United States Patent Application Publication US 2018/0305689 A1 - sequence listing, part 89

SEQ ID NO: 1244946 - DNA, 4001 bp, Homo sapiens
tgcagatcccctgcagatagaagacacagtaagaagaggtggttggcaccagcacattattctaaaaaaaaaaaaaaaaaataccactactcaaacataatacaaaatattggtgtatactctaacctggccttgctgaggtgaaaaaccaccgatgtttcaagcgggggcacagcagcataaagttctgggtgtttcccaattcattcaagtgtactgttccagtgtccctatcttgaagcagctgcatggcctctggcagggaaattctgctgtgcaggggcaccaccagtacctgatgaggagggccatccttgccacccagctgtctcttctctgccagaacctgaaaatagaaagatatccgagaacatctcagtgtctcagtacttcactccagcattgcatttccactcccacagatgctccccctacccaaaaccagcatctctctagtaaaagaccacaggtatgccagcggggtggcaggaattctgaccaaagcaaagaatgctagacctgcacgctcgacacgtgctctagggctatgctctgtccctggaccctcctcccggtctcattttccacttcgaggcattagccacctagaacaccagagaagccgcattctcccaaatcccgctcctctcaccgcctccttcttctgctttcggagctggctggcgcgatgcctctggtcgactctgctgagttcttttctcaccttcttgcttagggttttcagtgccagacggcctgaatggcagattagaaggggctggtgtgatcggccccacaaggtcaagaaaagggactcctctccgcccaccttagaaagggcctttcgcgtggagcccagacgggagacagaagctcagtctgggcatgaggaaaaagagttaataacggccaaatagcccttattccttctacgttatctccttacccttgccgtcccgctgtgcagatccccgaccccgatgccgtccgcctttatgagctttattctgctgcttgagcgggccggggcggtgggccgccatgccgcagcgcgcgtgtacggagtcagcactgcttccgggccaggacaagcgcttccggtcccctccaagggggcgggccctccagggagcgggactccctgcgccctctcgcgaaggtcttttccagcagctcgtgagagcgccgtgttagcgggttcgccaagccgcgctgggaacttttcccacttcgcagtgtgtggttgggggcttgaaggcgccggatgtagactgtcgaggctcgggctgttggtctagcagggctgtttgtaccccttgcattgtcatttttttgcgctataaagctgcatcacgtagaagcatgttgactggaaggctccattcgtgccgaaaaggcctaagcccttcctgtcacctagattcgggcacgttgctcttccgtttgcaacggcatgttctttatcactctgagcaacctttcttctccctcgattccctagcgaggcttgggaatcgcgtggaagacacttctctcaccttgcccggttccgtaccagctcaagcccgtccctgttactccaacctgcgccccgcctcccacggagcggccgggaaggaccttgtgggacgtggcgacccggcaagggggactggccgcgaccctccggccgtcgggctcgggcggctgcgctcccactaatcttcccagaaacttgacaactgcacggcgacggccggacggggattcagaggggtcacggggccaggctgcaccggcttcgccgtgggcaggctcggaccgcaggggaccccatgcccgagccccggccctttccgtcccgtcgggagagggagcaggcagaagtcaggggagcttcagcgggaccgaggctcgctctcagccgcggggccgcgggctccagggccagcgctcacaatgcggcttcgcgccctccatgcgggagcgggtgcgttgccatgacagcgacccccgtggcgcgcgcccgggtctgccgcccctaggcgcgcacggcctctccccgccccgatcccccgtcgctgtgcgcaacccccctccggctgtgggaaggggccgggcctgccgcctgacgtctgtgcggggctcggaagatggctgcggagccgagcaccgggcagtggctgcggcggcggcggcggcggcgggccgggagcgcggcgggcgggggctccgccttgcgcgtggggcgctgagccgagaggcgcggaggcggcgagggcgcgggggctctgaggaccgctcggcgccgcctcctgccacaccatgggcagcgcagaggacgcagtcaaagagaaactgctgtggaacgtgaagaaggaggtaaagtcgagtcaagaaccccggggggctcgcgccctggcccgcgcggcccagggggcagaaaggtccgcgcccaccccccggcgcgggcacccgggccgaacctgggccgggcggggcgggtcctggacgggctgcgcctccttcccctttctcggatgggggagggcagcgcccctctgcccgggggacccggccggcgctcccggcttgtttgcttcgcagccccgcagctccccgcccagtgacggcagcggcgctgggagcccaaggccgggggaggggtggcggcgatggcggggatggctggatccggagctgcccattcagtgcccgcgccgccaggggagggggcggggccccgcgcgagctcccgcggcgcaggtgggtgtcgtgcgggccgagcttccccacgtcctaagtgggtgtcgtgcgggctgagctcccccttgtccgacgtccgctgtgcctccagctacggagtgatcgctgccggaggggtgcgccgcacacctcagtttctccctccacgcccacctccttagccagggaccaggggcttgtttggaatggtttttaacactcggaagtttttcccttttgagggaagcccccctacttcagaaagagaagtagtccttccctctactaactccgtttaccttgaccctgcccaaaagcccatttccatttcgggtggggggcagtgaccatgtgaatgactcactcccatatgagagctggagagctccaacccacagcgcagcttagaatacattgggcctccttcccctgcctgcctctgtggctgttgtctgcctggtaagtaaactccaccagggcaggagaccctctgttttgtccactgccttgtatccagtgcctggcatactgtaggcactccgtgactgtttggtaaataaatgtgctgattttggagacttcgaggcctggtgtttggaaagcatacattttggaatagtctggacctaattctgtgtgaccttgagtctctatgccgtctccctaatatatatatatataacctcacgcctgtaatcccagcacgttgggaggcctaggtgggtggatcacctgagctcaggagttcgagatcagcctggccaatatagtgaaaccccgtctctactaaaaataccaaaataagccaggggtggtggtgcgtgcctgtaatcccagctacccgggagactgaggcaggagaatcgctggaacctgggaggtggagattgcagtgagccgatattgtgccactgcactccagcctgggcgacagagtgagactccgtctcaaaaaaaaaaaagtttaccttagctgagccgtaattagagtttcagggttggggaagcgtctggactctcataacatcctggaaagtggacaggcgcggtggcttacgcctgtaatcccagcactttgggaggctgaggcgggtagatcacgaggtcaggagttccagaccagcctggccaagatggtgaaaccccatctctactgaaaaaaacaaaaaatacaaaaattagccaggcacagtggtgggcacctgtaatcccagctactcgggaggctgtggcaggagaatcgcttgaacccaggaggtgtggttgcagtgagccaa

SEQ ID NO: 1244947 - DNA, 4001 bp, Homo sapiens
tacaagctgaagagaatggttttgaggaagaaatgcaaagaaatagatgtgaagggaggatggtgagccagaggattactgccaaatgggtgggcaaggtatatgctggtttagatcatgtggggtgttgcaagccaaggcaaggagtttgtattttatcataaatgcagtgggtagccattcagagctttctgacaaggagatgacataatccaatttactctttttttttttggtcgctttggtttctgcatggagaatagattgcaagaggccaggaggccaggaaagactactggagcatagttggtggcaatgatggtttgcactagggtgacagcaagggagatagacaaaaggggaaagatttgagaaatattttgcatttgttggcaacaggacttgttgctggactgtaagtgtattggaaggcaatggtaaggtaccacaagttttaagaatgactatgaggtttttaggctgaaaaactgatggtagtaaagagatggcgaaagcgtatgttgaggaggcattaaagatcgtttagttttgggcatgttaaatctgagaggtaggtatggtcctaaagtgcaaatggcatgtcagtagcacactacagaatggaaatacaaatttggacgttgttggcatcgagtaggtatttagctcaatggaagagatgagataacttgggaaaagaggaggaaaaaaaaatagaaaaggatgtggagaaaaggaagaattcaggaggagaaccgaaccgcataaccaacactaagttgccattttcaggccgctatatacgtgcgaaattatgtcatttcagataggctggttaattgataaaaccactacaaaacgttcccgatatttcgtttgcataaagcgtgatgcctagggcgccatctccatttgcacttgacactgcagaggttttactgcaggccttagagtcggaaaagcctggatggattccaatcccctctcggatgacccacctcattctcggcaattttacccgcggagcctccatccactcttcggcgaggcggagagagtaatgcgcagcaacgccaagaccccgctcacaaaggctaccgcgctcggccgggcgcagggcccggagccgcctcaccttggctcgcttcagcagctggatgatctctgcctcggcctcgtccgccccgtcctcggcagcggccccgtcggctccctgctgctcctcctcctctgccgcagcgggcctcgagaaccaggcgagcgctgcgggaaggggctctgaggtcatcgggcccggcccgcgcccctgtccccgcccggccggccccgcccggcccgcgcccctcacctgccagcagcggcagcaggcctgggccccggccgtgcggcgcgactcgggatggcggcacctgcacctcgggccccggacctcctgccagccccgggagcaggcgcgcggagcagccccggcaccgccgccccgcggcccgcaggaagcctcggcccaggctccagctcaggagccggaacatgctcccgccgcgtcctctgcgcactgcaggccagacgcgctcctggcccccgaccacgcgccgagcgccctccggattggccgggccctgacgactgagcaggacatccctgcgtccgcacgcgcgatgacgcgccccgacgtcactccgtctcgccctgccccggcggggggtcaggatcctccacaggtaggcgcagtcagctggagcgtcgcggcggtccgccggtcgtggagggcgtgtcctgcggcgcgatggccgtagtgttgccggcggttgtggaggagctcctgagcgagatggcggcggcggtgcaggagagcgcgcgaagtacgggaccgaggtcgtgtgtggctgcgccatgggcgcgggcggggcatccgggcaccgccgggccgggaggcaggaggcggggtgtccgggcctggccctgccttttttccatgtggttctctaaacctcttgttcgtaaaaagacaaaaaaacaaaacaacaaaaaagcgaaattggaacaagtaaaagtcaaatcgattcagcaaatatttacggtacagcgcagttgcaggagcccctccgtcggagcgagtaggccagtggggaccgaagtgctgagagctggccgggtcgctgggaggggtccccgcccgggggtggaagggacgggagcctacagtgagtgatagaaacgtggagttcttgattattttacacgaaattttgaattattaaacttctttttctcaaattctgatgttaacattaaagttaatgcttccatacactttaaaaagtaggcccagcgcagtggctcactcccgtaatcccagcactttgggaggccgaggcagttggattacctaaggtcaggagttcgagaccagcctggccaacatggtgaaacttcgtctctactaaaaatacaaaaaattagctgggcgtggtggcgggcgcctgtaattccagctactcaggaggctgaggcaggagaatcgcttgaacccgggaggcggaggttgccgtgagccgagatcgcgccattgcactccagcctgggcaacaagagcgaaattccatctcaaaaaaaaaaaaaaaagcattttaagagccacaaaacctaaatgcatatgcaatcgttggagtaaatctgggtattgtgaaagcaccattttttttctgaccagcagagggtactctttggctatgctcaccaaaatcacttgagaagggttgatctcaagatgtgttcagagtatgctaggataagatcaaatcaaatttgatatactcaaaatgcattgactaatgaactactcttaggatgtaaaaatggccaccttataaataacagccatatcaggcccccaaactgccatcgcttattcaacttggatggcttttgttttaaaagtactgtactgcattttgaaagggtttatcttgagttactgtttttaaggaactgagaaaaataagccaactttgtttcctcatctcagtcaaaattaaggagacttaagtatatgtgcttgaaagattagtgcagccaagtattcaaacatacttgtttccaaaaaggatgggaaaaaagccaactgatgttagcttatacaattgttctgggctctcagatttgatggcctgagggtttggaatgctgtcactttaaacaataatcgccagaactgttctgtgtctgaataggttaatccatacactgacagtagtttgggttggtttgttttttttttttagacagagtcttgctctgtctcccaggctggagtgcaatgggcgatctcagctcagtgcaacctccgcttcccaagttcaagtgattctcctgcctcagcctcccaagtagctgtgactacaggcgcatgccaccacacccggctaatttgtgtatttttagaagagacggggtttcaccatattggccaggctggtctcaaactcctgaccttgtgatacggacacctcagcctcccaaaatgctgggattacaggcgtgagccaccgtgcccagccagttttgggttttttccctccaacaagaaggttcacaagacacattgacagtcctgaagggggcataatcattgcccctgacacccatggttcagacacaggaaccaatgctgttgattcatgtttattttcagaagccctgttttctgtctttttcaaaatcttttttctattaatatatagttatgcacccttcctaacccccattcttcagtggtaatttttttagatcaagattccaagttttatttgtatgatgatatataaactagtcacagtggaaccatgtaggaagctatgattactttttgttttctttgtaacttttggatttccctggagttacaactatcttggttttgtttatgtgcttatttagttttttacatatttattcctactttaacctcacatcctttactagtgttctcaatctcccct

SEQ ID NO: 1244948 - DNA, 4001 bp, Homo sapiens
gtattgagctgtgattgtgccaccacattccagcttgggagacagaacgagatcctgtctctgaaaaaacaaacaaacaaaaaaaaaacaacagtttccttatgcagatgtcagatgtgtagttttgtggttagcacctcagcattggagtctgagcccggctttgaatccttcctctgccacttgctagtttagcgaccttgggcatgttgctcaacttctgtatatttcctaatctataaaattgagtatgcactgggtggggtggttcacgcctgtaatcccagcactttgggaggctgaggtggggggggatcacctgaggtggggagttcgagatcaacctgaccaacatggagaaaccccgtctctactaaaaatacaaaattagccgagcatggtggtgcatgcctgggatcccagctactcgggaggctgaggcaggagaatcgcttgaacctgggaggtggaggttggggtgagccgagattgcgccactgcactccagcctgggcaagaagagcaaaactccatcttaacaacaacaaaaatccagtctgcttagcagtgtgcctgaggctgaggcaggagaatcacttgaatccaggaggtggaggttgcagtgagccaagatcgcaccattgcactccagcctggagacagagcaagactacgtctccaaaacaacaacaacaacaacaacaacaacaacaaaaaccatcacccaatccccttagggtgggatgatgcaatttatactagggttactataataatgttgctggttggtgcagcagctcacctcagtaatcccagcactttggggggccgaggcaggtgtatcacttgaggtcaggagttcgacaccagcctggccaacatggtgaaaccctgtctctactaagaatacaaaaattagccaggcgtggtgggacatgcctgtaatcccaactactccctaggctgaggcaggaaaatcgcttgaacctggggaggcggaagttgcagtgagctgagatcttgccactgcactccagcctgggcaacatagcaaaactttgtctcaaaattgataataataatcatatgttgcttactggccaccttttataagcaacggtgtgctggggacattgaggcttctgcatgcaacctcccatccaatctgccagcaaatgatgggaaggtaaggctgctctgtggaaggaggccggttaatcatgaaacatttaagtaaaagtggaggaaaaggtcactgttaacgcagagaatggagattgcaagtgggaactggtagaaaatggccaaccacagggcttatctgtgacagcagtgtgtccatcaaaaatcagtgaataatagaaacaacagggtcctccaggcatcatcaagacctcagtgttatctgcaatcaaaaggtgagggcagggggcaggcgcagtggctcacgcctgtaatcccagcactttgggaggccgaagcgggtggatcacgaggtcaggagttcgagaccagcctggccaacacagtgaaacccccatctctactaaaaagacaaaataattagccgggcatggtggcacgcgcctgtagtcccagctacttgggaggtggaggcaggagaatcacttgaacccgggaggcggaggttgcggcgagccgagatcgtgccattgcactccagcctaggcaacaagagcgaaactccgtcacaaaaaaaaaaaaaaaaaaaaaaaaaaaaagtgacgggtgatggggtgatggataggttgagagctcgactcacgttgctgaagctctgcgcggctttagaaaattccccgcacaggtagagccgctcgccttcggccatataagagggaaaggtgcttcgcaaggtctcgccttcggggtccgacatggtgaccggatttagagacgctaaagcagagacaatcaaagaaaagctggagaacctctatctggtttgtggaagctccgtttcttagcaaccatgagatgtacagcgacttccggttccgcccccgtctggcaagggcccggattctgggtacaacctgccggcgtgcgcttgcgccagttctgccgcgcactgggccagggagtgatgattgcgtggctgacggctgggctggttagtgtttgctgttgcacgctctggcggttctctctggagttgctgcctgaaaaggctcccttgtaagacagccaagaaaacaggaagagggttggaggcaaagttccgaatagggatgaggcatacgtggtaaggatatgtgcacggcgtaccgccattagggggagagagcactgggcttggagtcagcagacttgggctgacttcgctcctgtcacttcctaactgcgtgacctctcgcggggcatgtaagggctcccagcctcgaatgttccacctgccaaataaatatgaaaataatggaacactcagggatgcgaggatttgcataagaaaacatggaaaataacgttgggttcaacataatttaacgcagttatttgagcagctactagtagcgggccttgaccaaggcatattctgacgtccttccccattccctcaccatcaccactcctccaaaagtggactaggtgcttcttctgggctccaacgataccctaagtagcttgcttaactgcctttactacgttacttccaaaacgtcctaatgtcattgttaaagtttaaatagtaaaaagatgtctttaactacaaatgcacacacacacacacacacacggcatacatgtaaaactggggatatttgagtaagatcagtggattgtatcagtgtcaattttctggttgtgttattgtactaaagtttttaaggatgttaccattgggagaaactgggaaaagggtacatgggatctcttttgtatttatttcttatgaactgcatatgaatctatgattatctcaaaaggtttaattcaaaatataagaaataatatggtccctgcttgaaggagttttatctaataggggagaaagatgtataaacaagtaacggccacttaagtgatattaactagtaattaaaagttctgtgtgcctgtgagggagatgaggacaaagtggtgtgaaacccaggcaaatgaatgattcagccagggtctgggatgggttagagacatgttcatagaggggtaatatttgagctgagggtgagtatggtggagcccagtagacgtaagtagagaatgagagctaggtgtggtggctcatgcctgtaatcccagtactttggagactgaggtgggaggatcgcttgagctcaggagttcgagaccagtctgggcaacatggcgaagccctgtctctaccacaaatacaaaagtgagctgggtgtggtggcgtgtgcctgtagtcccagctactcaggaagctgaggcaggaggatcacttgagcgtgggaggtcgaggctgcagtgagccatgtttgggccactgcattgtagcctgtgtaacaaagcaagaccctgtctcaaaaaaaaaaaaaaaaaaggaaataacatgtgcaaaggctggaggtgtgtacattcacagggtgtttaaggagcagcaacaggtttaaggacctgcagtgaaactggtcctgttctaagttaaggtgggctcattgatgagttgaggactgttgctggagcaaccaggattaatcagaaaaaaacctcctgcaaggaagagatctacagattcagtgcagttccaatcagaactccagcagcttttttttttttttttttatggtggagtctcactctgtcactcaggctggagtgcagtgatgtgatctcggctcactgcaatctccgcctcccggtttcaagctagtctcctgccttagcctcctgagtagctgggattacaggtgcacaccaccatgcccagctaattttttgtatttttagtagagatgaggtttcaccatgttggccaggctggtcttgaactcctgacctcaggtgatctgccc

SEQ ID NO: 1244949 - DNA, 4001 bp, Homo sapiens
aacacgggcatcctataaatgatagaaaacaataatttggtggttgactaagagaaccctgggagaacatatttcaagttgtagccaagttttttcatctctgaccttcatcacctggactttttttctagtctataggaatatatagagcactgaaagtttcgcctattgtgtctgtctgtgaagtccctctctttcaccagataataggttttccttcacgtacctccttttcatcttttggtcctcatttccctactggaagcatccctctgaaggcctccagtggttcttggaaaatgtcaaattggatgggggaagaaaagatgtggaggtaagacctctggatcttgctttcagctttgcccctccaactcagtatgtcataaaaatccaagcaattatttcctctcccactccctatcttctctataattacaggaccactaggaggataaaagcttcacatctagaaaagtgctttgagctttgattcagacaggataaaataagatgttttttgtggtcttttgacttttcgttttagtcacactttgaatttcagcccggggcctgaaagggtcctaagcaaaatgtgaactaacaagggagggatggggcacccaattgctcaagggctttgccaataagaagtgttgagaatgacaagtcacctgtagtgggaacaataagaatcttgctgacttagatgccatcttttattcttctagaaactgagaaattctgcaagattggaagatgcaatattcagatcaggctcatgcctagtcattttctccacaatattcagggcattgctaacaaagacagatggatctggatccaaatcccagctctactagtttctagaatgtgtgaccatgggtgagtaacttagcctctctgtacctcagcttctgtataagtaaaatggggatgataataatattcattttatggagctgttttaaagattaaatgagttaatatttctaatacccttaaagcagtgcttggttcaaaataaaggctatattgtaaaatgaaaatataaaccaggcgtggtgactcatgcctgtaattccagcactttgggaagcccaagtgggaggatcacttgagctcaggagttcgagaccagcctgggcaaaaaagtgagcccccccacccccacctccatctcttaaaacaaacaaaaaagaaaatataataataagattggcataaatattaaatttttttggagtgcctcgcacatactggtgctttcaaaacgttagctcccttcccacttcatcccccaatgtgatatttttcctagagttcaaatcccaaaggagaactttctgcaaagccagaagagtattttttcaggaggggtgagaaataacaactggaaatgaaagaacaccaggctggaaggcggtaggggcatcagcagaggactatgccggccatgaaaaatgggaagtgtcttgctggaaggtttctccagacaaaggaagaacagtgatgaagaaaatgacccaatgatggggatgaaggggatgaagagagttgtgtgagtcccagggatcgctggtgtctaagcgacagctccttggtggactgtggtttaggaaatcgggggagggcgggaaatgaacgttaataagagggactgagaaggggggagtcccggagccgagggaccgtgagggtgagtgcctggcgccatggaacgccaccagggagggcagcgggctaccctggggacctgggtcccgtgtgggtttaaggagacgtgtctagccaggttttcaggggacaggcaccaggaggctgcggtctggagccagcaccgggctttggggcgctcttacccgcaattcctactcccccgtctcgccccgctgggctgctagtccagcttgcaaccacacctgccggccccctcctcgaaggatgaaggagtaacgctcccattggctgccagacagccccaaccccaacccgcgctcgccctaactttgggtccgcccggccctcatatttgcatacggggccttctaggccttcgattggcccctgcagtagctgccatgccccctccctcccgaatccaattaaccgcccaggcgctaggggaggggcgcgcccacggttgtcccgggagacgcggaggacgcgcgcaccgcgcacccgggcgccaggggctggaccgccgctcgctcccgcagccctacccttgcccagcgagccaagccgcagtcccagcccatccgcgccggtgccgtcgggcgccgtgcgcgggcgcggccagaacgtctggctccagaggtccagctgcgcggggctgcggtgagggaggggggcaccttgaatttaggccttcgggagagggcaaacctgaagcaggaggcactgtgggaaaacactggttggagacttaaatcagcatctcaggcatattagtgcctgtgtcaccttgggcaggccacgttacctctgtgaggcttagcttcttcaacaggaaaatgggtgttgcaaacctgtgatgaccgctcaggcgtattgaaccctgacctcacctccagagtgtgggggtcatggcctccagtgaactgatcagtaagagagggccgcctagaccgactgaagagtcagtgagacttaaggggttaggggtctgggcttctcagagcaaccatttggtctcaggtggagaatctgtagtagtgactggattcaaatcattgaagatggtcgggcgcggtggctcacgcctgtaatcccagcactttgggaggcctaggtgggtggatcgcttgagctcagaagttcaacaccagctggacaacatggcgaaacctcctctctactaaaaatacaaaaattaaccgagcgcggtgcgcgtacctgtggtcccagctatcgggaggctgaggcgggaggatcgcttgaacacaggaggcagaggttgcattaagctgagatcgcgccactgcactccagcctgggcaacagagggaaactctgtctcaaataaataaataaacattgttcatttgggcctgagttggtaacctaagttcctcccaacccagatccccttcacctgctgatgtgcacaggcagaacaccagaggcaagggtgtagcttagcctcaagccgaccctggaagcctactacgtggtgcttacagtcaccccggagtgaacagaaggcccaaagtggaaccagtggcccatctgctgctctttcagaaacctctctgccatccagtcagcactcttcccttttccccccgcaggtggccccgtgctgtggtgcccctccccgacaggccctaaggggccaagtgaccatcattaactggtcacccagcagatgcttccctaagaccaactgtcccagcctggtcccctcccccatcccactgttgtctttccccagcgtcctaccaatctgctctgcctagctcctgtttggtctccggtccctcaggagtgatattgtgatggaaatgagggagaggatacaggagagagcagcaaagatttacggctttcagagagtttccactaaaatccctgacaactggttatttatgagatgttgcaacgggagcttataggccagagcctggcactactgtcctttcagggctgatgtcaggagcaaacacagggtgaacacggtgaacagtggagctgccctcactgtagagcaaagcaagcttcaacccgagtgacagccaggaaagcagagaatatcagtgatttgtgcctggcaaaccctaaacagacaaatccacaaggtaaacactgagggacttactcggcctgggcatgaaaaactgaagcagaatgatggagggtcctaattgtcaaaaaatttggaccatgtcctagaagctgtcagaggcaagagtgtgtggaaaaatccaggtccaaccctgttgttttcactgctgttttgttcctaaggcacccacctgactaaatagataaatagtaaa

SEQ ID NO: 1244950 - DNA, 4001 bp, Homo sapiens
acagagagaggatggatgtcacaaatccaagaggcagtggtggggacagacatttgccacctcacatgcacacaaatgtgcacagacagccaaagtggaagtggcagtgtggaaggaggaggtgcaggggagtgaacagcagaaagaatgaaaaagacaagagacacggctcatccaggcagtttcaaaagctcactagatcccagcccaaggggtcaagaaggaggaagcagggtcagccagacaatgagcatttgataagggcctttggtgcatgcaaagcctcatgcaaggaggggacactagaaactgtcacctctgtcatgggaagcctcaggaccattcagggagtcaacacacatgtgaaacaaccaaggatgcatttatataaagacagataagcaaaggatactcaatatagaggccacctcctccacctgccattgtcagaaaacagtgttgcacataaatggattttccagatcgctttaagccaatttttttcaagtggagaaaatgtatttaatttgcctaattgggaaataaattttcctgaaatagattatacacctccctggcaacatataacataaccttttcttgatgactcaggctcatcacaatgaatatacttcattgtgtaatttcataatgcccagtggtaagtcaattcaatttaataccagccatgtgctgagcacactgaaagatgaagatggcttggtgtctgccccagaatcctgccaggttttcaggtttcctgtcttctccttcactgtgaccgcagcactactcctgagtttgtgcgccagtggggtattgacagggagggcagttgacctcaaacgccaactttgggacagatgagacagtcagtatgagaagaagattgtctcaaaagatggagaggaggaagaggaaaggagaaacaagatgggagggagaggaggaaagatgaactctgcccagcactatgggaagaaccccaaaggccagggcaccattgtaaccctcaaggagcaaagtacaactagggacaaaagacaaatgtgcactgggcaaagaatagttatgggcgatggctgatgttgaccatgagggttgtaaaaatacaaaaaattggccaagcatggtggtgggcgcctgtaatcccagctacttgagaggctgaggcaagagaatcgcttgaatccgggagtcgaaacttttgcagtgagccgggatcgcgccattgcactccagtctggggtgacaagagcaagattccgtctcaagaaaaaaaaaaaaaaagacagtgccctgtccatgaagtggatggcacgggcagcatggcttagtgggtaagggcaccaactcgggggtcaggcagccctggtttcaatcccagcttcctagctgtgcgacccaggtaagttacttaactttttcacacctcagtttcctaatatgcagaatagggatgatgataatgctgacttcatagtgttgttgtgaggaggattaagtgggttcaagtatgtaaattatcactaggaaaagaaatgtccaagctctccacccctggagatgagaaggtagagatggggaagttgggcagggagaccaatttggagtgctgcggtggaggcaaggagagagaatacacccattctgggaaatgctgagttgaagacgtccaggtggaactgaggagagatggacctggagcccaagggagacaggctgagcccagcaagggcaggcggaggccacgggggcacacggctgctccaggagagagtggatggagaagtacagtggggtgagagggagatgaacagaggaagaggacaggggaaatggaagaggcagaacaacacttgaagccttgcaacctcaccttagttctgctaccccgagacacccctccatcacagccgagggcccagggcctgctgttggggtgccaattctcattggaggaggaaaatgagaacctttccattctgtgcccttagactaaggaaaaatgacagtaaccacgcacactgtctgtgttgccatcacaagtcatttgaacctcacagagaccctgtgaggtggcagggcagggcagggagtctcatcacgttcatcctccagaccaagaagtgcaggctcagagagatgaagtaacttgtccaagcctagttggcaagtgtcggagccgggactacaaactagacctcccagagtgccacgctcagaacgcagcaatgcaagaggcccagctgatgcccacagcccaggtggggaggagaggaggaagtcgcagagcttcaggcagcacaggtggctgacatcttctggaaaagggggagactgcctcccaccagccttccacatcccctttaagcagccttaacttagcgattttctgtgtgctttttggaatgctgccactgagggggtcatgaactgtcacatgcctctctgatggtctgaagccaaactaattgcctgttcagaggtcctttgaagcctggtgcagcggaaagagaatgagctctggggtctaacagacctcgcttctccacccagtctagcagtcacagctgcgggacctggggcaactcacgcaacctctgagactcagtttcctcatctgtaagatggagatggcacctaactcacagttctccacctacagagggcagatagtaatgcctttgccatagtgttgctgtgaaaaattcaagaataggccgggcgcggtggctcacgcctgtaatcccagcactttgggaggctgaggtgggaagatcacgaggtgaagagatcatgaccatcctggccaatatgctgaaaccctgtctctactaaaaatacaaaacttagcggagtgtggtggcacatgcctatagtctcagctacttgggaggctgaggcaggagaattgctttaacccgggaggcagaggttgcagtgagccaagatcgcaccactgcactccagcctggcgacagagcaagactcagtctcaaaagaaaaaaaaaaaaaagaaaagaaaagaaaaattcagcaataaaaaatgcacagaaagcaccaagcacagaccccaacacacatgaagcctcagaaatacttgctccttttccctttcctccttcacctggtcaagttcacattcttcagtcccccgttttcttaaaactcaaatgagacccgattagacaataacaggaatggaaaagcctctcgtgaagatactctcatgaactgctctcaatttccccccttctgaggaatcttcaagccggctagccacatgtcagggcactgtgacacatcatttgagaatctctaatggagcaacgtccaggggaacatgggccaagcaatgactgcctggcaagtccttctcacgtggcagactagcgatcaataaatatctgttgatttggaaatatcagaagggccaactgtaataagggtatgttttggtgtgtgtatatattctgctggggaaacagctcatgtttatctctcctcctcccagcctcccagggtttacgatggggccttcttttaatgattaacagccaagagggcagagatgaaggaatttgttctgggttgcgaggcaaaggagtatattctcagaccatgtgacccaagatggaaacactgatggggactaacagggtttgggtagaatcccagaaagcagttctgaggttggtagggaaaggaaagaaaaatgaagcctcttccttacctcttactgccagagtgtgcatctcgactgaaatttgaactgtgcttattaatggaataattagtcaggtgcatgcagatatcatcctggggaaaaagacacacatctgtcgggtcagctcggaagggcaggccccctgcttcctctctgtgccctcccatggcccctggggcttgaagggatggaaagaaagggaagttttagggcttatttagtgtggcaaaatacaggaagtaagaaggggtgtcctgcagcctcgagccta

SEQ ID NO: 1244951 - DNA, 4001 bp, Homo sapiens
gccgatgggaagggacaccctctggaaccatttgatgcccagcacaaagtgagccggggccagaatcctgggaggaggggcagaggctggaggtaggttcatctggctcaactgccacctgcccatgggactgagggggctgtgggcaggcccaggatccaccagccacagctgttgggctgataggaactgtctctggggccatcagggtgagggagtccccttaccatccctacccccacctaggggtcttcttgacccaatgaaaagtttagatttcctccagtggagaggagaaaactatggctggagaccccgggtgtgggatgtggggcacagggtttgggatggggacacacacacacacacacacacacacacacacacggctgtttctgaaatcatatccgcctcttttcatgcattctctgggagaggaagattccctggagctatccccaggcagccacattctcagggaacacagactcccacaggctgggctctgggggaggggggtgggtccaccgactgccgtcttgctcctgagtgcccactgaaccccaggaaggggtcctgatgctcccctccctctggtagggcaggcaccatctgcctgggcctgatggcagccgggtcgtcaggggttattattagactccctgtcactggcgcttgggcacctcacactggatcaggattccctccaagaggccctgctttgccctgatctgtcccatatctggagaacttgacacagggagaggccgccgggggccaaagtcctgagatgggcgcctggctctgaataaatggacctcatcctggtccactggccccagaatctttgacccaacacaaggaactgatacaggtgggctcccggggccagagcaggcgtgaccagacctgagacgggctgggagattctgcagctttgtttgtctgggcagggaggtctggggagccctggccctgtttgtggggtgcagaatcctgccaagggtcagcagagtagggaaagggcggggaagccgggagtgactgccctaggccagaaattcagggcttaaaggtgtgaggtagagagaggggcgtgggggaacaggaatgggccagtctaggaccaggggacacagagaagctgactgtcaatgcaagggggtcctcaggacaacagtgtgagatgggctgacggaggccaccttccttccctggaacaagcgcaagcagctgtgggttctctgcgctagaggggaagtgacccacaccgcttccccaagccctgcagccttccagctgagactcccaccctgcaggccggggctggggaggaggggtgctgcgaagaccgactcgggagactctactcagtttctgccaaactttcctaggccactcagccccggaaagagagcgccccatcttggaatctcagacggtcgaaaacttcggggcacccctcagcatccccgcacctcgcgcgccaggattaccccgagacgaatgcccctgtccttacccctcccccgcgccgccctgcccgctcagcgttcagcccctcaccccgcaggcggtcttgcgcccttcctccccttccccacgctcgcttcactctgatctcttcagttttcccggcccccaggttcccagacaggaggggacgcgggccacgggcctgggagggtgggggaaaaggggagaggggagacgggaaagggctgcgcggggagagaaggggtctgagaggcacgtgggaaagtgcaggctctcgaggggagagggggtagtgcggggacttggggcgcgcgtggctgcggtctggggcggcgtaaacttacctcctggtaactctcgtcgccggggctgaaggtgctgttcacgggctgcaggcgcaggccgacgtgcgggacgctgtgcagccacacgacccaccagggagcgatgtagtccacgcgcgccgcctgcatggctcggcccgagtgctacccacaagctgaacgacagctgcgctcacctcccggccggggccccgtgcccgccccgcccccggccccgcctctccctgggcccgcgcccgccccgccccgccgcgatcccagtcccagttctgggcgcgcagcccgctgcagtcaacagcccctttctgggcggggatctgtcctggccggatgggaggagggaagtgaaaaaagctcccagaagtctctaaatcagtttcagtctcgaggtccccgggctgcttcttatttatgatcagatcaagggtataaggtgtcagtgggggcagccagcagtcataggccagagaggggcgactgcccgtcccaagggcttgtcacagggtaagtaaccgacagactgggaaaggaaggaggcaatcttcagccactcggtcactcattctaaattcactctcattttttgggcatctattgtgcaagccctgtggacttaaaaagagaaataagacgccgtccctgccctcgggagctcccggcgcatctgccccaacaactcgctgaagccgcctgcaggacgcctgagtgaggacaaggtgtctcactcagaaaatttgcttgattcttcctggcaagtgggacagggtgagcttcccggaggaggggaccttcgagctgtgtagcggggaaggtaggagagcgatgagagcgcccggaagggacaagcattcggggagactgaagcgcattcaacaacatatttattgagcacctactacgtccaggcactgttacatcggtgatgtaacaaaagccgacaaaaaccctcaccccgagcgcaggcaccgcagagggcgatgacgacccgagaagatgccgaacgcaggccaggagggggctctggggaaaagcaaaggcaggggaggttgcccatcggggagcctcgcgtccctgggccctccgtactctgcacatatgcagaggcccccacccgtcctgtaaccgcaaactgcttggcgtgacttggccagcggagggaggagcccaggctgcaggacaagcaggagtcaggggtaggtgcggtggagtgatggggtcgcggcagattgggcgtggaaaccgcgctgggcagccagcctgaggggtgcgtatccaccgcggcagggacgcgggtgagaaaggagccccgggaggacggggcggggctcctagggttctggctgaagggaccgggtggatgcggaccgactgaaaacgctcgcaaacacatatggctgctggggagtggggccccagtcacccggtgctcaaaggccctgtgtccattagaggaagtcctggcctcggggcctctcctcgtggccgtgatcccacggttctggggccctgcaggagcccaaagctgaggggcccggaaggctggaaacagccattcttctctcattggggtgtctttcaacaaattttcttgagcacgttctctgttctagaggatacagtaatggataaaacacacgttcccgcctgcatggcgtctacagcctagtaggcgaggtgaggtggacttgtatcctgcaaacagcgattgcaggccttgtgaaatgtcagagtccctgctgtagggagaggggatggaaggtgggcgtcagggttgtttcccaaaggacagtgacatgagctgaaggatgatcgggagtcaaagaggggggtgctgggggaggcctctgtgcagaaggaacaggaccctgtgagatcagggactaaggccagtggaaggggaagcaagcaagttccagaacaggacagggagccggagaactgcaggagccaggcgatcagcttggagactgcggcaggggagggaacttctttgggtgaaaacctccttttaaaaggtcttggtctctgactcagtccctgcagttgctggggaaagtggactcttctggtagctgcttttacagcccctgccctcagaggccccccaggtgggaagggcctgcctcctaggcagtgggtggtcaccgaggactgactttg

SEQ ID NO: 1244952 - DNA, 4001 bp, Homo sapiens
cccatgcaccttgtgcagccctcggcagtccaccatggcggtcagctggtgaaggctggactctgaggagttcagcaggagctggattgcaagcaggtcttcctgaagcgggaagagagcgagagaggccgaggggctgtggaggagagctggcggagaaaaccaccacagcagctgtgctcaggggcctctagagccaagggagggagccgagtcacgggggcgggagaacagagagccagcagcaagctgtgcacagcctggccctggggccggggcaggggaaagggctgtcagggttcatctggggctcccctcttcctgcacagctgccttacctctgcagtggagaagaggggcacggcaaactgcagcagccccgcgacctggatctgcatggtggtaagtgcgcgctggaaggtggtcagggtctgagccaggaaagacacagccccacagtgaggctccgtctcccaggagccccacagtgaggctccgtctcccaggagccccacagtggctgaggggcctatgctcctgcccctcccacccccccacctggctgcagctgcacaggcccctccacttgcaggaagtctccccctactcctctggcttcttgagagctgcacagtcttctccctgcttgcagctcagatgtggtctttggaccagcagccctggcctcacctgggagcttgtgagtagtacagaatctcggccccaccccagagctcctggacagcatctgcatgggaactagctcccgcattgagctgcatatgtgttaaccaccaatctagaacccacgaccaaaagcacgcccccctcacagaagcagctaaggagaggaccacagtgaggcaagcaaggccctgccacctccgccatcttggtcagtggtgaggcttagggtcaagggggagcggctgtgggcagggtgagggcaggcctcggggggccatacctgctggaaggggctgcttccactctggctgcaatacaggtagtagcgagtcacctctgcagggcaacggcataacgttaggcagctcacaaatgaccagatgagatctctatcatccttggtggccaagccagacctccctccccgtccctgagctcccaagggaggcactttctaggaaatggcctagagcatgagctggacttgaagttcagggttgaggaggggttggatggctacagggctgaaagaggtaagtaggggcacagagtccggccacctatgcatccacagcagcagcctgagagtgtgtagttacctgtgctgatctggccctccgtgacgttcaggatgaaggtgtcaggagccacacagaagtcactggtggcctgagtgagggagagagggacggggtggaggaaaatcaggtatcaggacagcggggccctgggaggagccgggagcccatcaccccagccccttgagctccctcccaggtggcaaaggacagtctggagccagcctcctgggttcaaacctggctctgccccttcctagctctgttgccttggacaagttacttattcttcctgtgccccggttgcctcatctgtgacatggagatgataatgctattcacccaatgcaagtaaagtgctcagaaaagtgactggggcagagcgcatgctgttactcttattcccgaatgcctcttctgggacagacctttgggggccagcatcctgggccccagggcagctgcaggctgtgtgtgtgggagttcgttacaccatggcctcatctgctgttttacattttgtcttgctatgatcaagtgctacagggacgggtgttcaatctatgaagcctcccccaaactctttctaaagaatgaggttggtgctgaagcatctgtgagccttgggtgcaggtgctcacctgccaagacatggggtgggaagggcatggagctgagaggcggctgccacttatgagctggaggacctggccccacagcacggcctggctaagtgattgctaaggcccatgcggcagggtgggagcagacgcaggccccaggagaggcggcagcaaggacatggcctccaagccaggcgcaccccagatctggcctggggtgctctagggactggataaactggggggcctccgccttccagagcagccagggagagctcaggtcctctggcctgttccttagggatgtccccctcctctggcacatgctccccgggcaggggacccctctgagtgccctgctctgccggtggccccgtcctccttcaggagccactgcctcaggggtccacaatagagcatcactcactaacttgctaagttgatagacatttatggagtacttactcagtgccgtgcagggttctagcacctagaggttagtgcatcacagcacttacggtctagaaaatgtgtgtatagcgagggtgcggaataacacacccctccagatacagagcttcccgagagccccacatgcacgcacgcgcacacacacacacacgcatgcacgcacgcacgcacgcacttaagaccctgggagaaatgctttatacacaaaccaccagcattcataatacatcaacctggcctattattacctatcagagctgcggcgccagcaggcctggtggtgtgcccccaccccctggctggagtgacagagagtgcagccaggcccaagtggaggatggggaagccttggggaaataaagagcgaggccaccatctcagtttgggtcacccccaagaagtttgggaaccaagaaaggagagggacaggaggctccagtccaaggctccacagtgacatggtcttcctcctgcctctctcctccttcccctcccaggccaggcctgctcttcacaccccttggccaccctggagcctccatctcctgggataggtgcataggatggtttggggtgtgggactcagtgaggagtcaactctcctattaatgaagacaagcacctgtgtgcgtgtgcatgtatgtgtgtgatgcccttgtgtgtgtgcatgtcgaaatggtccacccagatctcatcttgaattcccacatgttatgggagggacctggtgggaggtaactgagtcacgggggcaagtctttctcacgctgttcttttgataatgaataagtctcacaagacctgatttttttttttttttttttttgagacagagtctcactctgtcgcccaggctggagtgcagtggcgtgatcttggctcactgcaacgtccacctcccgggttcaagcaatcctcctgcctcagtctcccgagtagctgagattataggaatgcaccactatgcctggctaattttgtatttttactagagatggggttctggcatgttggtcaggctggttttgaactcctgacctcaggtgatccccctgcctcagcctcccaaagtgctgggattacaggtgtgagccaccacacctggcagatctgatggttttaaaaacaggagtttccctgcatacgtcctctctctttgcctgctgccatccatgtaagacgtgacttgctcctccttgccttccaccatgattgtggggcttcctcagccatgtggaactgtgagtccaatcaaacctctttcttttgtaaattgcccagtcttgggtatgtctttatcagcagtgtgaaaatggactaatacacgtgtgcattactcatgccatggtgatagggatggcaggagaggggacaggaaggaggtcactgagcatagttggggcaggtgggagaggctgcccagtaaccagcccaggtgatggctgagcctgcaggcagctcctgagaatggaggtgtgggtctgaagggacccccgtgaccctagcatgatgacgatgaatgcacaggaagccagtggtggccactgtttattggacattttctgtgtgcctcccaggatgaacccactcatctttccctagcaacagccctttgaggtaagtcctgttattctctgtgttc

SEQ ID NO: 1244953 - DNA, 4001 bp, Homo sapiens
aacttcaaaaccaatctgattgccacactgaccaagttgcactgttacaattgacatgctgagccacaaactaggtgtattacctctaaaaacaacctgtaatcgaaaaaaatacgctttgagaaccactacattactaataagaacaaataaaatgccatgtatgttaattatacatcaataaaaagtcttttttcccccctgagacggagtcttgttctgtcacccaggctagagtgcagtggcatgttctcggcttaatgcaacctccgcctcccaggttcaagcgattctcctgcctcagcctcccgagtagctgggattacaggcacgtgccaccacgcctggctaatttttgtattcttagtagagatggggtttcaccatgttggccaggttggtcttgaactcttgacctcgtgatccacctccacctacctcagcctcccaaagtgctgggattacaggcttgagccaccacgcccggcccaaaaagtcattttaaaatgccacatacgtatataatattggagatagaacagctgtgttgtctaaggagctagtcattcaaggaagttctcatactctctacatggttttgggatttgtgatttactgtacctgaatccattcatacacagctcaatagtttccaaaatctgatttgtaatcacttttttcctaaacatatgtttaaaacaaaacattctcctcagttgaggagtgataaaagaaaaaaagaggctgggtgcgtggctcacacctgtaatcccagcattttgggaggctgagttgggagaatcacgtgagcctggctgttccagacctggtcaacatggcaaaaccctgtttgtacaaaaaatacaaccattagcttggcgtggtggtgtgcgcctgcagtcccagctactcgggaggctgaggtgggaggatcccctgagcctgggaggtccaggctgcagtgagccaagatcttgccaccgcactccagcctgggtgacaaagtgacatcctcctgtctccagaaaaaaaaaaaattaaaattaaaaaaataaaaacaagacaaaacaaatgctgattgaagaaattagtagtaccacccttcacaccacatgaacatgtagaacacagaagtgtgctcaacattgtacattcaattaacattaattttctctcttctaaataatagcttacgctttctccactagtctagcctggtaactttagtaagacctgtaagaaagattttgtgtttagctcaggtaggacagcaagaaagatgcagcttggagaaagaaaaccagatgaaatattaaccgggcgcaatggctcatgcctgtaatcccagtactttgggaggccgaggcgggaggatcacctgagcccagggattccagaccagcctgggcaacacagcgagaccctgtctccatttgaaaaagaaagaaagcaaaagaaacattagagcagttcctcattatttttacctaggaaaagacaagttttgataaagacttcacatcaggtctatgcagcactggaaatgagccgtgggttgtgagacagactctgtgcttaaaatgtcaaaccggcaaagtaggtttattattatcctcattttacagataaggaaactgaggctctgaaaggttattgacttttccaaggccacagaactagtaaagagcaaagccaaaaggtcccccgttccccacgggccccaggagttctccacacgtaacccgactcaccgccagacgccgaccagcgcttctgtccggttcaaacttcggaccaacctactcaccatgcgcatgctcactttcaaaacgaaaaacttactgagaacaaatgcgcatgttccataaacggagagttttgttgtgtatatattttttcctattcagaaagattaattacgcatgttcaatttcaatttacgaacttcagatatggtacgcatgctcactgtccaccgaacgctccagctgacaatgcgcatgctctagtcctccaagcgcgacttcggctggtgttttgcgcatgtttctgccagcgcctggatcctgccgatagttctgcgcatgtccactgcccactgtttggcttcacggaaccctgtacgcatgctcctacgctgaactttaggagccagtctaaggcctaggcgcagacgcactgagcctaagcagccggtgatggcggcagcggctgtggtggctgcggcgggtccgggcccatgaggcgacgaaggaggcgggacggcttttacccagccccggacttccgagacagggaagctgaggacatggcaggagtgtttgacatagacctggaccagccagaggacgcgggctctgaggatgagctggaggagggggtgaggcccggggtccccgggggcccgaggtgacagggccggggcggcggcgcgggctcaggaagcgcggtgtgtcctagagcgtggagacccaggggggctcctgaggagctgagggtcgcgcggcctgagacaggggagcgggcggggcggtcatggccctaggtgtgaggcctctgcggggctcgcaggtgcaggtcgcacccttagccccaggtcagcgcagccccgagcgatctgaagagggaaagagaacgggcgcgtggtcgattcctcgagctgttggacttgagtgtggcggggagcgggtggcgtgagcgtgtgttggggagacgggggctgctcttgctgggtgtcccgtaagtgcaggcgaagtgtggagggtttcccttcgagtctagaatttcaagtattgaatcttcagacctcccacaaccacctctcttctcggcctgtcgcttctctcctaggaagcgctcagctgttagaagtgacagctgaaaacttctgtcgggagtagcactgccgctgctgttacagccaccaggagttttatttcgggagcaagggggctctgctgcatcttccaatcttccagggtttgtttgtttgcttttttttttttacccccttccgtgtgactttttaaaataagcatttataaggacacacggcacttgtaacctttccccaagttgaagatgtctgtatttttttcagaataattaatgtaattttgaggtggaaaaaaaaaccaaaaaccagttgacagccttgatttagcttgccagaaataagttgcctgaacagagacttgtgaatggtggtatgagggctttccttgctgtaatttagggtgctaaatttagaattgtatttcctaatgcatagcttggtttcaccctgctggcttagtggtttgttaatctttatggaataactttttttttccctagataaatttatcaaaaaatgacaaattgcacctgaagttcaaaaatgttgtcatactaaatcactgatcctggaccaaatgatcatcagttgataacctcttggtagtttagcatctaaattccaatgtctagttgaatacatgggttaatgacgtcagatgtttgctctaattacacaggggcttcctttcccttgcctcaccctcagtttttctcctctggcacctgccctactgttgacaaaagattgagatgatgtatataaagaattttgaacactttaagaaactaagtggcctaaaataatactgttcttcttgtttgtttcttttgttttgttttgagttgggtctcactctatcacccagactggagtgcaatggtgcgatctcagctcactgcaatctcagcctcctgggtttaagcgattgtcatggctcagcctcccaagtagctaggattacaggcatgcgccaccacatctggctaatttttgtatttttagtagagacagggtttcaccatattggccaggctgttctcggactcctgacctcaaatgatccaccagcctcggcctcccaaaatgctgggattataggcataaaccaccatacctgaccaatactgttcttttcataatcaaataagactaaatcaaaatc

SEQ ID NO: 1244954 - DNA, 4001 bp, Homo sapiens
ttaatcaaatatattagtatttctgtaataaaaggcatcactaatgacagtaagttggatagaaactatagggccgggcatggcggttcacgcctgcaatcccagcactttgggaggccgaggcaggtggatcacgaggtcaggagatcaagaccaccctggctaacacagtaaaaccccgtctctactaaaaatacaaaaattagccaggcgtgatggcaagcacctgtaatcccagctactcgggaggctgaggcaggagaatcgcttgaacccgggcagcagaggttgcagtgagctgagagcgtgccactgcactccagcctgggcgacagagtgagactccgtctcaaaaaaaataaataaataaaaattaaaaaaaagaaactataaaacagcctgtcttcattgaaatttgtttttgctgataaactagttatgaaatgtcctttggtttcatggctttctggatcctggaaaggcagataagggactgtggacctgtagtacttacttctagggttgttgggagatttagaaaaattaatatatgtaaagcacttagaatgacctggcacactgcattagctagtgtaggcgcttgacaatattacatagtccactccctgcagccaggtctctccctccagcattcatacatccctgatccggttttccctctcttcgggacgtcatagagcctgtccctacccagcgagttgtgggccctgccagggaataggaaacgacctgggagaatccgctggcccagttgttgccagctcctcctccatgttccgacaggtagatgttctctgggttgtagagcttggcatagggggagttgaggatggagtggatcacccggggttccaagtccagcagcacggcccgggggatgtagtgctcatcgtctgcctgtcaaggggagtccaggagggggcccaatcagctagggcggcccaagtccgaagtcctcccaactctggctccctccggccctccctcctcaagccagccgcctggccctactgcccagcggggttcccagtaccaggccactcccttcccttccgcccccttgggcaactgccgcccccggccaagtcgctgggggcacctggtagaaaaagacgtccttgcggtcagtgccctcggtggcgaactcctccacgatgccctcggggctgataccatgctcggcgcacagctgtttccagaactcgaacccaactggggggaaggggcgggcaggggagaaagaagatatctaggtccgggcaggttccaatcaggagccgggggactgggcgcctgcgtccagggataagaagtcaagccgcaggactctcccgtgtctgaggaaaggactgtacgccagggactgggcaggggagggcccctcggggttgggcaagtggacactgggtcagggatgtctcgcctttcagagaactacgattctggcaaggacagatggagtccaggatcccacagcgagatcccattgaccctaaggaacctggctagctgaggggccggagtttcgctcactctgattgccgcactggcccaactgtagggtgatgatttccctcggcatcgctcctcaggcaccggcgttgcagccgctcccgcccgcaacggcgccgcacgccagcccgctcgccgcaagacgcaggcgccaaacaaccagctccacccacgaacttcctccgctccaatgagaatcgagttctggcaatgaatggcacgtctttaagcactggccttcgttcatgcagattgcgcgtgcgcggctccggatgcggctcggcgcctccggatccggctccgcgcctcagtgagggcggggtacggcgtcctccctcccctctgggtgggcgcctgcttgggcctgcgcgcaagcgcgctgtggtgcgaagccacctcccccgccgaatcgcgcatctgcgcagttgctgttattgtgacttgtcgggccacggccccggatgttgtggctgccgcggggagatggctgaggccgaaggggttcccacgaccccaggcccggcttcggggtcgactttcaggggccgccgagatgtgtcaggctcctgggagcgggaccagcaggttgaggcggcgcagcgggccctggtggaggtgctggggccttacgagcctctgctgagtcgggtgcaggcagccctggtgtgggagcggccagctaggagcgctctgtggtgcctggggctgaacgcggctttctggtgagagaactggaccctcggaaaccctccgagtcccgaattcgttggttcctctagggctctacttctcgcctgccctgttttcttcgctgcactggctccttcctgtacttgcctaattttgcctcacctccttccactccatcccgcctgcaggcttcggcaccctagttcttcccagggccgtccacccatcttctctgccttacctgtgcccgcacccccgccccgcacatctggcgggagcttctggtaacatcttgagccgctcaagagtgagcgagggctcctcttttgagcccgacaaagctgcgtccctttaaagccatcacttcctttctcttgtctgctcaagtgcaagttctagattgtttccagaggttttagtagtttattgttggagtagaggcgtgaagtcttgcaaaggtatccataggtgtgattataaaacaagcttgagcgattcgcatgaattagcatgttatatatctaggaaggaagtttatgaagtctaagcgtcagtgtgagcccccaaagctgaaaattgaaagaaaattacaagcttttaaagaacagttaggaaatgatgacggagattacacgcgtgtcaaagccacctgtgattgtaactcctccctgttccaaggaattagagaggcatccttagccatggtttataggcaaggaaattgatgtctaatactgtgtgtgagttttcctgagctggaaaagtagcactgtaaatatgctttatttgtgtgtgtcatgctctgtgaaaatggaactgctgcttctctcagttgtcatcacctgaagtggacctaggacttcataggatctaccaaccataattttggatttatttgtaatggaggaggttccaagggaactgacttatagggggctttctgctgctgaatggattaagactattctggataagcctgaaacaacaaaatatgtgtgttttttaattgtgtttttgctaaaaatagctttccccttaaaatttgttttaaaatcaaaacatttattatcctttatctgaaagattttcagtgagctgaagcagaacaaataattccaagttcattgacccgaaaacagtgttcagctattaagctaatcctctcccagtttgaaagagacccagttaaaggtgtcacagtagtctctggcatttgtggcttccagagcctttagcaaactcgatggtaaacttttcctaccacgttcttcatttatttttggtagtgctttttcccttttttttttttttaagacagagtttcactcttattgcccaggctggagtgcaatggcgtgatctcggctcactgcaacctccgcctcccagattcaagcatttctcctgcctcagccccccaagtagctgggattacaggcatgaaccaccacaaccggctaattttgtatttttttagtagagatggggtttctccatgttggtcaggctggtctcgaactcccgaggtcaggtgatctgcctgcctcggcctcccaaagtgctgggattacaggcgtgagccactgcgcctggcctttttttttttttttttttttttgagacaaggtcttgctctatcacccaggctggagtgcagtggtatgatctcggctcattgcaacttccacttcctgggctcaagcaatcttcccacctcagcctccacaatagctgggaccagaggtgcacatcatcatgcttggctaattttttaaatt

SEQ ID NO: 1244955 - DNA, 4001 bp, Homo sapiens
taacaaaagactgtctttcacctttatcactctggagctgttctggagctgtttcagaaaccaaggacaaaaggtcaaatattttaacaaaacatactattattgctctagtcccttaggaaattacatgggttataagagctgtaagccaggaacatatcgcacccagcatggggagagatggagaggcagtctccaaggatctgggggagagacttcggcttggttcattctccattcccaaaacgccaatgtctcaaagcttcctcttatgcatccaggctgaggctccttgggaaggtttggagctggagaagcagctgaatgactcatgcctaaggggccggtgccattcagatttatgacttccttgagaacaaagattatatcttattcacctcaatatcccacatctgatgctccataaacgggttttgaattgaattgctcccctcatattacctatccaggccacctcctgacctgtccccagcactcttcggcctccctgcccattccttcccccactccataacttcacctccaaactgtcacttccatctgcttctcggtctatgatgtcaaagatgtcttcatgaattttctcaccctgtatagagatatggaaagggagggtcaggccaaaggttccagagagcatcttttctcagcacagcaccaagaattctgtctaccctggaatattgttgccaccctgaagcagagcctaggctgtagccctcaacccagaagtgctactattgcaaatgatttgcacaaaatttgcataaacctctccctggctgtccctcttgttcgggacatccttttgtctcttattttctgtcagtcaggtcaaattcctagtagcttgagcctgccttgcctctggatgggaatatcaaaggtctctggaatggtcgctaggacacctgggagaatccgctggcccagttgttgccagctcctcctccatgttccgacaggtagatgttctctgggttgtagagcttggcatagggggagttgaggatggagtggatcacccggggttccaagtccagcagcacggcccgggggatgtagtgctcatcgtctgcctgtcaaggggagtccaggagggggcccaatcagctagggcggcccaagtccgaagtcctcccaactctggctccctccggccctccctcctcaagccagccgcctggccctactgcccagcggggttcccagtaccaggccactcccttcccttccgcccccttgggccactgccgcccccggccaagtcgctgggggcacctggtagaaaaagacgtccttgcggtcagtgccctcggtggcgaattcctccacgatgccctcggggctgataccatgctcggcgcacagctgtttccagaactcgaacccaactgggggaggggggagatgcccgggtctgctggagccttaaggcctgaggagcccagttttagtctcagaggctgacacgatcagagggtggacccaagatgcctgggtttggtagctgccccagccccgggctggaggcgcagctctcggtctgggttatccagagcagcagggcagggggttcatggaagggaaagggggactggtggaagccaggcacttgggtgggacccgaaggggcagaaccagagaccggcggggccggcgctcgcttgctcactctggttgccgcactggcccagctgcagggtgatgatctcccggggcatcgctcttcagacgtgggcgcgccagccccggcctggcgagagtcacggctgagacgaatgcccggcagccaggagcgcaggacgtggggagcgcgcgctctcttcgcctcttgacgcggatgctcggtctgcgcgtgtgcagcgcaggcctctcctcggccggtgggccggggagcccaacctgggcatcattttctccctcagcagtcgcagctggaattccgcacaggcgcagagtcaggccacgcccgctcctgcccaccgctccgcgcctgcgcagtgagactcgttgggggtggcagggtcggaacctggatgtgttggggaggagaggaacgggggaggggaggaaaggggagaagcggccaggtggatgtgcttgtccacgtgtaaggagtcatctacctatattggtaggtgaggacactgtcagctttgctagatcaaagggctagaagccaacttttcttcgtttaaatttctgttttttaatggtgttacaatacatacacatgtatgttacctttttattttttagaagggtctcgctctgtcgcccaggctggagtgcagtggcgcgatcatagctcactgtagccttgaacttctggcttaagtgatcctcccacttcagtctcccgagtagctgggactacaggcgtgtgctaccacgcccagctaatttttaaatttttaaaatgtatttttatagagatggggatctcaccgtgttgcccaagatggtcttaaactactggcctcaatcaatcctcctgccttggcctcccaaaatgctgggattacaggcatgagccaccactcctggcctaaatttaccattgtaaccatttgtaagtactgcatacagttctgtggcaccaagtacactcacattgttctgtaaccaccaccaccattcttttctagaactttcttatcttcccaaactgaaactctatcgcgattaaacagtaacttccccttgactactctaggcacctgatatgagtggaattatacagtatttgtctttttgggtctggcttctttcacttaacataatatcttcaagatccttccatttcgtagcatgtgtcagaatttccttcctttttacaactgaataatattccattgtatagatgtaccacattttgcataaccattcatccctccatggacatttgggttgcttccaccttttggctattgtgaatgttgctgctttgaatgtgagtgtacaaatatctgttcgagtccctgctttcaattattttggatatacacccagaggtagaattgctggatcatatggtaattgtgtttaatgttctgaggaatcgccatacgattttccatggtagctgcaccattttaaattcccaccagcaatgcacaagggttcagttaaataaattttataggaggccattgatttgcactgagctcctgtgcttggctcaacagaccaaaccaaaatggagtcactcacgctaaagttctatgtcactaagcaacactaagttgtttatcaaaccttcagaggaatcaggagagggaaggaagagccaaaaccccaaacaagccagtgtgagccggcatgatacggaagtccttttacaagaaaagtaactttgaaaggacccatctgctttttttccttctgtttctatttttctctacccttttttgtccataaaaactaacctgtgcttgactcatctgaacactcattctatttattttatggaatgaaacgtagcctgatctagaatcacaaacactgtaaatgccacttaagatttttttttttttttgagactaagtctcactctgttgcccaggttggagtgcagtggcatgatctcggctcactacaacctctgcctctctcaggttcaagcgattctcctggctcagcctccctagtagctgagattacaggtgtgcaccaccacacccggctaatttttttgtattttcagtagagacaggggttttgtcatgttgcccggactggtctcgaacccctgagctcaggtaatccacctgcctcagcctcccaaagtgctgggttacaggcatgagccaccatgctcagccaagtagccaagttacaatctttttttttttttttttttagatggagtttcgctctcgttgcccaggctggagtgcaatggctcgatctcaactcaccgcaagctccacctcccgggttcaagcgattctcctgcctcagcctcccaagtagct

SEQ ID NO: 1244956 - DNA, 4001 bp, Homo sapiens
cggtccccaggtacagcaggcatcacagagagctgcccggaaggcccctgcccggccctgcttccacagcccatgccaagtccctcagactcaggaaggctgccagtgccccctgatgtcctgaaaggtagtactggctttggtgggatggggaaggcttccctgctgggagactgggcctccctgaggtagacagagtggtttgaagaaataggagctttctcagaggacagctcctgggggttcggtgatggtgactctgcagggagtcactcttgggaacccccctccacacctagtcctctggccctgaccagcctgggccagcagttttctaccccctgcccctgacctcactctgaaatcattgctgagccctgcttctccctctccccaccctttcataactctcgcttcttcctggacttcaaaagtcacttgccaatatctgctgacattttctatggaatcctttataagtagctctacccaaagggcttgggttggagacaatctaagacaattcattcaaaatcccatggaagtacagacccggccccatgccccttcctgggcatggcaggccatgccctctgactctcacatttttcacttgtgacccagacctcccctgccctgaagacgaggctgaagtcagcgtagctgtggagctgcagagggctccggagggaactccacgcctcgggaggagcagtctgccagctctccccgctttgtgcgcccctcgggggagcctggccccggagccctcagggtacggcagggaagccgctgcgactcttggaaaccggagccggcagaggctgggagcatgtccaggtggcctgggaggacacatgggcgctgggacccccgtccggtgcaacctctgctgagacagccccacttggcgatgaccctttgggaccgcccgtccctcctaaaacagcaagacccccagcctggctatctttctgccccgcgggatgtatcgccaggcagctccctgagggcccctccccagcagacacaggtgcaaagtcgagctctgatgcccagaagcagagatgagagaacagagcaggagctcttccagccccggggcccctctctaagaggaaggaggaggccagtgaggaaaggagtcttccccaagccccccactcccagctctctcttctccacaccctgggcagtgtttggtgcctgcctgggggaaacacctgccgacccctgggcccagcccctgcccctggaacaaagaccagcacttaccatgatggaaatgatgagggggatgaggttgaggggccagacggggcagaagcaggcgacgacggccaggatgaggtaatctctgggggcttcttggtcttgggcataggaggtggtggcgatggaggacgccctccttgagctggcccgggagggggaccgaggcagtggggcctccaggtgcccctcggagatggccttgaagggtaggccctggctgttctgctccagatccagaggccccgagagggtcttggacagattcagggtcttgtcatccttgttctctgccttggtgaggagtatctccatctccggcaggtccaggaatgcggcggagcctggctcctgtgctgaaggaaactcggactgcaccgggtgggccatgggggcctgggccttgcgcggctgcagctccaggctgggacaaggggctctggagggacctcagcgcgccattccccagcccagactgagggcctccaggtcgggggcaggggcgtccctcaggagacggagggccggctgggtgctggaagggttgggctgagcttctcaagccagctgagttcagaggctggggcctgcctgctgcccccgcggagctcccagaaagacgctggagcctgcagctttgttcaagtttgaggccaactttgctggtgctgctgagagcacagatgggcagggaagcaacggaaagctcagagagcagagagaagaatgcgcctcttcccagggaggctcaggctcagtcagggaggctgtgtgtgtgtgtgtgtgtgtgtgtgtgtgtgtgtgcgtgtgcgcacacggcctccctccctctccccctccttggtgatgcttttccttttcaattcccctctccccagagaaccaccctggcaggattttgcctctgccccagcccagcccagcccagcccagctctgcccagcccagcccagcccagcccagagggacttgggccagcctccggtttctgttgcagctccagggcctgctcctctgggcagggtctctggatggggagaaagacactttgggccccacagggatgtgtcttcagctgtcctgggaactgagccctccgctgcttcttccaaagcaagcgtgtacttctttctttctgttgggaaatgctggaccttagggccccctattacatcccacccagaccctgacccccaaccgctgggagcatccaggccaaagcctggctcccgactccagaagggaaggggagatgtgagcaccagggtagcccctggatcctgcctggaccctgcatggaccagcagggccccatgagtaggtttctacgtagctcaccaccaggtggggaagaggataagggggagtgttgggtccacctcatgcccatcagaacgattctggggtgctaaagagccggtggcagagagcccctaggtcagctgctccgggcagatgccagctcggaagggcctcaggctgtttgtcctatcggattctcctcctttgttctctcttaggttttctccctctgtctctgccttcttctctatcctcggcatctctttctatattcctgacgcccctccttacattgttttacaagtgtgatctggagccgccacggatgtgtgtgtgtggtttgaaagtggttgtatgaaatagtttaaaatcctacgatcaggcgggatgccatggctcatgcccataaacccagcacttcgggaggccgaggcagaaggactgctttagcccaggagtttgacaccagcctgggcaacatggcaaaatcccatctctacaaaaaatacaaaaaatatatgggcgtggtggtacatgcctgtaatcccagctacttgggaggctgagggaggagaatcgcttgagcctgggaggtccaggctgcagtgagccgagatcctgccgcacagctcagtgggagatatggggctgaaaggacacctggaaatgaataagatttgaaaactcagccgggcacggtgactcatgcctgtaatcccagcactttgggaggctgaggcaggtggatcacttgaggtcagcagttcgagaccagcctggccatcatggcaaaaccctgtctctactaaaaatacaaaaattagcgtggtggtgggtgcctgtaaccacagctactttggagactgaggcaggagaatcacttgaacctgggaagaagcgaacgttgcagtgagccaaggttgcaccactgcactccagcctgggtgacagaatgagactccaactaaaaacaaacaaacaaacaaacaaataaaaaacaatgtttgtggctttgggagaactttgcaggtttcataaatttgactatattaaattaagaattttgctcaggctgggcatggtggctcacgcctgtaatcccagcactttgggaggccaaggtgggcagatcacgaggtcaggagattgagaccatcctgaccaatgtggtgaaaccccgtctctactagaaatacaaaaattagctgggtgtggtggcacatgcctgtaatcccagctactcaggaggctgaggcaggagaattgcttgaacccgggaggcagaggttgcagtgagtggagatcatgccactacactccagcctgggtgacagagtgagactcctctcaaaaaaataaaagagagagagagagagaattgtgctcaataaaggaaacccattgttatttgcaaaatgaagaccttg

SEQ ID NO: 1244957 - DNA, 4001 bp, Homo sapiens
gccgggcgtggtggcaggcgcctgtaatcccagctactctggagggtgaggcagaagaatcgcttgaagccgggaggcagaggttgcagtgagccgagatcacaccattgtactccagcctgggcaacaagagtgaaactccgtctcataaatgaatgaatgaatcaatcaatcaatcaataaataaataaatagtgggaacagtcaacattgttgtgtttctccagcctcatccggcctgggcgcaggttcaaatgtcagaagcatgtgaacctgaacaactccatcttcaataggagctgggtaaaatgaggctgaaacctactgggctgcattcccagacagggcattctaaatcacaggatgagatgtgaggtcggcacaaaatacaggtcataaagaccttgctgaaaaaacaggttgcaataaaggagccagccaaaacccaccaagaccaagatggccacgagagtgaccactggtcgtcctcactactagactcccatcagcgccatgccagtttacaaatgccatggcaacatcaggaagttactctctatgatctaaaaggggaggaatgaataatccaccccttgttaaccataccactaagaaatacccataaaaatgggccaccagcagccctccaggttgctctatggagtagccactcctttactttcttaataaacttgctttcactttgcactgtggactcaccctgaattccttcttgcctgatccaagactttttttgttttgtttgagacggagtctccctctgtagccaggctggatggagtgcagtggcccgcggctcactgcaacctcagcctccccagttcaagcgattctcctgcctcagcctcccgagtagctgggactacaggcgtgcaccatcacgcccaactaatttttgtatttttagtagagacagggtttcaccaagttggccaggatggtctcgatctcttgacctcatgatccacccacctcgtcctcccaaagtgctgggattacaggcctgagtcaccacgcccggccaaggaccctcttttcgggtctggatcgggacacctttcctgtaatacagctgaatttaaccattattagattttctccactcaaggcatctcctcataagcagtctttcctgaccataaatcttagttgtcctatcctcagacacttgttatttcatcaccctgcctttgcaattatctgaaaatatctttggttatacaatttatcgtgtctccccacccaacccccatctcctagaacccacttccctaacccaaaaatacggggcaagaaacctgtctgtactggtcacaaccctatccctgggcctacaaccgtgtctgagtcatagtaatccctcaacaaattttgtgtgaaccgaaagaaaaaaacacttaagacaatctaagtgaccataaacagtagttttttctaaaaatattattaatcttacgagtctctggttgccaacatgtggactacaattaactctaagagcacaaaggagagaatcaccaacaacattagtttggaaacagcaatttgaaagcgaggctctggcggtgtcgccgattcctacaaaatagcatcgcacccctgggtgtcaggaagctaagaggcccgcaggccgctcctcctcaactccaccccggcaataagggttgaggaaagagagacccccactcgcgctggttaacaatgggcgtccccacagccgcaagaagtacttgctctgcgccgcacgggtcacgccgcccccagcggcctcagaacccccagcagccctcctcagacaactacccacagccctccactcccggccgccccgctcctcctcgagttcgagtagcgggcgcgggggacgcgggctccagtcccacggaacctgcagagccagtcccaggagccgccaccctcccagcgagccctcagcccctcacctgctgcaacatggcggccctacgccagccctacttccgggagccacgtcagcgcagcagcgtacgggtccgggtcggaactgaggcgacccgtcaccaagggccagcagggaccactgtaagagcctcagtccggcctcacttccgctttgagggagcaaatccaggggcggggcgagcgggggcggggcgagcggcccggacacggcggaggcggagcctggagcaggagcgaaagggaaaggtattggggccacagtgggctctaagtggaaagcttcatggtctgttttacggaagtatttgctgtccacccaatgcaaattctaaagtcgttcccccagtgtcgctgccccgaatgcaggggggcggggttttattgtataatataattttctttaaatattttacaaagacttactcctgtacagtattacttttgtactttaaattgtagaagcaactttttaaaatatgttcttgcagagaagtaaaacgttaagaaaaacaaggcaggaggactctagagtaactaatggacggtattattatgggaggtataaacttagacgccaggagttgagaccttgcgccctggagcttaggcgcctgggaactctattgccaatcatatcaccaacctttatgtacttctttcatcagttgtaaagtgggggtgataatggtttccttacagtgtaagtatctagtaaatgggagacgttatacttactacagttttaagtccagccgctcatgctgtgatcttgcctgaacaaaggatgtgaaattaaggggcgttaagtcatctttgaagcggtgatgatgacaatatcctatctgtctggccgagtcagactgctgttggcatagtggtatttgcacgtgtccttaattgaagggattctattaaaatcacaaattttacgtggctgattgccagtgccatttaaaacctgatattctaataatgaaagggggaaaacacacacacgcgtttctaaaggcaagacatttcggcagcacaattgcattcgtgcccttggagatgaaaagctaacaaatttggggcctgtacgtccagcctgcccatggcaggttttcagtggtccactcagtgctgtggagttttgtgttgtttttcgtagtttttggttttttaagacattgtgtttgaattcattatcgtcttttaatttttaatagctaatttttaaagctaattttgtatttttagtagaaacgaggtttcaccacgatggtcaggctggtatcaaactcctgatctcaggtgagccacccgcctcagtctcccaaagtgctgggactacaggcgtgagccaccgcacctggtcaaggcttgaactttctaatgggccatagctcttgtagtgggctgcactcttctaaattacctggtccctgcaccatagtccaaaggtttaagcagaaacctcaatgcacttgatgttactggccctctttgtacagaggataaatatgctaattctcttccttaggagttagccctgagaaggaaaagctcaatgttgtcaaatgcaacaggtccaccccactgagggcttccccttttaaattcttaatgggttttatcaggcttctgtgcaaaaataccagaaaacaccaatgcatgaccctgatataatcccataacttcatttgccagaagaactaatagcactaaattggtagtgatgaatggtatctaatttccagtgatcatctccccatcccccatcaacgaaactgggctttcctaatgctcactaaattgttttcagtgggactacagatgctaatctcgcccaacctccttctgttttcttattttgatgatatcaaatatttggctcagaggaagataactgggagttcccacattaattaccaggaagaaacagtcaaaaaaaaaaaaaaaaaggccaaatagcaacatccgcttggctttctgtttattgtaaaacattgtaatttcccaaggctggtttagataaatacattttgtccaagttcagg

SEQ ID NO: 1244958 - DNA, 4001 bp, Homo sapiens
ataaataaataaataaataaataaataaataaatagtgggaacagtcaacatggttgtgtttctccagcctcatccggcctgggcgcaggttcaaatgtcagaagcatgtgaacctgaacaactccatcttcaataggagctgggtaaaatgaggctgaaacctactgggctgcattcccagacagggcattctaaatcacaggatgagatgtgaggtcggcacaaaatacaggtcataaagaccttgctgaaaaaacaggttgcaataaaggagccaaccaaaacccaccaagaccaagatggccacgagagtgaccactggtcgtcctcactactagactcccaacagcgccatgccagtttacaaatgccatggcaacatcaggaagttactctctatgatctaaaaggggaggaatgaataatccaccccttattaaccatatcactaagaaatacccataaaaatgggccaccagcagccctccaggctgctctatggagtagccattcctttactttcttaataaacttgctttcactttgcactgtggactcaccctgaattccttcttgcctgatccaagactttttttgttttgtttgagacggagtctccctctgtagccaggctggatggagtgcagtggcccgcggctcactgcaacctcggcctccccagttcaagcgattctcctgcctcagcctcccgagtagctgggactacaggcgtgcatcatcacgcccaactaatttttgtatttttagtagagacagggtttcaccaagttggccaggatggtctcgatctcttgacctcatgatccacccacctcgtcctcccaaagtgctgggattacaggcctgagtcaccacgcccggccaaggaccctcttttcgggtctggatcgggacacctttcctgtaatacagctgaatttaaccattattagattttctccactcaaggcatctcctcataagcagtctttcctgaccataaatcttagttgtcctatcctcggacacttgttatttcatcaccctgcctttgcaattatctgaaaatatctttggttatacaatttatcgtgtctccccacccaacccccatctcctagaacccacttccctaacccgaaaatacggggcaagaaacctgtctgtactggtcacaaccctatccctgggcctacaaccgtgtctgagtcatagtaatccctcaacaaattttgtgtgaaccgaaagaaaaaaacacttaagacaatctaagtgaccataaacagtagttttttctaaaaatattattaatcttacgagtctctggttgccaacatgtggactacaattaactctaagagcacaaaggagagaatcaccaacaacattagtttggaaacagcaatttgaaagcgaggctctggcggtgtcgccgattcctacaagatagcatcgcacccctgggtgtcaggaagctaagaggcccgcaggccgctcctcctcaactccaccccggcaataagggttgaggaaagagagacccccactcgcgctggttaacaatgggcgtccccacagccgcaagaagtacttgctctgcgccgcacgggtcacgcctcccccagcggcctcagaacccccagcagccctcctcagacaactacccacagccctccactcccggccgccccgctcctcctcgagttcgagtagcgggcgcgggggacgcgggctccagtcccacggaacctgcagagccagtcccaggagccgccaccctcccagcgcgccctcagcccctcacctgctgcaacatggcggccctacgccagccctgcttccaggagccacgtcagcgcagcagcgtacgggtccgggtcggaactgacgcgacccgtcaccaagggccagcagggaccactgtaagagcctcagtccggcctcacctccgctttgagggagcaaatccaggggcggggcgagcgggggcggggcgagcgggggcggggcgagcgggggcggggcgagcgggggcggggcgagcgggggcggggcgagcgggggcggggcgagcgggggcggggcgagcagcccggacacggcggaggcggagcctggagcaggagcgaaagggaaaggcattggggccacagtgggctccaagtggaaagcttcatggtctgttttacggaagtatttgctgtccacccaatgcaaattctaaagtcgttcccccagcgtcgctgccccgaatgcaggggggcggggttttattgtataatataattttctttaaatattttacaaagacttactcctgtacagtattacttttgtactttaaattgtagaagcaactttttaaaatatgttcttgcagagaagtaaaacgttaagaaaaacaaggcaggaggactctagagtaactaatggacggtattattatgggaggtataaacttagactccaggagttgagaccttgcgccctggagcttaggcgcctgggaactctattgccaatcatatcaccaacctttatgtacttctttcgtcagttgtaaagtgggggtgataatggtttccttacagtgtaagtatctagtaaatgggagacgttatacttattacagttttaagtccagccgctcatgctgtgatcttgcctgaacaaaggatgtgaaattaaggggcgttaagtcatctttgaagcggtgatgatgacaatatcctatctgtctggccgagtcagactgctgttggcatagtggtatttgcacgtttccttaattgaagggattctattaaaatcacaaattttatgtggctgtttgccagtgccatttaaaacctaatattctaataatgaaaggggaaaaacacacacacgcgtttctcaaaggcgagacatttcggcagcacaattgcattcgtgcccttggagatgaaaagctaacaaatttggggcctgtacgtccagcctgcccatggcaggttttcagtggtccactcagtgctgtggagttttgtgttgtttttcgtagtttttggttttttaaggcattgtgtttgaattcattatcgtcttttaatttttaatagctaatttttaaagctaattttgtatttttagtagaaacgaggtttcaccacgatggtcaggctggtatcaaactcctgatgtcaggtgagccacctgcctcagtctcccaaagtgctgggactacaggcgtgagccaccgcacctggtcaaggcttgaactttctaatgggccatagctcttgtagtgggctgcactcttctaaattacctggtccctgcaccatagtccaaaggtttaagcagaaacctcaatgcacttgatgttactggccctctttgtacagaggataaatatgctaattctcttccttaggagttagccctgagaaggaaaagctcaatgttgtcagatgcagcaggtcaaccccactgagggcttccccttttaaattcttcatgggtttcatcaggcttctgtgcaaaaataccagaaaactccaatgcatgaccctgatataatcccataacttcatttgccagaagaactaatagcactaaattggtagtgatgaatggtatctaatttccagtgatcatctccccatcccccatcaacgaaactgggctttcctaatgctcactaaattgttttcagtgggactacagatgctaatctcgcccaacctccttctgttttcttattttgatgatatcaaatatttggctcaggggaagataattgggagttcccacattaattaccaggaagaaacagtcaaaaaaaaaaaaaaaggccaaatagcaacatccgcttggctttctgtttattgtaaaacactgtaatttcccaaggctggtttagataaatacattttgtccaagttcaggggccgctgttttcccttgcttcgtgaaattatcaataggcaggcctttgatcttcctgatccatgcagct

SEQ ID NO: 1244959 - DNA, 4001 bp, Homo sapiens; identical to SEQ ID NO: 1244958

SEQ ID NO: 1244960 - DNA, 4001 bp, Homo sapiens
taggagtggaatgagttctgccttgaatgacactcatctttgaacacagaaattacgcaattcagaaactatcatctagttataacaagttttatgaaagaatcaatatatttgctgtaagatgaatcactaacatacttggctcaagagacttaaaccccaaataccaggaagctccacagactaaaacaggagacagcaagcccagtgccctcttcttcccctcaactctttaatttaggatcccaggggcatgactgaactagaagagatgcccttactttttaaccagaattatgaattaaacagaaaacaactgttgatgcaaatgttttaaggaattatgagtcaacctactttctggttttttaagagtgacttaacatgaaaaagacctaatagctagatatttacattatcagtttattgggattggccataggaatggactttcagcagcactctgaacaacaatggaattgagatgaaatgtcaagatcttttcaaatctggatccacagcaagttaaaagagttctgacagtgaattacaggcccagcatatttaaagatacttactgttccatacttaagtagtgtaggcactgctgttactttcaagttttttctgaagtcattatttggatctttccaactattcgaaaagaaaaagtgatcatgaaaaaaatttacttggtttattacagtttgcttaatatttgacatagtcctacatttaattttttagtaatcactgttcttgcaaacacttaaaaaaccttgcggactatggcttaatctactaattaccctgtgcaaagtttcaaagtgtgactaagatataaaagtaaagccagctaagttctgggcttacaccagaccaaattcgttgaattacccttacttaattcaggtgggcattttaaatttgtatttaatagcttctaattgtttaacttgtcagacattaccttgtaagacaaactgggtaagtaagtccctgaggcccttcccgcctaagtatgcaatttgtgcacgtctgcgaggtagattatacattgccacttactaaggcttttctcctacttggcagtagatgaacacacatccttcactaatgtgcttcagcccctctcgtacgactggttcagctttaaaaaaagttgagataaaataatcgcacgtcaactctacaatcaggcacgtataaactgtgttctttcccccttcccccagtcttggtaagcactcagactttaacctgcagctaactgaagaggtcaacacaagtcaggtgttcccttctggtcttagagccacgttaagggtaaggaccaaatcccagtcccgatttgcccctgcaccaccgcgcccgtaacaatggaaagcacatgtatttgctgaccaactcacgtatcctgtaagacactaatggtactgggggagtgagaagttttaaggaactagattccaagatcatccgggtaaggtggtaaaaggaagagcgctcttggcagggcggggtaggatttaatagaaggagacttggggacagctcagattgctccgcggatgtctggaaccaagactctgcctccgctaagccccccttctggccgtaggctcgaccttcctgccatttccattggacagcagcccccgaatcccggcctcaccctgcacgcagtcggggcaccagcttttccccccggcgtccttagaacccgtaaagtaggcgaaaatggtcttgccattgtgctgttccacggcccggtggaactcctcgaagccggacacgctcacctcctcatagcgggccattggcacgacgtgcagccgctactggaggagtgcacgtccggtcgccgcggttgggtcccgcgtaggcggggcgaggctgtttccgggtgggcaagagagggcggagcctgcggaagccagcgccgctaaagactacgggagcctctgacgaccacaatccatccgcatggctttttgctctagttcctcagatctttctgcgctagctgcactcccaagcccaggcttagatctaccctaatctagtcccagccccgacctcatggacactggctgcaaaacttaccgccttgcaacacctggatccttaaatagttcagggcctcaaaggctcccaagccgccctgcgcctgttgctatggcgactgggcaggcggccggaagcgcggccttgttgggggcccccgttgcccgcctcccagtagccgcgcctcaccctaggccaggtgggctcgggccggggctgggggggattctgggaagccgcatagagtcatggacttgggggagaggagatctgactcggaaagcctttgttgctttgtccccccagttaccttttctgccgtctaggctttacgggggcctgggactgggggcgggttcccgagactgggcgggggtgggatgggtgaggggctcggagggagaaaggctgcaaggccggagcggagtgtgtgagtgcgtgtgtggagcagcttagggagcgaggtgctaagacatcccccagggccgcggtagggaggaagggaactgccctggagctatgagccgggagactcgccgtggggccttgcccaggctgcgccggggagagcaggcggctaagatgccgggtcgctgcgtggggcccagcaggtcggggcggggggttcggcggccgtgggggaagagacggggcgcagggacgtcccgaggccgtggagcaaggcgccgggcgaagccctcggagtgggagacgcgctgtgtgagtgcagaaaggccacagggccgtcagcggccatgggggacgagacaagcggcggagacagccgacgccgccggggcgaatgaggctttgggagctcctgggaccccaggctccatcgaggctgcaagggaccctggggctgtgtgggtgaacggggctgtgggggagcccgaggtggtggggcttgccggggctgtgtgggtgaccgggtctggggaggaggagaccgaagatagaagtccccggggctgcgagagaaaaggtcgcccgggatctctgggccatgagagcattctgcacctgtggctgaaggtgcaggctatgagggccgcctcgggatgtggggaaggaagtagagtcgagctccatcccgtgcctgcaggagagggacctgtcgaaaggggtgttcctggccgagcttcctgggtagagacaagccgcggcggtcttacagggccctgggtgaaggaacaggcaagggggatccctcgggccccctcagggcccacagctctgggcttaggggcagcttacgagagagccttaggcttctgtggacagggacaggctgggagggtgcctcctgcgagtgtgcctggggctttggcgtcaagttctgaaatggccccgcacctgtggaggggagaagctgtgggggttcctgagactggggaggagataggctatgggtttgtctcaggcccttgtgaaaaagaacagactatgggcgagcctgggaccgtggggtggactggggctgtgggagcgcccagagccatggagggagagctcggctgtggcggtgctgcaggtctgtgggggagaggacagtccccgcagattcctggggctctgacacatgaagcagtctgtggggccacccctggcgtatgggggaggggacaggctgtgggggtgtccgatgctgtggaggaggagcctacttctgtgggtgccgcaggtgtgtgttacaggagacaggctgtggaggagacagactctgtgggtatgcccggcccgtggggcacaggatactctgttggggtgccctgtgctgctgaagaggaaactagatgtggaggtgacccagggttcagggaaaggggacagcctgtgtgggtggagacaggctctgggggtgatccagggtcacggggagctgcgcagactgcagagtcatcatgtcctggggagcaggcagcaggttctgg

SEQ ID NO: 1244961 - DNA, 4001 bp, Homo sapiens
ctggtggaaggaaatctcaaggatccggtgacaggagatggcaggaagcttcgagactcaagcataggcgggtgctggccatttctcctggtcaagtgcaggggacggtgtcccctggagatgaaaccctcttgggtttctaagagccctgtggccagcaccatgctcccatcatactcaaatgccattttggcttgatttatatacagcatcagccattctgagaaaaactagctaacaaggtcaagacagacccctctacttgtcctctgtgactagatgaaaacagagagccaaaggcaagggcaccaagtgttaaaaatcccaaaaatgcacctagagtccacaacagctctcctggggaacaatgttttaagatccctatcgctgagccctgcccctcctcccccagcagggctaataggtaactaggggggtagggtacaggagagatgtcctgggcctcaagaaagcagagtaccccatggccaggagggcaaaagcttgggcctgggctagaatgaaaaagaaagcaaatccagaccccggaccacttctctgtgtgctgggctggtggagctcaacacagagattaaagacacattcctggccttatcttgggtcaaaatctgtgtgtcctcctggcttgggggatgtatgtccttccaacttcccagtccccttgggcttcggaaggttgaacagatctttgtgggtagagcccggcttcctgagccagggtggattcatgcctttcctgttccctgtagcgctgggtgtgtgtgtgtgtggagggggaggggggaaaccactcaacagcacgagggggtccccataaacacaagcacccccatcgccctccctgggcccttcgcgcgggcttcccagtgccccagacgtccgggcatcaccctctccccctccccatcccctggctctggggtcccccagctcctgagcccctcgccaggcccccggccctctccccctccccccaactttggcgccgcttccccccagggaccagtgccgggcaccagtcccgaggccaagcagcagcagcccgggaggcgggcctcaaagttggaggcgccagcgccggcccgggagccgctctttcctggaagacattttggctctttgtttacattcgcggcgcggcgctccccggcaacatggctgtcaccgccgcgctgacagcggccccggcccgcgcccctgcccgccgccgcttaccatctggtggtggtggtggctgttgggaatgttggtttcttggaagaacgtgctcagcgcggtctgcggacaaacagggcagtgacacggcgggccaggcggagtcaggaaacgcagcggctgggccccccaccggctctccccgcctccgcgcccggcccgcggcccccgaccctcggctgccccacgtgcagaggggagccggtcccggccccggtcccgcgtaagacccgctcgcgggcgccgatcgccttccgggccgacaacaggagcgctccccgcccccgccgccgcccggcgtccccgacccccgcggcccggccccgcggcggccaggctcgcacctcgaactgccagtgggccgcctgcagcaactgcttcgcctggtcggccgcgcagcccgcggccagcacgaactggttgatcatgacctggtgccgcagctcgtccatgttcaccgacatggcgcggcgcggcgcggggcccggcgtctccggccggacgcagacgcggggctgcgcgggcgcgggaggccggccgcccggggctccggggctcgcgctcaccgctgctgccgccgctccgccgcccgctccgccgccgcccgcccggcgaatgttgtggttcgactcccgcggcccggccgacaccacaaacaacagcgcggggcggggctgggccggcccaacgttcggggactgccgctgattggccggggcgccgctccgccagcgcccggctcccgtaaggacgttcgattcgaatcctgcggcctgtggggccctcactgtttctcttttcgcccggccgcgcccattggcggagctcggcgccgtggggctccccagcattggccggccgctgtgttttggctcatccggcctcgtggttggtcacggccgggcgttcggggcggggccgcgcactctgattggcctccggtggtcctgtttgaactcaacttgaaaacccggagtgcctgctgattggccgagggccctctgtttgctgttgtaggcttgggggtggtgcggccaagttcattcattacttcattgaaacagaacatgctcagctggaaaagcaagacagagtggctttgactcatttcctctgaaagatgtggtcatctcgagaaacagaatgatcaaaatagaaaacagagcctttgcagctgctcaagtctcaaaagcatgtaatttttaaaaataactttcaagcagtccaatttaaaaaaatcttttattgaaatataacgtacattaggaaagtgcgatgtcgcaggtacagcttccagacttttcaccaagtgaacacccagatcaattaacagaacgttacttgcaccctaggaacccgcgtcctgccctcttctaatcactacccaccgcaaggatcgagcagtattttctcagtttttagaccaaagactttgctctctgaagatggaagccaagatttatgtacaataaatacgatatgcaaggaaatatgcaaggaaaaaagtgagactttctcagtggccaaaatgccaagtcaagaattttttcttgttaaatcggttgacctaactgaagctttaattttctttttttttttttctcttgcttgtcacgaaagctaagatgaagctttaatttctaccatcttttaaaaaaacaacgggtggcagtaggggtggagtctggggttgggatggcttacacctataatcccagcactttgggaggccgagacaggaggataacttgaggccgggagttcaacaccagcttgggcaacatagcacagactccatctctaccaaataaaaacaaacaataacaaacagtgagtgtttctacagagatactgtttctcagtggtagccctttaaagtccaaaatttggtggtggtggttgttagatagggctagagtgacatgatcatggctcactgtaacttcgagcgatcctcttgcctcagcctctcgagtagctgggactacaggcacacaccaccatgcctgactaatttttgaatttttggtagagatgagatctcactattgttgcccaggctggtcttgaactcctggactaaagtgatcctcctgcctcagcctcccaaagcacagggattacaggtgtgagccaccatgcctggccccaaatttgtttgtatgtgctgagcttccatcttctggattagagtttgatcttcagggctgtgtttgagaattgtgggggtaggaaaagaactaggagtttaagcagattggggaaggggcagaagagattgggaagataaatattgttagggattcactgttaagagtttctgtttcaggagaactttgtgagttttttatctgaactactaattacagagtgtattttaaccagctaaaggtctgcagaacagaaggaggcttataataagaaagcacgtcgtggttctatcttgactttgcctaaattggatttaactccctatctaagaaaacttgacagtatgtatttttaaagtttacaaacaagaagaagattacaattaatgttaatgtttctgtactgatgaaaaacaaattcaggtactatcatgagctcattccatttggttcgttttttgtttatttgtttgttttgaaggagtaggagtcagctttttcctgggaatggccctgaagtacacgtgggctgggacctggcgtgtggctggagactccagtatagcttgcagccttcccgtccagtaattgcaaggtgaaaacaaaagtgagcag

SEQ ID NO: 1244962 - DNA, 4001 bp, Homo sapiens
ttaagcgtacccacacatcactagagaatttcatgacaaaacaccaagtatgctaccatgcaacgaaacctttattaacattttgaacaggttcagctattactgaaacttgtaatttctaaacttaagttggggcaaatggctatagtgcagagtaatgccatcactgggcactgcgaatgccatgactgaagaattaacagccacccctcaggcgcaggaccaggtgcagggtcgactctttctggatgttgtagtcagaaagagtgcggccatcttccagctgcttgcctgcaaagatgagcctctgctggtcgggggggatgccttctttatcttggatcttggccttcacattttcgatggtgtcactgggctccacctccagagtgatggtcttgccggtcagggtcttcacgaagatctgcataccacctctcagacgcaggaccaggtgcagggtcgactccttctggatgttgtagtcagaaagagtgcggccatcttccagctgcttgcctgcaaagatgagcctctgctggtcgggagggatgccttctttatcctggatcttggccttcacattttcgatggtgtcactgggctccacttccagggtgatggtcttgccggtcagggtcttcacgaagatctgcataccacctctcagacgcaggaccaggtgcagggtcgactccttctggatgttgtagtcagaaagagtacggccatcttccagctgcttgcctgcaaagatgagcctctgctggtcggggggaatgccttccttatcctggatcttggccttcacattttcgatggtgtcactgggctccacctcaagggtgatggtcttgccggtaagggttttcacgaagatctgcattttgacctagtttaaaagtaaaacataagcgtgtcacctcaggatcattgtatttcttgcttttacacctaatattcttcaaaattagcaactattccttcaaaatgccttaaatacgttaatattccgcaagcctcccctcaattttacaaggctaagtcacttaatacgaaattcgtcattcaaggtttcaacgtcaacagcggaaaatccagagcgctctcttaccaagcgtccacagctttccccactaactgttccggatattcaaactcccccgaccgaactccaatctgcctcaaacctaagcacggtgttaggcaaactgaaaacaaaaccaaacccacaagactcgcgaaataaaaatcccattgaaacacaagaaggggcacctttctcacactgggattccaaagtaaaggcttccagaaaccacacaaactacctcttttccgccttccccgcgaagtaaactcgacagaatcgccgatcggttaggcgtccgttagtttccgtcaacgcgcgcgcgcgccaaccgccctcgcccccctcaggtcaacaaggcccactgtcccggaaaggcccagcgccgcgtcacctcgccctcccctcccccacgccctcccctcagcggcccacccaaccccaagaagcctccaccttgacctcacccattcccccctctcacacccccccaaggtcgttacggctgcgggccagtacctgttagcggataccaggatcctgccaatcaccaaccacgtccacccacagggacacaaacaagctcacccaacaaagccaaccgcccctaaatgctccgggctggcggagcgcaaatttatgcaacgagtgttgcgtcacttatcacccctcacgtagacgccgtctccgtgcgccgctgaaagtagttcgccgcgcccaacctcccgagaggcagtttaggcttttcaactgagccccaaattcctcatagccgtaagaaaggctcctaaaaaattatttcccttctcctctatgcgcttctcttccttctttaggaaaatataagaaaattatcaggcggatgaatttgagttgaagaaaccttcctcgaaagctctggaaacttccttgcagcgccggcactgattggttaggcctgcgaaggcgaggtcggcgctgattggtgggggacgcggtggctctgttgttgctgggctccacctggggtggcttagcgccgaggttgctaagtaactgagcgcgcgtgcgccgcacaggcgcgccgtcctgaaagagggtatttccggcgggagaaggagggggggtctttccttttttttcttgagacggagtttcgctcttgtttcccaggctggagtgcaatggcgcgatctcggctcatcgcaacctccgcctcccgggttcaagcgattctcctgcctcagcctcccaagtagctgggattacaggcatgcgccaccacgtccggctaattttttgtatttttagtagagacgggggtttcaccatgtttgtcaggctggtctcgaactcctgacctcaggtaatccacccgcctcggcctgccaaagtgggccgccgcgcctcagaagcgggacggcgtggcacccgatatcgagacacctgatggtgattgtgaagcacaattccctctcccatgttttaaaaacgcgcgcccctggccgggcgcggaggctcacgcctgtaatcccagcactttgggaggccgaggcgggtggatcatgaggtcaggggttcaagaccagcctggccaaggtggtgaaaccccgtctctactaaaaatacaaaaaaattagccgggcgtggtggcgggcgcctgtaatcccagctacttgggaggctgaggcagataattgcttgaacctaggaggcagagattgcagtgggccgagaatgtgccactgcattccagtctggcgacagagtgagactctgtctcaacaaacagacaaacaaaaaacacgagcccctcatacactggccagttgtttttgcttttttgtgacaaagtctggctgtgtccccaggctggtgtgcagtggtgtgatcaccgttcactgcagccttgacctccagggctcaagttatcctgccacctcagcctcccaagtggctgggaccgtggaccacgcctggctttttaattttgtatttattttttgagacggagtctcactctgtcacccaggctgaaggccagtggcgtgatgtggctcactgcaacctccacctccctggttcaagcgattctcctgcctcagcttcctgagtagctgggattacaggtgcgtgtcaccatgcctggctaatttttgtattttttagtacagatggggtttcaccacgttggtcaggctggtctcgaactcctgacctcaggtgatctgcctgcctcggcctcccaaagtgctgggattacagatgtgagccactgttcctggtctaatttttttttgttgttagatcagagtcttgctatgttacccaggctgttactgaactcttgggctcaggagatccgcctgcctcgggctcccaaagtgctaggattacaggcatgaaccaccgtgcctggcggactagccgctttttatttttcttcgtggttattgcagggttgtggagctttaaatcatgcttctgtagtcagagtgctcttagttgcattgtcttaatcctcatcacggcccgagaacagtctgtaaatcgggagttcagagtgggaccctctgcggggaccggaaacctgttgctgaagccgctcaccaccaggcccagagaggcgaggctggagcccatggtgacagtggccgggcttcgctctggctccagcaatacctgcaaatccagttcttcccagctgtttctccaaactggtaggaaaaaaaaaagtgcagattagggagccgaaaccccacttcaaaaacgggaattcacctacaagaaagtagctgatcctgctcccattgacgtgcttgttgtgcaagggtgaggttaaccagctaggaccaagcaacgggtttccctacaccctgggtgtggccactcgtcctgcaaggagataacccaaggaaggtgagtaaggcag

SEQ ID NO: 1244963 - DNA, 4001 bp, Homo sapiens
tagtcacccaattaattgcagaactgaaagcagttacgttaccactattcaagcagcctcaatcaaaactttgtttctccagcaatccttgattaggtctcaacaggcacatttgctttccttcaatgtaaagaaaatgcctgcaatcacttgagcccaggaatgatagtgagctgtcatcgtgccactgtataccagtctggactacagagcaagaccatcttttaaaaagcctgcatatccaactttttgagatgttgtcttgctctgtcgccaggctggggtgcagtggcacgatctcggctcactgcaacctctgcctcccaggttcaagtgattctcctgcctcagcctcccgaatagctgggactacaggcaggcgacacgacgcccagctaatttttttcttttagtagagacaaggtttcaccatgttggccagggtggtctccatatcttgacctcgtgatccgcctgcctcggcctcccaacagactttaaattcgagcttcagaaagtttgccatttacccaggatcctaacttgtaatgacttaaacagcaaagaaggctcttgcccctcagcccacccaagtgtataccaaagtcaagtgacttaactttgagcacattaccaatctcaaaattaaatccctaaacattttcaccagttttaagcgtacccacacatcactagagaatttcatgacaaaacaccaagtatgctaccatgcaacgaaacctttattaacattttgaacaggttcagctattactgaaacttgtaatttctaaacttaagttggggcaaatggctatagtgcagagtaatgccatcactgggcactgcgaatgccatgactgaagaattaacagccacccctcaggcgcaggaccaggtgcagggtcgactctttctggatgttgtagtcagaaagagtgcggccatcttccagctgcttgcctgcaaagatgagcctctgctggtcgggggggatgccttctttatcttggatcttggccttcacattttcgatggtgtcactgggctccacctccagagtgatggtcttgccggtcagggtcttcacgaagatctgcataccacctctcagacgcaggaccaggtgcagggtcgactccttctggatgttgtagtcagaaagagtgcggccatcttccagctgcttgcctgcaaagatgagcctctgctggtcgggagggatgccttctttatcctggatcttggccttcacattttcgatggtgtcactgggctccacttccagggtgatggtcttgccggtcagggtcttcacgaagatctgcataccacctctcagacgcaggaccaggtgcagggtcgactccttctggatgttgtagtcagaaagagtacggccatcttccagctgcttgcctgcaaagatgagcctctgctggtcggggggaatgccttccttatcctggatcttggccttcacattttcgatggtgtcactgggctccacctcaagggtgatggtcttgccggtaagggttttcacgaagatctgcattttgacctagtttaaaagtaaaacataagcgtgtcacctcaggatcattgtatttcttgcttttacacctaatattcttcaaaattagcaactattccttcaaaatgccttaaatacgttaatattccgcaagcctcccctcaattttacaaggctaagtcacttaatacgaaattcgtcattcaaggtttcaacgtcaacagcggaaaatccagagcgctctcttaccaagcgtccacagctttccccactaactgttccggatattcaaactcccccgaccgaactccaatctgcctcaaacctaagcacggtgttaggcaaactgaaaacaaaaccaaacccacaagactcgcgaaataaaaatcccattgaaacacaagaaggggcacctttctcacactgggattccaaagtaaaggcttccagaaaccacacaaactacctcttttccgccttccccgcgaagtaaactcgacagaatcgccgatcggttaggcgtccgttagtttccgtcaacgcgcgcgcgcgccaaccgccctcgcccccctcaggtcaacaaggcccactgtcccggaaaggcccagcgccgcgtcacctcgccctcccctcccccacgccctcccctcagcggcccacccaaccccaagaagcctccaccttgacctcacccattcccccctctcacacccccccaaggtcgttacggctgcgggccagtacctgttagcggataccaggatcctgccaatcaccaaccacgtccacccacagggacacaaacaagctcacccaacaaagccaaccgcccctaaatgctccgggctggcggagcgcaaatttatgcaacgagtgttgcgtcacttatcacccctcacgtagacgccgtctccgtgcgccgctgaaagtagttcgccgcgcccaacctcccgagaggcagtttaggcttttcaactgagccccaaattcctcatagccgtaagaaaggctcctaaaaaattatttcccttctcctctatgcgcttctcttccttctttaggaaaatataagaaaattatcaggcggatgaatttgagttgaagaaaccttcctcgaaagctctggaaacttccttgcagcgccggcactgattggttaggcctgcgaaggcgaggtcggcgctgattggtgggggacgcggtggctctgttgttgctgggctccacctggggtggcttagcgccgaggttgctaagtaactgagcgcgcgtgcgccgcacaggcgcgccgtcctgaaagagggtatttccggcgggagaaggagggggggtctttccttttttttcttgagacggagtttcgctcttgtttcccaggctggagtgcaatggcgcgatctcggctcatcgcaacctccgcctcccgggttcaagcgattctcctgcctcagcctcccaagtagctgggattacaggcatgcgccaccacgtccggctaattttttgtatttttagtagagacgggggtttcaccatgtttgtcaggctggtctcgaactcctgacctcaggtaatccacccgcctcggcctgccaaagtgggccgccgcgcctcagaagcgggacggcgtggcacccgatatcgagacacctgatggtgattgtgaagcacaattccctctcccatgttttaaaaacgcgcgcccctggccgggcgcggaggctcacgcctgtaatcccagcactttgggaggccgaggcgggtggatcatgaggtcaggggttcaagaccagcctggccaaggtggtgaaaccccgtctctactaaaaatacaaaaaaattagccgggcgtggtggcgggcgcctgtaatcccagctacttgggaggctgaggcagataattgcttgaacctaggaggcagagattgcagtgggccgagaatgtgccactgcattccagtctggcgacagagtgagactctgtctcaacaaacagacaaacaaaaaacacgagcccctcatacactggccagttgtttttgcttttttgtgacaaagtctggctgtgtccccaggctggtgtgcagtggtgtgatcaccgttcactgcagccttgacctccagggctcaagttatcctgccacctcagcctcccaagtggctgggaccgtggaccacgcctggctttttaattttgtatttattttttgagacggagtctcactctgtcacccaggctgaaggccagtggcgtgatgtggctcactgcaacctccacctccctggttcaagcgattctcctgcctcagcttcctgagtagctgggattacaggtgcgtgtcaccatgcctggctaatttttgtattttttagtacagatggggtttcaccacgttggtcaggctggtctcgaactcctgacctcaggtgatctgcctgcctcggcctcccaaagtgctgggat

SEQ ID NO: 1244964 - DNA, 4001 bp, Homo sapiens
aatgtaaagaaaatgcctgcaatcacttgagcccaggaatgatagtgagctgtcatcgtgccactgtataccagtctggactacagagcaagaccatcttttaaaaagcctgcatatccaactttttgagatgttgtcttgctctgtcgccaggctggggtgcagtggcacgatctcggctcactgcaacctctgcctcccaggttcaagtgattctcctgcctcagcctcccgaatagctgggactacaggcaggcgacacgacgcccagctaatttttttcttttagtagagacaaggtttcaccatgttggccagggtggtctccatatcttgacctcgtgatccgcctgcctcggcctcccaacagactttaaattcgagcttcagaaagtttgccatttacccaggatcctaacttgtaatgacttaaacagcaaagaaggctcttgcccctcagcccacccaagtgtataccaaagtcaagtgacttaactttgagcacattaccaatctcaaaattaaatccctaaacattttcaccagttttaagcgtacccacacatcactagagaatttcatgacaaaacaccaagtatgctaccatgcaacgaaacctttattaacattttgaacaggttcagctattactgaaacttgtaatttctaaacttaagttggggcaaatggctatagtgcagagtaatgccatcactgggcactgcgaatgccatgactgaagaattaacagccacccctcaggcgcaggaccaggtgcagggtcgactctttctggatgttgtagtcagaaagagtgcggccatcttccagctgcttgcctgcaaagatgagcctctgctggtcgggggggatgccttctttatcttggatcttggccttcacattttcgatggtgtcactgggctccacctccagagtgatggtcttgccggtcagggtcttcacgaagatctgcataccacctctcagacgcaggaccaggtgcagggtcgactccttctggatgttgtagtcagaaagagtgcggccatcttccagctgcttgcctgcaaagatgagcctctgctggtcgggagggatgccttctttatcctggatcttggccttcacattttcgatggtgtcactgggctccacttccagggtgatggtcttgccggtcagggtcttcacgaagatctgcataccacctctcagacgcaggaccaggtgcagggtcgactccttctggatgttgtagtcagaaagagtacggccatcttccagctgcttgcctgcaaagatgagcctctgctggtcggggggaatgccttccttatcctggatcttggccttcacattttcgatggtgtcactgggctccacctcaagggtgatggtcttgccggtaagggttttcacgaagatctgcattttgacctagtttaaaagtaaaacataagcgtgtcacctcaggatcattgtatttcttgcttttacacctaatattcttcaaaattagcaactattccttcaaaatgccttaaatacgttaatattccgcaagcctcccctcaattttacaaggctaagtcacttaatacgaaattcgtcattcaaggtttcaacgtcaacagcggaaaatccagagcgctctcttaccaagcgtccacagctttccccactaactgttccggatattcaaactcccccgaccgaactccaatctgcctcaaacctaagcacggtgttaggcaaactgaaaacaaaaccaaacccacaagactcgcgaaataaaaatcccattgaaacacaagaaggggcacctttctcacactgggattccaaagtaaaggcttccagaaaccacacaaactacctcttttccgccttccccgcgaagtaaactcgacagaatcgccgatcggttaggcgtccgttagtttccgtcaacgcgcgcgcgcgccaaccgccctcgcccccctcaggtcaacaaggcccactgtcccggaaaggcccagcgccgcgtcacctcgccctcccctcccccacgccctcccctcagcggcccacccaaccccaagaagcctccaccttgacctcacccattcccccctctcacacccccccaaggtcgttacggctgcgggccagtacctgttagcggataccaggatcctgccaatcaccaaccacgtccacccacagggacacaaacaagctcacccaacaaagccaaccgcccctaaatgctccgggctggcggagcgcaaatttatgcaacgagtgttgcgtcacttatcacccctcacgtagacgccgtctccgtgcgccgctgaaagtagttcgccgcgcccaacctcccgagaggcagtttaggcttttcaactgagccccaaattcctcatagccgtaagaaaggctcctaaaaaattatttcccttctcctctatgcgcttctcttccttctttaggaaaatataagaaaattatcaggcggatgaatttgagttgaagaaaccttcctcgaaagctctggaaacttccttgcagcgccggcactgattggttaggcctgcgaaggcgaggtcggcgctgattggtgggggacgcggtggctctgttgttgctgggctccacctggggtggcttagcgccgaggttgctaagtaactgagcgcgcgtgcgccgcacaggcgcgccgtcctgaaagagggtatttccggcgggagaaggagggggggtctttccttttttttcttgagacggagtttcgctcttgtttcccaggctggagtgcaatggcgcgatctcggctcatcgcaacctccgcctcccgggttcaagcgattctcctgcctcagcctcccaagtagctgggattacaggcatgcgccaccacgtccggctaattttttgtatttttagtagagacgggggtttcaccatgtttgtcaggctggtctcgaactcctgacctcaggtaatccacccgcctcggcctgccaaagtgggccgccgcgcctcagaagcgggacggcgtggcacccgatatcgagacacctgatggtgattgtgaagcacaattccctctcccatgttttaaaaacgcgcgcccctggccgggcgcggaggctcacgcctgtaatcccagcactttgggaggccgaggcgggtggatcatgaggtcaggggttcaagaccagcctggccaaggtggtgaaaccccgtctctactaaaaatacaaaaaaattagccgggcgtggtggcgggcgcctgtaatcccagctacttgggaggctgaggcagataattgcttgaacctaggaggcagagattgcagtgggccgagaatgtgccactgcattccagtctggcgacagagtgagactctgtctcaacaaacagacaaacaaaaaacacgagcccctcatacactggccagttgtttttgcttttttgtgacaaagtctggctgtgtccccaggctggtgtgcagtggtgtgatcaccgttcactgcagccttgacctccagggctcaagttatcctgccacctcagcctcccaagtggctgggaccgtggaccacgcctggctttttaattttgtatttattttttgagacggagtctcactctgtcacccaggctgaaggccagtggcgtgatgtggctcactgcaacctccacctccctggttcaagcgattctcctgcctcagcttcctgagtagctgggattacaggtgcgtgtcaccatgcctggctaatttttgtattttttagtacagatggggtttcaccacgttggtcaggctggtctcgaactcctgacctcaggtgatctgcctgcctcggcctcccaaagtgctgggattacagatgtgagccactgttcctggtctaatttttttttgttgttagatcagagtcttgctatgttacccaggctgttactgaactcttgggctcaggagatccgcctgcctcgggctcccaaa

SEQ ID NO: 1244965 - DNA, 4001 bp, Homo sapiens
gtcatcgtgccactgtataccagtctggactacagagcaagaccatcttttaaaaagcctgcatatccaactttttgagatgttgtcttgctctgtcgccaggctggggtgcagtggcacgatctcggctcactgcaacctctgcctcccaggttcaagtgattctcctgcctcagcctcccgaatagctgggactacaggcaggcgacacgacgcccagctaatttttttcttttagtagagacaaggtttcaccatgttggccagggtggtctccatatcttgacctcgtgatccgcctgcctcggcctcccaacagactttaaattcgagcttcagaaagtttgccatttacccaggatcctaacttgtaatgacttaaacagcaaagaaggctcttgcccctcagcccacccaagtgtataccaaagtcaagtgacttaactttgagcacattaccaatctcaaaattaaatccctaaacattttcaccagttttaagcgtacccacacatcactagagaatttcatgacaaaacaccaagtatgctaccatgcaacgaaacctttattaacattttgaacaggttcagctattactgaaacttgtaatttctaaacttaagttggggcaaatggctatagtgcagagtaatgccatcactgggcactgcgaatgccatgactgaagaattaacagccacccctcaggcgcaggaccaggtgcagggtcgactctttctggatgttgtagtcagaaagagtgcggccatcttccagctgcttgcctgcaaagatgagcctctgctggtcgggggggatgccttctttatcttggatcttggccttcacattttcgatggtgtcactgggctccacctccagagtgatggtcttgccggtcagggtcttcacgaagatctgcataccacctctcagacgcaggaccaggtgcagggtcgactccttctggatgttgtagtcagaaagagtgcggccatcttccagctgcttgcctgcaaagatgagcctctgctggtcgggagggatgccttctttatcctggatcttggccttcacattttcgatggtgtcactgggctccacttccagggtgatggtcttgccggtcagggtcttcacgaagatctgcataccacctctcagacgcaggaccaggtgcagggtcgactccttctggatgttgtagtcagaaagagtacggccatcttccagctgcttgcctgcaaagatgagcctctgctggtcggggggaatgccttccttatcctggatcttggccttcacattttcgatggtgtcactgggctccacctcaagggtgatggtcttgccggtaagggttttcacgaagatctgcattttgacctagtttaaaagtaaaacataagcgtgtcacctcaggatcattgtatttcttgcttttacacctaatattcttcaaaattagcaactattccttcaaaatgccttaaatacgttaatattccgcaagcctcccctcaattttacaaggctaagtcacttaatacgaaattcgtcattcaaggtttcaacgtcaacagcggaaaatccagagcgctctcttaccaagcgtccacagctttccccactaactgttccggatattcaaactcccccgaccgaactccaatctgcctcaaacctaagcacggtgttaggcaaactgaaaacaaaaccaaacccacaagactcgcgaaataaaaatcccattgaaacacaagaaggggcacctttctcacactgggattccaaagtaaaggcttccagaaaccacacaaactacctcttttccgccttccccgcgaagtaaactcgacagaatcgccgatcggttaggcgtccgttagtttccgtcaacgcgcgcgcgcgccaaccgccctcgcccccctcaggtcaacaaggcccactgtcccggaaaggcccagcgccgcgtcacctcgccctcccctcccccacgccctcccctcagcggcccacccaaccccaagaagcctccaccttgacctcacccattcccccctctcacacccccccaaggtcgttacggctgcgggccagtacctgttagcggataccaggatcctgccaatcaccaaccacgtccacccacagggacacaaacaagctcacccaacaaagccaaccgcccctaaatgctccgggctggcggagcgcaaatttatgcaacgagtgttgcgtcacttatcacccctcacgtagacgccgtctccgtgcgccgctgaaagtagttcgccgcgcccaacctcccgagaggcagtttaggcttttcaactgagccccaaattcctcatagccgtaagaaaggctcctaaaaaattatttcccttctcctctatgcgcttctcttccttctttaggaaaatataagaaaattatcaggcggatgaatttgagttgaagaaaccttcctcgaaagctctggaaacttccttgcagcgccggcactgattggttaggcctgcgaaggcgaggtcggcgctgattggtgggggacgcggtggctctgttgttgctgggctccacctggggtggcttagcgccgaggttgctaagtaactgagcgcgcgtgcgccgcacaggcgcgccgtcctgaaagagggtatttccggcgggagaaggagggggggtctttccttttttttcttgagacggagtttcgctcttgtttcccaggctggagtgcaatggcgcgatctcggctcatcgcaacctccgcctcccgggttcaagcgattctcctgcctcagcctcccaagtagctgggattacaggcatgcgccaccacgtccggctaattttttgtatttttagtagagacgggggtttcaccatgtttgtcaggctggtctcgaactcctgacctcaggtaatccacccgcctcggcctgccaaagtgggccgccgcgcctcagaagcgggacggcgtggcacccgatatcgagacacctgatggtgattgtgaagcacaattccctctcccatgttttaaaaacgcgcgcccctggccgggcgcggaggctcacgcctgtaatcccagcactttgggaggccgaggcgggtggatcatgaggtcaggggttcaagaccagcctggccaaggtggtgaaaccccgtctctactaaaaatacaaaaaaattagccgggcgtggtggcgggcgcctgtaatcccagctacttgggaggctgaggcagataattgcttgaacctaggaggcagagattgcagtgggccgagaatgtgccactgcattccagtctggcgacagagtgagactctgtctcaacaaacagacaaacaaaaaacacgagcccctcatacactggccagttgtttttgcttttttgtgacaaagtctggctgtgtccccaggctggtgtgcagtggtgtgatcaccgttcactgcagccttgacctccagggctcaagttatcctgccacctcagcctcccaagtggctgggaccgtggaccacgcctggctttttaattttgtatttattttttgagacggagtctcactctgtcacccaggctgaaggccagtggcgtgatgtggctcactgcaacctccacctccctggttcaagcgattctcctgcctcagcttcctgagtagctgggattacaggtgcgtgtcaccatgcctggctaatttttgtattttttagtacagatggggtttcaccacgttggtcaggctggtctcgaactcctgacctcaggtgatctgcctgcctcggcctcccaaagtgctgggattacagatgtgagccactgttcctggtctaatttttttttgttgttagatcagagtcttgctatgttacccaggctgttactgaactcttgggctcaggagatccgcctgcctcgggctcccaaagtgctaggattacaggcatgaaccaccgtgcctggcggactagccgctttt

SEQ ID NO: 1244966 - DNA, 4001 bp, Homo sapiens
actacaggcaggcgacacgacgcccagctaatttttttcttttagtagagacaaggtttcaccatgttggccagggtggtctccatatcttgacctcgtgatccgcctgcctcggcctcccaacagactttaaattcgagcttcagaaagtttgccatttacccaggatcctaacttgtaatgacttaaacagcaaagaaggctcttgcccctcagcccacccaagtgtataccaaagtcaagtgacttaactttgagcacattaccaatctcaaaattaaatccctaaacattttcaccagttttaagcgtacccacacatcactagagaatttcatgacaaaacaccaagtatgctaccatgcaacgaaacctttattaacattttgaacaggttcagctattactgaaacttgtaatttctaaacttaagttggggcaaatggctatagtgcagagtaatgccatcactgggcactgcgaatgccatgactgaagaattaacagccacccctcaggcgcaggaccaggtgcagggtcgactctttctggatgttgtagtcagaaagagtgcggccatcttccagctgcttgcctgcaaagatgagcctctgctggtcgggggggatgccttctttatcttggatcttggccttcacattttcgatggtgtcactgggctccacctccagagtgatggtcttgccggtcagggtcttcacgaagatctgcataccacctctcagacgcaggaccaggtgcagggtcgactccttctggatgttgtagtcagaaagagtgcggccatcttccagctgcttgcctgcaaagatgagcctctgctggtcgggagggatgccttctttatcctggatcttggccttcacattttcgatggtgtcactgggctccacttccagggtgatggtcttgccggtcagggtcttcacgaagatctgcataccacctctcagacgcaggaccaggtgcagggtcgactccttctggatgttgtagtcagaaagagtacggccatcttccagctgcttgcctgcaaagatgagcctctgctggtcggggggaatgccttccttatcctggatcttggccttcacattttcgatggtgtcactgggctccacctcaagggtgatggtcttgccggtaagggttttcacgaagatctgcattttgacctagtttaaaagtaaaacataagcgtgtcacctcaggatcattgtatttcttgcttttacacctaatattcttcaaaattagcaactattccttcaaaatgccttaaatacgttaatattccgcaagcctcccctcaattttacaaggctaagtcacttaatacgaaattcgtcattcaaggtttcaacgtcaacagcggaaaatccagagcgctctcttaccaagcgtccacagctttccccactaactgttccggatattcaaactcccccgaccgaactccaatctgcctcaaacctaagcacggtgttaggcaaactgaaaacaaaaccaaacccacaagactcgcgaaataaaaatcccattgaaacacaagaaggggcacctttctcacactgggattccaaagtaaaggcttccagaaaccacacaaactacctcttttccgccttccccgcgaagtaaactcgacagaatcgccgatcggttaggcgtccgttagtttccgtcaacgcgcgcgcgcgccaaccgccctcgcccccctcaggtcaacaaggcccactgtcccggaaaggcccagcgccgcgtcacctcgccctcccctcccccacgccctcccctcagcggcccacccaaccccaagaagcctccaccttgacctcacccattcccccctctcacacccccccaaggtcgttacggctgcgggccagtacctgttagcggataccaggatcctgccaatcaccaaccacgtccacccacagggacacaaacaagctcacccaacaaagccaaccgcccctaaatgctccgggctggcggagcgcaaatttatgcaacgagtgttgcgtcacttatcacccctcacgtagacgccgtctccgtgcgccgctgaaagtagttcgccgcgcccaacctcccgagaggcagtttaggcttttcaactgagccccaaattcctcatagccgtaagaaaggctcctaaaaaattatttcccttctcctctatgcgcttctcttccttctttaggaaaatataagaaaattatcaggcggatgaatttgagttgaagaaaccttcctcgaaagctctggaaacttccttgcagcgccggcactgattggttaggcctgcgaaggcgaggtcggcgctgattggtgggggacgcggtggctctgttgttgctgggctccacctggggtggcttagcgccgaggttgctaagtaactgagcgcgcgtgcgccgcacaggcgcgccgtcctgaaagagggtatttccggcgggagaaggagggggggtctttccttttttttcttgagacggagtttcgctcttgtttcccaggctggagtgcaatggcgcgatctcggctcatcgcaacctccgcctcccgggttcaagcgattctcctgcctcagcctcccaagtagctgggattacaggcatgcgccaccacgtccggctaattttttgtatttttagtagagacgggggtttcaccatgtttgtcaggctggtctcgaactcctgacctcaggtaatccacccgcctcggcctgccaaagtgggccgccgcgcctcagaagcgggacggcgtggcacccgatatcgagacacctgatggtgattgtgaagcacaattccctctcccatgttttaaaaacgcgcgcccctggccgggcgcggaggctcacgcctgtaatcccagcactttgggaggccgaggcgggtggatcatgaggtcaggggttcaagaccagcctggccaaggtggtgaaaccccgtctctactaaaaatacaaaaaaattagccgggcgtggtggcgggcgcctgtaatcccagctacttgggaggctgaggcagataattgcttgaacctaggaggcagagattgcagtgggccgagaatgtgccactgcattccagtctggcgacagagtgagactctgtctcaacaaacagacaaacaaaaaacacgagcccctcatacactggccagttgtttttgcttttttgtgacaaagtctggctgtgtccccaggctggtgtgcagtggtgtgatcaccgttcactgcagccttgacctccagggctcaagttatcctgccacctcagcctcccaagtggctgggaccgtggaccacgcctggctttttaattttgtatttattttttgagacggagtctcactctgtcacccaggctgaaggccagtggcgtgatgtggctcactgcaacctccacctccctggttcaagcgattctcctgcctcagcttcctgagtagctgggattacaggtgcgtgtcaccatgcctggctaatttttgtattttttagtacagatggggtttcaccacgttggtcaggctggtctcgaactcctgacctcaggtgatctgcctgcctcggcctcccaaagtgctgggattacagatgtgagccactgttcctggtctaatttttttttgttgttagatcagagtcttgctatgttacccaggctgttactgaactcttgggctcaggagatccgcctgcctcgggctcccaaagtgctaggattacaggcatgaaccaccgtgcctggcggactagccgctttttatttttcttcgtggttattgcagggttgtggagctttaaatcatgcttctgtagtcagagtgctcttagttgcattgtcttaatcctcatcacggcccgagaacagtctgtaaatcgggagttcagagtgggaccctctgcggggaccggaaacctgttgctgaagccgctcaccaccaggcccagagaggc

SEQ ID NO: 1244967 - DNA, 4001 bp, Homo sapiens
agttttaagcgtacccacacatcactagagaatttcatgacaaaacaccaagtatgctaccatgcaacgaaacctttattaacattttgaacaggttcagctattactgaaacttgtaatttctaaacttaagttggggcaaatggctatagtgcagagtaatgccatcactgggcactgcgaatgccatgactgaagaattaacagccacccctcaggcgcaggaccaggtgcagggtcgactctttctggatgttgtagtcagaaagagtgcggccatcttccagctgcttgcctgcaaagatgagcctctgctggtcgggggggatgccttctttatcttggatcttggccttcacattttcgatggtgtcactgggctccacctccagagtgatggtcttgccggtcagggtcttcacgaagatctgcataccacctctcagacgcaggaccaggtgcagggtcgactccttctggatgttgtagtcagaaagagtgcggccatcttccagctgcttgcctgcaaagatgagcctctgctggtcgggagggatgccttctttatcctggatcttggccttcacattttcgatggtgtcactgggctccacttccagggtgatggtcttgccggtcagggtcttcacgaagatctgcataccacctctcagacgcaggaccaggtgcagggtcgactccttctggatgttgtagtcagaaagagtacggccatcttccagctgcttgcctgcaaagatgagcctctgctggtcggggggaatgccttccttatcctggatcttggccttcacattttcgatggtgtcactgggctccacctcaagggtgatggtcttgccggtaagggttttcacgaagatctgcattttgacctagtttaaaagtaaaacataagcgtgtcacctcaggatcattgtatttcttgcttttacacctaatattcttcaaaattagcaactattccttcaaaatgccttaaatacgttaatattccgcaagcctcccctcaattttacaaggctaagtcacttaatacgaaattcgtcattcaaggtttcaacgtcaacagcggaaaatccagagcgctctcttaccaagcgtccacagctttccccactaactgttccggatattcaaactcccccgaccgaactccaatctgcctcaaacctaagcacggtgttaggcaaactgaaaacaaaaccaaacccacaagactcgcgaaataaaaatcccattgaaacacaagaaggggcacctttctcacactgggattccaaagtaaaggcttccagaaaccacacaaactacctcttttccgccttccccgcgaagtaaactcgacagaatcgccgatcggttaggcgtccgttagtttccgtcaacgcgcgcgcgcgccaaccgccctcgcccccctcaggtcaacaaggcccactgtcccggaaaggcccagcgccgcgtcacctcgccctcccctcccccacgccctcccctcagcggcccacccaaccccaagaagcctccaccttgacctcacccattcccccctctcacacccccccaaggtcgttacggctgcgggccagtacctgttagcggataccaggatcctgccaatcaccaaccacgtccacccacagggacacaaacaagctcacccaacaaagccaaccgcccctaaatgctccgggctggcggagcgcaaatttatgcaacgagtgttgcgtcacttatcacccctcacgtagacgccgtctccgtgcgccgctgaaagtagttcgccgcgcccaacctcccgagaggcagtttaggcttttcaactgagccccaaattcctcatagccgtaagaaaggctcctaaaaaattatttcccttctcctctatgcgcttctcttccttctttaggaaaatataagaaaattatcaggcggatgaatttgagttgaagaaaccttcctcgaaagctctggaaacttccttgcagcgccggcactgattggttaggcctgcgaaggcgaggtcggcgctgattggtgggggacgcggtggctctgttgttgctgggctccacctggggtggcttagcgccgaggttgctaagtaactgagcgcgcgtgcgccgcacaggcgcgccgtcctgaaagagggtatttccggcgggagaaggagggggggtctttccttttttttcttgagacggagtttcgctcttgtttcccaggctggagtgcaatggcgcgatctcggctcatcgcaacctccgcctcccgggttcaagcgattctcctgcctcagcctcccaagtagctgggattacaggcatgcgccaccacgtccggctaattttttgtatttttagtagagacgggggtttcaccatgtttgtcaggctggtctcgaactcctgacctcaggtaatccacccgcctcggcctgccaaagtgggccgccgcgcctcagaagcgggacggcgtggcacccgatatcgagacacctgatggtgattgtgaagcacaattccctctcccatgttttaaaaacgcgcgcccctggccgggcgcggaggctcacgcctgtaatcccagcactttgggaggccgaggcgggtggatcatgaggtcaggggttcaagaccagcctggccaaggtggtgaaaccccgtctctactaaaaatacaaaaaaattagccgggcgtggtggcgggcgcctgtaatcccagctacttgggaggctgaggcagataattgcttgaacctaggaggcagagattgcagtgggccgagaatgtgccactgcattccagtctggcgacagagtgagactctgtctcaacaaacagacaaacaaaaaacacgagcccctcatacactggccagttgtttttgcttttttgtgacaaagtctggctgtgtccccaggctggtgtgcagtggtgtgatcaccgttcactgcagccttgacctccagggctcaagttatcctgccacctcagcctcccaagtggctgggaccgtggaccacgcctggctttttaattttgtatttattttttgagacggagtctcactctgtcacccaggctgaaggccagtggcgtgatgtggctcactgcaacctccacctccctggttcaagcgattctcctgcctcagcttcctgagtagctgggattacaggtgcgtgtcaccatgcctggctaatttttgtattttttagtacagatggggtttcaccacgttggtcaggctggtctcgaactcctgacctcaggtgatctgcctgcctcggcctcccaaagtgctgggattacagatgtgagccactgttcctggtctaatttttttttgttgttagatcagagtcttgctatgttacccaggctgttactgaactcttgggctcaggagatccgcctgcctcgggctcccaaagtgctaggattacaggcatgaaccaccgtgcctggcggactagccgctttttatttttcttcgtggttattgcagggttgtggagctttaaatcatgcttctgtagtcagagtgctcttagttgcattgtcttaatcctcatcacggcccgagaacagtctgtaaatcgggagttcagagtgggaccctctgcggggaccggaaacctgttgctgaagccgctcaccaccaggcccagagaggcgaggctggagcccatggtgacagtggccgggcttcgctctggctccagcaatacctgcaaatccagttcttcccagctgtttctccaaactggtaggaaaaaaaaaagtgcagattagggagccgaaaccccacttcaaaaacgggaattcacctacaagaaagtagctgatcctgctcccattgacgtgcttgttgtgcaagggtgaggttaaccagctaggaccaagcaacgggtttccctacaccctgggtgtggccactcgtcctgcaaggagataacccaaggaaggtgagtaag

SEQ ID NO: 1244968 - DNA, 4001 bp, Homo sapiens
gttcaagcaattctcccgcctcagcctcctgagtagctgggattacaggcgccctccgccacgcccgaataattttttgtatttttagtagtgacgggggtttcaccactttggccaggctggccctgaactcctgtcctaaggtgatccgccagcctcggcctcccgaagtgctgggattacaggcgtgagccagcgcgcccggcctcagtgcttttccagcacataatttttatgagtatcctgtagtatcattagaacttctccatttactgcaagctaactccccctgagcatctagaactttaatacttgtccaaacctgcttgctcatggtctaataataaacccaattatacaatctgtaagaacccctgacaaccttttccttaagaagccataaaggtgatttaacgaacacctcaaactcttagtaaatgtatttcaaaaacagatttcatcactccagtctttggcttctgctgagggctagaggctactggttttagagtgggtagggggaagatcgcttgaactgagaatgacacacgccgggtgttgtacagcaggggtaagtgctggttcatttctctttaaatctggcagcacgtggggctgcattgtgaagccaccaacccgcctccccccttccactccgcacacggacgtctccactgcgcatgctccgcgcacacagtcctagcagagtaggagccaaccccctaaaaagtcaacctggaagccgcaaacggccggaggccgggacaatgggggaggggggccgcaggctcctcggggaggccgacccggccgccgccccgggccagagcctgcgggcgcagctccggggtttgcaggcctgcgcagcagccggaatcgcggcgagcacaaagcccggagccggccagcgagcggctctccccgcggcccgctcctaccctcccccagccgggcggcgcagccggagcccgtgccaggcggaggcaggcgaggcggcgatccgcactccgccagggtctccggcaccctcgcgcccgcgtggaggccgccgaggccagcgcttttgttgtcggccccaactccgcggacccagcgccgcccggggagaagttttgtgcgcctcacctatcccgccagggccggtcccttccgcccgccctcagacaccgagccggggactcgcagccgcactgggtccggacgctccagccggccccgaaggtccggcggccccggcagcacctgaacccgggacccgcccctccaagctggcggccccggcctggggacccgcacacagcccctcccccgcaacgtcctacagaacggtgggggaggggacctcctcctctccgaccccccgggcgccaggcccagtccctgggccggagctgggtcgcgtccccgcccccagtgccctccaagagccgggcgagaacggctgggcccggccgggaccggagcctcgaggtccccaccctcgcaggcccgggccccttcggcagtacggccgctggcccgggaggagaagagggactgggctgcggctgtccgcgatcgcggccgggcccggcgccccgccgcccgcctgctcacctgccagctgtcttcgcagtagcagtgccgactgcagctccgtcatcctccctgccgagggcccgggctggcgccggggcttccgaagggctggggacaggctctgggggcggctggagcggggtgtgccgaggaacccgggccccgcgaccggagcgccggagccgaggaaggccgggctgaggcggcgggagcggcgcctcgctgccggtgcgagtccgctcgcttcagctcttttcacagcgactcacgcccggaaggggagggtgcccgggctgccgcggcgcgcactgggacttcgctcgcccgcttccctccttcaacccgcccgtcggccccaccggtgccttcccccgccactgcctcactgcgcgcagggccgctcggcgcaggcgcgctgagactgccgacttgggaagcgtcccgcccgctagcccgacccctcggcctcccgccccgcccccggcggcggaaccccgccccttgagcgcagttgtcccgtccgccgccattttgggaaggtcgacgcccggctgccagcccaagcctccgctggtagacgccccgcggacgccatgacaaagaggtcgcagagggtcaaatacagcctctggattgaagcagtggatataggagcgaagaggccagaagaagtggtagatgtctagtccttggcgagcgcccaaaagccatctaacactgccacatggtgtgcgaagtaggaattgttagaaagccgaagttagtactggtgtgccccattttaaccaaacatcaaaatagaggcaatatatgatgataactcactttacatgaagagtgcacaaaaaaagccaccgcgtccggccctattattattgagccaccgagaccggccctgttattattatcatttatggacggcaattctctctgtcgcccaggctggagtgcagtgatcatagctcactgcagcttggaactcctgggcttaagggatcctcccatctgagtctccttagtatctgggattacaggtacacaccaccatgccctgctatttttttatttgctttatagagatcggggggtttgacggggcgcggtggctcatgcttgtaatcccagcactttgagaggccgaggtgggcagatcacctgaggtcacgagttcgagaccatcctggccaacatggtgaaacctggtctctactaaaaatacaaaaattagcccagcctggtggcaggcgcctgtactcccagctaccagggaggctgagaaaggagaattgcttgaacctaggaggcagagattgcagtgagccgagatggtgccactgcactccagcatggccgacagagagagactccgtctcacaaaaaaaaaaaaaaaggaggggggggccagaggtctctctgtgttgcccaggctggtctcaaactcctgggttcaagcagtccttccaactcggcctcccaaagtgttagcattacaagtgtgaaccactgccccctatcaaatagaccaaagggaccattttgatatttcactttaccaaatcaaggaaatttacttctattcctagtttctttcttttttattttatttatttatttatttattttttgagacagccttgttctgtcgcccaggctggagtgcagtggcgtgatcttggcccactgcaacctctgcctctcaggttcccgagttaaagcaattctcctgcctcagactcctgagtagctgggactacaggcgcacgcctccaggccaggctaattttctttcgtattttagtagagatggggttttaccatgttgcccaggctggtctcgaactcctgaactcaggcaatccgcctgcctcagcctcccaaaatgctaggattataggcaagggccactgtgcccggcctattcctagtttcttaagatttattttttgtaaaaaaaaaaaaaaaaaagatttattttttgtaataatttccaaatctggtgaaagatcagggctggataaaggtttagaaattgaacctaatccttaaacagtgggaggcccctgaaaagttttaactaggagtagaaaaatagcagacttgcattttgaatgttttgctgtggctgcagagaattgatgagggagggagggtcaagaccagtgccctgcaggctgtggtggctctcatctgtaatcccagctctttggaaactccacgcaggaggatcacttgaggccaggagctagagactagcctgggtgacagagcaagaccctatcgctacaaaaaagtgtgttttgttttgttttgaaacagtctccctctgtcgcccaggctggagtacagtggcacaatctcaggtcactgcacctctgcctccctggttcaagtgattctcgtgcctcagcctcctgagtggcagg

SEQ ID NO: 1244969 - DNA, 4001 bp, Homo sapiens
actcacagaaagacaccagcaatcatctggtgtcacacagtatacagcaataaccctcttttactgacacaatactgggtaatttttaacaagcattctgttgcacaaaagtaatattttccaaatactcttgtaaatggactgataattttccttccaagtctcagagctgttgcctgattcacatttctctgaggggaagcagggtcctgtgtgtggatttgtgtctgtggatgtatgtgcatccccaacaaaaagaccccgctggtatcagcagtcacttctgcctctaggaaatggatcatgtgctcttctctggagtggggcctttttccttctcaagccgttgtcacagaccccgctttgtagtttgacatgaaaccccgttcctctgtagtctttgtctcccactgtgtgagaaacccagatcaacttccaaagtgccctcccctgaaatcagacctctcaacctcccaaggacctaaaacagcgtaggcctgattcctgcttagaaatgttttcttgaaggggaggggaagtaggagagaaagaaggggtgtgagatacaggggggtgtgtgtgtgtgtgtgtgtgtgtcaattactgataggaattcacattctggaaaacaagccaccaaaccaacccgggttcaaggtttcgggtttatgatgacaagcctctttgttttgtaaaactgctatactcactagcatcaccccaaaaaccatacgggagtcagatgtctgcttaacagcttcaggtcaagaaaaaaccttcgggtttccaaattggtgactcccctctacccagggttctggattatttttttcaaggagtccatatgcacttaggagtcatcaatcccggtcgcagctgtcagaatcctcccccccaagtactattcataccggggctctgattgctaatgattttactcacaaagttccctgcagcaattaaaaggaggcagcagggtaaaacaaaaagaggctgggtggcttcaccataatgcagcctgtaagctagtgaacttcttgggttcggctgggattttcacctctatctttgttttggaatgcccacaacccctccctgcacggacccggcacggccttcatttctggatgcacaatgcagtaccgagctccttgggggtcagcaaaacgccgcactggtgtaacgccgaacgcgccccagaacctgagtccccacgggagtcggtccacgtctctaaatctcgaggccgacaccacagcataacatgtcttagaagtcccctcaagtcgggaagcccagggcccgcccggtcccgggccagcagtgcctggctggcgtgtgcgcccagagctgctgcaatgactttgcatggagtgtaccctccactggggctgtcctcccgcgtcggccactgcagtggcaccgctccgggcagggccctgcacgccgtccttccctggcctcggcccggccgccgaccccctgccgcccgcgccgcccagcccccgcccgccgcaccttggtctccttcacatgctgcttgacgccctccgggtaccactggacgcgcacgtagccgcggcgcagggggctggcccggccctcctcgtggcccgcgcccccggcctcggagcaccccgagctcccgcggccctcctcctcgccctccgagtccgagtcctcgccgtggatgaggcgcaccagcccgaagtgcacggagccacggtaacggcccgacaccaggtcgtgagaaaacagcaggcgctgcgagccggcttctgggccggagtccgaggacggcccggaggccgagtccgaggcgggcgccggcgccgggacgggggctgcggctggggccgggactgcctccggggctggagccggggcctgggctggagcgggagctgcgggcgtgggggctgcgggatccgccataactgctctgcgcgagtctcgggcggcggcggcgacagcggcggcgaacgaggcgcggggaggcgggaccagcgggcgccgggggcggggccatagcgcgctgacgtgtccctgcgtggcgccgtcgtcagggagccgggatgcagttgctaggagccaccgcctcgtcgctaggggacgctgaagatgccgcggggggcgggggcaggatggaatccactaagaaggggcgagaccagtgaggattcaactaaagggagcgagaaggggcggggacccgggaggaggaagtggagtggccaccgaggaagaggggagtggtcggggtggggcacaggatggtggagagactgtcaacaacttttaatgagctcccttggcgtcctagcctagcccccaggcactgggagcattgcagaaagagaaagatactgtccctgtcctctaggtgtttccagtctagttggggagacaaaacaaatacacattaaatagataacaaacaactccaacttgtaaggctataatagatacgtgtagagcatatgtataatgcactgtattcaggaattccaagcagttcgaacgtcatgacccctcagaagttgacccagaagctggtgaaggaggcccagagaaaggtaacaaaaggatcagtggtcccagtggtttggctacaaatccatgcagataaattcaaagctccctgaagccaagaatgaatggcaagaggtagtatagtaaggtagctaagagtggggaccacggattccaatttttggcactgccacttactaatctataaaaataggcacactgattaacttattttcatcttaatttgctcatctgtgaaatagggatgataatagcaatactcatctcattgggcaattggaggattaagtgaagtagaacagtgcctggcatttagctccttcgataagcttaaccattgttgtactatttccaaactccctgcctagactaaattccagactggcagaactgttatggtctgctccatattgtcattttaaaatataaaaagtaggccgggcgcggcagctcacacctgtcatcccagtactttgggaggctgaggtgggcggatcacgaggtcaagagattgagaccatcctggccaacatggcgaaaccccatctctactaaaaatacggaaaaaaaaaaaaaatagctgggcgtggtggcacatggctgtagtcccagctactcaggaggctgaggcaggcaaatcgcttgaacctgggaggctgaggttgcagtgagcccagatcgcgccactgcactccaccctgggcaacagagcaagactctgtctcaaaaaaataaataaataaaaataaataaaatataaaaagtaactctagggccaggcgtggtggctcatgcctgtaatcccagcactttgggaggcagaagcagatggatcacctgatcacctgaggtcaggagttcaagaccgccctggccaacatggcgaaatcccttctctactaaaagtacaaaaattagctgggcgtggtggtgtgcacctgtagtcccagctacttgggaggctgaggcaggagaattgcttgaatctgggaggcagaagttgcagtgagccgagatcatgccactacactccagccttggcaacagagcaggactctgtctcaaaaaacaaaaaacaaaaaaaaggctggatgtggtggctcttgcctgtaatcccagcactttgggagaccgaggcgggtgggagacccgaggtcaggagttcaagaccagcctggccaagatggtgaaaccctgtctctactaaaaatacaaaaattagccgggcgcggtggcagccgcctgtaatcccagctactcggaaggctgaggcaggagaatcacttgaacctggggagtggaggttgtagtgagcctagatcgcgccgctgcactccagcctgggcgacagagtgagattccgtctcaaaaaaaagtaactctaggccgggcacagtggctcacgcctgaaatcccaacactttgactgcgcctgaaatcccaacact

SEQ ID NO: 1244970 - DNA, 4001 bp, Homo sapiens
aactatacagtggacctttattggtaaggggattgtatgaagcaagccagccagcagagagtaagactatcatggtggccttcttgcccaggggtgtctcagggtagagatctcttcaggctggggagggatcctcagaaattgctaagaatctcccatctggaagatgacatgtggacttccataggagataagatttctgactcatatctcaccaactggaatggatcagttgagagcaaggggctaaagaacattctaggtggcgaaaagcctagggacttgctagggtgggtagggacataaaaagggcaaataggcgacaaagcagaggaaagcattggccaaactcaaaggtatgtcagaattggatgactgaaatggctggaggaggaaaagagttgagtgctgagtttcagttagaggtggcaatccctccacagttgacctcctgtgtcaggcactgtgccaggtactttacacacattatattaatttttattacaaccttgaaaagtagacacagagacatctgaaaggacgtggaacatggggaataagaactaaacgaagatgcttgtgatgggggcatggggagaagtcaaacaggtttcaggattaatagctaaagagcactgcccttttcttatgcgataggtactattctatgtgcttctggaaaacatcatctactaaatgataggatctaagatcagtcacccaagaaataagcacagaaaggacttaggcctttgttcctatatttgatgagtatatttgcttcatagaagtaaaacagacgacccggggagggtggggggtggggggagggaaattacaagaaagaagctcctgagtgggatattacaatccagagtggcactggggaattggggggaggtagcctgtgtttctggaagaggcgtaagagtggacagctttgggacactggaaaaggggttcaaggaaagattggggcgagggaagcgatctagacctgggaaaagactgtgtggagggaatctgagaaaaacggaggataaaaagaaaggttggctcgagtcagaggcatggcaaaggaagctgagttcgtctgtgttaggaacggggctccagaggagaagagaggggaccgatgggtggggcctgcgggcagcatctagcaaggttggggtggggaaggggaaataggggcggcgccgaaggcgggagggggcgttactgaagcgctaaagggtcgggtttccacccggaggtgggaggtgtgggggagggtggccggaatggagacggagggctcacgggaggttgtcgaggggcggggtcggatctgggcacacgaggcgggggttggtgcttgcgggtctgagggtggggggagaagggagttggatcccgacgcccggagctggcaagatttgggccgtggaggtgggccgccgcgagggcagcgcagtgggtggggggtgagttgtagtgggagagggtggggggcggggaaggtcgagccccggagctcggggctgggggaggaaaaaccccggctcaccgcttgatccggagtagacactgcggcgcggtgcgctcgccgtcccagtcggagctgagcgtggggtcccagtggctaagcagcgcggccccgtgggcagcggctgagggcgggagcccgggcagcggagccaggccgctccccgggcccccggccccgcccgctgccgccgccgccgcccacacatccggcaggaaaggcggcccgaacccgccgccgctgccgctaacgccaacaacaccagcaacgctgctcgccccggggcccgccgccccggcgcccgccgttgccgcctcctcagtcggactctccgccatcgctgcttcgcttccgggactactcggcagcacgtccgccgaccagagcggccgctgctcccgcccgctcccgcaccaccgagaaccgggccagagtgtccccaccccctccgcttccacagcccagacggtgctggctccgcccacccccgccccaaccagcgagaggcgctctgcaagagcgtccacctacggtcctccaggacgggaggggtgggaactagcaggccgtgatggttctgggctcgtgtgggtcctgcgctgtgcggaagtagcggagagcccaattcaagtgttgaaaggggagaagagaggagggagtgggggaggaagggccatatcattcccgttaatggcggcgaccctcagacgtctgcatggttaggattggggatccagcatcctcatgggaagctcagtagagaagttgactcgctttgggccccttctctcggaaaggctctgcgattgatccctcctgcacacttgtgcacctagggcagggtaccattgcccttgcctgcaacaggaccaagagagaactcaacttggaatgaaaagctacctcttttagagtttattcaacatatatttatgaagggcctactaaatgccagtcactgttgctagttgttgccatggggataatgaaacagaactagagaagcttggtgaaaggaagaaacatcaggcctcctgactccaagcttagtactttttcttcccacaaatcttggaatatacaggaatcgaggtactgtgagtgtaaaccctgaggattctttgggtctttcctaaaatgtttaaagtgaaaaataatctgccaggctcggtggctcacgcctgtaatcccagcactttgggaggccgaggtgggcgaatcacgaggttaggagttcgagaccagcctaacatggtgaaaccccgcctctattaaaaatacaaaaattagccgggcgtggtggcgtgcacctgtagtcccagctactcaggaggcttaggcaggtggatcacttgaacccgggaggcggagtttgcagtgagttgagatcacgccactgcactccagcctgggcgacagagccagactccgtctcaaaaaaaaaaaaaaaaattcctatggactaagaatgacaggggccttcctaaaaaactgtttttccttgccgggcgcggtggctcatgcctgtaatcccagcactttgggaggctgaggcgggcggatcactaggtcaggagatcaagaccatcctggctaacactgtgaaaccccgtctctactaaaaatacaaaaaattagccgggcgtggtggcgggcgcctgtagtcccagctactcggaaggctgaggcaggagaatggcgtgaacccgggaggcggagcttgcagtgggcggagatcgtgccactgcactccagcctgggcgacagagcaagactccgtctcaaaacaaaaacaaaaacttttttccctagcaaaaatataggatcaatattaactggaaaccagtggggccagatgtatttcagactttggaatgacacaccaagcaaggagtggggcagcgccgggtagccaaacctattgacatttctgcatcaaagtgtatgaacattcgtaccaagtcaaatgaatagcctcactttggatgttttgccaccaagtttggttttttaaaaaagaagtctgggccgggcacggtggctcacgtctgtaatcccaacaatttgggaggccgaggtgggtggatcacctgaggtaaggagttcgagaccagcttgaccaatatggtgaaaccccgtctctactaaaaatacaaaaattagccgggtgtgttggcaggcgcctgtagtcccaactactcaggaggctgagacagaagaatcacttgaacccgggaaggagaagttgcagtgagccgagactgagtcactgcactccatcctgggtaaaagagtgagactccgtctcaaaaaaaagagtctggctttagagtttttttgttttttgttttttgtttttaaagagggaatcttgctcttgtcacgcaggctggagtgcaatggcgcaatcgtggctcactgcaatctccgcctcctgggttcaaacaattctcctgcctcagcctccccagta

SEQ ID NO: 1244971 - DNA, 4001 bp, Homo sapiens
ccttcgccgtccccgcccgcacaggcgggcaagcagccggagagaagcggcctagcctgccccccgcccccgagccacccaccccggccagaggcgccgccaccgcccagccaccccgacgcgcacggaggagcccggcacagaggcgcgaccgcggcgggaaccgccgcctcctcccccgagcctgcggcccagccccgccggcgcccccgccccggcctccggggagccgagccaaggagagggcgggaggacggcggccgggaggcgggggcgcagcgctcaccggccccgccgccccctccggcggccggggagaactgcgcctgccggctccgagaagcgcgggctcctccgccagcggccggggctcggctcaggcctcgcttcctgccttcccctcccccggctctcggcgtcctcccaagtgccctggtctgctcgcgcccggtcgcctgctcggtggtcgcttcgggtccccgctgggcgcccaccgcaccccgcggttcgctcccgccgtccggccccgaccccagcgcgcgtcctcagccgcctcggttacccggcgcagcgcggcctccgggcttcccgctccagcggctccctccctggctctgagtggcggcgccctcccccgctcggccgggcacagccgcagctccctcccgcggcggcagcggctcctcctccgggcgaggcggcggcgctggggcggcggctgctgctgctgtggcggcggcggcggcggcggcggctgtggctgctgcctgctgctcctcgcggcgaaaagcacaaagcacagcgccctccgcctgcaggcagcccgcccgccgccggccccggcctcagctcgcacaccccccgccgccgccgcagcctcagccgccggagcggggaggaggagggagaagggaggaggaggagcgggagggggggcgggagaagcggggcagcgagcgcgtccttccccgtagagcgcacaccgacccccggggagcgagcgccagcccgcccgcctcgccggctccgctccctcccacagcctgcccgggcgggctccgcggggggcagctgggaggaggggcgggagctggggggacccgggcggccgaggcggagggaaggaaggaggggaggggggtggtggtggtggtgctggcggcggcggcggctgctgctgctgctgctgccgccgccggggaagggggggggggccggggcagggagacacgcagccgcccggatggcggcggggctcggagcctaggcgggcgggcgggcgccgagagcgacctcgccagacccgcgggggaactagcaggcttcgccggcgagggagggccgaggtgcggccgcggagagggtgcccggaggtgcccccggcgtccggggaggctcggggggcgcccacagccctgctccggagctctcccccaagttctcccagctcagactagggcttccaggccagctctctcccgcctcccggagcgagcggtccgcgcccaccctcatcccccggagcgtggccgctggtttggggcgcacgcacgccgatcgcggcgtccagcttcggtgcctacctcgcggtcctctccttgccgaacggcacatacgaaacttaaaaaaaaacccgaaaactaaaacctctgcattaaaaaaaaaaaatccccgttgctctttacaccccggaaacggcaagggaacgacgggctccggcggaggggccgctgtgggagccggttcaatccagcccggcatggttctccaggcctgcccgggcgcatgaagatcggcgccgccgccactcgtagcaacccctctcccccgaaatccgcggctcccgggctcacttaccgagcgtgtggatgggagcgcaggccgggggcacctgggagcacggcgggccgaacagtcgagccgcagctccgctgcagccgacgccggggcagcgagtcgccagacaaagcccgagatggcgaagcggagcgacggctaatggcgagccccacgcgccgcgctccgcccgccccgctccgcccgcccgcccgcccgcctcggcgcagcgcagcgccgctccgagcgcttgcccgtcagagccgcctcggcgccgccgcctcccgggccaccccggcctcgcctggcccctccgcctcctccgggcggctcagcctcaccccttccctcccactgctctaggggttgcacaaaaaaaattttttttttttaaagaaaaatggttttcgtcttttttttttctttttgcagggcgggcatgttgagacttttggatatttctgcccccagctcgcactcacctgcggagccgccgggagggctaggggtgggggcgcgcggggctggagccggcgagcgcgggttgaaagccagccaagctctgcagcgcccgacccgggcgtgtacgccgccgccagtccccgcagagaaatcgtcctcctaccccgcctccatcgctctgcgtttctcttccaatcagccggtcgcttggtggctcctccattctccggccaagcccagctgcctagagcgagctccactcctccatctgttcgccggggtcctcgctcccctgccggggccggcgagacggcgtgaggccggagggggatttgcaaggaaacctgcctgcttcccgctcccattgctccatccccgctgcctcctgcctcctgcttctctcctgcgtctttccaactctcccctgtcgccactggtgtgtgtctgagtgtgtgcgcggttttttttttttaattgctctttgcttttgcaaccctgaagcaaaagggggggggggtagttacagggaaaaaaaaagcgagaaagaagctcttagatttgcaacacatcggaaaaccgggggagcaccccgccttatccgatctccatgctccgcaagggccttccgggttttaggacaagcttctcaatgtcccgtttcgctgggtttaggatccgaggagtccgagcaaaaagttctccccctgggtcgtagtgacgggtgtcggggtgggagttgcggggatttttcaagaagcagcagctaccccggcgtcggtcactgggccggggtaggggaaagagcaaaatcccagtgggtttgcgcgagggatcttctagggtcgaggcgggtgtggggggagttggaaccgggagacaccgcttggcgcatctctccctcggtctctacctcctgtcctatgccagctccccctttaatttttttcctctcctttaatctaatttcttccaactccacctttgttgttaccggcgtcacacccggaccagccaatccccgccacgcaatcagcttgtcaaaaagcctcggccatccctaggaaagcaggccgcaggcgctgccccccggcggcggcgggcagccgcgaggggagcccagcacccggttctcgctgccccgggtggcagcggggcagcctccgacaagacgtcccttggttcactgtcctgcaggccggggatgaaaggcctggacagggtccaccacccactctcccactgccacggccgtggttgactgtctttgcctccccttttcagaggaaaggttatcaggacaggacgcagggagccagaagaccatctgaaggaagcctgcttccaacgggcccagcctccagccaccgctcctggggcagcgccattgctcctggctctcaggctgccagtctcccacaccgacgctctactgcccgcatctcggccagctgggtcacccagcccctttcgactctcccctggcacgcagccttctccttcactcggcctgcctcgctgctgctgtaattcctcttgtctcctgggagaaatgagattgctttcccaggacttccacatcccacttctatcaggtttcaccaacagggaggaagccctgtcaagatctggtgtgtcctgttttttttttttttttttcccagagggcactggcatgtaggagaagcggatttaccactagtaga

SEQ ID NO: 1244972 - DNA, 4001 bp, Homo sapiens
atccccatctagactggatcactgctgaatgaggcagagatctagttgagtacatatatcccatggcttggggcctaaaaccaccaaaacagcccttttctccacctgcctctacaaaagcctcatggtcttcctaaaaagcctgagaagccttccccaaccccttcctgacccttcctctacactcatccttcctcccattccaggacactgggctgggacacacttcaggctgaatgggaaccccagaaggcaggcctcctctaacacagagggtgagggacagggagagaggggaggtgagccactccaggccaaataatttggattcagccaaaccccaagtgtgggagatgcttgattcataaatactcaaggcactttctcccccagttcagtgtatgcagactgaaaaagcccttgaagaagggagtgagccccgcagccacgagggaaagagggtttaagtttcagagggccgggggtggatgcccctaccttggcctttgggggcggccatttccaggtctgtggggcagtcggcttctccgttcatcctccagctgtccagccacctcctcggtcgtgctggccgggcaacccggggtcaaagccacctcaccctttggaagacataccagttcccactcaggaaggctgagaggtgaacgactaacgactttctaaccgcccagagtagaagggggcaggtccacactctgagagactcagccatgaccttattagacttaaggggtctatgggaatgggagtgcgcccctcctcttcctcgtgaccccctcccccagcccctgcagcccggctccgcggcgcgcgccctcccctggccacgcgagggcctgctcctagctcccgcgtgcagcgagcgcccgccctccgccccgcttcccaaccccagccaaaaaaaaaaaaaaagaaaaaatctcctcctcctcggagcgcccgccccggggaggccccaggctggagggcgggggaagaggaagggcgggtaaagggcgcgcgcggccacggaagcgggcacgcgccccagtctcctcctcccgcctccccccggccggttccccccgcctccgcaacccggcggggacccggacgcagcgcagccgccgccagccccggagcggagcggccgcaccgcccccggggaccggatccggattcccgccgctcccccctcccgggctcccttcgccgtccccgcccgcacaggcgggcaagcagccggagagaagcggcctagcctgccccccgcccccgagccacccaccccggccagaggcgccgccaccgcccagccaccccgacgcgcacggaggagcccggcacagaggcgcgaccgcggcgggaaccgccgcctcctcccccgagcctgcggcccagccccgccggcgcccccgccccggcctccggggagccgagccaaggagagggcgggaggacggcggccgggaggcgggggcgcagcgctcaccggccccgccgccccctccggcggccggggagaactgcgcctgccggctccgagaagcgcgggctcctccgccagcggccggggctcggctcaggcctcgcttcctgccttcccctcccccggctctcggcgtcctcccaagtgccctggtctgctcgcgcccggtcgcctgctcggtggtcgcttcgggtccccgctgggcgcccaccgcaccccgcggttcgctcccgccgtccggccccgaccccagcgcgcgtcctcagccgcctcggttacccggcgcagcgcggcctccgggcttcccgctccagcggctccctccctggctctgagtggcggcgccctcccccgctcggccgggcacagccgcagctccctcccgcggcggcagcggctcctcctccgggcgaggcggcggcgctggggcggcggctgctgctgctgtggcggcggcggcggcggcggcggctgtggctgctgcctgctgctcctcgcggcgaaaagcacaaagcacagcgccctccgcctgcaggcagcccgcccgccgccggccccggcctcagctcgcacaccccccgccgccgccgcagcctcagccgccggagcggggaggaggagggagaagggaggaggaggagcgggagggggggcgggagaagcggggcagcgagcgcgtccttccccgtagagcgcacaccgacccccggggagcgagcgccagcccgcccgcctcgccggctccgctccctcccacagcctgcccgggcgggctccgcggggggcagctgggaggaggggcgggagctggggggacccgggcggccgaggcggagggaaggaaggaggggaggggggtggtggtggtggtgctggcggcggcggcggctgctgctgctgctgctgccgccgccggggaagggggggggggccggggcagggagacacgcagccgcccggatggcggcggggctcggagcctaggcgggcgggcgggcgccgagagcgacctcgccagacccgcgggggaactagcaggcttcgccggcgagggagggccgaggtgcggccgcggagagggtgcccggaggtgcccccggcgtccggggaggctcggggggcgcccacagccctgctccggagctctcccccaagttctcccagctcagactagggcttccaggccagctctctcccgcctcccggagcgagcggtccgcgcccaccctcatcccccggagcgtggccgctggtttggggcgcacgcacgccgatcgcggcgtccagcttcggtgcctacctcgcggtcctctccttgccgaacggcacatacgaaacttaaaaaaaaacccgaaaactaaaacctctgcattaaaaaaaaaaaatccccgttgctctttacaccccggaaacggcaagggaacgacgggctccggcggaggggccgctgtgggagccggttcaatccagcccggcatggttctccaggcctgcccgggcgcatgaagatcggcgccgccgccactcgtagcaacccctctcccccgaaatccgcggctcccgggctcacttaccgagcgtgtggatgggagcgcaggccgggggcacctgggagcacggcgggccgaacagtcgagccgcagctccgctgcagccgacgccggggcagcgagtcgccagacaaagcccgagatggcgaagcggagcgacggctaatggcgagccccacgcgccgcgctccgcccgccccgctccgcccgcccgcccgcccgcctcggcgcagcgcagcgccgctccgagcgcttgcccgtcagagccgcctcggcgccgccgcctcccgggccaccccggcctcgcctggcccctccgcctcctccgggcggctcagcctcaccccttccctcccactgctctaggggttgcacaaaaaaaattttttttttttaaagaaaaatggttttcgtcttttttttttctttttgcagggcgggcatgttgagacttttggatatttctgcccccagctcgcactcacctgcggagccgccgggagggctaggggtgggggcgcgcggggctggagccggcgagcgcgggttgaaagccagccaagctctgcagcgcccgacccgggcgtgtacgccgccgccagtccccgcagagaaatcgtcctcctaccccgcctccatcgctctgcgtttctcttccaatcagccggtcgcttggtggctcctccattctccggccaagcccagctgcctagagcgagctccactcctccatctgttcgccggggtcctcgctcccctgccggggccggcgagacggcgtgaggccggagggggatttgcaaggaaacctgcctgcttcccgctcccattgctccatccccgctgcctcctgcctcctgcttctctcctgcgtctttccaactctcccctgtcgccactggtgtgtgtctgagtgtgtgcgcggttttttttttttaattgctctttgcttttgcaac

SEQ ID NO: 1244973 - DNA, 4001 bp, Homo sapiens
gcattggggaaaaatggaattattttcaataattggaaagtgatttcataaattatagtgcaatatgccaagatcctacaacacaacttctaaaaataacaaatatgaagtccacatggtaactaacattaaatgaaaaaagaacagttcacaaccacttcaaagttatggacaaatgtagaaataaacttggaaggtgatacagttaattgaaaagttatttgttagcttggaaggattacaccgtgcttgagttctaaattattttcctaataaatgaaaagtaggccgggagccgtggctcacacctgtaatcccagcactttgggaggctgaggcgggcagatcggatcacctgaggtcaggagttcaagaccacactggccaacgtggtgaaaccccatctctactaaaaatacaaaaaaaaaaaaattaggcgggcgtggtggcgggcacctgtaatcccagctactcaggaggctgaggcaggagaatcgcttgagcccgggaggcagcggttgcagtgagcggagatctcgccacggcactccagcctcggcgacaaagcgagactctgtctcaaaaataaataaataaataaataagaaaagtagcattacttcatccgataagcaacaaagtcagcccacttttaacacgccccttgggcaacaatcagaactgccacaccctttaagattatttccactcccgatatgcctttccaaattctttagattctaaaacctcgtgtaactgtacttgcgaaacagcaaaggcttaaaacaatttttttaaggcttaaaggtgatttcatgttcaaggtgattgaaaatgaattgtccaaccacctttctcacccggagctcgtctatctgactccgggggggaaaacggtacgggggctcttcggggtgcaggggaccagtgctgggaaaggtgacacctcccaggctgcgaaagcctgaggctaatgggacatccgcccattttccgctgggtctgtaattatcaacctcaaaagtgaccagccctgggcacggggaaaaaaaccaaaggtccattcacgcccaaccctcgagtctgcacggtgcagtaccgtctattttgggtccagggtaacctgggtgcaaacgctcctgcgggcggaccgcggggtgggccccgggcacacaggaggatcagcagcagccggtcggtaggcggagcgctgccagaggcttgggcctcacaacaaccctcacaggaccaaaacaaacggcgagacgggctgcgcgcacaatagcatacccgggcggctagccgagtcgggggtctcggctcgcggctgcgccaagtttcagaaccacctagccccgtgcctgccgcccggggcccggcctcgccccggccggcgctcacctggcggtgccgcccccggaagaccacggcgaaggccccgtgtcccacgagatccctcttgctgtactcgaagtcacccaccacctccatggccgcgcccccggggcacacagcggacgggcgggcggcgcagtgcggcgcaggtatcagcaccgcggctccgcgggcccggagcgcgccagcgtgcggcgggtctggggcagccgcagccccgggcccgggcggactctcatgccgagagaccggagcggaaactggggaagctgccgcgcggagccagggtcagcgaggcccggcccggcccctgccgctcatggcccggcctgccgccggccgctggctgtctggcgaagcggcctcggcgctgccgggccaggggtgccgtcaccgtcactgtgcgcgcccagagccgcacacgcgctctgaggcagtgaggggcccggtactctccatccccagctcgtcgggcctcctcggccctccccgctcggggcgctgctgcgacggcgacggccgccgccctagaacccgcaccgccgcggccccgcgcttccccgcctcgcggcggcgcccaacgccctcgcgcgcgctacccgctcccgcgcgactggctgccctccgcgacgtccgcgcgccttgaaggccgcagcgccagccggctccctccgccggggaaaggagtgcggccagggcttggcgcccgcagctgggcagatcctcggccgctcctgaggcggggacgaagggcgcgacccgctgcggccacagcgggttacgggctgcgggctccgttctgggcctggggagcagattcgagccgaccacgccccgggctccaggccgctgggaggcggacttcagagaagcgggtcttgaaccccagctgcaggcaggacgggattatctgcgcagggtagacccccagattcctgccagagcaaaggagcaactgctactccaggctttgcccgcgctctggaaaaccagagttcacgctgccaaactgccagccttcggacgcctctcggggtttactcgcttaggatccctagagggacggtgacaggcgggattctgcaccttttgggggtcccttgactgcgagaagctggtgacagctcagggccctcttcgcagagaatcgtttctgcacaccgactcagaatcgcacacgttttcaaggttctcctgggagctcctagtgtcaggctagtttgacctcgggcttacttcacatggccgaagggagctttcttttctacctgattgttaaagctgtccaagtgacaaggaacagattgtcaggtttcccgcaaagaagtgtcttatgaaaccatttaataaacaatatgcttgaaactaccatggaatacgcaggctccacacttgagtgtgtgttcggttgtatagggtatgtgcttttggggtctgtcaccacctcgactgccactgcctgtccctgcaagctgatctctgaaccatgacagagtcagctccaggattctgagagaacgctccttcctcacacgctcaaaacgtagggccttgagtttctgcttctgctactgtgcacgcttacgttatcctgtccttacttacatctggcccaggtggttgtgttagacactgaaaatctggagccttcaaaagttgacagcaacttaagcaagtttgcacatacacccaaaaatggatggagatgattccttacctcactgaaagattctctacagtctatttttttgtttacttttttttttttttttttttttgagacagaatcttactctgtcacccaggctggagtgcggtagcacaatcttggttcactgcaacctctgcctcccaagtgcaagtgattctgctgcctgagcctcccaagcagctagaattacaggcacgcaccaccacgcccagctaatttttgtatcttagtagagatggggtttcaccatgttggccaggctggtctcaaactcccaacttcaagggatcagcctgtctcggcctctcaaagtgctgggattacaggcgtgagccaccacgcccggcctgttttttgttttgagacagagtcttgctctgttgcccaggctggagtgcaatggcatgatctcggcccactgcagcctccgcctcctgggttcaagtgattctcctgcctcagcctcccaagtatctgggattgcagacctgcaccaccatgcccggctaatttttttttttttagtagaggtggggtttcaccatgttggctaggctggtctcaaaactcccaacttcaagcgatccgcccacttcggcctcccaaagtgctgggattataggtgtgagccacctcacctagccacatgaaggttttttgtttgtttgtttgtttgttttgagacggagtcttgctctgtcgcccagactggagtgcagtggcacgatctcagctcactgcaagctctgcctcccgggttcacgccattctcctgcctcagcctccggagtaactgggactacaggcacccgccaccacgcccggttaattttttgtatgtttttagtagagacggggtttcaccgtgttagccaggacagtctccatctcctga

SEQ ID NO: 1244974 - DNA, 4001 bp, Homo sapiens
gaacagcaaacctcagacctgcatgattagggtcagaagagaccaggcaaggggtgccagggtggaaatccctggaactctgttctcaattcctgcacaggaaggggttctcatgaagccctttcctctacttacccttcacagatgccccatctctaagggctatgaatttcctccaaattaggagacaaatggtggtacatgagctggaagctccctctagttgcaaaataaacccccaaagttactcaggactcagtcagtctgagaaagttctgccccagagctaagctgaatcctaaatgctgctattgcaaattgtagcccaactggcttcaacatcagcctggtccagcctccctctctccattgatgcctgcttgggcaagggagctcagtactctgggggcccagctaagaatggctgctgcctagctcagtaaggagagaggaattggcccccagggacccaggagcacaggctcaaggctgtctcccctccacagctctgtctgggagtccggtgttctgctgctttggaagctctagggctcaggtccactccaatacatgccccccatacccacagagaggccccccccaacagttattctcacaaagggggccagggcaggttgctggtgaatgtggccaaggtggagagccactgtctctccatgcacctttcatcctttgaggctcatccaaagcctctgctatgaggtttcctagccctcgttccctgcctatgatgaccccctcccctgccctgaaagccaagttgtttgactccaggcagcagctatgagcagccctgtagggcccaaaaatactactgatcaaagagcccaatgtacacagcatgcatagatgccaggcactgtacagaatcagaggacttatcttcacaataatcttacgagaaaggtatcattatccccattttacagatgaaaagacatgctcagagaggtgaggttacttgcccaaggtcacacagacaattatatggcagagttggaactccaacccaggcagtccagctcagaaactcttaaccacagtggagaccaagcctcccttgatgacagagcccccagaagaggacaggtgctagtccaggcttggagggacattatgccactccccatgagaggaaccacagccaacacactaaagctgcctgctcagtttctttcccggggaagaaaatggcccaagtcttcctggaggatcagggtgagggtattaatggttggggagacatgaagagtctgaatgcctcccaagtaactcagcctccacctagcctccagcgtgggggctgaggacaggctgcactcagcccctctcttcattagtgcagggacgggcctcaaagcgctctggagactccacagctacagggctatggttgcagctgctgccgcacgtacctccacgctgggaaaaggggacgggcccctggaaaaggaaggaataaatctcgaaagggagaagaaggaggcacagagagagatcaagggaagggggtacacagagatctcagacctggcggcagaagggagagcaggggacacaggagaggggactcggtgggggaggggaggcgggaaagggggcgggggccagggcttggcgcgccgggagggcccctcgcaccctctccccttcccacccgcgggcggcgctccctcgcgggtgctcaccaccggtgatccgctgcagccccagcacgtcctccggcccgatcggctgcttcctctgcagcggccccggcctgggccctgggcctgcgtccggctccgactcggacccagattcggattccgcaggcggctgtggtatgggggccacgctctggcccgagggccccggagcggactccgtcgccgtcccggccccaccgccgcccttcttcaccttcatggccttgcggggccgaggctcgcctgctgctgccgccgctgcctgcgccggctggagccgggggaagtgggagcatccgcagccccgcccccggccggggccccaggtactgccccgccccggccccgcccctggggtgggccctgcgctgatcccgcccgccgcccggcccaaccctcccgaaatgcgacgggcgcgggggatgggagtcggggtatcctgccctgggcttcattctgtttttctaacactttcttgtactggtactagtggggtcctgactacctctccgcttactcattgtgttccagcctttctgcccgtgagttccaggctcagggtctctgcttggatggtcttccccagatggcctcttttctcctagtcacagctcaaatgtcatctgctcaaagggcctccctcacacccagtctgaagtccttccccctcagtcaccatctgaccagcctgtttttgtctttctaatgcattatgtgaaattatttttatttgtccgctgactcttccccctgaaagctcagctctgtgaaagcactggtcctgcctactttgttctctgtaggacccctgtacctagcagaaggctccctgcagctggtgctcaagactttttttttttttttttttttttttttgacctgatgaattagtatctcaggtaaaaagcagatgctaacagccttgggcaatccagctaggaagggcacatggccacgtggaagcaaagtggacctgtgggcacaggaggacaaacaccaggaaactgttacttacgcgtgaatgcagaaagagtagagctcagactttgtatcattccaattcatattcagccagtgtttattaagagcctactacacgccagacactttacatgctgatcacatttactcctcacaaccatcttgtaagggagacatcatcagtgccatttgaacaaatgaaaaactgaggctcagagagattcaataccttatccaaagctctccagacaataagtgcaaaaacaaggatttgaattcaggactgtttgattccaaatctggaactttctggaacctctgacacacacacacacacacacacacacacacacacacagcaccatgtcctgagctgctgcctcctggactcccgccagactgcacctgacagacaaagccaactaggagggaggggagtgagggagaaggtcccacaggtgaccaatgcctggccccttcatgacagcaggggctagggctgtcccacagggactagagagaggtgtggaaggcagggactttcccataatgctccctcctctcagtgcacaagtgtgctatgttgagaaatggggcaaaagaacaaacagtccttgccacagagggagacaggcagcagccttatcaaacaagataaggagacccggatgatgtgccttttgaggcccctggtggtggaggaggattgagccaggtgaatgggaaaggaagaaaagatgaacccatcttggagtgttgtactttggttgctggagagccaacagtggagactggagacaaatatttaagtcattccggcaggccccatgtacgtgcctcacaatctaacaccgcccaccttggccagaaaggaaggcttcctatggaggtgctgccctgctcagtctgtcttctcaggctttctccaggacttgcgggtctccaggaagatcttgaccagggacaggaggatgggcacagccataggcaggaagagtgggatgtagatggcaaacttctggtcatcagggaaataaaggaggtggaggagtgacgggtcaaagaaggcaagctcagaggatgtcacagcttcctggctggcgacaaaggcagatgccaggtgcccagacgccaactcttctgccgacttctggacggcagctacagccttgtacacctaggaaggagaagggacaagagggtataccagtaagtcctaggcattggtggaaagggtgctgggccttactgtgccttccatctaccaaggaagatgcctggagttcatccaggatctatggaagtctttct

SEQ ID NO: 1244975 - DNA, 4001 bp, Homo sapiens
aaggggaccagcagcatggggggccagcgctacagggcttcttggaagtgggtgctcccgccaagagtcctgggccaggctgtgatgggagaggaaggagccaggaagaagccccttggggaccccaccccatgctcaccactgacatctttgcccagaatgcccttggcctgtttcactgttgccttcagacaaaatattggcttctggagggacaggagggatggcctgagtccctgagggggctgggcttcccaggcccctccttgcccagggggaccctggccccaggttacctcaagctccctgacccgctgcagtgtctgctggtgctcctcgggctccacgtggaaggcctggtggggaggcaggcgggtgggtggctgggggcaccagacagggcagctgcaggaaggggggtggggtgggagccgggctcacctcctgcaggtatcgcagcagctcagaggcctccgtcacatggttgggctcaggatgacccaggcggtgcaagacagtgtagagtgcgtcctcgtagagcagggcccgctaagacacacggggtcaccttggggaccccaccagccacccctggcaccaacacctctcgccatgggcaggacaagggcggcttgtgcagcggagggagttgagacccaggagtcccctccccaccgcaagttgcttgctgccatcagcgtcggccggcaggaggacacacagccgccctccccacctctctgcaccccagcactctgactcttacctgctcgggggagaagtggtgggatggaggctggatctgcagagcaaggtggaaaggcagtgtcccgggaggcccagagcaggctcagatggacaggaatggctcctctgaggcctgatccaggccaagggtatgggggccccagcaccccggcctccagccccagtgatgccccgcacctgttcccccagcaggcctcctggaggtccgtccctgggcccgccgtggctgaggtccatgggtgcccagcagcgcgagccctccgcacccgcaccccacctccctcccttccccagaggaaacagctctgcttatcagtggcggctgctcctcacccagcagcggaagtgaggctcggcagcggaggtgaggggggtgccacgtcggcctgggggtctgctgctccccgaacagctcaccccacagcagggacacccccacctaatggagtcggctcttctgaagctggaggagtaggggatggggtcaggccaaccgggagggaggggttctgagagcctcagaccacagggcctgaggcccacagtggcccagagtccatctggcagcccctgctctgctggcccagggggctctccccagggtggagtaggcaggggagggtcgctggtccccagtcccagccttcgagaggtggggccagacagcagggcacccgtacccgagaccacagtgctccccaaggccagctctctccccagtgaggtcactcctacctccggggccatttggggcgggggatcctgtagatctctgactctgcggcgccttatcttgatggcctggcgcaagaagggagggcgctgctgcggatgggagaggagtgtcgccatggtggccttctctgcccttccctgtccgctggtgctgggtgaagacagcgaagccacaggattatgcaaagagcctggggctgccaccctctgtcaggggaagttttagggagggtggctgggagggacggaagggtgagggtttcaccgcttcggagaggcagtctcccaggccccctgcaccttccccagctgggatccctacaggaccctcctctggctggagcagaaggtggaccccgtgggcaggcctggccccgccccaccctcctacagaggccctgggaaggggacaacgctctcagcagggggcgggggggcccagaacaggcgggcagcatcctgccccatccatgtgctgtgcccaggctgggctgaaccctgagagaagctgacctgggcccgggggggttctcaccccacttcctcgagtgcgtccagacgtggggcggggcggggtggggtggggtgtggtggcgcccagggtgggggctcccaagaggcgtctccctggaggacagccagttgctcagcctgcctggccccacaggtgacattccttggagatgacggggccaagctgtgctgggcagggacagccctgtgcccctgcccccaccttggcagtcaggacagtgctcccttcagacacccttgaagggggcttagccaagtcccagagagctctgggccaggctggccaggaggaggaggcagaggggctgctgcccgatctctcctgaggacagacttggctcccgggggacaggaaaatgcgcctcagcatggggctttcctagagctctgtggcctgcccaccctgtgcccagtgctgggctgggggacttgcgggcgtgtgggcctggtcacggcctttggccatttcccaccctcctgtcccttcaagttcacagcagggcacgtgacgtgggtggtggcaagccggcttggctacctcagtgtccctgtcacaggtcctgacgtgctccagggctgactcggcctcctccctccagcaaccaggacttaggccagggctgccattcctcgaggagccagcaggggacaaggtggcagccccaactcctcccttcaaggccaactctgggccacatccacctctgtcccagccaggccctggggactcagtgggggagggacacagctgctgagcgacaaccgttaagaaccagctccagaggccagagctgtcttggggaccagacaggctggctgggccgtgagaatggggatcctcccatgggagggaaccgtcccagaagtctccagggccctcagcggccagacggctctccttccggaagagacccccgggtcaccacacgcagagccagaaagggtccagttatttcatttttactatttcacattttcagcaaacaaatcgaggtgcaaacagggtttatttcacattaatatattaactggattttttgtcaaataaatagggaattctctttaaataaccatctcctcacttcatggccagtccagggacaaacaagagtgaatgttagcgcatccaggggcacaaagcttaaggggaagaagcaggctggggggctggtggcaggtcccggccagcacacagggtcaggggcccttgttcccggccccacccagcagccaccaagtggacagacatgcattctctggttccagtcaggaagctccttctagaaggaagtgagaggtgagggaaagcaaattccagaaacaccagcaaaaggcagaagggcttcctcccagcctcggcggccctgccccgacgccacccaagccctggaagctcattttacagcttcaaaagtcacacagggtggcaacaacatgacccaggacagggaagggaaggaagggtggcgggggctgcagctggaccctggctgagtggaatgcgggcgcggtggccttctgagaccagcacagaccagcagagggaatgtgagcagggtctggcagggcccgggaagacacctggctggtctgaagtggctcatgaggctgagtgtagcagtgggtgccagactgagggagctggactgcggtggaggaggtggccagagagtcccttcgaggggagaagctgagagtgaaacaggaacaggggatgctccgtgctcccagaagagccccagacggtgagggaggtacgctgggcagcactgtgggctccgggctggcatgggaagctgggcggcacctctcccgaggccgggggccctaatgtcccacaatgctagttcctggtaattgtttatgatcagacctggagggagaacaaggcgccccctcccctccccaagccccagcacagccccgatgggaggggtagggtagagagatgagggtgggaggca

SEQ ID NO: 1244976 - DNA, 4001 bp, Homo sapiens
acgctccagtctctgctacaggatccctgccaggggcttaaccaatcggtgcttgcatacctccagcagtggggagctccctcctcctcaagacagccaggcgggcctggcgcagtggctgatgcctgtaatcccaacactttgggaggccaaggtaggcagatcacaaggtcaggagttcgagaccagcctggccaacatggcgaaaccttgtctctactaaaaatacaaaaattagctgggcgtggtggcagacgcctataatcccggctacttggaaggctgagacaggagaattgcttgaatccgggaggcagaggttgcagtgagttgagatcatgccattgcactccagtctgggcaacagagcaagactccatctcaaaaaaacaaaacaaaacaaaacccaaaaaacaaaacaaaacaaacaacaacaacaacaaaagacagccaggcagcttaatcagaaaacatttccctctccctgcctgaaatgtgttccctgtaacattgcccagccctggaacccttgagatgaaatccaatccttcttccttgtgacagccttttaggaatttgaaggcagctctctgacccacctgggagttgccttttctgggctaaatattgcagcttccctcaactgctcttcacaggatatgtttccagtcccttctccagcttgttctctcccttctgaagtcactccatactcactgtttcttcccccaaaatggtaactagattaaaacccaggccatgcagaggagaatgtgacagggcaagcttggaggtgggaggggctcacctctggaggcatctgaagctgcctggacgtagctctcctgaggaaaggggaaggagaaggagactcggttaatgtgggcccaatgcagagatggccagagagtgtccccacagtgtggggagagggtttcctgggggagctgcaggctgtcagaggcccagggcatgctcctcacaggcatggcaaagaggacaggctttgacatcaggcaaacccaggtttgaatctcggctctgctactacttgggagagcttgggcaagttaatgaatgaagccctctggatcccgagtttcttacctgcgatagggggaggacaacaacagctatctcacgggccattagtaagatgccatgaataacacatgaaagcacctggcattgggctgattctgctctggatgaatttctgtctttccggggcatgggtcagggggttggaggcacccttctccaaccccaggcatccaggagagtcggctgggatgaagggcaatttctatcagggtgaaggggctgccactcagccccaaagcccctctgcctcactcccaccctgtgccctgccctgccccagaccgttttcaggccacaggctgcccggttccgataaagcgtggccagcagggccttgtccttggtcagcttcagggcctggctgtagctatttgtggcggccttgtagtcctggagctggaaatgccggtttccttcctccttcagctgtaccgcttccacctctgccatctgctgggacaggagaagctctgtctggtcagcccctcactgcagacccagggctgggctcctggcctgaggtccggagctccagggtcccctcacaccagagaggatggtggggattctgcctggaagggacccacccccagaacccccaaatctattgccccatgaggacattatagcatttgctcagagcttggcccaagttgagagtccctgtgcctcactctctgtccctcccagcctgagcaggcgaagctgcttagtttgtgccaaaggcctgaactctcattgcaggtcttagaagtttgccgtctccctccccagtccagggcacaccccaggcccatgctcactttttcagcaaggacgatgctttcgatctgccctcttgtgatgctgctcccctgagcactcctgtgtcaacctccagccagccagcctcagtctgcccctcccagcccccacccaagagattttcttgcctcagccagtggctctggaccatatttggccacaggggcaggtgcccctggagtctgtcactgatactcagggccctccccctccccagactggtcagtcatgaccacgtggaggtgctgaccagcctccgcccaagcaccccactctgggttatcctggtggggggcttaggcactaacattccaaagagtgacagaaagatccagaagggacaggaaccccccagcagactccctccctgggcacagctctaatgcacctctccacatctatcccagataaacagcttcctctccctcccctcaaccattgctatttttgggagcagagtgacagctgaggggctgacagactgggacacacagcagttgcccagatcccagaccaactggagagttccagaaatacctttctggagggagcggggaaggaacaggggaagaaagttccttcccttttccacttctgcgcaacacctcaacccaccctgctttcacctgttcaaaatgtctttgcttttcagaaagaccaacaggacttgctaactcagtttagtgtgagtgagtggttcgttagtttcggtccacatgcggtctcctgttcctccccctgtgtatagagtggatctattcagcctacctctcccatctgactgttagctcccagagagtgggctttgtgtatcccccatcaggctgagatctcttagggcaagggctgggtcagactgggaattcccccgagaccaagggtcctccccacccgactggaaactatcctgggacacactgaggctccctcctcagaagggggtcttcctgggacaagaactatgtattcaccattgcagaggggtctctcctgaggcaggaatgtttctccttagctaactgggagttcctgaagcaaatttatgacgttgtccccagttggacccagaactcttctgcatttcagtgccctcaagcctgggctgtgagcttcctcctggaaggcaaagacagcatcccatatagcttgtcccccaacccccttcctgcacaggttctggcacattcagtgtccgaagtgtgtttcctgaatggaatgaatggatggatgaatgaatgaatgaatgaatggtgtcttcatgatgatgatttcctccactcacctctcatccctctcccctccaccccacacatatcttcaaacttatctggccagagctgagaaagacactgaagaaaatcccaggtggaatcattcatactagattctactcgcagacctgtgaccttggacacacagctatatgaccttggacaagttgtagcgccctgctggacacaaagcccagccctaacacatgtttgttgaatgagcaaataaatgaatgaatagatggatgaattccctgccttcatgttatcacaagccctgggcccttttgtggggcaagctctctgcagcaatgaggtaataggataaaggatcctgacattggcagagacctgcggttctgtgactttaggtccaagggatcttatattcaaatgctgattcagtaattcattccacaagcatttcttaaacatctttttgttgttgttgttgttgttgtttgagacagagtcttgctctgttgcccaggctggagtgcagtggcacgatctcggctcactgcaacctccaccttctgggttcaagagattctcctgcctcagcctcatgagtagctgggattacagacatccaccaccatgcctggctaatttctgtatttttagtagagatggagtttcaccatgttggccaggctgatcttgaacccctgacctcgtgatccacctgcctaggcctctcaaagtgctgggattacaggcgtgagccaccgcgcctggcccacatttcttaaacatttattatgtgtgaggaactgtgaagcatagaacactggtgaggacaaggatttgtgtctatgt

SEQ ID NO: 1244977 - DNA, 4001 bp, Homo sapiens
tgtcgctcaggctggagtgcagtggcacgatctcggctcactgccacctccgcctcccgggttcaagcgattctcctgcctcagcctcctgagtagctgggattacaggcgcccgccagcacacccagctaattttttgtatttttagtagagacggggttttgccatattgggcaggctggtctcttcactcctgacctcatgcgatccgcctcggcctcccaaaatgctgtgattacaggcgtgagagctaccacgcccggcaggaaagacaggttttaaacaaatgagcatcaagaggacaaagactcagatactgacatttaatcagctgttcacttgtttcacctgtcaattccaaaataagaaagcctttctattacagattccatagtatgctcaatgacaacacaacacagaaacacaagttgctgaagccaagactctcgtgactcaaaatgtgtttattttgctaaaaacagtgatctgagcaaccagagattataaagaagttccaattacgtgaagtttccagattcgaaaatcaagactacaccattcaactcatcagtagtctttgagctaagaacatctcaccaaaatcaatggaaagactgcgaaagatctccagtaagaaaggaccaggaaagcaatgtccatatcagaaaaggaatggttaacgtgagtcagactgtagtcaagaagcttaaatgatttcagccaacaacaaagaatcccacaaagaaaccatacacttcctataaccaatgttccccaaccccagaacagtttcccaaggtcttctataacaagagttcctcctgactggtttgagttctttctactccaacagatgattctgttcttcgttcactgaacaacttaagagctgttcaaccccccaggttccaaaacctctcgcagctggggatccttttaaacatgcacatcactcaggagcccatggggatgagaggcattcacagagcatcagggaaaatggaaagcaacattttgcttaacaggagaaaccgccccttattcatctttctcccacatcacctaactctagggaatgcttaacgtggcttgaaggaaatgaagacagcgacctaaaagcacacagatgcaagacttccaggaagaggttttcccatcctgctggactcctgtagtgtcagtatttggggctccctctaatgctacatttctgctgagcctgcagacatacttggaacccatcaccttcgggctcccagactcaggctccgcacagcccgcgagggaaacggtcatgggcacgcacggacacgtttccatctttgcatgtttatctacgtcgactgtgaattcaagcaagtgtggccctcgtggacaacctacgagccttagggacacaaaaggcttcctgcgcaaactgcacggaatctcctgacaggacttcacgttaatcatcattcataggtgggttctggggctggaccccacggaactcctcttggttgtgtcttggacttctcactgccccaaaggagcctactactgtggttttatggtctgaggaacagttaggcctcgaaggcctggcctagggagagtgcactctgcatcccgagctcccgccttccccactcggcggccgggaccgagtttcccgccccacagcccgaccagaggttggtggcagttggaggcagttgggaccggccccagcaggttggaaccggtctgggccgggccggaggaggaagggggggaggaagaggccgcctcgcgctctccctgcgcgcgtgactcacgctggccgctgacgtcaggcgtgcgcgcgcggcgggggggggggggctctacgtacgtgtagtgctgcggtttctcgggctgtgcctgcagcacctgagcggtagcggccgggggcgccgaggaagctgcggagccgccgggcccggggcccttcgacatggtcttgtcttcctgcctcttcgccgctccccttttattattcagtctgcgcggtccgcgccgaggacccagtgcgcctgcgccgcgccacgagaacgtgaagaccccccacacggcagcaggggttgctgggagttgtggttctatgtccggctggaattttaccgtcggcagagggttgctggcaaagcacaggaccacaatacccagggatccttgctgctagtgtcccggatgctgagggcctgcgacggcttctgggaattgcagtccggtcgcatttctccttcttaccagcgcgttttcagtttcatagggaagcctttccatgaaactggagcgcctggaggagaaggggcccagagctagggaggccctagcgatttctgcgaaagagttccaagtataatttcactgccaacagtgtcataactactttgcctttatacttagtacagctaggttcggttctaatgccagctcagagcagtgctccaagcagggcttaagaatctgtgttgtcggttcttagttctgggccctgtgctgcaggcacctgcaatccgccagcaaccccttcatccctgcggcgggtctaacctaagaggcattgagaaagctttgctaaggaggaggtacaccgcacgctacagttcccgcgcctttgccgaggcgcttcatttacctttgccaaactcgacacctggaactccacgacttgtgtgctttctcagcctgacacctggcctgaccaacttgtttccagtacattaagggccaaggacgaatttaatctccgcctagaatagtctctgaggtacactgacaagttgccagtgttgagaagcatcacagggtccagaggaaaggcctgggtttgagtagggcgtgcccgtatttatccactctagttttcttgtctggacgtcagcctttttacttgggacattatctttcccctctctgcttcccaccagtcaagcaaagttcttcactttataaaataagccagatgccccagacctaggcatttgtttctgtgagttttagaatgttctccgtagatattttaaccgttgtcatttaatttggtttttcatattgaatctatttcaaatccactggttttgatttatattttcttagatgggattatattaacaaatgattatctcattaaagaaacacattccaaataaccttagggatgaagggtggtggggctaatggaaaatcgttaatgtttgagtgacacatacttattttatttagctccaagttccctcacatcagaagccacatcacagagttgagaaactggtttttcctaaacaggctaaatcgtttagccactaggggcgtttgaaaatgaaaaattacaaaaggacaaataaaagttgtagtatattgctttaatcctatgattaaacgcaagttacttggtttatgttagcctcacaatactcaagtgtgatctgactgaagaaatagagttcacagcactggattttaaataatagatgtatatcatgagcttcagaataagtgtgtactggtggagttgggagatgatatcatccaaactgcttaatttacaaaagaggaaaccgaaacccagagaagctaagtaacttgcacaaagttactcagcaagttggtaacaagaggaactaggacagtagcctacaagactacatcacattcactgttgggttttgtttgttttgttttcttctgctttttttcattgtataaacattttttattcttcctcatttcctgtgttgcttttcctccgttgtaccaatctggaaaaagtgaaacatacctgcatgactacgaagtaagagagacagccttttttttttttttttttttttttttttgaggcagagtcttgctctgttgcccaggctggagtgcagtggtgtgatttcggctcactgcaacctctgcctcccaggttcaagcaattctcctgcctcagcctcctgagtagctgggattacaggtgtgtgccaccacgcccacctgatttttgt

SEQ ID NO: 1244978 - DNA, 4001 bp, Homo sapiens
ggcctgggcggggaggggagtgtgggggcagccaggactggaggggaggaggagggaaatcagctgcccgtgctccgaagccctcccttccctaggttgccccctctttggtatccctgcaaggctggctcacttgagcctgtccagggacccccgacagcccccacaagcacccttcacaccagacgggtgtcccccagggcaagctcccaagactcctccggagctctccctcccttgggggcccagcacagcacccctgccctgcactaatgaggccacaaggccaacccccagggctgggggaagaatcactcccttgtctcaacagctccccacacaccccttcctgggcctcccctcctggccgccaagtcctgcaggccagtgtgggaaggacctgccagcacccaacccacaacccatcaaacaccaatcctggtctctggaggagttggggcttggtgtacccaaggggagccctcttcccctcctctcatgagcctctctgaagggatggcagggacagtgtcactgtgtgccctcctggggtggggaagggccagccagccttggcctcacgggacatggttcagctgcccaggcttcaaggctgctcccacctgatgctgggcccaaggagcagcccaaggagagggcaagaaggaggggtctccagcacctactacatgttcaggcactggccagtacctggtaccggggccagctaagcccctggccctctctcccatgacctgagacttcatatcaaccttcctggggtgtcctgtccaggctgccctgatgcccagaccaacctgacttctctttataaagccactggggctgagggagttggtcacagtcatttgactttagccccaaggaacccatatcagtggctctggtcctggaggtggctcaactgccacctccaggccccttccctggcactgacacctgcactgtatgcccacccccccacccaggacaactccaaagggagggggagggaagagaagccccttcagggtgaccacatcacagcctccaccattgcttagctgtgcccggctgtgggggagggacttggagagagttaatggagtggctgaatcagtgacatttggcgccctggacagtgtccataaatccccaaaatgagcaggttgagggcaagcgctgtgtgacaccagcctgccggagaacgtgggtgctggctggcagagccctttggatcaaggctggagagtgggcagtggagacccctccctttctagcccccactgctggcccctcgagacttcctaaccttctctccgagtctcactatcccctcactcttgcttccagggggaccccagccaggggatctctcccaccttcccctcactctgcagcaaccccccataatcaggaacccccaaatcccggtttctcccctcctagccccagatccaggtcacaagtgttaacaagtgtcagatgcctccgcttgggtcccctcaacatgtgtctctcccacaaacgccagggtctaagggtccgcctgtctgcaggggaaggaggcagctcagaggagtggtggacgaggaagtttggggtggtctcaggggcctcaagggcactgggtggggcgtactcacccgcggctcacaatgagacgcagcgactcgaggttgccatggtaggcagcccagagagtgggggtcatgccatcctcgtcgggggcattcagctcctttcgggtggcctccttgaggagctccaggtagccatcccgggctgcccggtggtactggtcgttcatggcgcccgaagtggacggggcgggcgggggacacggagaaaggccccccgcaggggagggcggcggtattagggctgaggcatgaggttggaggacggggccgggcaggggccggggccgccagcccccgctgccgcagacggagggtgcggagcgccagagccgcgactaccaagacatctgaaacgctcacccgggggcgggggcggagggggcgggggacgaaatctcccgctgtccagggagccgcccccggtcttcccctgggtcctaaacaccctgcatgcacctcaatacacgagggtgacccacgcaaggccctgtcctcctcttcaaaagtgcccaccccggggccgcgcactgtgacgcccagtccggggacagtcagagatctgtcctcactagagcctggggcgctgtggctccgtatttctccacctgtcagtggaacgaaccgagagctggggaggggtgccggagggcggggtgggggagccgtcctgagccccaggacagtggacctaagaaggggcaccgtgaccgaccgcggttcggtcagcgagtgggacgggccaggccgccgccgcctgaacggagtccctcgaccgcactccagcagggggcgctggaggactggcagcggctccgcgtgccgcgtggaacttcgcacccaagccccggagtccaacggagcgcgggccggcggcgggggcgggcagggcggtgggatagaggaaaggggagcttggatcactgcgaggaccgtgggggagaggggaactggggttgccatcccaggcaggagcacaggagcacaggattcagggtgcgccgcggctggagggcgtcagggtgcccgcaggctttttggacgtctcttgagcttagctctcggggctctgggcgcctggaatgctgcgcgccagggcgcggtgggcaccaggggcggggtgccctctaggtgccgcagtgcggggccgcgcccgagcctggccgcaccggggtgacggagtggggtcgcctctcaaagggtaaatatgaatcttgccttatctggctccagcgggctcttccctaaattcaccttggagaaagatggatcatgtgagcgggactgagagctttatggagccaaactcccgcagctgtaaatcaccctgtcctcctgggtataaagcgcctgtccatctcggcgtgggagagaggagacgctcgccgtcccctgacccccagctcagcgccggctccaagcccagccaggtgggtgccccgggccggagggcagtcggacttggggagtggggaccttggaggggtccaaccgggtgctgccgcttctcctttcttcccatccagcgagaggggcaggttccgcattttctcttcccctttcccagcgcttcctccagcacccgaagccccaaccctgcgggtcaggaactccctagtccccaagtctagggatgagatgggggaaggagagccgtcagggttgacctggagttttgtccgctcctcccctacagtgatccctctagccttctccagtcgcctccgccatgtccgaggagctggcccagggccccaaggagagccccccggcgccgcgtgcgggccccagggaggtgtggaagaagggtggccgcctgctgtcggtgctgctggcggtgaacgtgctgctcctcgcctgcacgctcatcagcggcggagccttcaacaaggtggccgtgtacgacaccgacgtgttcgcgctgctcactgcgatgatgctgctggcaacgctctggatcctcttctacctcctccgaaccgtgcgctgcccctgcgcggtaccctaccgggacgcgcacgctggccccatctggctccgaggtgccaggggaggtgggggcgaggtagggtgggcacaacagggagctgcaggctagggctctcgcaggagttgcagagtgcagattgacatacgagggcgagaggctccctagggaggaccaggaggaccggagggtgaagtgggctgcagttagggaaaaagaggaaggtaaggggtcctgggggagggatgaatagagggatggaaggggacctctttgcccccggtctgaagattagagaaggctggctgagggagggcctttgatggagagcaggaaccagaagatggcagccactgaaagagctcagccagggc

SEQ ID NO: 1244979 - DNA, 4001 bp, Homo sapiens
acacccggctacttttcgtatttttagtagagatgaggtttcaccatgttggccaggctggtctcgaactcctgacctcgtgatctgcccccctcggcctccccacgtgctgggattacaggcgtcagccaccgcgccaagccaggccatcttttcttaaagacacacaattctactagcaagactctaactccgatcctgaaacgttttatgtctgattttagttcatccagacataacgctacctgataccattacagataaaaaaaattttgaggccgggcacggtggctcatgcctgtaatcccaacactttgggaggcagaggcgggtggatcacctgagatcaggagttccagaccagcctggccaacatggtgaaaccccgtctctactaaaaatacaaaaattagccgggcgtggtagcaggagcctgtaatcccagctactcaggaggctgaggcaggagaatcggctgaacccgggaggcggagattgtagtgagccgaaatcgcgccactgcactccagcctggggtacaaagcgagacttcgtctcaaaaaaataattttttttttgaattactgcttaacataccctacaatctcagcgagcctgttggtattcccataaataaaaaaatgccactcaaggtggaaactgccctcacaactcccaatctcggattgtaatctacaaaagcgcgtgaaactgtaaaaataaactttattcacatagaagaatcacgttacgttttgatttccaaacccttaccaagcctaactgcgggacgcaagactgggctccccgaggggactcactcctggttaaggcctcccacagcccacggcgcgcttccaagtctactcctcagccgcaacgcaaacccgggctgtggctccgcacccacaggctcgccccggccccagcccctgccgccctccacctccagctcctcgcgggccccgaggcagccgcgaagctccggccccgcgccccccagcccgcctcctgccccagctcccgtccaaggtcgctcctggcggcgggtgaccgctgcagaccaacgcccagaactcgacagccccccatcctttactcatttttttgaaatatttctttctctgcacccgcatccagccccgaaccctccagaaccaggagagttccccgcaaggacctcgcgcaggaacgcccgggaccgcccaccgaagtcccaggctccccaggcagcagggcaggagaacaccacccccggcccggaagcactcgcccctcccgggccaagaaggataagggagggggagggcggagagaaaggagggggaggggacagagaggagggggaggggacagagaggagggggagggaaaggaagaatgggggaaggggggagaggggaaggataggaagatgaggagataagggaagggagagagttgaggggggaaggaaaggagggggaaggggtaaagagaagagagggcagaaggagagaggaagaggaaggacagggaaaggcaacgggggaagggaagagggcaggaaaagggcccctccgccggccggcctcaggagcggcagaaggccccgagcccgccgcgcggtgggctgccgggcgcaccttgcgcttgcgggcctcagccgtgccgctccacacgaagcactggtagatggcccgcaggttctgcttccagttgtccaccttgaagctgcccaggtgcgagcagcccggcggcgctaccgccagctcggcgtccatggcctcgccctcgggctctggccgggacaccatggggggcaaggcccggccgcgcgcggggggcggcggcgagggaggcgaggacgacgccagcgcggcgtgggggctgctcggcggctggccaggctggccaaggcccgggcgccgagaacaaagcgcggaggccggacaaagatggggctgcgcgatcgccgaggggaggctgcaaggcaggcaccgcccccgagctgcggctgctgcggaccgcctgcgctgcgctctcgcggttcgcggagggtgtcgcggggcggggcgccgcggccgcggacggagattacgtcaccccccccccccctcccggccggcaccgcactgcgcagtctccagcccgcgccaggcccttcccccacactcgcgcgcccgttaggctctgggtagacccgcgcccgaggaagcgtggtaggggggggaagctaacgagggcccgcccctccccttcctttattggtagtaggccaccccccccccccccccggcaccttcggctattgtcataggctctcagtatagtccgtctggtacagagccgcctcccgggaccctggcggctagacgttccctgtctcttccagaggactggggaggcgggggcgtgctgcggttgggcggcgcgagacgtcagtcctagcactgaaccggtttgcgccggcctgagctctgccgcaaagaggcggggcgatgagctggagcgccgcaggtcgggcctccatccagggcctgcgctttcccacccaaaagcaccccctaatcgggagctgtttgcagggcccccggttgccgtaacctggctcgggccctgcagtgccgtggcccggggctggaactgcctgccaactgcctggtaggcgctgcccccggccgcaagctggggcgcctcctgtcgggagcccgctgatagtgagggccaacccggcgccatccagtttaaagaggcatctgcgcgccacacgcctgacacttcacatttgctagtggctacatttttctaatgaaaaaagaaagttacagtaatatatctcaacccaataaagtcaaattatttcagcatgtaggcagtattgcaaaatcgttagtggaatgttttacagtttttgcagcaagtcttggaaatctggtatttacacttaaagcacatccaattcctactagctgctaccgcagtgggcggcacaggtctaatcggtatacaaataactgacccaaggcaaactgagaagacatttaaagacgaatgcaaacgaagttctgggggaaccagggcgccaagggtctgggggaacttggataaggtgtcaggtgtggagctgctcccctgtactcatcccgctgctaactgctttgctcattcattcatccacagattgcaggaaacagcaattgccgtccagaaccatcacaagttaaaaaataaagattgtgatctcacaacacttaaagctacagggtttaatggactgacgactgggataaagcttttgtggccaagacaaattgccgagcacaggtttttgcctcatggccttcgtgcttgcagtaccctctccctaaaatgctttccctaccccctcaccctctgcatccttatattccatgtctgatgctcgctcacctccttccagctttatcacacacctccttttccgtgaaaaggaaaattgccaccctaatgaaaattgcaagccccccaaaattctccattcccttaccctgctttgtttttctccaaagaatttatcactatctggcgtaatgaatatttacttattttttttattgtctcttcccttaatagcatgaaaaattacgagagggtaatcttttttttttattttttatttttgagacagagtctcgctctgttgcccaaggctggagtacagtggtgcaatttcggctcactgaaacctccgcctcccagattcaagcgattctcctgcctcagcctccccagtagctgatattacaggcgcctgccaccacgccgctaatttttgtatttttagtagagaggggctttcaccatgttgatctggaacttttactagaaatggggtttcgtcaggctggttttgaacttctgacagcaagtggtccaccagcctcggcctcccacagtgctgggcttataggcgtgagccactgcgcctggcctccaagagggtaatgatattgtgtgttttatgtactactacagccgca

SEQ ID NO: 1244980 - DNA, 4001 bp, Homo sapiens
gctagagctgaatacaagtttaattttggaatttctcaatgccaggtacatcactagtattcacaccctcaaacttaagaaacacttctgaaccttgaagctgtaaatcagtttgactaatgtcctctttcatgccatgtaagccattgcctaattgaggccagacctgtcaggctcaacagcatcccggaaatgactagcctactagggctggaaacacatcaagaatttggaatatttctcatattggggcagacaaaaaaagttcaaatgagattgtccataaaaacaattattatactgttccacaagggaaaaagaaagaaagacataaaaggcatatctgtgttattctggtaaatccaccaccaccaatacatctcaattctgtatcttactgtcaggtgatggtcaactgaacttacccacttacccctcttcttcctatatacgaacaagagttcacttctcaagcctcattttgaatacccgtcttttaatctaattaccattttatatccttagctactaaaaccacctggagcatggctgatttcttgacttggaaacctgttaacaataatgcctagctcctaatcttcttaatgttttttcacttcttaccaagaatatccattaaatgtctaaaagaaatacaagcatacacagatctacacacactgaaatcccagtcatgaaaaattaagacattccggccataaactgtgcaacaagacacttccagttagtgtgtgctttagtgatcatggacagcggtatcagagtgagtggtagggggttggggctgccaacaatatactgtgcctcagagccaataagcagcaggccgggactggcagccaggccagtctctaaagggagatttaacacaatatctgaatgctggacttcccaatgccatttcatggagagggatggagcgagaactgggcatcaagtgcagtcaaaggctttggtcaacgtcggaggagatgaaacctaagacaaggtctggtgccaacgccagctgtccagtctcatctcacctcaaacacaacttcatttcagatcgttcttatcaaagtcagccgctcaaacggtgaagggtggcagaagcggatggccacagccctcaagagacaggcataggctctgggaaaaggcagggactccccagatacgaaggggcttccagtagcagagaggagcgctttgcagccgcctcctcgtccccttccagctaaggctgttaggaacgaggttaggatgttatttgaggtttttatgaaggaatgataggagaaaatggcaatgaaggatgaggggggctggatgggctggagccgcccaagaaaacggggagaggacttccctggacacatccaggatcacaacgccaccagcgagcacgggcactgccctgccagcgccgatccccctctctcaggacaagcccctttccaaacggccctaattcccaaacgctgcttcccacccgacctctctcctccaccacactccccaaggccggccgcctttcccttccgcctcaggcgccccacgccctcaatctcccctctccctcccggttacccaccctccaggctgcccgtcgcgggcctcccaggcagctcgcccagacccctcccccctcacctctcctcagcgcctcctcgtagctgaggaatccgatccgtgactccttggcacccatgctcccctcatcccctcggcggggggtcggagcctgatctcgcccccacccccctcccgccttctcctcggcgtccctgggtgacggtgacggtgtcggcgtcccccgcccccacctccccccacactaacaagtgcggcttctgccccggcggctcctcccggtcgccgccaccgcctccatgccggatcacgtgactcttccgccccgcccccttcccctgcctcctactccgcccttctctctcctctctctcctccctctccttccctcctcacgccctcttgccacttccgccccctcccgccagctccgccgagggtcacgggacccgaggccagacactgttcccggtaacggccgcccagggccgcacgctccgcccctccccaagctaaccgcgcgcaggagcgccggggagggggacgcatctccgcacgtaacgcatcgtcccatcttcccgccaatcgcagccgcgcgccccgcccgggcgcctccgctggcgacggggggtggtgacttccggggcgcttgaggacgaccccccccgcccccgcgcccacatgttctggcgttcggcgggtggggtccgagcagctgacggttagtgtggcagttgccgggacctaacatggaagaccgcagaatcttagggaatggggttctgagggatgcggcatatggctcagaagagaaaggagtgggtaggcagggagctcccaaccttagggacgtctttgactgggagggcgttgtgaaaggaaaggagaatctcaaggctttcctgtgacaaaagaatgctcacacctagcgggagatccctgaggaaagtggaccttgttaacgaagtggatctgccttttcgggtcatctcgcctgcccggcccaccttctcctcctgaccatgcctcttgtacacattctctggaaagcgctgtgcaaaaggcttatcctctctcccagagtttctccccgagaaacatgagggctacaaggcttagcgtggagtcgttttaatctgtggtaaaatatacgtaacaaaatgtaccattttcacaatttctaagtgagttcagtggcgttaagaacattgatattgttttgcatccattgccacgtcccatttcccaccgtttttcatcttgcaaaagggaaactctgtgcctattaaacggtaactccccaatccccctcccactggtccgtggcaaccgctgtcctactatcaatttcactactcttaagtatttcctctgagtggaactctgcagactttctcttttgtgactggcttatttcacttggcatcgtgccttccaggttcatggtgtggcagcatgtgactgactctcccactccacctctccatttcccaaagaatgaaaagcagggatgtgaacaggtatttgtgcccccgtgtttatagcagcattattcacgagagccaaaaggtgaacacaacctataggaaaccataaatggagaaaccaaatggggtgtatatgtacagtggaattattatttagttccttgattttcaactcttatttagtttgcgtcttcaacctaaaagtcacggaataaagcttctggaaaaggaagcaatattgaaaaagtaaccatttggattagattggacccaaggtgccggttaggtaatttagggccagggaaaggttattagttcctaaaaccaacagattctaatataccctgctagagaaagaaggtaatattctgtgtttttcttttttttttttttgagacggagtttcacccctgttgcccaggctggagtgcaatggcgcgatctcgactcaccgcaacctctgcctctctggttcaagcgactctcctgcctcagcctcccgagtagttgggattacaggcatgcgccaccatgcctggctaattttgtattttcagtagagacagggtttctccatgttggtcaggctgttctcgaactcgcaacctcagatgatccgcccgcctcagcctcccagagtgctgggattacaggcgtgagccaccgcgccccaccaatatttcgtgtttttctactcacctttcctggcaaaccagatcagcagcgtggcattagtcacagcgctgccctttccagttcactgtgaggtggttaattttaagacctcagattagctgcattactgaaaggccatgaatcagggggttgggaatacatttcaaagcctttaatttccaggtcattagttcggtatagagagacatcaggcaaaacacctcagtcatcttcagcctgcag

SEQ ID NO: 1244981 - DNA, 4001 bp, Homo sapiens
caggatgaggcgggtggaccgtactacctcatcaccagttgttgtaatgcacacgatatgaacaccttaaccttgaccccagacaagcccagagaaggaaaacctccccaacacctgccagtcagctccagtctaatcttatttccaaagagtaagaggtaataaatccccaagttttggatttaatgaaccagtaaaacttcaataacaacaacaacaaacctcagggagtaataggagttgccaaaattttgctttgctaagtgtggattttctctttcattaccatctacgatcactatgattacataaaattaaggttcgtaaaaacagtttacagtgaaaacattcaaacacacagatggagaaccgcacagggagcacatgagccccccttattcagcctcagtaactacatctgacccatcctgagtcacttcccatccccaggtaattctacagcaaatctcagacctatgacttcatccataaataaaagcataccaactcccgaaaaatgtgtaaggaaatgatctcagaataaaagccatctacaaagtgaagacatccagtcgtattaaaaactccccacaatatcactgctttcggttaggactcacatctaccctggaaggtgagaactctgtcatgcacaaccaacgcttgagaaccacttagggaggggataaacgaaccttgggagatgtaacccagtttcactcgagataagtaactttgaacttaacccactccttaatgtagatgcagagattttgaacacaatttttcaagtgggacaggtcaatctctacttcaccaattccacctaaaacattaagcaataacctaaacaacgctcgctcgctctctgacgtgtaggagcccgagacaagtgttcctgtaatcactagcaatccctccgacgcacacaccatccacactctacccaactcaggaaggatgctctctcttgtccaaggacagcacaggcctcatccacatttccacctgcgcgaaccccagccagcaccatttaggctcattcccgctccctcctccttctaaagtcacttttccaggatgaactgcaacggacgctcgcagggtcaaccacgtgctggggagaggagcccacggaagcagcggcctcccggggcccagcgccgcgctccaggggcctcccgggcgactccgcagcgcctgccccgagcccggccgcggacacagcgacccgagcacctctccccgagcatggctccgtggcgagcgttacgtaaacgggggcgcgcggagtctcccctctcgtgtgtctgggtttggcggccgccactccagccccaggcccaggacccccacgccacccgccagaagcagcagcatcggaaccgcaccccgccccgggctccatggcctcctccgcaaccacgaggaaggtgcccgccccggggccgcacccgccccgctgagctctgcggccgcacgcgacgccctcgccctgattccgacttcaacctctccgaagttgacctgaatcctgcacagacagcgggccccggcgacccccatcaccggcccggagcccgggggacggcggagaccggcgaggacagcccggccccggaccctcctcgggaatacccgggctctggagaagcgagctcgcgagcgggcggagcatcccgggtcctcctcggggacggccgaagccctgcgcggacccgcgcccacgttctccctgagcgtcccggctgcgcccgccagcccttcccgcgccccaggcctcgcggaaccccccgccccggtctcgtccccaggcctgcgcaccgccccgacccgaccccagcctaccccggcctctccgcgggcgcgccacaagcctacgcagccctggcgactccttcggcccgcggcccagcacgcgcaccatccgggcctccggcgcctcacacacgtgtcaccgcgacgcttaaaggcgccgcacccagcgttcgcgctgcgctaactccgaaagggttgggaggctttaagaggcggggctagattccgctaactccctgtccccgcccaccgccgcttccgtgtcgcctacgtcacctccccatcacgggaccccgccagcctacgtgatgacgcaagtgcgcagagccacaggcgctcccgcccctgtgccgcggcagggtgacgtctccgcagcgcactagaggtgccgctacttccgggtcggccgagcacacctggcggcgtggcggacgcctgaagtgtgacagtggcgcgcgcccccgccccagaacggggactcgagggactttgcccacccctgcaacagccctcccgcgctgtctcccgggcagggagaaggctgggctcccccacctgcccctggccgtcaggtggctgtggagaagcggaggcgcgggcgctcggccttaacgtcccgggctctggggccatccgtgactcccacacgcggagcacctgcagtttggggagggagggatctgggagcgatcggccaaagcctggggctgccgaggaaatggctcttcggaattagggatctgagagtgtgagatttgacctttgtaggctggtggcggctgtgcaatctctagctccacccactccctccaaaagctttgtcctctgacagctctgcgaaggttttagctgagtatttgtgagcacgtatttcttttgcagtatttttaaaaatcctcttgatctgaggcaacttcgctggcttcctccccattcccttgggcaggttgagagtgttggttcctggcctgacctcagaaactcagagaagcacaggatgggcataaactactttatccaaaaggcagaactttgcaaacacagtcgtatctgctgtgtcttttttgatgtaagtaggaatgatgagtagggtgaagtcacaggtaaacaacccaaaacgaatttccatgccctccccacggatcctaaagcagggactggagatggggagagaggctagatgtacttggaacaaaattcaccttgtatttattacctgggcgctggtgttttttgaaaaaagcaaacaagataaccatattagtctgatgctgagactatgccctatctgtaagaatccttgggctgggcgcggtggctcacccttgtaatcccaacacttggaggccaaggtgggcggatcacctgaggtcaggagttcgagaccagcatggccaacatggtgaaaccccgtctctactaaacatacaaaaattagctgggtgtggtggtgggcgcctgtaatcccagctactcaggaggctgaggcacgagaatcccttgaacctaggaggcggaggttgcagcgagctgagatgtcgccactgcactccagcctgggcgacagagcgagactccgtctcaaaagaaaagaaaagaaaagaaaaaaaggcagggcacagtggctcacgcctgtaatcctagcactttgggaggccgaggcaggcagatcgcttgaggtcaggaattccagaccagcctggccaacatggtgaaaacctgtctctactaaaaatacaaaaattagctgggtatggtggcgcacgcctgtaatccgagctactagggaggctgagacaggagaatcgcttgtacctgggaggtggaggttgcaatgagctgagatcgtgccattgcactccagcagcctggacaacagagcaatacttggtctaaaaaaaaaaaaaagaaagaaatgcaacgtaggtctctcacgaaattagcccaaatcttcagccatcttctacaggctgtgaaaccaggagaggaattgagtccatcttaccttgacctcccaggcagggagcggaccaggtaatttttgggtgacaatacaactattctgttaatgcacctttttcttgaggtaagttctaatgtgatccgttttggttacagctttctataacagaatattttattctttcatctttaatgtttctctagttttctcttttaggatt

SEQ ID NO: 1244982 - DNA, 4001 bp, Homo sapiens
tagaactcatttaatacaacaaccgtataacgaggtaagtaccattatggttctatattaaagatgaagaaagttgcggcacagagagatctggtaacttgctcaaggtcacaaaactccagagaccttgctcttaaccactatactatactgcctctttcttaaaaagcaaatgtcaccaaaaagagacatttagtgacaaccatttgacccactggctgctgcagaacagtgcttcactaatggaggcaggagggaggaaggtgggggttggcatctcatgggtcacatggcaaacactgctttctcgggctgaaactcaagagcggtgatgcttgtggaatgaacactgacaggtttccccctcccccaagaacaacaatcactagtctgtagggagcttcagttctctgcccagagctgcgggtttcttcttctttttttttcttttttttcttttttttttttttttttttgcaggaagcaagccatgtgcatcaattatcaggaacgctttaatccaactgggaccccaaacaaacaccccgttttaatcccgggtgaagtgatacaaacaatttacaaagcctcacgacccggcagcaacccgagtaagtagaccgtgatcttgcagacaataaaatgcaagcccgtgctcatacattgtaggggattgaatgcgccttaaacaaaaggatgctatctccaaaatagcacgctcactgcctttgctgggcactcagcacggtacctggcctgtaggttgtcagattccactgggcttagaataaaatccaaactctttaccgttgcctcctaggtcttacgtgatctggcgaaactcatctgcctcctaagctccaacgccactgcttttctttccctgtctccagcactcagctccttcgggtctatggcaattgtacttgctgttcctcctgcctggattagtcctacagcttgccctgactgcatccttctcatcattcagatctcaacgcaagcatcacctccttcctctgaggccttggccttcaacatcccattccctaccccacatcattccagactggaagctctagagctggcattagaacactgtctggcccacaagccttcaatacttcaacaaatgcttgttgaatccaaaaacgctgattacccttcaatctgccagctcaccccactccctctcaaaatacctaggagaattaatttacaaagaaaacataagcaagcgacagcgtaacacatcgactcaaaacaaagccggtaatccggggctgaactggtcaacggcatttaaagaaggccccaagaaaaccctttcctgatcgtgcacacacttttcaagaggcgaaaccagggggacagggcggtcggcggcgcagcgctgcctaccttgaactccgcggaaagttggggcgtgtattcgcgagtccagagcgcgcgcaccagcgccgccagctgctcggtgacctcggcgcggcccggagccgcccggtagcgccccagcgccaggaactcggccagcaggtcggtgttgctgagacactgcaccaccgcgttcatgaaacaggtgttgccgtggttcttcaagccctgagcgcccggcggccgcgccccatcgccggcggggagctggagctggggctggggtccgggcgggcgttcctccccggggctcccgggggccgctggaactgggcccggggcgcaggcgaagcccccctcaccgtcgccatcacagtgtcccggctggggccggggcggtgagtccccggggcgtgagcggctgcccagcgccagcaggaagcggctgaacaggcggcgcagggagcggcggcggcggggccggggcgcgagcggtccccctcctgccgcgtccccggggcccaggtccatggctgccgccggcgcagctccaggcgcggagcccccgggcgcgaggcggacgagcggccagcaggccctacagcttctctaaggctcctggtgccggctacctgcgggccaggtgtgcggggacggggcggaggcggagccaagggcggggcagccccgccccgcgcgggaatccggcggcacgaccagccccctccagggcagcgccgggccacccctacccctgcctggtgccgcccccgctgcgctgactgggagtcttcgtggtcggattccccacccttccttacctcgtaaaccgacagacctgggtttcgccgctgctcctgttcctcgagcagccttcaagcagtggaaattacggagaaatgaacattctgaaagcgcctagtaaatggtaaaggcctggctactgcaggaagaaaagggcaaggcaggcatctccagagcacagcctcgggcgtggtgagaggcgcgcgctgggcgctgtgtgggggtggggagcgcttttgtgcaccgctggttcctccgcaggctcaggtgtgtgcggacaggtgtcgccacctccttccagaccgtctgccccttggggggaggcagagtctgtgcctgcacccgccaacccgggacctgaactgggagccacgtgttgccctgtgaaaaaagcccccgagtggttgtggtttgcttttttacaccacagattgggttagaatcattttccaaaaacttgcaagacttgatcacccttgctttaatcggcaaggaagggggctcagagaggttatcgcaacgtagggaggccgcccgatccgtaagcagggaaaccggaactcgacctggatctatggactgccaagttcaggccctttccagcctcagtatttgctaaccaggaagttttcaggctctcaggcgcgccccctacgcggtttctggttcactccttaacgcacgatccttgttgaatgattgcccaatcagaattagtttggccttgccccgcccttgattccctgggtaaccctgggcccctcccccacccctcactttatcccatgcaactgtcaggtttataattaatcaggcaaggtcttgcaaaatgactttctcgtcaatttctagctcaggaagagatcagcaccatgtgagatgcagtattctaacgctctgaaatgttacttgttgtttaataagtgatcatcatttattaaatattcttgatcctggccgggcgcggtggctcacgcctgtaatcccagcaccttgggaggccgagacgggcggatcacctgaggtcaggagttcaagaccagcctggccaacatggtgaaaccccgtctcgactaaaaatacaaaattagccaggcgtggtggcgcatgcctgtaatcctagctactcaggaggctgaggcaggagaatcgcttgattcagtgagccgagatcgcgccattgcactccagccgggcgacaagagctaaattgcgacaagagctaaattccgtctcaaaaaacaaacaaacaaacaaaaaacttgatctttcaaaccgggttacagcagttacctcatgcaaaaaagcagccttacttaaaggataaataacatgcttaaaacatcagacggtactgtgaatcggagacttgcgttctggaaaatgccattatttacccctctctggaaaaagatacccggctgggtgattaatacacaaggacacaaggtccatttcatcacccttctggtggaaagcacagaagaaagatgtaatggccaactccaataaagcatctctgtaatttcatctttctttggtaattgtcctgagatccccaacaccacacattttctttgagaaagcatgcatatttctctctaccctgtcaggaattctgccgatgctttagtacattagtcacttaattctcacaataaccttttgagcaggaacttactcttgcttgacaaaagagaaaattgtggctcagagaatttttaagaagcctgcccaagatctggatttaaatctgagtctagtcccatatagcttgaccaatgaaatggcaattaagaaggaaattcacctcaccttatttt

SEQ ID NO: 1244983 - DNA, 4001 bp, Homo sapiens
tatctgcattctctaccatgtccatcctgtgagacaaaattgtctaaaggttacactgtacccgacagcttcggagaacacctgaaccgctcccaccgggctcccagatgctggctggttgtataaccttcattccaccactgcactccggtaaaaaggggccaaaccccatggcccacacctccatgggtctctgcagtctgaagccccaagcaggggtgggcatcttcccaaggactcgagaagagtgggacctggacagagaatccggttgtccccatatgccatgaaatgggcacacacctgccccggcaggttgaatggtgtccacctgccaagggtgaagagcctgtgatggtctattccagggatgtggatgtgaactgcggtcaggcaccagaggtctctgtacgatcggcctcctgggatgttcagggccacagagatgcccagtttcctacggggaacaagatctctcctgactgctccattctaccccgctcatcacttgggctaccatggcccttcagtctaaccagtgaagctgctttagcaataacaccatttgagcaggagtgtgtttggttttggggatgaaaatgattactgtctccaaagcagccactgtgctcatggaaaccatgtctctcagggagggactgtggactccaccattctgagctgtccccacaggagggggcttcattttcctgggtcactgatgaagaacagtgggtccttgctcctggaggacatctagatggaccgtccctcctgagaatactcagggcaaaaggaaagcgaggccagacagaataagaaatacttggggagagccccagtgcctggacccctttgaacacaagggaagatagtctcccctcagccagctctccagggctccttcactttccacaactgcccaagggcagaaggctccccatgccactcccagacaagggactgtgtgtgtccagtgggtcccacagtgaccatcaagacccagcttaggccccaggtgtgttctgaggacccttccctcctccccacccacagtggatccatcccagtgtctctgccagggccaggctctgccccattgggatcggaaatctgggcagatttgggatctagagcagggaggtctcagggttgaggcctgaagtctagcatggcacacagcagggctgagagcaaaacccagggtcttgtctggattcccaggccagttactgcctctctgaccccagacggctcacctgtcgaatgggtacattcgggaacagcacccactctacgaagccaccatgaagacgaaagagaaaatcgtctacatgggcagtgtagaacgggcgcccggtgagtgctcagggatgaccctcctctgtagctgcccagaggccaacaccgcccataccatagccactgtccccaagtcagcctggagggaagagagcaggtcacactcacctgattctgatgaatcagctggcctgggttatgcctctcagggagaaaacctttgagtccacaaaaccgcttgtgaataccactgcgtgtgtgtaactgccgtagaacacagacgcagtctggagagcggataggtgctaagcaccagtgacattctgaggtcatggcacgcatcacaatggggccttgcctgggtcagcagggcccagagtcagggtcctccgctgcctgaggcgtcaacatgcctgcctgcaatgtgtttgtgcacatgcgtgcacatgtgtatgtggataaacatgtctgtgcacgtgtgtgttgcttctctggccaggcccggctgccccactcatgtgtgcacccagttcctcatcactgtcacccccggagcccaggaccagcttcagacctccctgacctcagccctccccgcccagggtggtcctgggatacacataggagtggagggaagtgactgctgctgttgaatctcagaatacaaaagctaatactattacttaatggtatttttagtatctctaatcgtctttttagtgtctctaatggtatcactttttcatttctgatattttaactgggtatttctctccatgacccttggatattctagctagaggatcatgtgcggaaagtgccaggcacacagtaggggcccacttttctagacatgttatctaaaacctggctcagctgtcccacccagggcctaggggatgccaaattccagggtccagaaagagcttgggataaaatgaacatccaaggggagggctttgacctgggcttagtctgcctgtgccatccaaacggagtctcaagtcctgagacagggcgtccagatgcccagtgcagggtccccctgatcaacacctgctcccctgtactcattagcaacctcacccaccctactctcaaagcacttggccctcgtatctgggagctctgcaactgtggattcagccaacagcagatggaaaatattcagaaaacaaatcggatggttgtctctactgaacatgtgcagacgttgttcttgtcatcattccctaaatacagtatcacaaccatttatatagcatctgcattgtattacacataatgaataatctagagatggtctaatgtatacgggagaatgtgcatagcttatatgtaaatactaggtcatgttatgtcagcgacttgagcatccatggattttggcatccccggggaccctagaactaatcctccatggataccaagggatgactatataaactcactcaggaaggcttctcactggaggaagggcccagttcaggacacacagggacatctccctggactgctgtccattcatccatccattcatccattgtctcccccgactccccatctcagactgtcccaatgacagccctagcaagaagagacaagaaacaagacaagttcacgttgtccagttttgaggtcttggaagaagttgcaccagtatgagaatagtgggtcagttttctccaggatccagaaagcatattaggcagcctcggggtgaggaaaggagcccagcctctccagcagccacacagacctgcagcaggatggggctggggctggtttggggcggaagataagtgacagccaaggtttgtcagcctgcagaggggtggctgactcatggactaggggcggcggagcccagtggttgcccttagttcttggatcctgggagacttctggagcctggatctggacagcctaggggtggaggtgatgaggggcaggggtgggacgggaggccttgcatgactgggtgcagggcaggaagccagccagggactgctttgcagtggcggctcccatccccattcccaccccaaacccacccctccccccaccctggtgcggggtcagtcgtgggcaggtgtcctctgctttggccttagcagatcccaagatggaagctggcagccacgtgggcatgtcacttgcgccagctttgtcctgcagtttctgcttcctggagcgtggggcgcccacccaggagagcatgggcacaccccacacctctcactttgagggtgctgggaggtgggggaccaaggtcctgcagccctgtgcttgtgccgtgaaaattagcctaggagtcctgtgtccagccgtccacgtggagccccaggagcctgaacagtggcatgaagcgagatgaggagagagagagaactggaaaaggagagagaaagagagatgaggagaagggaatgagagagaggaagagaaattgggagagagacagaggaggctgagaggataaggagggcgagagatggggagagagacacaaaacgcaaagagacagagagagacgtgcatgagtaggaggtcgagttactcttgatcccagttcccagtgaaaactgtaggtcaccgtcacctaaccacacatacaataaagtcttctgcctgctgcttagagccctgagaatcccttctcatggagcataaaacctttgactacagcccttcctcac

SEQ ID NO: 1244984 - DNA, 4001 bp, Homo sapiens
gagatggaagactaataggtgccgctacactccagtctgggtgacaaagttagaccgtatctctaaataagtaaaaaataaatataccattaaatctaaattctaaagttataaatttataccataaagtttatactatcaaatctaaacctaggccgggtgcggtggctcacacttgtagtctcagcactttgggaggccgaggcgggcggatcacgaggtcaggagtttgagaccagcctggcgaagatggtgaaaccccgtttctactaaagatacaaaaaaaaattagccaggcgtggtggcgcacgcctgtaatgccagctactccagaggctgaggcaggagaatcgcttgaacccaggaagtggaggttgcagtgagccgagatggcgccactgcactccagcctgggcgacagggcgagtctaaaaaaaaaaaaaaatctaaacctagaccacagaatatcccttgaagtgagtttgagcttcccaaaaccaatgatagaaatgtccaagtggtttctacttgctctactactagtctaatagccttcaaacccaacagctcccacctccgtacactgttccttttccagacgacaaaaccgtcgcacagttcagcatgtttccagtaatagttctgtacttcccaaaaagattgctgccacttctcctacaagcacccgaaggcggctctggtaagcagctgacattaactaggtcagcatttgtgtaataaacatggcctgggtaattctcggtgagctttcctctgccccctttatctaaaatttcacaggcctctacacacgcccatctccctttcccgaatgtccttttttctcttcagcacttgtcaccaacaaacctgaagtttactcgtttatctcctctatcttgtctctgccactagcacacaagcgccaaaaggcagggatttttgtcagttttgtccattgctgtgtctcctccagtgcctagaacaatgtccgggactctctcaagaaaagcctggtatagaatttaaagggatagcaaaatgtgtgcaaaaagtatgatcaatcacgcagggtttgccattgccagaaagggtatctggcaactaacaggttcaccaatatttgctaaatgaacggaatacacgatcattctcaaaacatggtgggtctcatagtcacatggggacatagttacaacggagatgcccaggcccgtgcccacgaattgattccatcaacgaaatcgaattcctgaatcacaaggaactgaggcaggtgatcaaaagaccaccctcagtttgggaagaggctagcggagtcgagcagcagcgaaagatgctcacgaccacagttcgcaaagcagatacccgagcagcggcgcctccaggggcggagaaagacgcggtccccgccctccaggcactttcagtctggagcagggaggcgagggacccgcagctgcgaccctccgcgcccgcgttctcgggctccctcccacctgagcgctccccgccgccgcaggtcgcccaggctccgccccccggagcttcaccgcccaccgcgcgccccgcccgagtgcgcccagcccgcgcgccgcggcctccctcaccctcgggcctcgcagacgccgcagcaacgcgtcctcgtcgttctcgacgtcgccgaagaccagctcctccaagcaccgctccacggccggtttgtcctcctccagcctcaggcggttccgctgccggagccgtctctcttcctccgccgccgcgactgcaatcgcagcggccgccgcgctcggccgggccggcggtttccgctgggatgaaggggcaggcttttggggaggcccgcctggccccgctccggctttccagtccggcctcattccgggcttccgcttcggcttcgctccggttctccggtccagtttcattcgtctcctccgctccggcggcatcgttaggtttgaggagaaacgcaggcgctcacgtggaacctcgctgcgcatgcgcccaggcccctcgcgggccgccgccgccgaagccccgggggccggaaggagcctgcgcagcctcttgccacgtgaccagcactccctccctctacgtaactcccgctcccctacccagccccgccccgtgtgggagttcctccgggagggccaatcttccgggtgtagggggaagcggcgtgactggagtggaaaatttttccaacacaatttcgcagctgcaacatattgaaaggagcgcaagaaaccccgactatacactgggacggctgaatggaacttctgcttttcctcttggctgtaaccacttgacttgacacaagccccaatacgctttccacccttcgtcttggtacggtccttggagtacggagcctgcagagggtcccacggtggaagcgagagaggagggtatgtagggaagtgggccaatcggggcgcgggtcacggcgcaggcgcgctggggagggagggctatgctaatgttgttgatatcctggggccacccgagttaaaggggggaaatccgggggctgctgcacccgccaccggtctgggcccagccgggggccccctgtagtcgccgcagtcccggggagaggcacctgcccccagcccggggagggggcgccgcgggctcggggagcacggacaacccctacccatgaggccctgatggaaaacacaaaggatctggtgagagccgagcgcggcagccgctttgtgtgccaggtgggggggacgcctgcagctctccgaccccaggaaccccgcagctccctgaccccgctccctggcctgcttctccatcccacgccctctcaacctccggagcccccctcccccttccagccgttaaacgattcaggggttcccctccccccaccccgtcagccttggactcgttggggttctctccatctcctccaccctttggaagaaaaattcgagaagaaagtttttctctgcgtcctgcccccgccccctgctctggctaggggggaaaggctggatccgagacttttccttttttagccacccagggtgggagagtggagtagtcctctcttcttggcggggagggggagcacagtttcgttgctttgcaggggaaggtgtctatctgccttgggggcagtgccgcgaggcggtttgcacgtggaggtggaaatattgaaagggggcggggtgggcacgtgcgggagaggtgggagtggtgtttgggaagcagcctccaaggctgcatatttaaaagggtttcaagtcggtggacttctgtgaccattgcgttctcctttgtgaaataagaatcctaacatttcagagtcggaagagacattagaggtcatccaaagcagccgtcccctctgcagcctctctgacaagtggtaggtagtctgaaccctgcttacacccctaaaagcactgagagctcactactgcccaggaaagcccatatttcagtagttctaattgttgtctgcctacccttattagacccttcagtctcattcatgtcctggttaagttgctcctttttttacttctcaaattttctctcacatcctcctcacccacccactgctcattggcctatattttgtgtgccaagaaagaacagcagggaagtggaggaaggggggttgagagatagtgagggctagccgaaaactttgctgggtcagtgtcaagtgtgctggcttacatgcctgaagatgtttttctacaggaagctaaagaattacaatatgggaatttcgtgcctgttttctcttaggagtgcatctttttgaagttagaaatttcagcgtcatctccgtggttcttgtatcacaaaacacatttgtttattacctaaatcacttctaaggatgtctaaaactgaagtggttagaagcatcacctggtagagggatgattagatgattaccgcccacacccgtatttgacctgtgttcctcggaagctagtctttcctccaagggcctctcttcc

SEQ ID NO: 1244985 - DNA, 4001 bp, Homo sapiens
aagccttcttaatgatagccctgaggagaaagccatttaaacttcacttgaaaactgcaaaaattaaacgtttaagtttattttgaatatatttaaaacatgtttttcaaaatacgaaattcctagagttatctttcataagaaagtattatcggccggacacagtggctcatgcctggaatcccagcactttgggaggctgaggcgggtagatcaagaggtcaagagactgagaccaccctggtcaacatggtaaaactgcatctctactaaaaatacaaaaattagctgggcgtggtggtgcgtgcctgtagtcccagctactcgggagactgaggcaggaaaattgcttgaacctggaaggcggaggttgcagtaagccgagatcgcgccactgccctctggcctggcgacagagcaagactccatctcaaaaaaaaaaagtattctcttacacaattacttttgtgttcttaagggttcatttttaaactttcaggaaaatcatcttaatcaactcccaaaaccaatgacattcccaccagcaaagcaaatacaattaagaactttataccatttatgtatggtgttttttttgtttgtttttttctcgctctgtcgcccaggctggagtgcagtggcatgatcttggctcactacaacctcggcctcccgagttcaagcgattctcctgcctcagactcccgagtagctgggactacaggcgctcaccaccacgctcagctaatttttgtatttttagtagagacggggtttcaccatattggccaggctggtctcgaactcctgacctcgtgatccacccacctcggcctcccaaagtgctgggattacaggcgtgagccacagcgcctggctggtattaataaagacttcttttactccaagttcaggtcacttaaattttaataataaatttctttccgaaattcctcttatttctgagttctcaacatgtaaatttttttaaaaatctaaattgcgtctgccttaaaagacttattactacgaaggacttacgggagaagattcagagtccttagctaaggaatgaacatatgacaaatatatattaggagaatttaatgcaagatgtgcaagacaggtgtctttagtaatggtaacattaaccttaactgagcactttctaagcgtccacactgctttgttttgtgtttcattaacgaatgcttactttgaagctctgagtcacattactacattcagacgttgcaaaacaaagcaacagtcacagaaaccattaaaaactattaaacataattttaacacgctactgaatgtctaccatgtgccaggcgctgtagttaggctctggagtagcatatgaaactgatttcaatggtccccaccttcaagtctagttaggaatttatccactccccctgggctctcacagcactctgttcccatccctacagcagtacaaggtactacaatcaacttacagtacactgttatcaaaatatttaatttgtctgtctcccccaccacactctgcccaattagctcctaatgagcaggaatcctgggtttatcacctttacagccctaagacccggctccatgaagggctgtcaaaacgtctgatgggtaagtagacggacggattaccttgcaacgaatgaaaaattaattctggacatcaccgaaaacgagaaatgggcttccaccacgttaggaaaagtaaacacaggtcgagcgtccccacatctagcccctgccacacactcccaacctcccctcaggccgcctcagctcttccctctccccaaccctctctcacttaatctccgcatgactgaacagtccaatgcgctccagctgttccaattccgggagccgatcttctatgcgttcctgaattatctctgccatgaggtccgaggtctacaaccccgcgggtagcttctcaacagcgaacacgagcaggaagctcccggtttcaggttcggagacccagccctaccaccgacgcgtccggacgtaacgtgctccctaggtcccgccttttccgcttccgccacctcctacttaggggaaggcccttcggcttctacagccaccgtcccctccctgtggccgattgtgggattgcagcgagaacccgccctggtcttgggcaggacgactctagcggacaggagttgaggggcggggctagacgggagggaggggttaagtgcgcgcgccgctagacttggacagccatcaggaaaagcgcctccaggtgtagagaggtgggctgctcaagcctgaaagggacacgagatgcattttcttcagaatattgtctcccatcccacgtcctgacttcccaacaccaagaacaacaacaaaaaaaaaagcaaaggaggaggatattgtacaattaaacatttttgaaagccggtcgcggtggctcatgcctgtaatcccagcagtttaggaggccgaggcgggcagatcacctgaagtcaggagttcgagaccatcctggctaacatgatgaaaccccgtttctactaaaaatgcaaaaaaattaactgggcgtgctggcacgcgcctgtaatcccagctactcgggaggctgaggcaggagaatcgcttgaacctgggaggccgagatcgcgccattgcactccagcttgggcaacaagagtgaaactccgtctctaaataaataaataaataaaatagaattgtttattatttaaatcaatatcctgtctttgtaagcaatagctttcaaaatatatgtccctaggtgaatatcagacactataaattctttttagaaaaggagatttttgtattgaaaagtttgagaattaccaaaataaatcactaaggtatagacaccctccttaaaccattgcccaagcaacttagcatttctaagagaaacaccaggcaacacagcttggaggcaatattgctggtatagttagtaaacctcaaatgataactacatggttcagttcttttttagttctggatataaaaaagccaaagcagcagttcttgctaaatctgcttatttcaacattcacattagcacctggatcctgtgtgtgatttatgaaaggagaatgggctcagcaaaaccatgttccacctctgtgccttgcatttctttctttcctttcacattttacccactcatctcagaactgagacgagggttggcttgtgctacaccatttcttgaatccttcagctgtaagacatgtcagaagtggaaggaaatcacgaatgtaagacaaagatagaatttatttgtaaaagtaaaatctctggggctgtgttaacagtaagagtggagatgacactagatagtaaactccatatgggcagggaattttttcctttttgactggctagatactctacagcttatagcagtgcctaccatataataagtactcagttaataaatgcatgacactaagaaaaggtacttgctaaatttctttaggtacaaggaagtcagcaagttatgacagactgtaatcatttcaaagtaaatttgatagagaccttcataaattaaccatgatttttattttattttattttatttatttatttagagacagagtctcgctctgtcaccaggctggagtgcagtggcgcgatctcggctcaccacaacctcgactcccctggttcaaaggattctcctgcctcagccgcccgagtagctgggactacaggcacgtgccaccacacccaattaatttttgtgtttttcgtacatacaggttttcatcatgttggccaggatggtctcaatctcctgacctcatgatccacccgcctcagcatcccaaagtgctgggactccaggcgtgagccaacgcgcccgcccaatttttaaatcaaactaactataaatacgctcctcctttatattgttttgttttgttttgttgttctttttaagaccgagcctcgctggccaggcactgtggctcacacct

SEQ ID NO: 1244986 - DNA, 4001 bp, Homo sapiens
tgccaatgctactgtgaggtgggacctggattccctttctgatcagacctgagccagacgtggatgagaggccaggaggcctgtaggtgcggccactgaccttgtcctcttgcgttctgcacccaaagcctcaggcctctgctgggcagtgccttccctgctccacccctcagctggagcctcccctcctggccaccttccctgccccacatcaggtgccagaccagccgcctgcacaggcctcaaaggcaggtgcaccctctaccccagccagacccacaggctcccccttgagctgccgttgtcgtcctggggatcctgccggccgatcctcccacacctcagatgtggcgtcccccgcgcctaggcaggacacggaagccagctcagggttgattgttccagtggcaaagccacaagggatggagccacacaggcaggaacaggagtcacagggccgctggctgagaggaggagggtcccgggggcggcagccgcgccatggtctccacacgggccgggcactggcgcctgctgccctctgtgacgaagccatggtctccagaagccgggactgcgctggagcctcctggagaccctcagggaggcgggtgggcgcttctgggcatcacgggaagggcgctgaggggaagcgagcaggatctttccagaaggggacggaggaggggcagggcctgtgatttgggagttgggggggctcccgggagtggctggggctttggggcgcgtccccgcctggactccagccgcccctccgcgtgctcacgccggggccctgggaccctcgggcgcaggtcgggccggggccgctggggccagcacgaggctgtcagtgggctgtgggctgcaggaagacagggagcggcccgaacagcgctggaagcgggcgcggggctgcagggagggaacgggcccccggcctcccccgctgcccgggccccgcacgcggccgcgcaggtggtcgcggtagttcctggtgagcagcgtgtagaggaaggggttggcgcagctgttgccgtaggtgaggcaggtggtcaggtagttgacgatgcgcgccgtccgcggcgccagcggggcctggtggtactgggcgagcagctgccacagccagaagggcaggaagcaggcccagaagagcagcacgatgcccagcaccaggcgcagcgcgcgcgcccccggccgccgggcccgcttgaaggaggcgcgctgcgagcggcggtaggcgcgggccaggcgcgcgtagagcagcccgatgagcagcccgggccccgcgatgctggtggcgaagagcagcgtcaggtaggcgcggtgggcgcgcgggccccaggcgggcaggcacaggctcttgggaccccggcgcaccagccgcatggccagcatcacgggcagcgtcagcagcagcgccagcagccaggtgcccagcgccagcagcttgcggtagcccttggggcgctgcacggtgtccagcggccgcagcaccgcagcgtagcgctcgctgctcatgacggtcagcgtgaagatgctggcgtgcatggtcaggaagtccaggccgaagagcacgcggcagcccacgtccccgaagtgccactccttggtgacgtaggtggccacgatgaaggggatgctgagcaggtacagcaggtcggccagcgccaggttgaccacgtagacgtacatggaggccaccgcacgcagggagcggcaggtgaccaccagcgtgtaggcgttgcccaccacgcccaccacgcccatggccgacagcagagtcccaatggtgcccgtggccaccaggtcctccagggagctgggctcggtcgggctggcccaggagctgttgagggttgcgttggggccgccaggcggctccggcacagagctgccagtggcggccagcccagggaagctgctcggggactcgggggtcagcgccatctctgacccctcacgacgggctcagggctgggtggacactccctgagatggggcgggggcccctgtgggcaaccagctcagcctgtggggaaagaagcaaatcaggcaacaccttccgctcccaggaggccactgtgatggcctcgttcccacagagtcacgtgggctccccagtgccctccaactctcgggactctctggaagccaccagctctgcaggaggactcaagagccaccagacgagctgccccaacccccctccccgacccccgcatgccccagcaggacccctgcccccccctcactgtaggtcccatggcctctgggatgaactgggcttttctgaaagccggaacacaggagggcagcccctggggcagaggtcggcagtggacagaactgggagtcctgggctctgcccattgcgcccccccaggcctcactttcttgtctgtgcacaggtggggcccacttactcctgagtcctttctcgtatttatttgacttgtacatttaaaaaaatgttttctttagattgcaaaactagtagctactgactttaaaagtccaaatagaagaacatgtaaggagaggaaggcctctgcaatctccatttctcatacagggaaacgaattcaagatggattgcaggcctaagtgtgaaaggttaaatcagtcagtcgaggttctggaagaaaacgggaatactggcataaccttggatgggaaaatatttcttaaaaatgaacaaaaaatactttcaataaaagactaagcaaatgggtttcattaaaattaagaactttaccaagagagcgaaatcataagccacaggctaggagatcatcagaaaacatatatcaggccagttgcagtggctcacgcctgtaatcccagcactttaggaggcctaggcaagtggatcacctgaggtcaggagttcgaaaccggcctggccaacatctcgaaaccccgtctctactaaaaatacaaaaattagtcgggcatggtggcacacgcctgtaatcccagctgctcgggaggctgaggcaggagaattgtttgaactcgggaggtggaagttgcagtgagccaagattgagattgtgccaccgcactccagcctgggcaacaaagtgagactttgtctcagagaaaaaaaaaaagaagaaacatagacaaaaagctggtaagaaaaatatagggaagaactgcaaattagtaaggaaaagacaaacaacccatttgaaaaaaagagaccaaaaccgtgaccggggacttcctgaaaaggacacccacgcagccaacaagcagggaaatgccagtcagggccacaggagcccctgcgtgctgacaaggatgaacgcgtgaaaaggcagatatccttgtcaacaggcgtgggggctgtggaggagctggccctgccgtttcctgttgctgggaacctggactgtgccgccgctttggaaagccattggcacgatttgcagagttgaccgcctataccttctcacccggcaattctactctcaggttagtaccttagataaagggctgccaacgttcagaaaatgacaagcgtgcgaaagttcacggcagcttgactcctaagaagctggaaacagctcaaatgtccccagtggacggggcaggcaaactgtgacatgaagccagtgaaggagtcgccgctggggtcagcagcctggatgaaacagcgcggtggtgggctgaagaaacaagacacaggaggctgcctgattccacgagccacgctgaatttaggccgaacactcatggctgcgcagggagcagtcttggctggggtggggagttgtcaacaggtgggggcgctgggggccttccagggcctggaaatgtgccctgtccgccctttcccaccaggccgagcagctcccagctccatctgtccaggggaccctcacccccttgctgcccccacccagggcatttccagagccctcacccaggggacggcgcagaagccgagggtgcaccgggctccccagttgtgcgcgagcccgagtcac

SEQ ID NO: 1244987 - DNA, 4001 bp, Homo sapiens
ccccagctggctgacaccctctcttggactcagtttttccatctacaaagcaaggggctagacaggtaggttctgaggtcccttccgctccatggtatggccttgaagccacagaccctaatcctctgagcctctgagaccgcaagctctcaaataatggggtggttggcttcctggtcatgtctcaagcccctggtcctttcctttctcccactcctcaattccagggttctcagactgggctcttaggcctaaagggtcctcaatggatacaccagctttcctatttccaaatgttaacaagactgccaagaactaggcaaaatgcaggctaaataacatcaaagtttttggctctagatgaatcagaattgccattagcagctatatgtgtttttggctgaagagtaaaaactagattaatgaccttcaaaacctagaatccactggggaaacctctccagggaaagggccccggccattctcaccctactcacctatgatgatgatgaggatgatggcgcaaatcactcccaagatgatcatcatctgggggtgagaggcgaggatcagtaagacaaactatgataccccattcacccacctgtcctccttcctgtccccacccttaccttgaggtttttccaccagtatttgcgcttgagcttggctgcgcttgtttcaaactgggaggcccccgcctggagtgcatctgcacggtcgtccagctccgacagcttctggtctcgctccaggaccttgtccacgttcaccctcatgatgtccaccacctgggagaagggcccacgaggcaggggggtgtgccaaggcccacctcagtgagggcaatcctcaaacatgtgcccaccgtgccacacatggaacatgcaccctgatactgccaggttaacatgccaaggacacacagaacatgcctagcacacctggggacatgcaaggagcacacatcaggggcatgctggtgacatctcagatgtcatagcaacaccctccctctatggaacctcaggcgctctgtccatcaccagagcacacctgcccaggctggcacaccccaggctagcaaagctgattaacacccccagcgcccttccaagtgcgtgctgacagggagacagggatggggcatggtatctttgtccgcaaacccacaggcgtgaactgtcatcactcccaaaccaacatgggcccctacacctatacgccaacccccagggtccctcctactgcttttgactccccccacactcacctcatccacctgggcctgggtctgctgcagtctcctgttactggtgaggtttggagggggtgcagggggaccaccctccccagccggggcagcagggggggccgtggcagcggtagcagacctgaggagcagggacggattaagacccagggcctgcagcctcccggccccgcagccagggctccgcccatccacctgtccatcctcgtccctccagtcctccttttcgggaggaaggccacccgatgtaagccctggtctcggtccagccctgccgccgatgagctgcgtgaccttgagcgaggcccccccggcctcagtttccccgcctgtcaactgagggcgacctcacagatgcgatccgggtcgacccgaaaagacaggcggccgcggtgacaggggcggggaggggcaggaggacactgggtccgctccttcccgcggccatcgcccgagccggccagcccgggacgcggggctcctcggccgcccgcgcgcagtcaccggcttgggcctggccccggggcgcggggaacgcaggagagaccccgggcactcccgacggccggttgccaagggcggcggccggcgcagggaagcgcggtgagggtggcgggcggccgactcacatggcgggggcagcgggtggaggacttggcagcggcagtgatggcggcggcggctcgcgctggctccgactggcgctggctgcccgggacggaaagatggcggccgcgcgtcacccgcatccgggcactgcgggcgggggcggggcgccgcgggagacgcgtcgcgagcggggccgcgggggcggggcgctgcggggcgctgcggggcgggggtcgtgccgggcaggaccacgggccccgcgccaccatgccccggcagctccctcggcactcgcgggaccccaaggcgggctgctgcggcttccccaaacccaccgccaccccaccctgtctgaccacagcccccccaaaccgcctgccgcctgccccttagagcacaacgcagcctggccctacacctaacccccagaccactccctcaatcgtgaacccagtaaaccagcctgcaccccacacagcccaaggtcttgccccgcgcccaggtcccagcacctagcgacccgccttcagcacttggaatgggctggagttgggaaatcagagagggccagtgcaggtgctggggcagtatcgagagcggggaccttactgctagggtggagaggagtgggggagattggtcccaacccatcaccgctggtggatgtctcagaggaagcctggggtccctggccactgggtaggagggtaggaagaaaagatgaggcaggctcttcccgcccaaacaagtccagggggcggaggacgggggagtgtctacagggtgtggggagggggctgccccgcctcacgattaaggttcagactaggggtacttaaccgctggagcaggcccgactgaggtggggtgagctgaggaccccgaggaggagggcacaaggctgccgggggtgatgggggcaggggctgcttcacgtggtggctgctgactggccaagacctagctttgccccaggcttaggtcagcgacccgactgcaggaaagggctcaggctttggtcccaggcacagggcctgggccaaaaaaaaaaaaaaagccttttttctttttctctcatttttttttctttagtagtaggcacagtgggcacaggttacaaggtgctgctttacatgcgtattcgcctcgcaggtgtgaccttggaccgttgccctcctctctctggaccccaaatacattgcatatgtaggtactaaatccatatttgttaaatggcttgatgtggataacataggagattatccctggctggtctccattaggccctctaagcacacccagcagctgtatacactcccacccagcttgtcagagaagatgggaccaggggagctgtcgctctggtggagtgcagggggtcaaagcaagcctcaagggtgcaggaggcattttaggcgaggccctttggccctggggtgggggtgcttactacatccctggaaggtgcagggaggctgatggccttgatctctaagacaaacaggaaccagcttcctccctcccccaccctggcttcccagggcctccgggtgtgagatcctcccccactgcagtgccccacccgctccccacagaagcccggagagtggctctgtcaccagaggtgtcatttcccagctgtctgtgggaggtgagtgagcagggaatgtgtgtgctgggtgtgggaactcagcccaatctaagagaagatactcttggcttcctccccctcagaggagcagccgcgtccctggtccttgtgcactgacagtcccgggtggctcagcctatgtgatgagaaagaaaagagcagcttccacgggggtctcagatcatgctgtgagatgctggctcctgctttttggtcttcaaatgattcctctttctagtcagagaacaaagatgccaaattccagccttttaagttcaaaaccctcagtgtctgtcagggtataaataagacatggaggattggaagaggcaggcacaggaagcccttccgcccccagttggacaccctgcactaactgaggggagcctagtgcagagccagacaagacatttgatgctggtttgggggtgatgtggaagggacagagccccagatacacggtcaagg

SEQ ID NO: 1244988 - DNA, 4001 bp, Homo sapiens
cagagctgaattcagaggaaagccttaaggagaagctgtttgcatacaggatgaatccaacaaacctggctccagaattgggctggcaggtctgcaagaggctgcatctgtggggcctctcattgaggggtctgatttaaaaaggaaactcctggccaagcgcagtggcttatgtctgtaaccccagcacttagggaggccgaggtgggcagatcacctgaggtcgggagttcgagaccagactgaccgacatggagaaacccatctctactaaaatacaaaattagccaggcatggtggcgcatgcctgtaatcccagctactcgagaggctgaggcaggagaatcgcttgaacccgggaggcagaggttgcggtgagccgagatcgcgccattgcactccagcctgggcaacaagagcgaaactccgtctaaaaaaaaaaaaaaaaaaaaagaaaaagaaaaaaaaaagaaacctctaaacaaatggcgtgctgaggcctcatcccaggtctctcaaaaagctgatcattttgagctctctggtgtccagggttgtggccaagattaatgataaatgagaaggagaaacaggcctgcagacttggccaaccagttcaaggcgccgcacctctccgttccagtccaaacccctggcactggggtttctgaagtgggggtcctctgcaggaggaaggcagaggtgggtccccccttccactccccgccccaggcattcccaagggcagccccgggtcgtggcccgaaggctgagggctgagtcacaggaggaggagatactgcagtcacgggagacacagagcccaagacaaagatcggatgacccaatcccgcctcccccaccccaaaatcagatcggcggtgtaaggctggtggcggtggggtagcaaaggctctctctcctccgtgatgggcgtgtctcgtctctttggccttgctttgggaggggccgcctcacacccccacagaccacggggctgcatgtgaccaggactctggcacggccgctgtgcccccgcccaaccccgacgacatagcccctcaagctccctcggggaaagggggcactaaccgtcactcatagtcacagaccacaattacccagagagtgtttggtgggtaggggtacaggtgtggttttaatggggggggggggggggggtggggacggtagtgtggttgtgcgcatgcgcatgggcaccttattgttttcccccccaccagcacagcttctgggcggcggccacaactaaaaatggttggggaaggggcgataatttcgtctcccctccccacataaatgccgctctccaggagcccccaaacacaagttccttggctacgctttccacgctcgtgcacccaggtccgcgccagtttctcccgccctgccacacccccggcgctcgcccactcgtgccccactgcccagtggcctgcgcagccctgccctgccctacgcaacccgctcaccttgcggtcgctgactccctcgcccactgcgatcacaacacccgcgccctccatgcccggagtgacaggcagaggcgggagacggtcgtacagcccctgcctagccatgaggtctgcgaagttgagcccgcaggcccgcagacgcagcgtcagctggccgggcccaggggccgggggcgctgccggccggctctgcagcttcaccttgtcgtagcctccaaagccggtgagcactaggcagcgcagcagtggcggcgaggcggcggcggcggcggccccttcggaggccgcgggatgctgggggtcgctcgctgcctcggttttcggaggcggcgaagaggcgtcttccccggtcgctgcctcggctacctctctctcgtcggacatggctgggactcccgacgagagcgcacagctggatggagagtgcacagctggggaaggcggaacgcgtcgggaagagccgcggctgcgggatccagcgggaggggcggggcgccgggcgaggcggggcctcgcgctcagccttaaagggccagggccatagtggcgcaagctgggagagcacgaaaaggggcaccaggaacgtctgtgctcttgggatcaagccgactgtgatttatttattcatagtaaaccttattcaaattaaaaactattttaagggataggcctggcgcggtggctcacgcctgtaatcccagcactttgggaggccgaggctggtggatcatttgaggtcaggagttcaagaccagcctggccaacatggtgaaacccccgtctttactaaaaataaaaaagttagccgggcggtagtggcgcgcgcctgtaatctcagctacttgggaggctgaggcagaggaatcgcttgagcctgggaggcggaggtgagccgagatcgcgccactacactccagtctgggcaacagagtgagaccctgttaaaaaaaaaaaaaaaaagggccgggcggcgtggctcacgcctgtaatcccaacactttgggaggccgaggcgggtgggtggatcacctgaggtcaggaattcgagaccagcctgaccagtatggtgaaaccccagctctactaaaactacaaaaattagccaggcatggtggcaggtgcctatagtcccagctactagggaggcggaggctggagaattgcttgaacccaggaggcggaggttgcagttagccaagatcatgccgctgcactccagcctgggctacagagggagactccatctcgaaaaaaaaaaaggccgggcgcggtgtctcacgcctgtaatcccagcactttgggaggccgaggcgggcagattacgaggtcaggagattcacctggctaacacggtgaaaccccgtctctactaaaaaatacaaaaaattagccaggcgtggtggcaggcgcctgtagtcccagctacctgggaggctgaggcaggagaatggcatgaacccaggaggcagagcttgcagtgagtcgagatcgcgccactgcactccagcctgggctacagagcgagactccgtctcaaaaaaaaaaaaaaaaagttaaggaacagtcccaaaacttgaacttacatcagatttggagttaactcatatcagatttggagtcagccacctgtggactggagtccaactacattgtgtctcaggctctgacatctaacccaggcagggatgagacttaattcactgtggtcttgcagtggcaaagtagaagcatggagaccaagcctttaaaactttctgactttggtgttaacgttctgttcctcattttcccttctgtaacatagtgatgatgctgcgtgctctagttatatttatatttttatttttttgatacagggtctcactctgtcacccaggctgagcgaggtggggcgatcacagctccctacagcctcaaactcccggcttcaagcaatcctcccacctcagcctcctgaatagctgggaccacaggcatgtgtcaccacgcccggctaactttatgttttactgctctttgcagagcagggctaccccataggcagcgtgcctagagtggccaaacctagctaagttttgatttttttttctagagagagggtctcgctaatgttgcccaggatggcctcaaactcctgcacgcaagcaagccttggcctcccaaagtgctgagtttacaggcgtgagccaccgcgcccagcttctagttatctttacagaattatttgcagcatatattattgactcgaattgcctcgatataaaaaagcactttttttttttcgaaactctattgcacaagctggagtgcagtgaggcaatctcggctcactgcaagctccgcctcccgggttcacgccattctcctgcctcagcctcctgagtagctgggattacaggcgcccaccgtgcgggtttcaccgtgttagccaggatgatagtctcgatctcctgacctcttgatccgcccgcctcggcctcccaaagtgctggtattacaggcgtg

SEQ ID NO: 1244989 - DNA, 4001 bp, Homo sapiens
tttcaaccagctttccaaagatgtgttatgggtttttcctttacatgaagaacacttttttttttcaatctctatagacaccatgcttaatatggtttttaatcacacgaaaatcacttcagtggcacatcaatcccatattttaaaataaccatttgagcttttttctggggaaagtatttgccacctttacaccaacctggatgcatgctagttatatatcatttcttttccaatgcattttcaagttggtttatcacattattagcaagctcatcaaagtacaataaaacaacactgatcagaatgagaaaagggggaagttcatgaattccataatgttgggtattttagattttaagaagcccaaatatatttccataactacttaaagatcaaattgcccacatttgaaaaaatatgtcttaaaacaacaggccagtctacacagtaggtaatttctgagttatccaattctctatattaactccactaggatgaatccagtggctgggagaataattttttgaaaattctgcatccgttcctgttagtttcaaaaggtatcaagcgccccagctacgcgtttgggatttcacgaagtattcaaaggaaaataactcagagaggcgggaagaacgcacttaaaagtgacgagcttcctaacctcctccagttccgaagtttccccgtgagctcatcgctactgcccactgaatgcttcgttttgcaaacagaaacgaagtaggaaaaaaataagttccagcctagatctgccaaacaggggtcccccatctaaagtgggcgggcaagagaattgccaaaacacatcggctacagtcactttcaagtttcttgcaaaaaagcgaagaccaacatcccagagagtgactcatctgggggctttgtaagcggactttgtttgctctctccacttggttggaggaaacgttcgaggtgggcgagaaagaaaagcgcttcgggagaaggtcgggcctccaggagtcccggcccccaccgctccccgcctgccccgggccggcccggctgggggattccccaggctgaatgggacggcgggagagctggacagagggagaaggtgtcagctgccaaggctcggctgagacttgggaaaaaaaaatgtaaatccagtgaaaaagtttggggaggggatacacactcacaacatccgcccccccaactgggtaaacacgagaggggtggtggcggtgagggggagtggcggggaacctggggatacccgctattcgcggggacacgggagggggtcagaaagtcaacacacgcacgcacacacacaaaaagacgaggaaggtgaaaagagaacaagcgaaagatggatgaagtggcggggaggagactcagggcaggacctggggacctcctcaccccaccgtgggggaccgggccggcacgcaatggcccagcagcccgcgctatccagcggcccggcgccctcctttctctgggccgcggggtggtgacagcgaccggcctcctcccttccccttcagagcgagagggaagggtgtgtgtgagtgtgtgtgtgtgcgtgtgtgtgctggggggcccccgggttcaccccgcggcctgctatctcccccgcaccccgtgaggccgcctcctttcacctcagcagccccgcttcgccggggcgggcgggcggaaaaacaaagggggattaaggccgggccggagagcggagccgggagggaggggaggaggagcgcccgcccgcccgccagcccggggcccggcccccctgtcccccccgtgcccccccgggggggcccccagtacctggaacaggaacgcggtccagttggcctccatggctgcggcggccgacccccctcctccccactccccccgctcggggagcctcctcagccggaggaggcgacaacaaagcggcggcggcggcggcggcaacggcagcggcggctcctcaacatggcagcgccgagcgcggccacttccggtaacctccgggacgcaccaccgcggcggcgagcgcgggcggggggggagccccggcccggccgccgccgcccccagtcgcccggaccccctctgggcgtccccgctgccggctcgccgcctcggagctcagccagtgcccgctggcggtggggtcagggcccccgcgggggggctggggtggggcccggggcggggatggggcgcggcgtccccccccgcgggggtgtgtggtgctgcggtccgtggctcaggcagctggagcagggggagctcaggagagaagatggaggacgccagggtctggcgctggcccgctgggcacagctgggccgtctcccgtgactcagacacggtgtccagcaccgtcgcgtccctgttagaccctcagcggagggcacaggccacggcggacactcggctcttcagtcgctcatgcacagcatggtccccacctccaaactgggggaagccctttcgacttcgagcctctcttccttttggcatttcctccccggccggctaagccctctgcgctctcgctatgatatgcatctcatggcgagatggccttccaactcaagcagggaatcccactggggtgcagcctcagatcctctcagtgtggagggaaacacttcccacgcgtagagatgtcattactgggttattcttgggtgaagggctgagcctccccatcctccccttcactccaagataggatgtgaaattctatcccaacacccctcctctcccgccaaaaataaaaacaagtgagatagtatagacaaattattttagtcctttagtacagtctgtttcctccttcacccccagaacaaaaatcgaacttctggttggacagcgtcagatgtcactgaggtgaccccagcctgtttgcagttccaagtcttccgtgtaggcgtcactgctactggaactttgtagatgaggagcctgtatgatgatgtcctgaacatttctatcctttcctcacacagagggaagctactgggaatatcagagacaagctattattaaacaagtgtctctagtccaagacatctcctgtggcagggaaatgagggggcaggctgtatcagtgatatttttataaactctggttttagaaaaaattcttcagatggacgcattattttaagactttaacattttccaaaaccaactgaatcttatcccctccatttatccccctccagacacttctaatcaaggtcaccatctccaacttcccccatagacaataaaaatatggctggagaattctactgtaatagaaaaccaaggagatatagtaatttgacagtgtgtttcctttccatccactagacaagaataccccctcccattctttcctcccctcagtcaccagaatgaaggggctggaaaacgttggtctggttccttttagagctgattccccattggatactgcctggaggccttggggatgaatgagaagttctgcagtttggatcagtagcagaagcaggtaacacatcagggaaccggtcagcctaagataggaggggacagaaaatgatgaaagagtttctgatacatttatcagctaaattgctatggtcacccccatgtctcctgtaatgtccaaacctaaggaattaactaagtaaactaaaacctttgtgttcttgctctgaccttggacaatggaattcttcttattttcattcagtggatagcaaatctgcttcttccctgccttaactcactcaaggtctctgtgatgcactccagagttttcctccttccctgcatagtcttctcctccctagctgcctttcaaattggtgaaaatgaagcttcaggattatgaaaactagtacttaatgaagaccattattctaatgacaatatcgctggactcttgaacttgttatgctgggatctagaaaccctttccccagcaatctttcacacagcacctctgggaagcggtttcccactaacaggaa

SEQ ID NO: 1244990 - DNA, 4001 bp, Homo sapiens
ctgcagactctctcagaaagccagacttcctgggcccgcacgatggtgcaagccggtaatcccaaaactttggaaggctgaagccagtggatcacttgaggtcaggagtttgagaccagcttggccaacatggggaaactccatctctactaaaaatacaaaaattagctgggcatggtggtgggtaccagtagtcccaactactcaggaggctgaggcagaagaatcgtttgaacccaggaggtggaagttgcagtgagccaagatcataccactgcactccagcctgagtgacagagtgagactccaaaaaaaaaaaaaaaaaaaaaagccagacttccatcacttgtctgaaaattatctgtttaagtgcgtttttctcgagtccataacttttcagcaatctaccatagacccctgagaccaaatccaaatgtatgcctcacctaatgctaagttaggaggggaaaaggagactcagttccccatcccttaaacaggcgagaccagccgggcatggtgtctcacgcctgtaatcccagcactttgggaggccaaggtgggcggatcatgaggtcaggagatcgagaccatcctggctaacacggtgaaaccccgtctctactaaaaatacaaaaaaaaaaaaaaaaaattagccgggcgtagtggcgggcgcctgtagtcccagctactcgggaggctgaggcaggagaacggcgtgaacccgggaggcagagcttgcagtgagccgagtgagccactgcactccagcctgggggacagagcgatactccgtctcaaataaataaattaataaataaataaatgaaataaacaggcgagaccaaagtcaactcagagaagctttaatagcaagaggtgggactagcctcctggcccgggagagagcggcggcggcggcgccgttcaactgcggcagcagaataagcgcgcgtcgttcagcgcagtgtcatcgccgaggcctctaggtccctggatcttggtctgcaggccgcacgcgcccttggggcaatggtcactccagtctccaaagtctccccagctcagcccaggcccctgcagttcctcgccgtctgaacagcggaagcgcacgttgttcgctgctgtgttgtcaccgagggtcgtgggtgcctccacgcgaagcgagaaagccactaggtaggcgccgccgcgacaccacagcggctcactccattcgccccagctgcaaggcaaagggagatgcgttgcctctgcgggccccccattcaccaagcccttgagactttccaagccaagtgctgtgtatatgacctggtgggctgggtgctccccgacctccgccgaggagcggaggaggggtcttccatccacccttcgcctccccggtctatactgccccgtagctctggcggagccagcctgcctgttgcgacggagtatgtaatagagggtaagggacataccatcaccccaagggatcctcgacccctgcgccccaccttccagactgggactctaccacgtgcgtattgcctaggacgttcccgcgcgcgcagtgcagcctgatcccattcagtgcagtgtcgtcgccaggaatgccttggggaggctccacctgggtatcgaggagaggggcaagggcgagtcacggaattatcatccttggctctatggtcccacgcatctccgccctctccaggacctacgcctgagccccaaccttgagcgagaacccgctggcgaagaatccatcgggacacatctcaggccaggcccagtcgccccagggacccccgctggtcacttcgatgaccgccgtgtagccgttccggccatctgtctgtgcacatgtgaaaccagtcgcccgcagaagcagcagcagcggcagcagcttggctcctgcgccccgctccatcctgtagcgtctgtgaatcaggcctcctaagcagatttatatcagtttggcctctgtgagggctccgattgcggaagggcctcccagattaagtgaaacccaaaactaatccactcccggaaccctatttcctgctcccggaggcagaggctcccagagctagggtaggaggggcagtgagagagggcgaattaaaataaccatcacctactgaatatttactataggctacgaattatggttagcgctttgcagtattttgtttaaccctcacaacaatttttggggggtgagaattatccttcctattttgtagatgagggaactggctcaaaaatggcaagcaacttgccttaggtttacagccaagcaagctgggaaacattccagcagtgagagtggagacagagcagagaccagggctagggatggaagtgacctcccgggagtcccaccagtgacgggatggggcaagagcaacccagagacctccaggatgtgaggggacatcagagtgaggataggacaagaatcctcgaactggagaagctgagaaaactcctgtcagctcagaagtctcttcctcctctgagaggtcttctgagagctcagggccctaacaccttgagaatccgggacactcctccctaccttagaagaagacatatacaaacagaaataattcttttttatttttattttttgagtcgaagtctcactctgtcgcccagtggcggcatcgcagtggcgcgatctcggctcactgctacctccacctcctgggttcaagcgattctcctgcctcagcctcccgagtagctgggactacaggcgcgcgccaagacgccgccccgctaatttttgtatttttagtagagaccgggtttcaccgtgttggccaggatggtctctatctcttgaccttgtgatccgcctgcctcggcctcccaaagtgctgggattacaggcatgagccaccgcgcccggtccaacaggaataactctaagaagtttggggacaggagactaagaacccctaagaaaagatcatgctgtttcttccattgctttctgtatccttatatcctttcctggaatgcctttccccctgtgaccaccagatggactcctaatttgcaaaacaaaaagcgagaaaatctggctaagtatgttttttgtttgtttgtttgtttgtttgttttgagacgaagtctcactctgttgcccaggttggagtgcagtgacgccatctcggctcactgcaacctctgcctcccgggttcaagcgattctcttcccttaacctcccgagtagctgggattataggcgttcgccaccacgcccggctaatttgtatatttttagtagagacggggtgttgccatgttagccaggctgacctcaggtgatccgcccacctcggcctcccaaagtgctgggattacaggcgtgagccaccgtgcctggcctaaaaatgcctggctaaatttgttaggggccacaaccccagatttacctgcccctcatacacactcctttgtttattcaatacctatttagcaataatatgttttggcttaagcaatattccacttgctgtaagcaagaataacaaggcccctgtcatcagaggtcacattccagtgggggagacagaggataaattctcccccagtggaccttgagctctgtgaaggcacttttgtattcttgaagcctagtacgtgcggaagtacttaataaaagttggtgcaatgaatgattgaagagccaatctggagttttgaaaattaaaccacaaaaatgcaaaaggataaagcctgacgtacgtatatgattgcaagaggtcatgtatccaggtcaagacaaagtcccctgggaataagatagagaatttagaagtgggtgttcccggctgggcgcggtggtttacgcctgtaatcccagcactttgggaggccaagttgggcggatcacaaggtcaggagttcgagaccagcctgtccagtatggtgaaaccctgtctctactaaaaatgtaaaaattagccggcactttccagcctgggcgacagagcgagac

SEQ ID NO: 1244991 - DNA, 4001 bp, Homo sapiens
gacagttgtatgaaagaaagtgagcagaatttttatcaacacaatctagaccagctcagaatgttaggtaacctatcagccattacttaacaagtgttggagcccagacttcaatccaggtcttctgatttaaagtttaatagttaccaaaatcctaaaaagtggtgattcaagccaaaagcgagaagttggaaaagtgagaaaaactggataatcagtccttcaattgaacataaagaagataagatcagatttggcagttatataatcaagaagcaaatttaccgaatgttaaactaatgatacatctatcataattccatatctcaaattttgtcaccttgtttcaaagccaagcgtgaacaaattttcaaactcaaaataagaaaaatatgtaaactgacaaactgatttaactagctataggtaaactggtaaaaggcatcatggttctatgtatattttcttctggaatgtgactcatagaaattaaactgtattaatcaattgtaatcaagtaggatatatccctcaaaggaaaaaagtaaccttcagtgccttaagataatgtaggcaaagtagtaaaatataaaatttctactcgagagagtcacttcatacctacacaaatcagtcacatttgtctaggtaccaccatccctcttccacagtaaaaacataagctacaatgcatacaatgatgcctagtaagtaagtttcttcctttcatcatctatgctaagaatacacaactaaaatcagagctaatgacaatacaattactaggtagtagcaactggaatattaaattctatcatgacaacaccagaaacacttgtacaagcttcttcaaatgatcaatgtaatctgtccacaaaaatctctgacaagccccaaagtagaaatgaaagacgttaacattaggataaggagcgatgctgccaaaacacatcaacagtggccagtctacgtgtattattagatttttacatggagttgcaggtaaataaaagatgattgtgtaaaatcttctggaggtcataagtaatctagcagtgtgacacagggccacatatggtttctggaattttagagattaagtcgaccttcacgttttactgcaaatacctccactgtaataagatatagaggtcggggttcaggggtttggaaaggcagacaactctttttcattaaagcagtgaaaaatctgagaagttcctctccaagggctctgcggagcgaaggcccattcccttggctaccctgtaccaccagagctttagatggcacttgcacgcctggatttcgtttaggagcgaatacatctagcatcatgcgccagaggttcgggagagcaaaaaccaaactgacagatcctgagaaatagctcagtcatcagcagggaagaccttctccacttactccaaggtcctggacatcccgggactaagaggttctctaaagaagcctagcaaggcttccaagtacgcggagaggagaacgaacagcccggtgtctgggttcaatgtccgggtgaccaaccatgagaaggtgtcccaaataacctggctaccgccagcgtgagacatccagggtgagacatccagtcagcagcgtcctaaaacactgctggaagtcggaatcacagtgccccagatccgcaatgcctaagtgggagagctccggaagacgccaagctctgaggacagcctcaggcttcggtccccaattccctgagttagtttacctacccgctccgaccccggctgctccggatctcaggatcctggaagctgctccttacggactctcacacccgccgctgggctccagacaaccggaacccgctcacgtcacttccggtccggtccctctgccccctgagacagcctccagaagggatacgttcctccctcctttcggcgagctcggttgatcctcgcgggatttcagttaggctcttagtgcgggccctgtgggtgtggcaagaggaagaatgactgctcgctttgtgattcttgatccggaacttgtcacccaggaaccccggaagaggtagctcacgcgatagaaacgtgttcgctgcccagaagaagggaaggcgcgagtgaggaaaggaggtactgtaggtaggttggttggctccttacagggcgaaggagaccaatatcattattcattttctcgccagtaggaacgtttcttttcacctcgttgcattacccaccttcttcattttctcctttataaactgtcttccgcccaggggccgctgagccctctgttcctgttctgcgaaccgtcctttggaggaaaggaacaggctgctggggaggggaagactcagaatttctagttcccagcaaagcctccaggcaggcagtatcgatgcgctctctccgaaattgataaaatagcgagcaggcctcataccctcagctgggcacttatgaatatccccagcgtttcgagctgtcgagctctgcgtggaaagaattggtttctaagaatatagtcgaaaatttggggccgggcgcggtggctgacgcctgtaatcccagcactttgggaggctgatgtgggcggatcacctgaggtcagaagttcgagaccatcctggccaacatggcgaaaacccatctatactaaaaatacaaaaattagccggcgtggtggcgcgtgcctgtaatcccagctactcgggaggctgaggcaggagaatgacttgaactcgggaggcggaggttgcagtgagccgatatcgctccattgctctccagcctgggcgacagagtgagacttcgtctcagaaaaaaaaaaaaaagaaagaaaaaatttcccccctttttcacacaaagagattaactagagaggtattaatccttactgacataccccaggcaccatactagactctgggaatatgttatacagggaaagtggggcagtggcttaagggtcagagaagatttgggaaaggtttgtttgtttttttcggttgtaaactgcagacccggcgcggtggctcagcctgtaatccaacactttgggaggctgagacaggaggattgcttgagcccaggagtttgagaacagcctgggccacatagggggccacatagtgagaccctgtctcttaaaaaaagattaacgggtggagcatggtgcagaaggaggtaatgggatcaagagcactactgaaatgggtttactgaggcaggggaattagaaggcaccaagaagaagattttataggatgtacttattttgttctgctgtcattgcccagaattatttatgagacaaagaatggttatttgttttaccttagtcttaggcactaggcttattgatacgcttgtcgtaagtgtacagaaaaagagacagacatgttgttttagaggagttagatgataatctgatcagattaatatgagattagaacatcctaaagaacaaaaatatgtgttaattttagcatttttatgattagacactccattgagatatgggacataataaataaacttggtaacttttggaactttcactgtcctgtttttgatcttattgggtttttttttttttttggagacagggttttgcattgttgtccagcctggggtgcagtggcacgatcatggctcactgcaatttccacctcccagcctgaggtgtcctcctaccttatcccctgagtagctgggagtatgggcatgtggcaccacatctggctaattatttaaattttttgtaaagatgaggtctcactgggttgcccagattggttttgaactggactcgagatgctgctgcctcgacctcaagcaactccttgaggccaggagttccagaccagcctgggcaacatagcaagaccaagtccatacaaaaataaaaaatttttaaaaaatcaggagggtgtggtggcatgcacctgtagtcccatctacttggaaggctgaggtaggagaattgcttaagcccaggagtttgag

SEQ ID NO: 1244992 - DNA, 4001 bp, Homo sapiens
cctccgccacatgatcaggaagctggacttgctcttatccaaccactcgaggttccctgtaaaacagatacttatgaaagcataaccaggcgcgcagtggcttacactttgggaggccaaggcgggaggactgcttgagcccaggagttcgaaactagcctgggcaacatgatgagaccctacagaaaatacaaaaaaattctctctatagaaaatacaaaaaattagccaggtgtgtggtgacacatgcctgaggtctcaactactcaggaggctgagatgggaggatcacttgagcctgggagtcgaggctgcagtgagataggactgagccactgcactccagcctggatgacagagtgagaccttatctccccacccaaaaaaaaagtatcatgaactaaaaagaaacaaagaggcaaaaaaataccaaggtgggacagagtggaagagactcagctttcagaaagaaagattcaatatttattttactattattatctacaaggcactcatccttcttccacttctcttcaggtttagggcacagacagagatttcaattttgtgtacaaagaagaaaggacttgggaattgggctgcctactttacagaagactctggccttcaagccaggagagagaaaaagttattaaagggaaaaagacttatcctaatttgccctcaggaaaacccaactaggaagaaaaataaggaatctggggaactgaacccacctttcttcctcagttcctctaatacaatctggatcgactccacaggaagctttcctggtttaaggttaagggaacggcatacacatgagttgggtaggataaaaattttcagagccagtcccatgttgagaaacacctgccccttcctctcccacacacatatgtgtgcaatttcccaacatgatatgaattggcatttcctggatattcaaaggaggaaggtaaagagaaactcttccaattaaaaggagctttatgtgattgtgccactgcattccagcctgagcaagagaggaagaccctgtctccaaaaaaaaaaaaaaaaaagaaagaaagaagctttagaaaatgaaaggtactgtcattcctcaccctctgtctgttgccttccttcagcctttctccacagatattttagggatgaatcaggcagcaaaaacaaatgacccttacttcctggcaggaggggggcagagaaaataattaaaggtagttacccaagtctgggcctcacacagaaaaggatggaagatacaaatagtcaaaagggtttaggttaaaaaacttggaacttggcttcagggcagaaattctaagaccttaatgacatccgagcagtcatcactgccaagaacaagagggtatggtactgcatttgccaggggaaaatgtcagctacacattttcactctttaagtccagtttgggtgggaatctgcctaccatgggtaaaagggggctggcgcgggggggcgtctgggcatgtgtgaaagcgcagaagtgcatgtgtatgggctgtggaagagcctgagggaggatacgctgtagcttgacgttgttgaagagcgggctctcctgagcttccatcaccgtcatgctggactgtttgtgcaggcggcagaaggacaggaccagcgagcaccaggcggccagctgcttctgccgagtgtccacattcggttgtaacctgccgggtgaagggagtggggcgcagaattagagggcgggaggcagcacttgcccgggacgcatttcaggaagaaagtaagggactgagggtgttggccgacgggtcttttctccccctccccatatgaagcatcagggctgagcccagggtccgggggaggggagggaggcacagcggtgcttcttggggtctgagcctcacgtaaagaagggtgggaagcgatactgccacggccactcgaaactcatcgccatcgtagtagcccaggaaacccggaagctaccggctaaggacttccggccttcgcttccgcacgtccgggcagaaggcaatgcagaaaggttccggaagcctttctggaaagagagagaccggcaggaggagtcctcgtcatgacccagtccctcgctgttatcctaaaaagccctatcttttggagcaggaagagtcctgggaagtcttctggttcaaccccagagaaaggtcatgtcttccccaaagcggcgaatttttgttgctgaagtagaacggcaaataaagcccagatctccagatcccagcctacctttgtttcctctatactaggcttcttttaatattaacatttctgtgaattgccatttaatttgatcaactcacaattacccaagctcaattccaatgtcctttgttttatttttaattttttatttatttatctgtttatttatttttgagaaaggtctccctttgttgcccaggctggaatacagtggcacaatcacagctcactgcagcctctacctcctgagatctggcgaccgtccggcttcagcctcctgagtagctgggactacaggtgcacaccaccgcacccagttattaaatacattttgttgttgttttggtacagatgggcgtctcaccaaactcctgggctcaagtgatcctcctgcctcgacctcccaaagtgctgggactacaggagtgagttaacgctcccagcaacccggctaatattttctagagatgggcactcactatgttggcccaggttggtctcaaactcctgggctcaagcgatctccagacctcagcctcccaaagggataacaggtgaccaacccggccctccaatttcctttgacttcaccattcctcaggctcctgcagcacccatgggagcacactttgtagcttgaatcactagagacagccctacttccatgattcagagctgcaggctttgaccacaaccacccatctctcacctctgccatgacctcgcctttcttgtctcaagacctaggaccccttttggttttatcagactccttacccagcctaaactactcaattctgtccccttacctacctacctacctacaggtcagttcccaaaccaatgatcgttgctccatttcccccacctctttttttcactcctgggctctggagtattgctggaagaaaaataaccagaacatgtttgccaagccctagattccctgactagcctcactaccgggctctaagggcagctctgtgatcctttgtcttttattgactccgtcaccctcaagataactattcaaacttttccacattcatcaaggcactccacctgtccccatgtctctgctctctgcagaacgcctttcattcctgctttatgagattgaggccatgcatgtgaaccctttaagttttccctctgtctgtctctatacttgattcatcgctcaaaaatttctctccacttttactccttctttttttttttttttttttttttttgagacggagtcttgcactgttgccgggttggagtgcagtggcttgatctcagctcactgcaacctctgcctccctggttcaagcgattctcctgcctcagcctccctagaagctgggattacaggcatgagctaccacacccagctaatttttgtatttttagtagagacggggtttcaccatgttggtcaggctggtctcaaactcctgacctcaagtgatccgcccacctcggcctcccaaagtgctgggattaccaaccgcatccagcctactccttccttttggactcagaagaagtgttgcaccctttggcatatgttcttgcctccccttttcaacttcctccaggacttctctatcatcttccctctcgcccttgcccttagctcctctcccatatactataaatatgcacaggtcttccttaattaaaaatatgtaaacccttggccaggcttggtggctcatgcctgtaatctcagcactttgggaggccgaggcaggtggatcacgtg

SEQ ID NO: 1244993 - DNA, 4001 bp, Homo sapiens
tgcattattcttttcttccatgagagcccactagtccaaagagcaacagaaatgttatgtctttttctggcaaaaggaggtaagtggtggagccgtgtggccggaacactaaaagcttcctgcccaatggtttggcgttctcaggctaggacaaagttggttgtataagtaatccaaccactactggaaaaacacacatcgaagcgtcaatgaatgcacctgtagtcccagctactcgggaggctgaggcagggttatcacttgagccccaggagttcgaggctgcagtgagctacgattatgccactgtactccagcctggacaacagagcaagaccctatctcaaaaaaaaaaagtttcccaggggtcattaaataaggcataatggaattgtccatttcctcaatcataaatccctttcttaaatcatataacttcatgacaattcctttaagggagattttctccgtttatcaggagcaataccctgcagtattagaaatcactatttctgaccgggtgcagtggctcacacctgtaatcccagcactttgggaggccgaggcgggcggatagcctgaggtcaggagttcaagaccagcctggccaacatggtgaaacccggtctctactaaaaatacaaaaattagctaggcatggtagcggttgcctgtagtcccagctactcaggaggctgaggcaggagaatcacttgaacctggaagcggaggttgcagtgagccgagatggcacccctacactccaacctgggcgaaagagcgagactccgtctcagaaaacaaaaaaaaagaaaaaaagaaaagaaaaaaatcactatttctaatatcattagccttaaaaactcaataaacttgcaaaggcaagagttcctgcaggcagggccgcgcgtggtggctcacgcctgtaatcccagcactttgggaggccaaggcgggcgggttacttgagctcaggagttcgagaccatcctggccaaaacggtgaaacccccgtctttaccccaaaaaaaaaaaaaaattagccgggtgtggtggcgtgcgcctgtaatcacagctactcaggaggctgagacaggagaatcgcttgaactcgggaggcggaggtcgcagtgagccgagatcgtgccgttgcactccagcccgggcgacagagcgagaatccgtctcaaaaaaaaaaaaaaaaaaaagttcctgaagggaaaagaggccccttgggagtattctccaacctcacccaaactattcaacggtaggaattctcaaccttttaagaatggtaacgatgtcatttttcaacactttctctcttctctgccgtccgcttcagaaattaaagtcattcccttcccccagttccaagccactcacgaggtgccagcttgcaaaaccggggcgttggcacgagtctggtaaatgcatgaagcccccacagtccccagaatctgaggatggcacccaaggcctgcattctcctagcgtcgtcctctctaagcgcacaattcctttccccaaaaccaccagaacccccagccctcgccaaagacaatcaaagcctagaaagggttctctttcctttccttctgattcagaaaccgcttctcacccgcaccacctccccacctccactttcccttctgccgcgagcccccggccctccgtccacccgccgcggcctccccagcgcccggagctgccgtctcccctcccgcactcccgtttcccctcctgaggggcggaacgcttacctgctcgatggccagctgcacctcgggcgtgagctgcagcacggcttccagctcctccacgaactccagttcctcctcctccatcattccgccacccggccccctgccgacccccgccgcgagcccaactcaggcctccagccgccacccaggccccagcacagcaactccctcgcggcagcgacctggtgagcccggctccgtcagccgctctgtcagccgctccggcacttccggcaggccagggcacttccgggaccggggaactgtgggatcacggcggactgagactggcggcgttcctgtcacgtcaggtgtctcccgggcaacgcagtatcccggcggccccgcgtggcctcagcgcgtccttaggatgggcggggcctcttccctccccaaggcgcgccccgcactgaggaccccgaggttggggtagggtctggcctccagcaggacgcccggatgaaagtcagccctgcggcgtcgccaaccgcagcccacagcctccgcgggcagcgcagcggcgacctctcagctcccggggccccctcggtcagtggcagcgggtgtccccggccacgggggcgacgtgatcccagctggcgagtggcgatgtcgccaaggacattcgtaggacgggacagtgcccactcgatagaaattccccgtgcgccgggctctgcgcagaagcttttcgaggtgactgcagcctccttatggggagaaacgtcttttttttttttttttttttttttgagacggagtcttacttgttgcccaggctggagtgcaacggcgcgatctcggctcactgcaaccccgcctgctgggttcaagcgattctcctgtctcagcctcccgagtagctgggattacaggcgcccgccaccacgcccagctaatttttgtatttttagtggagacgaggtttcaccatgttggccaggctggtctcgaactcttgacctcgtgatccgcccgcctcggcctcccaaagtgctgggatgacaggcgtgagctactgcgcccggccagaaacgtttttttaaagccagatgacgcagcgccctggagctggggagacgtttactgaggttgaatatccgggatctaagtcctgaatagtccaccattgataagttgtgtgacttggaacaaattactaccccgcgtcgatgtggagaggattaaacattaacagcgcgatgtaaattcaagctggtaatacaggaaatagtgaggtgcccagcccttacccccacaaaggaacaaataagccagatcaccgatcaccctgtgaaaccacctttcctgcagacactgaaaagaaggagggaattgcagcccaaggaggacccgctccaccaggtgaaccgggaaactccaggagggaaacgcgttggccccactgaacttttttttgttgttgttatcagagttgctcaaagtaaaaaataggagcagtatgattttttcttttatttttaattgacaaataataattatataaacaatgtaatttctaacaacaaaggaatgctaaaaaatatacattaaaaaaagaaaaaaaagacaaaataaaatatacattgaacctggtgcagtggcacaggcctgcagccccagctactcaggaggctgaggcagggaattattgactttctgagattgaatatcaggggtctagatctcatcccaccactgaggatcgcttgagcccaggagtttgaggctgcagtgaggaatgattcctttgcgccactgcactccagcctgggccacaaagggagactctgtctcttaagtaaacatagaatattattgattcataaaatcatgattttgaaaattaatgacatgaaaaatatgcacaatatatttcagaaagcaaaatgtataatttcatttaaaaaatgcatagcatggtcccagctttgtgtgtattctgtgccaataaagctcacagcaaggaaatattacttttctgcacgtgatgaatgtacatcctttgtacattttcccaaatgtctacaatgagcctgtagttctctcatgctcagaaaatatgaatgcctttttctaaaaggaaaaggtaattatagctacttattttggactttttttttcctttaaaaaattaagatatttacatacagtaaaatttactcttgcaatttatgatgcagtgagttttgataaatgtgtataaacgactgggcatggtgactcacgcct

SEQ ID NO: 1244994 - DNA, 4001 bp, Homo sapiens
agagctgagctttccccaaaaggtcaacagaagcaaagtctggcctgagcaaacagactttgatcgatagctccacaaccacagccccctccagccggcctggctctaccaataccaaggggtttcagcccttttgagggagaagcaagacttgccctctctccataccagaggttctgccccagaagagaagctcgaagatgtcctcccagctgtcccgctgcatcatggcaaagtgttcaaacacagccgacagggagctgccttcacactcctcctgactgggctggtgctggaactggtactcccagtactgtttccctgaggagcagggtggtgggcattaggagggctgggccagggcaagactggagatcccagaggctgttgaagttaggatctcccagcatgaggtgggggtcaggggtgggcacatgctgaggcctgtccccagtgaaatgtgaaaggaatccaagactgctccactgcctgctcagtctcccaccaccccctgagtacccttgaagaagtagacccgctcccggccactgtagctatgggcagggagggccaaggctgcatccacgttgtccgggatgccatcgaagccgtcagagatatttcgggggtaatcagggtccaggacaccatcctcaaagcgccagtactgactaccctaagaggtggggaaagtgaaaaggggtatggaggccgctggctgggcacagaggcagagtcccttgccctaaggcagccgttcccaggtccaggttcactgcccaggacctggagtcttggggctgccctgtgctcacagagctcccaccaggtcctgcagggccctgggtccagcttccctgtccaccctgtccctgggagcaatagctctcaaaccctccctagatgctttctaccctggcccacagcccctggcaccttgaagaggtaggtcttcccctgacagttgatgcgggtgaaggcggcatcgatggggccctcgatgccccagacatctcggatgagcttggggtacccaggcctcactgccttttcgtccagttcatagcagtactgccctagagtggaggagatggtgtgagagcagggacgctcctggggcagacccgcatccccagtacctgccctggattcacctcggaaggcaaagagggaaccgttcttgaggtcggtgaaggcgtcgaagggcttcccactgcacagctcctcctctgctgggggctgaggtctccctggatgaagggtctcaggccttgagtctatcccctcaggcttagaggcgcccacctcaggcgcaggggcctcttcctcaggtttcagaacaggtgtctgctcaggattccctttggactgggcctggaggtcagaggtcagggaggggccccccacctgttcatggacagtggcattgtttttctcctcgccatcgtcatagaccgtgtactcatcctccggcatagtgaacacatccccgcgagtcactgcagagagtggatggtagtgagtctccagcagcagggggcaccccagcccacccacctgggctctgaacacaccttggggcttgcactcagccgtatagtctgtgcagcagctctggtagtaagagcagagctcgtcacactggcacttcttgtccacgttgaagccctcagtgcagcggcccttgcatgactctatgaggaaggagtgtcagtcggtgccaccaagcccagaccaccctcgccctccctacattgacccagatggccaccaacactcccctgtaccttggtcagccagagcaacccatgccagcagggccagtatgagaaggggtctcaggggtgccatggcagggcttctagctcagtgcctggcaagctgggctctggtctccctgaagtctccgctctgatgcctgaggaagggagggagaggcagagacagggaaggagggcactggagaagaggaactgccttttctgctgctctgtttgctcaacctccagcccatcccctctgccccctccagcggctgctgcagcaaaggtcacattcctggaacactgggcctgggcgagctgggagataagacctttgccaagctcagaatcattaggtcatcggaaggggaattagcaccgtggatctggagggcagaaagaaggctcattgggcaacagctttatctctctgagtcttagttcattttcagtaaaataggattaacaaagccttgcttcatggggtgttgggagattacatgaactggaccagacaaaatgcccagtagctggagcagccacaaattccttctccaaacatagctattgatccatgattgtttgatcagacacatccctggctgggtgctcattcgccattatttatttagggcaggaaaaagggagtgggaggagagattgtaagcactctggggaattttattttttagcataaaagaacaaagtttcatttctgggttcttctcttgggtgcatcaatctccccaggctggaaatttgggtaaatatcaacccactggactggatttaatttctgagtcttttctgagcaggccactccctgtccccaggctcagtctccccatctgtaaagagtgggcttgttcaacacacttttagactctcgagagaaatatgatccctctacctggaaaatgcccactggcatgaaacacctgattttgtgcccaatttcaggtgtccacagaacttctgaaatcctcccatcacctgaaaaaagtgatcctgagattttagctgactttttctgttctgtaatcagaggggactgtgatttgggccaatttcttcctcatgggcttcagtggagtcagctgtggaatggaacatcaattcccaccccataggcatgttgtgaggtttcgctaagaaacagccataaaagggccttaagagttatgatgattgttttaaccatttagtagggagggggcatccagcggtgttgctcccacgtaccgatgtcacgtggggcggggaggcggggcggagaacggagagcgtcctctcattctccacccccttcctccaagtccagcgcagggggaggtggctgcgactgactgaggggctagggaaggctggccaggggcgtgggcgtggctggggacggcttgggggtggggctgcgcaggaggctggaggagccccgcgggacccagaggcggggcgtcggcccggggaccactgctcctccggggcgtggctgcaggaggctggaggagccccgcgggacccagaggcggggcgtcggccggggaccgctgctcctccggggcgtggctgctgccgagcatctcccagctcagccgagcccgtgcccaggccacgctttgttccagccgccgcctcctctaccctacggcgtccggagccatccctcgcctgctcgctctctcctttcgcccactccctgcatctgggcctgcatcacctttgccaaccgctcccccgatcctgccgacactcctcccccaaacttctgaccggcacccttgcctggtacccttctctccattcctccccctccatcttctttccccgacccctctcgggtccctcttttcccaaaacccgggtctctccgcgtggccccgcctccaggccggggatgtcccccgcggccccgcgcccatggtcctgacgctgcttctctccgcctacaagctgtgtcgcttcttcgccatgtcgggcccacggccgggcgccgagcggctggcggtgcctgggccagatgggggcggtggcacgggcccatggtgggctgcgggtggccgcgggccccgcgaagtgtcgccgggggcaggcaccgaggtgcaggacgccctggagcgcgcgctgccggagctgcagcaggccttgtccgcgctgaagcaggcgggcggcgcgcgggccgtgggcgccggcctggccgaggtcttccaactggtggaggaggcctggctgctgccggcc

SEQ ID NO: 1244995 - DNA, 4001 bp, Homo sapiens
gcactttctaaaacagcaggctgaaggcacaccttacttagcaggactgagccctaagccaggtagaaggccgagcaggatagatacattcttgtctcagaaagttccacagagacagaaagaaaaacagtccccagagatgttgccaaatggcacgaaaagctggccaggcctgggaactgactcacacacagagatgcaacaaaacagtgtgaggtgtctctgattacatgataaaaaggttcacacggttctgtttgtcttctgcctccccccatatatcacaactttctctgactggggaagggtaagtgggaaacaactggtataagcaaaggaaaatggctgggcgcggtggctcactcctgtaatcccaatactttgggaggccgaggagggtggatcacgaggtcaggagttcgagaccagcctgcccaacatggtgaaaccctatgtctactaaaaatacaaaaaattagctgggtgtagtggcgggtgcctgtaatgccaactactggggaggctgaggcaggataatcgcttgaacccaggaggcggaggttgcagtgagctgagatcgtgccactgcactccagcctgggcgacagagcaagcctccatctaaaaaaaaaaaaaaaaaaaaaaaaaaaagagaagagaagtactgctcagagaaaagaaggaattaccagcaacaggctgggcccatgaaactctgagcgggtaagatagagggaaagtgagcatgctgggtcactctaggcattttcctctgactcatcaaacattcccaagtcacagggcagctggatgctggccttagctgggtacagggctctgactccacgatgtctcctttggggactcaggtgcctcctaagctccttctgccttcaagaggcaattcagggtcggcatagttcaacccagggctggctggtctgattttcaatacccaaggaacaaaaggagacagaggccatttaaggcttctcttggcagagactggaggagagacaggatgcaatgagcaaggggtggggaggatggagtggaaagaaccttgaattaggagagctctgccttccgaggtgacccaaaccaacaggcattcaagagagaggcaagggaatgactacggacccacacagtgccaggaactgttagacacctgacaaacgtcatctgtttaatttcacctctgggacctcagttttttaccgggaacctgaacagttctggaacatactggaagcctgtatgctggtggttaatcctattaactttggagtcaagactcctttcctggaattaccacctctgttacttacacagttgcgatctcgggcaagttacttaacctttctgccctccactttccctacctgtgaaatgtggacagtagtagattatactgcacagaatttattaaataaggtagaaaaggcgcagagcctgacacgtagtaacgttgtagacatccaataagtgacaattatttttgtttggggctcctcccagctactgaaatcacaagtctgggaaggggttcaagaatcacccctaggccccaccgggggccccataccaggtccccatgcagacgtcccacccccgcctcccagctgatcacaacctcccgggctctcccccacggcccacccaccttcctccaaccccgcccccagccgttccccaccaacctcactccatcagtgctccctcttcaggggcttattccccaccacccaccacccaccgcccacttcctcgacacccgaactttggtcctccaggatccttccgcagtgttttcacctctcggtgttattgacgatcactccgccgccctccgagtgattcttgttgagcgccatagtctctccaacaggggtcccgagactcaaaacgcaatgagcttgcgcccctcttcgccccgcccctagtggcgtcttcttattagagtcagccaatcaaagctcgagtgcggaggctggcccaaacacctgacccgaacgtcacgtggtaatagtttactccctccttccagttcctcctgcgcaacaaacaagatgaagactacaattcccagcaggcaacgcccccgcagcctcggcctgtccctatgctggaggaaggatgcattctggaacttgtagtctcctggatcataggcctgaattggttccacattttgcgtaaccaatcggcttgtgccatccccaccccgcctcttcagccggacggaaataaacagttccgctcctggcaggggcgcgatcttggggactccggcagcgcgttaagggaagtcctgctggtcgaatgcgacctggacatggcgtgggagcgccgagctgtccccttgtggatggggagctttcgttcactcagcagacgtttatggggcgcatgcgtgactctggggcgtttagctgagccggaggccccggctcttggggacgcggtgggctggcggcgtcggatcaccccgccatccatctcaccactcccagcgctgagcccggggggcggggagagtccctcatgggaaggggaggccgtgtgccccgcctggctcccaccacgttcgcaggccggccgggcgcccctcgcagccccctctccggcctcgcggtggcgccgctccccccttagcgcccagcggggtcccggccggaagactgaaggctgagtgggactgggcacggcgcgaaaccggcatcctgataactaggatttacagaataaggctgactcctgtcagctcgtgacccagccctgggcgtcctccacggggcagctgtcattccctaaccgccccccaccaaacccctgcacctccgagctgaatccgtgaggcggagagagggggctgcacttcccacgtggtagttccggtactcgttaatgttaaggaattagagtttgcttttcagtagacagctgctttcctgactgtggtggccaacctctagatccacctgcttgacttcgctttccagggaggtctcctatgtgaagaaacaaagctgcctcactagaaaagatcaggaaacagcagcgttctgtgaggtcctgtgcaataccaggttggaccttgcgggacaagtacagtgggttaaggatagtcataatgaaatctgccccaatggttagatgtattttggcgcctgcaatctctgcagtctttaaaaagaattaagtcagactatgtgctgatatgggaagatcatcaagggttattaagcacagaatgctgtatacatatagttgtatttgtataaaaaataggatctagatagaaaatttttgcaaagatccatcagaaaatgtctgtggcatttttgagacatgggtctaggaatttggggtggattggtgactcggtatgtcagtatgcattgtactctttggtactgtttaatttttttttcctatgtgcgtttaaaatataaatttaggccgggcgcgtggctcacgcctgtaatcccagcactctgggaggccgaggcgggcggatcacgaggtcaggagatcgagaccatcctggctaacagagtgaaaccccttattaaaaatacaaaaaaaaaaaaaaaattagccggacgtggtggcgggcggctgtagtcccagctacttgggaggctgaggcaggagaatggcgtgaacccgggaggcagagcttgcagtgatctgagattgcgccactgcactccagcctgggtgacagagtgagactccatctcaaaataaaataaaataaaaataaataaataatatgtaaatttaaaaaagaaaagcaggccggggtttgtggctcacgccaaaggcgtgagccaaattccagcactttgggaggccaaggcaggtggatcacctgaggtcaggagttcaagaccagcctggccaacatggtgaaactccatctctactaaaaatacaaaaattagccgggcatggtggcgggcacctgtaatcccagctactcgggaggctga

SEQ ID NO: 1244996 - DNA, 4001 bp, Homo sapiens
aacaaaaataagtacaaaaataaagtacagaagtaggcaaaactaatctatgatgtcacaagtcaggtagggagcatttattggaatcaagcgtggccaggtatattcaatttcttaattgttagtgacaggtgtgtagtttggaaaattcatcacctgaacacttatgatatatccacccttctacaggtatagcacacttcactaaaaagaaggcattacaaacaccagatggttggaaaccaccctctgagaaggctaggcatctcccttaccatctcagcaaaactttcttccggagaaaccccagcacacaaccctggggaagctggcagcgcccaggaagcctgactggtcccagggcatcaggcatcaaaatcactgagagggagttctttcaaatatgtgtaatccggccgggcgcagtggctcacgcctgtaatcccagcactttgggaggccgaggcgggtggatcacctgaggtcagattgagaccagcctggccaacatggtgaaaccccgtctctactaaaaatacaaaaagtagccgggcgtggaggcaggcgcctgtaatcccagctactcaggagcctgaggcaggagaatggcgtgaacccgggaggaggaggttgcagtgagtcgagatcgcaccaggctgggcgacagaatgagactccgtctcaaaatgaaataaataaataaataaaattgtcttcacatatacgggatcatacagcacctgcctggattctcttcaaaaacaaaacttccaaagccaacatgtaaagcctcgcagaagcctgtctcggaataacggacattccttttcctccccatcaggacctttgggaagcgcgcccttcaaatgggaggtgaggaggcaaccatccgaatccaggtcccgcccgcctcccgcgggaatccgaccgcgccgccccggccgcatcccccgcagctccgaagcacctgcggggaaggaggtcaccttccctgggcgctttaaatcatccagtgcttacacctggattccgacatgggaaaagaagtaagatttccctcaaaggcctcccttaagtcctttgactccaccaaacacgaagaaaaatcccggggagtgggggtggggagagtgacattttccgatggaaaccgacgggaaaggtgagacctgcaccccacccgcgccactcgccaccagaggcgtcggagacgccggctccgcggctccagtaaacccaagcgaagtcagctcagccacgggctacctactaaagaccctgaaaggaacagggggcaaaacggggttctgggcagggcgtcaatcacgctgtggggaaaatcccgataaccgtggagcccgcagggagccagggaacccgagtgggcgtggcgcgcggggaggggcgtccgcgcaggaggctggggttctgtgccgtctcccaccgacctcgacctcggcccgggacggccggctgggagcggtcacaacccggggggtgggggagcgcgaaaggccaggaaggtgggagccggttcgggcctggtccggaccccggctcgggctgggagcagcggcgagggccggggccgggggcttcggaggggagctcgggcggggccggggtcccgggtggaaggcctggccggaaaggggcgcccaggagaggcctgagagccggggaccccgggctgcgggaaggcccggccgggcaaggcgacagggccgcgcctcctcaccgtggtcctggttgaagccggcgtagagcagcccgttgccgtgagggttacacggcaggaggttcatggcgccgccgtgctgggtcgccgctcctcagcgctgcatgcctctcgctggggacggcggcctggtcccttcgggccggcgctgaggccgccgcggccggaagtgccggacgtacgtgcgtgcgtgctggatgtgcgtgtgtgctggacgtgcgtgcgtgcgtgctggacgtccgtgcgcgcgcccgcgccccaccagggagcctatggagcgccgagcgcatctaaccgaagcgaggcgagacgaggcgaggcagggcggggaggggcggggcggggcgaggcgaggcgaggcgaggaaaggcggggagaggcagggcgggcggggcgggatgaggcggggagaggcagggcgggcggggcgggatgaggcggggagaggcggagcgaggcggggcggggaggagggggcggggcggggcggggcgaggcgaggaaaggcggggagaggcagggcgggcggggcggggcggaggcggggaggggcggagcgaggcggggcggggaggagggggaggggcggggcggggaggggccaggcgggagcgcagagcacgttcgcgggagggtctggccttgtcatgcgcggggtcgccgcgggaaggaggatggcccgttgagggcttggcacggatacctgacggtcggaggaaggggggagagccggtaaaggaggctgacccaaaactgaggcccggtgcatcatccctcatgagaggcaagcccagaagcgccacaatactagggtcccccttcaggagacagagacccccaggacacagagggcccccaagtcactcagcccccccaggacacgcagctcctgcaggacgcagagggtgcccaagacacacagtccccaggacagagaccccccaggacacagaggacccccaagacacgcagtctccaggacacagaggtccccccaggacacacagtgcccccaggacacagaggtcccccaggacacagcactcccaggacacacagcccccccgggacacagaaacccccccaggacacagcccccctaagacacacagcctcccccagtacacagagtcctttccagggcacatattcccccagaagacacagaggtccccctaagacacacagcccccccaggacacacagaccgccaggtcacagagaccttcccaggacacagggaccttcccaggacacatagccccccagaggacacacagcccccccacgacacagcccatagaggacacaaccccttagtaccccacctaaaggacaggtggccctcacacagcacagcccccgcaggactccgggaccctcaggtcacattgctcacagggcacagttctcaactcttagggtcaggctgctgggggcatcctggtcacagagctttgtccctgggcttggctcatgcagtggatggctgtggaggcctgagtgctggccctcgtgtctcttgcccagggagtcctctccactccccctcctcactttcctgtcccctcctaggctctccctgttccctgcagcacacctgatctcctaggaggtcctgacactgtcccctcgcagccacctgcctccaccccgtctgtcatcctcatcccaccctcgccacttgcctgagctggtgctgacctcttagccatggggaggaaggagctggactgtaagctgagatcactggcccactcgggccaggcggtctccgcatcgtgggcattgaacacctcgattcccatacgagaggggctcctccctgagagcgaccagaagccttccgatggcggagcgagttgggccgccccggctgtgactagggctcgggggcccaggtccaaatcacagagctggggcgagacctaagtgcggtccaggggctcagcaccctcttccctgaagggcactgggttctcctctgtgcacacgtaccggtacctgctgtgagaagtgtcacgtgggggaaggagagaggcgtgggtaagggacatttcccttcatttctctgcttgccacccttggggcctccttcagttcacattttactcagtctcccggtggctgtacagccgggggcgggggcatgtgtggacatccacacacagcgctggttgtatcctaaccaggaaactcaaagcagccttgcccaccacagtgcgttgaatggtgaccctctaaagatgtgtcctggggggct

SEQ ID NO: 1244997 - DNA, 4001 bp, Homo sapiens
tgctatggggggtggccatgtgggcagggcaccgccaaaagccaaaaatggagcggcccagggaccaggtggcagctgagaacagttagaagtggagtgaatgcggccgggcgcggtggctcacacgcctataatcctagcactttgggagaccgaggcgggtggatcacctgaggtgaggagttcgagaccagcctggcccacatggcaaaacaccatctctactaaaaatacaaaaattagctgggagtggtagcgcacgcctgtaatcccagctactcaggaggctgaaggaggagaatcgcttgaacccgggaggtggaggttgcagtgagccgagatcgcgccactgcactccagcctgggcaacagagcgagactctgtctcaaaaacagaaaaaaaaaaaataaataaggaggtggagtaaatgggcaaaagcaggaggatcccatcagcagacacctgtccatggaggaatagggcaacttgagtaggaagtagggggcggctggcctgagaagcagcgttctgaaccccaagtttgcttcccatagccattcctcctccccaggcttggtcctcgggttcactgtaccctccccagcgccagccaccattctggacctccccagtactggccttcccctagaccagggagggtctagaccacagagtctgaatttactgtgctaacaggaaatacctctctttccaagcccagagcctctgaagaactaaggagcagagcggggttggggttgggggagacagtcttggagtgatgggggaaaagaaagatcatacaatcacatcccccacgttctttccttcaccacccatgggagtggataaggggatggaggagggtaagcaaggaggaggatgtggtaacagctgattcgtccccagaggtcacactttccaacaatcagctgttactggggcgcaaggcaggaagtttccttaaaggcgcaatgtcctgaacgcaggctcagaattttggagctccaagtgaaccttatcaattacctgatggagtgcgtatttaacagaaggaaggatctcaccctccagcctcatcattcctgcttagttaccctcagcccctatttggagctgaaggaaaaggcatggatttcagtccacatgttcctctttgggggacttgcggggattgataaggtagggcaggtctccggcttgcccctttaaaaacgccgaccagcagcttttgccaagtcactgggttcatttcactttttgcccatcccccgctcatctagactctgattggcccctggggaaggagcagcctgctcattggtctccaccttcgaatctcttccctaagtaggcctgagtcagtgaagagctttggagggcgggactgaatgggggttaatcagaggatgcgattgctgaccctttgcactttggcatggcccatcccctaatttctgaccagaagccctccctctaccctaaggtgaggactgtgctatgaatcttttgttagaaagctacctcttgggaggctctgggggctcttctgggactgggaagagacatccaagaaaaaaagcctcctgtggttaggaagagcccccaggaggagtgggctgggcgaggcgagcaccctccctcctccaaaaaccctggagagctctccaacggcagtctctgctgccctgggggctgacgctctgcccactcctgctccttggtccgctccacctttccttaaagagctatagcgtcccgcagaggccggcgagtcagtttggggaatgtctaaaagaagcactcacgactccaacaaggaggggctgtcgccctttaaggacttccccgggctggattccgagctcagtttaaaaatgccaactcacagagcgcgctgggttctgggaacgacggtgtcaggctgagaactacacggaccagcatgcattgcaaacgcagacgccgtggctttcgcctgctctttaggactctcgtttgacgtagcgcttttctaagcgggtcgctgacgcggagggctgggccacacctgtccgtctattggccggctcctcagtgggtgggcgtggcttcgtgcaattccgcccggcaaaagggtggcctccttgccaatcagagccagggcgcccggagaggcgggaccagggcgaggccccgtcggcccccgggtgggcggggccacgttgcccagcagtgggcggtgattggccccgggccgtgcattcgcagctcgtgcgtcacgacgccgccagctgatcggagcctggagccggtgtgtgctgggtgccgagaagagacagcgccgccggccgtggggagcggacgcagtgatttgctccccctcgtgcagcaacccccacacccagcaccaggtgggtgtgagctggcgacccggtcacgcagcggggagccgcggtaacgggatggagggtgaaagtggggtccgggcggccacacccagcccttccgggaggagaaggggcggcgggggcaggggcgcctcggggagaggggcctggactggccgggttagtgtgtcaggagctacgaggaaagagtctgggacgggagtcgtggcggaagggctggcggagtggcggggggcggggggagagccgaggggccggagggccgggggcggctcacccggcggcccccggtctgaggatacaggggccggccatctagcctggggagggtctggaccccccgagcgggcggcgaggaggtgctttgcctctgccggcgttcactgggtcagggccagttcagcgccctggcagggaaggggtcgctgggcgggccggcccctcctctcgttctctccaggggatgttatgtaaggggggaggggagaggagtagggggcggcggtgccggggccttatgcaacccaaaggttagggtttcaccgtggttgggcggggggaagagggcaagaggagggcctggaaactctaacccccgctccccagactaactggccgtcttgggccgagagaaggtcacctctgcacctccccccagcctgtccgattgtgaggcccctagcccaggcctggccctgactgcctgggaagccggctggctgggtggggcgcctgggttagtcatcactgggctgcctctctccccacctctcggccaactcttggcccctccccatggcctccggcgaggctgtcacccccacctccctccggccctggttccagcctccaactcctttggcctgtcatcctggctgtcagattgggctaggagctgtcagagtgccagagggttgatggagcagctggtcagagggtcagtgccctgggcccaccccgccctgcagccaagggcacctgcttggcacagactctcagcagctgctgagtcctctgggttgaacagagctatctcagacagaggaaggtcggacggagttggactggtcacccaggggaaggaagatacacaaagttcatgcctcccaagagggtttcggaatttgaaccgcaccccgtatcccccaatctttcttaccctctgagtatagaaattccaaggcaagaccgccttggcccctcagcctggcgtgggccatgcccttggactgagtgtcagcacggacccgccctccccagctcacatcccccgagcctgccacgcccccagccccctccctgggccatgctgcagggcccggcttttcctgctgattcatgcgttggaactgtgggggcggggcttggaacttggaacaaagttcagacatggaggggccggcagacagcctggaattcataccagatgtacccggaatgcgcaagcggaatgcctggcatctgagagtcctggggaagctgcccagccaccctgcccatacctccctcccctccagcctgtggtcccctgcccgcccctcacagccccggccaccctgccgatacctccctcctctccagcctgtggtcccctgtccgcccctcacagc

SEQ ID NO: 1244998 - DNA, 4001 bp, Homo sapiens
ttccgtgaagtcctcccggcctgtggtctcctggatggtctggaccaacagcttggggatgaggggaggctcgggggcaagggcaggagccccagccaggcgctgggggtgtggctgatcgaagagctgcaccaccccgtagctggccaggtgagtgtgggcgtccaccaggtgcagacacacattcttttccttgacagcctccttaccctggagtttatagccaaacgtgaggtcgatccaatggtgcaggtcccgggatacctcgcggctctccagcagggctcggtgggcagctacgaactcctggctggagctgcaccaggctggcacatccaggtcaggcatgtcggggtggatggagcggaagatagagggatcggtgtagaactccggaatgcactcatccggggtccagttctgcatccgctccatgctggccggatactcatggggctcccactgcgcgcggacgtgtccgcagagcaccgaccgaggcgtgcgccgagccttgtacacatagtacgtgatgtcggagagcacgtctgagatgtggtggggaacatgagggggttccccgccgcccgccccgcctgctacgaatgcctgccgtgtcatctcatacgtgaagtccagttgcttatcccccttgttgaggcggaacttggacttgcgcaggtctcggaagcgcccatggggcgtagtgaagtccaccacccagggcagcacggggtggtagttggggtccccctgccgccgacctgccaaccgattcagctgcatgaggtagtggaagttgctgatgcggccgtggacccaatctagcacgaggctccgaagttcctcctggccagtgggttgcccaggttgccctccctgctcctcttgagacacaatgcccgcctcatcccttgccacaggggcctcctcattctcgtcctcctcgggcctctcataagcactcaggtccagtcgcagctcgctgcaaagcttctcatccactgcgatgtgatacaaagacagggccccacacgccagcccctggcggtgacaggcgtccatagccctcagcacgcggaagagaatgaacagcaccttggcctggctgttggtcagcttggcagggctgaaggtgaccacgtcatgtagggagaactgtacgtaagggtgtaccacatacagcatctccggcgactccagcaaggcctcagcccgtaaaagactagggcaagcagggctgccccgaggggggcaggggccttctctggcatatgaagggcattgggtagtttcacccactggcaggaaggagcaaccatagaccctctgcagagcctgccgtactgagtccaaggcagggacagctgagggggcagggctgtgactgtacggctggccgtaagtgtggtatgcatggcgccacaggttgcgataattctgggcggcaacctcctgcatgaagcgagtgagggtctcagggccgcaggacccgtcctcaaagggcaggcccccgcccagagggtaggacagtctccgcttccgcagcccatgcacctccacgcgcgtccagccggcaggcagcctttgcacagagcgctgcaggagagtcctgacttccgcttctcccaggccctctgcgcggggacagggtcccaggggcagccggcgatcgcggaggctggccagccagcgcgcaggcactagggccaccacgtgggtgccccccggggccggagccagctgcctgggatcgatgctcaggtccctctccacgctccggagcagctcctgcatgtctgggcttggcggggaatgccagcccccggccggggttctgagagcgccttcccgccccccgctgccctgggccatctcctccaggccgcccgggggcagcgcggggctgagcccagccacggccctgctggcgacggcttccggggtgccaggccggcggggctgggatgggcgcgggacaggggctggggcggaggcggccgcaggaagccggcggcggcgaagaggcggacggggggcgcgcttacccctccgcgggtcctgcgctccgggcgcggcggggcagaggctgccgggcgcgagcaccgggctccaccgtgacgggtcagctgacgcgggtcacgtgatcgccccagcacggaaacaagcgcacgtggctccagaggcccgggcgggaccccgcttcctgcccggcggcctccccgccctccctcccgctgctccgctctggctcggtctgggctccgcttcctcccggggctgaaagggtctccagccagctccagccgggcccggcggagggcgatgcctaccgccccacccctccctactccctccagcacgcaccagcgcgcgggtcccggaggctgttcccagagatgccagcctcttagttaagtgcggaccgcacaaccaggggcagaactgggacttctgttgtgtctatttttgagacggagtcttgctctgtcgcccaggctggagtgcagtggcgcgatctcggctcaccgcaacctctgcctcccgggttcaagcgattctcttgcctcggcctcccgagtagctgggacgtcaggagcgcgccaccacgcccggctaatttttgtattttttagtagagatggggtttcgccttgttggccaggctgatctcgaactcctggcctcgtgatccacccgtctcggcctcccaaggtgctgggatgacaggcgtgagccaccgcgcccggccagaactgggacttttgacatggaatccccccggcgcctccatgccaccttccataggaaggagctttttaactttcctaagtacttcaacagtcacattccatttggccctcgcaacacactctgtgaggtagggaggacagttattactgtttatattttacaagtgataaccaacaaccgccagagaggcttgtccgcctggcggaatggagacttagaaactggtgccagccttctttctgcccaggagcactgcctcctgacagccctctcacggctttttaaaaaacaaaactggccgggtgcagtggctcacgcctgtaatcccagcactttgggaggctgaggcagctggatcacgaggtcaggagatcgagaccatcctggctaacacggtgaaaccccgtctctactaaaaacacaaaaaattacctggccgtggtggggggcgcctgtagtcccagctacttgggaagctgaggcaggagaatggcatgaacccaggaggcagagcttgcagtgagccgagatggcgccactgtactccaacctgggcaacagagcgagactccgtcaaaaagaataaataaataaataaataaataaataaataaataaataaaaataaataaataaaaataaaaccaaataaataaataaaaataaataaataaaataaaataaaaataaaacgaaaccctgggctgtctgagggagagaagtggcccaggcccagaggcctggtgttttgggggaagaaatgttcccccaagacttcctgttgaagattggcctctgcggtaccacagagcctgccagctgtggtcagagcctccagatgtcactgtggctgggggaagggtgcggcacaggatatggaatagaaaccagacagccggcaccaaagcaacatgattcctcaaggggtcttagttctgactcatctgcaggacagatagaccattgtctacagtgaaaccactggccctgtttcttttgtctccctcttaggagagagtttgcctcttgaaggagtttggtgtacaggtgtgagggtcccataaagacacttaggaaaactaggccttggccggtcacggtggttcacacctgtaatcccagcactttgggaggccaaggtgggcggatcatgaggtcaggagttcaagaccagcccggccaacttggggaaactccatctctactaaaaacacaaaaaaattagccgggtgtggcagcgggtgcctgta

SEQ ID NO: 1244999 - DNA, 4001 bp, Homo sapiens
ggcagctacgaactcctggctggagctgcaccaggctggcacatccaggtcaggcatgtcggggtggatggagcggaagatagagggatcggtgtagaactccggaatgcactcatccggggtccagttctgcatccgctccatgctggccggatactcatggggctcccactgcgcgcggacgtgtccgcagagcaccgaccgaggcgtgcgccgagccttgtacacatagtacgtgatgtcggagagcacgtctgagatgtggtggggaacatgagggggttccccgccgcccgccccgcctgctacgaatgcctgccgtgtcatctcatacgtgaagtccagttgcttatcccccttgttgaggcggaacttggacttgcgcaggtctcggaagcgcccatggggcgtagtgaagtccaccacccagggcagcacggggtggtagttggggtccccctgccgccgacctgccaaccgattcagctgcatgaggtagtggaagttgctgatgcggccgtggacccaatctagcacgaggctccgaagttcctcctggccagtgggttgcccaggttgccctccctgctcctcttgagacacaatgcccgcctcatcccttgccacaggggcctcctcattctcgtcctcctcgggcctctcataagcactcaggtccagtcgcagctcgctgcaaagcttctcatccactgcgatgtgatacaaagacagggccccacacgccagcccctggcggtgacaggcgtccatagccctcagcacgcggaagagaatgaacagcaccttggcctggctgttggtcagcttggcagggctgaaggtgaccacgtcatgtagggagaactgtacgtaagggtgtaccacatacagcatctccggcgactccagcaaggcctcagcccgtaaaagactagggcaagcagggctgccccgaggggggcaggggccttctctggcatatgaagggcattgggtagtttcacccactggcaggaaggagcaaccatagaccctctgcagagcctgccgtactgagtccaaggcagggacagctgagggggcagggctgtgactgtacggctggccgtaagtgtggtatgcatggcgccacaggttgcgataattctgggcggcaacctcctgcatgaagcgagtgagggtctcagggccgcaggacccgtcctcaaagggcaggcccccgcccagagggtaggacagtctccgcttccgcagcccatgcacctccacgcgcgtccagccggcaggcagcctttgcacagagcgctgcaggagagtcctgacttccgcttctcccaggccctctgcgcggggacagggtcccaggggcagccggcgatcgcggaggctggccagccagcgcgcaggcactagggccaccacgtgggtgccccccggggccggagccagctgcctgggatcgatgctcaggtccctctccacgctccggagcagctcctgcatgtctgggcttggcggggaatgccagcccccggccggggttctgagagcgccttcccgccccccgctgccctgggccatctcctccaggccgcccgggggcagcgcggggctgagcccagccacggccctgctggcgacggcttccggggtgccaggccggcggggctgggatgggcgcgggacaggggctggggcggaggcggccgcaggaagccggcggcggcgaagaggcggacggggggcgcgcttacccctccgcgggtcctgcgctccgggcgcggcggggcagaggctgccgggcgcgagcaccgggctccaccgtgacgggtcagctgacgcgggtcacgtgatcgccccagcacggaaacaagcgcacgtggctccagaggcccgggcgggaccccgcttcctgcccggcggcctccccgccctccctcccgctgctccgctctggctcggtctgggctccgcttcctcccggggctgaaagggtctccagccagctccagccgggcccggcggagggcgatgcctaccgccccacccctccctactccctccagcacgcaccagcgcgcgggtcccggaggctgttcccagagatgccagcctcttagttaagtgcggaccgcacaaccaggggcagaactgggacttctgttgtgtctatttttgagacggagtcttgctctgtcgcccaggctggagtgcagtggcgcgatctcggctcaccgcaacctctgcctcccgggttcaagcgattctcttgcctcggcctcccgagtagctgggacgtcaggagcgcgccaccacgcccggctaatttttgtattttttagtagagatggggtttcgccttgttggccaggctgatctcgaactcctggcctcgtgatccacccgtctcggcctcccaaggtgctgggatgacaggcgtgagccaccgcgcccggccagaactgggacttttgacatggaatccccccggcgcctccatgccaccttccataggaaggagctttttaactttcctaagtacttcaacagtcacattccatttggccctcgcaacacactctgtgaggtagggaggacagttattactgtttatattttacaagtgataaccaacaaccgccagagaggcttgtccgcctggcggaatggagacttagaaactggtgccagccttctttctgcccaggagcactgcctcctgacagccctctcacggctttttaaaaaacaaaactggccgggtgcagtggctcacgcctgtaatcccagcactttgggaggctgaggcagctggatcacgaggtcaggagatcgagaccatcctggctaacacggtgaaaccccgtctctactaaaaacacaaaaaattacctggccgtggtggggggcgcctgtagtcccagctacttgggaagctgaggcaggagaatggcatgaacccaggaggcagagcttgcagtgagccgagatggcgccactgtactccaacctgggcaacagagcgagactccgtcaaaaagaataaataaataaataaataaataaataaataaataaataaaaataaataaataaaaataaaaccaaataaataaataaaaataaataaataaaataaaataaaaataaaacgaaaccctgggctgtctgagggagagaagtggcccaggcccagaggcctggtgttttgggggaagaaatgttcccccaagacttcctgttgaagattggcctctgcggtaccacagagcctgccagctgtggtcagagcctccagatgtcactgtggctgggggaagggtgcggcacaggatatggaatagaaaccagacagccggcaccaaagcaacatgattcctcaaggggtcttagttctgactcatctgcaggacagatagaccattgtctacagtgaaaccactggccctgtttcttttgtctccctcttaggagagagtttgcctcttgaaggagtttggtgtacaggtgtgagggtcccataaagacacttaggaaaactaggccttggccggtcacggtggttcacacctgtaatcccagcactttgggaggccaaggtgggcggatcatgaggtcaggagttcaagaccagcccggccaacttggggaaactccatctctactaaaaacacaaaaaaattagccgggtgtggcagcgggtgcctgtaatcccagctactcaggaggctgaggcaggagaatcgcttgaacctgggaggcggaggttgcagtgagctgagatcacaccactgcactccagcctgggtggcagagtgagactccgtctcaaaaaaaaaaaaaaagaaagaaagaaaagaaaagaaaactaggcctgataggagagaaaataggagggccgggtgcggtggctcatgcctgtaacccagcactttgggaggctgagatgggcagatcacctgaggtcaggagttcaagaccagcctgaccaacatggagaa

SEQ ID NO: 1245000 - DNA, 4001 bp, Homo sapiens
gagtccaatgcaatcaaagctttcttgttagacatgagttccaagctcatcgttccctcactggccatgacaactgtgccctccgtgcctggctctgtgtccactctctcacctgtgaatgggctgctgatgcccaccatgctgacatgtcatgccaacatacacgacgtgcccggcacggtgctggccacagtagccctcagcacgcatgaaggaggaatcctcgggctccagtccctgatgaactgggacatcgctcccacctctccttccaggcttcggtgttaatagacaggatggtgccctgtttctctccaggtgaacggggcctgtgttccttcaccttcctaggacctgcagggcactcctgcatggtccccaccctgtggctcccacccccatcactcacaggctcatatggtccatctctggcttctggaccccactcacctggtccgcctcacactccagcttctggatcccactcacctggtccatctcacactgtggcttctggaccccactcacctggtccacctcatactcccacttctagatcccactcacctggtccgcctcacactccagcttctggatcccactcacctggtccatctcacactgtggcttctggaccccactcacctggtccacctcatactcccacttctagatcccactcacctggtccgcctcacactccagcttctggatcccactcacctggtccatctcacactgtggcttctggaccccactcacctggtccgcctcacacaccggcttctggaccccactcacctggtcaacctcacactcccacttctagataccactcacctggtccatctcacattgcggcttctggaccccattcacctggtctgcctcacactgtggcttctggatcccactcacctggtccatctcacactcctgcttccggacaccactcacctggtccgcctcacactgtggcttctggaccccactcacgttgtcctcctcacactcccacacagtccctccccgacggctcccacccccgtcactcacaggctcacgtggtccatctctggtctctggaccccactcacctggtccgtctcacactcccgcctgcaggtgctctgtgcgtccacccagaggttgggattcatgtcgttggggcagatgccggcgtgggaatagcggatgggcggcagcgccaggcttcgcgggggcaccccgagcagtagcagcagcagcagcagcgctgccacctgctcccagcgagaccagaaccggcgacaccttggggcccacatggtgcaggctggggcggctagagacctcccctgaaacgatgccagggtctggggcccaccagggccttcttctcaggggctgcagacacctgccctccccaccccagcaggtttcctgctcaggctgctgctcaggctgctctgccgctgctgcctccaccaagtcagcacagcctgccgggctgtgcggcttcagataaaagaaaggtctttagaaggaagctccctctcctgagtgtgcagggagaggagccacagcaggggcccgcgcccggatttatatcctgggcgcgccacccgagtgggagccagctaacctgatgcctgtcacaggcaggctgctggcgcctctgtcccgtggctgatcacagacttattgcagaaggggggaaaaaaaaaaaaagaagctggaagcagtttaggcagcgtatctggcacggtgggacacctgcttgtttttgactccaggaggcctttaaccccttcaagggccagaaatggcatgtgctttgcggggagctggctccaggacacgcaagctcactctgaaggagggcttgtttccctttcccccacctccttggggccgggccccctcctcccctttggccacctctaaagaacacacaatcgcttgttacgaggagggacctgcagccaccgggttagcatcgcccggcttgatagtacatttgagagcaaatgacgtggaaaaacaacaagttcacggccattccagggcgggcctgcgccgcgctgtgccctgtaagccgactcccaccccggccccggccctttgtggggggtgtgcgcacggacagctctgtatctctgtgtccagggcagtttgcgtcttaagttccaacttcagttaattttccccaaatcattccagagacacataccagatatgctctggccccgccggcggctgggacggatcacattcctccctcttccatcgacacaccgagaaaacctccgcggtcacagtgtctcaggattgtgccggagtccagctgccctcgctgacgaccacagtggctgctcttcagtgagctccttctgactgccagccttgtctggcctcccccacttcccaaaggagaaggtctgtggtcgaagagggcgagcgacttgtccaaggtcgcacagagtgagcagtcctggtggtaccagctgccagatgcactgggctcttcacacgtgtggcttctctgaacgcatcatctcatttaatcctcacaacaaactgcacctccatttcagatcggaggaaaggacgcacagagaggctaagcaacctgcccatgtcgcacagctaccccaccacggtacaggaaacagggacaccagcttgctgggtgtgggcaggggccttttaaaatcacccctcccccatccatctgccagaactgctgtcaaggcacagcccaaactctggttttcacagactggacaagaaatttttgaaacatcaggggctatatttgtggaggggccgggaagagagccagaagctgccaggggctgggggcgattcctcccccatttggcagcaaatggcttctatctaaaatgccacagagcagcctgcagtctgagtgttttcgagttggtcactcgatcctgggggtagggggcggaggcacatagagccccgaaagagaggtacctttccaaggccaaaccacaagggccttgaggagctgctgtgtcccggggacagtaggtggagtggcccccacacgcatcagatacggaagggatcctgaaggtaatctcgctttacagctaaggaaactgaggcctgagcccaggccgctccttccccacgtccactttccccttcaagaacacagctcgccatctcacaggactgtaaaacggccacgggaccctcgcttccacacccagacccttccccttcccagccgggcgggtgctgccttctccccgcctgagctggtcccttcccgttgtgcggccattctgcaggatctgtcttttctgcttatgtcaaatcgctaatgaagggtgtcagatcctaatcctctaaattattggaataaacttcccttcgaggccagtccccgtaatgaagccagacagcgggcgacgccggctgctttgaattccccgtaatttcatcagcccgtgttccagctgctccgcgcgggggccttcacacagcccttggacaaacgcggtttgcgcagcctcctttgatagcacaaagggacatggacagtgacacatttataagcaggacttagaaaaactgtcacagccccattaggccaggacaagtatccaaggagaggaggccgatttctgggcagtcccaagagaccattagagggtgtgggagagatgagagggggtcggaggaggggaggcaccgagcagaggttggggggtgctgaggagggcaggagaggggcacacggcagggcaggggaagcttggccatcctacccccactcctggggctgatggagaaagcccccacacccaacctggtcctgtctcaagccacggacttctccttcccgggccccattcctggacgttctactctgagaactctcaaagcagcatcgggaaagagaggagcccaaagcactctgactctccctccagcccttccaagtctcccaccaaaacacagctcagaataataaataacatctg

SEQ ID NO: 1245001 - DNA, 4001 bp, Homo sapiens
tgagagcttaataatttgccttgaagttatttactaaatccataggtaggctaaaactgtccttattccctgtggttctcttctgatttgtaaaaggagaacagaatagccaaaaacattcagtaagacagtcaaaaaccaaaaccgtaaggcaaaaataacagcatgaaaaaggacggggaccctgggagagcccaaagcaataacagattattcaagtcctttaaaaaatatgaattctggacaggcgcaggggctcacgcctctaatcccagaactctgggaggcagaggcgggcggatcacgaggtcaggagatccagaccatccatcctggctaacacagtgaaaccccgtctctactaaaaattcaaaaaaaaattagccaggtgtggtggtgggcacctatagtcccagctactcgggaggctgaggcagaagaatgggcgtgaacccgggaggcggagcttgcagtgagccgagatcgcaccgctacactccagcctaggccactgagcgagactccatctcaaaaaaaaaaaaaaaacgaattctgggccaggcacagtggctcatccctgtaatcccagcacttgcggaggccgagacaggaggatcacttgagcccaggaattccagactagcctggacaacagggcaagactctgtctccaacaacaacaacaaaaaaatatatatatatacatatatatatatatatatatatatatatatatatatatatatatacacacacacacgttaggcgggagtagtggtcacacctgtggtcccagctattggcggggcttaggtggaaggaccacttcagcccgggaggtcgaggctttaaggagccatgatcatgccactgcactccagcccgggcgacagagtgagaccacgtctcttaaaagaaaaaaaaagaaaaaagaattccatcacatatcagttccttgcctcaatgctatttttaagaactttccttcctgataaaaaactcgaccatacacactgccatgctgaacactttaacatttccatcttggccgggtgcagtggctcacacctgtaatcccagcactctgggagtccaaggtgggaagatcgcttgagcccaggagttcaagactagtctgagcaacatagccagaccccacctttaaaacaaaaaaaaaaaaattccatcttccctcacttcacaccacttcaacatgaaccctcaactccagacgttccaatgcgcatcttaacattctcaatccaacctttaactaaattctgattccttttcaaagaacgctctcaagattccctctagtgtaagcagtttcccgagccatcttcccaaacactagctttcacctaactcaatccccaaaatgtcacactggactcctcacccacagcatcctgctaattagccgttcccaacaggtcctccgttcccgtctccctttttgcgcacgattacctcgttcctcacagagttgccgccttaactcacccaacccttcaggagcccttattgcctgtctctcaaaaacgttcctccccatttttccagtccccgctcgccccataccaatattcgaccactcctccccagattccccacgccctctctcctccaggttcttccgatacagtcccccggccccccgcccctcaggccccacccgcaagacccctctccccctccggcccctcctctaatgcccccctctcttctcaagccccgccccgagcccccctccccgcgactttccctcccactcaggtccgcaggtcatttcagcgactgacccagccgccccggcctctttccgacctggccgcagctgctctgggagcgaatcctctgccgcctacactccggcttcgtcctgtcctgctcgccccccggcaagctctttctcgccgtcgccgccgccgccgccgccgccgccgccgccaccgccccttttgccaacccggaaatggatctgctcccaccgtccccagcgtccgcgaacaaaatggaggcgggggaaaaaggaggagagagcagggagcggagagatgcgagacgcatgcgcccctgggaagcccgccccctgccggcccacgtaaaggcggaagcggttgagtggacgccatcttaggaaggtcacaggaattccgcttaccagctaaaagctgggtttgcaactttagctgcaattggaatcacctggcaagatttaaatactatgatgcctggttcccacccctggaaattataatttaattctggggtgcagcctaggcatcaggaaattgttgcaggtgattctaacgtgttgccaaggtggagaaccactgagctaaacagtcattgttgaatatactcctttcgtctttaatccgccgcacacacacacaccctcccccctaaatatccttccttaatctcgagttaacgaagaacccgcctcggccaaccttgcaaaggccaagtagtcaagctccggttgtcatggcaacagaggcaggccactgctcacaagtcatcatttacgtcatcttacccacctgactcgaacaccgtctcttctttctcgggctggggtttcctccagcttccagggctataggatggtgctgtggacccctccagctgcttgggccagagagagaaatcctgtgccctctttgatggagctgctgttaaaccctgacagctgactaagtatctctccctagtccacccagaaaagcgctttccattatagcttcaaaatactcttggtttaattccattcccagcacagaatccgaagtaagggggcaagattgggacttagtccccattacttacaagctgtgtgccattgggccttagctaccctatctgtaaaatgggtctaatagtgcctgtcccgtctgtctcatagagttgttgcaaagctgaaatcagttaatgaatgggaaaacgtgatagagcataagttgttattatttttgttttccttctattctgccatgagtagtactaggcaccacccactagtcaagtaaatgtcacattgagtacctgctaaacaccaggagatggctacagaggtgactaagacagagcctctgccctcagggaactcactacgttggtgggcagactggcataaacagctagctgagatacaagtcagcgtgtgattagtgctgtgggacgtcagacaagggagcaattaattcctgctaaagaatggaaggaggtttcctaaatggtttggagctgggccttgaaggatgaatggaattttattattaatcagagaaggcagggaacacagcaggcatagggatcaaggacacgaggtaaagattttcagctgtctacatcctgcatggccatacgtggggcgatggagccagggagatggtgggtccaaacaccttaccagagcctcccaactcttcaacctcatcccctgcctgtcccctcctcactcactctacattatgaggacctgatttctatcactgcaatgtaccccattcagcagttcccacctcagggactgtgtactggctatcctccgcctcttcctcatttttcaagccttactgcaaatgcttcgtcctcagagggcattcactgcccactgtagctaatgtaaagccccatgctctatcacacactctgtgataagggcagccgctgggatgaatatagggacatctcacccagacttggggaaatagtgatataggcttcatgaaaaaggtaaatggcccaagtgcagtggctcatgcctgtaatcccagcactttgggaggctgacaggggggatcgcttgagcccagaagttcaagaccagcctgggaaacatggtgaaatcttgttactacaaaaattacccggatataaccgggcacggtggctcacgcccgtaatcccagcactttgggaggccaaggcgggcagatcacctgaggtggggagttcgagaccaacctgaccaacatggtgaaaccccg

SEQ ID NO: 1245002 - DNA, 4001 bp, Homo sapiens
atggcaatacacctaaatgtattcagtaaggggcttgacttattttaaaatccaatgtcataccctctgtggctcaaagcaactgactgtgacaagaacttttatttataggcaaggcaaagctgcccagcagagcttccatccaagaaaataaaactaacagtagggagtaaggaaattaactttcaaagcaccctaccgttttgaaaataacattcttattcaatttctgtagaaagctgggactttgcgttatttaatggctagagtataaattaacacccttttttgtcaaatctaatgatgttacaaagcagaatttagaacatttactacttacaagcaaactaaccccctttcttaacttgtgttcaattgggaaggaaaacatcacccaggcatttcaacagccatgccctcttgcaaaatgtttcttacagaacatcaggattttatctataccagcatttttataaactgcaggtctcaactcatgagtggatcctaaaacgcaattcagtgagtcacaagcagcttagaaaaaaaggacacagaaaattgcacatgatattttgtgaatagtgtatgtgttatgggtattgggtgatgttgcaatacatatttcgtattgtggattgtggtcaagaaaaacttgaaagtcactcaaataaccaagctgtagagctactcgattacatgattacacatatgggtttttcaaacaaaggcatattgttcagcaccgggtgtttttaaacagaaacataaagggaatggaagccagggtggctaatggtacataatggccttaattacaccactgaaggatcaatattagcgtagctcagtcaccagcagccaaggcacagaaactggtacagcaggaagtgggaaactgggaatcggtcatccccgcctgatgctcagggtgcacattccaaaaagatgattccatatggtccccagggctcgcttccatgaaaatagggaaagaaacaggcgtttgcctgtaagtcacagaatcctgcagatgcctgaaacacacttcagcccagctccctctcaaagcccaaatgtgaacatcgaagtaaaacattaaaaatccactcaaaaacaacagggtggagctcctgtttcctggagagaaagcagtctgcgcccgggaaaagagtcttggactccgagaaggagatcctgcctggctgggtgggcgatgtgaaaacagccaaagaaatccaaaggtttcttccatccagagcgggcaggcacgatgccctgcgtcggggatgggacaggggctggcctggccgcagggataggctgcctctttgtccgaggccctgcccagatgccacgttgagatgctcaaggacaaatgggaaagtttttcctgtactctcatcttcctgggccccaactacagagtcctgggtcaacttgcaacttcctctcctttctcatctctttcttttggccactgtctctcttccccagacacccactttggtcactggctttcccaccgccctgctccccccatattccgtggcccccgcagccccaccactccctttgcgaactccctgctttcacccttggcccaaccttgtcgctctgggaggacactgggagtggggtggggtggggggtgcggcaaaccccactgaaggggtacggggataacaagatcccaatgcgtccgaagcagacaccggccctcccgccgaggccgcctcgaggcggaagccacaagctgctctcaggacgacacccctgggtcctgacactctgtcccccacctccctggcaggggccgagtcgcagcttacgtgcagtcctggttgaaagagaagcagctgagcgccgactcaaccccgcccgggggagcgtccgcggcctcggcctccatcgggggctcggcccgggaagccgcagctcggagccggcgacagccacctcagcagcccgcccgcgccggctccacgggccgggtcgccggtcctgccccgcccctaccccgccccgtccccaccccgcccctaccccgccccgtccccaccccgcccctaccccgccccgtccccgccgcgtccccggcttcgccccgccccttctcgcccctccagctggtcccgaggaccagagcacctgatagggcggggcccctgcctccggccaccattggccacgagcccaagccacggctggcgggcaccgccccccttggccaatccgtggcagctgtgggcggacccgcccggctggcgacccgcccctggcttcgtaacgcggctctccattggacaaaggcgcgtgacgcaaaggcagcaggcccacgtggcggtgttttcattgccggagccgcccagctgggagggagagggaagaaggaatgcggctggggccagatctgctggtttcagtccggcaactgcgtcggggccgccgcaagggtgacaggaggacgcgctagttcccaccccgcccagaccccttgccatgtgtaactctgcctattaaacttacagagtttagcagagagcgttagactccaaagccccacccttttgtcgagtcctcaagccgcattgagagaagctcctgaaatggggctgcctcagccagagagatagcaagttatcttatccattgccgagcggttgagaaccctcactacttgccaagcgcgccgtactatgtatgtcatcttgaattcttataaaacttgtgtggaaaatacgattgtgctcaatatacagaagaggcaactgaagctccaaagctaaacaatttgtctaaagtaacagtaaatggtagaatgtctgcatgtctgctttcaagacctgtgcactaaataactgctaaacagtaatttgcaaaaacaacgtagcacctagcatgcgagattctaggttttctaaccaggacagaaatgactgcagcatttgacggagctggaaggtggggggaagcacctttgatctgaaaagttacaaaaatggcacaaagtatctaaacaagacctatccgatccgcagctgaaaaaaatgaaagtgtgtgtagggcagtgtagtttatgaaaggggtaacgtcttgaagatatagcacaattcaaaactcacgtaattcgagataaaccttaacaaagaatctctttttaaaagctgagtactgtacatgttcccatgcggaattactgtcaatacggtttatgaagcaggagctctgccagctttggattgtataactgctgatggatttttaattcattttttcaaattttgagatgatattttagttattgttatatgacagtctctcaaatcagcataattcaaatttattaggttggtgcaaaagtaattgcggttttccccatttcccacttttaatacccagtttatgacaaagctacttttatgtatgtgtatatatatatatatttaaccttggacctacaatagatgaacaaagggcactatttcacctaaacctttctggttggatttccggtttgtgttttctgagatgcaaatgtaacagtttcttttctcaactttattatttttttctctccactgatgtaaaaaatagttcagctcatagattcacagatgttattgctctttggctgattgtgaggtgttgtataaactatcagaagtgaatggaactgctgtttagatactttgtgccatttttgtaacctttcagatcaaaggtgcttccccccaccttccagctctgtcaaatgctgcagtcatttctgtcctggttagaaaacctagaatctggcatgctaggtgctacgttgtttggagaattacatgaagtgtaccataaagtttttaaagtgtaagctgttattatcagtttgttattaagagtttggactttatgggatagacctgggagctggtgttagtttttgagcaggagtgtttcatgataaaaaagcagtgtctttgtcagataaacttggccagggtgtgcagaacaaa

SEQ ID NO: 1245003 - DNA, 4001 bp, Homo sapiens
ttacttgcccagtgggctgcagaccctgaactctccaacagtcccgcacgtaagctgatccaaggacacacccaacctgggcctggggcagccccctagaccccctgctggacacaagcacctttatgcagcccggtcccagagccctgagctcaatagtgcctttgtggctgcccaggccggccatggggcgggagggggcacccgggggctggcagtgagcaggcagcaggcgggcagcaggatactgcgggcagggaattggggccggcaagggggttggccccagaaacagaactgctagatccagacggaaggcgggagggatatggagggaggtactgagaaggaaagaaaagatccaggactaggcgccaggaggctgcccacccccatagtcgtcccgccccggctcctctccctcccctcaccccccaatttggctgcctctcctggcctggcccagagcctggggcgcggcactggcaggcgcaaggggcgagccctgtgccagggctggagagggacccttcccctaggctctgtcccctgatctgaatcggaagcttcaggccccaagttgactgggttctcctaacccatatgtagcatgggagcaatgggaggaaggtccccctaaagcccatgggcttagtgcctttaggtctgggaagggagagcacaggtaggcagtgggatgaggagcagaactggactcactcgagagctggagctccctatgtccccctcctcgcagctgtggagaagtccagaagtctgactgctccagaaggggttagggggccctattctgccacaactgccctaaatcttctggagttggagatgacccttgcccagctcctggcttcccgcatcccagcctcctggtctgcaaataggtgggggacgggaggagtgaggggatcaagaggaccagggtcataactgaggatctcaggacttaggggagaggaagggattgcgggtacccaccagcaggaaactgacctgaactggctcccctgcctaacttcccatcctattttccacctctcagggttgagtatggagactttaaagtgagaatgttcatacccatgggggagtcaccagacaccacctgcctcaatctctccttctgcagcccagagtcagccagatcattcagggcaaagacagcagaggtgtctatagacatttgactggaaaaatacatgcttcccttgatgctgtctcccccaccctctgtctgtcatcctaagacctccagagtcccatcccaaggtgccaccgagggggctcccagccgcacctgcagctcacaccaggccacctccactgtggtgtcggtgtctagccctcgatacaccgtcttgaaggagccacgtccaatctcgatgtcaaacttgaggtatcggccatcgggggacgttgccacagcctgggtctccatgtcctccttttcttcctgctcccgccgccgctctagggccacagcttcagggacccttagcggctccctggaccccgggcccactgcagagtccgggagctcgggacgcgcggagtcttccgcagccttcacaggggctccctcggtccacgtgccctcggggggttctttggagctaggcggtgggctcctcgcggggccaggaccagcggagtccggaggatcgggggggtccggagcgggtgaggctggcagggaccaagagctcagcagccccaagtcgactgagctacggcggctgagacgagaagagcgcggccggggctcagccttcccggagaagcggcgcgctcggcgaggagggggcccgaggcggggctgccccgcggtgccaagaggaggcgggggccgcagggccaggtcggcctcagtctgggacatgaggacggtggtctccgtggccggggatgccaacatgaggaagagcagggcgccgaagggtagaaaatcagacggccggagaggaggcggcctgacagacggactcgctgggtgcgctgcgctccggctgagcggctgcggccccagcccccagctcggcctggccccgcccccgtcgccgccccgcggcccgcccttgccccccagggccgcccctccgagctgctcccgcggtgcggatcccgcgagcagcccctcaccttagtcaccgccccgcccagccgcgtccccttctttcccgagcccccggccgcagtctcactctgaggccagaactgagtgggagaccgcggagcatcctcccgcactaagagtgagcaaacctgtttgtgcgcggaggagggcaggagagaacgacacccggaccctagtgggggattacttagggggaggctaccaccctcctgcacaccccagataaggcagcaccaccccctcctaactgtccggagtagccccaggccgaacggagaggtcagtggaaaggtctgacgttgttgtccctctggtctgcatagggaatgggtgtgtactccccaggataagtccctcccccaaaccgagagcccggtcatccatcccctccaggccaccttggccgcagcctaaccctggccagagtggctgtttttgctatatgggctctccttcctccccttctgtttgccagtctccaataaaccaaagtccacatccggcttacccccctcagctccccttggccacagttaccccacccagaccagatgggtggagggaggggcttcagagtagttcaggacttccatgagggagatggtgagggaagggggagcccttaagtgactccaattcagagagaaagcagtctgtccccaagctgtgttccatcagcactcctccacacagcccacccagcagatgtaaaaccacaggctcactggagcccacagggccctggaggaccttttcttctacaaaagccataagctttcttttctctcccctctcccaggctgggatttactcaggtggcaacacttcacagccctccccatccccattccagtactgtagtaatttaagaggcaggcagtgggagttgagattttaatatcataaatcggtgtggggccacacctctcactgccaggcccgtgggcctcctatcttcatattgcctggaaggctgcctgcagccagggcttcccccatcccctaggaaggatccagcaccagcctgagaagggaggcaacagcagctaaaggggtgggaggaggaggagacagaagcatgtgctgcaggcgcatgtgtgtatgtacttacatgtgtgaacacatataaagtgtcaggtttacagaccctggctcaaggacagtctaggatgggaaaggaggtagggcgagaagaagcacatattttctccctggtgcttcagcctcaccctatccaagggacagacatatggggtgtgagaaacccatccccaggtcccagccttcaggactggagtccttttgagtctggtggagtcacagatccagtctttgggggacactgggtctgtctccttttgaaagccctggaaaggtgggaggtaagaagtaaagggagacaggtccctgctagaagaacttgacgcctcggccatcgctgacagtgatgatctcggccttgtgctcctgctgtagggcctgcagagcccgcagtagagtggcttcatccagcccgtggaactctgaacagggagagataggcagagacaatcagctcctgaggcccaaggcctctgaggagagtgctctggctggaagccgagacctcccagaggcagggtatgcataagccatctatactgctacagctgccatccacacttcccaggcactccttaggagtaaggggtggaagaaagcctgaatcagcatgaaatgagtttgtgcttatttcccccttcttggttctcctctcagactcagcctcccccacacctagcatttgtgtctgatgcacgagaatgacaccatctgcttcagggccacaaaggggccgtgaaaatcaggc

SEQ ID NO: 1245004 - DNA, 4001 bp, Homo sapiens
ccctgccacctatgggccgccaaacctttccttcctaccctcccccaacccaccagagtctctgcgaaagcaaggcgaaaaacggcatggccttggcccgggaatgggaagagggtcaggaatggccgggtgaggctggactggtgttggcagcagcctttccccagactggccgaacctccttcctgaagtccctggctgccctggccaccccatggacttctttatgtgctggaagcctcaggttagcccagccccccggaaaagtgtgggttgggcagaagaaagacttccccttggctggctgtcctgggagcaactcctagcaccctctaaacagagacccttggccatgtccccaccctctctcccaggagccccaaacacccagacacaaatgctgccatccccaaacaactggaagactcggggtgtggcccccaagtctcgctgtctctgctcctcctaccctggactctgggttggcgaaaggcagggagtctggggacctgcaggcggtaccgcaccgtggtggcacttctttctgactttcaccccgggggccacagcccacttctcactcacagatcccaaattcttcctcctcacctccccccgcccaggccaaggctctcctatgtccaggaggggaagattctttaattaaagttttccggaatgtagggggctggagactggggagaggcggagtgtaatttagagaactggtttcagtgtcttcccctctggcccctgggacctgcggagggtgggagagcggcgatggggccgctcggaaaacaaggggactcctggagctggggctcccaaagcgatgtttattcctcacccaggccccccagacacgcacagccccccccaagcactgctcccggcttcccagtcttatttactaaaatgtcttttgtatccacatttctcagggacggaattctcccttccctctccctttctcctcggtcctcggttttccaaaaggaagaaatgtgacatggagaattggatttttggtcaaagaacaacaagcctacccctcccagacaacacattttcaaggaaccccccttttgccagggtggacaagcaagaaatgaataaaatccgaattcaatggcatcccggatcagcaaataccatattcacttcagaggctcaagatgaatctagagcggtggggagaatctgatgaaatccccccacccactcccctgccccgggaggagccctgaagcctttggggtctgaaataggaaggcaaaggggggttattatggggaatctcttgatggaggcgccggcagaggtggggtggcagtgaaggaacaggatggttttgcccatgaagaccccaaaatggagaagaggagtggctgggccccagggacagtgctggatttccagaaacccaactgcaagcaaatggggggtcttcgggggcctctagattgggacgggcagagggttaggatctaagaataagaaaccttctgagatgggaaaagtcctccagcccctgcagcggggagcagggaaaatggtgattatcagaggagccaggagttggattctgaaggcgacaccagcagaaaatccaggaggggtgggcgggtggggggctggagggaggcgaggagaggagccccagccctgcagcggcccacccccagccggcgcccccaccttccccggacgcggcggagaaaccgggccgcgggcagacaagaggcgagtcttaccaccaaattgggtagccagcgaggaccctggtgccaccgagcaggaggccgaggagcagcccgagcaggtggggctccattagaagaggcgccgaggaggaagtttgcccgcgaccatgaagagggggagcgacgcccccaatagttggaacaaagtccacttgagattggaaatgactttcgggcttgtcagaagcgcacctccacccgcagccgcccccctcccgagcccagcgcggagcagccgggtttgaggatgtcagcgagcagccaatcagcgcccgcggcctaaggtaagagatgagtctgtagttcagcctgtcaatcacgcgcccctcccgcccggcccacaactcgggctccgggaagggcatcgcccagcaaacttgggcaaagcccgcgccccggacgccgcggggcttcggggggacgcggtgggccggaccctctgctaccgccgcggtcccccgctggccagggttagggcgcgggggctttgacccgggcgttcacatggcgagggcttggcgtgggcatgaacgggtggctcctttgctggcggggaccgtgacccgttgggacgtgggcccgcgaggaatcgagggtagaaagcacagggatgtttccagaagccccgctcgggcaggtcaggatcagagggtgggggaacgcaccccctcccagcttccagcctcccgagtccgcccgctctctggcctctcgtcctggccgcgggaggtcacttcccgggtgtccgaggaacgtgcggaaaagtccgcggaggctcgaaggtctggctgcgggcggcgccgggggacggagccgagtgtcatttgagtcttttgtcagggatcagatcggtatcgggacctcctgctgcctttgcatttcctgcaactgacaccagcggccagtcgcatttcctgctctcggagtcgggtcactttctcctccttgaggggttcaggcccgacctctggcccgggtcggaggcgtgacccacagcctcagtgggattctcggttggaccatcagggaccggtgaaacgcgcagctctggccgagggcggcccaggtccttggaagaccttgctgccctccggagcgcccctcactgcccgaccgtcccgcctgaggccccggttctactgatagggagctccagcctggggtttggcgataaaggcccttgccctgtgcggacaccaaatgcctccagttacccacccctccccacaggaaaggagtccttccaggcccccttcgggcttgcttcctctcctctccctctccagagcgaggaattaggtctcagccctgggtggtattgacatcatggtcaggttttggggactcacgcccggtcacctgggtgcctttccctaggccccctcccaggccacctgaggcaccaggactctgcgcagccccggtctggggtgaaggaagcactgccggtggggagcagggaccgctgtgtagggaactgtggcagaaagggcagagaatgagccgacccgagtcccacagaggcctggaacggcgggcgttccacgaggtgagggccatggctgaaggaagtcttacgccagggggccagacattcctggcctttgatctgagccccccgtacccacagctccaacctgctgccccttctggtcggcgagccctctccgcacgcggctgctgccggcacagggagcgcggggaaatggcctcgggggcaccaagggtcgggagagccgcctgggcttgtcatggctcctgctgcgttcccagcccattgctggactggagggggtgggaggggaggttgaaagagaggaaggaaggggaggaaaaggagaatccgagaggaggagagagagagaggggctcagagatgagagagacgctgagacagaaaccaagaaaactgtcggggggaggctgagccaccggtgtgaggaagaaaggggcaggggggaggcggagagcaccaaggagctgcaaggcgaagaaaaatcgtgaacctgaccaggagtggtgaacctggtgggggctgcagagatggggatccctagagatgctcctcatggctgggctgattctggggtgccctgtttctgattcacctggaaagagggttaccattgccatgaatgcagagcctcaggaccaaggctctggcagtggagagctttccacatacctccctcttggatggaggcctgctaggtcctacctggagtcctgtcccac

SEQ ID NO: 1245005 - DNA, 4001 bp, Homo sapiens
atcaggagttcgagaccagcctggccaacatggtgaaacactgtctctactaaaaatacaaaaattagctgggcatggtggcacgcgcctatagtcccagctattcaggaggctgaggcaggagaatcgcttgaacccatgagatggaggttgcagtgacccaagatcacatcactgcactccagcctgggtgacagagggagactccgtcttaaaaaaaaaaaaaaaaaaaaaaaaaagtcactagcattagttgagcacttactgcatgctagacactgtcctaagtgctttacatgtactagctcaatcttcttataaaataggcagtataatcttcattttacagattgagagactgagagacagagaggttaagttaagtgacttggccaagagcacacctagcaagtggcaagactgaccccagagtctgtgccctagtgatgatgacatcctgcctgccgagggaacaaccattccttcaagcctgaaatcttcggaaacaaacaagttgtgcactgctgttggggtggatcgcaaaaggatcagtcatatcaagttcaaccccttctttgtacaaaaggagaaagtgaggcccagagactgagtggtcttcccatatcattagcaagctaagcccagagctagggtctgggatgataccctcctccacagcccagacatgtttccaccaggggtcatgacctggaaattagcccacagcccttactccaacctgtgcagaacttctcagacctttacatacctctccctggctacttcttcaaagcagcctctagcaggtcacttgcttggtgttttcttgcctttgctgtatatactcagactgtaagcctcctattgatttggggtgaagattttaaaaggaggcaaggcttaaagtaacaggctgtacatattggagttggctttgggtggatggtgggaaggtgccttcttacccatgatacccgcccccatccctcaccaaatccctgcaattcagggtcagagaagaagggactggaaacaattgccctataacttttgctccaaacattccccacatagttcctgtccggctctctccccagtgtcacctaccccactgtcccccaggtgtcaccccccactgtgatcctccttttccaaccatgtacacacacacacacacacacacacacacacacacacacacacacacacacactgggccctctcactctttccagtgttctcctgagaaatcaccccatgccaggtctgagatgtggtcgcatttccccagcgcacggttccttcctgcgtctccagctggcgctctcaccgtccgaggtttcccccattctccctggacgcgcacgatcctctgccccgagaccgggaacagcccgtcccacccatccacccagccctctcggtctccgctccgcagggcgaaggcggagggtggggaaggagtccgaggcaaggacggctcgccggaggccaggatggcggcagacagggcaccggcgtgaggatcccgagagggcatcagagagcgggactgacgcctgaacgggcggggccggggcggacggggccagggtccgaggcgtgcgcagagtccgagacccggcgggatgaggagagcggcggctggggggcgaccagagactcggacactgaacagggcgatggattcggagccggggaagctggagaccgaactcagggcgcgaactccgactgcgaagtgggttgggtcgcgccgggctagggtctgagttcgagacctcggcggggccaaggacagcgggagggaaaaattggcccagctgtagcgcaggagggagagacaggcaggccggggagcgggcggggggcgcggcgggcactgacccgaagtaggaggcggcggcggcgggcagcgccagcaggcagagcccggccagggccagcgcgggcggggggcgcatggtgctggcggcgctgcgccctctagcatctcctcgcgccgctcaagctcgcagctccgccaccacccgcccgcgggactttaaacccgggtggggcggggcaggcggcgctgggaaaggaggagattgggaggctccccagccccgggcggcgagccccccgccccattggccccaccgccctcgccccgccccgtcgcgggtggggcagccgcccctggaccgcccccgcccctcccccattgccccgccctccggccccaggtgagcgctcacctggcgccgcgcccgcccggggtcgcggtggctgaacgtgaagccccccgggcctggagaggcggggaggagggtacgaggcggggacggaggagattctgcctctccgggatggggcggaggcaagcgcaatggcttctccgaggtagagaaggtggaggggtaggaggagggacgcatctggagtcggtggaaaacccgggtcattgtccgccctcctgccgggcaagtgcggtctcttcgccgcagcccgcagactcagggcagggccgggtcctggtgcagaaccgctctctggaagcgggggaaatgcatgtccaatggctcaggggaccctgttgccaggcaaagagtcttgggcagaggggagagaggaaagggcgctctgtttttaaacgggagagtgactgttaccggcgaggcgcgcagcgtgggcctccgtgggcttttgacaaaatgctgctgatgttccccagcgcagaaatccaaagtggacagtggggcagacagagccctgcgggaggagggacccactttccaaggtgtgtagatgccagaatctctggtagatagggtgggaacttcaagtgttgggccccaaagttctgttttgcttattattttttaaagtttaaccccaatttctgctgcgaaggtgcagagatcaaagcggcgcgtggtacctgtctagaaaggagacatacaaccaatgacccaagtgagatttaaaatgtttttgagagtctcgaacacggggtcaaatcaagcaaaacaaaatataacttgcaatgaatgtcaagatctgcatgtaaagtttccaaaaaatcagccatgcatagggaacatcaagtgactgcgaccttggcttttcagtggacaccagcatggtagggggctgagagaggtgttgagggaggtgttgggaagatggtggctaccgtgttaggtggcattaacagaggaagcccccacctctttgagcctctttgagctcagtttctctgtcaaatgagcgcagtgattacatgatctgatgattcctaacagctctgccagccctatcaaatcccatggttctacttattgaggccacatggcccaatgtaatgtgcagagacctggagtcaaatcatgtaagttatgagccccatatgaaatatggatgatgagaaatatctaacaggatttttgtgcaggtaagatgttaaatgctggccaggcacgttggctcatgcctgtaatcccagcactttgggaggccgaggtgagaggatcacctgaggtcaggaattcgagaccagcctggccaacatggcaaaaccctgtctctcctaaaaatacaaagacattagccgggtgtggcagtgcatgcctgtaatcccagctactcaggaggctgagacaagagaatcgcttgaacctgggaggtggaggttgcagtgagccgaaatcacgccattgcactctggcctgggcaatagaatgggactccatctcaaaacaaaaaaaaaaagatattaaatgcctagcaggtgccggcacctaatatcagtgatcgttatacctgcaggcaggactggggtgtgatggtgtttacaactggttctcaaggagggttgatggtggtctgatttgtatcatctgttgatctctgtgccttaaatattcccatcatggctgacttcatgccaccaatgtggcatcgtttctgatcactggagttaggaagagatgtgcacagctagccctgcaggccagctg

SEQ ID NO: 1245006 - DNA, 4001 bp, Homo sapiens
atataggcactcaggaatacaacaatgaataagatagtagaaaaattctatatcctcataaggcttacgtttccatgtactgaaagcaatgaacaaataaatcttatcagagtgataagggttgtgaaggagattaaataagatggtgtgatataaagtatctgggagaaaacgttagggtgtgatattacggaaagccttcctaaaaaatgacattttaactgatgagaagaaaggatccagctgagagcaaacgcaaaagctttcttccttccacccttcatatttgacacaatgcaggattcctccaaaatgatttccaccaattctgccctcacagctctggcttgcagaattttccaccccaaaatgttagtatctacggcaccaggtcggcgagaatcctgactctgcaccctcctccccaactccatttcctttgcttcctccggcaggcggattacttgcccttacttgtcatggcgactgtccagctttgtgccaggagcctcgcaggggttgatgggattggggttttcccctcccatgtgctcaagactggcgctaaaagttttgagcttctcaaaagtctagagccaccgtccagggagcaggtagctgctgggctccggggacactttgcgttcgggctgggagcgtgctttccacgacggtgacacgcttccctggattgggtaagctcctgactgaacttgatgagtcctctctgagtcacgggctctcggctccgtgtattttcagctcgggaaaatcgctggggctgggggtggggcagtggggacttagcgagtttgggggtgagtgggatggaagcttggctagagggatcatcataggagttgcattgttgggagacctgggtgtagatgatggggatgttaggaccatccgaactcaaagttgaacgcctaggcagaggagtggagctttggggaaccttgagccggcctaaagcgtacttctttgcacatccacccggtgctgggcgtagggaatccctgaaataaaagatgcacaaagcattgaggtctgagacttttggatctcgaaacattgagaactcatagctgtatattttagagcccatggcatcctagtgaaaactggggctccattccgaaatgatcatttgggggtgatccggggagcccaagctgctaaggtcccacaacttccggacctttgtccttcctggagcgatctttccaggcagcccccggctccgctagatggagaaaatccaattgaaggctgtcagtcgtggaagtgagaagtgctaaaccaggggtttgcccgccaggccgaggaggaccgtcgcaatctgagaggcccggcagccctgttattgtttggctccacatttacatttctgcctcttgcagcagcatttccggtttctttttgccggagcagctcactattcacccgatgagaggggaggagagagagagaaaatgtcctttaggccggttcctcttacttggcagagggaggctgctattctccgcctgcatttctttttctggattacttagttatggcctttgcaaaggcaggggtatttgttttgatgcaaacctcaatccctccccttctttgaatggtgtgccccaccccgcgggtcgcctgcaacctaggcggacgctaccatggcgtgagacagggagggaaagaagtgtgcagaaggcaagcccggaggtattttcaagaatgagtatatctcatcttcccggaggaaaaaaaaaaagaatgggtacgtctgagaatcaaattttgaaagagtgcaatgatgggtcgtttgataatttgtcggaaaaacaatctacctgttatctagctttgggctaggccattccagttccagacgcaggctgaacgtcgtgaagcggaaggggcgggcccgcaggcgtccgtgtggtcctccgtgcagccctccggcccgagccggttcttcctggtaggaggcggaactcgaattcatttctcccgctgccccatctcttagctcgcggttgtttcattccgcagtttcttcccatgcacctgccgcgtaccggccactttgtgccgtacttacgtcatctttttcctaaatcgaggtggcatttacacacagcgccagtgcacacagcaagtgcacaggaagatgagttttggcccctaaccgctccgtgatgcctaccaagtcacagacccttttcatcgtcccagaaacgtttcatcacgtctcttcccagtcgattcccgaccccacctttattttgatctccataaccattttgcctgttggagaacttcatatagaatggaatcaggctgggcgctgtggctcacgcctgcactttgggaggccgaggcgggcggattacttgaggataggagttccagaccagcgtggccaacgtggtgaatccccgtctctactaaaaaatacaaaaattagctgggcgtggtgggtgcctgtaatcccagctattcgggagggtgaggcaggagaatcgcttgaacccgggaggcagaggttgcagtgagccaagatcgtgccactacactccagcctgggcgacaagaacgaaactccgtctcaaaaaaaaggggggaatcatacattatgtgctcatttttgtcgggcttctgtccttcaatgtactgtctgacattcgttcatgttgtatatatcagtattttgctccttttcatttagtatagtccatcgattgtatatccgtccttttgatggccttttgagttgtttcccatttgcggttatgaaataaagctgctataaacattcttgtacaattctttttgtgatcatatgttttcgtgtttcttggagaaatacttaggaggggaattgcgagtttggaagtaaaaagtagctgtattttgaactttttcagaagctctgagttttccagagcggttgtaccattttacactccaactagcaaggtatgggagttattatggttgtgccacagccttccggacattaggtattgtcagtctttctaatgtggtatatccttgtggttgtaatttacagttctctattgactaaggatgttcagcattttttcatgtgcctattggccattcgtattttgtttgtaaagtagctcttcgagtcttttacctgttattttggttttttgtttgtttttattgttcagttgtgggactgctttatacattctggatacaagtcctttatcagatccatgtgtcgtgaatgttttcttctgatctgttgcttgcctatttgtttgctttacagagtttacagtatcttaagaggagtggatttatcttttttatgttcagtatttgccttgtcctgtttaggacatctttttttttttttttaaccccagggtcatgaagatattatcttacattttcttttaggacctttatggttgtaagttttacagtaaggtccttgagccattaattaattcttaaaattaattgtttatggtgtgaggtgtaggagtcagtctctggtatctttcctgtatggaaatccagttattctgtctccacttgttgaaataggcttcctttctctactgaatgcttttaattttaattattttacagttggagtatagggctaccattttagtgctattttctttttttctttgttaatttttgagacagggactcacactgttgcccaggctagagtacaatggcacaatcaaggcttactgcagcctcgaacccctgggctcaagcagtcctctagcagcctcacgagtagctgggattactccaccacacccagctaactattttatttttttgtattgacaggatctcactatgttgcccaggctggtctcaaactgctggcctcaagctttcatcccatctcggcctcccaaagtgctgggattacaggtgtgagccaccatgcctgacctcttagtgctattttctatttatctcctctgttctctgctctcttt

SEQ ID NO: 1245007 - DNA, 4001 bp, Homo sapiens
ctaaaagggctacgtgccgcttctcccagctctggggcatccctctcctagaaaactggactgttttacagtgaaaatctcgggggtggtcagctccctgccccgttgttatccttaccacttacagcctttcaagaagttctcaggttgggtgctgaactctgaccaggaaccactgagaaatcgaggcagctgggagaagctgtagttccaagcgctgaaaggaagatgggggacaataaacctgggtcgccaagcaaagggggcagaggcctggagaagtgggtctcaggaccagaggacagatcgacctcacacttcatctccccagactccacactccactgccatcaccacttacgtgtctccctcgtcctctgcagcgggttccccagaggtatcttccatggcttttccagaccccaactctggcccgttcgcttcttcttcagaaaggctcccgtttgcttcttctgcaggaaggcttgtattttcagaaagttcttgctcctcgattcgaggactcaactcactaggggaaccaaactctgtttccaggggagtggagagagaaactgggtccccctcccgtagctcctgggacacagctgagccagccacaggatctggggacaaccggggcggatcccccctttcgggaggcggtggcatcagttcagagtccgcatttttattcatcggggaagcgtggggagaaggatgggctggagctgggtcctggtctgaaggacagcagtccggagctaacggttgagtctccaaagtcttcatactgcagaggaagcacagcggagattagcctcagccaggatggcttcgaagttctcagggatccgacgcagagctaaagaaacccacctgtgcttccctcctcttctgggagtaggcagaagactcccgggaggagaggcgaacagcggacgccaattcttttgaaagcactgtgttccttagcaccgcgggtcgctacgggcctcttgctgtcgcgggatttcggtccaccttccgattgggccgccgcatcccggatcagatttcgcgggcgacccacggaacccgcggagccgggacgtgaaaggttagaaggtttcccgttcccatcaagccctagggctcctcgtggctgctgggagttgtagtctgaacgcttctatcttggcgagaagcgcctacgctccccctaccgagtcccgcggtaattcttaaagcacctgcaccgcccccccgccgcctgcagagggcgcagcaggtcttgcacctcttctgcatctcattctccaggcttcagacctgtctccctcattcaaaaaatatttattatcgagctcttacttgctacccagcactgatataggcactcaggaatacaacaatgaataagatagtagaaaaattctatatcctcataaggcttacgtttccatgtactgaaagcaatgaacaaataaatcttatcagagtgataagggttgtgaaggagattaaataagatggtgtgatataaagtatctgggagaaaacgttagggtgtgatattacggaaagccttcctaaaaaatgacattttaactgatgagaagaaaggatccagctgagagcaaacgcaaaagctttcttccttccacccttcatatttgacacaatgcaggattcctccaaaatgatttccaccaattctgccctcacagctctggcttgcagaattttccaccccaaaatgttagtatctacggcaccaggtcggcgagaatcctgactctgcaccctcctccccaactccatttcctttgcttcctccggcaggcggattacttgcccttacttgtcatggcgactgtccagctttgtgccaggagcctcgcaggggttgatgggattggggttttcccctcccatgtgctcaagactggcgctaaaagttttgagcttctcaaaagtctagagccaccgtccagggagcaggtagctgctgggctccggggacactttgcgttcgggctgggagcgtgctttccacgacggtgacacgcttccctggattgggtaagctcctgactgaacttgatgagtcctctctgagtcacgggctctcggctccgtgtattttcagctcgggaaaatcgctggggctgggggtggggcagtggggacttagcgagtttgggggtgagtgggatggaagcttggctagagggatcatcataggagttgcattgttgggagacctgggtgtagatgatggggatgttaggaccatccgaactcaaagttgaacgcctaggcagaggagtggagctttggggaaccttgagccggcctaaagcgtacttctttgcacatccacccggtgctgggcgtagggaatccctgaaataaaagatgcacaaagcattgaggtctgagacttttggatctcgaaacattgagaactcatagctgtatattttagagcccatggcatcctagtgaaaactggggctccattccgaaatgatcatttgggggtgatccggggagcccaagctgctaaggtcccacaacttccggacctttgtccttcctggagcgatctttccaggcagcccccggctccgctagatggagaaaatccaattgaaggctgtcagtcgtggaagtgagaagtgctaaaccaggggtttgcccgccaggccgaggaggaccgtcgcaatctgagaggcccggcagccctgttattgtttggctccacatttacatttctgcctcttgcagcagcatttccggtttctttttgccggagcagctcactattcacccgatgagaggggaggagagagagagaaaatgtcctttaggccggttcctcttacttggcagagggaggctgctattctccgcctgcatttctttttctggattacttagttatggcctttgcaaaggcaggggtatttgttttgatgcaaacctcaatccctccccttctttgaatggtgtgccccaccccgcgggtcgcctgcaacctaggcggacgctaccatggcgtgagacagggagggaaagaagtgtgcagaaggcaagcccggaggtattttcaagaatgagtatatctcatcttcccggaggaaaaaaaaaaagaatgggtacgtctgagaatcaaattttgaaagagtgcaatgatgggtcgtttgataatttgtcggaaaaacaatctacctgttatctagctttgggctaggccattccagttccagacgcaggctgaacgtcgtgaagcggaaggggcgggcccgcaggcgtccgtgtggtcctccgtgcagccctccggcccgagccggttcttcctggtaggaggcggaactcgaattcatttctcccgctgccccatctcttagctcgcggttgtttcattccgcagtttcttcccatgcacctgccgcgtaccggccactttgtgccgtacttacgtcatctttttcctaaatcgaggtggcatttacacacagcgccagtgcacacagcaagtgcacaggaagatgagttttggcccctaaccgctccgtgatgcctaccaagtcacagacccttttcatcgtcccagaaacgtttcatcacgtctcttcccagtcgattcccgaccccacctttattttgatctccataaccattttgcctgttggagaacttcatatagaatggaatcaggctgggcgctgtggctcacgcctgcactttgggaggccgaggcgggcggattacttgaggataggagttccagaccagcgtggccaacgtggtgaatccccgtctctactaaaaaatacaaaaattagctgggcgtggtgggtgcctgtaatcccagctattcgggagggtgaggcaggagaatcgcttgaacccgggaggcagaggttgcagtgagccaagatcgtgccactacactccagcctgggcgacaagaacgaaactccgtctcaaaaaaaaggggggaatcatacatt

SEQ ID NO: 1245008 - DNA, 4001 bp, Homo sapiens
tcccacacagaaagcaaaccagcccttcatctgtcttgtccaccactttatcccagcacagtgactaacatatatcagtagtcaatcaataaatagctataagccaggcacggtgactcacacctgtgatccccgcactttgggaggccaaggtgggcggatcctctgaggtcaggaatttgatatcagcctgcccaacatggcgaaaccccgtctctactaaaactataaaaattagtcgagtgtgatggcgtgcgcctgtaataccagctacttgtgaggctgaggcaggagaatcgcttgaacccgggaggcagaggttgcagtgagccgagatcacaccacagcactccagcctgggtgacagagcaagaccttgtctcaaaaaaataagaaatagaaatatatatatgctgccacaagaaattcactactttttagcaaaaaacacagattcctaattaaagaaaggggaaacctctctctaaataacttcagaattcggggcagaaaacgctacatgtggaaactcgtcttgaaaaacagtcccgtttgtgaacaggaaacacttggactacactttttccatctccacgaaggacttaaatgtgcagcattgatgaagaggcagttagccccagtccttaccatttctgcatattccacctgctccccctcatggtacagctctgggggcaggttataaattcgcaagatgttatcagcactattggtcaagatgcaggaaccgtcaggagccctagaaacaggggagagttagaaagctggccagacctatgcttttcaagtgtagggctagggctgagcctgcctctggggtaggtaagcccccctgaatccttgagggaagtagaagacacaaactgctagataaaatgtaagctcagtctaaaagggctacgtgccgcttctcccagctctggggcatccctctcctagaaaactggactgttttacagtgaaaatctcgggggtggtcagctccctgccccgttgttatccttaccacttacagcctttcaagaagttctcaggttgggtgctgaactctgaccaggaaccactgagaaatcgaggcagctgggagaagctgtagttccaagcgctgaaaggaagatgggggacaataaacctgggtcgccaagcaaagggggcagaggcctggagaagtgggtctcaggaccagaggacagatcgacctcacacttcatctccccagactccacactccactgccatcaccacttacgtgtctccctcgtcctctgcagcgggttccccagaggtatcttccatggcttttccagaccccaactctggcccgttcgcttcttcttcagaaaggctcccgtttgcttcttctgcaggaaggcttgtattttcagaaagttcttgctcctcgattcgaggactcaactcactaggggaaccaaactctgtttccaggggagtggagagagaaactgggtccccctcccgtagctcctgggacacagctgagccagccacaggatctggggacaaccggggcggatcccccctttcgggaggcggtggcatcagttcagagtccgcatttttattcatcggggaagcgtggggagaaggatgggctggagctgggtcctggtctgaaggacagcagtccggagctaacggttgagtctccaaagtcttcatactgcagaggaagcacagcggagattagcctcagccaggatggcttcgaagttctcagggatccgacgcagagctaaagaaacccacctgtgcttccctcctcttctgggagtaggcagaagactcccgggaggagaggcgaacagcggacgccaattcttttgaaagcactgtgttccttagcaccgcgggtcgctacgggcctcttgctgtcgcgggatttcggtccaccttccgattgggccgccgcatcccggatcagatttcgcgggcgacccacggaacccgcggagccgggacgtgaaaggttagaaggtttcccgttcccatcaagccctagggctcctcgtggctgctgggagttgtagtctgaacgcttctatcttggcgagaagcgcctacgctccccctaccgagtcccgcggtaattcttaaagcacctgcaccgcccccccgccgcctgcagagggcgcagcaggtcttgcacctcttctgcatctcattctccaggcttcagacctgtctccctcattcaaaaaatatttattatcgagctcttacttgctacccagcactgatataggcactcaggaatacaacaatgaataagatagtagaaaaattctatatcctcataaggcttacgtttccatgtactgaaagcaatgaacaaataaatcttatcagagtgataagggttgtgaaggagattaaataagatggtgtgatataaagtatctgggagaaaacgttagggtgtgatattacggaaagccttcctaaaaaatgacattttaactgatgagaagaaaggatccagctgagagcaaacgcaaaagctttcttccttccacccttcatatttgacacaatgcaggattcctccaaaatgatttccaccaattctgccctcacagctctggcttgcagaattttccaccccaaaatgttagtatctacggcaccaggtcggcgagaatcctgactctgcaccctcctccccaactccatttcctttgcttcctccggcaggcggattacttgcccttacttgtcatggcgactgtccagctttgtgccaggagcctcgcaggggttgatgggattggggttttcccctcccatgtgctcaagactggcgctaaaagttttgagcttctcaaaagtctagagccaccgtccagggagcaggtagctgctgggctccggggacactttgcgttcgggctgggagcgtgctttccacgacggtgacacgcttccctggattgggtaagctcctgactgaacttgatgagtcctctctgagtcacgggctctcggctccgtgtattttcagctcgggaaaatcgctggggctgggggtggggcagtggggacttagcgagtttgggggtgagtgggatggaagcttggctagagggatcatcataggagttgcattgttgggagacctgggtgtagatgatggggatgttaggaccatccgaactcaaagttgaacgcctaggcagaggagtggagctttggggaaccttgagccggcctaaagcgtacttctttgcacatccacccggtgctgggcgtagggaatccctgaaataaaagatgcacaaagcattgaggtctgagacttttggatctcgaaacattgagaactcatagctgtatattttagagcccatggcatcctagtgaaaactggggctccattccgaaatgatcatttgggggtgatccggggagcccaagctgctaaggtcccacaacttccggacctttgtccttcctggagcgatctttccaggcagcccccggctccgctagatggagaaaatccaattgaaggctgtcagtcgtggaagtgagaagtgctaaaccaggggtttgcccgccaggccgaggaggaccgtcgcaatctgagaggcccggcagccctgttattgtttggctccacatttacatttctgcctcttgcagcagcatttccggtttctttttgccggagcagctcactattcacccgatgagaggggaggagagagagagaaaatgtcctttaggccggttcctcttacttggcagagggaggctgctattctccgcctgcatttctttttctggattacttagttatggcctttgcaaaggcaggggtatttgttttgatgcaaacctcaatccctccccttctttgaatggtgtgccccaccccgcgggtcgcctgcaacctaggcggacgctaccatggcgtgagacagggagggaaagaagtgtgcagaaggcaagcccggaggtat

SEQ ID NO: 1245009 - DNA, 4001 bp, Homo sapiens
tgggcgatcacctgaggtcgggagttcgagaccagcctgaccaacatggagaaaccccatctctactaaaaacacaaaaattagccgggcgtgtgcatgcctgtaatcccacctactcaggaggctgagggaggagaatcgcttgaaaccgggagccggaggttgcagtgagccgagatcgtgccattgcactccagcctgggcaacaagagcaaaaactccatctcaaaaaaaaaaaagagagagagaaaacaggaccgcaaagttttcaaaatggtttatcaggatgaagtaaaatacagatttaaaaaaaaggcagatcactcgtctataacattatggtgtactaaagtaaaagaaaaacccactggactgataagaacttttgagttctttgtcccacttcgcgacatactttctagtcttaaaatacagttaaaataataactggacacaaattctgtgttctttgcatctttttttttcttttttctgtgtgaactctgctacaattttttcccttttttttctgtgtttgtatctttaaaaatggttattaaaaccagggttaaagtcccttcctaatcaatcatccctaagacaacaaaagtccagaattctaaaacagctgtttctagatataaaaattcacccacatacaaaatagtgcgcgttttggctacttcagcctcttcccttctctagaaataactcctccttgtacttagtaaaggcacacattcacttcaagagtaggaaaatgtaaatgctctctgctcagcggccgcagctaattattacttcacacagtaagatcagtgtttgctaagtgttatcagccaatgtacagcaccccccaacaccgtcaaacgttgttccagttattttactttaaaagaggatttaaataatgcgacgtgctttccactgagccactaagtaggtgtggacgcacaaccttcaacactaattgccctttactaagccgaccagggctagacactaagccagaaaagccttttccagagtttcctcttccgcacaaaagctttccttctgtcactccacccaaccacccagctcctcccttaagtgtttgaaagataattctaaaagtctcctcccccgaaccgctgcgtttcttaaggccacaccattttaaaaatactgtattgcttttgccaggctgttgggacctcttccatctcatttctatctaagagtggttggtacacacgaggaccccctcctttcattaccgcttacaacccacaagtttacttttccccattgtaaacctaaagtccctgagtggcccttccctgtccactcgacagtcatgccctgagccaagaactcccaggacaagagccctgcgcggacctccgacgaagaaaccggggtccttgcccgccccagccacacagcaaccgcgagggagcacagtaggtgctgcatccacgtcggtgccgtttacccctcagccaactcccaccgaggcggcttcctcctcctcgctagtgggctggccctggcgcactggagctcttccctcagacttggagtcgcttcctcccaaacctcctccggggagtccctgcctctcctcggccctcatgcgcccacccacggtcccaatcctcaccgatctctttctcgttgaccctcgggggaaagctggccatctatggggcaccgtctgattccgggaatacgatgcggacccaacaacagagaagagagtggcgaccgctgaggggcgtgacgccaagttggtccctcccgggcccagggacagaggagacgggcgggggcggccgctgcggcttctgctaactgcctcgggaaagctcccgaaggcctcagaccaaagtacggagtcaaccacagacaatagaccctgtacccagcctcgcgcctgcggaggaagacagttcccctaaagcgccgactgcaaacgagacactggagtcaaaatggcgggcggcgccggagatatctgggcggcaggggcgcggccacgtgacgtcacagcccgaggcccccgcctcccgacgcacgggacgtgatctccccggcccggcgcgggcgttgcctgggggcctcgcagggggagatccagcccaggctggttccgctgactctgcctgtaggccggtggcgtcttctgggcctggatggtctaatatggagtttataagctgaagtggctttgaaaagggcaagcagagaattgtattattattagcctcctagcttaaagattgcatggaacttaaactggctgaaccaaaagaacaaaaagacatttcaggttttcactcaatttggccaactccccagcccacaagtaatagggaactgaaggatgcactgatgaaaaagacaggatgaaaattaacatcgttgtgcaccacctgtccagctgcgattgttcagacctgagccagcaggttttaggaagggccgaggggaacgagaaggagactcgggcgtgatcgcgccgcaccgcgccgcggggcctctctggactgcctttgtcctggccaagatggatcccactgtcctggccaagatggatcccactgtgtcagctcagaattggcccttcctccaccttacctgaaggcctctgggaggcacctagttgtccacacatcagactgataaatgtgtcagtatctgctagatgccagcttggttcccggtcacagatgacgtatttgcattttaatggcttctcgtgtggaccctaaacattgcaaaggcctggggcgtataagactgggaattcaaatatgtggcagatattcatgggacagagtagagtgttgcatagccgcttttttttttttttttttttttttttttgagacggagtctcgcttctcccaggctggggtgcaatggcgtgatcttggctcactgcaacctccgtttcccgggttcaggcaattctcctgcctcagcctccccagtagctgggatttgtacaggcatgtgacaccaagcccgggtaatttttgtatttttagtacagagggcgtttcaccctgttggccaggctagtctcgaactcctggcctcgagtgatccgcccgcctcagcctcccaaagtgctgggattacaacgtgagccaccacgcccggctgcatagccgcttttaagagatctcaaatgataacactgtagggcatgtttacttcatcttttctttgcatgagtgtattaattcttcaaatagcgaaatgtttaataaaacatcgcccctccttttttttttttttggttatttatttatttttttttttgagacggagtcttgctctgtctcccagagcagagtgcagtggcgccaactcggctcactgcaacctctgcctcccgggttcaggcgattctcctgcctcagcctcccgagtagctgggactacaggtggctgccaccacgcccagctaatttttttcatccttttagtagggagggggtttcacgatattggccaggctggtcttgaactcctgaccttgtgatctgcccacctcggcctctcaaagtgctaggattagaggcgttaagctactgcgccctgcctgcccctcgtctttaaaaaaaaatcactttgttaggctgggggcggtggctcacgcctgtaatctcagcgctttgggaggctgaggcgggtgtcaggagttcgagaccagcctggccaacatggtgaaacccccatctctactaaaaatacaaaaaattagccaggcgtagtggcgaagtcccagctactctggaggctaaggcaggagaattgcttgaaaccgggaggcagaggttgcagtgagctgaggttgcaccactgcactctagcctgggtgacaagagtgaaactctgtctcaataaataaataaatcaataaatcactttgttagcttcagtcaacgatatcttgaggactcactctgtatcaggcactgggcctagttgctgaatttttagagtag

SEQ ID NO: 1245010 - DNA, 4001 bp, Homo sapiens
taaggccctgaaggtctaaacactgagctgccccaaagtccttggccttgacctcattgtacctccagagaaagagtcagggagctggtctcaccaaggctgatgggggtctgagctggatgggagtacaagcttggagcttctataatgagaaacaccacttccctagaggccctgctcggaggggttccatcagggcctggaggctctggattcagaggctctgagtcgcctgctcaggctgatgccataaggaaccagctctgtgactcattccccagtgctctggccaaactgatcaggttggaggctcaagcttcagcagcagacccactagtggcactgaatatccacttctgctcggttaggaagacaggaggaagagacaggagtctggccttctgccttatcccagcttctcttcacttccaaccagacatgccacaggccacagggcagtaccccatagggcacaatgcccactgaagagagggatcccctcaccccagaagaaggcatttttacagaggagctgtggaaatggccctgctgaggcctggaggatgcagccacaggtgagagccttctggcggagaagatgaggcagtcaggctcagccaccagcccaaccaccgccaagcctccttcagatcccatgcctgggagagctcctgctcttcctcctagaaaccctgagctctggcagccggttgaggccccttcccggaggatctcctgagggccaatctaagtgtgtgggggtgggggcatgattgagagagacaaacctcattctcccatagcccaaggaaacctcccctagctctctccccagcacctgcagccaccaggagtgggtgattgcaaacagcgcagggcaagccagctttatatctcctgtaactttcactccccaccaccctcactttctgtgcctgacaacctaggcaaatcagaggaaaaaagaaaggcccccactcctgatgccaaagtgggataaaccaagtgcctccataaacctaagcatgctgttccagcaacaagagggatgcgggtatctcatgttagaaaagtacagcggagtcctgcatctgtccatcttgggagctgcaggggcagggccagtgtggggagcagctggatcccagtgcagggctatgaggctagaactcctatatgagccttcccactgctcagcggaaggaagagcggtccccttccccacccgcattcccgatcagcagagcaggcatcatcccaggcgcacaaatgctcaggaaaaccaccagcgaggttacccggaggcaggggacccagccaggtacgtacgctcctgagtagccaagaaaaacgcaatttagcaaccttcagtcgtgagtctccgtccacacctacgaagacgcaaagctctacactaggtaattttctggacaaaatacatacgttttgcttttgcctctgcctctgttcaagttcaccaagagacggagcaaaccctccgctgaccggaagcctctcttggtagcggaacgagagggagctgcttctgggtaaacgtcgccgcctaggagggaagctgtgcgcaccccacaccctgccctcgccccctccccgggaccaaccgcagcgccctcccgggtgacggacgggctctcaggactccggagggggacgcggctcgtgcggcgcctcgcgcacccccaccccatcccggccgcgccgagcgccgcccccgcccccccacaacccctgcacgcacccgctcactctcccctgccccggccgagccgccccgggcccccgggaaggtgcccccggcaagcccgccctgcagccggagcaggtgcagccccgccgcgctcccaaccgcgtctgcacaaacttgtttgcccgcggcaaggggaacaccctgctcgcagcccgcgcgggggtccggctggagcgccgagagacaggactcaccccgcgatcgcggccggctggggcgcccgcacccgcgcccatggcccgccttccccgggcgccgagcccgcagccccccgcagtgcccggagcccagaagccccggcgcccgcacgtctccggccgcccgcggcaagcggacccacgcgcccgggcacagggcgccgccgcctggctccccggggctgctggcgtccgggctgaacggcggggcgggcgggcgggcgcggagccggggcgggcagcgggcgggcgagcgggcgccgggctctgcacatgctcactcgcgcggcccggggacagcggccggccgccgccgggtcctagaggcgccggtgcgcacctcccgccgcccgggggaggggtcgcggctccgccggagggggcccacgccctgccccggcccgcgagaacacgcgcgcggggcgggccacacgcgccactgccgagcagagacgccgccacccactctgatacacacacacacacacacacacaccagtcacccagagccacagcctttcaccggggccccacgggctctaacacacgcaccatgacgctcacacccagacacagacccacaaacacacggggcactgccgcgcagaggagagcacgccgccactctcccatgcagactcacagcgacagccgcacactgcctgacacacacatcccgaatcactgcttcccagagacaccgacacccacactcacacacacactctctgggctctgccccactcacccagaagcagactgggccactgtgacaggcacgcacacgtacacacacagccacacagtttagagtgcactctaatacacacacacaccacacacgcacgcacacacacacacacacacacacacaccggatcaccgtcccatgcagagctagagacagacggtcacagcttcacacacattcacactcagaaacaagcacctgctggaacacagacactctcacacaatctgagacagacctacacagaattgcagccctacaaataccctgacaccagctcccgcgtctacacactcgggggtcggccgccggcttatcatactgctccacaccgcacacagtgacaaacccacgccttgacatagttgcccacagaagcaatgtcacacactggtgtctactaacagacacactctcagaggggcatactgggcattgacccacaggctctctctctctctctctctctcacacacacacacacacacacacacacacacacacacacgcaccgaggtggaaagaggctgaacagtcacacaagtctatacacaatccccctctttaaataaaggctggatccaaacctaaagatttttcccagggaggagccccaccctgttcccccaaagccgccaagtcacagcatctgccctgctctgccatgtgcaccggtggaccctgtcctcacccggagctggctgctaagatgctcccagaagctgaggacagcagaggcagcaggagcaggtggtggtgcctcttactccgtcttcctaaaagggagtttcatgcctccgactcccgctaggggcagagctgcttggcctggctccgaggagctggcttgcaacaggtgcaggtggcagggaaagcgtttgcctggggaccagtcacagtccctccttacgcgggtcagtcaggtggcgcccagagcgggaagagactcgctgcagtttgcatagctatgtctggccaagtgcagaattagaacagagtctgcaccatccgcatgaaggcagaatgctctgaaggtcttggggcacctggatttaatatccttaagcccaggaagaggatacagtaagtgagagacgaattctgtgctgcctcagagtcccaaccttgcagaaaagcccccttcacatatatatcctttacagaatgtgaatgtgtgtgtcgttacgatttataacagcaacccactgtgcagtctcgcaatgctgtttggtttgcaaagccctctccatgaccagctacataatttgaagggcctaaaataaaa

SEQ ID NO: 1245011 - DNA, 4001 bp, Homo sapiens
gaggaattacaaaggggcatggggagcttttggggtgacaggaagcttcattatctcaattacggggatggtgtttcatggatgtatataacttaggccaaaacttatcaattgctaccctttaaaatgtgaggtttattgtaggtcaattatacctctataaggctgtttttaaaatgaaacatttcattttaaataatgtaaataattaaattatttcaatttaaataatttgagagaagtgccaaattctcttgaatcttttttcttgttttctggtgcccctgtttggtccacagtgttaggaacgcagccctgctaggctcacgcttcctgccagggccatgccaacttccaaaatctccaaagcgagagcttcccaagtctcccctgccttcaggttcacctgcgctaactcacagagactccgaggttcttcctggagaccacagtgaaggaagggttctgagcctcccacttcctgggcagggcatttttctctaaccgtcctttttgccaagaagtgcccccttttggctgggtgtggtggctcatgcctgtaatcccagcactttgggaggccgaggcgggtggatcacctgaggtcaggagttagagatcagcctggccaacatggtgaaacctcatctctactaaaacaatacaaaattagccgggcatggcggtgcacgcctgtaatcccaactactcgggaggctgaggcaggagaatcacttgaacccgagagatgaaggttgcagtgagctgaaatcgcgccattgcactccaggcactccagcctgggcaaaaagaagcgaaactccatcttaaaaaaaaaaaaaaaagaagaagaaagaaagaaatgactcctttcatttccatcagctcttgcttgtggcagcttgggagaagggaaatggggtggctgtagccgtaaaggcccaggggacgagaagagttacatgcccatgttcctggcacaggggacgtgctccgagagggactgtcaaagcctcactcctcttctgcccaggcagcgggcacacaggcagcatcatcttcccttcctctgctctctctcctctgcctgacctggccccttctccccctgctcttcctgggctggttgagaaaccagagtacttgaagggtctggctggagcaaagctctctggggagggtccactcaggtccctgtcacaggtagggagctttgagaatggggctttttgatcggtcagattccgcgccccccctcccgttagaggtgtggtcccagccccctgctctgtcccccctgccccgccccacggctccctttccaaggagggtgagagtagtcctggagaatctccgtgggacactttctttcacagatgggtgtgaaggtcatagtatcagaaccccaaattaggacccaaggtctcacaagtatgagtagcccagttgggaccactggccgggctatttggcttcagaactgtcccagaaagcctaacatttgggggaaaggggctgcagtgaagtggaggtaatgctgcccacccccacccagagattaccaagtttaaaccctcctacccttggggcccacggtctccagctgcttgtcctcctaagtgttcttatgcaggaaccactttctgctcccttcagaaacagccctatgtcgtctacgtctctccctcgccagcccgggtctgccgctggagaaagcactttcttaccagttcctgcacaccgagaagtctccttccatgttctgctctctgcaggctttcggttgagtttcgtttcttgcaggcaaggaaacaaaactgaaagttttccgatggcccagcccacagcttcagggagggaggagatcttcagaattctcggctcaggagttccccttgattcctgaggctggaccctcccaagaagcccctttacagcatggccagcccctgctgtcgcccttggccgtcattctttgctgctgtcacagccgcatctacctccctgaggctggcagcctgaggccaggcctctcctgggcagcacagcagcttgttccctcaccctggctggctggcttctctccgtctgggtctccatcccttttccaaaccatccacctcccacccttctcccccatctccggctcccttctggtcctcccctgcaggaaagagggaacttgccatgttgagcttgaatgctgttccctaaaaatggctcctggacttccaggcggtgaggaccttgcaaacagcgtccagggaggctctggggatgcagggtggtgtgagcccagacccaatctggtgtgtatcctcctgggggtccttagagtttttccagaccctagaaacagctgtgctaacagaagaactctaaacaacatctggagtgatgacaagcaggcccagagaattcccgtggcgtctgccaatggggtgggtgccgcctctctgaggaggataacaagattaagggaaatgtccaggcagggctccagcctccaggcaggctctaaaattcaggcactaaatgagaagcagtgtgtggtggtactgatgatcacagtgataggagggaagaatgaaagactgtttcaacattgttcctatgttccaggcaccattctaagcattaggtaggcattgtcttcgttttaatccctcatgtaagcattattaactccattttgctatggaaaacagaggcagtgacagagtgagactctgcctcaaaaaagaaaaatgaaatgaaaaaagagaaaatggaggcagagagaggctaggccaatcgctcaacatcagagctgggattcacaccaggttgatatgactcaggtgtctatgtacctaaccaaggccccatccacctcatttgacagctagttggggtagtgagcacttggctgagagtcagagactgaggtttgcatcttatcttgttcccttcctcatcggctaggcaagctccttaatccttctgaccctcactacccactcctgtctgtctctgggcagtctgtcaatatcaagaatgaaaaacgagtgggcttggcttggtggctcatgcctgtaatcccagcactttgggaggccgaggtgggcggatcacgaggtcaggagttcgagaccagcccgacgaacatggtgaaaccccgtctctactaaaaatacaaaaattagctgggtatggtagtgcttgcctataatcccagctactcaggaggctgaggcaggagaattgcttgaacccaggaggtggaggttgcagtgagccgagattgcaccactgcactccagcctgggcaacagaacgagactctgtctcaaaaaaaaaaaaaaaaaaaaagggctgtgcgcggtggctcatgcctgtaatcccagccctttgagaggccgaggcgggttgattatgaggtcaggagattgagaccatcctggccaacacagtgaaaccccgtctctgctaaaaactacaaaaaattagccgggcgaggtggcgggtgcctgtagtcccagctactcgggaggctaaggcaggagaatggcgtgaacccagggtggagcctgcagtgagccgagatcgcgccactgcactccagcctgggcgacagagcgagactctgttacaaaaaaaaaaaaaagaaagaaagacaggaagaaagaaatggaaaagaaggaaaaatgaagaactttcttttcacatattgtctcctgctgagatgggataggggtggtggcaggggtgtatagattggacaccttagaggaatggaatgtgtggccaggggataggagtggaattagaagtgaccataagttgcttctcatctacatcctaattttcttccaagatgtttcctcctatagactgtcccacccacgccaacccttcccttcctcatcaaaatcccagcagttcttcaggaccaactcctatgccaacactgatctagaatctacctcctttgtctctggctttggttagttggctgtgtg

SEQ ID NO: 1245012 - DNA, 4001 bp, Homo sapiens
ggaactcctgcaagtgcttcacaggcatcattttcacttaatctttataatcacctaacacgggaggtgccattattatccccatcttgaggagggatactgataaggataagggaggaggcaaagtgatttgctggtggtcttctcagggtcagagctggaagagagtggtgaagtgggtggtccagcttcagcactcaccttcccatgcaccccgttatgctgcctggcaaccccagagtcaggtgagggagcagctgagggggtccaagcagcaatgggtgcctggaccgcacaagctttttcaaacattccagcccaggattcccctattcattcagccaggaagctggaggaggaggtggtgggggatgggggcggtagcccagagtggtcacatattccagggtcagagggctccctaactgctttggcagcccattccatcttggaatgtcccatctgcccaaacagtcttcttacactgggcctgaaacactctcctacttgcttgtcctacttgtaggtctacaccccacggatgtcacggagccagccccacccccgcccccacctccttttggagttatggtctcatgtgactctgttccagcccccatcaccatcccaccctctgggttctcccaaaaaaaggcaagggcagctcttctgtctccacaccaggccttccagactggcgagatgcggtaaggggtcgcgggtatcggggcttgccggaggacagcagcagatagagtctctgacccggagccctggaggcagcagaacaggggcgctgggggcagggaggtcctgacctctgggccacagcttagggctgtggtgtggcctgtcctctccatctccgcagcacgaacccagacccaatggacccttcctcaccacaccgctgaggtgtctgagcctcccgctgaaaccacatcggggaagagggagaaagaccctcgaggcagggacttgggggctgagacggctgttggttgcccctgctctgcggctggggctctgttacagtccccattcccttaaagccagagggcccctccctaattccctaaggtcctgaggccaactcaccagctcagttcctcctctccctgccctccggagacccatccaggttcttcaaacccccggctgaggaagccacacctcgggaatactccagttctctccttcggcgtcactccctgttccttcagttcccgggtacacactttgtcccaggcctgaattccacccccgagctccccttcctcaccggccgctgcccctcgggctcagctggggaaggacgccctgagtcccttggccctactcctccgcccacggcgcgcatatccccgccccctcccaacttcagaaagtttggcctggggctccccacctccgagcaggttcgggcccagccccgcctcccagccccgctcgccgcgcctgaccttcatcgctcccttggccggagaccaccctagcatgacctgctccccccgcccgactcccaatccaccagggcccgggtctccaggtcacgcactgcccccgcgcgcagctccctaggcctgctggggaagggagtgccgggggccggatgctccgctctgggcgaccgccggcgccccgcacgcacgcacgcggcccgtgccccacttccccggctggggccgcccgcagccccgccaggaccccgcgcgcccccgcgcccggcctgcccgcccgcccggccgtcggagcacctcgcccgcctcgtcctcctccaggccgctgaagctccacactaccaggccctgcagcagcaggatggccagcgccgtggcaatcgccagcttgtagcgccgcaccagcttctgcactcgcgcgctcgccaccatcttcctgcccgggacgcggggcgcgcgcccagccctgcaacccggccgcgagcgcgcgcacgggcgcggggctgagccgccccccctcctccacgcctagggaggcgggccgggcgcgcgccggggcggggccgggggcggggcctgcggggccaaagcacggcgcaccgcaggctaggggtggagccggggctcgcaacaccttcagtcccggcagtcgcgggcgtgggcttgagcgcgtgccttctgcgctcgtgtctccgccggtgcccctggctcccacgtgtgctcccctccacctggacggcgagcgcctggtgctggggagtggagggtctgcggcacaacctctcttgcctggtgtcgggggtcgtgggcgagttcagtcccacgcgggtaagctctcggtcccgggggcccagggaacgccagggctcccagagacgccgccttgggagagggcgtgtgagagccacaggcgtctgcttaaaaacctggaggccgcacctgcggggcaaagtctaaccccttgactggcatcagagagccttcacgaatcctcctttccgctctgcgctcatcctaagcatcctcaggccgctcccagagtcgtggttctcaaactactctagcgtgtgttggagtctcttggaggtcttgataaaacagatttttagtgcccctcctccctcccccagagtgtctgctttggtaggtcggtagtgaggcctaagcattagaattttcagcaggttcccaggtgatgctgatgcctttgctctgggaccaaacttggagaaccagtagacctcgacacatgctgctccctctgccaagtccccaccccctacaccatcagtggcatcctccctgtgcgtccccagcactgtgcagtgagcaccaatcatacatccggtcgtgactgctctgggatctcgccctgccttggacacccagcaatgctcaagaaatgttgcggaaagcaagcaggggaggcccagattcccgtctaaccagctgtccctaacatttgtttgagaacccggcgtgttcaatgagcaccgcattggacaaggtctaagcacctgcggccttccctaagcctggcaggcccatggagagagggaaggcgagaagagcaaaacagtggccaccaaagcaaggtgaatccccagctggggaagccaggcactgggaggaggaagtcataaaaatagcaaacacaagttagaaggtttaaagggaagacgttaggaaccactacagagaggtctggaaagagaagtggcttacaaaaaaaaaagtttgaaaagttagaaggccatgatggaggggtttggaagttgccacaaggttgggttgatgagagaattctaaactgatgtgtacaggatacacaagcatttgatggtacataaataacctcctttaatcgtcttctgcgctttagcatttgtaatcattctgttcctccgcgtttgttaaatgggagaattgtaaactatgtttccgacgacagtttggctacttaagagagcctacacttcaatgattttggaaaacatcagttgacatcccggcaattgatatgttaattaaatattgatcttgtgtgctcattaaatcagatcctctagggacttctacctgccaagaattccccccacaacaatgaaaatagctttatttttcactgattatataagtaataaatatccattatataacatttaaacactaaacgaataagaaaaaaagtaaaagtcacctacaatcccaccccttaagatgatcatcattaacattttagtggctatcctttcctttcctttcccccatttctctcttttttttttttttttttttgagacggagtctgctctgttgcccaggctggagtgcagtggcgcgatctcggctcactgcatgctctgcctcccaggttcacgccattctcctgcctcagcctcccaagtagtagctgggactacaggcgcccaccaccacgactggctaattttttttttttttgtattcttaggagagacggggtttcaccgtgttagccaggatggtctcaatctcctgacctcatgatctgcccacctc

SEQ ID NO: 1245013 - DNA, 4001 bp, Homo sapiens
acagctgccaaactttattctcatcctcagcctggaggtgaatcccagagtcaggaccactctcaacacgcgtgggaccaagggtgagagagaagaaaacattcacccattctctatcataagaaccccagtgggtggggggaggggagaaaggaaaagttttcctggaggcactctgcccccgacccagtctgccatttccagaattagacagggacccttccccagaacaaacgttttagctttaaagcacttggatctgcacaaaggtcagcctgctaagagggaactagggcctcccaggagagccaggccgggcaggatgcctgggctggggaagggcccactgggggagacctggctctgctcagaatccactgccacagcctctcccggtgctgaggggtggggctgcctactgaaggaaagcagcagcctctggctccttcctcctgacccccactgtcagcctcagtcccaacaggtggagggctcgaatgagccacagctctttaagggagttgagttgtgagtgctgccataacaggaaatcagttgaggattccagccgggggccctgaggcacagagaaccctataatacattctgccccaaaggcatgtcagagtaaaagtaatgaagcaattccagaaggtgagatgagaagctggcagggtcagagccaggtttgccaagttcctgaatcattaatcctccgctacccttgaagatgcggaggaggcttcctcttgtcacgaagcacacatttgtgctgcggttaaaggctttcaaccagcatcagctggacattgcaaccatgtgcctccgcaggggtcgatgaggttgggcgggtgtccagtcccacaggccagctgggaagacacccattccacccccgccctgggttccttggatacctgttgatgaatccgtaaccattccggacgttgaaccatttgacagtgcccaggacttggattgctgccaggcagagatgcagtggggacagtgagatggggggaagagatggagttgaactcagttttgagacactccaaaacaaaaaaaaatctagcctactgccttattacctattcaggttaccttcaagccaaccaggtttcactagtagcttcaaggtattcctaccctagtccaccaaatgaaatcacccacacagggactcaggctttcaaaaagccttccaactctaagtcacgttccccacatcctacaaatccagccccttcacctagaactgggtactcacctggtctgcaaagtgccgcccccaggtcataactgagggtttttctagccctcccaatgcaagggtccccagtgcacctgcttgccaggctcagaggtttgcctagttctaacccagtcaactaggcactgtgtcccgcccgggggcgtggccggaccctggggctttattctccaccccaagaccttagctgaacctgccggccccgccctctctcccaggaaggtacggcaggatttcccaccaggggaatccactttggtgcgcagctcccagcccagttagcgctctgggcctgcgggccaggccgcctttggttttccggatcctgccgggctccacactgcccctcccccagcccgccgacccctcagagccgccctgtgcgcgcctgcccctcacccagcaccggcttgtccgcctgactccgggccgggggggcgggggttcccgagaccgccgtcgccggattgccaggggtgcgggagcccggcgccgagggggtcccagcagcggggcccgaggcggctccgcccccgccgcccgccccgccgcctttctgcggctcccctgcgggcaccggtaccaccaccgctaccacccctgccgccgtcgcgggcaccgtcgccgcggggaccgctgtagcccccgctgccgcctccacctcgctcatcccgccgggtccagtaccggccacagccgccaccgccccggcccctccccccggctcgcgaacccaccgccctgctcggtcctcgcgccccgagcctcgcccacacgccggcagcgggcccggagccgaggccaatggcagcccgctgccgccgctcgcgcagaccccgcctcccgaccacgggccaatcccagcccagcagcacccccggaccgcacgccgaccccgcctcccggacttcgcaccgcggccccggcccccgccagccgcccagtaagtacacctgggccccgccccctggccgccacgtgacggcccccggcccaacccattggccggcggcccctttcccctcccccctccgcccctttccaccggccgcgggaaatcaaacgggccggtcgcgccccaaccgccacctggcctctgcgggaagggcggggccggggccgcagtgccaaggttgcccctaacgacctgagcgaggggcgggaatctgcagcctcggttctggcagtgagtagcaccgctcgcctccaccctcgagaccgaccttgcccgtatgctgccaggtgcagacgccttccggccaccaccgcccttggcaccctctccccacaggacggccctgcacaccctggggctgcgggatccaaccgcaggataggctggaaagcgcagcagaatggttttcccggctcacacttgctcccatgagccaggaccccctacttttcttttttctttctttttcttttcttttctttttttttttttttttgagacagggtctcgccctgtcgcccagactagagtgcagtggcgcgatctcggctcgctacaacctccgcctccctggttcaagcgattctcctgccttgagccacctcaaggtggctcccggcctgcccctacctatgtttgtattggaaacaaggtttacaagtagtacaatgcgcaattcttcttcgctgagtttgtttgtttgtttgttttgacacaaggtctccctctgtcgcccgggctggagcgcagtgcgcgatctgggctcactgcagcctctgcctcccgggttcaagcgattctccctcctcagcctcctgagtacctggaattacaggcttgcgccaccacaacctggctaatttctgtatttttagtagagatggggtttcaccatattggccaggctggtctcgaactcctgacctctggtgatccgcccgcctcagcctcccaaagtgttgggatgacagggtaagccaccgtgcccggccttcgctgagttttgatcaatgtgtccacccatgtggcccataccgaccgctgcagctctgatgtctaccgccctagactggctttggggtctctcacgtctgtatgccgggggctgtggtctccggccaggcgtcaagctccagcggactcgaggccttttgcacatgcggtttcctctgccgaaaacgcgccttcgtgtctccaggtggctctctccaagcagcagcttacgtgccactcttcgccatcacaccattccttatttttctaatggcatttttgaaaatatgacatgatcctgaccatttgcttattttatttccctgcacacagtgggctgtaaactccacagcagtaagagccttgtagttaagctggacgcctgcagcagtgcctggtacaacgtacacgttcaatatttatcgaatacatgaacggcccccattccacagatgagaggactgaggggcagtgcgaggcttgtaccaggtttctcgggagcctgggaagattaagaaaatgggccgggcgcggtggctcacgcctgtaatcccagaaaaacgaggctccagcagtatctcctccctagggccgcctcccccaccagggaggacgcgggtgcgcgttgtatttttagccagggcagcgcgccccggggcagcacacgtgcccccaggcgctgctgggcaagccccacgtgcgcttcccaagggctggcgtcctccgcgtctccttcgccgccagctgcccgcagcagccgcagtcgcctctcccggtccc

SEQ ID NO: 1245014 - DNA, 4001 bp, Homo sapiens
ggtcaggacctgcttggtcaggaaatcaaattaatgggtcataaccagcagttgatttttttaaatgaagtagaaaaaaaaacctttaaaacagagcacactgcagggagtaagggtaattattgttctctgaaacttatttcagttacagacctgtatgcagtgcaggtcccactcaaagtctgaaaaccatgctcctagagggaagaaggaaaacagttttctcgcgcatggtgtttattttccattttccacccctaactctaagcttcttgattttggttcaagcacagaaatatcaagacagatccaagaaatgctgtcattgaatgctaacctgcggcggcaaagcccaactgaggaagcggatgaggctcccactgcactcctgcctgagatcctatcatggagctggggacaggggatggtgccaagggggaagtctgcacagctctccccaggctgggcctgtttctggggaaaagaacttgcagccactcaaaacacagtttagaagaatgaaaatgttcctcaccggaggcaagactcagccattcataggccctgtggcccccagaggcaggaaagcacgggggagcaataaccatgtgaaatcaagtcccaccccagagccagtgaggcggtttactgaacttcttgcatctttaatgctctgtgaggcacagggaagctgaccgctacccttcttgcccaatgctttggaacaaggaagaacaaggaaggaagggcagggaggaaaagacagctgtctcgttagccttcagattcaccaaaggcaaggactcactcaagagcctcccaagttgcaaggacagcaaatcagcaaggaggccagaaagcaaaaaccccagcaaagcttcggagcagttctctggggcctttcacagcggcgggactggggggcgggcgagggtgcagctccgctccaagcggaggaaaacaagacactcgctcacctggctttttaaactctcgcagctaagactgaaggcagaggtagcaatcttccggacaagaagtccagaagaacaggtgtcccccacccccgcacgcccccaagaccggagaaaagcccaccactccgggaaagacaccagaggaggtcggcggccaagcagggtgaactggaagtggcgaaaggtcggggccgcccctaagcgccagctccggggaggcgctcgcggcagaggctcccgcgttccgtcgggcaggacctcgcgcccacccccttggcaaggacaccggggaggcgccgagacgcggccagggaggaactcggctgcggttacctcgacccgggtcggggcagacgacgcgctccgagaaatttcgagggcgcccagtcccacagtggaaggcccccagggcggcgcccctggacctaagtgtccccaggactctccgagggaaacgcggcgtcacgagaggacggagggcgtccccagccccacccggaccccatggagtccgaacccatggggacgacgcggaggaggaagcggcgattccagctccgcacccccgccccaaacctggccccgcagactcgcccagcccctggcgcgcgtctcccgccccggccgggggtcccgcgcccttgggctccctccgcgagcggccgcgggcccggcagtgtttgtaaacaaaccggtcacgtggcccggcggccgctccccgtccccggcgcccacggggaccccacgcggaaccgagggcgccgcacccccaaccccgcgcaggcccggccgggggagtccggaggccggggccggggacccagagcccgagctgacagcgcgccccacgcccacgcgcgcccggcccgcgccgcactccggtgcacttacccggcgacaggcggccctgtccggccagcgtggggcttggctccgctggggtgcgcagcggcgaagcgcggcccggctggggctcgggctcccggcacgctcttaaagccacagtctccgccaccgccgcggccgccactccgcatccctccgggtccgggccgggggctaccccgtgatggacgcgcccccgcacctatcccctcggctcagcacatagcaacacgccgcgggttggccgggcgcagccgcagcccatccgcgcagagccaatcatcagaggacggaactccgccccccgcttccccgaccgcccactcccccacccctcggcccggcccagcctgggctaggggagagcggctggttagggtcccgcccgtcccggcaacttgccggagggcagggacccagagtgccaaagctgggtgggctctcagcgcctaggaggaggccgtttatttgagtttggggtttgtccccagggcagggctgggattcccagaacctgggttgtattttggggcggggggatttgcagtgcatctccctggaggctcaagatagtcattcctttcttacgttttaaacctcgccctaagccatagcctaagttaccagaagtggccctcaggccccgggtaattgaatttaaaatgataggggggaggggggagggatagcattaggagatacacctaatgctaaatgacgagttaatgggtgcagcacaccaacatggcacatgtatacatatgtaacaaacctgcacattgtgcacatgtaccctaaaacttaaagtataataataataaaattaaaagaaaatgatagtgctagttgcacccagcccacccatgccttgctcagaagccaggcatttcccctcttctctctgccctgctagtaatttcggcgaattaaaagtacgaaaggggcttagtggaattgaagaccgccccattgctgctaattttccatgactttcagaggcagatgacggtaattagagtgggatggtccgagtgaccagaggggaggagtccacgttctgggtcaccggggtggtgcttttcaaggaagagcaggttaaaaaataacctcgtggcagtcaggaaaccagggaggcaccaggtgggtggagtggggcagtttcccagcaggaaaacaggacagtttgataaagaatgttggcacggacaaggtgaacaaagcaggtcctgcctttcgctcaagacactggggttccgcagttcctctgggaactcttcctccaaggaaactagtgttttactgtgcagccatcaggatgtgaggtgctgcaggaggtgcagctgactctccgccttccacacactggtttgcacgtacacccagaatgctggctcacctgcatctccacccagctgtttttaaaatatgcttggtcaaccaaattgtattcagttaatatctattgcatgtgaatccagtcaccaaggttagtaaaaacaacaaaacaccccaaatacctcagtattgtggggctgacatatcagcctcagatttgcagtttcagtgtaaacaaaggctatgtcctggttcacaactgactagtttggagagtctaaaacggggggggggggggaatgctttcagatgagaggaatcacaaacaagaactgtttagcatttaatccttaatctaagatgtgatggattctttagattagtaagagcttgccgtctcgccctgatctgcttcttgagcaagtttctttgtctctccaggcctaggtttccacagtttaaaacaaggagggttgaaataggatgatctcaagtcccttccagctctgaaattctaagtagggccagaaagtcatgtttgttacaacgtttccgcaatattgtgtgagcgaatatttgtgttgccacatcaccacttcctaacagtagatgctgaattagtttaacaccctaggatattggtatgttatgtaacaagactggtggctactgtttctgtttaaataaaagataacgttagctaaagaagactagcctgatacagtggtttcagagggagctctgaggaccccttcaggcctgctgtgtgtatgcaggggactggaagaggccccagaccttagg

SEQ ID NO: 1245015 - DNA, 4001 bp, Homo sapiens
ttcatatctctttgatttttaaacactgaaataaagacaaagcagaccttgagctgtacttccccatcttatccccccccccaacaggaaccttgttgaatacaaatagcaatttaagaatttacaagacgaaatttagttcactatatttcctaaatatgagttctagaggccttgtcttattttcaaatccctgaatcttatttctgatgataagggggactaaccctgaggttattcacatgactaaatccgcatttcgaggaaagcaagggccctaacattttgaaatataggtattttaattaggaaaaaaatctaagaatcaaagatacttgattccaaccatgtctcaccccaccctaccacgcaaaagcattaaaaccacaggacccacagacatgacctttcgtttaatactacagtatcgcacaattataaatgtgtgggtatttcaaaaggtggtccaaaaggtggactgggagagaggattaagaataaacttcctgacaatgactggacagacacaatggacattcgatgaagttctgaaaaaggactggagaacccattaggggcaaaagaacaacgaacaaagaggacctactaatatttctacataaacccatttatttaaaacggaaaaaaagaaagcaacaggatcttcaaccttcataactcaaaaaacccagcctcagccgagcgcctggaataggttaagatcccccacgaagtacagaccagcattccgagcctgcagagtcaaccaaaatacagttactgaacactattggaaataactttatttcaacaggtcttcccatttgtcatcacggtgcgcacaaactgtaaagtcatcgtttttacaaacggggggacggaggctcgggctctacaaaggctcgaactctcagagtcgtggcctcctggttctatccatcagaacccacgggtgatggagccagagaaaggttacaggaacttcgagatctcctgttttaagtctgaggaaagggagggagtgaggattttctgggcctccccagaagacgacgaggaggaaaagccccgaaacccctcactacgaggtgccggcctacgggaaagaaacccgatcgcagcatgggagcctgccaccgcccgaagacgaactgcagtgattcccactcacccctctccccccaccatcatccacgactgtcccccacctcaggcctgaggaagcccatcgctctcaaaggtcctcctttgtgagactccacggccgccgccccacacggggcctccggggaaaagccaccgcccccacccgccatatttccctgaaaggcgcccgcgctacagctcccggtcttcgctctctcccatgtggcgggtgctgcttcccccgtcaccccacccaattgttctccacatcccaaggccgtcccagaagctcccatgagggtggctcgttcggagacagcacccgccatctcctccccctcccccgccccgggactcgccctccccccagccgccattttacaaccaactcctccaccccgtcgccccggcctcccggcccgcgagttgtttgcagttaaggacggcgaaggggtcacattccagggcatagagcctcccatcgccccgggagctcccaggccatttcctgcttcccgaacccaagcccccgggccaggctcgcagacgatgccgccattttgtctcctgttcccggcctctgtgggcggcggcagagggtccgagaattccagccccccgttgcccccccaactcaccgtcgtatcgctcagcctgctcggccagcttcgcctggtacaccagatcctctcgatcatccatagcggcagcggctccggcagggtctgcgcgacggatggaagcggatagtgtctccgactctctcagcctctcgctccgcgtccgggcagcaaaaatggcggcgcctcaatccgggacttccgcctgcgcacgcggacaactgctcagctctatggcaaccgctccctggcaactggcgcggggggcgggtcctggaactcggcgcccgaagcggctggaacgagcgcacgagacgcctctcctctgtcggctcagcgggcgccggagcccagaggcgggaactgcgactgccgaaagggagcggcccccggggaacgagaagggctgaggcggggccggccgggactgctcctgaaaaaagccagcgagagacctgggtcagaccggggcccgaggcccgacctgcggaaaagaacgacggaggctgtaacggtttctgtcatggcaggtcttctttcccgaaatctgaggctgtcactaccgcgccctggttttcttttcttttttcttttttcttttttctttttgagacggagtttccctcttgttccccaggctggagtgcagtggtgcgatctcgggttaccacaacgtccgccttcccgggttcaagtgattctgctgcctcagcctctcgagtagctgggatttcaggcccccgccaccacccccagcttttgtatttttaatagagatggggtttcaccatgttggccaggctggtctcgaactcccgacctcagatgatccgccccccctcggcctcccaaagcgctgggattccaggggtgagccaccgcgcccagcccacgtcctagttttctcggccaagcctggtcatgggcctttttcagacacttttagactcagggtaacgaaccgggccctggccgggcgcggcggctcatgcctgtcatcccagcactttgggaggccaaggcgggaggatcacaaggtcaggagttcgagaccagcctggccaatatagtgaaaccccgtctctactaaaaatacaaaaaattagcttggcatggtggtgcatgcctgtcatcccagctactcaggaggctgaggcaggagaatctcttgaacccgggaggcggaggttacagtgagccgagatcctcccattgcactccagcccaggcgacagtgtgagactgtgtttcaaaagaaaaattatatatatatacaaaaattagctgggcgtggtggtgcatgcctgtaatcccagctactccagaggctgaggcaggagaatcgcttgaacccgggagtgggagggtgcagtgaaccgagagcacaccattgcactccagcctgggcaacaagagcacaactctgtctcaaaacaaagaaaaagaaaaaaaacgaactgggccctgttacagttgtcagggacaggggagctccagttttcacgcctcaactttcccctcacactgatctttgtcttctcctgtttaacctttttccctccctaggcccactatgaataggagcagggaatttgttagatgagggtggtgtggagtacatggtacagaagagttggaccaagatcaaataaagattgtggaggcaggaataactcagtgaacattgcttcagcttctggcgcttgggaggcccatgcggaaggatgacttgagcccagcctgggcaacatagcgagactccatgtctataaaaacgtttttttttttttttatttgagtcggcatctcgctctgttgcccaggctggagtgcagtgtcgtgatctcggctcactgcaacctccacctcccgggttgaagcaattctcctgcttcagcctcccaagtagctgagactacgggcacatgccaccacacccggccaattttttgtatttttaatagagacggggtttcaccatgttagccagggtggcctcgatctcctgacctcgtgatctgcccacctcggcctcccaaagtgctgggatgacaggcctgagccatatcttagcagtttcagaggctgaagcaggaggatctcctgagtccaggaggttgaggctgcagtgaactgtgattgcaccagtggactccagcctgggtaacagagcgagaccctgtctcaaaaaataaagtggggagagggagggatcttgccacgttgcacagactg

SEQ ID NO: 1245016 - DNA, 4001 bp, Homo sapiens
tttgatggcttttggcagggacagacttggacacaaaaccgatccatagaagggcttcccaaaccttgttttgcaacatcccaaattgtctccagttgaaggaaggcctttatcagattcatagatgagctttcattgtaaaaataaatgtactttgcaccacttcatgatggagggagaagtggtcacaggctcgtcagtctatcatctcacagctgaagcaggatccccagggctaccgctgtggtctctcatggagggaagggtaggacttctctgccaagttagatgtcacctgatgggtttatacagggtggctgcaccttcaggtggtttccaggagtgaggccatggcaacctgagcctctggccttgctgcaaggggccgagccactgcagtcgccatggctgtggagggcagttgctctggggaggacagaagactgatgtgctcggacctctgggattgcagagctgctgcgaatgtttgagtctgtcaccctagagaggggccctgaggctaccgctgagcacagagatgggctgccactcgagtggggggcgcagtgggagagcaggtgctgcccgcctaagcctggggtagactgctctgaacacagacctgggagttcgccttctgtctgcctttgccccttccccttgccccgcaccctgcccctgcaccacagacctgggagttcccctcccccaccttcctcctcccctcctcaaccctgcagcccctgccctgtcagcacccgtgttgctgagagcgtagaagctgaggctgcagttgctgtggtcccgggggaagtggaggagctcaaagttgcagttggtctccgtggcgagggccaggttgagcttcacgtggccgtcctggtctactcgagcctgggggctctggtccctccagtccacccagagcctgtggggaaaggcaccacagccagagccccagccccttcttggacggggccggggggagaccctggcatcccaaccccaaccccagctgctttcagagttctggcagtgggaggggaattcgaggcagtgaaggtgcactgctagtccggcggggaccgccaggagggtcatattcactcagacagcctctaggttgtagatgggggaaaaggagggctatgcatggcagattcctggggcaggaactgtctcacttacgcctccaggatggtgagccttggtgtccagagagactcccagggcagcgtgatggcgtgccgcgggtgtgcactagtgttccaggccaggcgagtgtccagccaggactggggacacaagggcaccactgaggctcctgctctccacatatccatgcccctaagctcagcatgttgatgaaggctggtagttctgagctggactcagctgggctttcccatcccacctccccaggcataggagctcaccagcctaagcagcagcatggaggacattgtgtatcgcaggatgtcctgggggaagggcaatgcatcacctcagggtgagcgctgtgttgaaagaacgcagcaggagaccccagcactatccagggctgagtcctgttccctgcccagctcagcacttggggcccttggcctagaggcacttaccacattaaacacgttggagacaaacacccgcacatccacgagcaggggcgcactcccattgttcgggatctggatgctttcctgaaccttcttggacaagttgacgttgaagagggatggccagactgagagagaaaagtcaaggtcactcaggtgccctagggcccaagtcccaaagcttatgaccttgccctccacctactggctgctgtcccttggaagccctgcccgtggaccaacagcaaggtaatgctgaaccccaggaaggtgagatggagcagggaccatagggccatcatcggctgcacggagggactggagggagcagcggtgcctaagctacaacctctattccagtcacttctctggcagctgagcaattagccagaggcagctgctctgggcaaggactctggggccgtgcacttggcagcccctgccccagttccgcaaacgctcaaagataaagcccaggacccagccccgcccacactgcacctgccttggtgtccctgtcccgctccatttccaccacctggaacccgttgagacgctcaatgcctgcccagggggacctggcaggtgtaggacctctacctctccctgactttgtacttccaatcagggcccacgagtgtcccctgcatttcggtggctgacaccagcctacctaagacccaaacctttgggcagagtgttctgtgcttaacgatgtgagatggggacagccttgagagtctccttgctctccttaaacactgaagtgattttgtgtaaagagccttggctcaagaaccctggatgtggtggctcatgcctgtaatctcagcactttgggagaccaaggagggcagactgcttgagcccaggggtttgagaccagagtaacatagggagactctgtctctatcaaaaacacaagagttagctgggcgtggtggcatgcacctgtagtcccagctactcaggaggctgaagctggatcacttgagcccaggaagtggaggttgcagtgagccgagattgcaacactgcactccagtctgagcgacagagcgagattctgccttccaccccacttccccccaacaacaacaacaaaaagaacaaaagaactctggtaatcccagcactttgggaagctgaggtcaggagtttgagaccagcctggccaatatggtgaaaccccgtatctactaaaaatacagaaattagccgtattagcgtccatggtggtcgacgcctgtaagctcagctactcaggaggctgaggcaggagaatcacttgaacctgggaggcagaggttgcggtgagccaagattgtgccattgcattccagcctgggcaacaagaacaaaactccgtctcaaaagaaaaacaaacaacaacaaccaaaaaaaaaaaaaaaaaaaaaacagaagcaaaaaaaacctctgggaagggagttttacctgacaacaggtaaaggccaactcatgagcaaagccctgggacattcttgtcctgaagtggattctcagcttgcgccagcccagcagtgctgtgcacctggagcccaacctgccagggaaagactttcctgccccccccccccccgccggggagtgaaacagctgctggagacttgatcctggcccagatgtagccagggaaggaaaagctaaggccaaaaatggacggggactgactgggctgcccagactcaaaggggccctgggagctgaaagcaggcaaggacagacctgtcacacaccagagcacaaatgcggctgggaacacacatctgtgtctgtcatcaaccgactttatcgaacgccttaaacaatctgcctgcctctgtcgcacgctccccagactcagatttttatgcggattgtaacccggctgcctgaggtgtgatcagccctctttcctggtagctctgcaaagggtcctgcacttacccctagggagcccctctgtgaagccccagaggcttcctcccagaatctcaagacaatgagaaacgcgaaacagcgctgtcactgtgtgtgaaatggtttgtgcgttttattaacaggcaaagctctccccacggtcccccaacaatgactccaactctgtgacatcccagcgcgcccgctaagtgctttcaggccacatcaaccgtcaggatgctgtcgcctgcctttgggccctgccaggacgggccaggacagggctcgaggatgcatggctgggaagcgccggggcagggacgaagggcccccgccgcctcgctcatgtgcaacaggtcgctggactcgcgctccaacacgctgccactgtgggtgccccgcgcggcagcgcacacacggcccgaggctcggcctggggcacggcccagcaggcccgcgcagatc

SEQ ID NO: 1245017 - DNA, 4001 bp, Homo sapiens
gaggaatctgcctagtgagcgaattctgttctgaggcccttccaccgtcgcaggagtggggcccagtgtgcgtcagagatacccacaaggggggcagagagagggagagggtgaagcaggaggaggctgaaaacttcacgtttcttttttccattttagtgacaagagtcacacccagcctttacataaacatggccaaggagcctctctgtctaagcttacttcccttgtggccgcccagcctctcctccgggtgaccctgacacgctgggcaggctcatgaggggcaaacatacagaccctgcaaagattagctgggccatctgacaacacccatgcctcccgccggcctccatgcgctaccctgcatttatctcccgccttcctcataccaaatcccctccgcagccccaccgccacttaagcacacagacggcaggcacgcacacacagcctgcttgcggctggcctcttgggtctgaggcccacactgcccttgtcacgccacctccctccccacatgtgttttctgaccagtttgcctcccagctcagcagcccagacaggctcctacaaacaacgtcacaaaagaatcctgtggagaatgttgcaaacacacaaccttcccctcgcttggctgcccatgatcccataaacacaactggcgcattccacctcgagcccctcacaccagtgccaactgacccacaggcccctgagacataccccggggttcctcgctcctctcatgatctttgggatctgagttctagacgcgcagcccccatgcaacgcgctcatcacagacacgcaaacccatccatcgccctcttcaccactggaccacacctcagcagggccacagaaatgggacccagacgtgacgccttctgactcaaaggcccacaaccgccccctccaaaagggcacatacactgcatcctggcaccctccgcaacacatacagcatgccagctctgcagaaaacagttcataaacaggtcataggtgcagcacaagacacacatgcgagaaaacacatgctgtagaaaacatacagccccacatcgaacaaactctgcacccagcatgctgtgccctgctcagaatacccatctgtcacccaaagccacagggctcgtcttgtaactctgccccacaacactggacacccttcctggctttctatctccatggcccagggagggccctacccagacccctggctgccagcaaacggtggtgcccaggagaggtttaccttgccccaccacacagcacaagacacacgatctccaagactcacagccacaaccctgccccgacggcgcggcggttccggggccccagctcgccctgcgcaccccgcacaccccaactctggggcgctcggcggcccacccctccccctctctgcctggctcctacgccatcaccctcccagcagcttgcagcgcttgcccgggctcacacccgccccaccccacccccaatctgccccacggggggagggggccattaggctgcagaattaacccttcaaagagggagtgagcacctccccttccacggccccaggcgatcgcgtcccacggccgcccctcgctcggacgccataccagggcccccttagtcgccccccagcgtcgtgcgcgcccgggggcggggccaggctcagcccccgacccctgcgcccccaggtcaaccccaaaggagagcggtctgggcgcggggcgcggtcggggctcccgcagcgccgggcagcggagagggggcctggcagttggctccggtccgccctggccctgcccagttcgccccagggcccacctgactgcgatggcgccgcgtccgccaggcccggctcatcaccgtggccgcccccggccgctccggttttgcccgcctccagctccggctccggctccagctccggccctggcccccccagcgcctggccccggcccggccccgctgccgccgccgccgccgccgctgacatcatcggctccccccgccccggtcctacccccacccccacccccggaaacagtccccccccagcgccgccgccgccgccgccgagaggaggccggcgcagcgcagccgacaccgacacaaagctccgagcgcccgacggccttccccaggactgacccccgcggcatgacactgcgccgcgctgggccaccgggcgggtggacaccgagcggggcgcgggccgggctgcagcatcccggcaggggcgcaagaccaccgacccccagggaaagggctccctccgcccttcctcctgcacgcccttcactcagcggtgcacactgcctgaaagcataacacacaggctctcagggtgcagacatgacatggcagactcataatcaggcccggtgggactcacagacccagggtcggcacactcaaagagggccagccctggacacacacacacaccctctccaggaatgcgcaggaaagctcagcaggccgcggaaaaagaaggccctggccctgcatacggggcacacacgaacgaccaccagcgcaaatgaacacatgaagctggctgggtactttgtccccaccagcagatagatccacatctgtatacttgaacataaatgcagaggccttggtgtcggcctctggggacagcatcaacaaaacaccaggtggaagcacacacagaaaaaacacattcctgaaactccacagggacaatcccaagaactcctccctggtgctggaaaattaaaaactaaggagatggaggagccagggttcacagctccttgccttaaaacctctctgaggctgggcgcggtggctcacgcctgtaatcccagcactttgggaggccgaggtgggcggatcacgaggtcaggagatcgagaccatcctggctaacacggtgaaaccctgtctctactaaaaatacaaaaaaattagccgggcgtggtggcgggcgcctgtggtcccagctactcgggaggctgaggcaggagaatggcgtgaacctgggaggcggagcttgcagtgagccgagatctcgccactgcactccagcctgggcgacagagacagactccgtctcaaaaaaaaaacaacaacaaaaaaacctctctgaaaccatgcaagatataaataaacaaattaatgtaaagccacagagctagccataaaaagaataaaagaatcagacaaactttggagtcatggagacataaatagaaaagaagcagagttgggctgggcacggtggctcatgcctgtaattccaccactttgggaggcggggggtggtggggtggatcacttgaggtaaggagttcaagaccagcatggccaacatggagaaaccccatctctacgaaaaataaaaaattagcggggtgtggtggcacatgcctgtaatcccaggtacttgggaggatgaggtaggagaattgcttgaacccaggaggtggaggttgcggtgagccgagattgcacgcaccactgcactccagcctgggcaagaagagcaaaactccgtcccaaaaaaaaaaaaaaaaattagccaggtgtagtggcacattcttgtaatcccagctacttgggaggctgaggcaggagaatcgcttgaatctgggaggtggaggttgcagtgagatgagatcacaccattgcactccagcctggataacaagagtggaaacttcgtcgcaaacaaaaaaagaaagaaagaaagaaaagaagcagagttggactcagcgggaaaataggcgtgctaccacctcaggagagttccagggaagaaccccacccccactccaaccatgtcacaatggctggagctctgaggggcccaggctccctgagccaggaggagaggagaaagtccaaggaaagatggtgagtgtgggggccaggggcctagtactccctccctatagctcctggttgctccatttcccctcctttcctaaaacttagctgtctcagagatacccacaaataga

SEQ ID NO: 1245018 - DNA, 4001 bp, Homo sapiens
tgcgtggcgacccccttctgggacctcctgacatccgaggccgggcctacttctatgccctgctcaacgtcctcagcattggatgtgcctacagtgcggttcaggtggtgcccgctggcaacgctgccactgttcgcaaaggttcttccaccgtctgctccgccgtcctcaccctctgccttgagagccagggtctcagtggctacgactggtgtggactgttgggcagcatcctaggactaatcatcattgtgggacctggactctggacactacaggaggggatcacgggtgtctacaccgccctgggctatgggcaggctttcgtgggaggactggcgctgtccctggggcttctggtctatcgttctctgcactttccctcctgcctcccaacagtggccttcctatctggcttggtggggctgctgggctctgtgccaggcctctttgtgctgcagccccccgtgttgcccagtgatctcccgagttggagttgtgtgggggcagtggggatcctcgccttggtctccttcacatgtgtgagctatgcggtcaccaaggcccaccctgccctggtgtgcgctgtcctgcattccgaggtggtggtggcccttatactgcagtattatatgctccatgagactgtggcaccttctgacatcgtgggggcaggggttgtgctgggcagcattgccatcatcacagcctggaacctcagctgtgagagggaagggaaggtggaggagtgagatagaacttgggagcccgggggttgggagggacagggataaatagaggcaaagactgaagacaaacatgggaggagaagtgactggaaaagaactggtgtgggagagggatacctctcagagtcaagggtgacttggggacttggtggagagggactacctggaagacctggggccagcctgggaccaagggatgtggagaccaggctgggtcctggaatcagggcataactaaggggtaaagtctgaggagcagatccaaacggctgaggcagggaggccgtgggccacggggaggacttcactcagcagcaaagagaagagcattggggctggagtgttccggcaaagacagagccagcagctgcggtgggggaggggagcgtgcctccccacccctcccctcacggcaaaggtttcctttcctcgtgcttgtgccccccccttggggtggtgacgtgacattgacatcaaacaaggattactctgaatgtggcttgcagtggtgtcgtctctgctttggagggagagtggaaagtcctacgaccgttctcattggagaaccccttgggatccccgccccccattttattcctgaaatattctacaaagtggaggatttcctaatgttcagatgccttgaccccaaatcccccaggactttcgtggcccgccccatggctaatctgcttttctcggattgtcgcggtcccgtgatctctcccggacagtggccaccctccttccagagcaggcctcccagctgaagtctcttcgagaggctcaggccatggatctaggatcatggctcggtacagcgcggcattacaggccaggagatgcccacccgtctccgggggccgtttgacaaacatcggctacttccggacaagccactggtcctgccatcttggtttgttcatgcatattcagcaagagaactgcatattcatgagcaaccgcccttccccgggaggacccgccccgccccgccgccattaccgattcgcagagcagaccattttccagctggggggggctacgaatgagaggcttttgctgaagatgaaaccgttgtccaaactagaatgaaagcggcccaattttaccctcgagtcttcaaaccttaagcctcagtgcaaaagggagcagcgaggagaggcggtgggattaaagaaaaaaattcttctctccctgtcacttcaaaaggtcgcccaaccagcgagcggggggtttacccacgactctggctcgcaccccttgcgggcctgcgcaggcggccccgtagcgcaagggagggcgggaaaggaaggggcggggacgcgagggcgaatctataagaagcgtcgttcagcgagttcgctgctcagaagcgccgagagcgcggccgggacggttggagaagaaggcggctcccggaagggggagagacaaactgccgtaacctctgccgttcaggaacccggttacttatttattcgttaccctttttcttcttcctcccccaaaaaccttttccttttcccttctttttttttcctttttgggagctgaaaaatttccggtaagggaaagaagggctcctttcgctccttatttccccgcctccttccctcccccaccttcccctcctccggctttttcctcccaactcggggaggtccttcccggtggccgccctgacgaggtctgagcacctaggcggaggcggcgcaggctttttgtagtgaggtttgcgcctgcgcagcgcgcctgcctccgccatgcacgggggtggccccccctcgggggacagcgcatgcccgctgcgcaccatcaagagagtccagttcggagtcctgagtccggatgaactggtaagcggctctgtcctccccttcccccctcctcccctggcgggcggggccggacgggggctgcggaaacttggcgctttctcgctgcttatgggtgacgggccaggagcatggctcagcagcgccaaggccgtgtaggcgccagtctcgggcctcccagagttatattttgcaaagagttgagcaggcgtagcgctttgtccgagatggggggctggctggagggtgagaaggagggagagaaggatgactgatttcacactccagagttaccgacgttaaaggcgatccgacgaatcctagggagtctttacaagtttggttaagaagccaaacccgggtagcttcctcctcttctgtaatacaaatgttaactgagcacctgctctgttgaagacacaggagactcgggttacagaggtgaacacgacagaccaggaccctaccttcaagagcactgtctgtgggaaagggcaagcagtaaacatgaatacaatgaatgaatgagataattcagttaatggcatttgtctcgaatagagtgaaaaggggtaatcccatggagagtcactgagctggggctactttatttttttatttttattttattttattttttgagacggagtcttgctctgtcgcccaggctggagtgcaatggcacgatctcggctcactgcaatctccgcctcccgggttcaagcgattctcctgccttagcctcctgagtagctgggattacaggcatgcgccaccatgccccgctaatttttgtatttttagtagaggaggggttttgccatgttggccaggctggtctcgaacgcctgccctgaggtgattctcccccgtctttttttttttttttttttttttgagacggagtttcgctcttattccccaggccagagtgcaatggctgaactcctgacttcaggtgatccacccgcctcggcctctcaaagtgctgggattacaggcgtgagctaccgcgcccgtcgaggtggggctactttagatgggatggcgtcagggtctgggaaggcctatcttagaagacattacccaaatgatgagaggcagccagtcgtcgaagccatagtttggatggcgagagcttttccggcagaggaaatagcaagtgcaaagggcctgagggagaaatgaacttgggcttgtcctacagggtgaaaggcggccggtgtggctgaggtttagtggatgagagaagagtgttacagaaataggctggagaagcatgggatattgtatattatggtaaggagtcaggacttaattccattttcagtaggtagtcgttgacaattataaacagagtgacagcacatttgaaaaaactactgctgtagttgctctatgaagaactgatgcg

SEQ ID NO: 1245019 - DNA, 4001 bp, Homo sapiens
tgtgagcaaaaatatttgcagtggctttgctttccttgccagagatctaacctcatccaagagctccagcaggacactccaactgagttaacccagtcaaataaatgccctaattcttgcaaggcactggttcagaaacagcaaggattcgggaattcctggtttggaaatggacatccaccttcatctgggtcaatattttgaggacgtttgctgggagcttctgggaatagtttcctgccatcctgagagaaccataggaaaatacttccatatattattgcctgtacctgctgctgccatctcactaccagcctgtggatgagggcagctaaagctcagaaaaacaagggagatgctgccagggccactggattaatcagtcctgaaaccacgatacctatttttttttttttctttggagatggagcctcgctctgtctcccaggctggagtgcaatggcgcaatcttggctcaccgcaacctccgcctcccaggctcaggcgattctcccacctcagcctcccaagcagctggtattacaggcatctgccaccacgcctggctaattttgtatttctagtagagacagggtttcaccatgttggccaggctggtctcgagctcctgacctcaggtgatccgcccacctttgcctcccaaagtgctgggattacaggcatgagccatcacgcccagctgaccccctccattttcttccctgacccccaggctctaaggcagacagctactccttcaccttgtagcagctaccccactgcattattaatttttcatacctattttcttctctagaccataagcaaggatgctgttccattcatcctggtattctgagtacctagcatatttcagatacctggtaaatgttaagtgaatttgtgtaactgtcttatatatataatgaatctgcaatacctcccttttttctgagacagggtcttggctctattgcccagactcactgcagcttcaacttcccaggctcaagaaaatcctcccacctcagcctcccaagtagctgggactacaagcatgcgccaccacacccaactacccaactaatttctttgttttttgtacagatggtgtctcactatgttgcccaggctggtcttgaactcctgtgctcaagtgatcctcccgcctaggcctcccaaaatgctgggattacaggcatgagccactgcacccagcctctgtaatactcttgatggctaactggatatttcattcatcattatatctaaagagcctaggatagtgtctgacacatagctggtgtcgataactgtttgtaaaaataagttccttttcccaatctgggtgatatttaatttatggcactgttaacctcctttcctctcttctccctctgacccacaatagggctctatctttgcagctcaaacctgtctccttttcacgaccacccctcataagccaatatcttgtctggcagcacagggcacaatctgccactagggcgttaagtttgtgacactgcccgccatttcgtcctagcggtttacttgggggtggaatgtctgagaaaaccacagctcccacgggtccccacctcggtacagaagggagtgtccctgcttctcccacccccacggctgacaggcaccaaaccagagctgggactgtccctggcggtgtccaggccccaccctctctgtgtgcaggtggaaatgaaggcctgggggcggggggaatggagggaggcataaacttcaaggtcacacagcgaaccccggtcagaacgggcctaaacgtagggtttccgctcggctctctagggagctgggagcccagcccccgcctacccccacagccgcgacggaatgaggtctcaccgcaggccgctactgccccgcgctcgctcactccgctgaggctccgcgctgctgggccgctcgcacagagcccgcagctgttgtcccggtgtcactggcgacgggcatcggccacttccggtacccgggcggcactccagccaatcggcgcgcgtcgcactccgctggaggaacaggtggtcagcgcaccgacgcccccttgccttttccggcttgcttttcgccggttctagccctagcccaagttccacgtcgccgccgcctgccgagccggctccctggaacagcaaagtgcacccgtcgatgcccacttcagccccggaatcattgacgacctgagtcctccgggtttcctagaacggctccggggatgaacttccgctccgcgatctgccgctctgcgccctcgtgtcgctccccaagcattgctctaggctcaagaactcgagaatccgcttcgcattcccgcggggaccgtttgcgcgacccttttaactctcccaacccgcatcgttcttatcccatccttcctttccacagactccgtgggtctgataagcacagggctgcagatcctgggaacaggtctctcctcggcgggagcgaagggagacatgctttgagttccggaagggcttgcaggagtgacgtttggcctgaaatctcaagattgcgtgggaattaccaaggttaagagtaaaggcctaggttaagctgccgaggccacggaaacagcattctgcagctagccttcctgggttccctgagcaagcttggcccattctcacctcagaacctttccttgttacttcctctgtaattttgcacagccagcttgttttcttgtttgtttgttttttgagatggagtttcgctcttgttgtccaggctggagtgcgatggcgccatctccgctcaccgcaacctccgcctcccggattcaagcgattctcctacttcagcctccccgagtaactgggattacaagcatgtgccaccacgcccggctaattttgtattttaggtagagacgggttttctccattttggtcaggctggtctcgaactcccgacctcaggtgatccggccgcctcggcctcccaaagtgctgggattacagacatgagccaccgcgcccggcctccagcttgtttttgtttgttttttgaggcggagtttcgctcttgtcgccaaggctggagtgcaatggcacgatctctgctcactgcaacctccacctcccgggttcaagcgattctccagcctcagcctccagagtagctgggattacaagtgccagccaccacgcccggctaatttttgtatttttagtagagacggggtttcaccatgttggtcaggctggtctcgaacttctgaccttaggtcagaccttaggcccaccttggcctcccaaagtgctgggattacaggcgtgagctaccgcgtccagccagccagtttgtttttaggtgtcagttccaagatcaccacattgaagactttcattctatataatgttgcctcagagtacactatccttcccaaatatcagttacaaaggactatgattagccctgtttgggtctggtgctcaaccatggaccaatcaagggggaaaggaccgtgtgatttaccaagcctggtcacctgccttcccgcaaggatgacggcgggcttctgtgtttgcctcaccataatcctatgaaatagggaaaggagtgaccacccttagaagggaatattgtgtttgtatgccacacacaatctagcagaaagaaaactttctcttgaattcatcattgccattaggccctagactctagggtccatcactttagccactctggtactaaaatccttaactcccttgccctactgtctgcaactgcatgggaagtttgttaactctgattcaatcagaatatctattttccggccgggcgtggtggctcatgcatgtgatcccagtactttgggaggctgaggcagacagatcacaaggtcaggagttcgaaaccagcctggccaaaatggtgaaacccatctctattaaaagtacaaaaattagggccaggtgcggtggctcacacctgtaatcccagcactttgggag

SEQ ID NO: 1245020 - DNA, 4001 bp, Homo sapiens
cacgaagggaagcaaaggtgaagcctggccggggaccccatgtccgcattggggttttggctaacttcacacctagccttgggaccaagctctccagctctctaaatgcagttgggggggagatggcatcaggctggaggaggtgcttgggaatccagggcccgagtcctccccagcctcagataccagatttctataccgatgcagccgggcatctcccacagtaagctgtcggggctttcggggatccccagagcccatgggacaggccatgctgtgacagaggagagcataggcccaaggagccaggtccttggtccctgagccccagcttgcggttccctgggctccatccactagcagatcaatgcccaagatggtgccatgctcatccgtcacaagtaagagacaggaaacgtgcaggggggcagcctctggggaaagagggaaaagttgaggtggtagggggcagcgagagacaaatgtggtcagggtcaggagtaccaaactcaaatacctacggggctaggcaagtaacctcactgagtaaagggctctgggtagagagggcacgctccttctaaaggggacagctgctacagaggaccagaatgcgctgccatgcagaaatgtaggcccactgtcagagcttgagatttttcttgggaatgtgtaaatccagacttctggatactttttttcttgcaatgtttaaacattaaattaaaaaaaaaaaccccactgtgggtcaataaaaacaccttttcaggccagattggcctgaaggccagcactcagaactagtggcaggggagggcttccgaagggaggatggctgggcaaggggtagggcagggccagccctgggttcttaccactcctctgtcccttcctcttctggggtcttgtttcgttctccaccctgtcctctcggcagccatccttgccacctcctgcctcccgggcagcctcctctgactctcctggagggtttgtttcctggggggactccctgctggtaggggctagctcccggtcctcctctggttccaccttctctgtgctgcctgcacccccgtcctctctcttctcttcttcttcatcttcctcctcttcctcctccccttcctccccatcctctaggctgacaaagctgatgtaggggctcaggtctcgcaggtggagtggagggttgtctcccaggagccaggcagtccccaggcctggtccaggacctggttctgccccttgccccaggctgatgcccacactatggttgggcaggacatggagcacccaaagggcagggtcctggggtagccttctgatctgggcctccagctgccggcagcggccctcaaggctagtccctacagctccacgctctgccacaaactttcggaaccagccgaagagaagggcagtgaaatcaaggaactcatcccggtatccagacacaaactccatgtcttcagcggcacagggccccggcccagactgagcaaaagaagggatatatggtgagggacaggagagcaatgatggagtttggggctgggtcacaaattgagggagagggtaggtttgagagtcacttagggttggatccgtggatatgctaggagcggagaagaggatttttcagggctgaggatgggagtttagggaggaaaatgggggctggacttgaaagtgggtgaccagggttggagaagactactcagggatgagatggtatttggggcttaaaattggagagttcacaccctcaaaagcagagtttaaattaaggctagagaggagagagggctaatcctatcgggaacggtttggtggggagggaagcattttggatgcgtctgtggggtatgggagtgggagcgagggggttccctgggctcggatctgcgtggcgggcagccccggtagacctagcccctcccggccgccccactcctccggtacctgcagccgccaccacttttcgaaggtaaatacctcgcggtggagggtgcgcgggtgcggttgtgacgtcagggctgcccgagccctcgccggctcagcgggcggccacgccccccgggctcggtgcgtccgcgggtggctgccccgcaggtgcgcgcggccggggctggcggcgactctctccaccgggccgcccgggaggctcatgcagcgcggctgggtcccgcggcgcccggatcggggaagtgaaagtgcctcggaggaggagggccggtccggcagtgcagccgcctcacaggtcggcggacgggccaggcgggcggcctcctgaaccgaaccgaatcggctcctcgggccgtcgtcctcccgcccctcctcgcccgccgccggagttttctttcggtttcttccaagattcctggccttccctcgacggagccgggcccagtgcgggggcgcagggcgcgggagctccacctcctcggctttccctgcgtccagaggctggcatggcgcgggccgagtactgagcgcacggtcggggcacagcagggccggggggtgcagctggctcgcgcctcctctccggccgccgtctcctccggtccccggcgaaagccattgagacaccagctggacgtcacgcgccggagcatgtctgggagtcagagcgaggtggctccatccccgcagagtccgcggagccccgagatgggacgggacttgcggcccgggtcccgcgtgctcctgctcctgcttctgctcctgctggtgtacctgactcagccaggttagccgggggcggggcaggggacccagattcccctgtcacgggaagggggtgagttggggaggggacacgaggcccacggagttgagtggatgaaggcagcggggacaagaggaaagccagccagccgcctggggttggggacagaggcccggggacgcctggctccgggcgggattatggatgttgtcgggggcgtgatgatgtgtgggttgagcctggcgctctgaccctgggtccaccgagaggctgtcatggggctgtggattggatgccagggaacagcggagtggggaccctgggcctgggaatgggtgccgaccacctccgtcccgcgcaggcaatggcaacgagggcagcgtcactggaagttgttattgtggtaaaagaatttcttccgactccccgccatcggttcagttcatgaatcgtctccggaaacacctgagagcttaccatcggtgtctatactacacgaggtaattttacctgcctctgcgagggcagcgcctgggcggcccctccttgcaggtgcctccaggaccctctctggtccagcctgaactccttcccggctcaccgagccccatctccgggttccgtttgctctcattccccgaaacttcatgactccgtctcacctactggggagtttcccagtcccaggagaaagggctctttcttggtggcaacttcacgcctctggaatgaggaaggagccggggaaggaaagaaggcgccgcagctaagcccaggtctctcctccgcaggttccagctcctttcctggagcgtgtgtgggggcaacaaggacccatgggttcaggaattgatgagctgtcttgatctcaaaggtgagacttttccactgctcttcaggctctgcctccagggcttagcagcttccacctgacagttttctttacctgagccttttcccctggggccgcacattcctagaaccttcttctgatcctgtccaaagtacttagactcgagtccctgtttgccaaacggggtgatcattcaccatcaccttcatgagttttgccaattcattctaccacgtgtgctattgtctacttattaatatttttcttgaaatcaaagtactattttattttatttttttgagatggagtctcactctgtcacccaggctggagtgcagtggcacgatcttggctcactgcaacctctgcctcccaggttcaagagattctcctgcctcagcctcctgagtagct

SEQ ID NO: 1245021 - DNA, 4001 bp, Homo sapiens
cactgcaagaaaaaaaaaaagaaacccaggccaggcgcggtgggtcacgcctgcaatcccagcactttggaagccctaggcgggaggaccacctgtggtcaagagtttgagaccagcctggccaacgcagtaaaaccccatctctactaaaaatacaaaaattagctgggcatggtggtgcgcacctgtaatcccagcaactcaggaggctgaggtaggagaacagcctgaacctgggaggcggaagttgcagtgagtcaagatcgtaccactgcactccagcctgggcgacagagggagactccatctcaaaaaaaaaaaaaaaaagagtcagtgaagtcaaaaaatctgaacactatcaaccgacttgctctaattgacattttcagaacactagacccaagaactgcagagtatacattcattacaagtgcaaagagtattcatcaaaacagaccatatgcataattttcaaatgactgatatcttaaaattagctctaaaaatattacgcaaagtggtattgctaaaaagccattaaagcaataccaaaaaacactcaaaaacccaatatctgatagaaaaggaacacaagagaaacaaaaccagaaaggtcaaatggaaaactttagagcttcctgggttcaaatatattctctgatcatagtgcaattaaagtagaaatcaataacaataactagaaaatcccaatttatggaaattactaaataatgctcttaacccatagtcaaagaaaaaaatcacaaaggaaattaaaatatgttttcatactgagtgacaatgacagcattatcaaaccacctgaaaagcagctttagctcagaggtaaacctacagtttcaaataacatcttaaaaaacgaataaatatatttttaaaaataccttgctttgtaaatccaacctatttggctcaagagtttcaaataacaagcggcaagattttagatagcaagataccgacctgtaaacttactgcaatttatctgtttcctaaattaagatagcagtttagataatatttaagagaaatgacattttggaaaaactacagattttataaaatacttaaatcttttgttagtaatattatactcccaggtagtgtgtaagaaaaatgtctcgattattcaaaattaaattactttatatagtattaaaaatttaatagagtttatattccgataacctcatgaggaactgcccccattagttatgaaaaaaaaataaggttgtctgttatacctgttattaaacctttaacaaatagaatgaatttttaaaagtgcattctaggtgtaatatacacaagtggttacatacatggttacatatataagtaaccatttgttaagcacctactacgtatcggctcattattaagctcggttcatgtatttccaattcccacaattaccctggtgtacagatcaggaacctccgaggctcacaagtggcagccagattaacccaggaagctctaaagcctttgctttggggagaactgccaacgtctggtgatttgttggggcgttttctggttgtcacaagcagctaggggaactggcatttagtgctcgaggccagggcagcgctgctcattggatatgtattctccaccatgcgccccccaaatgccgactgcactctgatgagagagggagagactccaggcatcatcccatcgggtttcctcttccagagactcattttcagcccttaggggaagacagcggggaggagcccgttttcggtcccagtgcagagacccggccggtcccgcggggcgcagaggcgcaggaatgcagagccgggacggggttcacacatccccccgcacccacggtccactcccagccatggctgccccggccccgcactcgccacgtcccccgcgcgctcccagacgcatgggcaagggagcccgctggcccctccgtagctccggggtgcccagctgagtcaggtgcggacgcagatagcgcaaggcctgaccccgagcggccggaggccgggaccgccccgcaagcgcgctcacctcggcccgcggcgccggctccgggcgcacttccgggagctgggtggctgcgcgcgcctcaggcggcaggcgaacgacgtgcggcaccgggcggagctagggggcgggggcggagctgataccgaagctcctattggccgtcggggacgccccgcctctctctggcgttgcagcccaggagcctccaccgacatggcagcgaggttcccgagccaacgccatcctccgttccttccgtcactcactcactaatcactgttcctgagttccttcacttctcacccgtcatttattgcgcacctattctgtgccaggcactcggccaagcactgcgaggccttcaaagatcatttctttgtctctcccaaacccttccgcccagtcccacccgcagagctgcaacgctctgccattatccctgattcttaaccgccgcctttctcctttccgttcttgcctcactgggcctccctgagacacttgatttgccccaaccttcttcctctgtcttggttctcccactctcatcagctctgcatcccctgggtcctctcccacttctccccattccgttggggctagtccaatgtggtgccatcctctttccacctgcgtctctctctcttctctctctctctctcaacaaatgtcatccctgactcttcccttctccttccctttcccacacgccaacaatggctgaatcctctgatttgacctcattgtctctcagacacctcaccctctctcccttctcactatccctccctcggctcagttccacaccatttgtaatggtcaagaccttcttaccctttccccagcgtccagtgttgccggtttccaggccatcctgtgctgggccacgacatcaacttgtgatactaagttgcattaatggaagtatcatgtcaaagtttgggtgttccaccttgggcaactggcaaagaggagggtattcaaaaaaagctgccatgttccccaataacctatggaaataaaataaataaaaaataaaaatttaaagaagagctgtcattatcataacatgtcctgtacctgtcattatcataacatgtcctgtacctgtcattatcataacatgtcctgtacctgtcattatcataacatgtcctgtacctgtcattatcataacatgtcctgtacctgtcattatcataacatgtcctgtacctgtcccatgtttacaagaattaaagatcctcctctggagaaataaagcttgatgcggggatgggattacatcttcatgtacctgaaaagtgaccagcggaaaagggattcgacatgttctcttaagtcccagggtctgaacaagatcctatgtgtgaaactactgtttcagcctgacataggtggaagtttctagtctttttttttttttttttttttttttgtatttttggtggagacggggtttcaccatgttggccaggctggtctcgaactcgtgacctcaagtgatccacccaccttggcctcccaaagtgctgggattacaggcatgagccatggcacctagctggacgtttctaacattcatgtgattgatggcgctgctttgagttcctgaggacagcatggctaacaatttaccaggcacatttagagggacaccttcattgggtattgcttccaacatcaatgtgctctgcttctaagaaagtcaagagataaggtggtttagaggggaagattataggagttttatcttcaatgtgttcgcttttagctgatcaacacccaaggaagataacagtaattcaaaaccattaattgggttctgactcctttgtgaatctgatggaaggtaaaatttttcccaagaaaaatgcacatacacatctacatacaacactttgcactcaaatccagggagctaacacagccttgaaacccatccttggaacccacaaacctca

SEQ ID NO: 1245022 - DNA, 4001 bp, Homo sapiens
aaaattagccgggcatggtggcggctgcctgtagtcccaactactccggaggctgaggcagaagaatagcttgaacccgagaggcagaggttgcagtgggccgagattgcaccactgcactccagcttgggcgacaagaccgaaactcaaaaaaataaaaaagattattctttcaagttgtttccaaatcacaagcggacaataaatacagaagaaaaatccttacctgcatgcaatgaatagctaagccaggtcctgtatacaatttcttgtgacatatatggcatttaaaatgctttgctttttggtgctgaataaggatcttctcatcatcaaaatctctattacaatacctgatcaatactgttaaggcacaaagacagcctaatgatgacactgcctataataaaaacatatggataacattacaatatgggaacagctaaaaccaaaatggtactgtatagaaactctgctttttatatttattacacaattagggactacacttgccatgttatttcagtattttcaatttcctagaaggccagctctcttcaccaccccaaaaaacacatctcaataatcagcaatatactttgtcaaattcctgtgtttaacagagatgtcggtgaaacttttgttataaatatttcaacatttacaaatgcacactgaggacaggaaagagttcagttaagaaatccctaaggttctgtcaagacaattacttcactagatatgaagacgatagcaataactggattaggaatttagcaatatttagaatctaagagtaactatatggtgaacaataatcacataatttcgaatgaacaatccataaagttgtttccaattccgtatgaatttatgttgccaagcaatgtatttaaattcacagatcaataaaatcaataaagcagaattcttacatcaataaaacagaattcttacctcactactcagattttcctaaaatcacattacaaaattcgtaaccgtatttaagctatttttaaaactgttacataaacgcagtactgtaacaagccgcctttacgtacaaaacagtaaataaaatcaattttaatgtaaagaatattaacgcttccagaaaaagcattaataccacactgtagtaagagttttcctaataagataggcactttttagtcctacaaagttgggtaacagaaactccgccctgtgagaacgcttcctgaagattaaggcgcctctgggtgagacacggaagctagttctcctcccgccccgaaaagaaaaaaaaaaaaaaaaaggttcgaaaccagggttgactaacttggttctttactaaaccgccaattcgaaaaaataaacacaaaacacacataaagtaaataaaaacagaaaaagtgggtgacagactgtgaagctgtccccaaccctccatgaaagtaataagcctatcgcactcgaagaaaagtcccttgttgaatcgtcaccaaaacaacggaaggtggctgaatagtccctaggggacactgtccctggcggaggggtccaggccgcctcccggagtccaaaattcgcaccgaacaagatcctcctgagtcacagagtcacacgacccacaactgcaaaagcctgtcgacctcggaaccccattttcctagaagccttcccaagtccaatcccagccaccaggccacccacgcagacgcctaaatacaaacgctccacgccgtaagccaaatccaggcctcctagtcccaggccccaacaaccggcaccccaacgcgacctcgacttcaaaccgacaaaggataccagcaccacggcttcagctgcttcttcttcttgcgacccataactgtgttctaccggcaaagtaaaagggaggagaaaagaagcaggagaaacgaggccaaaaatccctcactttcccaacccaacggctaccaccacgtcccacaggaagcagacacaaaatggccgacggcctcgttccccgctccgcctcccgtcaagcactgcggtaggaggcggagccaagaaggggagggtcacatgacgcagacctccgccctgagtgggtgggactaagaggcgcgaagaggtggcagccatcttgtccgtttcagagtttttcgctttcgctggctgtgcttgcggagcactttgggtttcatttgtaaaggagccggagccccaggtacgctaaggggcatgcgaatggaaaacagaaaacaaaaaaacggaaaagattgccagtgcagttagggccgatcacaaataaagatagagacagcgcccaattttaattttgtttcaattgaacagtaaatgttgattatgtgcctattaaatgctaaaccaaataagttagtctctgctttgtaactcgcagattggtgacagacgagtacacaatgcagagttctcagtgcggcgttgagggaaatgcgaagtgctgtaggacctcagagagcgggagtcctagggcggctgtagtggtagtggtcgttgggttgtcaagtaaagttttgtttttctttgttttgttttatttttctgagaccaagtctcgctctgtctcccaggctggagtgcagcggcgcgatctctgctcactgcaacctccgtctcccgggttcaagcgattctcctacctcagcctcccgagtagctgggactgcaggcccgcgccaccaagcccggctaatttttgtatttttagtagaatggggtttcaccatgttagcgaggctggtctcgaactcctgggctcaagtgatccgcccgcctcggcctcccaaagtgctggattgcaggcttgagccgctgcgcccgacataagaaaggtttcttgaggagtcaacgggagcaagcaaggtgaaggaaagggtatctccgtaagggagcaaagagtttaagtctttgaggctgggcacgtgaaaaactaatcgtggtaagactggagctgatagccgggcgcggttgctcacgccagtaatcccaacactatgggccaaggccgaggcaggcggatcacttgaggtcaggagttcgagaccagcctggccgacatggtgaaaccctgtctctactaaaaatacaaaaattagccaggcgtagtggcaggcgcctgtaacctcagctactcgggagaatgaggcaggagaatcacttggacctgggaggtgaaggttgcagtgagccgagatctcgccattgcattccagcctgggtgacagagtgagactccgtctcaaaaaaaaaaaaaaaagactggagctgtcagtgaaggtgctggtcacaagagataatcctagggaggctagcaaaggcgggttctggcgaaccctagaagcattctcagaagttggatttcagctgaagtctctgagaaggcacagtggttctaagagggcaactggaggatcatgcaagtgagaggtggttaaaagtccagtgcttgggttcatagtccaccagtgccactgcttagctgcctgactttgggcaaggcagttaaacttcatcttggctgcacttaaaacagagcttagcatataataataactagtaatgtaaattatgttactattaaaagcaaaaaataatagcagacatccatggagcacctaccgtgtgccaagcattgtagtgagttttaacattatttgtctcagcctctggggtaggagccattattgtcaacttgttaatagagatgagataaaagagacttaagagagctggaataatttgccccaaaacacaaagtatgtgtggagctgaattaaatttgaattttaaaggatcagtttgggctgtgcgcagtggctcacacctgtaatcccagcactgtgggaggctgaggcgggtggatcacctgagatcaggagttgaagaccagcctggccaacatggtgaaacccggtctttactaaaaataccaaaaaaaaattagccaggcgtggtggggcacgcctgtaatcccagctactccggag

SEQ ID NO: 1245023 - DNA, 4001 bp, Homo sapiens
ccagtgtcctagggacagcaataggtgcaaaagaataacacccagtgcctgtctttgaggtgccgcagttcggtaggggtaagaaatgcaaacaaccgcagagcaggctgaattcctccaaggtccaacgtgggtgcagagggtctttgtgtgcaggtgcctttggggccccatagaggccagggaggggctaggatatggttctcagcccctttcctgtgccccacttctgaaaatctcctgaaacccctgtggcccactctgccttccagagagaggggctgaactgcgaggtggccaccaacacagaggccctgcagagcggcaggatagagatatggagctctacatctctgtgcagaacctgagccatcccagctcagcaaggtagggcctctgtcccctccccaccctgtacctatcaccccagggtgagcccagccttatagacccctgcttggaggtgtgttacgggacccaactggcccagctgcaggggctcatcagaagcatggagcagcagctgtgcgagctctgctgcgacgcggagcaccaggaccatgagcaccaggtccttctggacgtgaagacacggctggagcaggagatcgccacctacagccgcttgctagaggttgaggacgctcagtgagtgtgcacccgggtacctgctggggcgggctgggggcccacttcacctaggaagaagttggtgtctgagcaccagtgaagttcaggaggtgtgaatgtgggaacctgtgggggtttgcaggaggtgaaactgacaatgcaggctggagtctgattgaggagccttgaatgccaagttaaagcgtctggattagatcacgtaggcaatggggagccatggagggatttggagctgaagaggggaatgaacatcaagatattttagaacattcactctggctgcagagggagaaatggatcagaggggtcagggtggggccagagagatgtgtcagggggctggagcagggagtgtggccagagaagtcctgcggggtggagggtgggtcggtggggtggcaggggaaggaaggtggtgcacgcagaagagaggttatagctcaaaacagcaggactggatgcctggatctcagggtaagcgtgactcacagtcaggactcagtaagtgtggggtgaacacatgaaggagtgggcattgatggccctggatttctggttccgatgactgtgtgagtggtgacaccatcagccacagggtgaagagcaaggtgggtggtggtcgggtttgcaggtgggaagggtgatcaggccttcagctggcagtatcctggagtctccatgcttagtcacacgttgcagctttttgctccccgaaaaggtttttccatcaaggtttttccaaaggacaagcggcccggcggtcctcttagttccttggcccgcgtgccacccgggaggccgaaccggccccagccctgggccccctccccagcccaacccagccccgaccctccgctgcggggccctcccggaacggccggctgcaacgcgtgtctcccctggacacagctccgcccttcccgggaacaaaagcagctgcccgcgcctaagctcccacccggagcccagccccggaaatgggacacccgcagcgggtatccccaaacttcccacctctcaggtccggtagggcgaggggtcggggccggtgggtagggcgcggagagcgcactgagctcttagaggtctgtggccccgcggcggggggttatgccaaggaagaacgcgacgacgcgagggggagggaccgagagcaccccgaagccggggaccgccaagccggagccagtggagggggcgaagtcggcgagttggaaacttactgcaatcgtcctctcgtagccttgggcgtccggctcgtcttctggcagcttggtgggcggctgcgcagggctggacctgggctggatccttaggctccgaagagatgggccccatccttgtcgtcgtcgcgggcgccgtcagaggggcggcggcagcggccggcgctggcagtggctgggcgcgcgggggcgtcatggggcaggtcccgcgggaagtgggggaagtagccagagatctactggatggggcgggtggggctggggcacacgtcggtggccacatgctcctggatacaaatggtcgccttttccccgcaccgccggtgggggggtggtagaggcagcgcctccccgcccgggcacggcctggcccggagtgaccccggcccgggggcggctcagcaggcccggcgtggcgtggcgtggcgcggcggggcctccgtgaaggccagcgccagtgagtgccaggggcgggcaggcagggggccggcccagcccgcgtcacccggcagcaaacacgcagggtgagtgtgcgggctgcccaggcagtgcagagcggagagagctgcgtggggccacactcactcgcactcacaccgggggggcacgccggcctgggaccccgtgtgcgcactccctggggacaagcggggagccagcaggacagggacccgcagaacgcatactcacacgttcctgcaggtgccagcacatgctgggcttcgttcgctctcacgggacacacgcaggtgtgcaaggacaatgcaagtgcacgcacacgtgtgcagacacgtagtggaagcatccactggctcacacctgtaggacacacacacacacacaaacatgcacacatacagagttggttgaggatgctgttaacaccgtacaccccctaatgcatgctcgcgcgcaagcacgcacgtgcgcacacacacacacgcacacacacacacacacacgtgatcaagggcacccagggcagaatcttccatacccctaacaaggacccctaacaagacgcacaaacacgcacccatagaagtaatcaggggaccctaccaggacacggagtcacactcctaggcatgtgtggacaggctgcctacccacgggcaggacatggacatgctcaactatacgaggacactgcaggcacagtctgtgcacacatactctcaggtcacataaacacagcactctgtaacctcgagtcagtccctcacttggtcagtgagtgggctgaagcacccactgggacagggtggctgagaaccaggacagggcctgggaagtgagtgatgcaatgaggttgggcggtaccaccccccacccaaccacccagtccaggcttcccacataatcgggtcactaaacaaatcccagagggcccagccccagctgttgcctggctttccagaaacagaactcggttgggaatggcagctgcttggacaggtctgtccccagaaagccctgggcatggatggattcctgtctaccctctggtttccactgacacatttatctaccaacattttgtccaagtctcctcttctgagccctcaccagaatcacccttaatgaagagtcacagggagaagacgtccacccacacatcaggagacaggcctggaacagagccttcctgcacagcctcagaagggacccaccctggtgacaccttgatcttggactgacactcatgacctccagtactgtgagacagtaacattctgttgttgaaggtgcccagtctgtggtactgtaaaacagccctgggaaactaacgcagcctgttagcccacagatggtgaagggatggaatgctccacggagctccaggcttactatctacagcccccaaagtgtgctgcgggacccttgggtgggtgtaggtatgcaaggtaattttgggtggttcaaggtgaataatttcaattgacataataatgtatttatcttgctgggtaaatgagggatacccaactgttaggaaccaggcaacacagcaggaggtgagcagccagccagtgagcaaagcttcatctgtagaaacagccacttcccatccctcgcattaccgcatgagctctgcctcctgtcagatgagcggtgccgttagat

SEQ ID NO: 1245024 - DNA, 4001 bp, Homo sapiens
tagagaaacaagttttaagaggtatgtaccacattatatttaaaatagtttctcacattaccaagcacagaaatgagcataggaggctaagaaagggaaatgctgcttacctatctgttgagggacaataaacactaaatagggaagaaatccatccagtgttataagtagaaaacattttcttctgagtccattagtctcctgactagtctcttagatttagaactcagctctgcagatgggctttagtggataaagaaactccacatcacaaagaagggagtgcatctgtactctaagaaacaaggtgtaattccaataatcagcactcactcacctgggatctggccgtgaggcgcagagcagccacttctccctcttctgtgctcttctcttggaaatggggagaatcctgggaagacagagctaacgacaagaaagcagtaatgatgagacctaggcttaacgtgccactcagatttaaagtctaaaaaccacttcaacatactatatgtgctgcctacaaacactgagactgaaggtacccccaaaacaaccgacctcctcccaggaccctcttcccgggatatgcgggaatattgctactctgggctcgaattcagttgctataatcataacacattctgtaagatggcatcctctgatctagaaattagaatatgtcagtaaatttcccagtttaatctatactcgttggttctcactctgaaagcttatttataatgtagattgctggaccccacctcaaagtaataagcattagttgagcctggggtacaatccagaaatctaacaaccaccccagggggaattctggtgtaggaggtcacagcacaaccttcatgaaactggtcaggtagaatggaagtcagtcattaactactacgcctgttttctcctatgtaaaacaaaacatttttgacaaccaaagaggtgaattcttgccatagaagttaacatttcactcacattttgggggtagctttgaagggtccactgtgtgcccagctgccatggaaagggcggtgctcccataccaagcccttcagtctcacttaaaaagcccatccatccccaagacaatggagacagccagccaagagccacctcccctgagccaaccgttttcccttcaggagcaggaatttcgtccttccacgctacaagttcaacacgtccgcaattctcacctcctttctcaggcatttcagccaaatctgtctccatgatcaccacctcctccttgttctggagattctgctcttcaccccaattcagatctccctggccagacgagttagaagccccccgggcctcgtggtcccacttcctgccttccctcctgggctctgatgaaaggcctgggttagatcgggtctctttctcaccgtggagtctgcctcagtcctacggcgctggagcctggaagcccggggacagcatccctgaggctgggtcctcagatgtctgtccctaccgcttgaagctgtccctgggggaaccgggcacctggaagaggtgacgctggggcatcaggagtttggacaaattctgccgcgctcggggcactggcccagaaccccgcgaccaccccgcccgtggcacaaccgcgtcccccgaggagaggatcaggccagagtgagaagggacagggctcatggtctgccctcgaggcccctttaacaaacgcgcactctagccccgactcggcacagaacgacccggggaaccaccgccgaggccgagccgagacgagcgacatcaccacaagcaactcacctcccatcccgggcctcacaaaggggacgaacttctttggccagctcggagtcgcgcatgcgtaagaaggagcggagccaggcgtgctgccctcatcccgcccggaactacaattcccagaagcgccttggcatcgccagactccggttctccgcaggtgggagcacccgtggtgcggctgggagaatcggacgatcgaagagctccgtccgtctcgcgagagtatgaggcagcatctcctgtgtctaatcctcagagcaagggagggagggagcagcggagacgcggaccggagtcagggtccgtccccgcgctttgtctgcacaagttcctgcggcacagtgcttagggctgctgagttcaacccaaattactccggtgtaagatacgttaaaatacatagcttttatccatattttgtgcgcccagaactcatccttttgctttcaaaacatacgaaggatgtttttaggaagagcaggtccctctttgtacactcagtcagatgttcctgtatccacagactacttgtaatcctaaaattcatgtatttaaaatgagttgaaaagattgaacctgttgtaacaaatttaagcaataggttctttgcagacataagcattagtttaaacatatcataaaaggtggttctttcaagggagagttattcagtctctccaattctgttagaggactaacccatccacctccagcttcgtgtctagactgccctccttttctcagtgaatgacattactgcccactcactcatttgcacaaaccagagcctgaatattcttaactctttgatctcaccatctatttatcaccaagtcctattcattgtatcttaaataactcaattgtttccatctttctctattctcagtagcattaccttagttggggccaccaccatttcactaggattgccgttgcagcctggtaactggattccctaactaaggttttctctaccaccaatctgttctccacactttctggctagtgctctttctaaaacaagaatatgctattactttagtgcttcaaaccgttcagtggcttttagaaacttcaaggaaagatgatttccagctcccagaagggatttgtaactcccattatctcagccacctggtagttacacctttgtgcaatcccctcttgtgtatggactgggacttgcttctaaccaatacagtgcaataaaggtgacataaaagtctaacgtgtgtcttgctaggagactcctctcttgctggctttgatgaagtggtggtgatgttggggaggcccatatgacaaggaactgaggatggcctccagccaatagcctgcaagaaccgaaggcccttggtcccacaacctgcaaggagctgaaccctttggacagctctgtgtgcttggaagtgaatcattgtttgtagagtcttcccatgagaaccctgtcttgcctgacatcttgatagctggctgcaaaggactcacttaagctgtgctcagactctcacccatagaaactatgagataataaacatgtgctattttggaccactgagtatgtggtcatattgttatgcaggaaaatttaactaattccactttctaacataaaacaggatcttctttgtcaaaatccaatctgggaattgtctggaagagggaaattgttggattgagcaactattgaaaagtttatttgaaacccacaggaagacaaatggctacagtcggtcctaggaggtgtgtggcctgtacacatacttttaaaaagctatcctaagaatgataaaggaggagacaggaaatatcaagcaagaacttgtcataaaaataaaaacaacgaaactgtgtgtcaaaatatgatggttaatactagattggatagcagaatgtgtaaaattgaaaagtgaatatctacaatattctagtgaagctacaatatcaggctagggaactctacacttccagaagataccaggaagggagaaaaagttgaaaaatacgaaagaaatattaagcagtatggaagctgactagactttatgagaatccataaggaaagaaaaacagagaggaggaactattttaagaaataatcaagaattatggaaaaataaaaaattaaagacttcatattgaaattattgatagagagtcaaacaaaattatgaaaagacaccacatattacggtgaa

SEQ ID NO: 1245025 - DNA, 4001 bp, Homo sapiens
aactctttaaattacgccttcataggctttccttttccagtgtttctttgaactatgtgagtatttattatttttacaatcacttcagcatttaagtgctttcttagattgccacttaaagtcacatacatgctgtttcctctagagaaacaagttttaagaggtatgtgccacattatatttaaaatagtttctcacattaccaagcacagaaatgagcataggaggctaagaaagggaaatgctgcttacctatctgttgagggacaataaacactaaatagggaagaaatccatccagtgttataagtagaaaacattttcttctgagtccattagtctcctgactagtctcttagatttagaactcagctctgcagatgggctttagtggataaagaaactccacatcacaaagaagggagtgcatctgtactctaagaaacaaggtgtaattccaataatcagcagactcactcacctgggatctggccgtgaggcgcagagcagccacttctccctcttctgtgctcttctcttggaaatggggagaatcctgggaagacagaactaacgacaagaaagcagtaatgatgagacctaggcttaatgtgccactcagatttaaagtctaaaaaccgcttcaacatactatatgtgctgcctacaaacactgagactgaaggtacccccaaaacaaccgacctcctcccaggaccctcttcccgggatatgcgggaatattgctactctgggctcgaattcagttgctataatcataacacattctgtaagatggcatcctctgatctagaaattagaatatgtcagtaaatttcccagcttaatctatactcgttggttctcactctgaaagcttatttataatgtagattgctggaccccacctcaaagtaataagcattagttgagcctggggtacaatccagaaatctaacaaccaccccagggggaattctggtgtaggaggtcacagcacaaccttcacgaaactggtcaggtagaatggaagtcagtcattaactactacgcctgttttctcctatgtaaaacaaaacatttttgacaaccaaagaggtgaattcttgccatagaagttaacatttcactcacattttgggggtagctttgaagggtccactgtgtgcccagctgccatggaaagggcggtgctcccataccaagctcttcagtctcacttaaaaagcccatccatccccaagacaatggagacagccagccaagagccacctcccctgagccaaccgttttcccttcaggagcaggaatttcgtccttccacgctacaagttcaacacgtccgcaattctcacctcctttctcaggcatttcagccaaatctgtctccatgatcaccacctcctccttgttctggagattctgctcttcaccccaattcagatctccctggccagacgagttagaagccccccgggcctcgtggtcccacttcctgccttccctcctgggctctgatgaaaggcctgggttagatcgggtctctttctcaccgtggagtctgcctcagtcctacggcgctggagcctggaagcccggggacagcatccctgaggctgggtcctcagatgtctgtccctaccgcttgaagctgtccctgggggaaccgggcgcctggaagaggtgacgctggggcatcaggagtttggacaaattctgccgcgctcggggcactggcccaggaccccgcgaccaccccgcccgtggcacaaccgcgtcccccgaggagaggatcaggccagagtgagaagggacagggctcatggtctgccctcgaggcccctttaacaaacgcgcactctagccccgactcggcacagaacgacccggggaactaccgccgaggccgagccgagacgagagacatcaccacaagcaactcacctcccatcccgggcctcacaaaggggacgaacttctttggccagctcggagtcgcgcatgagtaagaaggagcggagccaggcgtgctgctctcattccgcccggaactacaattcccagaagcgccttggcatcgccagactccggttctccgcaggtgggagcacccatggtgaggttgggagaatcggccgatcgaagagctccgtccgtctcgcgagagtatgaggcagcatctcctgtgtctaatcctcagggcaagggagggagggagcagcggagacgcggaccggagtcagggtccgtccccgcgctttgtctgcacaagttcctgtggcacagtgcttagggctgctgagttcaacccaaattactccggtgtaagatacgttaaaatacatagcttttatccatattttgtgcgcccagaactcatccttttgctttcaaaacatacgaaggatgtttttaggaagagcaggtccctctttgtacactcagtcagatgttcctgtatccacagactacttgtaatcctaaaattcatgtatttaaaacgagttgaaaagattgaacctgttgtaacaaatttaagcaataggttctttgcagacataagcattagtttaaacgtagcataaaaggtggttctttcaagggagggttattcagtctctccaattctgttagaggactaacccatccacctccagcttcgtgtctagactgccctccttttctcagtgaatgacattactgcccactcactcatttgcacaaaccagagcctgaatattcttaactctttgatctcaccatctatttatcaccaagtcctattcattatatcttaaataactcaattgtttccatctttctctattcccagtagcattaccttagttggggccaccaccatttcactaggattgccgttgcagcctggtaactggattccctaactaaggttttctctaccaccaatctgttctcgacactttctggctagtgctctttctaaaacaagaatatgctattactttagtgcttcaaaccgttcagtggcttttagaaacttcaaggaaagatgatttccagctcccagaagggatttgtaactcccgttatctcagccacctggtagttacacctttgtgcaatcccctcttgtgtatggactgggacttgcttctaaccaatacagtgcaataaaggtgacataaaagtctaacgtgtgtcttgctaggagactcctctcttgctggctttgatgaagtggtggtgatgttggggaggcccatatgacaaggaactgaggatggcctccagccaatagcctgcaagaaccgaaggcccttggtcccacaacctgcaaggagctgaaccctttggacagctctgtgtgcttggaagtgaatcattctttgtagagccttcccatgagaaccctgtcttgcctgacatcttgatagctggctgcaaaggactcacttaagctgtgctcagactctcacccatagaaactatgagataataaacgtgtgctattttggaccactgagtatgtggtcatattgttatgcaggaaaatttaattccactttctaacataaaagaggatcttctttgtcaaaatccaatctgggaattgtctggaagagggaaaattgttggattgagcaactattgaaaagttgatttgaaacccacaggaagacaaatggctacagttggtcctaggaggtgtgtggcctgtacacgtacttttaaaaagctatcctaagaatgataaaggaggatacaggaaatatcaagcaagaacttgtcataaaaataaaaacaacgaaactgtgtgtcaaaatatgatggttaatactagattggatagcagaatgtgtaaaattgaaaagtgaatatctagaatattctagtgaagctgcaatatcaggctagggaactctacacttccagaagatatcaggaagggagaaaaagttgaaaaatacgaaagaaatattaagcagtatggagcctgactagactttatgagaatccag

SEQ ID NO: 1245026 - DNA, 4001 bp, Homo sapiens
aaaaaatgcatcctggacctctcagtgctctccctgatttctttaaaggagctgctcagatgtgctagttgtcttctttaaccacccagggattcctcccctctctgctctatgattctcaccttcctcttctagaatctgagtcaaatcctccaccagagtcactgcttcctcgctgctctctggatactgggactttacccaagtcctaacctcaccaggcaggatggtcaggaattgctccagcaccagcagctccaaaatttgttcctttgagtgaatctcaggtctcagccacttaaggcagagctctcggagttgactcaatgcctttcgaggaccagccaggtctgggtatggaaaattcctaaaattctgtcgacaggtctcagtgtcacgcaagaatcttgaagtaaggatttccttctcaacattgtagggtccactctgagccttgtctgacttccaccttagaaggatttgagaacgtgaagaactgttcatcctcttgcttgaggctaacattgctacagacaggagagtcaatctggcaatatcctttatttctccagtagtgagccaactgcttgaagtctcatgctagagtcacaaggacactatatcaaaggctgctgcagccgagggcagaacagaatcaaggtagagttagcagccttagtgacaaattctgagcccagaacttgcagggatggataagagaccctgaaacacaagcatggaccacaaggtcaagaatccctggtgtactctactatacatatacacacacagaaacagactcgcagtgtgcatagatgaacacacataagctttaccttgtcttcctcccctatatccttagacttgtaagggaactgccatctgcttggggttggtgggggatggagctgctattaaaaaggtagtgtcagaggcaatgactcgaatctaagccaaacaacagattaaacctctaacctgttgtaacaaaaattaaacatttttatagagaaaatagtttcattattttagtcactgatgttacagaagctgtaatgactgaacggactctcaacaataacaaagtgaatctgttacttggaagaaactaggagaatttcttcttaatacagtgctcaaggttcccaagggaactgtcaggggaaagggcgagccatttatctgcgttgcatgttaatgccagccgattctagcctttcactatcagagggttgggaagaccagcgggttggactggaaaagagtgaagaggttggtgtgacttcaagtcctttaagtgcttctataggagacagttctttagggatatattcgaaaccaggattctcgaaggaaaccttagaaccggcctgatctggaggagaaccgacaccacctctccccaggctccagctccgagccctgctgaggcacagtcgtgccaccaaagacaactgtttacaaggccctgcggaggtgatgcgacagccttgccttgcctcctgtcgcctccccttcccggccaagtccctctgcctcttactcctcttcagccgcagggtcgaggtcgagggcagcgggggagtcggggaccgtgcgacgcgcaacgctgggactgggcccacagcagcctccaccccgtctttgccctcccgcaagccacgagcacgggagcccgcgcgtggacgggctcgggctgtcactgatcgcgcggacactcgcgcgctgcgcccggacatcaatacctgtcgctgggacccggccgacgggcagccggagcggccctaaggccacaggcaacaatggcgacgctggcacaggcgcctgcgtggcgggctcagtcccgagcggcagcggatcctcgggctccgccacttcccttccccgcaaagcacagagtgtcccggccaggagctgcacgttccagcccggtcctgagaagcccggcccagaaaccccggcgcctctgcttagccgcgacctcgcctcggcgtcactgcgcatgtgcgccagaggaacgctgcgcgcccgcagagccaatcggagcccaagctgccgcctccccctcccgcgcctctggccctggacctgtctccatggcaacctcctccacccatcgctctgacttgcttgtcagcctgcgaggttccgaagggaacttcaaagtttccccgggcagacgcaggtctggtagacgtcttggaggccagggaggtgccagtagctggaggagcgccgggagttgaagccccgcgccaactacgcagagaaaactgggcgccagatttcctagaggaagaatgggcagggaagatgtgggtctaaaggcagaaagacttaatgtgcggtttcgggctttactgtgcatacatactaactgtgaaaggttttcacttcctcctcaggaatttgattctgagactctcagattgggggaaaaaaacccatgttctttctttctttcttttttttcttttgagacggagtctcgctctgtcgcccaggctggagtgcaatggtgcgagctcggctcactgcaacctccgcctcctgggttcaagtgattctcctgtgttcaagtgattctcacttgaacttcctgggttcagcctcccgagtagctgttatttctaagagacacaaaacaaaaatacataaaacactggaaaaataaaagcatagaaaaacatattcaaggtgttcccgttatctactgttctattaacaaaccaccccaaaacttagtggttttgaaggacaatcaccgtattatgctcataaatttcatggtgaggaatttgaaaggggaactgagtgggtgggcctttgcctcattatgtctgtagcctctgttgggatgatttgatggctgggagggcccgcttccaagatggcttttccactcacatgtctactgcttgggaggagatgggctaaaagatgaactcggcttgtgtttgaccagagtgcctcaatgtggtctctccagcataaaggactgagggcagctggacttgttacatggtggctctgggctccaagagtgagcattccagtgaacaagagagaagcgccatggccaattataacatggccttggaagtcacctaacaccaattctgtcagactcttggtcaaagcaatcacaagcctacagagaatcaaatggaggcagaatcctgtgagggtggaggaggactgtcaaagactcttaatatcaccacaccaggaaaattttaacaaaaagaaagttggaccgggcgcggtggctcacgcctgtaattccagcactttgggaggcccaggcaggtagatcacctgaggtcaggagtttgagaccagcctggccaacatggtgaaactccgtctctactaaaagaacaaaaattagcctggtgtggtggcgcacgcctgtaatcccagctactcaagaggctgaggcaggagaatcacttgaacctgggaagcggaggttgcaatgagctgagattttgccactgcactccatgtactccagcctgggcgacacgagcaagactccatctcaaaaaaaaaaaaaaacaaacttggggagtgtgatggtcttttgatgtgtcaacttggctaggctacagtctcttgctatttaagtaaacacgaatctaggtgttgctgtaaaggcattttgtagatgagattgaagcccataaacccagttggactaagtagcatgggagattatcctagataatttgggtgggcctgattcaatcagttaaaagctttcaaaaaagaaccgaagtttccctgatggagaagaaactccatcagcgtaccacagcttccagcctgcccttcctgatggggtgctcttatggactttggactcacctggtcaccccctcaatcgagtaagccaactctttgccacaagtatcttaaatatctactggttccgcttttttgattgaaccctgactgatacaagtaataattctaatatctgataagctagaatttga

SEQ ID NO: 1245027 - DNA, 4001 bp, Homo sapiens
cctcttgtcgcccaggctggagtgcaatggcggagccaaaatcttgcaacctccgcttcctgggctcaagcgattctcctgcctcagcctcccaagtagctgggactacaggtgcccactaccatgctcggctaatttttgtatttttagtagagatggggtttcaccatctctgttggccaggctagtctcaaactcctgacctcagatgatcagcccacctcagcctcccaaagtgctgggatgacaggcatgagccactgcacctagcttcttttccttattttaaatcatttttttcttctatagaattaaggctttatgttcccttttctcaggaagttgggccaaatgcagctgtctgaacttgtcaagaactttccaggctgggcgtggtggctcacacctgtaatcccagcactttgggaggccgaggtgggaggatcccttgagctccagagtttgagaccagcctgggtaatatagtgagacctcatctctgcttatataaaaataaaataaaataaaaaaggaactttccaaaccttcccaagaaaagaaaacagagcttagagagaagaacatgggtgcagaaacttccctgagaacagaaagtggttcaaattttcacagcacccagggccagcaaggggctcaggggacaggacctcagaggagaatggcctgcaggggccccctgcaattggaaccatgccattcaacagtgagcctgtcagcaagcgacagcaaggactcaagaccagaggaccaccccccaaatgcctcagactccttaggacctctgtctaactctggagggtgggagggaagggattcctaagtgtgactgaggtggagtttgccaccatctgctcaggatggggcatgccacacccatgatttcacttgagttttcaaaatttaaaaaaacagagatggttgctgatccctcatatagtgaattaaaattcatatacttgttatgcacacgtgtacaaggaaatgtacagactaggacacacacacagcacagaagcttcaggcagttacaaatgctcagacaagcagaacaattcacactcatgcacacaaagggcacatgaccacaggtaaactcacaatcacccaagccacacaaaaacacgcatgctcagagggcagatacacgccaaacacacaaaagacacaaggacacaataaaccctcagattgtgcaggcacataccttaattacataaaattacccatgcacaaagagttgtttacaaacacacgttggacaccaacacacaaactcacatccacatataacatacaaaacctatagaaactacaacaaaaaggcacaggttacacacacacacacacacacacacacacacacacacacacacgtcatccacaggagcgcctacacagaagcttaagtggaatgcacagactacaggcccttgcaggcccagcagctatgatggtgggggtggggaaagggctgacaccatcttgttccccagcctaagagagagcgggtccctctcttaggatcccaaataggggtccctatttggggagcacctatcccctctgggggatgttggagaaaaagctcctggttagacccagctgctgagagctggaccctctgaacccaccttctgtgcccacccacaagcttgtgtgcatgcccccacccgccagcccagcccataccgtgctgaagttggggaagagactgagcggggcagcgccattgaagtggaaggcgagcaagtgcttgaagtccagcgggggctgcagaggccgggtgggcaggggcagggaggccagcagggggctgggggcgccggaggccgggcctgctgcaggaggaagaagggcagggtctgaaatgggctctgtcctacccccgtggccagaacaagaggcgggtgggcttcttgggtgtggagctgggcagaaacctgtgtctctcttcacagagtggcaccagccagacccatagtgattatagcccccttctctgtgcccttcctccccacagctggggaagcagaggcagggagtccacagttgaggctcccagcccagagggatgaccctcctgcccctactgaggcagcatactgaaccccagggcagcccagccaagagagggacagaggggtctgggcaggccctgacacacacaccaccatggagactgcatgatgtgctgggattccattttattgcaaattaaactcaaacccaggggtattaggaaaaggctagccctcgcccctctcactctctaactatcctccctccctccagatccccaggatttcatggccagggctgacaggagggaatgggaaacccatgggctctgaagggatgtgctccccagctctgatgaggcctaaactgcttcccccaggaggtaaataagccaacattcctgggttgggcctcgacgccagtccttggaggtggcaggtacagcactgtggttttgcagtctttggtcttaaaggtctgaggcaagggcaggggaggggtaggaacttggagagcaactggactttgaggaagaaaatatcagaaaaaaaaaaaaatccagcccatctggggcttttttcgaccctgtcattgcaaaaccaaaagtagtccttttagatgtttgtgtggtaacactatgaaagatagcatagatttatttcacatttgtaggtttttatgtctatatacacagttatacacagaaaaggcctgaggctgcctattggtgaggagggaaggaagggaaccactatctctctggaaccattggcccttgaaccaccagcttgtgtacagagaggacactgtgctgtgtgtcagaaacaagcacggtcatctactccccagtcatagctgaagagaagagacactgccaggagtggggctaagaaacagccaaggaccagacgcagtggctcatgcctgtaatcccagcattttgggaggccgaggcaggtggatcacttgaggtcaggagttcgagaccagcctggccaacatggtgaaaccctgtctctactaaaaatacataagttagccaggcatggtggcaggcgcctgtaatcccagctactcaggaggctgaggcaggagaattgcttgaacccaggaggcagaggttgcagtgagccaagatcacaccactgcactccagcctgggcgacagagcaagactccatctcaaaaaaagaaaaaaaaagaaaagaaaaagaaagaaacagccaaggaccaaggaccagtgtccgttccctcagccactcaatttccaagacctagtcttccttccccaagccaaaaactcccatctttggggggacccaaacttgccccgagtccagaagggaaaagggtgagctactcctcatctaactgtgtaaaggccaggaatgatttagggtaccccagatcctagcatctctgcccacccgcccaggcccctcttgagccagtcccttcctccacagcccacagggtggggggggttggtgggaagctccagaagggcgggtggatggcctcaggcccctgggaggctgcagtcagcagatcatcttgggtgcagcatggtcaagtctaggttggcccttacagtgcccagggccccaggctggatgggccgagggaaggaggccaccctcaggtgagctgcgaccccaggaagccctctccccacccactctctaagaactccacagccaacccgaagtcaaactcgtgcagcgggggcccatccactgcgatcttcaccatgtggcccccccggccttccccggccccactctgcccccaccaccgcagctcccggctgcggccgaccttgtccagcaggccagcgcccgcgggcagcgccaaagccaaggcggctagggcggcgaagtcggggaagagctcgtgcagctccgagtgcgcgcacgccagctgggtgcacagggcccgcgggccgagccgcccaaggccga

SEQ ID NO: 1245028 - DNA, 4001 bp, Homo sapiens
aatggaagggcaaataaaaagcattatgtagatgaaattcacataaggaacaacaaaaataatcactacaaggtcacaatgaggcctggagaaataataaaaaatgaaatgaatacaaatgtgattacagagaaaaccagtaactaaagaaagataatcaaatacatataattagtgttcctaaagaaaagagcaaacacaggccgggcgcagtggctcacacctgtaattccagcactttgggaggctgaggcaggcagagtaccagaggttgggagttcgagaccagcctgaccaacatggagagaaatcctgtgtctactaaaaatacaaaattagctgggcgtggtggcacatgcctgtagtcccagctactcggaaggctgaggcaggagaatcgcttgaacctgggaggcggaggttgcagtgagccgagatcgcaccactgcactctagtctgttgacagagcgagactctgtcttaagaaaaaaaaggaagttggccattaattcaaataaaaacaaacagcatgagccaagaaaatgtgtctacactcaaagctggcctaggggccactattttttaacttaagaaatgccactatttcatgcccagttcttagtatcttttaactatgtcaatcctttttaattcacattcatgggcacgcattaggtgaagctaaacaaagaatctatgcctagaggaagactcacacatgaaacaaggtagtaagagcctatgaattagatgctaaaagcgctgcggtggcaatccgggaaggcttcccaaaagaaatgacttttgaagtgtgataccctactttgttttaacctgagtgactctctcctagcagagagagagccggacagactccattttagtttctccactggcagccccctttcacctccctcccttaaggcatagctagtgtaaactgactcaaagcacgtccaggaatgcacctactgataagatattgaggcaagctgcaccagcagctcctggggacgcgctcggtggatggcaagcaaaacccctgcatttatctctttgtgatagtttaagcccgtgcaattggaactgtttatattttgtaactgcatttgtaaccaattaatttttcaactttttgccagttctgcttctgtaaaaattgcttcagctaaaatcccccctcccctatttagaccacggtataaaaacaaaactagccccttcctcagggccgagaaaattttgggcgctagctgcctctcggttgccggctaataaggactctttaatttgtctcaaagtgtggcgtttctctgtaactcgcttggtcacaatagaagctgctcctaaaagcaatgtagacccttacaaagagaccagcccacctaaatccctcccttgtttgaactctaacagtcctaatattttagactgagtagtagaacatatatgaacaatacagttcattcctgtggcttagtctagcctccccagcggggtcactcgtgggatgcaaaaaccagatttggttacatatacaaatatacctggcacagatgtgggcgaggaataatcaatttatgcctgacggtggattctgggcctcgggaagatgccgttagcggtacccacaggagggaactggaacaggcaagagtagcgggacagggccgggaatggggcacgccgagaccaagaagccgaccgagagcaagaaggcccagtcatgcgcacccggcgcctacatcctcctgcggtcccccaggcctctccccataggcatatgagctctgctccactcctcgcttgccggtggacgcaggcgccgcggccgccagctctgtgaacgcagcggggtctcacctccaggctacccccaacctcccgctcggtcgggggcccctccacggccgctatcactgggtcgcggctcctagcgccaccatcttggaccccgcgcctgggccaggcgagaacttccggtgcgctccccgggactgcggtcccccagtccgcgccccgcccagccgtcccccgtcggctccagccaatccgcgcgcgctcccctggccgtctcccaccggatcaggtgtctcctctgcgcagactcctccacgacgccagtcggcgctggcgtagctcggctcagcccggcggagtctgacttccggagggccagcggcgcgctggctggttaccaaggttaccgccgagaggccgcgtcctcagctggtcctagacatgcgtggcgtcggggctgtggcacggtcgggtccggggtgagtgaccccttcaagtaactacgtttttgttctgcccttttgttttgtttttgagatggagtctcgctctttcgcccaggccggagtgcaatggcgcgatctcggctcactgcagcctccatctcccaggttcaagcgattctcctgcctcggcctccccagtagttgggattacaggcgcccaccaccacgccctgctaatttttgtatttttagtagagacggggtttcgccatgttggccaggctagtctcgaactcctgttctgcctgttctgttttcatcttttgttattgttccctgcatgcatttgtggtctcattcattgatgacttctatttgcaatgcccggtcaaaggctaggcgatacagatcccaacaaggacagcttaatgtttaaaagtgtaagttccgaagtgagaaagtcagacactcagaatccttgccccaccacttaggggctatgtgactttgaacaagttacctattaatagcttcttcgcgcctccgttgcttcatttgtaaagtgaggtaaataataggaccgacctcactgacatatgtatgtgaagtttgcatgtggcgaaggccagatacatattagttattactatggagatgatgttggttcgcgtagcgtaggatcgtggtaagggttatatatgtatgtaaagatgtaagatgtccaaccccaagcctttccgaagcaaaactgtcagtgcactagtcactttggcttctcatatctctctgtcccaaactttgggttgcacgaattatgcacgtttcactcttgaatttgtaaatgcagctactaccaactattccttaatttgcacaactacatttgagatagtatttcattgactgtgttacattttcattgaaatactgagccatgtctcaaatagacttcaattatagttgcttttatagttccttttgctttacctctcttaataagagtgcactaatagaagttactctttggaatttagaaatgggtttttaaggcagggcacggtggctcacacctgtaatcccagcactttgggaggcctaggaggccgcatcacttgagctcaggagttcaagaccagcctggccagcatggtgaaacccccgtctctactaaaaatgcaaaacaattaactggcatgatggcaggcgcctgtagttccagctactcgggaggctgaggcaggaaaatagcttgaacccgggaggtggaggttgcagtgagccgagatggaaccacttcactccagcctgggcaacagagcaagacactgtctcaaaaaaataaaaaaaaaaatagactgttccgtgtcctctgctcctagaggcccagcctctgtggccctgtgacctgcaagtattgagagatccacagctaagacaccgggatcctctgggaggcaaaaatgagttagaactcataagtgggagttgaacaatgagaacacatggatagagggtggggaacatcacataccagggctggtggggggtggggggctgggggagggatagcattaggagaaatacctaatgtaaatgacgagttgatgggtgcagcaaaccaacatggcacatgtatacctatgtaacaaacctgcacgttgtgcacatgtaccctataacttaaagtataacaaataaataaaataaaataaatgggtttaaaaaaaatcgtacaggctgggcgaggtggttca

SEQ ID NO: 1245029 - DNA, 4001 bp, Homo sapiens
atgtgaggcacagaaatatacagcttgaacaagtacaccttaagaaatatttagtttaatataatgttaacatgttaattatataatgttaaattatataatgttttagttttagtgtaatattttaagaaatattgcctgttacacaatagggattctgaagggtgaaggagtgggaggggggtggagaataaggaattacttaatgggtataatgtacgttattctagggacagataccctgaaagccctgatctcaccactacacaatctatgcataccagtaaatcttaatttttgggggggtacggacccatctgagaatctgaccttgtccacaaaataatgcacatgcatatatgatgttgcatattacttcagagagcttgaaaactgactctccctcccaagcccatacactgacccccaagttttacaaggttgcaaagaaaaaaaatgagccaagaatattgccccatcccgcaacccccgaacactaaagcagacctacaaagagcaacataaggcattttcaattccgaaggtctagagtaatggttttctgcatctttaacatttatcaagagtgagctgagtcatcatttttaaaatatttgtaaatattaataaactctttggcaatactttatgtagattatgtagattatgctcgtaacatatgtttaacaaccaaactacaataaatcccttgttttattttataattagaataaacaatatttaacatttaatatattcagcttgatctcaattgtgcaaatgtaatgcatagaaaaaaagactgagtaacccaaaactctactgagacctctgagacctggggctgtgatgtttacccttctttctgcttttctgtactctccaagcagacaagaagaagtatctacctatacataggagtgtggaataggaataaaatcccagagtggctggccacatccccaggttctaaccctgctttggctaccgtaaaactgtgaccacaggcaagtcacttgagcacaacgaatcagctattagtacatgacagtagccaccttatatgtttctactgtcccctttgtcattatgcagaagatatctaggccactattccccagttataatttccctatttacaagctctgtctttccaactattgcaaacgtatccagagacttaaggagaaactttacttgttttgcttccttggccagtgcagttatttagaaataatgaagggtccatgtttttgctgagaatctcagcgccatgtaccagtccagcatttcccaaccaatgcaataataccattgtcatgtcagggagtgacaagtgattaaaaggtgattacagtatttgaaatgtgacatttcaggaaaagctgcctcggttactgagtagcgcaggtcccccgatgtggaacctagttccatccctgccagttcagaagccagagcggatatgctcctgccaacctcgccttctttccctaactgctctcctctacccacttcgggtatgccctcctcagggcctgcaaggcgcggggctgggaagaccgggaaagtcgggtcaggggcccgcccgccctactcgactccctgcgccctgcgcccggctctttttaaccccagcgccgccaggcccgcagggagggggttcccgggtttggacccggactaggaggccgcatagggcacgcggccctacctgtgagggaggccagctggagactgaacccacactcgggaaggaggcccagccccaatcgcctctcaggagtgggcgggtccgctcagggacaggggctctagagggaacggccacgccccggacgccgccgggagccaagcgccaagggaggggcggcgggcaaccgaggccaggcgcccgggacaacgagtacctggcggccgaactgaggacaactgagggaactcgcagagcagggcgggaacgcttccagcaatggcggcggctcggcggtgccggcctccaggcagggcattgcgcctgcgcagccggagcgtcggaactacagtgcccagaatcctcagcgcctgagccccccgccccttttgtctgcgttagtgaaggaattggctcttcgagggtgagaaaaaattccaattggatacacttctgttgagaagccttgactatgtgtcaaaagcaatagcactagagatacaaataatgacacaacccttgtcttggaacatttaggtgcgactaaagaaagccgtcgagagaacagatagatgtgatccagacaaatatgtgaacaagtgcttggaaacacatatttctgaacaattccctttatgacaattccctcagagttggaagagacaacaattgatgactataatgccaattaagtagaatggatatgaatgtctgaaaataagctggaaattttaaggccaaaattcttcgaaatacaaagaaaaaacctttctgaagacaaatagctgtagaagttctcctcaatgcatacaaatgataattcttaaaacacaatgactgaaagtatttatttgcaacaaatttatttgaccacttattcaagggctgctcgtccaagagctatattaaggtctatttactttatccctaccaaaggcggtattttttgaggatagaaactacatctcatggagtttatcactcagagtgcctacttaggagactgcttgcatactgaatgaaacgaaggaagaatgaatgaataatttgggaccccacctcccaacacacttccacatatcgaaatgcacacggaatgaggtacatcttctaaggagagtggcattgaagagtaatcaaaacaacaggatattcacaggaggactggaataaaacgaaatttccagtgaaaaagattactcaaaatatttattcaatacactctgaaattagaaactaagcaaatgtcttttggagatcccagttccctcacattccccacagatgaagatgagccaaacagaagtccaaaacttaaacattacaaaacaaataataaaataagacactgtgactgaaaatcagcacaaacaataaacggcagaaatatatcccccaaaacttcagaggcagagctcatttgattaaaaatttaaaattattacatttaaaatgtttaaggacatgatagatggaattaaaaacattatcaacaaacaacagaatgtaaaataagccaccaggaaagtttagagaaacatacacatttcgttaaactattaaaaaaaaatgtttaacacaatatttagggtagattattacttctacagggataaagtccaggaaagacagacacacaggtgacttcaaaggtattggtagtgttttatttcttaattttggtaggagtacactgttcaatttgtagtgatatttgttataggcaattttgtgtgcattttatatttagtaatttttaaactcttaaagaactcttctgtgaaggaagaaactaatgctttttggcttcaaataataaaccaatggttaaaagttacttgaagatagattttgattcagattgtataactttatgctaacaacgaacagctttagaaaatagagtaggctaccttgtgcaataatgaatttgaattctttggagaagttcaggcagagattagatgaatccttgcttagaatttttaaatgtcctcttgggaatttgattgcatgacctgcaagctctcttccacataagcattttgtgtttacatgaatattcctttcattacatttatttttcctcccattgggccaggtaatgaatagatttgtatcatcataatgtgttatggaatacttaggaatcagtgacattaagggatgacttcgtctgggaagagtggaacttaatggattcctcaaaaggactctgcacaagggtgtgatattgggaaactacaggaacctggtctctctgggtaagaagagttttgttgtgactcgctatttttctgttggacca

SEQ ID NO: 1245030 - DNA, 4001 bp, Homo sapiens
ttcctttttacaggaaaacgaggaaatgataatttacaaatacctaacttatcctaatcaaagaacaaaacacaaggttacatgcataagctactttgttgtttattgctcagggccagacaatgtactctaatcctttttaaaaaaaaactaaccaactaaacaaaacacacaacgcaagttcctttcacttttgcataacagagatcttaacctgaagtcccaggaccagcttcaagttgactttagtggcatacaaaattatgtgtctatttaatggagaagacggttctaaagacttccatgaacccaaacaaagattactaaccactgaagtcagttccaggatcactaaaacttagtgaacagtttaaacaaaattatactaaaggtattacctatctgaatactgtgcacggtcctgatataaacaaccaagctgcctgccaccactgacaatcacagtgtcaagccccactcacaaaacagccccactcgacgacatcacctgtattcagctcagacaccacacatcccagcaacagcagctcctcaatccctaagcacacacatgttgtcaacaaagcatgtgctagttgccattcccagaacaatacgggcctggccatcctctggaaaaaaaaaatacacattctttcctgaatactaccctacgaatacattatgccttgatcatagatcccaaacactacaacaaaataggagaaacttgcacacaccatatctaatcaactgggaaaaaagcatcactcaggtgttcctgagggtccacgggagatgcatgtaagggatacactatgataatgatgcttgaacacgggaacaatctgggggcaaaggcagactcacgcaggaacaccccgaaaacgtggatgtggaaagcacccttctccaaaggcacaagcacattcctttgattggcaaaagccatttctgacaatggatccgcggtgacaggggctgctcggcaatcaggaagtgagtgagtgtatgagtgtgtctgtgttgtgggggagggatgctctagttgtgatcaaagctggaccttttcagagaaggtctcgaatcctgaagacagacttcgaggtgaggcaggggcatttatcatttctattggagacatccctcgacaatgaacatgttacgtggagatgtaacgggggtgtcactacctttggtgtctcggatctaagaatcttcagcagagcctgattggaggggaggaggaggtgggggtggagaaaggtctgcattacccactggggtgagtgtggggctgccggtggcgggtgtacatcagacgcattttatctactggcggcacaatactcccgggggttggaggtttgggtgcaaccgcaaggcgggggaggtagtgggtgcaagccaccagctgcagggcaggagaacgctcgcaggaggaccggtgcaaacctcctctcggcccgctaacccgtgccgccccagcctcccctcaggcctcagggcgagcggacccgctgcaaaactgcagccaagcccgggtccaggaggaagggggcgaaagagcaggagcggggcgcccccagcccaagctgggtgcctgaggagctcagcgcccggggcctcccagccggatgggggctgctccggcctagcgcacgcagctgcctcggcgaagggttacgccggcccccggagcccgggccggccccgcgggcggcggagaggaagggctgccgggggcgccgccgcggcggtggcgagtgcgtgggggaaggggcccttactcacccgggccggccgcctccgcctccgccgccccggccgccgcctcggcggtccatccctgcggcgggggcctgcagccgcggcgctcgagtcacaaccgccggctgggccagcccctccccccctgcccaacgtctgtcctcagggccgctcctcagacccggcctcggccgctgccgctgccgccgcagcgctacgtggccgccgctccgacgtctcgcgactcccttcccagcgcgcgagggcgagcggggccggcggggcgggcagcgcggggcgggcggcaggggagggggtgtgcgtgtgtggatgtgtgtgccggagggggcagggagggaggcgagcggcggcgaggacgcgcgcgcccgcgcgcgcccgcggccccttccctcgctggcccccccgcccaacggggatcccgacacctccctccgcccgccccctcagcatcccggccgctgggagcggcggcgcgcatgcgcagccctcgggccggcccgggcgcaccttttctgtctcctgccacattgtgagcgctccgccgcccagataaccgccggctccccgcgccgcccccgccttctcccactccgcccactgccgggagcccaggtaaagacgagagctgcgcatgcgcggcgctctccgtgagtcggggggcgtggttgccgaaaggaagccaaagtgaagagtgcagggggttgtagcaggcgctgctgtgggattccacaaaataggcgcgggttaggatggggaaggtaaagtgaagaaacgggccaaagcagaaaagtgggtcgacgtgagatttggaagtaaaaagagactttgaataaaaacttaacgactgctgacctccttgttctccttggagggcagtgggagtgacggggggcagaaatcagctcggcagcatgcaagcagtagtggtcattcgccgtatgaatgggaccgctaaaaactgaacagtttcgagattgccagggtgctcagaaaaacagatttagagcctcgcctgtcctgtggccaggaatagggaaggggatgtgtgtgtttgagacctacagcagctgcggtaaaggaagcctccattgtattacagtattatgactaattagctattaatcattaatatactcagtggtactattagttaacaaggtagcatttatccgagttcagagacaagagagtgtccataattgaaagtgtttagggtacagggagaggaaatgaacccggcaaggtgaaggcctgggatggaaaagacccaagacagcaaatccgaggtcagggttccctttcccaacataaaccaaacttccctgaagttgtccaaatcctaccttaattggaactccttccattattaaaagcacacttaactaatgttcttgcactaaggctgaccccaatagcacataaacattttctttttctttttttttttttcttatttgagacatggtctcactctgtcactcaggctggagcgcagtagcatgatcacggctcactgccgcctcctcctaccacgctcacataagcctcccacctcagcctgtggagtagctgggactacaggagtgtgctgcctcacctggataatttttaaatttttgtagagacaaggtctccctatgttccccaggttggtctcaaactcttgggctcaagcagtcctcccacctcagcctcccaaagtaatgggattacaggtatgagccactgtacctggctgacattttcaatacacatgcagctacttttccctaaaatagcactgctatggtttgaatgtgtcccccaaagttcacatgttggaaacttaataatcccaatgcaaaagtgttggaaactggggcctaataagagtttattaggtcatgagggctctgccttcatgaatggattcatatcataaacagtgcgttagttatctccaggccgggcgcagtggctcatgcctgtaatcccagcagtttgggaggccaaggcaggcagatcacttgaggccaggagtttgagaccagcctggccaacatggtgaaacccgtctctactaaaaatacaaaaaaattagctgggcgtggtggcatgcacctattattctagctactcaggaggctgaggcatgagaaccacttgaacctgggaggcggaggttgcagtgagctgagatcgcgccattgcactccagcttgggtgacaga

SEQ ID NO: 1245031 - DNA, 4001 bp, Homo sapiens
tagtgaacagtttaaacaaaattatactaaaggtattacctatctgaatactgtgcacggtcctgatataaacaaccaagctgcctgccaccactgacaatcacagtgtcaagccccactcacaaaacagccccactcgacgacatcacctgtattcagctcagacaccacacatcccagcaacagcagctcctcaatccctaagcacacacatgttgtcaacaaagcatgtgctagttgccattcccagaacaatacgggcctggccatcctctggaaaaaaaaaatacacattctttcctgaatactaccctacgaatacattatgccttgatcatagatcccaaacactacaacaaaataggagaaacttgcacacaccatatctaatcaactgggaaaaaagcatcactcaggtgttcctgagggtccacgggagatgcatgtaagggatacactatgataatgatgcttgaacacgggaacaatctgggggcaaaggcagactcacgcaggaacaccccgaaaacgtggatgtggaaagcacccttctccaaaggcacaagcacattcctttgattggcaaaagccatttctgacaatggatccgcggtgacaggggctgctcggcaatcaggaagtgagtgagtgtatgagtgtgtctgtgttgtgggggagggatgctctagttgtgatcaaagctggaccttttcagagaaggtctcgaatcctgaagacagacttcgaggtgaggcaggggcatttatcatttctattggagacatccctcgacaatgaacatgttacgtggagatgtaacgggggtgtcactacctttggtgtctcggatctaagaatcttcagcagagcctgattggaggggaggaggaggtgggggtggagaaaggtctgcattacccactggggtgagtgtggggctgccggtggcgggtgtacatcagacgcattttatctactggcggcacaatactcccgggggttggaggtttgggtgcaaccgcaaggcgggggaggtagtgggtgcaagccaccagctgcagggcaggagaacgctcgcaggaggaccggtgcaaacctcctctcggcccgctaacccgtgccgccccagcctcccctcaggcctcagggcgagcggacccgctgcaaaactgcagccaagcccgggtccaggaggaagggggcgaaagagcaggagcggggcgcccccagcccaagctgggtgcctgaggagctcagcgcccggggcctcccagccggatgggggctgctccggcctagcgcacgcagctgcctcggcgaagggttacgccggcccccggagcccgggccggccccgcgggcggcggagaggaagggctgccgggggcgccgccgcggcggtggcgagtgcgtgggggaaggggcccttactcacccgggccggccgcctccgcctccgccgccccggccgccgcctcggcggtccatccctgcggcgggggcctgcagccgcggcgctcgagtcacaaccgccggctgggccagcccctccccccctgcccaacgtctgtcctcagggccgctcctcagacccggcctcggccgctgccgctgccgccgcagcgctacgtggccgccgctccgacgtctcgcgactcccttcccagcgcgcgagggcgagcggggccggcggggcgggcagcgcggggcgggcggcaggggagggggtgtgcgtgtgtggatgtgtgtgccggagggggcagggagggaggcgagcggcggcgaggacgcgcgcgcccgcgcgcgcccgcggccccttccctcgctggcccccccgcccaacggggatcccgacacctccctccgcccgccccctcagcatcccggccgctgggagcggcggcgcgcatgcgcagccctcgggccggcccgggcgcaccttttctgtctcctgccacattgtgagcgctccgccgcccagataaccgccggctccccgcgccgcccccgccttctcccactccgcccactgccgggagcccaggtaaagacgagagctgcgcatgcgcggcgctctccgtgagtcggggggcgtggttgccgaaaggaagccaaagtgaagagtgcagggggttgtagcaggcgctgctgtgggattccacaaaataggcgcgggttaggatggggaaggtaaagtgaagaaacgggccaaagcagaaaagtgggtcgacgtgagatttggaagtaaaaagagactttgaataaaaacttaacgactgctgacctccttgttctccttggagggcagtgggagtgacggggggcagaaatcagctcggcagcatgcaagcagtagtggtcattcgccgtatgaatgggaccgctaaaaactgaacagtttcgagattgccagggtgctcagaaaaacagatttagagcctcgcctgtcctgtggccaggaatagggaaggggatgtgtgtgtttgagacctacagcagctgcggtaaaggaagcctccattgtattacagtattatgactaattagctattaatcattaatatactcagtggtactattagttaacaaggtagcatttatccgagttcagagacaagagagtgtccataattgaaagtgtttagggtacagggagaggaaatgaacccggcaaggtgaaggcctgggatggaaaagacccaagacagcaaatccgaggtcagggttccctttcccaacataaaccaaacttccctgaagttgtccaaatcctaccttaattggaactccttccattattaaaagcacacttaactaatgttcttgcactaaggctgaccccaatagcacataaacattttctttttctttttttttttttcttatttgagacatggtctcactctgtcactcaggctggagcgcagtagcatgatcacggctcactgccgcctcctcctaccacgctcacataagcctcccacctcagcctgtggagtagctgggactacaggagtgtgctgcctcacctggataatttttaaatttttgtagagacaaggtctccctatgttccccaggttggtctcaaactcttgggctcaagcagtcctcccacctcagcctcccaaagtaatgggattacaggtatgagccactgtacctggctgacattttcaatacacatgcagctacttttccctaaaatagcactgctatggtttgaatgtgtcccccaaagttcacatgttggaaacttaataatcccaatgcaaaagtgttggaaactggggcctaataagagtttattaggtcatgagggctctgccttcatgaatggattcatatcataaacagtgcgttagttatctccaggccgggcgcagtggctcatgcctgtaatcccagcagtttgggaggccaaggcaggcagatcacttgaggccaggagtttgagaccagcctggccaacatggtgaaacccgtctctactaaaaatacaaaaaaattagctgggcgtggtggcatgcacctattattctagctactcaggaggctgaggcatgagaaccacttgaacctgggaggcggaggttgcagtgagctgagatcgcgccattgcactccagcttgggtgacagagtgaggctctgtctcaaaaaataataataataaattaattaattaattaaaaaataaacagtgggttagttatctcaaaagtgggcttgttataaaatcaagtttggacccctttgctctgttgctctctcatgtactctcttgccctcctgccttctgctaggggatgatgcagcaagaagacccacaccagatgagggcgccttgatattggatttcccagcctccagaactgtaagaaataaatttctattctttttaaattacccagtctgtggtattctgttacagcaacacaaaatagactccaacaagcaccccactcccgtgacccaaaatcctgcagggagtaagatgac

SEQ ID NO: 1245032 - DNA, 4001 bp, Homo sapiens
aaagtgcgctgagctgagagctcgcttctcttcctgctcaacgtgcactgggccgggtgttggggcgtagctgcccacacagacagtgctttgaagagtgagtggtttcggttggccatggggttgtgtctaaattgccaatatactgtctttccaaaggttcctaagtgtggacagttaatgcagcagacagttgttagggtaatagtgagaagttgggatgcttaacaagcttctaaggagtttgaactttgaaaaatagacaagagaaagagttcttaaaaaaaaaaactttgataggacacagcggaagtaattacagtttaactttatgggacgtttctgtgacaggctgggtaactatgcttgtcatgcgtcctaacctgtgccctgagattgtgctgtaatgttccttttggtggtgtccagctgtctggcaaggagcctgctcggctggagcattgtgaagggcatgctgtaattacaatattgtgatgtggcgttgttgcataactcaaggacacaccattgtcgcctacccactgtgatgtcgcaagaacgagatttgtgagttttactccaattgagcttttccagtgattgactgccactccctcccagcctttcggttctttaaaatgaaagataaacctcaggacaaccaagacctggggaaaagacagtctttgggaatgtaatttggaagaatggatccagaaaaacaaccaggggctcttaactctagtttcggcaggagatcccgagttacagacctgagctcgtaaacaaacgctcaccactttacagtcgccgcctcatcctgaaactccggtcagaaatgctggaaggcctttgctaatgcgcagtgaaaattaggggcacagatgtggacggactgtgcttggtcagtaattgttctcctccaaatcaagtttatgagaaatttcatataaggaaaaaaacccttttgtatctgtgtctatatgtacagaagaccttaacaaccaaacagaaacttaacccctttggtttggttttgttttcgaaagcttatgcccaattttaaacttcatgtaagcttatgtacttattttaaactttaaaactattaaaagttaaactagatagtaaattcggcactgtctaatgtgcatacaccacaaacatataaccctaaattcagctgtgtctaatgtgtatacaccacacatatatataaccctaaattcagcctgatgtacttataccacacatatataaccctaaattcagcctaatgtacatataccacacacacatatatataaccctaaattcagcctaatgtacatacaccacacatatatataaccctaaattcagccctaatgtacatacaccacacatatataaccctaaattcagcctaatgtacatacaccacacatatatataaccctaaattcagccctaatgtacatacaccacacatataaccctaaattcaccctaatgtacatacaccacacatatatatatgacccttacctcttgttagcatttattgtagtttgtttttgaggttaggagcagttaagcaataatatgaatttgtgttggtttaacttttatgaattttagggcagaacaaggagttaatttccagataagcttgttcatgttcttagaataaagtgtcagcctcattagaagttttgtaatcgtggtctgcatcccagccatgcacctgctgggtcctgagtaatcctcggagcccagagcaaggcagagcagacacggagcaaacgctgcgttcagctgggtattttagatacgtctgagaagagttttaaaataaaacttgaatttgaaaagaaatagtgagtacttaccagaggtgggcagtgctgggatgtggccggtcttggtgccggtggctggcggtgctcaggaagcagtacctgttctcacgcttgctgggtgaaactggagcctgctgttccagtgggagggatttaagtgtaggagttgagccctcggggcgtagagatgcacctgatattcctcctgcccgcagctacgattcatgtgtttgcacccaccgagctgctgcgggcagcctccccagcactggacccagcaagcaagttatctcgccgactcccagcgctgtctccagactcaactgtctgtgagtgcggcgtcggtgctgcctggacggccatatgtcagagggctttcgatgtgtccgcagttagaatagagattactatattcatcagaatcacacccgatgaatatttggcgtcatgataaagacatgtgagactttcctttagaacttgagcatgtgtacgcaggaggcaaacacttggattgattctcaagcgcgcataccctgggaggcacagtattcatggcgtccttgccatgaggtccagtgaggcctttgaggatctgtggaccttccaccctctaccctgctcctgagagtctctgtccctggtcctcctcaggagctgagccggcagggagggagcttatcccagagcctggctgcagggacctgccggagcttgcccgacaccaggcaccgcaagagctgcggagcagggtgtgtgggtgcgggggagggggccagctgtgcactcccgcaaaccaccctccccccactttaaattgcagaggcacttaacttgggggccagtttttacctccacacccccccaccaaaactgcttgcttgcttaatcggaggccgcaccccagttgtagcgaaggctggcatgtggtgtcggtttgaggactgggaaaggaggtgggatgagctggtgtcaggcccttggatgagcctgaggctgcagggcagaggctgcagggctgtggcatagggacgagctggccaggacagacaaactggtttttttttttttttttttttttttttttgagacagagtttcactgttgctgcccaggctggagtgcaatggcatgatcttggctcactgcgtttctcctgcctcagcctcccgagtagctgggactacaggcgcctgccaccacgcccggctaattttttgtatttttagtagagatggggtttcaccgtgttagccaggatggtcttgatctcctgaccttgtgatccacccacgtcggcctcccaaagtgcttggattacaggtgtgagccactgcacccggtctgtttttttgtttttgttatttttttccttaagacttaagattttacatggctttgcgtttacttttatatttaattccttttttttttcttttgagacagggtcttgccctgtcacccaagctggagtgcagtggtgcgatcacggttcactgtagcctcaacctcctggactcgagtgatcctcccgcctcagtctccccagtagctgggactacaggcacggtcactatgcctggagaattttttgtagagacagggttttgccatgtttcctaggatggtttaataccttaaaattttttttggtggcttttgtccattgagacatccatatactttatgaagtcaaaaagagttatgtaagtcttatgacaaaaaacagcagttccctgtccctcttacctattcctggatagcaaactatcccaaacttagtggcttaaaacaagcaccgttttattacgtcttaggatatattgtgtcaggagtttgtggagggcctggccgagtgctgcttctgtttcatggacactgactgaggtggctccgtgggagaaagctggcaggtgactggtctggagggtccaggacagctttactcacctgccttctgtcctggaggggcagctggaatcctgagatcagctggaacctcatcctcacttagtagcacttcagaggcctccctagcagggtggtcagctgtatgatggctcaggacttcaagagagcaaggcggaaggttccagtcctccagaaggctgggccgcagattgtcagggtgtcccttctgtcacctttctctgctgaggc

SEQ ID NO: 1245033 - DNA, 4001 bp, Homo sapiens
aaataaataaaagataatattttttccttcattcaagaaacagcaaatttatggaatgtgttatttaaagaaaaagaaaaaacctgaaaaacataaatgggttctggatttagggcagttactctctaaccctggcatatattagaataacctgggtgcttaaaaaacacagttgcctgggcccaatcccagatttattgaaggggaaggcctcagacactttaattattttaatgcttcataggtgactctcatgtgcaaccacatctgaccatcattggtttggtcatgtttggcatatagttttcttatgtttttaaaataaagcacactaagagaactgattaacctacaatgacttatgtgtttatgaagtgttctaaaaaaccatacaaaaaccaaagaaacaagaaaacaaaccttttcaacttgatgtagggttcagaagatacatacattccaaataccacagtaagcattcatctgaaagtttgccggttggtctttctattaattaaaaaaattcaaaacagaatacagatttaactatgtacaatatttacaacttacagattttacaacgaaattatacagttaagtctgtcgtggaaatgttggcattttggtatataacacttcagaaatttcaaaaacaactttacctcaaaaacatgttacacaaattttccaaagtgctgtagctcactggctcattttatctcaacaatccagtttagcaatccaggtacccaaatcttgaggcatgaagtaaccgctatactactgagagacagcactttttatacaacagcagaggctgttagaaaccttgggtctttaaaaccctataacaatgcccctttcaccctccaatcctgagacaacaaatcctgtagttccccctcatcatcgctgtcagcattctcttcttcctttttctgcagttcttttatggtcaggatttctttaagtttattttttatttcatcctggcgattccgtagcttttccacccgtcggtaacactctatctgctcatcgatctccccaatctggcggtccaaccgtccctcctcatcctcttcggcaactatggcttcggaaatagtgttgacctgcctcatggctttttggaattcgtcccactctttgtccatctgatcttttggagcatcaacctttcgtactcttgcatctacctcagggtcgtcaaaaaaaccttccggtaacgcttccgcggtgttttctctcctttccaccactttttcatgtatttctgctttctcaattgaccctgaatgaggaattatgggggccttgggaggattagtactaaagaaatcgtttggcagcacactacttgttacctcccgtgaagaggaaactgagtgctccttgccctgtgcgtcggagagcggcttgctggcgtcccccctttttctttctccatctccttcctcctcctcttcctcctcctcctcatcttcataatcggggagtaaactgagtcctgaaggcttactgggagtcgctctaatgaactcctttcctattttgtcaaagttggtggtccacgcagatgtggagggctgtacctgaggcaccaaggtggccttcgctctcttgacatcttggtcgtctgcgtccggcgctttcctcttgacggaatgaggcgctgaactggcggacgaaccctggctggcttccttcgcgcctttcagctcggccactttctctcggtgctgctttcccaggacgtgagtctgccacaggagctcgctcttaaccggagtgttacacagggcacaactcagctgccccaaacggttgtacttcgcgaatggagattctatccgtttccgactggtgctcagacgctgcttctccttcattaaccgccgcaattcttcctgatttatcactcgcttccctgccggagtccgggcggaggcggaggacgccatcttggcgaccagacccaaaacgattctggtttccgtcgggcgaggcatgataacgtcacttcctgtaagggcgatgattggccgaggctcaagagagcgtggcgtcgcattgccgtttttgctcagaatcgcgactaaggctttttttttttctccctctgaacggttaggctatggctgcgataaaggccgtcaactccaaggctgaggtggcgcgggcccgggcagctttggctgtcaatatatgcgccgcccgagggctgcaggatgtgctgcggaccaacttgggtcctaaaggcaccatgaaaatgtgagacagcggttggagcggccattacgcggctaggggcccgttggtgtcctgtcgccctctgaggcaggcgtccgcgtagcgctgtggatgttcttgcgagcttgatttccctcattctcatccctgctctgggggtatttctcgcctggtgcaggtggaggagaaaagcctcccctagtagagggccccgggagtgaagctgtggcgcttccccgacccccgacttgtcgtcaaggttcatatgcagttagaaagtcagttaatttagtgtctcattggaaacaaagcatttaactcctctgctccttaagactgtatacccttggtccataaattcaacaagtagttttgttttttgtatggcaatgtattgtagtggagaggacacaggctttggagccaggaaggcatggggtcaaatccaagttctacttgaataccccgtgtctatggttgttcagatctattcatcttttcagtatatattaagcacccttttctatagacaagagtgaggaaaagagaccagtgagggcaaaagggtataagaggagagacacatcctcatagtaatgaacaaaataatattaatggtaaaataagtcacttaggtaccagttgttgggacacagaaatgatcaagataacggtttctgttcttaaggagatgtggtagagacggatgtggtagagtaggatgtgctaattatatatagatgcatataattatgctgaagaaagggactgatggcagaaggaaaagcatcttaagtaacatgtttgatcagtcttgaaagaagaataagacttcactagttggaagagggagtaaaggcctgggcaaagtaatttcaggaataagaaagaccaatggtgcaaatccaacagaaacgaaacaaaacatggtatattaagggaaccagaagatttgcttgtggaaaagtagatgaggcagggaagatattgggaaaggtcaagtatgtcattgctgtgtttggattttaacttgaaaatgatggaaaacataaaaatcattggaggacttttgatcagggaactgactgaatcacgttgccttttagaaagaaaaatgtgtggagggtatatttaagtttggagatatccggatgccatccaaagtagagatgataacagtggagatggagagaaggtggcagattcaagagatatttaggtagtagaattgatagaacttggtgatctaataaatgcagggatgagggaaactaagttgagtgactgaatgaatgaaaacattcaccaaaattaaaacctgcaggaaatttgcgaatttgtgctttgtagacttccaagtattctttgaccaaaccacagttcgtaactcatcaagtgcttttatctttaaacctgtaaatagtccatttggaatgaaatctccataatctgtccatctggggagaaatgattctgtgagctgcaaatggtggtaattaccatggcatattcccatggtacagtggaagttttccgagcccagttccctctattaaggataatggagtggcaagcactgggaatgtcttcctaccacatgaagttaatatcattcttctctgaacaggcttgtttctggtgcaggtgacatcaaactcaccaaagatggcaatgtgctgctcgatgagatggtgagctgatgctgctgactttaataaaccttaataagccttaattagaagcatagt

SEQ ID NO: 1245034 - DNA, 4001 bp, Homo sapiens
atgaaataacatacagtcctttaagtcagtgagctagaacttgtatgcactagtctttatttttaatttttttaatttttttttagatggagtctcactctgttgcccaggctggagtgcagtggtgcagtcttggctcactgcaacctgcgtctccatggttcaagcaattatcctgcctcagcctcctaagtagctgggattacaggcgcgcacctccacacccagcttatttttgtatttttagtagagatgtggtttcataatgttggccaggctggtctcgaactcctgacctcaggtgatccacccaccttggcatcccaaagtgctgggattacaggcatgagccactgcgcccagcctgtatgcactaggttttaaaaagtgcccaatatataaactcaaatgaggatgttgggtacagtctcattgctgagattctaaaagctaaaaaaaaaagttctatatattggtacaagagtggaaataagctgaaagaatctacatcaagctttttttttttttttttttgagacagtcttgctgtctcccaggctggagtgcagtggtacgatcctggctcactgcaacctcctcctcccaggctcaagcgatcttcccacctctgcttcctgagtagctgggaccactggcacaggccaccacgcctggctttgtttgtttatagagacggggtttcgctatgttgcccaggctggtctcaaactcctgagctcaaatgatccgcccgcctcggcctcccaaagtgctgggattacaggcgtgacccaccgcgccccacctacatcaaacttttttttttctttttttttccagactgagtctggctctgtagcccaggctggagtgcagtggtgcgatttcggctcactacaacctccgcctcccgggttcaagcgattctcctgcctcagcctcctgagtagctgggattacaggcgcgcacctcgcccgcctaatttttgtatttttagtagagacggagtttcaccatgttggccaggctggtctcgaactcctgggctcaggtgatccacccgccttggcctctcaaagtgccgggaccacaggcgtgagccaccgcgcccggccaggtcacttctttttaactgtacaaaagtgtgttcacatcatacacagaacttacttggttctttttttctcttaacaaatcaaggacgtctccttgtattgtacatggacttacctctttgtttctaacaagacattatttacacgagtgaaaatactgttaaagttagcgcagtttcagccaaatggtgaggggctacatcagaatactgaggaagaaactgctagggtagacctcggtgggaaaagcaatcggaaactatttctaagcaaaaaagagtaacacgcagaaggagaagcggggtagaagaaaggctactgaccaaaaccctgagagcgattacaggcagggacaacagagggaactgtccgacacacagagacaccagggaccaagtcagaggaagcaaggttcctgcagaacccgcggagacccgaggcgggaaaggaagcgcagcccaagggtccacgcccccaagacggaggctggacgtgggggctgccccgtgcgcagtggtacgagggctggcggggacggggctcacctttgtgcttccggaagcagactaccgagcagctgtaacaacagaggccacaggccgcgtcagccccgagggtccccggcccctccagcagcccgcccgctcccgcccggcctcccggcctcccgccctcccgccatggccggacacccgcgcccctggaccccgcgacctccccgctcactagggcacgcggcaggctggacagcggtatttgggcttctccaagcagatcacgcagacgacggtgctacatttgagcgacgccatggttttgtggaaggagactgttcactgcgccgccgcgcgcctctcacgcagccgcgcccgcgtgcacgcccctttttccgtttcctaaacggggaccaatcagcgctcagcaggtaggcaaaagcaatggactgatcctgctcactgttccagccctcgtacttagagcgtcgatacactcgatgcgcatctattagctgcgtcccaggttttccttgattagatcacagcgtcgaagaacttgttatgtagcccagtccctgtccctatgcggccgtgtggcttggagcaagccatcgacactgtccaggtgtgttgccccgcatgtaaaaaagaaaacaatacatggaactaaacgtcctttactttctggctgggacttcctgaatcttgcagggacattggggttcatccgcccatctcatctgcttattcttggcaaaggacaagtccagacattgggcgaaccagaatcggttggatcacgcagtagacaggaacctgcccttcccaacctagaccatttttcactggggaaagaaagatgagcctgaacagtggcaaatgtttgagctccaactgtgagcccttccgggctggggaccccccggggtcttctaatgaagaagtcgtctctgtcccctgggaactaaatgcttagagtgaaagtaggacggggaaacggggaggaaagagactcactcttagagtcctgccgtcgctaccctgcacctgcacgcccctgagactgagtgcttcttaaattttgcactctaggctcctcacacctccccctagtcccggaagctaattgaccaggaagcaggccagtgaccactagtcccaagacggggatcccaggcagatgagtctggatagatgggctatgatgggacttgaatgccaccacaaactttaggtttagaaaaagtaatgttttttgttgtttgttttttaaggaaatttgcttgcagctaggcatggcccagccttaccttagctcccatcctacctgcactgggccctcccagggccataaatcacccttactcccaagtgcctcctcttctgtgttggccgttcagccttcagggtccctcttcaataaaggtgtctgcagggatgtatctgcaacaaccgaggcagtggtttgaaccttggctcaaccccctccctggctgtgtgacctggaggggttggttaccccctctgagctccctcatctattaaagtggatgtttgggcctactttcctgagctgttgtaaagcagagaggagaccatgtgcaaaagttttgtaatcagaagtgctacctgatatctagaaagagtcttaactctcatggatctccgtctggaccgcatgaacataggtcccaggccccaagccatgctctccaaaacagttctgccgcctgcttcttgagtgggaggtgagtaattatccttcctttgggcgtggcgacccagtccagtcctcagtgctgaagctgctgggccctctggccacctgcctgtcctgcttgcagctgccccagcctccaacttctgcccaggacccagcttagaatccaaaacgggtccacacaggcccagtaacccgcagcgttcctcatattgttcaacagttgtaccactgatgatttgaacttgaagcatcccagaaagtccaagcttacctgggaaggccagagaaggccagtgacttgtccagggccatatttaaatcctgtgccaagtcgggcatggtcgcatcagcctgtagtcccagctacttagaaagttgaggctggaggctcacttgagcccaggagttcaaggctgcagtgagctatgattgtgccactgcattccagcctggatgacagagagagagagaccccgtcttaaagacgaaaaatttaggccaggcgcagtggctcacgcctgtgatcccagcactttgggaggccaaagcaggcagatcacttgaggccaggagttcaagaccagcctggctaacatagcaaaaccctgtctgtactaaaaatagaaaaaattaactgggtgtggtggtgcacgcctgtaatccca

SEQ ID NO: 1245035 - DNA, 4001 bp, Homo sapiens
gcgtggtaatgtgggcctataatcccagctacccgggaggctgagggaggagacttgcttgaacccgggaggcagaggctgcagtgagccgagagtgcaccactgcactcccacctgggcaacagagcaagactccctctcaaagaaagttcagaaaaagacttcagcataactattctaaagatgatcagctgggagcggtggctcatgcctgtaatcccagcactttgggaggccaaggtgggtgggtcacctagctcaggagttcaataccagcctgaccaacgtggtgaaaccccatctctactaaaaatacaaaaaaatttgccaggcatggtggtgggcccctgtaatcccagccacttgggaggctgaggcagaagaattgcttgaatccaggaggcggaggttgcagcgacccgagatcacaccactgcactccagcctgggcaatggagcgagatgctgtctttaaaaaaaaaaaaaaaaaaaaaagattggctggtgctgtggctcatgcctgtaatcccagcactttgggaggctaagacgtgcggatcacctgaggtcagaagttcgagaccagcctggccaacatggtgaaaccctgtctctactaaaaatacagaaattagccaggcgtggtggcgcacgcctgtaatcccagccactagggaggctgaggcaggagaatctcttgaacccaggaggcggaggttccagtgagccaagattgtgccattgcactccagcctgggtgacagagtgagactgtcaaaaaaaaaaaaaaaaaaaaagaaggaaggaaggaaagaaagaaagaaagatagatgatcatgatcaccctaagggaaacctgatgtttaactgtaaattttctccattgggaacaataattaagcctatctgggcatattaggaagatgtgtgattacttcttgtttctggtttggtggacagaacgatggtatgcttggaatcactgcaacccagaaagatattaattttaaagcctactgaatgccaggctcataaagacaacgtcctacaatttggttgggggtcggggagagaactcaaacacagaaggagtctaaacatgacaaattctatcaactggctcaatttatctaaaattagctgtgtaactaattttccttgggaaagtttcactgcagagataaaggacatttgagctgagccctgaaggatgcgtgggagtttttccagttaataaggggaggattaaagatattccaaacagaaggccttggaaatcactcctttgcgtgggtttcccgcgttgcaaagcagcagagacacctggaagtgagatggcatctgagagagagatctggaataaatcccagccctttgtgagctgtaaggctttaaagcaaggcgacacaatagggatcgctgtaaggatgaaaaaatgcgaccgtcgtgaactgccaagcagatgcttagtataatagatgctcaataaacgctggctcgttccccttctctccaggaagctcttccgggaagagcttcgcagttccggcccctccaatgggcccgcgtgtgcagaggcccttattacctggctgtcctgtcttgccataaatgaagcccttcttattgaataaggtaaaacgcgggcattggactgcggaggaaataaaacactgacttttagttagaagaggagcagggttcagagtcgggcagggcagggcgaggcgaaggaggcaggaccgggaagctcgggcagagggagaggcctggggaccgggtggagggagccccacctcctgtgaggcaccagagcaccgcggagagtaggacgcacgttcgcatcatcgctcaggggctggcgtcgcaggaggcgtcgagggacagactccctcctacctcagccctggcccaacacctccccacctcctccacagtgcggagcagaacgccggggtcgcctcccctacccgtccgtcgcaacggcgggagcggacgcgcaggagaacgcgtgcgtgcttcgattctcgcgcgcgggggcggggcgacggcgctgcaggcgatcgccagatcctctggcgcccacgcggcagcaggcatgcgaacttttcgcgcctcgcgtccggcgccattttcccgcgctcctggccccttgctctctgagcggagcggaaggcaggaagagaataaaggaaaagaagccacggtgtcgcgttccggggattccccagtctaggggccgaagggatcaaggagagaacaccgcgaggtcccaaggaccgtggtggggtagggcggctaggggatgcgatgaggaatcccctaggaaggggacctgaggaaggcagagacttgtgacaatttcctcctcacgtgaagcagaaaggcccgcgtggggatttcctacgcctctcttctcatgaacgctgaaactgggtgtcgaatctctttcaaactgacacgcgatttttacctaattgcattctttaccagcaagaccaagacccagaagagccactactgagccaagaaggcgcttccgggccttcccactctagaggaacgttgaatcttcattttcacttcaagtatgaggcgatgtgagagacctcccccagtgcaaacgtatctaggttgatgaagtgaccttgctttaaaaatgggcccaattgtaaggcccattggccttttctgtagggatggagcccgattggccttttctgtagggatggatgactagtcaagatcggggagctccaaaggggatcatgcccgcgtctttgatggttccttcttggctactagtttggtggcccgaaaggccctgtgtgttgtctgtttcttagcagcgggacaccactctcagtagtggttttgagtaggctggttagtagagagagcccaaggttcagacagggtgcagaatggttattttgggtgagatcaagagttttcggttttatttcctttgagccgagtcagtacttggactctctcatatggtccaggagcaaactttgtcagtaatttcatttttagtcactgttaattttacctatatagcataagccatgaaatgtgactcagtgagtcagatccacccattttcagttaccatgtctggatacatggtctggtctcaactgttctcttcttaaggtgatgataatgaagacagatttaggcattatctttgattccctacaagttcttcattccagttttagtcaaagtacattatatatccacagtgtgttttattgactttttggttactgtaagtaattgatagttgtaaatcctgtgtgataaactaaatcctatgagaggagacttaaccaaatgagtaatagttgtcaaaagtacccatccactctttttatataaactttttattttagaagagttttagatttgcagaaaatttgcaaaaacagtacagagagtttttacatactccctcccgattttccctattattgacatcttacattggtatggtacatttcttacaattaatgaacggatattgatatattactattaactgaagtccaaactttattcagatttccttagttttttactcaatgtcctccctacctcgtttgtttttttgctccaggatctcatgcgggatcccacattacctatagtcatcgtatctccttagattccccttggctgtgtcagacttttcttgtgtttgaaggtcttgacctggctttaattggtgaggtattttgtagaatgcctctctactggaatttggtgtctttctccatattagactagaattatggattcttaggaggaagattacagagataaaatgacattctcatcacatcatatcaaggggacatactatcaacatgccttatcacttgatgttaaccttggtctgctggctgaggtactgtttgtcaggtttctccactgtcaacttattcccctgctttcatactatactcttcggaaggaagtcactttgtgcaccc

SEQ ID NO: 1245036 - DNA, 4001 bp, Homo sapiens
ataaacatgaatcaacagcattggttcctgtgtctgaaccatgggtgtcaggggcaatgattatgcccccttcaggactgtcaatgtgtcttgtgaaccttcttgttggagggaaaaaacccaaaactggctgggcacggtggctcacgcctgtaatcccagcattttgggaggctgaggtgtccgtatcacaaggtcaggagtttgagaccagcctggccaatatggtgaaaccccgtctcttctaaaaatacacaaattagccgggtgtggtggcatgcgcctgtagtcacagctacttgggaggctgaggcaggagaatcacttgaacttgggaagcggaggttgcactgagctgagatcgcccattgcactccagcctgggagacagagcaagactctgtctaaaaaaaaaaaacaaaccaacccaaactactgtcagtgtatggattaacctattcagacacagaacagttctggcgattattgtttaaagtgacagcattccaaaccctcaggccatcaaatctgagagcccagaacaattgtataagctaacatcagttggcttttttcccatcctttttggaaacaagtatgtttgaatacttggctgcactaatctttcaagcacatatacttaagtctccttaattttgactgagatgaggaaacaaagttggcttatttttctcagttccttaaaaacagtaactcaagataaaccctttcaaaatgcagtacagtacttttaaaacaaaagccatccaagttgaataagcgatggcagtttgggggcctgatatggctgttatttataaggtggccatttttacatcctaagagtagttcattagtcaatgcattttgagtatatcaaatttgatttgatcttatcctagcatactctgaacacatcttgagatcaacccttctcaagtgattttggtgagcatagccaaagagtaccctctgctggtcagaaaaaaaatggtgctttcacaatacccagatttactccaacgattgcatatgcatttaggttttgtggctcttaaaatgcttttttttttttttttgagatggaatttcgctcttgttgcccaggctggagtgcaatggcgcgatctcggctcacggcaacctccgcctcccgggttcaagcgattctcctgcctcagcctcctgagtagctggaattacaggcgcccgccaccacgcccagctaattttttgtatttttagtagagacgaagtttcaccatgttggccaggctggtctcgaactcctgaccttaggtaatccaactgcctcggcctcccaaagtgctgggattacgggagtgagccactgcgctgggcctactttttaaagtgtatggaagcattaactttaatgttaacatcagaatttgagaaaaagaagtttaataattcaaaatttcgtgtaaaataatcaagaactccacgtttctatcactcactgtaggctcccgtcccttccacccccgggcggggacccctcccagcgacccggccagctctcagcacttcggtccccactggcctactcgctccgacggaggggctcctgcaactgcgctgtaccgtaaatatttgctgaatcgatttgacttttacttgttccaatttcgcttttttgttgttttgtttttttgtctttttacgaacaagaggtttagagaaccacatggaaaaaaggcagggccaggcccggacaccccgcctcctgcctcccggcccggcggtgcccggatgccccgcccgcgcccatggcgcagccacacacgacctcggtcccgtacttcgcgcgctctcctgcaccgccgccgccatctcgctcaggagctcctccacaaccgccggcaacactacggccatcgcgccgcaggacacgccctccacgaccggcggaccgccgcgacgctccagctgactgcgcctacctgtggaggatcctgaccccccgccggggcagggcgagacggagtgacgtcggggcgcgtcatcgcgcgtgcggacgcagggatgtcctgctcagtcgtcagggcccggccaatccggagggcgctcggcgcgtggtcgggggccaggagcgcgtctggcctgcagtgcgcagaggacgcggcgggagcatgttccggctcctgagctggagcctgggccgaggcttcctgcgggccgcggggcggcggtgccggggctgctccgcgcgcctgctcccggggctggcaggaggtccggggcccgaggtgcaggtgccgccatcccgagtcgcgccgcacggccggggcccaggcctgctgccgctgctggcaggtgaggggcgcgggccgggcggggccggccgggcggggacaggggcgcgggccgggcccgatgacctcagagccccttcccgcagcgctcgcctggttctcgaggcccgctgcggcagaggaggaggagcagcagggagccgacggggccgctgccgaggacggggcggacgaggccgaggcagagatcatccagctgctgaagcgagccaaggtgaggcggctccgggccctgcgcccggccgagcgcggtagcctttgtgagcggggtcttggcgttgctgcgcattactctctccgcctcgccgaagagtggatggaggctccgcgggtaaaattgccgagaatgaggtgggtcatccgagaggggattggaatccatccaggcttttccgactctaaggcctgcagtaaaacctctgcagtgtcaagtgcaaatggagatggcgccctaggcatcacgctttatgcaaacgaaatatcgggaacgttttgtagtggttttatcaattaaccagcctatctgaaatgacataatttcgcacgtatatagcggcctgaaaatggcaacttagtgttggttatgcggttcggttctcctcctgaattcttccttttctccacatccttttctatttttttttcctcctcttttcccaagttatctcatctcttccattgagctaaatacctactcgatgccaacaacgtccaaatttgtatttccattctgtagtgtgctactgacatgccatttgcactttaggaccatacctacctctcagatttaacatgcccaaaactaaacgatctttaatgcctcctcaacatacgctttcgccatctctttactaccatcagtttttcagcctaaaaacctcatagtcattcttaaaacttgtggtaccttaccattgccttccaatacacttacagtccagcaacaagtcctgttgccaacaaatgcaaaatatttctcaaatctttccccttttgtctatctcccttgctgtcaccctagtgcaaaccatcattgccaccaactatgctccagtagtctttcctggcctcctggcctcttgcaatctattctccatgcagaaaccaaagcgaccaaaaaaaaaaagagtaaattggattatgtcatctccttgtcagaaagctctgaatggctacccactgcatttatgataaaatacaaactccttgccttggcttgcaacaccccacatgatctaaaccagcatataccttgcccacccatttggcagtaatcctctggctcaccatcctcccttcacatctatttctttgcatttcttcctcaaaaccattctcttcagcttgtagggacttcactcattctctaccctctgtttgagtcattgttctccccaggtccttatttggttgactcattctcatccttactacctcagtttagctgtcacttccttggaaggcttccctaagtcctatttagaggagaccccttatcattcctttctgtcatctttatagctcttatcattagttgtaattaagcttacttgtcctatatggtcacctccagcctgcaagaaattagaaagaggatggaggacaagcagcttccttataaaatatgttgtaagatcacattccttctgcctgtgtctcttg

SEQ ID NO: 1245037 - DNA, 4001 bp, Homo sapiens
atgcagtggcgtgatctcagctcactgcaacctccgcctcctgggttcaagcggttgtcccacctcagcctcccaagtagctgggattacaggcacccgccaccatgcccagctaatttttgtatttttagtagaggtggggtttcaccacgttggccaggctggtcttgaattcctgacctcagatgatcctcccgcctcagcctcccaaagtgctgggattacaggcgtgagccactgcgcccagccatgactattatttttaagggttgggatgccttaaaggtacttttttcataagaaacacacaaactacattatctgaattctggccatgtacaggaagacattcttaaaatattttaaaagcctctgattttaaggtgaacagaaccttttaaaggcactgcaagtacccgctggtttactgctttatgtacacacccttcgtggccactgaagattctacatgactggctaactcattttcacaaaataagtacctttttggtcataccgtggtgttaaaagaaataggatcccaggaaggaggtagtgagacattaaaaacaaaaaatagggtgcgggtggagggagagagagcatcaggaagaatacctaatggatgctgggcttaatacctgggtgatgggatgctgtgtggagtaaaccaccatggcacacgtttacctatgtaatacatctgcaaatccaaatcctgcacatgtacgcctgaatttaaaataaaagttgaaagaaagaaaaaaaaaaaaagcaagagatctagttgatagtctgttttactaatgattcactgggtaaccctggatcagtcttcttaactcgaagtgaagcgcccagtaaataaactcccaaaatgccttccaaggaaaatattttgttgccaaatcaatttgctctcttaatgacttagcagacatgatcttggtgattatatgaagaactgcataattacaagtattcacaggaaacctggtatttgcctatcagtttcggatcctatgaaggtttaaatgagtctaatatatggttctttaaggatctacaaaccagtatgtattttagaaaagctagtttttgcatgaggaggataggttttagaatgtgagcctttccagcatgttactactgtctttccacacttattcggcgcccacactgaattgggaaggtgctgtgtaaaaacctggacaggacaatacaaaaaatggttctcagcgccactcctcctatccttacatctcttttctctccaaactgttcgagaatctgatagaagatctccagagtagcgtcaatcaactgcacaaaggtctgcattacaacatacagagagagacatatgggcttgtccagctcttcagagcaaggacggcctgatgcagactttccagacctctaacataggttaaagagaaacgaagcaaacgcctggtgaaaagctggaaacacctcatatgggtccccgcctggcctctccaaagcaaatgcccacctcttccttcagtcccctgggggcgaccgccctgccccatccccgcagtcgcctgccggccctgacctcctcgaactgctcgctagagcagccggcgccgcgagcctccagcagctcccggaactgctccagagtgacagactcttcgccgcggcccagccgctcttccagccagcgaaacaacgcgccgcgatgcctcgacaccagcgactcgcaggggggtgtgggcagcaacgctgcagcagcctctcgcagcctggccggctccagcagcgccgcggcgggtggtagcgctggagccgcgacgcccgggccgggggtcgtgcccgagaccgcggcccagtcctggtgtgggccccagccctcgccaccggcagctgccgcttcgtcttcactgctgtgactcggagcgttccccatggggtctccgtcttgggcgcctggctctgcagccgccgccgccgcctccccgcctcgacctgtcaacctccgacagcagctggcgggcggggacgcggaggagacgacggcggcccctgcggcttccggcttcctggccgtcaagcgacgaccgctgtcgcaaaggcgccgtcacgtagataggcggcctctaccaactcacgacagctaggcggggagcgccgcctcaaagggtgcaaccttgatttcccagaggacgagtctgtctcagtatctacgtcattccgtagcctccgctgccgccatctttgttggggctgacaacctgcaagccaagaagtacgagaagggccaggcgcggtggctcacgcctgtaatcccagcactttgggaggccgagacgggtggatcacctgaggtcaggagttcgagaccagcctgaccaacgtggtgaaaccctgtctctactaaatacaaaatattagccggacgtgggggcgcgtgcctgtaatcccagctacttgggaggctgaggcaggagaatcgcttgaacccgggaggcggaggttgcagtgagccgagattccgccagtgcactccagcctggacaacaagagctaaaactctgtctcagaaaaaaaaaaaaaaagtacctggaaaaagtcgcagacagcgagcttttcgccagtgccaggaatacagataaaacgagagagactaagggagggagcgcgagcactagcgcgcgagagagagagcgagagcgcgcgcgccgatgacgtcacgctcggcgtctcggccatcttagctgtagatagaggcggcaacctcggaagtgcggagcgggtgggcctatatagatgttgaggtgcggaggccgtgggcttttgttgggcctggctgtagccgcagcagcggtaatggcagcacggcttatgggctggtggggtccccgcgctggctttcgccttttcataccggaggagctgtctcgctaccgcggcggcccaggggacccgggcctgtacttggcgttgctcggccgtgtctacgatgtgtcctccggccggaggcactacgagcctgggtcccactatagcggcttcgcaggtatcagcgaggctgctcacgcctttctctccgctggcgcgagccagtagccacctgcgcgtcgttcgttggttcattattcatctatttccccccccatccccaccccacatccatcaaacccgtgcggtgggcgggacgagctgcatgcactatccttctaggctctctggctctggcgggactgtgggccagctctgtcatccaccaccgccctgcgtgacttacattggagaaacatgtcttctgtctcttgttacccattacccagcgtcggaagccctaggatacgggctgtgtgccggacttttgtgggggctcttagggcacagataaacgagatcccgccccgcccctaccctcacagtttccttaataattccaaccatctcttcattatgccctggtcccaaataatctttcttccccccacccctaagcatagtgttttcaaggttcatccatggtttatgagcatgcatcaatactttattcctttatggcccgtcatatagtacatttggtctgagtcattcctgcttctagtacaagatgcacctgtttgccttccttagaaggttagggcagaggaaaggggtccagtcacctttacagtccttgatacgtagaccaaagttgtgcatatgttaggcctcaagaaacatttgtcaaattaagtttatgctggtgtccctgtgttacagctgagggggttaaaggatgcgatttgcctgaaaccctcacacctgaatactgacagaatatggactcggaccaccagtctagtgctttttttttaaagatggaatctcgctgtgtcgcccaggctggagtgcagtggcctgatctcggctcactgcaagctctgcctcccgggttcacgccattctcctgtctcagcctcccgaatagctgggactacaggcgcccaccaccacgcccggctaatttgttg

SEQ ID NO: 1245038 - DNA, 4001 bp, Homo sapiens
tgaggtcactcaactaatgcgacagggaagtctgagtaagtaaaatgctgatctaatctctgaccactgctctagctctttggactcaataatgcagtctccttgtatagtatacttcaagattttcttctgaaataatttaaattatttctcacatagtattcatgaacttacagaattttcccaaacaaacagtgcaagttccaggcaacaaaataaactccagaaggatagatgactaagggaaattaataacaggcaccatttaaatctggttcctgataaatcctggaccgtatctttaacacatcaagagctattatcatcaagatcccatttgcctgtcaataggaagtcattttacaccaataaatcgcccaaaacccaaattaagtggcatccttctcaccccacccccccccccagtatctgctacttatcaatgaatgaatgcagatcatcaaaagatctgggtctttctgacagatgtatgacaaactgcgagacagtaatccccaaacacttctctcatcctaaaaataaaccatttacatcaggttggcggttagggcggggaccaggaggcaaatacctgcagctggggtattttcctgcagctgggggtggagccggggacgtaccttccattttcattccctctttctgttctatatacttcctaaagcagattctattaaccaagaactgggaataagcaagcaagcaaacaaacaacctgtgattttgcagaaatgactgaaaacggaaattcacttacttcctgtactgcaccgggggcttcgaagtgatgaaaggtctaagcagggtctgtcctcgaccctcccagcaccagaccgtcgggtagtacgtttctgtaaccacgggacagtggtcttgaaggaagcggctgaaactctcacccccggtcactaactggggtttctgaagggaaaagcagtatcagagaagggcccagagcaaagtttctgccaaccgtaaaccagaaaccggcaaagacttgtcgctcgcgcgcgcgcttcctccgattacaactctttctggagggctgacgcaaaaaattcacagtcacagaggactgaaacgggggtttcgccaatgccccgaggggaaggcgagaatcgcgataagggagtttgtttgtttttaactccgcctcccgggttcaggggattctcctgcctcagcctcccgagtagctgggattgcaggcgtccgccaccacgcccggctaattttttgtaattgtaacggggtttcaccattttggtcaggctggtctcgaactcttgacctcaggtgatccacccgcctcgggctcccaaagtgctgagattacaggcgtgagccaccgtgccctgcccggagtcattttcaaaagcgccacggcgttcccgagtgcgccgccggcttcgcgatcggtgaccgggcagcgccgcagcgcagaagtcagccgggttcaggctgcgctccgaggaccacccggccgggacccccagggggcgggcgaacgggcggggcctgttggctttcccgcgcgcgctgggggctgccgctcgggagcagctcgccgcctatccccggggctgccgaccgcccctggccgcgcagcctcgcgccgcgcctgctaccctagctcctggcccagcagcccgcggccctgcgccacccccggctcaccttggcaatgctgctcaggtagtagaaggcataagcgacgctgaagcccaggataagggataagcccacccccgagccgaagaaccccacccggacttggtgttccaggtagagggagagctcccgggacaacatccgcaggtccatggccaggcgctgcatggcccccgagcgcggcgcgcgggtcctgcggcgggaggagagccggctggcgagcgggcgagagcgggcgagagcggacgcggcgccgctgcctactcccgaccacagtgtctcctgcctggcggagcgcggcttccgacaacgggcggggcggagcggcccagggaggcgtagcccgagactccaacgccgcccgctccgccccggcttcctggagccgcccccactgccagccactcaggaaccttccagaagcgcggttccaagaccggccaccgggagggcgggcggactgggttctcccagctaggtcgcagtgggcgatggggatccccaagggtgggccgagagctgacggatcggcagcgctggttaaggccccgcacctgcagccccagtgaccttgaacgattccgctctgcggcgggtgtccctaaactagcagtttagggtgtcaggtaagcgtgccttgcattcaaagatttggggagttaatgccaaagatatgttagcaggtaagaatcccacatcctctagacgtttgcgttggtcctcaagactatggaaagagaaaaaatattctatgagcattcaacagtgaggacatcatactcgactctgaatcactctgtgaatctttttagttgctaagtgtcacttaaatgagaagtggtctctgaaaataaatgaaaaggtcaagaatagcaaccgggattcaattgttaaaagcctatttgtggttcattaatgctttgaatttagagacttatggaaattcacaccgattacctaatgtacagacaagaaaccatttatgaagtagggtctcctaggcttatttatggcaatatgataaatcaggatacttatggttatctgaaatggttagaatttaatagcctattcctactcttatgaactccttcctcagagaggtaggaagaatggcaagacttaaacagacgaaagaagggaaagtgctgtctagattatgaaaaatgccaaaggattgtaaattaatgatgtaatttagatggggacatgagacggaccagaagtgagcaatttatttggctccgatttggtcattgcaacttggtggttggctgcagcacccaaaataattcaattacctttactgagcctgtttttttcttgttttaataatctgtagcgtaacaatttctactttatagagttcccgagaggacaagatagtgtatatactggactccccgtgagcagaagtaattttcacgctctggctctcacacctgagcacacatagcaaacgtgaatgcatatgctggttgccatacttgaaacttcatagcattcttcataacccctgcaccagccttctgcactacctaccaataaatgcatgcgtatttcagtttaagtttgttctgttttgttttgttttgttttttgagacagagttttgctcttgttgcccaggctggagtgcaatggcgagatctcgggtcactgcaacctccacctcccgggttcacgtgattctcctgcctcagcctcccgagtacctgggattacaggcatgcacaaccacacccagctaatcttgtattttcagtagagacagggtttcaccatgttgaccaggctggtctggaactcctgatccactcgcctcggcctcccaaagtgctggtgagaggtgacaacgtgctagcagccctcgctcgctctcagcacctcctcaggccagggcatccactctggccgcgtttgaggagcccttcagcccgctgctgcactgtgggagcccctctctgggctggctgaggccggagccagctccctctgcttgcagggaggtgtggagagagaggcgtgggcgggaaccggggctgctgtgccccgcgatcacgggccagcgggagttccgggtgggtgtgggctcggcgggccctgcactctgagcgccggctggcaccgccggccctggccagtgaggggcttagcacccagaccagcagctgtggagggtgccccgggtccaccagcagtgccagcccgccagcgctgcactggaattcttgctgggcctcagctgcctccccacggggcagggctcaggacctgcagcccgccatgcctgagccgcaccccccgcc

SEQ ID NO: 1245039 - DNA, 4001 bp, Homo sapiens
ccttaatacaggtgtcaatgtgcatttttttcctttttgggtttatagtatttgtgaaattttcaaacaggtctgtattataagaaagggtaagaaccactgataaaatattaaaatgatatcagtaaaaatattatttccttttttagaagatagctcatgacaatgcaccttttaaatgaagtgtaaatgcctcgtctaaaaaaaattcaccacgctgctttatgaagtaaatgtagtaaattcagtcaggaagggcactggcaaatgaaatccacgttgcaggaaactgtaaacactgcatttggtcccagaatacggatttttcccttgatttgttcccatgccactttggttcttctcactttcagatccccctaaccaatgcttagctggcatctccacttggctgcttcacaggcaccaaaaagttttctgcctaaaactgaattctcaatccttctttccacatctattcctttcccaattttcctcactctgtaaagtggcatcatcatgaacacggttcatcaaaccagacacttttcatcattctcgacatttccttcttatatttactccaccacatccaatccactttctatcaaatccacctccaaatctatctcaactcatccctccccttttctccccaattacactgccccacacgagtcaaagccatcatttgctgctccctggacctctacaatagatccttaaatggtctcttcgccattacacagaccgccccaaattcggacagagtggaaatcagatcctgtcattaccccgctttaaatccctgtattgccttccactgaatttggaacaaaaccccaccttcttacagagcccacagggccctggagcaccaaaatgcttggttcttagatcctgccaagctttttcctgtctcagggcctcgatatgtattccacctcaatgttcttcgactcgtacatccttaaagtaagattccattgactgtgcccacttgttttgaaaagggagtttattacacagttgttttaaacaagttcataaccctagaacttaggtatagagtgaccgctctaatctaaagcaacagaagggaaatgggagcagggcaggtcttccagcagaacaccagctaccatttctgcaggcctctccatcgattcacccggggagccctgaccaccgaggccgagcggcgggctcctgtgcgcagctgccccgcagcaggcgcccgcggcctatggcgccgccccattttttctaatacttggactcgaactagtggggtcactgttaggcgaagaaaggaatgacctccaaggtcacatgcaagcaaactttggtctcaactaaacaggaaattgcaccgaaatcgctgtcgctagcgccttacaagtaagggttttctccttaacccaaacaagcctttcgggctgggtttttatcacgtccgctccaaaaccgaggaggttgagtgaacttcaccccacgaccccgactctccgcggcggccggaagcggaggcctggcctggggagggcaggaccccgaggggcgaggagaggaggagggggctgcgctcacctcggagcagagccatggcggctgctgggtcgtcggcggcgcgggtctgtggtgtgggggacgctgagcggccgctcgcaatcacccagatttcaagagcgtgggtggcgccccgagagccacgcccctgccctttcacctacttcctggggctccttggcggggtcccagcgtaagatggtcctaccccacgcgtagcgctgcccgcctcaccccagcccgagggagcccaggggacggggctcggatagaccacaacgcgccttgagagcggactctttcctcacatcctcatttttagattttctccgtttccaaaccgagagaatttggtttgacacctctcacccatcatatcctagccccgacaggcgatgactcttcccctttgtctccgccaacaccctaaacactgggcaggagccaagggctgaggaacttggcgcgcgggcggccgcggccgccagctgggggcgggaccgaacgtcctgtgggcggggcgcggcggcggcggcgggattggctggggcgggcgggtgcgcagtccgctgggcagaggcttgggccgccgagctggacccggaccggttttgggtactgtactgggggcagggcagagaggtgggcggcagttggggtgcggtgattgtagtaggctagggcgctttcgggtccccattgcagcccccggatgagcccgcagtattttccttatatgatcaggtcccattgcgggcggcgccgcttgcccggagcctgagaggattatgaaaacgtggcgagcgaaatggggccaggggacctggagcaggggcgtgaggagagtaggcagcgggtgaggctggacgggagggaggtctagggaggcctctgccgcgggcactgtgagtcctggccgatgatgacgagaccactgcgcaatctgagttctgggaaccaggtgatggagtatgttctgagaacagactgaggccgggcaagcaggaggcggccgcggcaggggagaggcggagagcccctcgataccagggctcggagggccgggctgcctagcgagggcttcttttgagtgcgtaggggtggtgggtggcatggacggtttctctgagtcgtcagcgaatgccccccctagaatcctgcttttcaaacactttggtgacactcttgcaatgttggggtgtttttaaatccaaatttgtattatgaaaacttacaaacttacagaaaagtgggaagacttgtacagtggacacatatcgacccaattgttaacattttgctatattgctatccacctgttcttccatcaaaccatcttatctttttaatgcagaccttagtactctacacccatgaacacatcagcacacattattcatttacagttctttttaaggcaaaatatccacgcaatcaaatgtacaaatcttagacaagcttcacaaatgctcatgtataggccgggcgccgtggctcacgcctgtaatcccagcactttgggaggccgaggtgggcggatcacgaggtcaggagatcgagaccatcctggctaacacggtgaaacctcatctctactaaaaatacaaaaaaattagctgggcgtggtggcgggcgcctgtagtcccagctgctggggaggctgaggcaggagaatggtgtgaacctgggaggcggagcttgcagtgagccgagatcgtgccactgcactccagcctgggtgacagagcaagactccgtctcaaaaaaaaaaaaaaaaaaaatgctcatgtatagagtgttcatttttgtacacagttttctattcagtttgcctctacatatttaagaaaggttaagtatcacaacttcccactgcagatcaccatcagtaggtctttatagatgtactgtgttttctctaattggaaatgtcactaatgagtggattctaacaccattcagtgaaaggtttacatatattaaaacacgtaaatatatgagagaatattgacatagtctccaagtctcatgaagaggaaagggtacctttacaatggataaatcttgcgggtattacttcaccaaattatgaagtaatggtgtcccatcaccaataaagggacagactgacgtcatgcgctccccttgctacagcgacaacacaatctcacttgcgtagaatttctgctgaaaacatctggcctgaatctaattataaggaaacaatgagacaaatccacatggaggtacattccacagaacaactgacctgaactctttaaaaacatcagtgtggtgaaaaacaaaaaatggctaaaataggaatagtatcacattaaaggagactagatatgtgacacatattgtatgagatccttaattaaaacctgggttaaaaaaatactctaaaagacagtattgggacaactggagaa

SEQ ID NO: 1245040 - DNA, 4001 bp, Homo sapiens
accagggtgttttaaggccactaaacgaatagttcgcgctgatctgttatcgatggcggtgccccatctcaaccccagagcacgaggagggggaccgagatccagcgagtgcctggcgacttcgcagtcgccctctacagcctccgttcttgacacaggacgggtagagatgggttaaaacaaatccctctcgctttggacccctggagagacttggcgtgcagccagcgctagtagcactctctgggcggggttggagtcgtacttcgctgcttcactcgccttttctccatccttggagaggcccgggcaaggcaagcgcatcattccgcacgcctcgcacccagcctttgctcggcgatgcgcctcagccctggcccgggtaccccgaaccctggggtctttctggatattgccctgcctcgagcccagatgctggaatcctaatacagaacccagaacccatctctccgtccaaatcaatgatcagcggccccccagagctaatgttcctgggcggggctcggagaaggcagcttcgcaggcagaacgcgcgctcctcgctgccccaggcgccgctggtacgaaccctcccctacccagggctcatccacagcctggcacatcggtccgcgactctggggctgcctccgggaacctgggccgcgcctgccggttagaaacccggggttaagaaaaaagccaaggttcctccatcccgggccaggcagggctgctctcccggtcctgcctgcctgctggctttcccttcctcctcctttgcgcctgtttttccccctccttcgcagtctcgtccttgttcttccctctcttaagtcgcttttcctcaatcacaccgggccaacaccctccccaccgcacgccccccaagacagcctgggattcaaaatgcagttggaacacggatcacttgaaagaaagctcttcaggggaaagaattggaatgaaatgaaaagaaagggtggaggagagagagagaccccacccggatagtccagaacaagcagtaacaaagcaaagtccgagggagcttcacgctcaacccccggccaggctccagagctgaagttctcctaactcgtcccaagaataggtaaaagaaaccaagctaggggccgtgccctgcccccatcctgtgggccgggttgggggagggggggttctccagcggccagaagctcactggctctacccgggaccctgagctgcctagggctgggggaggcgtccgagcagtcgcggagcctgccagaccctcggctagaatggggacccgctgtccagccgaggctggcggaggcgcaccgggggcgcagagggcgatgctagtagtctggacccaaaggactgcaggaaggagaccgtgaggaagcgtctgtgcctgggaagccccagctcctgcttgggccaggcagccagcacctacctgatcccggggaaccggagtccggcggcggcaggtgagctgtagacgctgctgtgcatgattatcccatagaccagcagggccagcctcgctccgctacacatggtcattctgcgcaggatgggaaagaggacacacagctgtgagaacgcccctggcctcccaccctccaaccccaaaaagctctggaagccgggggagggacggagcgaagccccggctccctgagttgaacagcacttggcgacagccggtgcgcgccctgccacttcttgcttgctatagttagaaaaaaatatatatatatgcatctacccggcgcccaataactagccagacccggctgaaggaaagctaactcccctgacgcgatgccaagcgaaagaatcagcagtcgagtgagccggtcgctttggtaagattttccctcccttacccttcaactcctcccgctgccaggagagctgccaggtaggacggcgggcaaagcgcttcttcaagttcctgcgctggagtcaccacccgagaggcatcgccgtctggcgttggtgtctgagcagaagccgcaggaaccagcgggagcagcaggaggagctgcgggactcgtttgccgaggctcgtgttctgctcaaaagtttgtagacgcgcagaaccaggagggagcgtgacacggagagaagggggcgcagagagagaggcagaagaaagaaagagggggcgatgaggtgaagcgcggaggagcaaggtggccgtaagtccacccggaggaagaagcaggcgattaagggaaagagggaaagtcagaaaagaaggggaggaaggcaagggagagggcgggcggctagcccgcctttgtaggagccgcgggccaggcagccgcgagggtcggcggcgccttctctgctccgaggtctctccggctgcctctgaagctgcggcttctgctgctgctaccgctggttacagaggtgaccggccttctgctcctatttatctgtgcagttcgcaaaaatctatccgaacatggtttttggagagccctctttgtcaacatctgcctgcctgttgcctttaagtacagaatattttgttgcactgttgcgctccgatttttattcatgaaatgacttcctttttttttttctcagtcacgtaatgatcgggtatcagaaaaagacgtcagcatcctagtccctcaaggaacatattaactattctgtgctgtcctcttggatgataagatccggagtcatcgacttctcataaacacctttcactcatacaatccaatttttaagaagtccaattgttttgatggttttcaatttcacccgtttctcaaggacaggtaaagaatttttagaattttgaggatgacaaaagttatgtttttaactatataattacgatttctctttactttttcatcaagcctcaccaatcagagctctggtctctggaattaagcatcatcaagctctcctattaataaatttaatttagatctcctaatttcttgcgtatgttctttcagatagaccattaaatgtggaagtcgttttgtttttaaagggaagtcttggaggattttcagtaaatctctcctgagtctggctgccgttgacagtagggctatgagtagattgatgagagctcatgctgcctccggagcgcggcctgcggagctgtccagactccgggtgctgaagtgtagggtaacagatgctacaaacgttgaaaattgccaccggtttaatttttcaccagagcctctaaatttgaagatttggcagtagtgctattaacgtggcgattcatcgcctaaatcacccccaccgttcagatacatcctttccctcttgtagcgtccataaatgccctaatgctgagaatgctccccatccctgcctggatttgaggaaaaagcattctgtcccccgttagtcctggcttttggatttctagaccggctgtttggctactttcacaccttctgtggctcttacagattttaaaaattgatgttgtgaaattgtgttttccacaagaagtgaaattttaagaatttgggggcgagaaatatgtttttccactttgtttacaacttcagctctgtttgggagacacagacagactgggaaagcatgagggttcccagtacaagttcacctgatgaaggtttctaacaggaatccctctgctggaaacagttaatttttttaactgaaaatgatgtgggaagaggaaagcaataagggaagaccatatccacccagaggcttccaatttcctgggtaattgaagaaggttcatatatttctactccagtaagagaactcaggtctatttctttaaaaaaaaaaaaaagaagaagaagaaagaaagaaagaaaatagagccatcaataaccattagagtgcattttaattatttggatcttacacaaaaattaggggaaattccagtttagtgggagggtttcctgttactacgatttggatctcacatttaaataagctatattagttctgcatgctttttccaagatattata

SEQ ID NO: 1245041 - DNA, 4001 bp, Homo sapiens
ggggccaactcctcagccacccccaccccagcctccgagcccaggggagcccttctccgagcagatgtaggtcacggagaacctcggtttctattttgggcaggcgaggatctggcaggaacatgaataataaatgcccctaaacttagccagttcggcggcggctcagactgtggcgcgtccgcaccctccggtgcttctcgcacggagaaagtgccaggcacacgggaacttgaaaatagctgagggtgaaaccagggtgttttaaggccactaaacgaatagttcgcgctgatctgttatcgatggcggtgccccatctcaaccccagagcacgaggagggggaccgagatccagcgagtgcctggcgacttcgcagtcgccctctacagcctccgttcttgacacaggacgggtagagatgggttaaaacaaatccctctcgctttggacccctggagagacttggcgtgcagccagcgctagtagcactctctgggcggggttggagtcgtacttcgctgcttcactcgccttttctccatccttggagaggcccgggcaaggcaagcgcatcattccgcacgcctcgcacccagcctttgctcggcgatgcgcctcagccctggcccgggtaccccgaaccctggggtctttctggatattgccctgcctcgagcccagatgctggaatcctaatacagaacccagaacccatctctccgtccaaatcaatgatcagcggccccccagagctaatgttcctgggcggggctcggagaaggcagcttcgcaggcagaacgcgcgctcctcgctgccccaggcgccgctggtacgaaccctcccctacccagggctcatccacagcctggcacatcggtccgcgactctggggctgcctccgggaacctgggccgcgcctgccggttagaaacccggggttaagaaaaaagccaaggttcctccatcccgggccaggcagggctgctctcccggtcctgcctgcctgctggctttcccttcctcctcctttgcgcctgtttttccccctccttcgcagtctcgtccttgttcttccctctcttaagtcgcttttcctcaatcacaccgggccaacaccctccccaccgcacgccccccaagacagcctgggattcaaaatgcagttggaacacggatcacttgaaagaaagctcttcaggggaaagaattggaatgaaatgaaaagaaagggtggaggagagagagagaccccacccggatagtccagaacaagcagtaacaaagcaaagtccgagggagcttcacgctcaacccccggccaggctccagagctgaagttctcctaactcgtcccaagaataggtaaaagaaaccaagctaggggccgtgccctgcccccatcctgtgggccgggttgggggagggggggttctccagcggccagaagctcactggctctacccgggaccctgagctgcctagggctgggggaggcgtccgagcagtcgcggagcctgccagaccctcggctagaatggggacccgctgtccagccgaggctggcggaggcgcaccgggggcgcagagggcgatgctagtagtctggacccaaaggactgcaggaaggagaccgtgaggaagcgtctgtgcctgggaagccccagctcctgcttgggccaggcagccagcacctacctgatcccggggaaccggagtccggcggcggcaggtgagctgtagacgctgctgtgcatgattatcccatagaccagcagggccagcctcgctccgctacacatggtcattctgcgcaggatgggaaagaggacacacagctgtgagaacgcccctggcctcccaccctccaaccccaaaaagctctggaagccgggggagggacggagcgaagccccggctccctgagttgaacagcacttggcgacagccggtgcgcgccctgccacttcttgcttgctatagttagaaaaaaatatatatatatgcatctacccggcgcccaataactagccagacccggctgaaggaaagctaactcccctgacgcgatgccaagcgaaagaatcagcagtcgagtgagccggtcgctttggtaagattttccctcccttacccttcaactcctcccgctgccaggagagctgccaggtaggacggcgggcaaagcgcttcttcaagttcctgcgctggagtcaccacccgagaggcatcgccgtctggcgttggtgtctgagcagaagccgcaggaaccagcgggagcagcaggaggagctgcgggactcgtttgccgaggctcgtgttctgctcaaaagtttgtagacgcgcagaaccaggagggagcgtgacacggagagaagggggcgcagagagagaggcagaagaaagaaagagggggcgatgaggtgaagcgcggaggagcaaggtggccgtaagtccacccggaggaagaagcaggcgattaagggaaagagggaaagtcagaaaagaaggggaggaaggcaagggagagggcgggcggctagcccgcctttgtaggagccgcgggccaggcagccgcgagggtcggcggcgccttctctgctccgaggtctctccggctgcctctgaagctgcggcttctgctgctgctaccgctggttacagaggtgaccggccttctgctcctatttatctgtgcagttcgcaaaaatctatccgaacatggtttttggagagccctctttgtcaacatctgcctgcctgttgcctttaagtacagaatattttgttgcactgttgcgctccgatttttattcatgaaatgacttcctttttttttttctcagtcacgtaatgatcgggtatcagaaaaagacgtcagcatcctagtccctcaaggaacatattaactattctgtgctgtcctcttggatgataagatccggagtcatcgacttctcataaacacctttcactcatacaatccaatttttaagaagtccaattgttttgatggttttcaatttcacccgtttctcaaggacaggtaaagaatttttagaattttgaggatgacaaaagttatgtttttaactatataattacgatttctctttactttttcatcaagcctcaccaatcagagctctggtctctggaattaagcatcatcaagctctcctattaataaatttaatttagatctcctaatttcttgcgtatgttctttcagatagaccattaaatgtggaagtcgttttgtttttaaagggaagtcttggaggattttcagtaaatctctcctgagtctggctgccgttgacagtagggctatgagtagattgatgagagctcatgctgcctccggagcgcggcctgcggagctgtccagactccgggtgctgaagtgtagggtaacagatgctacaaacgttgaaaattgccaccggtttaatttttcaccagagcctctaaatttgaagatttggcagtagtgctattaacgtggcgattcatcgcctaaatcacccccaccgttcagatacatcctttccctcttgtagcgtccataaatgccctaatgctgagaatgctccccatccctgcctggatttgaggaaaaagcattctgtcccccgttagtcctggcttttggatttctagaccggctgtttggctactttcacaccttctgtggctcttacagattttaaaaattgatgttgtgaaattgtgttttccacaagaagtgaaattttaagaatttgggggcgagaaatatgtttttccactttgtttacaacttcagctctgtttgggagacacagacagactgggaaagcatgagggttcccagtacaagttcacctgatgaaggtttctaacaggaatccctctgctggaaacagttaatttttttaactgaaaatgatgtgggaagaggaaagcaataagggaagaccatatccacccagaggcttccaatttcctgggtaattg

SEQ ID NO: 1245042 - DNA, 4001 bp, Homo sapiens
caatcataaattaaccaacagcatattgcaaacttgggttcaaattaaaaacgtgtctcccaaatcccagaatctcttcagctaaaaatcttagcatagctgtcatcttcccccataaacagtgatcaactcctttcagacatgtcctaaccctcactgttcctcccctcaactagagggccggtaggacaacctcttgtctcatcttcactcttgtacttcctttcttaacacacatctgtcacttcatgtttaaggacgacgggctcaatgctgtcttcgcagtgaagtcctaactccaaccgaaatttaaccgaaatattaatacacactcatacatggccaactctccaagaacatctttaaataagttacacatacattaccgacttccaaatacagctgaacatgtactttacacaactctttttacatgtggtcctctctcccactaatgctcctcacccccaaaaatggtacccagactccaaaccccctcttttgataaaggctctgcgtggcagatgcccacagtactctacaaactgctgccccacttgccaatctgcattgtcagttacctgcttaccagtttctcctcccccaccccactcctccacagccagtatattcctcaagatcccaagaggcagtgattacccgtgcaaatagagtaagttttaagcacgcaggcaagtcttctgttcaaataaactacttaaaatatctaattatttctcattctgcatctgtacagtatttaaaagggcagttaaaattaacattccaaagtcaactgtagtagaaattttgtaaacggaatctatttcaatgcaaccagcaacggcagatgaaaagtaatgttaaagtcaacatctgtatatcaattattgatattcgcatcaaaagctcaacgatgaagaaacagggccccgttatcagctgttcttcaaacctttctagggaaaaaaaaacctgggcagatttaggtgtcaccgtcagctcctgacctacatctgccgtcactcaaggctcctccagagagaagcttccaggagaacccggtctcggggatgcggcgggcgggccagcgggcggggcgtttctggagtccttacaggggtcgccacagctccttgccccctctcttcttctccatccccgttccctctccctctactcctcgctcccttcaccagcccccctctctccctcggtccccgtcctcgtctttcccctattcctactctcccctcaggtccccatccccttctccgccctcccggggcggcccccgctcccacgtgaccggcggcgggcggggcgggccgcgggcgcgtcgggggtcgacgggcgccgttcgggccgcgaacccgcgccctgagaacgtcccgggattcccgaggcggccacgggcggcgcgagggcaggcggcgggcgtgggtgtgggctgggtaccggcgggggcggggctcggaggggaccagactggggcgggggccaggaccggggcagggggcgtcgccgcgcgggcccgcgccgggccgggccgtacctaccgcttggcgcccgaggagcaccgcgtctccgctgctgcctctcgcagggctgccgcgtcttccgccgagcgcagccgcgtcccgtggggccgcctgcgcccgcccgcgcctccgccccgcgcggcgggacccccgcctcagcgcgcgcccacccccagcgcgactggtcccctcctcccgcgcagccagaaagagaaaatggcgctcgattggcctcaggaagtgacgttggccctcatttgcatgtaggcgcagccagccaatgagagcagagtgtgcttgggggcccctggcacttcccacaggccccccggggcccctggctaaagatggactggaggctctggggtggcagtggggggcccctgttggaccccctgactcccttctgtcccagggaactgccctgccagctcctttccacatctgtgcaaactctcgtgagagtttgagtgggcaatgacgtcactaaaggggtggggagagtgtgtcatcaaccatgtgactaatcacgtggactcaccacagctttgacttcatttgcatggaatggggtggagctagtggcagctccaggagtggtgaccccgcccacatctcagagccaatgggagcccaactgtgataatgctgccttgccattggaagacaaaactttggctcccagaactgggacaagtgtgccatgattggcatatcctggtgaaccgactagctggggtctcctgacttcatcattcctgtgggaaagtgatcacaccttctcttgagaattctgatttttagatctactacaagttgtgtggggagagggttaattgcatacatttgtataaactcttaacctaaaagttcatttttgcacaggtgtttatcaattgtgtagcaataataatttattccacaaaattagtggaaacatggcgtagggctttcaaaatggctctaggtcttcgttccgtggagtccccaggcctctggcggacgccctcgtgccccagagcacgtgggagtaaccacgagggcagcgcaggcgcctcccccagtgcccctaaccttaaccctaattctgaccctgcacctgaacctcacctagcactaaccctgactctgaccctaactcccctccagtgttccttcccctgaccctaactcagccgcgccctcagtggctgttccaggcagttccttcttggcgaagccgtctgcaggacacgtgcccctttcagcacaaggccacgtctccttccagagcgccgagcccctgcaacccgccgccagcctccagccctgaggcccactccagccaccgcggggcagaggccgtgcccaggctgggccttccgcccaccgccctctccagagcctccttgtcaccatccgctcgtccataatttcagcttttccctctcaatgggagccttctgctcagtttagcccagtgactaaacacataataggcactaaattaatgtccatattcgttttaaaactgtgttaaatggtgggccgatatgacctgaccaaaatttgcttttttcctacatgaatacaagtcataattgaagtagagtttgccctttatgtttgctgacaagttaagattttactttgagttacagtggtaaatgggtgtgatgtccctatatatcttccttgcaaaattatgggtgggatgaaaagtgtagttaaagcctgcagtctcccattgatcctctagtgacctctcattttatcacatttctcaaaacagcagtccctgtgtctgtctcctcagccccctgcacgcctctcgcccccaccctcaccactctgcagaaacgccttggtcaccagcgccctcctaattgctgagcccaaaacagattttaggcctcgtctttctgtatctatcttccatttgttactacagaccaatccccctttcctacagacctcccgcaacaaagccgccccaccaccactactcctcaaacgggctctttaatctccaaactcgggaactgtttcctaatctacagacctccccccacaaagccgcccccccccacacccactactccccagacgggctctttcatctccatattcacgaactgtttcctcatcttcgcctgcatctcttcccggcccatccttgaacgcggtgttctctgggatcctgctgactttttccttcacggtgcagcacatatgcgccactcgcttcctgtgtgccaggcaccgtgctgggtattggaactcccacgcctttcatttttttctgcattttctcccttgttaatttcgaccacagattcaaaccttgttatgtcaattccaaaccagtatctccatctctttcctacgtttcagttttatttttctggctgccaaagggggcagctccacttcagagtcccacaggcaactcagattcaaaacgttcaaatctgagcccat

SEQ ID NO: 1245043 - DNA, 4001 bp, Homo sapiens
cagagtccgtcacccacgctggagtacagcaatgcaatcaaaactcactggagcctcaacctcccgcgccaagcaacccgccttggccccccgagttgctgggactatagtcataagtcactgagcccaggtaagaaaaaaaaaaaaaaaacaatttgtagaggccaggagctgtggctcaggtctgtaattccaacactttgagaggaggaggcgggaggatcgcctgggtcctggagttccaggccagcctgggcaactgggcaagatggtgaaccctatcttttgggacggagtctcgctctgtcgcccaggctagagtgcagtggcccgctcttggctcactgccagctccaccgcccaggttcacgccattcccctgcctcagtctcccgagcagctgggactacaggcgcccgccaccacgcccggctaattttttgtatttttagtagagatggggtttcaccgtgttagccaggatgatctcgattttctgacctcgtgatccacccgcctgctgggattacagccgtgagctaccgcgcctggcctctccagaaactttttaaaaatcaaccacggtgctgtagtcccagatactccggaggctgaggcgggaggatcgcttgagtttggggctgcagtgagctgtgtttgcgccgctgcactccggcctgggcgaagaagcaaaaccccgtctcttaaaaaataaaaataaaaataaaaatcgtagatcggagggtctgctaccctacccaagctggtttccaactcctggagtcaagcgattctcccgcctcggcctccctaagtgctgggatcgcaggcgtgagccccggcactagcctatctccccttacagtgaagacgttgagctgactacaagggcgctgggatagcaggaggccaagccaggttcccgtggccgacccggggacctcaaccaccacccgtacaccagtgcaaggctgaggaaccgtgtcacttaaacagtgagagcgactattcgacacgtgaacctttcattgagactgatcacggccatggttctgtcaacactctatcattatgtcagaaacacgtatcaggtcccgtgtgtgtatctagagggatggctaccaacagagaaagagcctcctgctgagagcaggccctgatatgcaacgaacacagagtccctgctatgaaaaggtgacattcttaataataatagctaatactgccagtcctggaatgcccgcaatggccccattcaacagacgggaacacggagactcggagaggttaggcagcccgactccaaaacccgtccttgcgactacatcgtgctcgtgctgctgactcaaaattacagacgccttcgttccgtgctccggggacacgaaagcggggacaaggacggccaccaagccaacatgaccttcgaggcttcaaccgccccggtgaagcgcgaaaacccggctctactgaagctgcgcgttttcaaaacttgaatcccacaggcagggctgagcgcgaatcggcgctcccggggccggctgagagacagcgcagggcgcccaggccctcggcagggacggcccgcgtgcggccggagggcgggggccagtgaccttgacgtccgctctcccgagccggaagtgggcccgaggcagggtggagggcgccgggcgcccaggtaggactcaccgtccggaggcagggctgctcgcccgggcccacgccgccaggcacgaggagctgctgtaggccgcggggccagcagccgccccggccccacagccgcaaacagcggtgcgccatggccgccgccgtggccctctcggcccgggacgctgcgcaggcgcgggcaggcgacgactggcggcctcgggaagcgggctcggctcggggaaaggccgccaggcagcgaagcgcgccggcggctcacggaggagcccaagctctcaacgcggcgtctcctgccgccagccccgccccggcgcgctgacgtcggcgtctcctctccgaggcccgccgcgacctccgccagtgcagaagacaggaccaaatgggaggagcatgggggcgggaccggaggcgggggccgacggagcagcgttgggggcgcggcaggaggcggggccgagaaggaccctggagggcaagggggagctagaggcggggaccgggccgagggaggactcgggagggcgagcgagagctgggggcggggctgatggcgcacgtggggggcgtggctggaggtggggccgaggaaggactaggagagcgagcaggagctggaggcggggccgacggaggggtgtggggggcgtggctggaggcggggactaaggggagacgcgtgactgggatcctgggcttccgagcctgggcagccgggtgggccagccagtaggagcgagggggaagtagcgaaggccccagcggcggcagatggaaggaccctccgagcgccagctgagtcatggggtggtgctaggctctggagacaccgaagcacacattcctgacccctgggagggcgatgcgaagattcacaagcagcagggaatgttggggctgtgccgtgcagcctgcgctctaggaaccctgtcggggaactggttctcggagagcaagtcgagtcttccaggtagtggaaactacacattgtttcctgtaccgtgacagcggaggaaaaaggagaggtctttgaactgaggtgggggacttgggggtttttctgagacgggctctcgctctgtcgcccaggctggcgacgctggacctcaggcaaaggacagtaatccttgagagacaggagacaaaaccaggtgagtcctgtgattaccccagtggcagtaaaacaataacaaaaagatataccagatacaccatcataccatgctcacacaaaagaaaactgagtagacaaatagattttagggcaaggaaattccaaagaaaattaattgcagggaaaagaatatcactaaggatgaagaggatcgggtttcttttccagagacagggtctcagtctgtcacttaggctggaatgccatggtgcaatcgtagctcactgcagcctctaactcctgggctcaagggatcctcctgcctcagcctcccaagtagctgggaccacacacgctcgaccacactcgactttttttattttgtgtagagttgaagtctcactttgttgcccaggctagtctcaaactcctggctttaagcaatcctcctgactcagcctcccaaagtgctgggattacagatgtgagccacccacatctggccaagagaattattattattattattattattattattattattataaaggggtcagttcatcagtaggacataacaaccctaaacatctttgttcccattaacagaagcttaaaatacatggagcaaagactgacagaaccacaacttccaattatatttggagatttcaaatccttcttttgataattgacagaacaattagacaggaaaatagtaagtatatagaagacttaaacacaaccaactaaatcaaatagacatttatagaaaactactcataacaacagaatacacattattttcaagttttcacagagcacttatcaaaataaaccatattgtaggccataaaaatattaagaggagtcaagtcatataaaacatattttctatccacaatgaaattaaattagaaatcagtatcagaaataggctgaggtgagaggatcacttgagcccaagagttccagacaagcctgggcaaaacaaagacctcggcttcaaaaaagaaaaaactagacagaaaatgaagtaaaaccaaagaacagaaagaagataaaagtaaaaatcaataaaattaaaaactaaaagacatagagaaatgaatgaaatcaaagtgtgttctttgagaagatcaatagtcagagcaatcaggaaaaaagaaaatgacacaaattggcccagcacggtggctcatgcctgtaatcccaa

SEQ ID NO: 1245044 - DNA, 4001 bp, Homo sapiens
actttaggtatatttattcatctaatcccccatcaatcctgttaaagtgaatactgttaagattttacagatgagtaaactggggttcaaacaggttgaaaagttatgctaaaattaggagtcgattccaaatctgactccaaagcctttctcaggacctcccctgcttctcccacctccatccagagtaagatactaactcaactgcatcgcatcacaggggctgatacctacacacaagtgttcaggaggctgttaaaaactcatgaaactggaggagaaaaaaactttgtaggtaatgacaataggaactctgccctacctaaaagcttcccaaaattatgattaaatgtttggtaaaaacatcaaaaagacaatgtaggccaggcgcggtggctcacgcctgtaatcccaagactttgggaggccgaggcgggtggatcacctgaggtcaggagttcaagaccagcctggccaacatggtgaaaccccatctcaactaaaaatacaaaaaaaattagctgggcatggtggcaggcacccgtaatgccacctactttgggaggctgaggcaggagaatcgcttgaacccagggggcggaggttgcagtgagctgagactgagacattgtactccagcctgggcaacaagagcaaaactctatctaaaaacaaaaaacaaacaaacaaaacaaaacaaaaaaaggacaatgtatatttgggagctaaagttcatttagtttgttttaagtcctgatttccaagatctgaacatggttattggccatccatgctttttaatacaggatttgtgaagttgttgattcggaaggtaacccacaacatccttggtttcaattcagaagccacacagcaaaaaaccccttcaatttgtccttagttgatatagagttataaaacatatcacatatctctggaatgaccattcctggttaattaatctttagaaataaaggctacctttacttaaggaaaaggttgtggaaagaaaataattagagcagaagcagctctaaatgccgttcttgcttttatctatttttaaatgattgccaaatgtctgtaactgacacccttaatcaaggcttttaaagtttagatgtgttcattaaattgtaatgtgacagtggtggcatttaattgatggatttttttttggctgactttttgccttaaatttttttttaaatctatttaacaactcgataaatgtttacatcagccattttgaaaagcctgatagcttttcagcaaattgcattacctgttgtcagacaatatactcctgtgtctacccagataggagagattttcaatcattcagttaattcacagtaaaaggaataactcttgactaaaatactcaaatatttcagacaaaagtctctggggcctgagttacctggatagttgactttttatgttgctttgcaaaactttacatatcactcgtttgagtcattctgtatattttttctaactgttaagatagacatgatgtgaaagaaactgttttcattcattattgtcaagccaaaataagcaaatttaaaaatagcaataattttcaaaaagggtcaaaatggacttaaattacaagaccatgagagtttgcccactttaaaaccttatatgcccaaatatcccatataatccctattggtttcatctcattctatttcatcaggaaaccatctgctttgttctttgttgcagaaaatgtaaacaactatatattgaaagcacagccattccttatgtaaaaaccaaagtctacatacttacttttcagtactctttgtccaagaaatgttgtaggagggctggctcagctgtggattccccaggctgtgtgtgaggcattgattgggtgtccctgttcccgggacagggattcaaaggagtttatagggctcagggtcttccatgatcaggtcaaagcatagatgggtctgcttccagaaagttcatctcttcctaagaggggaaattccatgcccggggaagttctggaagaagagcattttttccccgcccttcagtgaactaggtcattgctgaagctggagaatatattttagcatccctgtgatgaaacttgagggctgtttctgcagtaggtgcgacacttgttgacacgacacgctggggaggccctggcaagggggcctggtgaaatgcagccccagggagctgatgaaacccagacgagctgtcactggctgctgctcaggagaccgagcagctctttacaaagcccatgctggaccctgggcttagttgctcgctccttaggaaaggaaaaacttgctgcctgataaagggattaaggccggagtaacacaaccagttctcataccaaggttatcaggcatttgaagtacacataggaaacccgtggagggggtgttggggaggtgaaaatatgtgtcatatgttgttcatttagaacaggcattatagccatcctctgaagttctctgagaaaggcagaagccacagaaggaaggcaggatccaccctcctcaccctgcttacccccccttaccccttgtctgtctgtctgtctctctctctctctctctcacacacacacacacacacacacacacacacaccccttcctattttgactacgatagaagagaacagacaaagatcagaagaaatccacagaagaaataccacaggtcctattccttcagattgcctggaatggttcttgttgggaaagtagattttgtaatatgggcaattcttttattgaagtttatccaagtccaaaaacatagagaatcctttagcatcattctgtaactacttagcctctccccaaaaatattttaatgtatgacacctggaaattgacagcttagacagaaacctcttttgagactcgtggagacagctcaaattagcagctccaggggtgactttgaaagggacatagctgtaaatattcactctgtgtagggcactgcaatcctcaaaagcaaattgtttttacacagcacagaatgtacatcattatcccttgatggaatgcaacttttcacaagatgaaaactcatctaaaacgataaaatattaagaaatgtaggggtgatatgttctgtttttcagttttatcttcatgtgagaaaaaagatattaaagctgaggcactgtaaaataatgactatctcctggggaacacatctgtgaaatgccacagaacacagaaattaccaactctttgcaaatggtcggctttatggaaagctgaggtcttcacaatgtaaggtcttttccagataagaaagaggagataacttcaagttgggaatgaagagaggaggaaagtgtgatgataaagaataaacaaatgctgtcgcacaccacagagagaataaagtcaaaagtgaaggaatgtcccaaagcaatagataaatgtgatatggttgtgaaagaagtgttgcctgggagttattaaatggaaaagttgaaattcactatgaaacttaattttgttcctctgaaataatttgaaaaaccaattccctcaactcccaacattcatctcctagcaaaataaatgtaaagagcagaaggtttatatatgtgcatatatagatacacacacacacacacacacacacatacacacatatacatgcatgcatacacacatacatgcatatatatacacacacgtacatacatacatataatggatttaactgtatttgttttattcatctcatgaatttacagccacagaatttatgttttaatcttaggtgtcggggaggaagcatgaaagaaaatcagaaacagaaatcttggaattaaactcaaattaggcctgtaatccctgcactttgggaggccgaggcaggtggatcacttgaggtccggagttcaagatcagcctggccaacatggtgaaaccccccgtctctactaaaatataaaaaatagctgggtgtcatggctcacgc

SEQ ID NO: 1245045 - DNA, 4001 bp, Homo sapiens
agatttttctcaacaagactgttaatataacgacttcatcttacacggtggacactatcctcattttgcttttaagccacttggcaccaatagagcatatgttctgccagttctgagctaatctccaggaaaggctttgtataacgattaaagaaactcagatcagtgcccaagatttttaacggcctacttgagcatatgtttttttgtttgtttgtttgtttgttttggtatgtttttgcgacggagtttcgctcttgtggcccaggctggagtgcagtggcacgatctcggctcactgcaacctctgccgcccgggttcaagcgattcccctgcctcggcttcccaagtagctgggattacagacatgcgccaccacgcctggctaattttgtatatttagtagagacgggggtttcactatattggtcaggctggtctcgaactcctgacctcaggtgatctacccacgtcggcctcccaaagtgctgggattataggcatgagccaccgcgcccggctgtgcatatgtttttaatacacagttaatttacgataaaatagctatttcactagcctttctttataatttacataaaccattctaaaatgaaaacgaaatacatgactgcagatgcaggctcatttcaactttaggattagaggtaattccgaaccattacatacacagcactggatctgcaacacacttcaccttagttcgcagtttaaccacgggtgtccagtggaaattacaatcccggtgactacactgctttaaatgtttcctaaggtttcaacgagtgcaacagtaacttcctatcccagacagcgtcttactgttattactaaaacagctgtcagctaagcttcgcatacctctttgtacaaccgtttattcaacgctttgggatctgtaaggatgcgtcactccacatcactcctcaaaacgagatctaagaacctgacgtgctccaggggtcttgaagcatcacaagtgggtacttgaaaaacgatgacgggaactgcctgtccaatgcggcaaggttattttacactggcatttaagacagaactgtagagtggctgctctttccccggacactactaaagcagcaatttccccttcttgatttcatccacctctcccaggacccgggtacctccgacgctcccggcccgagcggccgcggcagactccccggcgtcggcgcacgctcggcggctggcggcgggaacgcgcggcgggccgggcgcgcccccgcccccgcgggtccgaccgccgcacgccagcggcgccctctcggccgcgcacactcacactcgcacgcacacgctcctccggccccgccatgttccgggaggcggcggcagcccagccccgccagccgcggtgaggggcgcccgcgacgaggccagctcgcggccctccgcccggcccccgccccgccccgcgcagcgcccccgcccagttggcggctcccacctgcgccgcggctcctcgcgacgccgggaggggcggcggcgggcggggccccggcggacccgcgccggggggcactaacggcctgtcactgtcaggcgagctacggctcgggccaggctgggcgggcggcgcgtcgggaccggggggggcgggcagggcgcgtcccctaccttgctctggggagggggaacgggagcagcgcagaactgaggggatctcctccctggcgccggggacaagctcgaaaccgcgcccctccttcctcctttcctgtcgccacgcccccctcacccgtacggacccgaggcaaggccggcgcaggaggcttcacccccggaacgagtgcttcggcgtagccgtcgctgtcgttgtcttcgtcgccgctgcagccgcctgtaaagccgccggagccgggcttgaaaacatctccggtctcggtccgtctctcaccacagcctcctcgctcccaggacagcgtcgccccgcgattggctgcgacgcgagcacgtgacacccgcggacacgtgactaccgcgggcacgggacgggcggcgtgaccgccccgccccccggcgcccgcccctcctgctgctcagccaggctccgcgagccgcagggcggggaagcgggacgtaccaagcggcaggcggcggaggggtgcgggccggaactccgcccttcgtgctggtcggtctccacgccccactcggactagtgtcaccgcctccccgccgcagacactatccgacaaaggagggggaatcaaaggctgggcgaagaggcagggcaggcgccggtgacgctgctgggcaagcgggctctgcagtagcatttgtggcgaccgtggcagtggctgtgactggaagcttctggaaatggcggcgatgaggacccccacatagggtattcacctgttatttttacacggggtgggtggacgagcgtgatccaactcaggcaaaatgacgctgcgaccgcagcccgaggactaggcgaagttcccccgctaagccggcggcggccgtctggccccgcaccaggccggagaagctgcacctacgcccagagcccgcggccccccgcctcaggtggggccctgggccccgccccgaaagcgcggtagcgtgcacctgccctggcaccagggggtctagagcgcgtcccctcccagccacgccttccagtggcctttttaaagaggaattcagtgcaccctcccacacgtagtgttggggatttgagagggagctgctcaggtactaggaagggtgccggaggaaaattgaccgtcgcagcgtggcagcagcgtgtactcactcccttctgggcgcgttatttacgtagaggttaatctgcaacaacagcgtctgtttatgacttagtgcatgcagttacaagtttatgttacactgtcctttaacgtcttgatgaactgagggttcaggtgtgatcacagcagatgaagtgacattcagacctgacagggacggcgaggtcccatcaaattactatgtaaagcataaacctgcattaaagatcaggagtttttcctttcctgggttcctgatttctcccacctacaaatctttagggtcaacaagactagaaaaagagcaccttatggctagaggtggaatagtgttacatttaacttggttatttatgatgtgaaatacaaagaaaaaaacagtcgcctatgagaaagtcaggagagctccagggtaggacattttcattgttacttttttgtgccacttggaaaattaactgttgtttaccttctctcaattaaaaaaaaaatcttaaagacatacttaaaaataatcgttatagccgagcgcagtggctcacgcctgtaatcccagcaatttgggaggctcaggcgggcagatggcttgagcccaggagtttgagaccagccaggcaacatagtaagaccctgtctctaaaaaaatatatgaaaattaaccaggctggtggcgcctgcctgtgctcccagctgctcaggaggctgaggccagggtattgcagtgaaccaagatcacaccactgcactccagcctggggacacagcctgtctcaaaaaaaaaaagcataattactagtgaatagtctgtttcaagtacaggtgactttgagaaatcgaggattagattaatataaattattcatgcattaaagctggctaatgcaaaactaatgtactacagctaatttcttaaatacacaaaagggtttatccttttttctaagttgtaatatccataccactgcagagtacataatcatacttccaatcccttcacccaattattttttgtatacttgcagtgtcagaatagctaaggataatgtcaagtgttttggacctttcttttttaaaaatggtaatgcttaagccgggcgtggtggctcacgcctgtaatgcttgcagtgagccgagatcccaccactgcactccagcttgggagacagcgagactccgtctcaaaaaaaaaaaaaaaaaaaaaaagg

SEQ ID NO: 1245046 - DNA, 4001 bp, Homo sapiens
attaaccatcctctttttggactgaaataatgctcctaaaacgtaagaatggtttaaagaaaagtttacgtgtcagctaatagcaagaaatcaaaatgatattttaaaaatcacttatttttttttaagaataaaaatctcttctccaacgaagtgttttccaaatatcctaccatttctccaatctacttcaaaagagtatcagtcatggttttcaacttctataggggaaaaagtaatatcgacagcttgataaaagcatcttccttttaaactcattctaccagctggacactagtctgcaaataaaattcaggcttttttcccccttgggtattaacaaaccagtgtaagtctgcacaatgtattttcagctaaattctttcctcgtctgaatatttttgttctcttcactcctcctcaaatattcttcatggaatacacacccagagatttccactttcccagttctgcgtagttcataaaactattccgataactaattcttaccaactactatgaaaattatgagattatgaaaactatacaagattaagaacattaaaagtatcctacataagtacacttaacactcattttccttccattttaacacctcatctgtctctaaaacacataacgagttaaacttgaccttagccaagatgcctgtagagcttcagaaatttattcagtgcctgtatcaaatataaaagatccttaagtagtaaaacttttctccccttgtctataatctccaggggtaaacatttcaaatttttaaaggctcctgcttttaacccaaattaaagatttttctcaacaagactgttaatataacgacttcatcttacacggtggacactatcctcattttgcttttaagccacttggcaccaatagagcatatgttctgccagttctgagctaatctccaggaaaggctttgtataacgattaaagaaactcagatcagtgcccaagatttttaacggcctacttgagcatatgtttttttgtttgtttgtttgtttgttttggtatgtttttgcgacggagtttcgctcttgtggcccaggctggagtgcagtggcacgatctcggctcactgcaacctctgccgcccgggttcaagcgattcccctgcctcggcttcccaagtagctgggattacagacatgcgccaccacgcctggctaattttgtatatttagtagagacgggggtttcactatattggtcaggctggtctcgaactcctgacctcaggtgatctacccacgtcggcctcccaaagtgctgggattataggcatgagccaccgcgcccggctgtgcatatgtttttaatacacagttaatttacgataaaatagctatttcactagcctttctttataatttacataaaccattctaaaatgaaaacgaaatacatgactgcagatgcaggctcatttcaactttaggattagaggtaattccgaaccattacatacacagcactggatctgcaacacacttcaccttagttcgcagtttaaccacgggtgtccagtggaaattacaatcccggtgactacactgctttaaatgtttcctaaggtttcaacgagtgcaacagtaacttcctatcccagacagcgtcttactgttattactaaaacagctgtcagctaagcttcgcatacctctttgtacaaccgtttattcaacgctttgggatctgtaaggatgcgtcactccacatcactcctcaaaacgagatctaagaacctgacgtgctccaggggtcttgaagcatcacaagtgggtacttgaaaaacgatgacgggaactgcctgtccaatgcggcaaggttattttacactggcatttaagacagaactgtagagtggctgctctttccccggacactactaaagcagcaatttccccttcttgatttcatccacctctcccaggacccgggtacctccgacgctcccggcccgagcggccgcggcagactccccggcgtcggcgcacgctcggcggctggcggcgggaacgcgcggcgggccgggcgcgcccccgcccccgcgggtccgaccgccgcacgccagcggcgccctctcggccgcgcacactcacactcgcacgcacacgctcctccggccccgccatgttccgggaggcggcggcagcccagccccgccagccgcggtgaggggcgcccgcgacgaggccagctcgcggccctccgcccggcccccgccccgccccgcgcagcgcccccgcccagttggcggctcccacctgcgccgcggctcctcgcgacgccgggaggggcggcggcgggcggggccccggcggacccgcgccggggggcactaacggcctgtcactgtcaggcgagctacggctcgggccaggctgggcgggcggcgcgtcgggaccggggggggcgggcagggcgcgtcccctaccttgctctggggagggggaacgggagcagcgcagaactgaggggatctcctccctggcgccggggacaagctcgaaaccgcgcccctccttcctcctttcctgtcgccacgcccccctcacccgtacggacccgaggcaaggccggcgcaggaggcttcacccccggaacgagtgcttcggcgtagccgtcgctgtcgttgtcttcgtcgccgctgcagccgcctgtaaagccgccggagccgggcttgaaaacatctccggtctcggtccgtctctcaccacagcctcctcgctcccaggacagcgtcgccccgcgattggctgcgacgcgagcacgtgacacccgcggacacgtgactaccgcgggcacgggacgggcggcgtgaccgccccgccccccggcgcccgcccctcctgctgctcagccaggctccgcgagccgcagggcggggaagcgggacgtaccaagcggcaggcggcggaggggtgcgggccggaactccgcccttcgtgctggtcggtctccacgccccactcggactagtgtcaccgcctccccgccgcagacactatccgacaaaggagggggaatcaaaggctgggcgaagaggcagggcaggcgccggtgacgctgctgggcaagcgggctctgcagtagcatttgtggcgaccgtggcagtggctgtgactggaagcttctggaaatggcggcgatgaggacccccacatagggtattcacctgttatttttacacggggtgggtggacgagcgtgatccaactcaggcaaaatgacgctgcgaccgcagcccgaggactaggcgaagttcccccgctaagccggcggcggccgtctggccccgcaccaggccggagaagctgcacctacgcccagagcccgcggccccccgcctcaggtggggccctgggccccgccccgaaagcgcggtagcgtgcacctgccctggcaccagggggtctagagcgcgtcccctcccagccacgccttccagtggcctttttaaagaggaattcagtgcaccctcccacacgtagtgttggggatttgagagggagctgctcaggtactaggaagggtgccggaggaaaattgaccgtcgcagcgtggcagcagcgtgtactcactcccttctgggcgcgttatttacgtagaggttaatctgcaacaacagcgtctgtttatgacttagtgcatgcagttacaagtttatgttacactgtcctttaacgtcttgatgaactgagggttcaggtgtgatcacagcagatgaagtgacattcagacctgacagggacggcgaggtcccatcaaattactatgtaaagcataaacctgcattaaagatcaggagtttttcctttcctgggttcctgatttctcccacctacaaatctttagggtcaacaagactagaaaaagagcaccttatggctagaggtggaatagtgttacatttaacttggttatttatgatgtgaaatacaaagaaaaaaacagtcgcctatgagaaa

SEQ ID NO: 1245047 - DNA, 4001 bp, Homo sapiens
actctctttcaagctattgcaatctggctcctgatcctaacaccactgaaagtgctcttggcaaggtcaccagtgcctattccgtcactaaatccaatggacttttcaattctttgtttatttgatttccctgtggcattaataaacatcaaggtcctcttcatctttgttgaaagattagagatgcttggtgtaagtgacagcacatgcttctgagttttctcattcgtctctggctgctctttctcaaatcttcttcaagattttgtcctcagtcctcttattttccacctttatatggttccactgggcaatcatgttcattcccatgggtgcctacttaacactgctgactcctaaatctcatctctagctgctgcccagacttgcctcctgggatcgaggagagtatatctgtctaatcaacatctctgcttggattcccatctatcctcaaaatttatcccaaaccaaacgttttatctttatctctcttgccttccctactgaattatgccgatttaaaacttttaaagtcggccgggcgtagtggctcacgcctttaaccccagcactttgggaggccaaggagggtggatcacctgaggtcaggagttcgagaccagcctcgccaacatggcagaaccccgtctctactaaaaatacgaaaaaattagctgggcatggtggcgcacgcctgtaatcccagctactctggagggtaaggaaggagaaatagcttgaacccgggaggcggaagttgcagtgagctgagatcacaccattgcactccagcctgggcaacaagagcaaaactccgtctcaggaaaaaaaactttaaagtcattcacattcgtctgcttcgttccattctcaccacctatgcactggtccagtaccatttcttaaaaagatgacaacatcttccagctccaaccctcttctccaaacctagccagagatctttgcaacatgcacatctcgccatgtcactcctctgcttacatgagctattgtcggcaacgggattacagtggcttaggagtcagacacacttgggtttcagtcttaacaccataacttattggctgcaaaaccgtgggtgagttaatttctctatatcttagttttctcatttgaaaaaaaaaaaaaaaagagccacgaagagcacctcccacaggtctcccccagggttgagaccatacacaccatgtccttggttcagagtcaggcacatttgaactgtttaatacattttaactgctatttttattaaaccctttcaatcgaggcaaatcaacctctttcatcctaaaatgtggggattagatggaatgactttaatcaactcttttgagacaagacacctttggaccctgaagcctccctgggtgctggccacccctccggggaggaggcatccgtgggtgcagctggtactcctgcatgaggacccagagggtcagggtcggggactccttctgctgcaggacagcgctgaccccaggcttcttacccgcccccgacctgttacccggcgacagtccccgccgccccgtcgccgggcacagactcagccgatccacagccatgagtgcgaagcctctcaggcagggcaggcaggcaaaccgcaaacccacagggcgcacccagccccgccgcttcctcccgggcctcgcccgcagctggaggagagaggaaggaggaggcggcgggcagcgggcagcgcccaccccatcccaccccatcccaccccacccgaccccgcgggcccggccgcccgagcccggccccagccctgaccccggagtcccggtcgctcaccttgaaggacatcctgcacatgtccgcggccgcccgagcgggagccggcgcgctttgggcccggggcgccttgtcctccccggcccttcactctcccggggctctcggcgttccgcagaggggcggcctccgacgccgcgcgctcccgccgcccggcccggcagcagccgccgcacacagggccgggccgaaggggcggcgcgggggcgcgcgcgcgcgcacactacacatggggtgtcgcgtggacgcgctccaggacctgccacacacgcgcgtgcacaaacaccccaaactccgcacgcactgtgcactttccacacacgtccacacttccacactcactcgtccacacacacactccaaactccacacacattgtgcatacgctccacattccacacacacagaggttccacacacatactttccacactcacgcccactcacccgcatgtactcacacacaaactccatacatatcctcccaaatagactggtctgccccagaggactcccaaccttcattacagcacaaatattataatgatgtaaaaatgaagcttgaggaaaaaattcatccaatagctattttcgttataatttctttctcggtttcctgggaaacttttttctcctggggaaaatatctaggaaacaaaccttttgattgcacaaacaataagtggtcttttcctctttgaagggcaaaggccaattttggaatagactcatacccctcctcctcctccgcgttattaatccagcagttccctcctcctctgggtctgatgctgcagccctggagtattgcagtatgtgtgtccactcctgctgcctgcccaggattggtttgggcgaagtaaaactgggagttttaagtataaacggcaacaacagctctttgagagcattttagaaaagtgaaagtaaaaaagtagcccaggcatagtggctcacgcctataatcccaactctttgggaggccaaaggcgggcagatcacttgagtccaggagttcgagatcagactggccaacatggcaaaactctatctctactaaaaatacaaaaattagccaggcgtggtggtgcgcacctgtagtcccagctactcgggaggctgaggtgggaggatcgcttgaacctgggaggttgaggctgcagtgagccaagattcggtcactgcactccagcctgggcaacagagcaagactctgcctcaaaaataaaaataaaaacaaaacaaaaaaatagtataaaaatggaggtcttaccccctcaaactataagaatccactcattcattctccccctccttccctcttctcaattaaatttgtaacgaatatttaatttaaaaggtagaaaacaattacaaataaaagttaatgataaaaattaaaatgtttaaccttcatggataaattgtattactttgtgcttaaaacaactttaaattaaaaacattctgaacttttatagaaaattccaattttaaaaataaggactctaaacattttccttgccttgagtgcctataaatgacacagtttttaagttgccacacaacgttattatataaaaatcaagcatcagaggttttgctttaatagttttttgtttgtttgtttgttttttcttctcagatggagtttcgctcttttgcccaggctgaagtgaagtggcatgatcctggctcactgcaacctccaccccccgggttcaagcaattctcctgcctcagcctctcgagtagctggtattataggctcctgtcaccgtgcccagctaatttttgtatttttagtagagacagggtttcgccatgttggccaggctggtctcgaactactgacctcaggtgatccacctggttcggcctcccaaggtgctaggattacaaacgtgagccaccgcgcctggtctgctttaatagttttgataaataaaagggagaaaggaaagaactaatattttgagtgttttctaggtacaaggtgctttccttataaacattttatggggtgagtattaacccattccacggatgaaaaaactaagattctgagagattggagtaatttgctaataagtgatagggctaggtgtttgtctagctccaaagcctgtttcctttccgttacacttgagctcaaagctgcttttctctggccaggg

SEQ ID NO: 1245048 - DNA, 4001 bp, Homo sapiens
gttgatttgagtgaattctctataaaaggaagatttttaattctaatatgtatacacacacacacatacatgagtagtaaatattttacaagtatgctgccttttattttttctcatatgcagggtgatttaatttttgttttactaaattactcttcagaatgcttgcttctgagcttcttagaaaggttttgtcaacataaaaatgtatctgtgtaaataggcatttatgttttttctggtatttttatctttttgtatattaaaaatttttaatctatattccatcaggaacttattttgtgccataaaaatctagttttctccaaaaagcaggcatttcacttatgaaactaattcttttcctaataattcatattcctaaaagaattatgaaactaattcttttccacaaggataatgatccttgtgatcattatcaagttctaaattcttacatatgtttgggtgtttctggattttctattctgttgtattcatttacctgtcttttcagctgttagcaaacaatctgtgattttttttttttttttttttttttttttttttgagacagagtctcactctgtcacctaggctggattgcaatggtgggatctcggctcactgcaacctccacctaccaggttgaagcaattctcccgcctcagcctcccaagtagctgggattacaggcacccgacatcaggcccagctaatttttgtatttttgtagagacggtgtttcaccatattggccaggctggtcttgaactcctgacctcagatgatccacccgcctcggccgcccaaagtgctgggattacaggcgtgagccaccgctcctggcccattttgtgcaaattaatagcgcattttgatatctagaagggcaagacttttctactccattacaaaatatttaaaatgtcatcacaacagtaaaagcctgtgtaatttaaaaaatgttaaaacgttaatagctttatttggtttatgtaaaactggtaagtcgcatcttgagaaaaatgagtcttcttaaattcaagaacataaactatcttcccacctcgaagtttccttctaaggtccctcagcaaagaacatatttacatagacattcattgatatcaaaatggacattggactttatccaaagaatttttagccaagaaggtcatatattatgggaattagttcattatgcaccatttcatagtgtatctaacattatcttttaaaacctgtacattaaaagtaaaaccctgtatgtacttaattttgtgagtttaatcactttaaaattttctacagagtgctttgtgaggggaagtgggagtgaaggagaaagcagctaaagcttggggttgattttaaggtggcctgtgccctctgccctgcagggcgcccccatcccaggcctggggggcctgaccgggaagaaggccaagacctcggggcccaggacggccgccccatcgcccgccactcctccacctgctcccctcgtccccaggacccccagccaccactctgaaggggcgatcctcccacagccgcctcctcctcctgcagccccggctcaggcagggcctggtacctcttcttcatatctcttttgttcaggttgacgggcttcttccctactgtcatcttctccagcttctggacttggccccgggaggcagctgtatggatcttccctagatccccgaagtagatggtcccgtagtccttctcagtgtagacccgttcgctgaaggggttcgggggctccgggccccgcacgcccttgccagcggcagctaagagcctcttcatggctgcagccccctgctagagagagcccgcgcctcccgctcgcccttccccagcccctacccctcgccctcgcttcccgcttacccttccccagcacccgcccccggctcgcactcgcccgtcttcagttcccgcacccgccccaacaccagcagaaatttctgtatcgccaagctcttgaacactccggcctctgtcgggagaaattctgagcagagccgttagctgctctaacgttagagcgttacagcagcagctcacgcgcagctcagcaggctgaggagacacgcgccctggccgcgctccaccgggcaccgcgtgcaggtggcaccggccgctgaggcgctgccgggctggcgggcctccctggagcggaacgtgtggggctccctgcaacacggcctgcttgacatagccgcccctggcccctcctcgacccgcgatccaggagctggaccctggtactgggcaccgtgcagcctccagggccgcgctgagcgtcgattcccgccctcctgcagctggggaccgaccccctcacttaggcgccctggaagcttctggcccaagtatccgccctgctgctggcacggacagggtccgggttggagcccccgctgccgcgtgccatgttcaggtgggagctgcacctgagtccacggtggaggctgcagggctgggcccagaccgctgagggtcgccgagtgcaccgcccttccaccctgggctctgctcttccttggcccgcgctggcagcgcaggctcgcgacctctgggccatgtatagttgccaggatgaggctttgcggcaggttcccgccctcacacagctgaggtcccaccgcctgatttaggcgcagtggcggcgtccgaccctggggttccccgctgctggtggcacggacaggttctggggttgccaccgctgctgccactacaggcatgaaccaccgtgccaggatgtaatctttttttcttgagacggagtttggctcttgacgcccaggctacagtgcaatggtgcgatctcggctcactgcaacaacctccgcctcccaggttcaagcgattctcctgcctcagcctcttgagtagccgggattacaggtatgtgccaccatgctggctaattttttttttttttttttttttttttttttttagtagagacggggtttctccatgttggtcaggctggtctcggcaactcccgacctcaggtgattcgcctgcctcggcctctgaaaatgctgggatttcaggcgtgagccaccgcgcctggcgggttactttgtaggttactttgtactttaagtaacatggacgcaggccggtcgcggtgactctggcctgtaatcccagtattttgggaggccgagtccggtggatcacctgagatcgaggtggagacctgcctggccaacatggagtgaaaccccgtctctaccacacatacaaaaattagcatgttgcctggtgccgtgactcaagcctgtaatcccagcactttgggaggttgaagcgggcagatcacctgaggtcaggagttggagaccagcctggccaacatggcgaaaccctgtctttactaaaaatagctgggcgtggtggtgtgcgcctgtaatcccagctactagggagactgaggcagggagcatcactagaacctgagaagcagaggttgcagtgagccgagatcaagcccttgccctccagactgggtgacagagcgagattccgtctcaaaaacaaagtccaactaaaaataaaaaacaaataaaaaataaacagtctaacaagttgtagagactacatttcattaacttactctgttttctttgttagtttacactaaataaaatttcattgttacttattccagaataggctagaaaggtataatgggctcttttatccattgaagatgaaaaacaggaatgattattcttggctattcagaggtccttgaaggtccttggatcttcacaaaggaactcacaatttctgttcttctgacttttatccctagtgaattgacggagtctcgctctgtcgcccaggctggagtgcagtggcttgatcttggctcactgcaagctgcacttcctgggttcacgccattcattctcctgcctcagcctcccgagtagctgggactacatgtgcctgccaccacgccc

SEQ ID NO: 1245049 - DNA, 4001 bp, Homo sapiens
ttacatgttgacacagcttatggaggtaaactaacctaaatctatgggacacatttagactacagacctcgtgttttcatatttgttatgaatgtatttttaaatagttgtatgtaaagcaaatatttgcacgtaatatatttccttctagtttcagatgttttactaaaaaaaatcatatgtcaatggtaaaacaaatatacttgaaatactttgaaaagaacattggttgatcatacctggcttcttgcttcaatatctgcaccatatgcaagcagttttcttgccattgatatattctcattatcaatggcatagtgcagagcagtgttgccatacatatctctaacatttgggttggcgccatgttccagcaggatggatgcacaaacttcttcttgacattgtacagcctgtcagtattagaccaagaaatagactgtaaattctaggaaatcttccacaggattcaccaactagtcacatttcaatgaggtgaattaattttattctgtgaatttaaattaaatccatcccatgctgaaagagttggctaccatataccttgatcagagctgtcctgttttcactgtcagtgaggttaagctggcattttctggccaccaggtcagctaccactcctggacggccatgggcacacgccaaaagtagagcagtcctgtgagaatgagaggtcgctttaggcaattgtagtgcacagtcccaaaacatacaacgacgcatgcaattgtaaacatccaatagtatgttatccctctgccttcagaacaaatagttacttttcttgtgaagaaaggcaaggtttccacatcccaggtgctgctgaggctgccagggtagaaagcccagtgcccttggtgacaacactcaccccacccccacccccacccttgcatcgtacccacatcctacccaactctacccccaaccagtcccctcactccatccaacccccaccccagccaaccctcactccactcgactccccaccacagtccctcacccaactctaccccccaccacagtccccaaccccacccacccccacaccagtcctgcactccatccaacccccacccaactccacttcccaccagtctcccacccaactctacccccaccacagtccccccaacatccaacgcccccagccactccccaccacagtcccccaccccatcccaccccccaccagtcctccaccccaacccaccctcactccactccccaccacagtccctcacccaactctacccccaccacagtcccccatcacatccaacgccccccagccactccccaccagtcccccaacccatcccaccccccaccacagtcctccaccccttccaacccccacccaactccacttcctaccacagtcccccacccaactctacccccaccacagtcccccatcacatccaacgccccccagccactccccaccacagtcccccaccccacccaccctcacctgacttccaccccacccacgccttcaccccacaccgtatctcccctaccccgaaaccaggaacaggggcttctcccatatccccaggcctcctcccggcttcctgttccccttacctgttcttcttgtccctgtcgttcaagtcattcagcctgagcaagatgctctccatcaccttgttcacatcacctgcgatggcagctttgtggatcatgcccagatccttctgccggactcggtacccgggatttgagaagccatccttgtcacgattcttcctccaggtagccatgcgtctcctgcaggccgccaggaacgaccccctgacctccatcctgaagccagagatcttctcccaggctgaggaacggctttaagacacctcagctcccactcgttttctgcctctctggagcgcagcaccagcacgtaaccaggtccagccgcaacctccgtcagggacactccagtctccagctgctcggaggagcacctagcccagcagagccgttaggcaccagcgcgcatgtgcacctcagccggcccacgaggccatccgcggagaaacagccctgagcctcgcgccctccattcgcgggcgccacgtggtggcgcacccgccctccccccacctcccaccgccccccgcctccccggccagaacccttaggcaccagggcacatgcgcacctcagcctgcccgcgaggcccttcgcgggagctgcgcactctcgcgagcgccgcctgctggctggctcacgcctgtgattccagcactttgggaggccgaggcaggcggatcacgaggtcaaaagatcgagaccatcctggctaacacggtgaaaccccgtctctactaaaaatacaaaaaattagccggtcgtggtgccgggcgcctgtagtcccagctacttgggaggctgaggcaggagaatggcgtgaacctgggaggcggagcttgcagggaaccgagatcacgccactgcactccagcctgggtgacaaagcgagactccgtctggaaaaaaaaaaaaaaagagccaggcttttagtgcccggcagggactcaggaggaagccgcagagccatagatctgccttggttggttctgccctaactttgccctgtgctaccctgggcctgttctaccctgccctgccctgccctgcctttggctctgccctgatcctgctttggccctcacactggccctagtgcagacctggccctagccctagccttggccccgcacggccatagccctagccccctccaggacccctccccagtgccagctgcaggccctggagatgctgcagtgagcccgagagtacaacgctcttcagcctggtgtggcacggcacagcgcagcgcccaggccctactcaactatggtgtcaccacggacgccagcacactgctggcgggacaatgccacctgctggagcaggacgagaacagagacacgccactatacctgtccatcatccatgggccgaccagggtcatcaagcacatagcccatgtcatctaccacacccagcaccttggcatcgtcaacctcaccaaccacctgcaccagacacccctgcacctggcagtgatcaccaggcagatgagggtggtgagctttctgcttcaggtggatgcagacccagcactgctgattggcatggagactcagccatgcacctggcactgcaggcaggccctggtgcctctgagctgctgcatgcactgctttggagtggagctcccgctgtgcctcggctgttgcacatgcctgactttgcagtacacctggcggcccaagcccaaagccccaagtgcctggatctgctggtggacagtggggctgaagtggaggccacagagtagcagggggccaaacagccttgcatctagccacagagatggaggagctggggttggtcacccatctggtcaccaagcttcgggccaatgggaatgctcacacctttgtgggaaacacacccctgcacctggcagctggactggagtccccaaccctcaccctccttctgaaggctagtgctgacatctatgctgagaatgaggagcccctgtgcccactgccctcaccccctacctctgataacgactgggactcagaggggcctgagaaggacacccaaagcagcttccagggccacacgcctcgaccttatccacagcaccaaggtgaagaccttgctgctaaatgccactctgaacaccatggagctagctgcccctgaccccacccagccctgcagggccagggctgtcacttggtgacacagccctgcagaacctggagcagctgctagatgggccagaagcccagggcagctgggcagagctggcagagcggctggggctgcgcagcctggtggacatgtaccaacagacggcctcgcccagtgacagcctcctgcacagctatgagctggctggcgaggacttggcaggtctgctggaggcgctgtctggcattggccta

SEQ ID NO: 1245050 - DNA, 4001 bp, Homo sapiens
gtgtacaaggttgcatctctgaggatcacttttgtagtttaaaaggcaatgattttaccccaaaaaatgctgttcatgccaactttttaagtaattttttaaattttaaaatcatttgaccatactatcttttttcttcacagatattacaacaatttttttaagggggacaatgtttcctgtttcatctctctcttttgtttcttgtgtgtgtggcagctgctgtttgatctgttcattggctctgatttgtttcatgtttcagccaaagattaaaactgctctgtaattctaagcagatgggcctaggagtccaaccctataattataccttctctctttttgccctctgcaagccttccatcccgactgttaaaattctgggatcactggggctctgagtacaccttggcaactggacaggtctggcccagccagacaagttcacaaagcctgtggagctatgcgagccatccacctggggcaggactacaaagaaaacagcatcccggtggcttgtgggttaacaattcttccctttccttgatcctccggagggaaggtcctcagcctgactttcagtcctggctaccatgcattctgaagccggagcccgctacaggtttggggtggctgtggtgggtgttgaggaaggagagccgtgaagtcatgctgttgaaacgtcaggtgtctgaccattagggacagtttgctcaggacatccacatcaacacgacgtgatctgccacggcttgtcaggattatgaacccgacgcgccataaaacctgccttgtccaccccaaagaaattctgtcttggtgttttcagcgcaatttctggaacccgctgaaagggctgatgttctctagctaaaggtttactagaacccctggggaaaagtggcactggaagcccaggaaatgggacgtcaagttggggtgcacattgggagactggtaataatgattaaatcttggctaataggggtcccctgtttcttaaaattacacccagagaacgcaacagtccacttgggagaaaaccccacaaccccgcctcaatcgcgaggcaaagtgcaggcagacaacaaacactagttttcagaaggcagacagacgtgtctttcccaaatgatcagtttctctttccactctcctaaacgcttggaacacatcaagagcctgctgcattctggcattttggaaaaaggctcgcagagccggcgatttcatggcagtgtacagttggaaaatccagcagagcggacgaaagtttccctcggactggatgcaacggattctggacataaaaggtgtctgcgtgggagagcttccacccttccaaaaagaacagtcccgcagcaaagagctccgggcgccctgggggagagcggtcccaagcctcggaaagtgggcagagccccctctcccagggctgagacggcaggcgcggggctcccctcggacccgccccgccaaggggacagtgtaggccgtgccgcgatccagacccgacgcctccgcgggctccgcggcgcccgggctgcctccgccggctgggagcgctcgagtggccctcgggaactcaccgtgaagcaggagggccgggaacaggtatctgagcaggaggcggcgcggccaggacatttccagtcctgctctggggcctcccgcacgccgcgctccgatttggtgcccgggcaactgggcgcgcgctctgccctccgcctccggccgggtgcggccgggccaggccggggcttcaggcggctgccgcgcgccccatgcccggcgggctaggcgcggggctgcggggcgcgcgctctctgggcgccgtcgggcggctgtgggcgccccggcccggtccgcgtcccggcctctctgccgcccgccccgacttctccgcgcccggccccgcgtcccgccccggccgccgcgtgcgccgctctgagctgcagtggccgccaccgccaccgcagctgcagcgtctcttcatatttccagcgcgccgccggccgggcagcctggccgcggcacggaggaggggccctggagggggcggtcgggggaggcgacgccgagccaccgcccccgggcagccgccgccgggggggagcgcggagacttgaaagggcgcgtcgggcaacgcctcccctcctcccactccgggcgcccctcctccccccgctcccctcccgcttccctccttcccctctctcgcctacccctcctcttccagcttcctaccccttccatcctcccctcctcctctcctccctccaggcccctctgcctccctctggctctgcgcacccctttctctcctccccgtcccccattccgggcgcgcttcctccttggagggggtgggagcctttggccccgcaccccgcccgcaaggaaagagaatgcgcgggtcacccttccgcctccgcccactcccctggggaaaggtgttcaaagggggtgcgggcggcgaggctggaggcctggcgtgggatccaagcaaagcggcctgctgagccggggtgtgtgccagcgcgcagccatgggagagaggggagaccaaagagagagtcctggagggttgctgggggtgaggatgcgtcagtgctgggccccctcgtgggtgcggtgcaggtcttcactacaaatcgcctaccccggcccagtgcctggctcctctggggagcacggagaaccttgtcataggccccaacctgggaagggcacggtgtaggaggcaggagcccgttcactttttcctcccccttccactaggcaaatgacttgttgaaacgggagaaatctccgagaaacgctccctgtcagtctaagaacgtgcacttaggccccttcgccgagtcctcttctcttccagagcaaattgaatcaccacaatcaaagctgattttatttgtgttcgcggtcttgtgggggaggggggactacatgggcgtttgagacccaaaggcaggaagagtttcccctggggtccttcgttctccaatgcgggtacaaggcagtggccatctgatttacctggaaggtccctcctctgccaagggcctgcttgagcccttcccctcttccagcagttttccccctcctaaggttaatgtcacctcttctccacactaggataaagagcagacaggagacccagtggagtctagagaacatttcttgacgcaaccgttagtgtttttcatttaaaaaaaagattaaaataaatgcctgatttcccaagagaattctctgcccctttgaacaatgcaataattcaactccttatgtgttagactttcaaaagtagttggatcttagcaacggtataatagtaaaatagatgagaatacatttgacagtttccacttttctttttttttttttaacctgagaaatccatgggtgttttgatgtgatagtgctgacgctgtttgatgtgtcttaatttttatcaccatcattatcatctttccatcattaatacagaggatcataagatgtaccagctgctcagctcacacggatgttgtgaagattaatgtgctcctgtttgcaaatcttgaagatgaaagaatacctgtgtgggcaaaaagaagatcatgaaaacgatgcctatgagcgcaggcattattttgtgttagtcttgctctgccacatctttctgagcctgactttgtacctgatcgttctctcatcccagttgctaggcttgggtagcagactatgatttgtaagatttgaatgtttgccaagggccaatcaaattttcattttaaaccaagaatttgacttcttcacgaatgttgggcagttggaaacgatgtaaacagcatacttggttggttatgcagaacaaaagccttgtcaccaagaacacatatgaagtggtgtttagtttttcaatgtcttttagtcatttgatgccttttagtccatcaaagaatatttgaaacaagcaaatggctaagagagtgttaggggtggtgcatttt

SEQ ID NO: 1245051 - DNA, 4001 bp, Homo sapiens
ggcttttctctacggtctttttgatggctttctgttacatgggcctataggacagtgtgtctcaccttgtggagcttctctggggagggtggtgggcagggagtctgggagagggaggacgccttctcctcccgtctatatccctcttgctgtcattagatctttggagcagagaaggggtggtttgacgatattgatgccaactgctcattctggcaggaaatggctaggattccccttttggggggggggggcaattaccccagttaccctatcatctaagacttttgcccttgtcctttgcctgtgatagtcatgagagccaagaagtatggagagtatttaccagagaatctaattgcagaggaccacgtaaggggttaggcaagaaagccaagtactttaagagattagtattattgtggctttccctttgacaaattgcggggccctcatttccccatgtcactgaatgttcccgggaacctgctttctgcgtgggtagtgaggaaatgcagtgccaaaaagggtgaggggaatttccagctcagcctagcccttagtttgctatggggctttgctttagaggtggagagagaaaaaccctttcttgcccaggcccgggtggcaggataaaggaagagctggctccacaggggggtggccagccacatcccacgcatcccctgccccagtgaagcgaatctcagaagtatgaaaaaccccaggtgggatgacaacgacatcatactctctagaggaaaagaatgtaaagagacaaaaacgatggttgcaatggggcagggagggcaccctggaggagacactaaaaatattcccaaagacggtaaactcagaaaagtcacatattgaagaagttaggagagtcacttctgaactcaccggcagcccagggctgtagccgggatggcaaagggggcaaaatgcgatcataggtgctgtcgtttgtggtcagggttaggggagaaggaggaggacaaaacagtaggctaaggaagctaggtgggcaggaaacgtccttttcagccccgcaggagacaccagaagaggtgggacccagaaaaggccagccccgctgctcacccccttcacctctcacttctgccatttccggagttctctccctgcttggcctgtcatgcacctgtttacctctccagaggtagttgctctttcagcttcaaatattcatcaaccagagaaatttaaaacagtgcaaaacaccaacacaaaacataaacatgctctttaagaatgtttttagcttttttttttttttaaatccacaaaaatctgatcttcttccaaggcagatggaccagcctcacttggctgtgaaccgtgaagtttgctggcagcatatacatatctctggccttatgagggctcaccctagcgtcacccatagcaccctgcttttattgtcagtgttcccttatatgttcacagtcactggaaatgatcaacacaattagatttgcttcttttgccccagaacaaagcgggtttgttgatgtactgaatcggacacattactttctagctgaacactcagcttcatccactccaggacagctgagcgtctgggtgagtaatttttccgaagaaatgtactatagctagattcacctccatagggtaattttcctgggcttttgcagatctgaaacatatggaggatttggctaaaaagcatcccttttcttctaccttctctatgcctctcttctgaaaatgcccagtactcagatctaaaagaaccacccacctgccctatagctgccttccagattctgcctaagaaggcacaaacatctataataaaagagacagtttcatcttttggccctaagcgttgttcccttaaggcaaagaaggacttacccccaccgccttgctgtgggtctgtcactcatgccttccccagccagagtgcagctctcattgcctgccccgcagctccctgtgtgctgggagtcagattacggccacttgtctgattgggtttttggagtgttaggggtggaaagattctgcaccatgtggcaatcgctaagttatatttgaacttgaagtagcttttctgtacctgatcactgtagacacagggcatttcaggaatgcaaaaacatttacttaatttttttttttttgagacagtaatttttgaaaatgaggatttccttaaatctttatttgaattctttctaccatgaagaattgttcagaatttgtcttgtttggttatatgttgtagttgaaattgggcaattattagaaaatgaatttgtataatccagcagttaacatgaatttagatagagacttcagtgcatttagtttttagccaatgaattctgtttgaagtttttgatctgagaagaagcattataagaacaatatataactgcagctccatttatagcacaggcagcactgatttggacaataaaaataaggaaacataggaaatacaggaaaaaagactgctctagggtgctcacctgactgttacattaataatctggggataagaagtagcaaacttaaaaaatatcaaagttggatggggacgaaattatggggaactgtaggtaaatttaacctctggaaacttagggacaggactgattttataatttactggtcccagtgcaaaatgaatgcaggacaccttggtaaaacactatttaaatttcaagattgcgacagcagagcataaataaaggctgggtgctcctaaaggcaggaccttgtgcagctgcgcaggctgcatgcttatgaagacgtccctgccgaaggagtttggtgaactctagaagggtctaaccattagctacctgcatcaccatctcattattattttttctttaaacagatcttaggtgcatgggattggaataatcagaattcctgatttatgacactctgtcatcactcgtgcatgtatggccctcttattttctaatagttaattataatggcttttaaataatgtaatgaacatctatgaacccaccactcaacccaacatctagaacaatgataataactcacattacctacggatgcctcccttttcccactttatatttcagattggattatttttttccagaatgaagtatgacaagaaagaaatacatgagagaagaaagactgttatacttttaaatcccagttacagtttttttgttttgttttcatttgcgtacttgagacatgggaatgggtgaagagctctcattagaaagaggaattcaaaatttgagtgtgactttcagaggagcactttattactgtttcaagcattctcagctaaccaagattgaatttagattcttaagaatatggttgcacacttattattgtacatcagtggtttctacctttaatatgctccctgaaagtcagaataaattctgatgagaggggcagggagaatttatatgaagccacagagaacacttaaaacatttcatattgattcttaaagctgtttaccatttggattttagaatgagatttttaaaaggtgcaaaatgtttgttacaaattggaaaactgtgagtttctaggcagatgtgctaaatgtcattactctgaccctaagacatttgagtcagaagtattttgagggctgtgaagctaaggcacaatgtagccatgtttaggggcttccttgtgaatgagtacggtgggcagatcctcaggaatctacagagtggggctctttagggctaccggtctggtcggtgggtggacattttctaggtccactctttacaggttgtcctaggcttattagcattctctgcacagcctcggcagttgcagttaccattttacaaagtgccagcaaaacttggttaccacggtttctcagcctctttccctgttttctggctggctgatgctttccagggcagttcctaagggatgactgttcccatcaaggaaggggtcaccctcattggctc

SEQ ID NO: 1245052 - DNA, 4001 bp, Homo sapiens
gctattctttccctagtctttatgaaagatgtaataaagtgagggtcaaggttggagaaatgcaagagaaagtagtaggcaaaataatgaaaaataaaagagccccacaggtaattgtcctcaactgtaggaagatgggaactatcaatatgagggttacccaatggttttcccaatttcccatgataactgcaggtccaaaggatcgggcgggattcatgctggcaccagtataattgatctataggaaacaagaaaacaacttcagacattgctgaaacagggctactagcaagtatcattcattgcaatttgctgtcatttgtcacttagaggaacctcaagatattagcagctatatcaacattctcattgagcagttggaaaaattataacctaaaatggacagtcatggctggatactaaagagctactgctgtaaaacacaacatcttcaggccagctagagtgaggataaatgaggtgggattgattatttaaatggacttggaaacttactgcaaataaatgtccaattgcaacagaaaatccaattgctaaagctattgagccagtgacatcagtccgtttggaatcacagctggcaaagatagtaaacaccaattgaaatgtgattatcaactcaaccaggagaccatgaccagcggtaagatttccatgaacctagagaaagaaaaatattccatcagaattgaagcaagagtattttcgatgacaatgtattaatatcattgtgaaaggcacattttatctgtgtaaaaagtaaaggtaagtcttctaccccaccttcaactgagaatttccttctctcaccccccaaaaagaaggaataaatttatattcattttgggtcatcacagatgactgtgattactcttacaacgaccaaacaggagtttgtgctgaatgtccttttctacaaaggaagcaaaatgtgccactgcagcacttaactcgtaaaagaatttcttgagagccttgtgattttataaggcaatgattaaatccattaattaggtttaaattaattaatatatatttcaattaaaatttaagccatgtgtgtttttttttaatcagccctggtgctgagttaacaattgatactcctaatcagctaagaacaaaactaggatcggatgtctatttttttaagcataaccctttatgtagatcattgtacatcttatgaacatgacaagaaaatagtttttttctgctagtgaacaaataactgtaaggaaaatgcattaagctaaatataaagtcaatatagtaattggaatgggagaaggggaggaaaaaaccaacacaattttcgggccacctagattttgttatttttaaggcactcaagagcaaacaatgatttcttacagatatacctaaatactgccagaatcagttttcacactattaagaatcatcaaaaattccctaggagtaaattagctattttagggatgtgcctcatgccaccaaggcattatttagcaaagagtttgcaagaagcttggagtcctagtttgaaaatagctaaagatgctaccatggtgactcccaggcctcccaccacactgggaggtgtgaccagatagaggattcctgctccaatgatggcccccaggcactgggctgcgatgtagaagacagacttggcgatgctgatcttcctggtgcacaccatggccacagtcactgcagggttgatgtggccaccgctgatatggccaaagcactgcaccatggttgcaatgctgagtccaaagcaaagggagatgagaaccatgtcgaccggtaaaggcttttctgttccaccccagttgatggtggatcccaggctgaggagaacaaaaataagcatggccagaaattccgctgtgactgctttccagaaagcttgagtccagacccctttgaaagccaccatgatgttctctctggtacacaaaggtccacacttactgaaaagagaaacaaatcagcatcagaagccactacacccaggtttatgaatttaggtgaagggaacaaggcctgccatcttcgggtactgtgggcaggggctgccaggcgtgatttgcacaccaagaaagaatgcttctgctaaagctccttcatgaatagtcaagagactgttattctagtctcctttcatttaatattcaaagatcatccagtttcacggaaaattatccaaactgtccctagaaaggaaaaatgtctaaatcaaattccttaaaatattaagaataaaatatatttaccttgtacttaattcccttagagcaagtttttaagtttcgagtacattttatatgctacttacatttcgaacataaagcattaaaacaaggtgtgcgtggggggggggggtcgtcttttctagctttgcatttgattgctttgaaatggcattctgaaaatctccccctccccccagactctggattagggggaagccttctaggaaaccagggtgctgaaggctgtcttttgagaaagtgaactcattgaggggagaggagcttctggtgactagcaagggcgatgggaacaggcagggcctcagctgggacagcgacactccctccctctcctttgcgccaggaacgagcaggctgccagcgggaggagtccgggagctgagcctgcccaagggacacgcgcaccgcccagatctgggagcgcggcacggggacgtgtaaacctccgtccccagggagcctggagcacctctcagagggcggagcagcggccattcccggcccgtggcaggctcccgggcggcggccaggtgcacacgcagaagcggccccgcgagctcgcccgcctgcccgccggcccggtgcatcctggccgctggaggtggggagagatgggagtgggggatgcttttaggggaggaaggacagcctctcctcgtgcccgaccctctctcaccccttgaccctgaccgtacaatgcagataaacctgccaaagggagcctggaggctggggtgtgccagcaatgccccggtacctttcctgccttcatggtgcagagctcgggaagtcaggaaaagcgggtgtggttagggaaactgtgggcccctgagcagaaggctctatggaaaacggcttttctctacggtctttttgatggctttctgttacatgggcctataggacagtgtgtctcaccttgtggagcttctctggggagggtggtgggcagggagtctgggagagggaggacgccttctcctcccgtctatatccctcttgctgtcattagatctttggagcagagaaggggtggtttgacgatattgatgccaactgctcattctggcaggaaatggctaggattccccttttggggggggggggcaattaccccagttaccctatcatctaagacttttgcccttgtcctttgcctgtgatagtcatgagagccaagaagtatggagagtatttaccagagaatctaattgcagaggaccacgtaaggggttaggcaagaaagccaagtactttaagagattagtattattgtggctttccctttgacaaattgcggggccctcatttccccatgtcactgaatgttcccgggaacctgctttctgcgtgggtagtgaggaaatgcagtgccaaaaagggtgaggggaatttccagctcagcctagcccttagtttgctatggggctttgctttagaggtggagagagaaaaaccctttcttgcccaggcccgggtggcaggataaaggaagagctggctccacaggggggtggccagccacatcccacgcatcccctgccccagtgaagcgaatctcagaagtatgaaaaaccccaggtgggatgacaacgacatcatactctctagaggaaaagaatgtaaagagacaaaaacgatggttgcaatggggcagggagggcaccctggaggagacactaaaaatattcccaaagacggtaaactcagaaa

SEQ ID NO: 1245053 - DNA, 4001 bp, Homo sapiens
gcttgctctaaacccaccaattaggactcctggtgggaaacctgcttgggtaatgcttggatcctaattgaggctctggtccccaggtccctcactcactctcactctttcctgttccctgcctgcttgttgattgcaagtgtcccggatggctgccccttcccattggccctgagagacgagctgccatcttctccctgggatctgttctttctcttatttcatgtgttttgctgagttgcctcctctgtgtctcacctggccaacacacctgaacctagcttatttccagtcagggctctcttcttatagcatctgccagtacaaacgagtttcctgtaagagggacacccagtcatgggttgaacatgaaggttttaggccacccaccaggataaagaggtatcctgtgaaaggcaaacatcagtgaccaaatcccctgtagctccatcagagcagggttagtttatagctgctcacccgagagagacctcaagaccaaattagagaaaaatacaacagtgagagtaataataacaaaaggattaggtgcctatgaggatttttttttaaatcaatgtatttatgacaggtagcaaagaatctggaagaaagtcggtattcaattgatgttcattctcccacctttctccttattctgaatgttaatctctttttttcagaagaaaattcaaaaacctaaaattcctcaatatatagaaatataaggaaatcagaataacagtgtcctgtaacagaaaatctactacacatatgtttctgggaactatgctaaggaggcattacccaagtgagggttgtttaaagagcagattagactaatttgtaaacagcatgccaaagcattagtctagtactggattctgcttacattattgcatcactggtgtataaacaaagcctttgatgtgtattacaggcccagtttcttagctaggcaaatatttaatttgctatcttaattgttcatttgctttgtaagctgtccctttaagaaaaaaatgaaaagtgaattgatgattggcagccgtaatctaagtagtaagccctttaagttaagagttatgacatggagctcttccttaagctatagataagcttttaatttctgaagacaaaatttacaatttaatatttaatatgttaatattaaaattttaaaaagttgtttttcccctccacctatgtaaggagtaatgaaagagtgggaggaaagagtacttggtaggactggagttgacataaatcagaggtgaggatggtctaagtccttaaactgcagcctaagtaggatgtatgttttccataggtaagaaatgttcagggcagataccagtattactcctgttggctgctcactctagttgtcaaatacataacttcaacacagagaactcctttgaatttcagttccatatatctgactgcctattcaatatccacttggctctgtcattcatatgtcatattcactgtgttcaaacctgaactcgtatttctcactcccaattctaggcctctttcaggattccgtatttcaacacacgaaacccaccatccaatgtaattaggcaagagaataaccaggaggcattcttgacatctccctctctttcacacatcaactccaacacacccccaaggccttttcatattgcctcgttattactactcaaaaggtccaccttcctttatctcttctgccgtgaccctggtcagagctacatcctctctcttgtggattgctgtgatagactcgcaacagttcctcctatgccattcttgatccccttctaatctattatccatattataactaaatgagccctttcaaatgaaaacaaaaataattctacagtgtgaaacggcttacatttctggacatgcttataccatactctcctcctctcctgttctctggcaatactggcctactttggattcctcaaaaactcaacattctattttgtcacaaggtctttggacatgtcagtccttctacttgacctcataattactggccacccatctttcagatctcagtttctacatctttttctcaggaaagcctctttttccctgaactcatcaagataaggtcatgtcctattgctatcaatcctaacactgctgtttcttcttccttcaagtaattttctcctccaaatatatttatattatttcattaattactttctcttctactagattatcatctccttgagagaaaaaaaattctgctttttttttaatcactctaacaccaacaccttccagagtgctctattagagaggctgtattccttatcctgctctaaagggagttcattttagttcccacagttaacttgactggactcataacctccactgcttgccctgctctatgcaacatctgtaatcttggttagttaaaaacagctttcagcagttgtttttaaatgggatgcttagagtctccatatatattccctaactgactcccagataaaatgtggggcaatctgaacatcaaaataaatgacagtaaaagataaacccactaaataaaccaggagtccattctgatataaagaaataacttggtgtagagtgggatgtttatacagtttgaaggtacctcccaagataacagtaattacaaaaatgaaatgactaagttcacactggagaaaccttgcatgtatatatcaccttaagtaagtgattgaagtggacatcatcagtgacagaacaaattaaaattatgagccacctgacaggatgccatgagaagaacacaacatcacaacttgccaaagatgtataacctgagtctaagtcattgggaaacatcagacaaacccaacttgtctgatgtagaggagcatctataaaattacctgcaattttcaagtgtcaaggtcataaaattcaaagaaaggctaagaaactgttccagactgtaaaggggagagagagagagaaagagagagagagaagaaagagaaacacgtttttcaattaaatataacaagtgattctaaactggagggtttctttttttgtcataaaaggtaatctagaaacgatagcagtctgaggactggatgatagtaatataataaaaataattattaattttaatagtatgttgtgattatacagcgaatggctttctctctatataagtgtgtatgtatatatacatataatacctaaagtacttgggagtgatagagcatcaggatggcaagttactctcaaatggtccctgaaactgtctttaaaactgtacttgtgacttccctatatgtttggaattatttcaaaattaaaagaatataagtacatatgacaacttaaagcaaaaatgacaacattgcattgatgtatgtacaacatatgcagatgttatacataaaacaatagtataaaccactgggcatgaagaagaatgaaattctactgctgcaagattcttatatttgatatagtgaatgaagcatagtatttatctaagtagactatgataagttatggatgaatattaaaatgcctgaacagcaacaccaccaattaaagcaatatagctgaaatgtaagcatagaaactatgaagaaattgtgaagaaaaacacagacagataggtaaagagtaaatggatgaaataagatatatcttgcaaacaataaccctataaccctaagaaagccagaatgactatatattattagacgaagcagacttcaagacagggaatattactaagagtattgaggaagctcatttataatgataaaatgagtcaattcaacaaggagtaacaatcataaatgtatatgcacccaataacatagtttcaaattataagcaacaaaaactgacagaacaaaaggaaaaaatagacaaatacacaataaaagttagagattttaacaacttctctcagtacttgttaaatcaatcaaagattagtaagaacataataaatgtgatta

SEQ ID NO: 1245054 - DNA, 4001 bp, Homo sapiens
tagctttaaattccatcagagtaatgttatttattaaataattctctgcaggcagatatggctaattcatgacttattatttttaaatatttataaatcaactcattgttcacttgcttaaaatatacactaaagctctctaatagtacttgattgccactccacggaacctgaataatgcattttcagaagccttgcacatccccacacaattctgaattaatggccgagcaaacaataagtaatgtactatgctccagcaaaaactcattgacaacatcaatctggcatctacttaacacttactgcttacttctcacatattccccacaacttaagtttcctcttccagatgcagttcattaaagaatcactatcacctgcccattcatccacagagtgagagatttagcgattaacgcaatcacagataagtggagaaataacatacaacactacaaaattaagagattaagtaaagggacctgggcactccagctaccaataactagattgcaattaaaaaggactttgtcacttcttcgctgggcaatagggccaattatctaaaaccctttgctagaatccagatacataccagagcaaggcccttcaaccaaactcagataattacttttgacaaatgttctccttgagcataatgtagttactcaaatgcttttcaaaatgactacagttacagtaaaacaatctttacaaagtcaacccaataacacgtcctgctcccccctcccaaaacccccgctgcatgcagtctgctttcttttggccaatttataacagatagtaagctggcgaataaatgtttaatttatgcagccaaaaccctgaaaggcttagcttcaaatgtaatgcctggcattcccgagacacactgtacagaaatatccttttgaaaaatccttttacagctgtcctttaaaagaagataggaagaaaaaagaaagaaagaaaagaaaaacccacacatatacatgcatcaaaccaaagacgccgacgcccctctgccaaccggcatttctatagagacattctttcgatgattaaaacgtaagctccgaaaggttaaagaaaaggaaaagcagccaagtaacaccgcccaggaagccagcagtaaaatacacctagctgtacactcttaataacctcccactacaaatgacactgacccaacttcaccaaacacacacacacccgaaacacactcacaaattgcacacacgtgcacagaatgtacacacaaacatcgagcagagcacaatacctacaaacacaaacgaactggagccacacaaaacatgcacgtatcagtgtgcacacataatgcacacgacatggcacacagacacgcaaccacctagcccacatgcacacgccccacaagtccgtgtcggacacacaccatgcatgcacgtgtaaaatgtttgaactcacaaacgccgaacatacacacagactgtgcacagagttattgatgaaattccggggggtggaggggccgggagggagtggtaattgccacacaaaggtctccggagcggcagagagggaagtcgagctgcgccgagcgctcggaaattcacccgtggagaaggcacagcagagccccgagagcgaagtacggggagaagtgtcccgggcggtcccggacgcggggctcccggagataatcgctgcgcccctccgcgcgcgcacgcacacacacaggggcccccgggcgagcccactcccgcagaataacaaagagcaggagcccggcgagcgggcggcggctcgggctggaagtggccgtctccgccgccgcggaccggcgcggggcgagcggcggggccggcgggaggcgcgggcggcgtgtggggggcggtacgtaccaggcgggcagcctcggcccaggtgcggtccttcttcttcctcttgtctttcatgtttgcatctcattgatggttctgatgatgacgtgggggattccacggggtgctcggggttcgggcgcggagacaatgacccagtgacccggtgacccgcactcgctccgcggggggaggcgcgcgggcggtggcggcggcggcggcggcggcggcggcggcggcggcggcgggtgggagggatggagcgagggggtggggtggagtgggtgggggcgcgcgacggcggcggcggcggcgcgcggcgggcgggccgggggcgggggcggcggcagcagcggggcccgggccaggggcgggggcggcgccggccgggctcgctcgtgcggggctcgcgctgcgccaccgccgcggccgctgcggtgacagctccggggatgctccgctcggccccgctcacaacaatacactctgacgtcacggggaatggcgacgcggccgcacactcaccgcgctcacactcgccgcgctcacactcgccctctcgcgcgcgcacacccgtgcacactcgccgcgcgccccctactccagccacgccctgaaaccctcgcgagacccctctccctccaactcagcccccaaattcctggggcgctgcccactccgtgcaggccgttccacccgcttcccgctgtcccgctcaggccgaaagccgcggacacggtggcctttggaacttgtgtaggagtccgccccgcacctcgacgcctctgtcctgtgcgctcacgcgtgcacactcactcacacacacaccgcactactctcctctgttggactgccttaaccctgtctctgcttggctgggggaactcccagagccttgttgaaagggtacagagccagtgtcttcggatacagaactaataatgtacgtgcaacttaacacaatgttgaaccacctacagcatctcaaacaatgcaggaccaaagagccgtcaccgtggatccacgcgatgccataccgtagggctaattatatttaaacagcgtgtagtcaacattctgtagagtaaaacatgatgcacatggaaaaaactgaaaagctaacgcttgtgtattttttaaattataattttcaggtctgggatacatgaagtgttggattgttatccttattagcgaactaccaaaaaatatgttaagacttaaaagtttatggtaatctttccaacttcatacatctctagtgaattgtttgggtcagtagagttatttaagcaaagaaaaaaatgacgctgtgacccacacagtaattatgtgtatttgtcttgagtatctgaaaacaaaaaggtcacttctactggattatttttctgaagttatttcctgaataggatattaatggtatataaatagtactttgtgttttttcatacacattatatcgtttgatccccaaaacagctcagttaaacatatatttcccctctactgtacaaatgaggaaatgaaactcaaaaacatgacaatgtatccaagatatcttgctaaatcatttttaataattcaagtcttttgaccctaatctcatgttgtttattcaattctatactgcctgtttaaaaatagtcttgtctaaaaaatgaacacttacatctaatgaagagatttatgtctcagaatgagaacaattatagtaaggtgattcctttgagagcactgtcaaatgattggagtaataaaaatgtttgattaccaaaaattaaacagagacagttcataatcataaagagctgcatatgataattcttttagaatatttgttttattaattcattagactgagaaaagactatgcatcagttttagaaaatatcaaaagattatctgcactttttctttttttaaaatggatttagagaacacgctgaagttatccctaggggaaaattttatccatgcaatttgcataattctatccaggtgtattatatttttactttacatttcaaatatattaaatttgaatcacgttcacatctgcttttattttccagaattctctttatggctaaagtaattgatatattttcaaagtattttcattctagtgtt

SEQ ID NO: 1245055 - DNA, 4001 bp, Homo sapiens
gctgggcgtggtggcacatgcctgtaatcccagctactcgggaagctgaggcaggagaatcgcttgaacctgggaggcagaggttgtggtgagccaagatcgcgccactgcactccagcctgggcgacaaaagcaaaactccgtctcaaaaaaaaaaaaaaaaagcaactgttaacaaaatgtaagtgtctttccctttaaaggtacccaatttttattattttgactttagatgtattttaatggagttgcaggaattctaagataaacagcttcctacaaggggcaaaactcaaagtagttccaattttacttaaaaacaacaacaacaacaacgacaacaagcggccgggcacgacggctcatgcttgtaatcccagcacttcagaaggccgaggcgagcggatcacctgacgtcaggagttcaagaccagcctagccaacatggtgaaaccccgtctctacgaaaaactacaaaaagtagcagggcatgacggcgggtgcctgtaatcccagctactcgggaggctgaggtgggagaatcacttgatcctgggaggcggtggttgcagtgggcggagatcacgccattgcaatccagcctgggcgactgagcgagacaccatctcaaaaaaaaaaaaaaaaaaaaaaaacaagcaaacaaaaactgaataaatgctagagttagattagaaaccaagagttgtggcatgtggacttattttactctctcaacaaatcctgcagccacctggaacttccttcagtttctccttcaagttgtaatactgcgactggtcactgtcaattctgaagcctctaccttccataggagctagatgaaaaccgttaaaaatgcttttttgttaacagaaacccaagatgctaccagcggttgttaaggcagcaaaacagccaacatgtttatttcacctttcaaattgagattacttttagaacaaaaaaaaagtgtcagtgtcaatgcgtttacactgaaatcatgttaatttcaagggaaacaaataacgaagggtattaatccttacagccattttccaaccttgttctcttttacttgaattctccatcactaaaaattactcaaaaccaggtggaaaactcaaggacaaattctttaaacacgtccaagtgccacaaagcacacactctgccggagagacaatttagaaaccagcttcactgttgtcacagtgctggccacatgaaatggttctttgcacctgcaggacgttttcacggtcgtttcgtattcagcactaagagaaagcctacgtaagtattccaaaaaccaccttcatttattcctttcctctaaactgagctccaggcagaggtgaaatgctgggcctgctgaccttcacacaatgtcagactccactgactagcttcaacaagagctgacagcagttttctgaccttcagcgggacgcgaccctaagaatcgaaagagaggaacctcaccgattcagaacaggcctcggagagctagcgcccaagccctgaccttcacccaagatcccccttctagggccgctgtcagccgaagacaggaatcttgaggccctgtctctggacaccatcgagttaactgtctgccctgtaccattctgcctctgcgcaggtgacgagcaaaagggcacctgtgtcgcctgctctgtccagccggagaagccacgggtgcaagatggcggcattcgccacagcccctcgccctcctgcagagagcgcccgagccggcgcaccaccaccctgcagccccacccggccgcctgcatcatgccggccttcggtgctcaccagtccggcccgccgaggaagggcgcggaccacggccgcagcaacgcgcacggacagcatctttgcagttactccgcaggcggtacttctgcagccgcagcctccggactgactgggacaaaatggccgagccgcaaagaaggtcaagacagccggcccacctgacccggaagtactgcccctcgcgttcaccacctctccccccgcccccgccgccactctgcattttttggcaggttacttatttttttatgtaacatttttaagtttaaacctcaaaatgaatgattagatatattccggctttggtcctggcattcgttatacatttattttggtcttttgagtcgaccttgtggttgccccgggtgaccacgtgggtagctgaatctgctaagcagcagttcccaggccccatctggtgctagaggatgagggcctcacccgtctggggtcgcggctgtcttgaggaccagggcgattaatagtgtcggtagtgttagaccgtggtttagcacgagtagcaacagtgaacagctaaaccccgggactggccaccagcagggagcctcccacggagcccgttaatctgcagatcttagccccacttcagaccctctgagtcgaaaattcggggcaatctgaatttttaacaaacaccagcaccgttccacgtgatccgatctgcgctcaggttaaagattcccagcttttttagattcattctaaaagaatcctgtcagtgaattagagcaaactgtttaaaaatcctgataaccgggggaggggagcatcaagataaatagctaatacatgcggagcttaatacctaggtgatgggatgatagttacagcaaaccaccatggcacacatttacctgtgtaacaaacctgcacgtcctggacatgtattccggaactttaaattaaaaaaaatatatcaacaatcacaaggaggcctagaagagtcattgccaatcctactgagaattgtccagaatcagaagtttacaccaggataggacgaggactcgctttttcctctgccaacatctagttcatgctattgggaactctgcttcttcatttggagtcaaagggagatgatgaaaaaacactttctatgcttacctggatgggctttttttttttctccacagaattaccatactgagatttttgtgatatatgcaagatttgtgtgtgtgtgtgatgctggttattattatgtcatagtggacacttattaacgttgccttcacttttcttttttttttatttatttattttattttatttaagacagggtctcactctgttgcccaggaaagagtgcagtgggtttatcaccattcattgcagcctggaactcctgggctggagcaatcctctgacctcagcctgtgcccctgtggtcccaccaccatgcctggctaatttttttgtaaagacggcggtggtgggcagggcgtggggggaggtctctctatgttgcccaggctggtctcgaactcctggcttcaagtgatccttcctcctcagcctctgcgctgggcccgcttttcaccgtttggagaagcattttcagttccatcccccaaatcctggcttacacctagaacctgaattttggtgaggcaaataaatatccgggctacaagggtcatctcctgaaacatggcttgtaaacacgtgattagccatccttttctctagtatcctactcttttcaaggtaagccatgggaaaatagagcagcagttctcctgggaatcaggggtacaaaaaggctgtccaagccaggcgcagtggctcacgcctgtaatcccagcactttgggaggctgaggcgggtggatcacctgaggtcaggagttcgagaccagcttggccaacatggcaaaaccccatctctactaaaaatacaaaaattagcccggcatgggggcgggcacctgtaatcccagctactggggaggctgaggcaggagaattgctttaacccgggaggcagaagttgcagtgagccccagattgcaccactgtcctccagcctgggcaataaaagtgaaactccatctaaaaaaaaaaaaaaaaaaaaagaaagaaaaaaagaaaagaaaaagaaaaaggctgtccaagtaaaataaaatacagagacaaatctataaatttaaaacattt

SEQ ID NO: 1245056 - DNA, 4001 bp, Homo sapiens
agacataaagataactttttttgccccatactgaagggctgcaccagtttatctgaaatttggttacagagcagagatatatttagtttttgtttttttttgttttttgtggtggattctcactctgtcgcccaggctggagtgcagtgtctcaatctcagctcactgcaaactctgcctccagggttcaagtgattctcttgcctcagcctcccaagtggctgggattacaggcacgtgccaccatgcctggctaatttttgtatttttagtagagatggggttttgccatgttggtcaggctggtcttgaactccggacctcaggtgatccacctgcctcggcctcccaaagtgctgagaatataggtgtgaggcaccgcatccagccagagcagagatatgtttgaagcaaaaagaataagcaagacaggctgggtgtggtgcctcatgcttgtaatcccagcactttgagaggcccaagtgggagcatcacttggggccaggagttcaaaaacagcctgggcaacatagtgagaccctctttctacaaaaaatacaaaaagttagctgggtgtggtggtgcacgcctatagtcccagctactaaggaggctgaagcgggaggattgcttgagcccaggagttcaaggttgcagtgaactgtgatcaccactatactccagcttggacgaaagagcaagaccctgtctctaaaaataaaataaaataaataataaataagcttggcttgctagtaagtttcctttgaaaagaaaatcattttaggctgggtgtgttggctcacacctgtaatcctagctctttgagaggccgaggcaggcagatcacttgaggtcaggagtttgagaccagcctgatcaacgtggtgaaaccccccgttctactaaaaataaaaaaattatccctgcatgctagcacaagcctgtaatcccagctactagagaggatgagacaggagaattgcttgagcctggggacgggggttggaggtcgcagtgagccaagatcatgtcactctgcactccagcctaagcgacagagaaacactccatctcaaaaagaaaagaaaaggtcgggcgcagtgcctgtaatcccagcactttgggaggccaaggcgggcggatcacctgaagtcaggagttcgagaccaagctggccaacctgatgagatcccatctttactaagatacaaaaaattagctgggcgtggtgatgcacacctgtaatcccagctactcggaaggctgaggcaggagaatcgcttgaacccgggaagcagaggtggcagtgagctgagagccgagagccgagatcgtgccactgccctccagcctgaacaacagagactccatctcaaaaaaaaaaaaaaaaaaaaaaaagctgggcgcgctggctcacgcctgtaatcccagcactttgggaggccgaggtgggcggatcatgaggttaggagttcgagaccagcctggccaatatggtgaaaccccgtctctactaaaaacacaaaaattagccaggcgtggtggcgcttgcccgtagtcccagctacttgggaggctgagacagaagaatcgcttgaacccaggaggcagaggttgcagtgagccgagatcatgccactgcactccagcctgggcgacaaagcgagactctgtctcaaaaaaaaaaaatgtccctagtttttaggttgggggaactaacggatcaagttaagattgcctcagctcatattgccagggtagaatataaattctgagtggatgcaatcaatgtggaagaaacacaaacatcttgctaagcaagaaccaaacgtttcaagtacttttttttaacgacaagtgattcaaacaagaaataaaaataaaagaaagaaaaaacaacctggttctaggcggctctatctctcgtagtgttgattataccgcggaaggcgggaagagctgggaagtggcaacgaagcgaggcttgcaatgccagagccttcgaccagccttgcacaggggctcaacggccaggagtctcaggtaaaaccacaactcccagaaatcccgggcccggcgaggggcgggtgccaacggcgtgtgggcggggcctagggagtgagcggggcgcatctcccgctaggagttcctagtaaagtggcgggagccgcagctatggagccgcaggaggagagagaaacgcaggtgatggggcgggaatggggatcgttggcctcctggaaaacgcgtttttgacacccccgcgccgacagcgggtctcctgtgcgcgccacgtctacttttctctcccctattccacacatccgtcttttagtgccgccgtcactatctgcaagccccccgtgcttagactctcctgaaggcctttcccttcctgcccgggcctccccttgtttggatctggcccgggagaggcgttgagcagcccgtgtccacagactctggagtgggacttatgaagccaaacccgccttccggttcgctgctcagcccggcggcttccacatctgaactgcttccgcgccctgcatcccaacactgggagcctcccggcgcggcggggcttctggtgatcgagggacaattgcttttttcagaccatgcacggtctaataatgcgttcgcattattatggtctattaagctttaaggtttttcaagcgaggcaaattgttagcctgtaccgcttttgcagatttggaaaagaacggattgttctctggtaattttcagtattgtacgtttctttgtgtacttgctcactttttatttcctgatatctagtatctccctaaagacaagtgaggttgtgaagtaggactccaaaatagtcacagaaagcatttagtttgcttttgatcacttctttgtcatattctcatcgagccattacagtaaacaaggcttataatatttgtctttcttttaatggttaggttgctgcgtggttaaaaaaaatatttggagatcatcctattccacagtatgaggtgaacccacggaccacagagattttacatcacctttcagaacgcaacagggtccgggacagggatgtctacctggtaatagaggacttgaagcagaaagcaagtgaatacgagtcagaaggtgagattaagtccagagttttgaacgagaataaatagaggtaaccaaattttataacactaaagtatacaggattaatttactgtagactacttgttttgctcctttatttttcccagattttcttccactctgttatagtagtaactttattgttttatgtttatatatatgtatatgtatgtgtgtgtgtgtgtgtgtgtgtgtgtgtgtgtgtgtgtgtgtatatattttagacaatcttgctctgtcgcccaggctggagtgcagtggtgtgatctcagctcactgcaacctccatctcctgggttcaagtgattctcatgcctcagcctcccaagtagctgggactacaggcctgcaccaccacacccggctaatttttgtgttttagtaaagacagggtttcacaatattggccaggctggtctcgaactcctgacttcaggtgatccgcctgcctcagcctcccaaagtggtaggattagaggcatgagccaccctgcctggccagtagtaattctctaagtaataaatgttattatactaaatatcttattggtactctgatagcaaaacagtaagccttaaaagagtctaaacttgttagtctgacacacaagatgccttgtggttttttacttacctatctgttttttctgtttccggtctccatgatttagtcatacggacctatcaggacacctgaggtggtggccatgaaatgtgagacttggacgaaattactctatgactacgtatcaggagattgcattagaattttctgctgggcatatatagtttgaaaaagtgcattcaaggccgggcacggtggcttacgcctgtaatcccagcactttgggagg

SEQ ID NO: 1245057 - DNA, 4001 bp, Homo sapiens
ataacatgtgcacacaggtgtgtgtgttccttaaaatccataaggaaaacttgaaagcagccagagctgacctcacacaggtggcatctgtgttggacagtaataaccaaaagagtcttgctcggcccttaataacccacgcaaagaatcactaaaagttactaaaatacagccactggaaaacgacgaatgaacaaagtggttaatgttccttcccaaaattatagcaaggaaaactccaccacctaatgaaaatcattaagagaattcagaggagttaactgcaggcaggcgtgacttctcccccagaaagtaatcagctaataagcattaatcatcttgtgcacagtctgcgcatttataatagggtttaataaagccttcaacaacaggcccagaattaatgaacggcatcttaggtctaacacaaaagtattccttagcggacgaaaattagcgcttctacttcacatttgctgtcgtgtcccccatatatacgggctcgtattcactatccctggaggctttatcacgcgtggttttttttagcttttgttcctgaaagcagttaaccttcatcgataacctaccgtgtgccgggtgatctccaaacatcccactagttttttctttttttagtttcccatgggtagtggcaaaattttgaaggcaatgcaaccaggaagatgggagcgaatattttctcacgccaacagggaggccagtttccgggagaggaactcggcggcgtctggagctacccaggaagagcttgcagcccccaagggcagcgcgtgcaggccaagggggtcgggtagggttgagcgggtactcaccgggcagaagcgcggcccaagtcctccttacttctgcgtgtcaatcccccttccccaatttgcatccttactgcaatccagtctcccccgtacaaccgtcacggatctgcgctccgagcaccgcccccccccgcaaccagccaccaacccccggcagggaccacaggcacacgcctccgtcggaaaagttgggcagacacttcagaacttttctttcactttggggagaaggagggagttggagaagtgggggcgaggggtgttaaagcactgggccattctctgcaacatctccccgcgccccccaacaagttgcccctcctcgtgcacacagcgaggtgacagcgcagggcaccaaactgctgagggaaggagatgcctgcagccatctcagcggggctggcggacgcgacccgacagtcaccggaaaaacagtggtgtcggtcttccccatcacctcccctccccatcccacaataaagcgcacggaagatgtctgggagtacctggccctgccacaggagctggggaggagagcgatctcaccccctccatccctcccggcaggtgggccgcggtcagatacgtttggcccgcaagtccttttcggacacgttggcatctgctcccaaagagcgccccagcaggacccggtcaccggggtcttccagaggggcggtagccaccgcacaggagccagcggcatcccccaaggagccgcaagccctacctggcttaacccccggacatgtgtgtcgctaccgatcgaagaacccaaacaccccgagatttccctcctctaggcaggtgaaaaccccacggaactctccgcagcgctgcctgcccagccggccgtgtctcgccgtccccgaggcctcgggggctcccagcacctccacccaaatcccacctgtgcgggctcgggagtccgagggcgctgacagctgctgccgccgcatcccggatctccaaagtgcggcgggagcggccagggaacctgcaggacaccgccgggccaaggggcttgggaaggtctgggggcccccggcgccgcacccctgcttacctggcgttcgctgggccccggctggggcatccgcctggtgcgcgccgctcggagcgctcgctgcgcacctggccgctgccgccgcccgcccggccccagccctggccgccgcgctagcgctgcatggcgcacgggggctggccgggggcccggggaagcgtgtctagttggcggcggcacctccggctctcgcggctcgctagtggctcccccgcctttccccgccccgcgtccgtgcacccttcctctgcagccgcccttttgcctccgctccgccggaccggccaaactggtttctccgctcggggaggtgcctctggtttccctccagcagccgcggccgccgagcctcgctggggctggggctggggctggaggcgggctcggccttctcccctccctttttccctccctagggcggagaggggctggactgcaagccccggggcggcccgaggcggcccaggtccagctcctgccccacgccctccgtgcgtcctggagtcaggtgggcacccctttcagtcttccgagcccagcctacgagcccttgcctcgcccagcctgagacccagttgctgcggctgctcttagctccccgggggccgcactcgccaccacacctctccagcccagcgtcactttcccgctgcccttggctggcttggccgtcaccccgggtcgaggactgagccagcctggaaagctggcggggccgcggcgcgcccgggacctgagctccctcggtaaggggagctgtgtcctcttgatgccaagtcatgtttggggaccggtcaccgaatgcgcgtcaaagttcgccgcgtggagggtgaagaaagaggctgcgcctcaagacttccagaaacgtatcctgtgattgcagccagcaggctttctgccgagtccaaacgctatcgagtttttttgggtttggagtcaaaaggagttaaggtgcggcccgtgaaccacgcggtgtaggtggaaattttggactcagcgcctcgttgctggctggtgtctgagcgggtgaatcgtgcctccctggcagtatagacattaccctccttcttgagtagacttttgccgctccccgactatggaccgagtcgttgggataagaatggaggaaaatcaaagatcagagtttgcttaaaatgcagtaggggagccaggactcccacacgattcccagtcacctagaggctcacatctatgcccaagagtccagactcccaactgggtcatcacagaggcttcctacaggaggccgtgcttgatgggactcaaagatccacagctttaaggatcagagttgtgtagagagggtattcaacgggtggccaactggtagaatcttgtctgataccaaccccgaggctgctctaggcttctttttcatgagtcaaacttgatctctgactaggtgctggtcagtcactcaatctatccaggcctcagtttcctcatttgtaaaatgagattggaccagatggtctcttccagcacttatattctgaagctaacgacagaacaaaggtaccgatgcaagagaacatagggcctgttggtgacactggttgatctaagacatttagacttgtttttggtagcacctgcaaaccgttgacaatttaggaccgagcatgagcatgatcaaggttgtgttttagggaaaataatagggagatagtctagagaggataaaactgaagatgggagaatcacttgagaggctgggacagcgacatacggaggagttgccaggggaagtaaaaaggaggaaattcaagggacaccacagaagagagatagggcacgaagtggccacaacctgcaactgactgggagaggggagcaatggaaggtgagccaggttctcaagactgggttatggcatgcaaggagcagcagactccaaaggagggaagccgtttaggaagactctgcccctatctggataaatgccagcaaacctaggaatcaagaggggattccagactaaagggggcaccccctccttgcagatccactaccaagtgctcaacctgtccaagaaaatgttacatagaagagactaaacaaggacgcatccaatctac

SEQ ID NO: 1245058 - DNA, 4001 bp, Homo sapiens
aagaacaatagaaaaaggggaaatatgcgtatgtggtatatgcaatacactatctttatcatcatgagttttataaaccatatttgatgactgacacaaaaactgtaacaccatctgatacccaggacatgatacttaaagtgaggacctaagtgaaagaagggtttccacacttgactggaagtggtgaaatacagcaatacaccatggtgataagtcacatttgtatattgtaatacccagagcaagcactgtaaaaactataccaacacctaatctcaaacacactatagggataccaaaaaagtgtccaagtaacccaaaaagtggcaaaaaaaaaaaaaaaaagaaacaggaatcagaatgagaatcagaagaaacagaacacagataataaatggcacacttatattctaacatatcagtaattatcgtaaatgtaaatggtgtaaatatgccaatcaaaagagaatggcatagttgataaaaaatataagatccaacaagaaactcacttcaaattcaacataggtaagttgaaagctaataccatgcaaacattaatccaaaaaaaagcataaatggcgacatcaatatctaataaagattttagagcaaagaaaattaccagagacagaggaacattaacaatgaaaggaacaatccaccgagatgacaaaaaatcttgaatgtgcgtgcaccacatgacagtgcttcaaagtacatgaggcaaaaatggattcaatctgtgatggaaacctattttgaaacaggtggcacatttccaactaaagaactcctaaaattaaacagatttactaacacaattactgttataggtaacaccagaacccacttccaaccaagcactgaaaaaagggcaccttacacatgttctactgtaatctccaataatcccgtaagaaaaaatattatccagcattttacagatgaggaaaccatggcttgagtttaaataagttacccgagagtaaatcgctagtgggtaaacactcaaatcagcgttataacattccagtatgtactttgagctatatgttagtctctcaaatggccgaaaacaaaaattattcaaaaactcaaattctgaagcaactacatattgagtgaaattatgttttcgacaattcctctggaataaaacttcaaaaactataagaagcaacactttttaaaattttcttttctttgaatgagaaatgttaaatatgagctaaatgcaatctcgagtatgaaaggtctgtacactaattctactgctaacctgtgaccccactaaacaagttaaccgttctcaataccccatttccctttcgtaaaagcaaaattacttgtcgacaaaaagcactttgtatatatatgtttaaacaaaaagtgtgcctagcaaagatatcgaaatgtcgaagagaagtcatttcaataagaagtgtgtttttaacaaagcaattaaaagttacatccgtcaccttcacaattcacagggctacaagaacaagtttcggagactctgaagtatccgagaagttagcacttttgatccccgtttactttaggagagcagccacccctcaacactggaccgcggttctctgctcccgttctggctcctacgctcggcccaggcgtcccggggatgcagccgctcgccccggcagctgcccgcggccctcaccaccggcggacgccacagctgcggcgcgctcagaacgccaaggactcccggctcccagcgaacagatggggcgcgccggtagcgaccccagacccgcccggctccgggttcctgcggtgggctgggggccccggggagcgtcggcggggaacggggccagtgccgcctcggttacctgctgtgccggtcggctcccggcctgggccccgcggcgctgtagtaggccgcgcgtttgcggttggctgcggccgccgctgcgctacgcaccgggtaaagcgggatctggtccgccatgttccgaccgcccctttcccgcccctcccactttcccctcaattcgccaccttttccccgccctctcccctcagcgccaaccccggctgaggcgccgcctgcgggccttccccgcctccgccaagcggcgaggtccgatgacgtaacgagcggcggcgcggaaggtgtggcgtccctaggccccgccctcgtttggcgtcggcgcacgatgacgtgcccagggtggcaaaagcgcggcgcaggaggcagtggagtccgggcaatgacgtcacgagtggctaaagctgggacggggggcgtcgcgttccgaggccccgcccccgcctcgtgacgggcccgatgacgtcaccgatcggcggggcggggcgcgcgtgcgccacaggctggccttccggtagcgcgcgagggcctgcacgtgggtcgtggttcgacccggcgcgctctggtccgcgggtggaagggcctcgcagccgtctcctggaagctctgccggggacacgcgtgggcgcgcgcggcctccttagcggtccagagcctgcgctgccagtagtacgcgcgccccatggctgtgtggggccccacgcgccctcctcgccgcgcggcttcttgcttccgccccgcgcttctccagcctgccttcggtgcccgcttcctgcccgcgcccttggaaccgctggtgtctgtgcgttcacaggcagggtcgtgctacgtggcccgggcccccaaagcgccgcgactgcaggcgcgcccaccgcgccgggctgaatttccgagatgttcttgtcctgcttcctcactgctgcttccttctttctctggttctgggtctttagcttgattccacatcccccacctctaggcccacagcctgctgaaaagtcctataggcgactgtcagaaacgaggtttacaccctcagtctacacaagaaagcaaaacgatattgaataaacgaatacacggctttggttgggtttgtttcatttcctgtcccgaggacagctcccttccacctccatcacccgctgcagctggaagccggcaagctgatgcaccgctcacctcacgtattaatggtttactcactttgtgtttttttaaacaatgtttttctgatattccattttcatgacatataaattttgtctatgtgtttgaaacactgttcaacatgaacttataaatgcttttcttttctgttttttggagatggggtctctgttacccaggctggagtgtaatgttttgatcacggctcactacatcttccacctctcaaggttcaggtgatcttcccccatctgcatgtattactttttcattataaaaaatggtctttatgaatatgaatattcttaatttgttgctgccactctgattgccagtttgcttctcagctgcttttcatgtaacctgaatacatgccactccacagacactaactactttcaaaagacgccaatggcctcctaattgacaatggcctcacccattatttctctacctcactctcagccgctgacactgttcacaccatctctcacccacattcaacaactgatattgataacaccatctcattctcacagcactggcactgtaacaccatctcctcaccctcactcagtacctgacagtgataacgccgtctcctcaccctcactcaactactgacagtgacaacagcatcttctcaccctcactcaactactgacagtgacaacaccatctgaccctcagtcaacacctgacagtgacaacatcttctgaccctcactcagcaactgaaagtgacaacaacatttcttcaccctcactcaacaactgacaatgacaacaccttctcctgaccctcaactactgacagggacaacaccgtcttctcaccctcactcaataactgacagcaacaacaccatctcctgaccctcactcaactactgacagtaacaccatcatctcctgaccctcactcaacatctgacagtgacagaccatctcctctctctcactc

SEQ ID NO: 1245059 - DNA, 4001 bp, Homo sapiens
gaaaaaaactttctccaaaatctttcaaagttaaattcctagtaaaaaaacataccccaaagatgtccaaacttttaaagagttacatgagaaagtaaaaattgctatagaatgaagagttaatttataagactccaaaatggcaaaaaataaagaaagctcttgttgagtatctagataatatcaaatccactaagctaccactgtcatttgtactataggcttcaaggggtaggtttttgtgaggttttttgttttttctggcctaaaggaaaactgcaataatgttaaaatattcttcaaactttaccctaaaacttctattttgggatacgtcaacgtttcacaatgcatttcttcttaaacatcatcatctgagtttatacacctcactgaatccaaaaattaattattaaagaaaaagtctcatagtaattttaagaaatgaagcagtctggattaggtttccatcttccttccctgctgcaattcactgcaataatctactacactcaagacaatgccctgatcattccatctgaaaattctgcaggtgttttcactctgtaaggggcattacatttttagctaactcggaacaaagagcactggctcaaacgaccacagtgtgtaaggagaaatgagaggagatgctcactgttactaagtaattgaacattaaatacgtaatagccaggaaaaactcagaaaagttttggaaatatgacatattttaatatgcatgtgaagttcataattctcattcactagaattaacgccgcattggctccttttcaacaaatgggggacgaggaattcggatatttaataaagaagttaattcaagcagttttacaaaagtgtattttgcaccaaaggccaaaaaatgataaaccggttaacattttaaactacaagttcccttagataacggttattttaatcactattttctcagaagtcatcctaacaggtagcaaaggcaacgtacccttgaaaataacacccaagcagactaaaataatggagcattgtttttacaagacaactcatcgccttaaaattccccaagtatggcacaaaaagaatggggtccactgaccccattctaaaaaagcgacctaggaccctagaaaacacacattgttggactcaatcacattccctgctgctggctcctccatatttttacaaccagttattatacccgagagtgtttgaataaaactacgattaagcactcagtttaggcttaaagacttaacattaaatggataaagctgtcatgaacactcaagaaagcgactagggcatcccgggccatcacactaattttgctacgtctatttaatgcaatcttttacgttattaacaaacatgcattaacaaaatgcatgcattaacaaaactcacataccaaagccatgccctgaagcagtttgacacgtctgaaataacatttaaaacaaaacgcttttctgcgggcccctgtttgaacagcttccaaatcccagaagtaacatcggataacagcctgcgctggctgtggtgtgaccaggggaagcgagggtgtgtctcggtgcttaccgatgcctggggccacatagatgaagtacagacaggacgaagagagggagaagaagaagatgaaggcgaggagagagcgattggaaacccgcatcatccgcctgagcacagacatcttcctcttccctgccagcagcccaggctgcgctctcaggccggactcggggccactgtccaggccctaaacttccataaatgtgctgagaaccccgagactgcagcggggtccgcgcggggaggctctggggagagggcccgagcggaaaagaggaaatgggagggagcggacggaatgaatgggaggccagagagtcgggggaggggaggcgcggaggccgagggacaagaggtggaggggggagaggggactgggggctaggggcccggggacggcaggacggaagaaagccggggaagggcgaggaggagcgttttctccgccaagcagcggcgggaggaggggctgcaggtgggaggaggcgcaggctgcgcgccgcggcgcccctgcggagaggggcagctaactgcagcacgcccggctccgctgcccgcgcccggcggggtcccgccgcgaagccccgtgcttaaggtccgggccgcccgcgtccgctcggcaggccctgcgccgcctcctactccgggccgcggcgtctcctgcctgcgcggggctagcgtgggcgccggggccgcaaccagcgcgcgccacgcgcgggggcccgcgggggccctcggggccgaggagctgggcgctcgcctgcaccgagccgcctcctcatgccgcgccgggccccggcgccccgcggccgccgcgggagctgagcacaggccagggcggcgtcccggccagcgacgaacgcgctccgactccggccgccgccagctgcctgcctggccgcaagggcggcagcggcattaccgccgcgcgcccggggtgaggcgcccccgccgggcccgcggacaccaggcgaagagcaaccgggcgacgcgcgctgcgggcagagccggggagccggaagagcagaggccgagcgccgtcggagccgcgtctggttggagaaagaggcggacgtgaaggggcgggggagccgcggaggaaaaccgggaccggcgggaacgtctcgagacccctgcgcgcttcgcgcgctcgctcggaactcggcaggcggcgctgcgccgggccccgaggaaacctggaggtccccgccctccccgcgcccgaaacaccgcgcgtcctgataggcccgcgcccagcagccccctccccgcgcccgccgcaccggggccccaccgcctcctgcgtcaccgccgcccccgcccgcccggggaccccgcggtgaccgcgctgctgggggttgagggacgcgttgcgagccccggatacattgtaccctgggggtacataatgaaggatgctgtacctgaaaggaaaagggcatctccaaaaggggacttcgcgggtggaatttccttccaaaatcctcgaggaacaaggtgtatttccgacctggattaatgaatcccccctcctatcccgcacttcctgtggaaacagtgtcaggatgtggcgcggacctatgtgcgtcccttataccaggacttgccttcaacgctgaaggtgaaccctgggtcatcctcgctgtattcaggcggcgctgcaaaggcttctgggcagccaataggcccttgagcgcctcagccccatcttgcttcagtaggcaaacggacgggtgtcttcatccacctcctaggccgtggtctacccttcgttcaaatgtttcttcctgctagctgactgtccaggtccttagctgtatcacattgttcaaatgtgtgtgcgcaggtgtttctttttcaactaatcatgcaggaagtggcgggatgccttactgccattatttgctgagtatttccagatggaactgtagttgatagccaataaatttggtacgtttttatcgggatgcgcatgccatagatcgtccctgagataatgctttgcaatgtggaacctgaaacacctatgtataagcccaagcctttcattaatattaactgtgagacccctggaagctactactttgtgtgagcctgttttctccgccctcaaacagtggatataatacccccttgcaaggctgtgagattaaatggataactgtgcataatgctaagcatggtgtctgggacgtaagaggttccttatatcccattagttcactaggtgggatcaccaagttgaaattcattttttaatattttgcttgttggagtactcacaactcaacttctctggctaatttgatgtttaatttgaaaggtaatgacactattttgtaacatttttagatgcttaagggaaatttgaaatgcaaagtggaacaacattaaaaggaaactcatttgtaaaataaag

SEQ ID NO: 1245060 - DNA, 4001 bp, Homo sapiens
gtagcaaagccatagcctgatactcctcaggacacctcatcacgcccactgggaacatggcacacactggagattccagtccaaggactttggaatgtcaacttagctctttacaaacacaactaagtttttcagggaaaaagacttacattggttttcctcttttggaaaattttaccgattgatgatgcccttggtcttctgtggagtctattcttctaatcgggttgttctccaattttagtgtacaacgggcttgtttcaggggagcttgtttgggatgcagactgtcaagacccaacctggtatctggttcataagcagtccctgaaacctccctccggttccaacaagctgctcaagccaggaaacggtggtcctggggactcctggaccttcagcttgagaaacactgaaggggtaccatttaccaccacatcctactggattacaaacgctagatctttggatctccacgactagcaagcaagttaaagacttttagatggcaggcgttatcggtcaggttgggagtgaacgctttgtccagaggaggaggtagggacgccgggaagcaacaactctgattttatttcgccggctccacagcctcccattgccccaggagcccacccgcactccaacccccgcatctcggacctgtggcctcagcccagactcacatcaccaagtgcacctacccagcctccgttatcctggatccaggtgtgcaggtgccggttcaggtactcagtcatccacagggcgatgttgtccaccaggggcgacatctcccggttgacgctctccacacacatgaccccaccgaactcaaagaaggccacaatcctcccccagttcaccccgtccctgaagagctcctccaccaccgtggcaaagcgtccccgcgcggtgaagggcgtcaggtgcagctggctggacatctcggcgaagtcgcggcggtagcggcgggagaagtcgtcgccggcctggcggagggtcaggtggaccacaggtggcaccgggctgagcgcaggccccgcggcggcgccgggggcagccggggtctgcagcggcgaggtcctggcgaccgggtcccgggatgcggctggatggggcgtgtgcccgggctgggaggagaagatgcccggtgcgggggcggcccccgggggcgcggcgcccacatctcccgcatcccactcgtagcccctctgcgacagcttataatggatgtacttcatcactatctcccggttatcgtaccctgttctcccagcgtgcgccatccttcccagaggaaaagcaacgggggccaacggcacctctcgccccagctcccaccccacggcccccagagaaagaagaggagttataatccagctattttattggatgtgctttgcattcttggacgagggggtgtcttcaatcacgcggaacacttgattctggtgtttcccccttggcatgagatgcaggaaatttttattccaattcctttcggatctttatttcatgaggcacgttattattagtaagtattgttaatatcagtctacttcctctgtgatgctgaaaggttaaagaaaaaacaaactaataagtaaaaaatcaggtgcgtttccctgtacacactgagtgaaagcagggcatacacactacaagtaacacggctaaaaagaatgtattaagctgcctggaaattaaatttactcgaatgcactttaagtaaaaaatctcaaaggtttccattgaaagttacattaaaccaatttcctgtgcagagaacttacttgtattttttaagtacagcatgatcctctgtcaagtttcctttttgtaaaaccaaaacaaatgcataaggcaacgatcccatcaatcttcagcactctccagttatagctgatttgaaacttcccaatgaatcaggagtcgcggggagagggagtaaaaattaggaggatttccagatcgattcccagacttctgcttcacagaaatgtcaatccgcaggaatcccaaccggagatctcaagagctcgagaaaaaaaaaaggcagcggcggcggcagatgaattacaattttcagtccggtattcgcagaagtcctgtgatgttttccccttctcggcaatttacacgcgcgcacacacgcgcgggcacaggcatgaatctctatccacgggaccgcttcacgcctccccaggagagagacaggggagaggggacgatgaaggagccggggacggaggcaggaatcctcttctgattaaactccgaacagcaaatgcattttccgaaaagctgctggataaatgaaggcaggacgcgcctggcccgccggtgccgagcgctagaagcccgcgctgtgtgtggtgcggcgaggggtggggagaaggaggtggtgggggagggttttattttttccctcttttcctaaaaaggatgactgctacgaagttctcccccctggaccccctcttccgctgcaccccaccggcgcaccccgcctccgggctgcgcaccctttctcctcctcctggtcctgcgcggcggcgctggctacggccgcctcccggagctcccgccgcgcagcccgctccgagcgctgacggccgccggcagggagggcccggagccccggcaccttcgctggcagcggcggcggcggcagcgcggcggggccacggagagcggcgggcgggagcgcggcgggcgggcgggcaggcggcgcggaggggcgggcgcgggaggaagggggcgggagcggggctgtggtgcctgtcctcttacttcattctctgcacagcccgaccggtttcctgtgcgtaacgtcacacggttcattcaaaaaaagaagaaagaaagagccctcctctgagccacccgaccgccccctccgccccgctccctggcccgggttaaaggcgccgcggcaggcccgggagtggcgcgtcccgccgggggcacatggcgcgcggggccgcggccggggagggcgcgtccgggccggccacccgcccgctccgctgcgcccgcggggcccggccagtgggtggcgcgggcggcacaggcctcccgcgcggccgcggcgcggtgggtgtgcgcggggccttctgctcaggcctgcggcaggccgcgtgcggacttggtggtcgctggggtccgcgacggggtgggggctcccggggaaccgcacgcggccgggccgggcggacgacggagtgcggaggggggcggctggcgggagggtgcgccatgaaaacaagggctggaaaagcgccgggaaccgcctggaccctttctggccgtgtgagtgtgtgtggagtgtgtgtgtgtgtgtgtgtgtgtgtgtgtgtctcgcctggaccttttctagccgtgtatgtgggagtgtgtgtgtcgcctggaccctttctagccgtgtatgagagtgtgtacacgcgcctacacacacacacgttgtgttaccggcgctcggccgccgggggaagacccaggccaatgccgccccccaccgcccccagcagtgggacctcagcgctgccctgctgtgaagacaggtgactctgcacgttttaagcaatgtctagggacgccccgagcgtggtgtttactttcaagtagcttcctaggtgtccgcgcactacacacgcacgcgcatccccgcccgtgtccacctgaacacctagtccgtggcccaggccatgcagaactcagcgctccagggaaggggtttatcaagggctttacgacagtttaagtcaatgttttccctctgtccctaacaccttttacactggtttagtgctacacgatgaggacttccatatagtaactttcaggcccaccgtcctaacgctggggtgggtgggctcctaaaggtctccacctttgcctcgtagccaatcctagttggccgcactttctcaaatgaggtacatagatacacacatacacattcacactcgcagacgtgtgtacgcgcaagcagacagttt

SEQ ID NO: 1245061 - DNA, 4001 bp, Homo sapiens
atacgatttcttcaattagatcatgaggacttactacggtaagcgaagttaagcgtttagtacactgccagctgtagagcaatagagcaagtgcttcgtcagacctagctactatagtaagtgtggtcatcccttatgagatctatgggagcacagaggaaggagtctgtcactcctgcttagacgatgtgtggctcctcaggagctgagtcttaaaggagggtaggagtggttgagggcattcccttcacagtgagcagagggaacacagggtgtccaggatagtcatgggcatggttgtcatatgagaaatgacagtgtacggggcagcagaggtgaccaggggccccattatcacgggcctcataaaccatgccaggtgtctgaccttctagaaatatcagaaaactgacggagcttaaagaggaaaaggatgtaaatctgcatttcttttttgttgttgcagttgaaagataagccatttattgaccatccacttttcaaataaaacacaaatgtgagcataacataaacacacccaagactcactagcccctgcaagacaggaagcattcttggacagagagtctgcaaatgagtttccttatacctaatgtctgaacttctcactcattctagggtttcatgctttgttatctcttacaaaggaaaggaaactggctagaagattcatgtacaagaaggtcacaacttcaaagctatctgacactaatgttgtgtacaatctagtttgcaactctgagagacaatatcaaataagtactgtcaaatattcctcccagttaacctttactgtcattgttctttgaaattgtctttgggattggttatgttctctcgctgtagctttcgtttatctcagagcacaaaccctaaaatccatgtgcagtctccatgttcaagtatagatgtctgtttcaggacaatcctgggtcgcggtagtgtttccctctctgtagtgtgtgtttggtgtcatgcccttggaaaggctggccaaatggcagcgcaatgcaggagggtgccacggtcaactttctctctggcgaacttgcttccctttcaatctggtcactgctcatggtcgaggtggaaatcttgagctcagtgatgaacttggcttatcttcaatctgaaactgcactcttatgtaaccgaatccatttcttcaccaaaaattaaatagcgctttcaaaagctgtcaggcatattcttaggaagtgtcctgagacggagctggagggtcctggccttctggctctggagggagtgctggcacagctgcttctttctgggccaccaggaattcatgaattatttgttctatttgtggcctgaagatgtggtttagttttggatccaccacctgagaactaatcctgtccactccagcttctgacctccctgactgaaccacactctgcctcagaccatcgtgcagttggttgtcgtttgctggaggattccattcctgcttgtccagatgtgtcgacacaaaattatccgctttctggctcaggttttggtaagctggcttggtgtccacgtcagccttgcagtcccggcggaagctgtcaaaaaggcccctgctcttgagctgccccacgatgatagcgatgagctgagggtcgccagggggcaacgaggccgggttgatggggccgccgcccccgctggcccgggtcgaggccgggcccgcaccgccgctgccgccgccgccaccgtccgccatggctgcgcaccgggcccacaaggaaaccgattatagcttcttctccaggacagaaagcctagaatgtgtagaggtggctaagggggcggtgaaggaggagggccccaaggaggcagcggcggaggtgacggtggtggtgatggcggcggggccggtggttggggcggcggtgggggaggccagctccagaccgcggaggttgtggaagacgcggcagcaaccgcctgctggattccaagcgcgctccagatggcgtcaccgttgacctttgcattgtgaggcgggaaccgtaatctgcatttcttaaaagatctctaagagggaggtgggaaacaaatgccagtgggcaagggcgaaacagggagacaatttcagcaaccatttcagtgccctaagaaggagatggcgaggagtgaatgatcttcgtggcctggcaggtgaagaaggtaacagggatacaagagatatttaggagatagactcatcccagggattggagaacaacggggtgagggacgagggaaaggagagggtcaaggatgacccccaggcttctcacttgggcaggtgcatggaggtgccatttactaaatggagaacaggtatagaggtgaggatgggagacagagacatgatcgtgcattccatttttatttactagtttaagatgggtatgggttattcagatgcagacatctgcctatgaagtccaaagatacaaggactaggggctggggagagacatctaactcactgaaggtagagactataggtggcaattacaatggagaacttagaagagatagaggaacacctggagagcccatgagggggactgagaacaacactaaaaagatggagggaaaactacaaaagccttggatcatagaccgcaaaaggtacatttcatgaaggccatgggtgaaatgccacactatgttccacaaggtgtccattggctttggtagccattgatgagcctagggcagatgtgtcagtcagaaggaggtcatttcaacaagagaactgtattgcaaccaagagccacaaaaggcaaccacatccagcgccatccaatagagaagtgcaggtgcacagaaagaaccttctatcaatatttcaaaagaaaagcagatccctgatttcaccccaacactcacttccctgaattaaaatgcccctgagatgtagacaccacattgttctataagccgtaacatagcttaaaggtagtatatttcacaaagaaagtttacacaacagactctgtcaataacctcaccccatagcttctgacatacaagtacagatgcctcagatggacgtattctgaatctcatcccacaggagacagtgaacctaccaagacttcaccacagcaaccccctacctatgctcctcaccatccccatgatcagctcgacaattcagttctgtatttttttaaattaatcaatatttattgagggactagtcgatgtggccctgtgctaagctttatggagctctccacgtgcctggcccagtctaacactcaataaatgtttgctgtggctgttgtttaagacaggcaacatggccagcctttgaaaagcttacaatctagttggagaggggagatgttgacagagaaaaccattgaggacatacacaagctccatgggaacttagatgcaacatgcacacctagcatggtgcctggaacaaaagagaggcaccattaatatttgcagaataaagattgcatagatgaaaggagggtgtccctgtcatgtgttggagaacactgaagcctgggagaacgtggcagatggaagaagactttgcagaagtgctggagcctgaactgagtcttcatttatcccctcactgtgcatgagcccttcagattgcacaggagttctcttagaatgcaatcacctatgtggatccaagatgagatctatggggttctccaatcacagcctcacccacagagggacacttacctaagcttttgaaagtgatgataataacaatcatattgcagtgttccattctgtactgaaaaatgttcactgtcaaacaccttttctccacatcctccccaagtcttaaatagtgtgctggcatggtttttctgaatagctgacttgtgtattatttgtaatcataaacattaagttaccataattatcccatcaccttggatcagggtttagggcacaggacagttctcacctctcaccgaggcttcaaaccactgctcccg

SEQ ID NO: 1245062 - DNA, 4001 bp, Homo sapiens
ctagccacttctcattacttgctactaagttttaaaaggctgttatgtttcaccaattttaccaatgcatttaccacaaaataacaaattgcactgcgattttgtttctttttttaaataattagcacaatgaatagtatctactgttgagcactgtgctaagtgccagggatgcaacagcacttataaagctaaagaccacacttaaacttagctctgccaaatgtgaaactcattcatattcactaagtgacaattaagaatgccaggcactgttctaagtgctggagacacagcagtgaacaaaggacaattcaccgaggcatacaataaatataacaacgtcaaatgttaagtgctgggaataaaaaagtaagataggaggggggaatagaagtattgatggagttactgtaattttaaataggtggctagggaaagcttcattgagtgatattatagagaccagagggaaatggaggattcacatgaaagcagatatgtgaggcaagaatcccaggcagagtgaagagtacctgcaaaggccctgaaacagaaaagcaaggagacctagtgtgactggagttgcgtgaaggaaagagtacgtcagagaggtatgcaggtctatgacacagggccttacaatccttttaaaggactttcacttttattaatccaggagagagctggtgatggcctggagcagggtagtagcaatggatgtggtgaggagtggagtgcaatggcgccatctccgctcactgcaacctccacctcccgggttcaagagattctcatgcctcaccctctcgagtagctgggattacaggcgtgcaccaccatgccaggtaatttttttgtatttttagtagagacagcgtttcgccatgttggccaggttggtctcgaactcctggcctcaaatgatccgcccgcctctgcatctcaaagtgctgggattacaggggtgagccaccgctcctggctgattttggctacattttaaagccaacaggatttgctcgcatactggcctgggggaggagagagagttagggagtcaagaatagctccaaggtttttgggctcaataactgtaagggaagaatggaattatttactgaaatgagaaaaactggaggatcttgttgggggttaaagctcaggttttggacatattagctaagtttgaattactagacattgaaaagaatttgtcaagaagacattcggatatatgagtctagaattcagaggagaggtctgcgctgagtatatacatttgtaagtcctcagtatatggtatttaaaagccatgagattggatgaaaaactgtcaccaaggaagcgagtgtgcctagaaaagaggtccaagggctgagtactgggccacgacaatacttaaagcttggggagattaggaggaaccagcaaagcaaatcgagaagtaataaatgaagaggtgaactacgtaatgacctagaagccaagggaggaaactatttcaagactgatcaatgtgtcaaatgccgctaacaaagcaagacaaggcacattaaagaatttggatttttcacgaaaccgagacacatgcgggctttgttgttgttgtttttatggagggaagtgagtccatcggccttatttgagcgttgtgcggaacagaggaaagcggggcgacaagagcccaaagcacaagagacaggcgttcttcttaccgtgcgacgaagtgtaggcccagctgtaaaagagaaagagacttgtgaggagcaaaggaacacctacccgctcgcctcccgcttcccctccagtcctcttacaggaggtagcgggcttggcccgggcagctgtcgtgcagtccccgcgctgcagcctcaaggtagtgcttctgtctcatcgccgccgccgctgccgctggctcgccgcgggaaccaggtgagaaaatagggcgccggaagtcggcttcccagcgtccccgtcgttggtgtccggactcaagctgcttccggaaacaggcaccgtaggcagacaggttccggtttccttcgcgtccagtctggcttggaggcgtgcccagccgggaggcggccccacccgcccgccgcgtccccgccccctcagttccaccccttggcctgccgggtcctctcaggcacccagcggagtttcgagtcagacttgagctcgggcgtagcggctagaccgggctgtggcgatagagtccaaaggtgaggctcccacccgcctctccatcttcctcccgcctcgcctcctctctgacagcccttttgtgattgccctgccgcagcttcgccctccacattcgccgggcgcggtactgactggtgcgccggcgggcggaagcgctgccagcaacgaggcggccgggaggagcgtccccagtccagcctgccctccgcctgcgtaaacgctagcgtttctctttttgtaattaaagtgaaattcacataacgtaatattgaccattttaaggtgaacaattcagtggcgtttagtaaatttacaatgttgtgcaagcaccattctgctatttccaaaatatttcgccgaaggacagccaactccatgaagcacttacggccaatcctcctctccctcccaggccttggcaaccaccagtccgctttctgtctctatggatttacctattctgggcatttcatgtaaatggaatcatacacacgaccttttgtgtctggcttccttcacctagcataatgtatcaggttcatccaccttgcagcacgtatcagtacttcattcgttgttatggctgaataatattccattgtatggcggtatcacaatggtttatccattcatcagttgaacgtttgaattgtttctactttttggctgttatgaatgaatgccgctgtgaacatgtgtgtacatgcatttgtttgagtgccttttttctgttcttcggggtataatacctaagagtagatctgctgggttatgtagtaattctgtgcttaatgagggttccagtttctccgtatcctcaccaacatttgcttttctttttcttttttttttaaatctagccttcctagtgagtatgatgtagcatctcattgtggttttgattaacatttccctgactactgatgcttttgagcagcttttcatgtgcttgttggcaatttatgtatctttggctgtttaagttctttgctcattttttattggagttgtctttttgttgataagttgtaaggttcttttaatgtgtatgttctggatagtggacccttatttagcctgctttatttatttatctgagatgggatctcactctgttgctcaggctggagtgcagtcgtgtgatcacagttcactgcattcttgaattcctgggctgggttaaagggttctcttgcctcagcctccctagtagctgggaaccaggcacactaccatgcgtaggtattgttgttgttgttgttgttgttgttattattattattattttggtagagatgggcgtctcactatattgcccaggctggtcttgaactcctgggctcaagtgatcctcccacctcagcctcccatagtgttaggatcacaggtatgagacactatgcccagcccatttttaattttaaaagggagctaaattggctaggcgcagtggctcacgcctgtaattccagcacttggggagggcaaagcgggtggattgcctgatctcaggagtcggcgaccagcctgggcaacacggtgaaaccctgtctctactaaaatacaaaaatttagccaggtgtggcggcatgcgcctgtagttccagctacttgggaggctgaggcacaggaatcgcttgaacccaggaggcggaggttgcagtgaaccgagatcacagccactgcactccagcctgggcgacagagcgagactccgtctaaaaaaaaaaaaaaaaaaaaaaaaggcgggaggcggggggctaaattatataaagatttgtaaagagaaa

SEQ ID NO: 1245063 - DNA, 4001 bp, Homo sapiens
tttactatatgggttttgaattaatcataaccataaaacaaagagtattatgacagttactctcacataaatgcatgttaaatataaagtgaataagtaacaactacacggtgaacttattctaacaatggagaaagtttccagctccaatatccagtccatcctattttccacaaaaagttgtcagaaaaaattttttttcccattaagaaatctgattcagtccaggcgccacggctcacgcctgtaatcccagcactttgggaagccaaggcgggcagatcacgaggtcaggaggtcaagaccagcttggccaacgtggtaaaaccccgtctctactaaaaatacaaaaattagctgggcgtggtggcgcgtgcccgtaatcccagctactcgggaggctgaggcaggataactgcttgaaccatgtgttttttttttttttgtcctgagactcctcaggacatcaggcagtaactatcaattgtaggcctctaaaaatgcttgttaaaccaaaaggcaatgctctgattactggaggaatctagattgccaagatcagcaaaactacattagaaagttaatagcttccatccttaaaatatcccaagagaagaaagggagtgattctgttagcatgtacccaatactacacaataaaagcctaagcaaaattggcagatgtttttgtaattaagaggtccaaccttgacgaagtatcatcagtaggattttaattctactgggtaagaggattcagaaagcaaaaggtcaggcaaaaaacgaaaaacccatccaaacagaaactgctcaaggatctggtagggctcgtaccgatgttctctacttcaacctgtgagcatcaattttgtgatgggggctgccggggacgggggtcggggcgggggggtggacaattttaaagtgagaatgaatggcttgcgtaaaggcgatagtctttaacacgggttcgtcagtgtacatcctcgccggttttgaaataaagttgacaaactccccagaagcggtctattttggagactgacacatctctcgcattgactggaggcgcctgccgaccgaaggtagtggaagcgccgagaggcaggcggcgccaagcctataagaaagccttttctccctccaccaaggccactgcggccgcggcgccggagctctccgctgcaggggcaggtgtcggcgccagaccccctactctcggagctggcggagttgccgccactgcttcccccgcgggcctaggagccggaaagttgcgtgaagacaactccagggccgtgaagtcgcttccccccgcagcccggggactgcggcacctccagcctcccctcagcacccccggaaaaggactcgcctcaacccggccccagcgtctgggggcttggagtgccggagccaactccgccgggccgggaggacgctagggtcaccaacggcggacgagcaaggaggtcggagaggtgcgatgccccagcgtcagccggcaatccaggctgcgagttcccggcgcccaccagccaggcccgctaggaccccagcgtccggacgccgcagagccctcaccgcggcccgcagccctccgattcgccccgacccctccctgggacgcaacccgggccccccaactcgaccagtagccaggccgcggccctgcgccccttcccgcctcacctgcgctccgcggcgactccgtgccttctcgctcgcttcgcgcgcgccccgtcggggcacgcaccgaacccccggccgggactcttccccgctgcggtgactcaggacgcgacggccaccgccgccttctcctcctcggaacaagccccggcagcgagcagtgggtcgcggtcagagcccctgccgggaccaaagtgaacctcgccgcctccgcagcctctaccaccaagtcccttcagtcgtccgcgccgcccccaagaaaatgtcaccagaggccgttccgctgggcgcctcacttccgcccggaaacacagagcccgcgtcggccggctagagaggcagctgcgccggagacctctggagactggcgcccgaggcccgagaaaagccagacagcgccatctggcgcgatggaacccgcgctcctcccgctgcagaccgcggggcgtgaaggcgccggctccccgggcttctttcccgcgctccctccttctgttgagaccgtcaccttcccgaaatgtctttcccggggggtgggaaagccactcaatgcaagccaaggacaatgccttcagcaaaggacagcgctcccttttctgtgcgctgctcagtactcaccccctcctgaagcccttccgaaagcagcttgcggtgtctgaatcccagagtcgctccagcggagagcccgtgcccttctctccccgctttttcgcggatgccgatagctgggctcggggagactcggctgagctcttctcgggcagcggcaccaatatctgctcaagtttctgtccgggcaccttgcaggccttgcagatcgaccgccacctgctggtgggacgtggcccgctggggagaccccgctctgccccgaattccgcctctgcagtcgccctccgatttgcagtcagccctggggagggtgggggaaacgaggtggacccgaaccccgaagaaggggaggagggcgcaggcccactggcgggtggagcgtttcccaaggaggagcaggagatgctgaagacatatctcaagactcaagatctggccaaggacccgcgctcccccaaagcaaagcagtgttttgagaagaaaaataataataataaagctttgaggaggaaaatgtaaacggtctttacctttacagagctgtgctggaacctcggatgagacccgtcaagaggagattctgaaaatctcacaccactgggtccgcactcccctaaatatcagtctcccccttcagaccaggccccttagttcccccacttcactcattttttctgactgcctacaggagtgcgagtttttcatccccaactacaagaataaattaagaaaagaaaataattttattataccaggcaccttgcatttaaatgggttaaatccactgaatcctcattacaactcataacaaccctatgagttggatggcgttactagtcccaaattgcaaaggtggaaactgagggacagagtgacctgcccaagatgacacatccaagtaagtggcagtgttggattccaacacaggcagagcttactttcttaaccacagccaccaactgcctcactgagaatcacagagaacgtagtgtgtgctagctaagtagtttatccgtgtatgttatttcactcgttcattcatttatttactttctgctacctgagtcctcaagggatttgagaggttatggggtagtgacaagagcccagcctatttcaggaaaaaaagaaaagaaaaggaaaaatcacactaagatcacaactttcagtctggaaatgaatgaatgtggactaatacattgagtttttaaaagattccttgacagtctgatctaatcaatgctgcagaaatactgaagtaggaccctgactactgagataccatcttgggtccttctcctgttttttgttttttgttttttgctttgtggttgttgtttctttgttttttgtttggttggttggttttggttttttggtttttttcttgagacagagtcttgctctgtcgcccaggctggagttcagtggcgcgatcttgactcactgcaatctctgccccccgagttcaagcgattctcctgcctcagcctcccgagtagctgggattacaggtgcacgccaccacacccagctaattttttggttttttagtagagacggggtttcaccatgttggccaggctagtctcaaactcctgacctcaggttatccacccacctcagcctcccaaagtgctgggattacaggtgtaagccagcgcacccagccccttctcctgtttaataccaataag

SEQ ID NO: 1245064 - DNA, 4001 bp, Homo sapiens
ctgggcgcggtggctcacgcctgtaatccaagcaccttgggaggccgagggggtggatcatcttaggtaaggagttcgaaaccagcctggccaacatggcaaaaccctgtctctactaaaaatacaaaaattagctgggcgtggtggtgggcacctgtaatcccagctactggggaggctgaggcaggagaattgcttgaacctgggaggcggaagtcgcagtgagctgagattgcgccattgcactccagcctgcgtgacaagagcaaaactccgtgtcagaaaaaaaaaaaataaaaataaaataaaataaaatcaattgctggggcaatagtgatttttttttttttgagacagggtcttgctctgttgctcaggctaaagtgcagtggctcaaacataccacctgtgttcagagttcactgcagccttgacttcccagaatcaagctatcccccttcctcagcctcctgagtaggtaggaccacagccctgcgccacgatgcccgacagattttttaattcttagtagagatgaggtctcactgtgttgcccatgctgatcttaaagtcctaagctcaaatgatcctcccgcctaggcctcccaaagtgctgggattactggaacctggcctaatttttttttttaaataattagcaaggtgtgatggcacgcgcctgtagtcccaggtatttggggagctgaggaaggagagaaccgcttgcgcccaggaaagccgaaactgccgtgagctatgatggcccactggactccagcctgggccacagaggcagaccctgtctcaagattaaaaaaaaaaaaaaatccaaaagttgtaacctgtccaaagttctcacagaggtaactggtaactagagcttctaagaccattatttccagttctggttttcctcaatgctcttgccttttcctcttccaaaaacacaatggtcatgtttttaccaaacttttaccaaactttccaaaccaacgaaaccccttcaaaacaactgacaatgctaccagtactagtttagtgactgacaggccctccatcataaagattcatttttacttctgcaattgtgttttaagtaagttcgcacacagtacgatgtacataaactctcgaggacaaatactactaatcacttacgccacaattacggcttttaagagactttttagctctcttcggaatgaagcctatttgtatcttatcttttaatcttcataataatacttcggtaagatattttacttcacacatatggaaactgggtcagaaaagtctagaaggtggctacgagatattattattttaattattcgctccaagccaacaaagcgagcaaaacggattaaagctgttgcagaggaatcttctttcactcaacttaagtccagacaacagagtagacagttaaagtctgaggctccatccgaaatagggaaggcataacagggaaagtcaccttcctccaagtcatccagttgagcatgtcatcttagtggagacagagggagcggggacaggttgagtcaatgacaatgattgaaaagagacgagaacagaggcctaacggtgaaggtcatagaaaggatgtgaaaccgatacttggccacggaaaagaacaaaatcaatataaagtatcggagaggcaaatgcaagctccgagggcgccggtggtggacaaagaatacagacagaggggaggggagggcggggcggagggcggaggagcgcgctcgcggaaggaaggtaccctgagagcgaaggcaggcaccgcggaggccggcgggccgcgaccgccgaggagggaggaggcaggaggccgcgcaccgcctaggactctgcgagcgcggcccgggctgggcctgcggagcagctacaaagcccaacccaggccgctagcccgggcacactcacccgcgaccgcggaaacgcagctgacaatgtccgcacttccggagggagggacgatccgcagccgagccaatgggcgccttcaacggggacgacaaaggcgcgcttgcgtcaacccggggtcgcacagcacgcagcagtgttgcccaaggggcgcggcgaggcttccggctctgcggcctgcaggtagcgcgaaagtcctgcgcgtcccagatgcccaactaaaagcttcgctgcgggaagaaagcctgacctgactacacccagacccagaacgcaggatctcggtaaaggatgatgcctgtgcaaacggcgcggcacccacacggaaggtggcagctaggccgttgaggcaactgtggataagctattagttttgctggtttcttaaattcaagggcagagcaaactaacattaaggccaactttacaaacgtcagttgcttaaaagaagcagttacatcactttataaacgaaaagtactgacgctcgctaggatgtcagtacgtgttggcgaagttgtgtgaaaactgggaccctcataaaccgttggtggaaatgtagcgtgcagcctttttggaaatatttggaagttcctcagatgtttactcaggtaaccttatgatctagcaattccactctagtatatactcaataaatgaaaacacaaaaatctgcacacaaacgttcacagtaccatcgttcctaatagcaaaaacaaaacccctttatcaattgacgaaatgatacaggttgagcatcaacctaaaaagcttcaaaacctgagcctgagtgctgttatcatactcaaaggcaatgctcaatggagccatttccaactggggatgatcaactggtatattcacatactggattgttctgcaaagaaaaccactgcaaattccttttgggataatgaaactttttttgagacagggtcttgttctgtcttgcccacgctggggtgcagtagtgctcactgcagcctcccacctcagccccccaattagctgggactacatgcaagtgacaccacacttacttttttttaacagacagggttctgacatgttgccctggctgggcttaagcagtcagcctccacctcccaaagtgctgggactacagaaatgagccactgtgcccagccatgaaaatggtttttaatggtgcagggtaaacaatcttgtgtttctagttctaatcctaaaaaatcctcatttgatccatcttgtaaggacacttgaaatatgttcactaataaagacaaccaacattcttttccttttaattacatttattttaatgctgaatttactcccgtgccataagtttttgtttcttcagtttcttctgggatatctggggaaagaaaaatgtgttaagtttcttagagaaaaccacagtacatcttggaggacttcagcttattctggaggcaggaaacctagtcgttaaggactaagggggaaaaatacttaaatggtagaaatcaacagaacttaagttcattagatgtaaaaagaagtgtacagaatcactcaggttcttgacttaaaagaactaaatgtgatcaattactgaaaacaagcttcttagatttggggagagggcccattttgaagtggctatgtacatctaagtggggccatcagcagataatcatacgggcctgaggtactgaatataaaactaccagtttttttttttttgagacagcgtctcgctctgtcacccaggctggagtgcagtggcgcgatctcggctcactcctagttcctcctcccgggttcatgccattctcctgcctcagcctcctgagtagctgggactacagatacccgccaccacgcccagctaatttttttttgcatttttagtagagacggggtttcactgtgttagccaggatggtctcgatctcctgaccttgtgatccacccacctcagcctcccaaagtgctgggattacagaaaacttaccatttattattagtcaagaaacaaacttacaaaagccaaaataagacaggtgaaagggttgctcagaatagttttctttcatagttat

SEQ ID NO: 1245065 - DNA, 4001 bp, Homo sapiens
atacaaaacttgaaagtaaaatggaaaagtaaagtcctgtccaaattgtgggctctttaaaccaagccagtctactccagaaattccccactgttcattacagtggccatcactcacgatcttgcttttagaaaatgcctagttaacatcacgcaacaaccctaactcttgtacaacaccatatccctcccctccttggaatggaaaggatatgctgagtctctggctacatctgaccttggaccaaaaatcatctacccctggagccagtgagatattttgtcaggaagaaaggttgtgggagaaaaagacagaattcgaggtcagaaaactccattagagactagcaagattatctggaaccagcctccctggggatggtagagtaggaatgatattccttaactctcagggtaattaggagatcaaatgagatagcagcatgaaactgctttgtaaagtgttaagtgctgtataaatgcagcaaagagctgttttccaacttccttgctccagtgttgattgaatgtcctttgctatatggaacaatttcctcccttgagttatttaggatgggcatgggaagagctcctgggcattcctttaaggcgttcctctaagaaccactgcctgtggtaaagccagagcctacagaaactcatccctccctccccagctagcattctgagggggagggggaggggactgacttgctcttctcaagttttgctaattgaattttttgaagaaaagactcaattcttccctttaaaaaaaaatgcattacgccttttctccccagccatctgaagcccatgaccacagcaaatacatgccaatctttcaagttaaagaccccaggaacaaagctagagagttctaggcccctccagccttccccactccctgttttccacagcagtctttaacgaaatcagaccctaaaatgcgtgagagagaaatactttggatctacccctagagacagcgtcggacgttcacaacgaccacgcttttccccgcttcctcgattagcctggcctcccttgctccagtggggcggactcaaatgcgcacgcacgcacacgccgccaagccggtcaaccgcagacaaatctgactcttcgccaactagtagccacggagagcagcaaagggaccaaggtccttcaccgcctgctccaaaaagacacggcaacctccagcggcgccgcagtagctgcctctgtgctgcagcctccggtcggagtttcaggtctaattccttaagaagtatcgctcctctgcccttcgtcctactccccttggcttcgcccacttcgcctccttctcctcgggaggccaggaggacccgggtcactttgccaattctgcggagggggaagtagcagtgagggagattcccacgcaagtagcccgaagcccactactctttgccccacctctccactctcttgcccgtgtaggtgccggtgctgctggcgaaagtcccagttcttaaggctcctgagctcggaaggggtgtggaggagccagatgggaagagaagcagcgggacgagggcgaggaagggctggagattgttagaggacagatggggcgggactggggagaggggcgaaggcgacgcgccgaggcactcctccgccccatgagcacagacagtaactccgaaacgcgcagatgggccgtaaggtaaagaggccttttttccctctcctctccgtcctctaccctgctcccctcctagacacttggtgaaaaagcaaggtgcggtgtacctggagcgaacaccatgatttcttccagccgctacgcccccagattaagagagaaagacaggcagacggaggatgggaagaaggccggacttggcggggtccggtgcaggagggcgcgctgggcgggcggcgggcggggcggtcagcaccccggacagctcccgccgctagatcctggggccgcagctccagccgccgccgcgcgctctgcctccacaatgcggccacagcggcggcgggaggaggagggtgaatccccgctcagtccatccctcattcctgtgccagctcggcgacgtacactgctgcttagggagcaaagcacttccaccgctttcacgcgacgaaggtcggaagagcaagagagagaaaggtaaacttcccggcaggggacagtgaattgcttttaattacctgctgtggctcgtcgccgtggatattggactgacatttaagatagatttgtcaaaaaaaaaaaactctaagagctttctttactctcgaggatgactctgagttctccgagttgggctggctcgaatagaggggcgggtctgtcaagttaataggtcctggaggtccgtgagtcctctctcgcgagtcccagtcctctgctaacgtcaggaagagagcaagaggaaggacacagtgactatggagcgctcgaggagggcgctactatcaggttccgctcccaggtggcaaatccggctctgaaagctcctaagcttgaaggtcctcaaggtcatcactttagaaaaagcaaggccggccagggcacaggaaagataacgcatacacccttcacaaggaagagccaacagagccccctgcaagtgtgagaacagccctgagatcaatcaagaaacatcagttcttcccctatcctcacccagctgaaaactgtctgcatgccccgctcatacacccagttctaccttaaaggtactgggactgccttatgctcacttcatcctcctaatcattgctcactttaggtatctattccctaataatgtctgtgcagtgtgaacagcccacactagatgtcacccagcttgaaacaggtccatgtgggttacaaacccaaagctaaagccacccagaatcctccagcctctcccctatttttccagctaaataaggttttccaagaacaaaggtaatcaaggtcatctccagtgttttatggggtttcttcacttgcaactatccctggaaaatgtaactattctgaaaattaagtatttcctgataattggttgatggcaataagttctacagtcttttggcaaatataaagcatccaaatagactgattggcactgttttttttttaaagccatccgatagactgaaaatgcaaatagttttacagcttttgaactacagtttgcatgaaggcatatgggcagcctcaacataatacaatcagtactgctgttagcacctggctcaacacaggcttgaacatatggggcctaccccagcagcagcaagatgaaagtcagctgatgggcaggataaagcgtgtgcatgacaggatagagttctcccattttgccaagtttctccaatgatgcttcactctgtcttcttttcttcatcccacgggaagtgtaaaacagtatttaaaataattttggaatgaaaggtgtttttcttgtaacacactcaaaagggctgtcttttacagcccttatgtttaaatgggctttcatctcccaatacataaacagttacccatgattaagttcaaggaaaagcaatatagtataggaaaaacaacaacaaaagacttgagaatcagactgagacccaggtaccacatcctcatcatttactagatgcatgaccttaaataagttacttaacctgtcctgtctcatctgcaatataaggattaaggtatcttgaaggtttgttgtaaggattagctgtgagatggattaacagattaattaagagagagcacagcctcaattaaactcattccaggaaatcactggcaccctgggagtagagtacaccctatgggaaagcaaacaaaatatgttagaccagtgcttctcaaacattaatgtgcgtaagaatcctatggagatcttgttttaaaaaaaaggttatgattcagcagtgatatggtttggctgtgtccccatgaaatctcaacttgaattgtatctcccagaattcccacatgttgtgggaggaacccag

SEQ ID NO: 1245066 - DNA, 4001 bp, Homo sapiens
cttcgtttttggtaccaccctccctattttcaattcttatgttaaatggattcagctcacctctttcaaaggaagcttaaataatgtgaaaatcaactcaatgtgttcttctgtttttccattattaaaattgagagaatccctgtctacctcagtacagtaacaggatgtatatttgaaaacctaagaaatcacagaacgaaccggcactaattcagtccatgatgacattctttttaaaattaaatgaatggatttcctatactaaaaaagtattaatgttgaggacttaacatatgctatgatgttataatgtttaatttttggctataattttagaaatatttgttataacaacttttaatgtaatcttagtaactattaaatttggctttaaaacatcgaaagttttctaattaaataagagacaaagtaaaacatcatcctaccacagcgttagagcatgcaatggccattacaagagatctgaccgtggtcagtgcaaatggcagaacataaggtaacagttgtttcgtctcattgatttatctgaattctgtaatactggtatatctctgacgaatggctaaactaagccagctttacctttttcgtatcccttttatttaaagaagtttaaactcactcaagtaaatttgtttggataagcctgaccaaatgttttctgtctttgaatgccgaacaggctactgattttattttacaaaaccttgaaagagaaagctgttgtattggtctccgtaagtgggtgataacatttactagttatttcaactcacaggacagacaaaaagaaaatgcacaatttaagtttcattatgaaaagttttccaacttttccccaaaagagtatacaaaagtagaatcgttcaataaacccctatgtactcatcatcctgcttccaacaatcgctgaacagaccccaattgtagctaaagtgggtagggacccacccacttctccccacttcagccacaggattattttgaaccccacatatctcatgcaaatcccatatatcttaccatttcctccgtacaggcttcagttcgaatctccaaaagaaaatccatcacgcggaagaacagaatgttaaacttattgacaacaaattttaactaactttgattcaaaaacagaatgttcagtgttaaatagccaatgggaatatcgcacaggaaattaagaacaactcttggaaatagctctgtgactgctaagttaggaaagggaacgtttgtttactcggcagcagaaaaccaggaacccaccgaccggccagcgaaggtcgcccgtctccagcagtgcgcatcgttcccctaccccgggcgccctgaattccaatttttccagtcccaatcaggcgacaccctccctttggtgttccaccgcccgtcagtcacagacacagacaagttcttcagtgagatgcttttcactccgaaaccatttattcagcagccagggcgagcgcagcaatggactgaaggagaagtgttccgaagcgacagccccagagcgcaagccccttcctgtcgccgcctcaggtccgcagacgcccgtgtgagccccctccgccgcgtcccgcgaccctccctcgcccagggggcactccccctacagtgttcttccttccacagagactccacaagcgccctccctcaggagacgtctcctcctctttcctcgccactctcctttcgccttttctcggctgtcacaggatgggacaaccctcgaaaagacaccctcctttccgtcctaactcacccctaaggccccaaaataaaaataaaggaaaacaaaaacaaaaaccgcacacttccacagctctccgccgaaagctcaggcctgttacccaacgcgagacaccacaaagcatccccaacccggacaccgccccgcctcaggctcggctcactcgcagcttcctccgcagtcacagcagagctcgacacccgcgctcgctttcaaaccgccccaacatggcgccggcctgcggtgcgcatgcgcggcagtggggcgccgggcgcgagcggagatgagggagcggccggagaagagaggatgctgttgagcgttaggtcgcgacccctgctggaaggtgctgtttctccctcctttctggggctgggaatggggggatgtgggctgcatccaagtcgctgccccccacgcccttccaacctccgtcacagctattctcggccagtttgcgcggggacttgctgatctcccttcagccggccccggggtctgcgggaggggactgggtggggagggagacttaagggcgctggcggctgtcgttccggtcgctgagagtctgccccacagctccagtttttccaagtgagttcagcctccccgcttccagagcatcccccgccaaaaataagatatcgtctcagctagtaggcagtcccccctcaccacttctttcactccctcttcagtgcctttcctctcacaccccggagcctctcacacacaaagcagatgggagattggagacccgagtttagccagggatgggatttaacaaactcctaggaagccttgattcccagggaagaatggcagtgaccccgcacggattggggacccagtcaggcagctcagaaagagggtcattgtacaaacagatgtaaagactcactaacatgtgtgaacctgtctgtaagtctggaaggaatccagtttcaaccaattggtgtatcaaaaaaagaggccatcccaatgttggtttatgtttattttccactgaccctatgagtgaagatatccttgaccatgagtccatctgaatatgttccagctcatccgacgttccaccaccatgtaatacaattgtagtcttactgtttgcactttcttctttttaccctttgtagcctactaaattttaccttcccttttctcttagcaaatgaaaaagtccggaagctataacgttcagtttagtggttaaacacaggtctattgtggcagtaatagttggtgatttgaaaataagacataccctgctagtggtatgtcccaataatcttcaaagtctctagatcaattaatatcaagtaggtttccaataggaaatcaagaacggtgttttatatgctaagacgagccctggtcggggattaacaatccttgttaattgttagtgacgtaagcttaaaaacttaaatttttgtatccacgttccacctaagtgtctttttaaactgagttcctttaaaatagtttcttaaagattctttttataaacagtatcttttaaagttttttgtactatatttttctttcatcttggggcatatatgtagcaaatgtttcctaatgaagacaaagtatagataaaggacactgagaagatataaagaaaattatcaaatatattgacctaattcatggatcaaaataattctacttctgccttgtttcctcacaggttaagagatatggagatttccacaaggatttggagaggagccccagtagttactaaaattctgcattagatctgtcaggaaaggtaaagaaaccaggactctgctaggaaagaggaggttataataatggtttactaaaacttttcaaatatagagactatcaactacctgttgtgccttgctggagaattaaataagagaaaatagatttatgatccaacctgaagagttttaagtgagagctaaggaagaaatgttccaataattaaactttaagaaggtttatttaagtgcttaaggaagcagatctttggagagttttttaaatgatggatttatatgtgtccatttttttaaagagaaactaactattttgataacctagtatagggctccacactgtttaaagcatttttacatatattaactcaactaatccttataatgattcggtgagatagatattattatccccattctatagatatggaagttgaagttcaaaggttaagcaatttatccaaaat

SEQ ID NO: 1245067 - DNA, 4001 bp, Homo sapiens
acataaaagctcccagatatcacatcaactttacagcacttcttttggtttaaaaaaaagaaaaataaataactataagcaataaacaaagtattaccactgaatggctttgtggattgtcctgggagaagtggattctcacattgacactggctatgttcaaaatcacatttgtattcattaactaattctttatcatcactcaaggaatttgaaaagtttgagggttcaaaagcatattcaaaacaatctaatttattgataagccgagaagttccttgtgcctgatgactatgtctaggggaacactgatcatctttaaatatctgataaaccctttgactatttgcatcaggtagcaagtcttgattgtgcagccagactgggtatttgaaatcaggtatactagttatccctgaaacattaaggtcagatttctggctagtgagccatcttgggtaattcttttcaagactgtgttctgaactgtccttgaaagacgatttcttgggaaaagacaaagatgattcagaaatgcaattattagtcctattcataagttttgggtttttcagcctaccacattgctttccatttatatttgagcgtataacaggagtaacaaagttatccttgcccatggaagtgtagggtccttgaaaatgtggattcttctcaatgtccaatgaacccagtcttccacggcatttcttgtttttcttgctcgttcggtgactcggtccaacataagtataagaaaatgatccatctgctgggagtcttaatagatcatcagttgttaggctcatggagtctatgtcattaacggtgtgtcttctacaggatatgaagtttgagtgctttttgtgatcaaggttttcaaaagctgaaaaacgaagaacagttttgtttattacatacaaatattttataatatccaacagtaaatgagaattaagaatttaagaggcattttgctgctttccccttatcctcactaaagctttgattaaaagcataaaaaggtgtaggtggataaaacaggatgtgctttttttctcacgattcttcgttctgtgttaatttctacgtttctctccaacctcctgaattttcctgtgttctctaatttactgttccttcaactttcatcatctagacatatctgatacactaatacaatcacagtaacattggtcactcaatattggttgcagcatagaaaaaaatatgctattaaactaggtggaaaaataacttgttttctcacctacaaacccttcaatggcatggattatacatagagaacagctgttctcattctttgcttccggaatatattgaccacatccctccaagaactgaatacaaactttttctattctagggtcattctgcaagtgttaagtaaagtagtaattgacttatcaacaactgcattttccaaacttgtcttcaaggaagctttattatggacaaactcttaacatcttgtgaatattactgttccacagagaattatataatcattttacaaaaacacccagatctcaatattatgttatttttactccaaagtaacaaaaataatgtcaaactttacaatactacagtacatctcccaaatgcttcaaaacatctgaacacaaagaaaacaaagaataaaagcataccattgtttggtttgtaaatatagttgcagaactgtgacatattagtaaaatcctcatcaatgttaatttttccagtgcttgcaccaggatatatttggcctagatcaaaatcatcaatataagcctgtagagcttgagaagcagatctgtacagcttatctttatagtgaaacgagccatcagaattagaggaattactaccactcagggtgcagcttgccagcagggcagatactgaagattcctgagaacaaagtctatgttttgtctttgatttcgccatggcttcttcaaagtggattgtttctattcatttcccttaaaaacaactgtaatacaaaaacgaaatgttaagatgccaattaaaagtgaccatacacaaacaaaattactaaatatgtaaaccttttgtaattttctttaaataataaaatccattatctataacagacactccttgttaggaattgtagatttttgttatatttattattgtgaattccttcatcaatgatttagaaaacattttttgagtacctactatgtggctggaagtatgtatacaaaaattatctgagaatatacatggaaaataccaaggagagagtactcacttcttaaaaagtcctaaaaactacttatgaacctcttttctcttatggtgatatattctatgacatcacaatacctaatattcccctatacatcatatttttcaaatcataagcctactaccatgtgctgcagataatagcgctcaataaattttttaaagccatcaaatgaagtattcaaaacaagaacaatggagaatattcactttcaatgttataaatgctagtacatttacaacatttaactgtaaataaactgcaggtcttattctggaatgagttagcaatatacacttttcctaaaatagttaatcatttcctgaccttcgtttttggtaccaccctccctattttcaattcttatgttaaatggattcagctcacctctttcaaaggaagcttaaataatgtgaaaatcaactcaatgtgttcttctgtttttccattattaaaattgagagaatccctgtctacctcagtacagtaacaggatgtatatttgaaaacctaagaaatcacagaacgaaccggcactaattcagtccatgatgacattctttttaaaattaaatgaatggatttcctatactaaaaaagtattaatgttgaggacttaacatatgctatgatgttataatgtttaatttttggctataattttagaaatatttgttataacaacttttaatgtaatcttagtaactattaaatttggctttaaaacatcgaaagttttctaattaaataagagacaaagtaaaacatcatcctaccacagcgttagagcatgcaatggccattacaagagatctgaccgtggtcagtgcaaatggcagaacataaggtaacagttgtttcgtctcattgatttatctgaattctgtaatactggtatatctctgacgaatggctaaactaagccagctttacctttttcgtatcccttttatttaaagaagtttaaactcactcaagtaaatttgtttggataagcctgaccaaatgttttctgtctttgaatgccgaacaggctactgattttattttacaaaaccttgaaagagaaagctgttgtattggtctccgtaagtgggtgataacatttactagttatttcaactcacaggacagacaaaaagaaaatgcacaatttaagtttcattatgaaaagttttccaacttttccccaaaagagtatacaaaagtagaatcgttcaataaacccctatgtactcatcatcctgcttccaacaatcgctgaacagaccccaattgtagctaaagtgggtagggacccacccacttctccccacttcagccacaggattattttgaaccccacatatctcatgcaaatcccatatatcttaccatttcctccgtacaggcttcagttcgaatctccaaaagaaaatccatcacgcggaagaacagaatgttaaacttattgacaacaaattttaactaactttgattcaaaaacagaatgttcagtgttaaatagccaatgggaatatcgcacaggaaattaagaacaactcttggaaatagctctgtgactgctaagttaggaaagggaacgtttgtttactcggcagcagaaaaccaggaacccaccgaccggccagcgaaggtcgcccgtctccagcagtgcgcatcgttcccctaccccgggcgccctgaattccaatttttccagtcccaatcaggcgac

SEQ ID NO: 1245068 - DNA, 4001 bp, Homo sapiens
caccaggatatatttggcctagatcaaaatcatcaatataagcctgtagagcttgagaagcagatctgtacagcttatctttatagtgaaacgagccatcagaattagaggaattactaccactcagggtgcagcttgccagcagggcagatactgaagattcctgagaacaaagtctatgttttgtctttgatttcgccatggcttcttcaaagtggattgtttctattcatttcccttaaaaacaactgtaatacaaaaacgaaatgttaagatgccaattaaaagtgaccatacacaaacaaaattactaaatatgtaaaccttttgtaattttctttaaataataaaatccattatctataacagacactccttgttaggaattgtagatttttgttatatttattattgtgaattccttcatcaatgatttagaaaacattttttgagtacctactatgtggctggaagtatgtatacaaaaattatctgagaatatacatggaaaataccaaggagagagtactcacttcttaaaaagtcctaaaaactacttatgaacctcttttctcttatggtgatatattctatgacatcacaatacctaatattcccctatacatcatatttttcaaatcataagcctactaccatgtgctgcagataatagcgctcaataaattttttaaagccatcaaatgaagtattcaaaacaagaacaatggagaatattcactttcaatgttataaatgctagtacatttacaacatttaactgtaaataaactgcaggtcttattctggaatgagttagcaatatacacttttcctaaaatagttaatcatttcctgaccttcgtttttggtaccaccctccctattttcaattcttatgttaaatggattcagctcacctctttcaaaggaagcttaaataatgtgaaaatcaactcaatgtgttcttctgtttttccattattaaaattgagagaatccctgtctacctcagtacagtaacaggatgtatatttgaaaacctaagaaatcacagaacgaaccggcactaattcagtccatgatgacattctttttaaaattaaatgaatggatttcctatactaaaaaagtattaatgttgaggacttaacatatgctatgatgttataatgtttaatttttggctataattttagaaatatttgttataacaacttttaatgtaatcttagtaactattaaatttggctttaaaacatcgaaagttttctaattaaataagagacaaagtaaaacatcatcctaccacagcgttagagcatgcaatggccattacaagagatctgaccgtggtcagtgcaaatggcagaacataaggtaacagttgtttcgtctcattgatttatctgaattctgtaatactggtatatctctgacgaatggctaaactaagccagctttacctttttcgtatcccttttatttaaagaagtttaaactcactcaagtaaatttgtttggataagcctgaccaaatgttttctgtctttgaatgccgaacaggctactgattttattttacaaaaccttgaaagagaaagctgttgtattggtctccgtaagtgggtgataacatttactagttatttcaactcacaggacagacaaaaagaaaatgcacaatttaagtttcattatgaaaagttttccaacttttccccaaaagagtatacaaaagtagaatcgttcaataaacccctatgtactcatcatcctgcttccaacaatcgctgaacagaccccaattgtagctaaagtgggtagggacccacccacttctccccacttcagccacaggattattttgaaccccacatatctcatgcaaatcccatatatcttaccatttcctccgtacaggcttcagttcgaatctccaaaagaaaatccatcacgcggaagaacagaatgttaaacttattgacaacaaattttaactaactttgattcaaaaacagaatgttcagtgttaaatagccaatgggaatatcgcacaggaaattaagaacaactcttggaaatagctctgtgactgctaagttaggaaagggaacgtttgtttactcggcagcagaaaaccaggaacccaccgaccggccagcgaaggtcgcccgtctccagcagtgcgcatcgttcccctaccccgggcgccctgaattccaatttttccagtcccaatcaggcgacaccctccctttggtgttccaccgcccgtcagtcacagacacagacaagttcttcagtgagatgcttttcactccgaaaccatttattcagcagccagggcgagcgcagcaatggactgaaggagaagtgttccgaagcgacagccccagagcgcaagccccttcctgtcgccgcctcaggtccgcagacgcccgtgtgagccccctccgccgcgtcccgcgaccctccctcgcccagggggcactccccctacagtgttcttccttccacagagactccacaagcgccctccctcaggagacgtctcctcctctttcctcgccactctcctttcgccttttctcggctgtcacaggatgggacaaccctcgaaaagacaccctcctttccgtcctaactcacccctaaggccccaaaataaaaataaaggaaaacaaaaacaaaaaccgcacacttccacagctctccgccgaaagctcaggcctgttacccaacgcgagacaccacaaagcatccccaacccggacaccgccccgcctcaggctcggctcactcgcagcttcctccgcagtcacagcagagctcgacacccgcgctcgctttcaaaccgccccaacatggcgccggcctgcggtgcgcatgcgcggcagtggggcgccgggcgcgagcggagatgagggagcggccggagaagagaggatgctgttgagcgttaggtcgcgacccctgctggaaggtgctgtttctccctcctttctggggctgggaatggggggatgtgggctgcatccaagtcgctgccccccacgcccttccaacctccgtcacagctattctcggccagtttgcgcggggacttgctgatctcccttcagccggccccggggtctgcgggaggggactgggtggggagggagacttaagggcgctggcggctgtcgttccggtcgctgagagtctgccccacagctccagtttttccaagtgagttcagcctccccgcttccagagcatcccccgccaaaaataagatatcgtctcagctagtaggcagtcccccctcaccacttctttcactccctcttcagtgcctttcctctcacaccccggagcctctcacacacaaagcagatgggagattggagacccgagtttagccagggatgggatttaacaaactcctaggaagccttgattcccagggaagaatggcagtgaccccgcacggattggggacccagtcaggcagctcagaaagagggtcattgtacaaacagatgtaaagactcactaacatgtgtgaacctgtctgtaagtctggaaggaatccagtttcaaccaattggtgtatcaaaaaaagaggccatcccaatgttggtttatgtttattttccactgaccctatgagtgaagatatccttgaccatgagtccatctgaatatgttccagctcatccgacgttccaccaccatgtaatacaattgtagtcttactgtttgcactttcttctttttaccctttgtagcctactaaattttaccttcccttttctcttagcaaatgaaaaagtccggaagctataacgttcagtttagtggttaaacacaggtctattgtggcagtaatagttggtgatttgaaaataagacataccctgctagtggtatgtcccaataatcttcaaagtctctagatcaattaatatcaagtaggtttccaataggaaatcaagaacggtgttttatatgctaag

SEQ ID NO: 1245069 - DNA, 4001 bp, Homo sapiens
aatcattcatactttcctgactgagtgtctcagcaatcaggcctttaaaaataaacagcaaaaaaaggtagtaaattatcttaccaatagagttccaataccaagtcagcacacaatatttgatattgttttagaatgggatgatacaaacaagttagtttgcaaacttcagcagttaagtatccctgccatttacctttaaggtcttctaatgattttctaggatttttggtacaagttttactaagatatagttcacataacataaaattcacccatttaatgtgtacaattcactgttttttactgtattcagagttgtgcaaccatcattgcaataatttttagaatattttcatcactcctttttctataacaataactattttttaaaagtcaaaatgtatagcaaagtcttttgttgtttcagatttttctgtaaagcacttcaaggttgaggaatatattatttttcattgtacacgacagaaaatgtttactggtctctaaattgttacctagtttttgtttccactaaattatccagctttcaaattctattggaggcacagtttacagttgataattcataaggtatacctttgaagtctacattacattttactacagtaacaaaaactggaatataaaagtaaagcaacccagtgaagcttcagtacactaacatgcacaaatacattagggaaaagtaagctggactctagtactttcaacttttcaacatcaacatgctttttctttttaagaaagaataatatactggcccgggaatgtgcagtgtgaccagccttctgatcacagtactgaaatgagtttgtggtgtcatctgaggaatgctggcaatgccagcaggaatgtaatacagtaggaatgtaaattccaggtcaccaaaaaattcctgggtgcaagtcctcccgttttgccaatcttcaaatactcacggattgcaacactgtatgtaaacaagagtgatctgttcagggataagcatgaatttattagaattattactattgtttaattttgtgagttcctagttggcaaaacttgcagattcaaaaagaatgttgttttctttggctaggctgtagaactatattgtgaagctcaaaacgtgggccaagccttattatgatctacggatgcgctattaacatcctgtccagggagtcgctccactacgtttctgtcccaggatttcatctttattcccaatccccagcagggcaaggaacaagtgctaggagcaggcaacaggcacctacgcaattctacacgtgagggaggactcagagaaccccaaaggaccaaaactctgggagcgcccagctcctgcagtgctgtgcgctaagcctcgggaccgccgctacgagggacccttcctaaaaatcctcccggggcgcggggttcagggcggccccagacccggcttgccgctgcccccaggcgagcgcccacccctcttccggcctggcttctgtgagaacagtaatggacgtgagtggaaacgaatctaaggtctttgttcagctaaatccattttaaaaggtgattctataaatttccgatataatgaaatgcccgaaaaattgggactcatgggtctttgcagatgaatacatttttttcctgacccaaaccaacgtcctcagggtgccggcgccggcaccgggatcctgccctcatggcggccctgacctgctcctccgcaaccgtggggaagagaatcaggaaaatggtcttacaaactggaaaagcaacacttctaacgcccacggcctcctgcactgcagatgcgtcaggcgtctcctcagggggaggaaagggcgggtgggcggcagggcctccagcagtctccctcgcttccgctctgcctccttcaagcagctgccccccaaggccaggcctcttggtctctgtggggcgtcgattgagagcccgcgtgcctcagctccctcctcgctgccctcaggagacgctcccggctcgccccgcgtgccctgccttcatcggagtgtcccctcgtgccctcctcacagccctcgggagccaatcccagtatttcccgcgctctcccagcgttccctgcgctctcccagcatgccctgcaagccttgcgctcctggcacgcaatgtaggtcaacttttcccgccaaggcaggaaccgaccaaagctggtcacggatgacccagtgaagccctgtgagattctctcagcctgagctggtgtgggtggggccgggacacaaggttctggccgccctcgaaggcgggaaagctgggtcagcgcaacacgtccaacggggagctccggcgctgaagccccggctaactgcgtgctgcacaggggctacccagcctcttgcctcggcacgtttctcctcagattctcatgcccgaatttacagcttctgcagttcctttagtggtgggaatctccatgactggaacatcttcatgcctggtgtggaggggaagcgtggtgcaagctcgtgggagtaaatccacgaagcgcctactgtgtgcagatgcgtttctaaggtctgctgatagagcactaagcaaacagcattcccggtccttgtgggatgcacattttacttggtagttgggggaaaacagatacgcaagataaatgtgcaaaatcttagtgtggcagatggtgataggtgcattggagaaaaattaagtagggtagggaggcggggagtgccgaggagaagtcgttaggtttaatagcgtggtcaggaaggcctcgtggagaacgggacgtttgagaaagacatgaaggcggtgagagtgggcagcctcgtgcatgtctcgggggagaatgtttgttacgagagagggaatcctacaaaaggccagggcaggagggacgccagctggctgcagtagagcaggaaagaagtggctccgtgaggcaggaggagttacagagagccagacagggttaggcccgataagccatggaagtattaaaggtgcatccagcctgctgtgctggaatggactgaaggggacagggaaaggaagaaaagcagttaggaggcaatggcaataaggagagaggtggcttggatcagagcagtggcagtggagggaatgggatgggatgggattggattctggatatattttgaaattagatttaataggatttggatatggattgatgtgggatctgagagagagggagaggaatcaagcatcactccaaggtttttatactaagaattcagaaggattgggttgccattaattacaaaggggaagactaagaggagcaagtttggggctgaagatcaggagggttcatgtcagttttggacttgttgacattgagaaatgaagaggaacaataagagttctggggaaagatctgcatataatagatgctatttaaaacctgaggccagattggatctccatgagagtgcatttaggaagaaaaggaaccctcacactggatcctgggacaccccaatatgaggtcagggagatgacaaggaacttcatgggtggaatgtcaggaaattttcattaagtcagagatttgctacttttcaatcccacatcttgccagctcccagaagtggtattgtgaaagaatgagattttatattgtgtttaatgtctaatcagttaaagtcatttacctattttatttgcaaaataatttttggcaaagaggaacatttttacatatcttcctagcaataagaatgtgttcaatgtttacaattgtttggttacttatgaccccagatgtgagattatagtaagtgattatcacaacgttgttgagacaaatcagcctcctaagacaaagacactttacattaattgaacaaaacacaatcttctgaaatagtctaacaaatgtaatgtctcaaatttaacacctgcggtctgaaggttttatgtcacagtccttgcaattattaaaacaaacctttcgatattacagaaaatctctt

SEQ ID NO: 1245070 - DNA, 4001 bp, Homo sapiens
agtatggaaacttgtattaaacatttgatttttataccttttttgtgtgtgtggagtgagctaggaatagtgcattgacaaatgaacaaccaccagtgacttgtgtacaatcaatgtgaacacgtttcaattgtcagtaacaaaatgatgctggccctccagctgccattttctaggtctgccacaccagacaccaggacttaactctttgcccatccatcaaattacgctctcagatttcgcatgcactgtagataaacgtgtaagaaaggaaatggtttaaaagcacaatattattgtagacagacaatgccctgagtgaaatcacatgtgggtgacttaagacagggccctaaaccggctagaaaaaggaagcaagtcatgaacagttttatgtggaggggtttggaagtcttgatcaccattcaatgatctaccttgtccattttcaacacatggaaattgttagcgcaagtttgtactttaaaatagacccaagaatgcagatgaacgtaggtttacaggactgatattcattccaaaatcctaccaaaaagctattaaagtgtcttcaaattttaatctttgttgttacctacatgtatgtaataatatgtgtatacaaggacatttacggctttgtaattaactgaatttggggatactttctttgtgcattttcacagtgtactgaaatgaatggtgggcacgtcaatacttttcggtgaatcagacttaaacgtgattgctgaagaatacatcccacttaggcattcatgctgaagccagcaacaattgtccgtgacctttaacatgcccgctctccaaatcagtgcaggtcgttagtcacacggagcttacatttgaggactcgcggatccttcatagcggaggttgtccctgtctttctgcctgactcccccccgccccccgaccccgacacacactccccaccgcccccagaaacatcacacatgcagaatgccccccccgtctgatcgccagctttcgggcacatgcgcctccctttgcagcgcgtctggagtagtttcttttgtaaacgccctaagttggggagggccgcgggctgcgagtgtgaggcgcagagagagacgccgccgctgaggtaaccgccaggattgcagcgctgattgctacgcggagccacgttgggcgtcttggacggaatccacctccactgcggagttatcacgaggagaaggagaacaatacggccaggagcctggtgggagaagatagtgttacccctccgcaggccgcagctccccgggtctacgtcaccggccgtgaaggggcgctcgccctcgctagctccgacccgcccctcccccgcccccgcgcgcccgccctcccctcccccaccccggccatccctgccctgtaacaggagagcgttttggagtcaaattaggatttctagtcccagactcaacttattacaactaactactgctcgtggggagtaggtgaggtgaagaaatgaagttttaagaacagaaaaataagagttgaactttcgaggctaccggtaaacaaccccttcatttttaaatggccgggtggcagagccgctgtttgaagtctttccagcgggacctctgtgacccttgattcaggacttaatgtattgatcctgcatctgaacacccccagaggcatttaccaggaagttgagtgacacgcacacgctacgccgtgtgtaatgcacacgcacctgggacccccgaaggggtgtccccatttcagtccagatggggcgcagtgcccaggtacccgccggcgggacccgcatcccgagcacgtctgtacgtatggatgcgcgtgtgcgcgcggaaacggcctccgggagccggggctgcagcagccttagaccttgacgaggggcgaccactggccgctggaaccgtgattcagtgctattaggggaggaattggctgtgtctgagtcactgcaagcctccagactgtcccctcagtgtggcagaactttgtgctgatgagacaatagtggagtgtgcgtttcctacagggcagaccatttccaggctgggggaagcctccggcctgcgccgggccgtgagcgcccggccccctccccgtgccgcgcagccccccgagcccggctcgcgccggggcccccgcggggcggacgcgtccggggcgcgcgcgggcggcgcgaggagggggccgggcgcgtggcgggccccgcgcgccctcgcgcgtcccccgcgcccgggcgcagctggcgcggtcggtctagtgcagcgctcggctccgcgccgcgggcgctcggcttcaccttcagatgcgcggggcgtgcgcgtcctcctccccaggcccgccgcctccctgccaaggtaggggccgcgggcggggggagggctgcgccgcaggggccgcgggcgggcggtgggcgcggggcccggagccccgacgtgccccgtactctggtgtgcgccgctgggggtagggggggaggcgctggggaggggggtgcgccggggaggggccccccgggcgcggggagggctacttggctttcccggtgggtagttgctctgctcgtcaattccaggataggggaagatgcaacttcgggcggcggggcgagcgcccgggaggtggtttttaccgcagtggaggggcggggtgggggccggggtgggagcgcggaagaggctctggctttgtacactttgtcaaaggcgacgcgggaggaggggagctcggatgcgctctccatccattaggagacaaagagcaaattgccttactttaaagtaaaacgctccggctaatgaaggtgggtgatggggctgcgggcccgaggagccgcttcaattattaagggtttggcggatgggatcgatgcctgtgggcaccgcgcgctgctgcctaggggacgtgtttgcgtggaggtgggggtggccttgttttttacggccccctccccggctgcttgccagtctgctgggagcttctaagtgaccctaacgttaaagaagtgagaggtcctggaagggaagttcgggcgggggtgggggtgggggcgagggtctggcaccgactcggagaggggtgggcagggactcctcggagctgcgccccgccgggtgcgggtgggggaggcctcggtggcgagatgaacccgggtgtatgaaggaagaatgcggtggggtgtgtgtggttgggcgggaggtggggggaggcgcctccgctgccatttccagggagaactaacagactgaatagttacgatcagtatttagattaaaccgcctcaagttttaacgaaactttgtatgaataagtttgttaaatggcagccgagtggggtatttaaaagcagcagtttatgtgtgtggtgaggaaagccagtggacccccgcaattagggaccagagggaaccagccttttacccgaaaaatgtgggtctgtaagtcagcctcatctattatcagcgttaataagcttcccgcagcagaccgggagctctgggggctgtgtgtgtgtcttactcattccgctgataaagagtcaccgggtctccgggtgtgcaaagatcaacttgcgcagccctctttttaaatatattcattctgtgctttatttaatccagatgcacaaaaagccatttgctgctgcattgttggtttacattttttgaaaaggcgactggtgtaacctgtggaatttgaaatgcaaataagagcctgtgggagtagaggcagaacagatcagcatttataaagtggaaaagatttaatgtctttgaaatcattgcaggggaagaaactggagggggagtgtgatttttcagggagtgaattgtgacgtcaggtctttttggaaaagatgttatttttaaggtctgaaacccggctaggtaaagtgcttacaggaaaaacagattacaagattaacatctgttaacatgatcgtttatctccagccaaaaataggtcagttctttcttaag

SEQ ID NO: 1245071 - DNA, 4001 bp, Homo sapiens
ccatttccccttccctgtggagacaccctatgtaaccttcagttacacagacccagagttccccaaaacaccatgctcgaaccccatccatactttaaaaccttgctcaggccgggtgcagcggctcatgcctgtaatcctagcactgtgggagtctgaggcgggcggatcgttttgaggtcaggagttcgaaaccagcctggccaacacggtgaaaccccatctctactaaaaatacaaaaaaaattagccgggcgtggtggtgggcgcctctaatcccagctacttgggaagctgaagcaggagaatcacttgaacctgggaggcggaggttgcagtcagccaagatcgcaccactgcactccaccctggggaacagagggaggctccctctcaaaaaaggacagtttctcattaacacagaccaacagtaaaattttttaagtcactactgaattgagggcctacattatactttcaccttctgtaagcaccagtgttacagtggccagatagcttatcatccaaatcgagacacttctgaaagtgaaaggccctgctgttgatcattaaacctgttcaacagtgcgaactgggactatgcagtcaccttaagtatagtggaagccatgattttcttgtattattacatgagaaacaatgaatctcctccacctgccactctggaaagacctgggctaaagaaatgaacgccctcctctgtgaacaaaccagaaatgggcacatcatcacgctgacttgttaatttccagtgctaggaagtggctgccccacttttgaagtatttggctcccaaatcaactgctccagatattccactctgacaagaggtgctagtaagtgccacgaagaccctccctacagacaggaattccatgtgcgcacacagacttcaggcctcttagggcagaccaaatgacaaaattataaaaaaccatttgaattagaaaaacatcattctgtttacatgacaaaatgatctgaaagtgtctataccattacctaaatgagatgggattcctatcatctgggcctttaactaccacgccagtagctccaccagatcgaacagcaaaaacctgagagggaaaagcagcaaggttaacagcctgaactctgaaaggatctaaactcagaagccaacccgcaagcgattatttctgttatacaccaccctgggttcaactaaagtaacacggcacatatcaaggtacagatgtttggctgctcaggtgaattttaaaaaccaagagcagagagcgaaaaggatgccaccgtgacaccgggtcgggttcccgaggctccaagttctaacaccggttcgcgcatcggcgccgctgatacgcctgaagtacagtcttttccccctttacaaaatttcaaggaaaatgaaaatctcgacgtctaaacccttgactacgagtgtaactaatgacaaacacaacaaaagaagcctagataagacgggcgcgccaacaattgagacactggccacggggccactgcatccgcgcagctggctcgggggtccagccccgaggtcacctgcgaggacacctggccgcggctgagcccacccaacaaggaaggagcgcgcgccgcctcccgcgctgggacgggacgggacaggacaggaggggacgctcgggcctggtcgcgcgggaccggccttggcgcgcccacgaccccggcagggccgcgcgggggaggaagcgcgggcgcgccggacctgcttgttggcctcatcgaagaagacgcagttgacagggttcgccttctcgaactgcaccggccgctcgcacagctccagatagtagtcctcctcgcccatggcgggcgccgcgcccgcggcgggggccccgggggcggtcgccagagtggagcaggatgcgcggtggagcccggcccggactgtagcggcggctgcggctgcggctctgggcccggcgcggacgccgcttcctggtgccacgcccccaccccgcccaccacgtgacccgcggccctctgcgcttaaacgggcagcgtctggctgcggtggggcccaccggccttaaccacgccccgcccggcgctggaggctcctcccctctccccgagggcggtcggaacgcggcggcgtgacccggaagcccgcgtggttccccgcggaccgagggcggcgtagccgccaaccctaccctgctgcgagttcctgtgcccggctcggtcgcccctgccccaacctgtacccccgcgtgggaccgctcccggtctaggaaaggctcctccttgctttcgggaggatttcccaagtgcctcccgcgccagagttccagcctctgggagcttcgtcagggagaaggggctgaaggctcactgagcaggtgtaggggcgccagagaccgtctccagtcccctcagcgcttctgcgggctcttccgctggagccagaaaccgaattgacaagaggcagataaacaaaagaaaagcatacacactttattagtttttcatggggaccttcaaaagagagtgaggtctgaagaagtggccacagcaagatgcttttatactttttagacaaagaatgatgcatttgagaagaaagcacaaaaggcatctggctggggcgatacatttctaagagagtcactaggagaaatattggggagggtgtaaaattagtggaaggtaagtgttacttgggaagttcatttattcaggtccattgcagccccaactcccagtctctggtgataagggctattttctgacccgggtacagagagggtgccactcccagaggaatctttactgcttattccctgtaggaaacgacaggtcatctagccctttctgaaactacaatttctccggtgtttttagctcaaaataatataccaatttttggacatattttgggatagcacatccttcactccttgctagtaacagggaaacctaatatagattgtgggtcagcaagcctttttacttgataagaaacatgaaatttaccatgttagcccctctttttttgtttgtttcagagacagagtgtctctgtgcccaggctggagagcagtgatgcgaacacggctcactgcagtctcaacctcccatctcagcctcacaagtagctgggaccacgggtgcatgccaccacacctggctcatttttttattattatgctttgtagagacagcgttctctgttgcccaggctggtctcagactcctggcctcaagtgattctctcgctgaccgtgctcagcccccatgttaaccctttatttttattgtttattttattttattttgagacggaatttcgttcttgttgcccaggctggagtgcaatggccctgtctcggttcactgcaacctccacctcccgggttcaagcgattctcccgcatcagcctcccaagtagctgggattacaggcacctgccaccatgcccagctaatttttttgtgtgtatttttagcagagaccgggtttcaccatgttggccaggctggtctccaactcctaacctcaggtgatctgcccaccttggcctcccacagtgatgagattacaggcatgagccaccgcgcccggccccgtgttaaccctttttgaggtgttcagtagtatcaggcatattcacattattgtgaaatacgtttccagaaactttttatcttgcaaatctgattctgtccctaaatttgactactctaagtatctcatataagtggattttatagtatttgtccattagtgtctggcttcttttgcttagcaaaatatcctcaaggttcatccatgtagcatgtgtcaggatttccttccttcattaaggccgaaaaagattccattttatgtatatagcacattttgtttatccattcgtctgttgatgggcatgtgggttgttcccacctttggctgttgtgaataaagctatgcaaatatctgttcaatattctgtttttaattcttttgggtc

SEQ ID NO: 1245072 - DNA, 4001 bp, Homo sapiens
agaagtacactaggggcaaacttgtggatgaggcgggcctgttcttcccccatttgtccattgcgggaggaagttaagttttcccataggcaccttcttacttgggccagatcaagctttcaggtaagcatgataggagagagaaattctagcagagaaagtcattctttcccagaagggataactgaggccccaagaagttaaaacaactttgtcaaggtagggtctatgctattgctaacttcacaagaggccttattaaccaacaagggagggcactccctaggaacggatctgcatttccccacctgttcccgcctactcgcctacttcttttgcaagcttcagttcacacagtcccaacctccgactgccccttagaataatacatggtgacaaactctatttcctgaacaataagcaaacgtccagcgtttcatgtttttgctaagacgcctaatgccgccagataacttcagctaacaaacaagtaaaacaagcgtttaacgaactcaagcaaattcatcttggaataggaaaaaaatccctcaagccctatttcctctttgttccccacccccctaggcctagttggaggcaatgtaagaaggactttccattgctcaggaaagcaaatggaaaaagccaagtttccccgggccgcaagaagacttggagcgcaggcaagaacttctccggagggtcacgcgtgtctgctacaagttcaggctcacacgcgccgctcagctgccggcctgcactgctccactctgcgcccggccgagtctcgccccacgcggggaagagtgcgcctccgggtctggaccgggtttcaggaagtttgtgatctcgtgtggggaggctcggacgccgctttctactgggctcctgcaactcccaattcccgacccactgcacaagcgcggtgctcctctgcgaatgctgggctcgtgcaaacacgtgtaaccccgcactccctggggacgccccctcttttgggtgccctcgtggtttgggattcgggcccggagcacaggatccggcagggcgcgggaaaatgggagcaacccgtgtcccgtagcccagagaccgcggggaggctgggagcgccgggcgggacgcagggttgggtgcgcgtcgcatcccggatactcaccgggacctctgcagctgctcgaaggcgctggtgctgccgccctggcctggctgctccagggagcagtagttctgcgaagtcggcctggagaaggcgatgggcaggattccctgagtgaacgagttgaggcgtccccgactgccgctcccactcccgggggtcccggagcccaaaaaggcggccgccggcacctgcacgctgataaaggcatcgtcctcctccaactcctcctgcccggcggccccggacccgtcgagcagctgcagttgggcacaggcggcgagaggcgccggccggggcggctgccactgctcccccgacgcccggccggcgcccaggggactcgcgaacccccgcgccaccccggggccggacacggtcgcatggccgccaggaatcaagggcggcagcgacgagggctgtgggaggcaggggccggacccagcggctaaccccgcagccggcgtgcccggcgcggcgagcgcgatgcagccgccccgctcggcagcggcgagcaagctgaaccgagtcctcgcgccgcaggcgccgccggcgcccggcttggccgcgccgccctcctcgccaccgccccactccgcgtcctgcggcggcagccggccgtccagcgagatgttggtgaggaaggagagggcagcctggcggcgccgcgggtccatgcgcggcttccgggggggttcgggcggcggctgggccggcgcggcggccgcgggctgaggctggggctgcggcggcggctgctgcaatccgctggcgcccgcggcgtcggtgccggcgctgccgctgctgcaggcggccgtggtggcggccgccgccgccgccgccattgtgtccgtctgcggcgggatttccgcgatgcccggagaagcgagcggcgcccgagcgctaagcggcgggcgcgagcggcggcgacccgggctgggtagggcgcggggatcgggcggcgtgcgcggcggtccagcccccccgcgggcgggccatgctcgcccctcggtgctggggatgggggcgccgccgccccggcccacgcgcacgcctcgctacctagctcggctagttcggctcgctggctggccgcccgccggtcgcctggccgctggctcgcgggctccggggccgggtgtccgtatttataggtgcgcgcgccccgcgctcgcgctccaaagccctctttgcaataacacggaatcacgtgtggggaatgcgacctgggaggaaaacaaagccgcaggcggcggccgcagaggcagacggcgggaggcaaggggccacgggaggaggaagaggaggacgcgagagccgagcgggtggtggggcgggggatcggcccggctgtccgggttgtcggagctgcctgctgggagagttggcgactcccggggccgcggaagccaggtgcgggaggcgagcacgtttcccccgcgcgctcgcactgggaattgggtgagcgagcagaacccggtgggttaggtcctggggctgtgctcctgggagagttgtgggtctacaggacggttatgtggagcgttgcagagttttggactgcgagcgagttacttggaccccgcaaggccgttggtccccgagaagtaaatagatccttttcataataacacgggtaagtccacagcccctatggagactgtcccaccgtaaagctatcgctaacaaccattgcagttgggtctattcattcccaggccaaggatgcagcccccgggataaatgcacgccttgggatgcataagagcccagaagcacgaacatcttacatgtggccaacgaactcacgcatccccaatccatggtattgtcacttttcatctctctcttagcaaaggacaacgcaaattttttactttggctctgaaatgtgctccattttctgtgaagacccaggtgggctaaaatgaccttacactcttttcccctggtcaccttgcaaatttttgtagattatgatctcttctccctcataaactgggaccaatgtggacagttaccctgtcgtttatctcataagcacgtttggcacctaccatgtcttctataaatacgggttcctgacggccctcccagagcagtagctctgaatctgggaggagtcgcagtccccacccacaacgaatgcttgttttggttgggggtgggggcgggggcggggacagggtggaggagttcacctggagggatctgaaaacgtgtgcgggtttccccaggcggtatgggcaacttaacaaatgcagtaaggaacaattgccacactgaattaagctctgtgacacctaagaaacctgctgcacttttgagggagaagcaatgtgtttcagatcaacggattaatttaattaaaggtttaaatttagccctggagctaatgggtaactctacattgaaattccactccatttcaagttcaggaaagtaaattgagtaatggagagcaaatacaccgtccagagaggtgccgccaacccggagtgccagacagagagggtttcaggttacatttgctcaggacagagatggcacgtggccctttacatgaacaatcgttgttatattttattttgtgctgtttttaggccttttgaaaacatggagcctggtgtctgtttacagcagcctcatgtcagtggagtcaaagctcaatggccagctctgtgaaatttcaccaggattttaattattttggctaactaccttgaaacttccaagcccttttatgacaattgacttaatttacatgaccactggcctggttgggaggcagtgttaagtgaaagactccaacggtgctcctgtaaaatatattttccatcattca

SEQ ID NO: 1245073 - DNA, 4001 bp, Homo sapiens
ggcctggctgctccagggagcagtagttctgcgaagtcggcctggagaaggcgatgggcaggattccctgagtgaacgagttgaggcgtccccgactgccgctcccactcccgggggtcccggagcccaaaaaggcggccgccggcacctgcacgctgataaaggcatcgtcctcctccaactcctcctgcccggcggccccggacccgtcgagcagctgcagttgggcacaggcggcgagaggcgccggccggggcggctgccactgctcccccgacgcccggccggcgcccaggggactcgcgaacccccgcgccaccccggggccggacacggtcgcatggccgccaggaatcaagggcggcagcgacgagggctgtgggaggcaggggccggacccagcggctaaccccgcagccggcgtgcccggcgcggcgagcgcgatgcagccgccccgctcggcagcggcgagcaagctgaaccgagtcctcgcgccgcaggcgccgccggcgcccggcttggccgcgccgccctcctcgccaccgccccactccgcgtcctgcggcggcagccggccgtccagcgagatgttggtgaggaaggagagggcagcctggcggcgccgcgggtccatgcgcggcttccgggggggttcgggcggcggctgggccggcgcggcggccgcgggctgaggctggggctgcggcggcggctgctgcaatccgctggcgcccgcggcgtcggtgccggcgctgccgctgctgcaggcggccgtggtggcggccgccgccgccgccgccattgtgtccgtctgcggcgggatttccgcgatgcccggagaagcgagcggcgcccgagcgctaagcggcgggcgcgagcggcggcgacccgggctgggtagggcgcggggatcgggcggcgtgcgcggcggtccagcccccccgcgggcgggccatgctcgcccctcggtgctggggatgggggcgccgccgccccggcccacgcgcacgcctcgctacctagctcggctagttcggctcgctggctggccgcccgccggtcgcctggccgctggctcgcgggctccggggccgggtgtccgtatttataggtgcgcgcgccccgcgctcgcgctccaaagccctctttgcaataacacggaatcacgtgtggggaatgcgacctgggaggaaaacaaagccgcaggcggcggccgcagaggcagacggcgggaggcaaggggccacgggaggaggaagaggaggacgcgagagccgagcgggtggtggggcgggggatcggcccggctgtccgggttgtcggagctgcctgctgggagagttggcgactcccggggccgcggaagccaggtgcgggaggcgagcacgtttcccccgcgcgctcgcactgggaattgggtgagcgagcagaacccggtgggttaggtcctggggctgtgctcctgggagagttgtgggtctacaggacggttatgtggagcgttgcagagttttggactgcgagcgagttacttggaccccgcaaggccgttggtccccgagaagtaaatagatccttttcataataacacgggtaagtccacagcccctatggagactgtcccaccgtaaagctatcgctaacaaccattgcagttgggtctattcattcccaggccaaggatgcagcccccgggataaatgcacgccttgggatgcataagagcccagaagcacgaacatcttacatgtggccaacgaactcacgcatccccaatccatggtattgtcacttttcatctctctcttagcaaaggacaacgcaaattttttactttggctctgaaatgtgctccattttctgtgaagacccaggtgggctaaaatgaccttacactcttttcccctggtcaccttgcaaatttttgtagattatgatctcttctccctcataaactgggaccaatgtggacagttaccctgtcgtttatctcataagcacgtttggcacctaccatgtcttctataaatacgggttcctgacggccctcccagagcagtagctctgaatctgggaggagtcgcagtccccacccacaacgaatgcttgttttggttgggggtgggggcgggggcggggacagggtggaggagttcacctggagggatctgaaaacgtgtgcgggtttccccaggcggtatgggcaacttaacaaatgcagtaaggaacaattgccacactgaattaagctctgtgacacctaagaaacctgctgcacttttgagggagaagcaatgtgtttcagatcaacggattaatttaattaaaggtttaaatttagccctggagctaatgggtaactctacattgaaattccactccatttcaagttcaggaaagtaaattgagtaatggagagcaaatacaccgtccagagaggtgccgccaacccggagtgccagacagagagggtttcaggttacatttgctcaggacagagatggcacgtggccctttacatgaacaatcgttgttatattttattttgtgctgtttttaggccttttgaaaacatggagcctggtgtctgtttacagcagcctcatgtcagtggagtcaaagctcaatggccagctctgtgaaatttcaccaggattttaattattttggctaactaccttgaaacttccaagcccttttatgacaattgacttaatttacatgaccactggcctggttgggaggcagtgttaagtgaaagactccaacggtgctcctgtaaaatatattttccatcattcaaaaatgataaatgttaatttcagaacataagataagcaaagaggagcaaaaaaaaagggggtatcactaacaatatcttctgtggaaataacgtaaaacttaaattttgatttctgttttgtattttcatatattttatagagagatatgtatatatattcttttagcctgtcacccaggctggagtgcactggtgtgatcatagctcactgcagactcctgagctcaagcgattctctctgcctcagcctcgcgaatagctgggactaccggcacccaccacacctggctaatttttttaaaaaaatttggcctggcacggtggctaaagcctgtaatcccagcactttaggaggccgaggcaggcagatcacgaggtcaggagttcgagaccagcctggccaacatggtgaaaccctgtctctactaaaaatacaaaaattagctgggcatggtggtacgtgcctgtaatcccagctactggggaggctgaggcaggagggcaggagaacggcttgaacccaggaggcggaggttgcagtgagccgagatcgtgccactgcactccagcctgggtgacagagcaagacaccatctcaaaaaaaaaaaaaaaaaagaaaagaaaaagaaaaaatttttttgtagagatgaagtctcactatgttgcccgggccggtctggaacttccagcctcaagcagtcctcccatggtggcctcccaaagcactgggattacacgtatgagctgtcatacctggccttgggtgtgtttttaaacaaaagtgaaatcggctgttttgttttgttttgttttgttttgtttttttgagacggagtcctgctgtctgacccaggctgcaagctccgcctcccgggttcatgccagtctcctgcctcagccccccccgagtagctgggactacaggcgcccgccaccacgccccgccaatttttttgtatttttagtagagacggggtttcaccgtgttagccaggatggtctcaatctcctgacctcgtgatccgcccgtctcggccccccaaagtgctgggattacaggcatgagccactacgcccagccaggctgttttgtctcttgtgatttttgcctgctgtgttgtgattatctttccatgtagaatatttttctgcatggaagaatttttattttaatgactacatagtgttcaatttgatg

SEQ ID NO: 1245074 - DNA, 4001 bp, Homo sapiens
ttttagacagggtctcgctctgttgcccaggttggagtacagtgatcctcccacctcagctttcagagtagctgggactataagcacgtgtcactatgcctggctactatgctgattttcatctaattaaatcatatagaaattattaagaagagataataatatttctttttaaatggtattaaaatatgatgtcagcatttaaattccatcatttaaggcactcttcctatcttgccagcacagcctggtgagaaggaagaggccttcagagcctgaaatattccactttccttctgccatatgcctgggtcacactggctctctgattcttggcttcctgatcaacagggaagaggacagaaagccagcccttcccacctcaagggtatgaggaataagtgagatgggctgaggcaggcctttgtaaaagagaaagcagattctttccaggacccctcaatctagagaagccaccgcccccccgcctttactacctggataaagtacagctgatcctcattatccccaggttctatatttgcagacttgccgacctgctaaattatttttaacatatatatgtatttctaaataaaacagagatggggttaagccatactgcccaggctggtctccaactcccacgctcaagtgatcctcctgccttggcctcccagagtgctgggattacaggtgtgagccaccgagtccagtcctacttgctaaaatttatttgtaaccccaaaatggacactcatggcactttcatggttatttcgctgacatgagtgtgtacaaagtggcaaaaaatttgagtcacccaacacacagattcctagttgaggtgaccaaggctacatgccttctctcagctcattcttgtctttttcttagcatttttagtgccatattttttgcatttttgtgctttttgctggtgatttcactgtttaaaagggtcccaagcacagtgctgaagtgctgtctagcattcctaagcagaagcaggctgcagtgtgccttacagagaaaaaacatgttcaagaagccttattcaggaatgtgttacaatgccgctgtcaatgaagagtcaataatatatattaaattaggtgtctttaaatggaaatgcacctaggacaaggtatacattgatcagatgacggaaacgtgtgaccagaggctcacaggaacatagctacccatgtatttgcctccggagcaatggatcagtatttcctaattcagtgcttgcagcaactttataaaacaaactactgggggtaatgagatttgactatattagctaaaagttgtataatgaaaattcactccctccgagtagaggcagctactataggaggacaaagcacaggcactgacgtccagggtcctgaagcgaaacaggaaacacacaatcttggtgcccgctgggcctccaggtctccctccctttcacagccaagcagcctttggccagcatcaacccagagaacagagacaagggctctcgtccctccatccaaggtctatggagctcagaagcacacggcaggctcacctcccagggcctccgaggttccttcttatccatgtgagagcctatggcccagcccctgtaggaaataccaaggctggtcttgggggctggaggaccctccatggagccccccctctgttccagatgacctcatgccattcacaccaccctccagcccccgctgctggcccacatcaggactgacatcccgcttttccaggctgagcctcagagatcaatttccaacaaagaccgtcagcatccaaaggggggagccaaaaaaacagactcagctctctgggtcacccaggcgatcctctgacaacttacatgggaaaatcagcatatattcttgcatggcagcccctcttagaaagcattcaaggaaggaggcagaggcttcagaccactccaaactcattttatgagtcattcaaacaccaggaagaaaaatggcctggaggctaagcaagcactgttgagaccaaacctaagactcaaaatgaaaagccattttcttaaagccataggggaaaatatgtactgccaccccgtgattctaggatcctgccacgtggagaccacatgaggtcctgccgccccagacagaaatacccttgtgtttctccctgaggttgaaggaaaatggaaatgaagctaccagctctggacacggctcaacaaggctgaactagctcccattgtaagcgggagatgccaatgctaataaaatgtcacctccattacttttgccagggttataaaaagaaactggagacttcctcacttgggcatcttctgttaattgccatttacaaaagttctgtttgctaggtctataatatgcattattttccctttgaaaacaaaaagaaactcctaaaatatcaatcagccttccaaatggcaaagtgatttgtttcccaactcacactctgggatcagctcaggagtctgtctgaaatgcaggcatctggtaccaatttgtgacaatataaaatcaaagctgaactcctatgtaaatattttttttattccagatctcaccagcctccatgtatcttattcatttccttatatttcagccttgacttttattttcttggctctaacagaactgaagttacgcataacgaacattgcacttcttaataagctctacaggctaaattatttctggctctgtgaaatgctgctgctcacagagtactggattgaaatatattgttcctattgcttccgatctgccaggccccaattattcaattacgtttgtagcaaacagggtcaaataaaaaagtctggtttagtcattctgtacacacatagcagcttcccaccaacaggggctggatgggtaaatgacatgaatatcagcgtatgttcttagacagtgcaagtgttgaacagtacaggtgtccagaaacactggcccatcctaaaacaacctgttttgttcaggaaggtcacaaaatttgtttagataaaatgtcacacgtgtcaaaaggcaagagagcagagtgggagaggatgggcttccgttagaagggatccctgctctacatgacttggtgagaaaactcaattctctaaagttcaaatcccttgctgacatggtgacatcagcccctacaaaatctgtacggcaccaacagagtatatgggatacaagagtcccattagatatttactgagaactatgttctaggtactgtaagtgccttacagagatctcagatttgctcttcgcagtcacactacgaggcacccgattgttaaatatcgtctccccctctttacagatgataacaaaggctcaagaagattaaggaatcggcagatgtgggatgtgcaatttccctatggctcggtagatgatcaagttaaacaggcacgctattatgaaaaaccaccaataaaatgggagaaagacataactgctgctgtatgtggagactgcacctcagccttaatttgacttgccgagcaagaacaaatggacagcacaccgggtgcttgtttagttaccgcggcacatgattatgaggtttccagaaggcatcttcttcacatgtgagatcactcagacttcagcacttggcaatcagatacaaacatgtgcaagttgaactagaaattgtttgaaaaagctaatgatcttgctctagattttttttttaattagaagactatatgtgttcaactgaaattgaataaatgaaatctgatttgggacatttctacaatttttttttgagacagtcttgttctgtcacccaggctggagtgggtggtgtgacttcgggtcactggaacctctgcctcctggttacaagcaattcttgtgcttccgcgtcctaggtggctgagattacaggtgtgtgctatcacactcagctaatttttatatttttagtagagatggggttttgccatgttggccaggctggtctcaaac

SEQ ID NO: 1245075 - DNA, 4001 bp, Homo sapiens
gcgtctatcaacagatgaatggataaagaaaatgtggtacatacatacaatggagtactattcagccattaaaaaagaatgagatcctgtcatttgcaacaaagtggatggaactggagattattatgttaaatgaagtaagtgaggcacagaaaggaaaacattgcatggtctcttatttgtgagagctaaaaattgaaacaattgaacccacggacatagagaaggatggttaccagaagctgggaaaggtaatggggcctgggtgggggagggggaaagtggggctggttaatgggtataaaaaatgaataaaacctactacttgaaagcacaacagggtgtctatagtcaataattgtacattttaaaataacagaaagagtataactggattgtttgtaacacaaaggataaatgtttgaggggatagatgccccattcccaatgtgattaacattgtatgtctgaatcaaaacatctcatgtgccccataaatatatacacctactgtgtactcacaaaaaaagaattttttaaaaaatcagaagtggggattccgcagtcccacatgctaaatgctaaggggcataggcagcatgacatgtttgatacatacatactatttgatacatatatatatttgatacatactcatatatatcatatgtctaattttctttaagtacccaaagtgagtagatagaccgttttgaaagtggctcccagaggccgggcgcggtggctcacgcctgtaatcccagcactttgggaggccgagtcgggcggatcacgaggcgaggtcaggagatggagaccatcctggctaacacggtgaaaccccgtctctactaaaacaaaaaatcagccgggcgtggtggcgggtgcctgtagtcccagctactcgggaggctgaggcaggagaatggcgtgaatccgggaggcggagctgacagccgagatcgcgccactgcactccagcctgggtgacacagctagagtccgtctcaaaaaaaaaaaaaaagaataaaaaagaaagtggctcccagaaaccatgatggcgccaacaacctttcaggaggcagttagcagttggtgctaccaaaggtggggacagcggccatgcactccatgatcccccgtcccactagttctcaccccgactttgggaacgtgtggggccagggacgctaaacgtcctacagttcagttccccacaaagaactgtcctaagcaagctgagaaaagtcaacgggtaaaattgtcacaaacactattagggttatttaaaagcgacagcttaataattcttcccagatctctcctatcaccaatactggtccaccactggcggaatttaaatcctgccccgcccaactgtaaacgtccatgcgcccactaccacaagggtaacgccttaagcgagaaatacgatgcctttcaggatgccagcggggacttcggagccataggtaaccgcactccccgacctctccctaaagaacctccgggatgtgggcccccgctgtgtcagtgctcgttttgcgctaggtctgtttgggagagacgggagtgaaatgtaggaggctgggcgtgctcacatcgcctggacttgtccaagagaggcgggcgacggacccaccgaggcctcagattcggcagctggccgtctggtcgccgcactccccggtgtgggccggggccgccccacaggccccccacccccgactctgaggaccctccgcctgccccgacgacctctcccactgcgagagactccctgagacataatggtctccgaggccgcagggtgcgccttttctccagattctccccacctgctttccggccgcgctcttaagagcttcctcgttgcccccttgccggcggctcctgaggagacttggcgcttgcgagcgtttttatagccccgcaggcatcggggcgtgcatcacgaagctccgcatcacaaagctccgcaccactcaaggaggcggggccacagcggccgcagccaatggggagccgaaagcgacaaaggccatgatttggccggcgagggagacttatttccccttttctggctaaatctgaacggatttaggtgatttcccaacaaatagccaggagtagctcaaagcgactgcctctccgtctttggtcgttgagcttaaaattagagctcgtttggaaagaaagtaagagatttatggcagtgctgtcttgtcactgcctcgccattccacacattgctcctggccccataaactatagctctcttcggtcacctttaggaataataatttctgccacgttgtagacacacagtgaataattgtatgcaacagagcactttttcttttgtgaaactcgcctgtggaatgggagttcagcatgaatccagaaacttcctgtttctccacagttgagatcagacaccaactatccccacaaagcacaccgtcagcaacaagtcaaggtgttactgtgtgtaacttcagctcaattttaccaaactaaaggaatactgcttcatttaaaaacgcccactctgccgggcacggtggctcacgcctgtaatcccagcactttcggaggccgaggcgggtggatcacgaggtcaggagttcaagaccagcctggccaagatggtgaaaccctgtctctactaaaaatacaaaatattagccggtcgtggtggtgggtgcctgtaatcccagctactctggaggttgaggcagagaattgcttgaacctgggaggcggaggttgcagtgagcccagatcacaccactgcactccagcctgggctactgagcgagactccgtctcaaaaaaacaaaaaacaaaacaaaaaaaacaaaaaaacgcccactctctgctctttcactcatttaggctcaggtatttgggctgggctctaaataacaccataatcatgattatcagagtacaagcagccttaattttgatccatcttcaaatgtttaaaaagcaactactttaaaccaaagagcatcgccagggcagatatctgaccaaaaacaaaacaaaacaaaacaaaaaccaaaccaaaataaaacaaaaccctattttttaattcagaaaaaattagggcttccagagcactttgcaataaaagcaatgttaaggcctcagtcagcattatctggtgccattcattaatccacttaataattattttactgagtgccaggaaagctccctcttctcgggaagtttacatacttaaaaagggagaattagcgagactccgtctcacaaaacaaaacaaaaaaaagggagaaatgcttttagactgagtatgttggtgggtctgcagatatttttcatccttcatcacttgcctccagcaccactttggtaatgtaaataaaagtgagatgaggctgtcatgatttctgatagcttggtttataacacatttaggtgtcagagacataatgaactgagctactgaaaatcctaagtacctcatctatggtgtcttttggaattggagacatttatggtttttttaacgtaaccttggtgggtcatctcaaacatctattaggtgtaaggtattatgcagaaatacctgtaactcaaaaaacaagattttactctccatttcttcagtgactgtttggctgagtcattctgaaatgcaaattgttacaatgtaaacatctaaccaagaattttcaaaccactgcccatcgctgctttgatttcttgaactcttaatgatttgatgtggtttcacaatcttggcttgtgttcatctccctttcaatcaccagtatgttattttttggtcaccaatgatttaaaacgcaaatgtaccttccactgcccctctcccacaccccaaatccttaccctatggaagtccatggttgtgggtgtggcctctgcatacctctcgtatttcatgtctcaccatgtgattcccacttgaccctccagagtcttgaacacacatgtcgcttatcacc

SEQ ID NO: 1245076 - DNA, 4001 bp, Homo sapiens
acatcagttgtatgggagaaccacagctattctggatactgaaacccaggagaaatttctcccccaagtccttataaagcaaatagtgtgatataatgaaccatgtcctcaacaacatccctacagtaaataatgagtttcacggggttaagtggcatagttcagttacaacaattatagaagggcacagcttctattataaagtaacgaatatctcatagcaaaatgttcaatacttaaaaacacatctcatcttcccaaaggtcaggacaaaatgaatctgtactggccaaagcaaatcctttcagtatataattaagtataattgaatcccttaatgaaaacttccttttacgatatcattcaacagatttactgaattaaaccatctttaaaaaaccagaagtgatccagcaatcccactgctgggtatatacccaaatggaaatcagtatacagaagagatatctgcactcccatgtttgttccagcactgttgacaatagctaagatttggaagcaacctaagcgtctatcaacagatgaatggataaagaaaatgtggtacatacatacaatggagtactattcagccattaaaaaagaatgagatcctgtcatttgcaacaaagtggatggaactggagattattatgttaaatgaagtaagtgaggcacagaaaggaaaacattgcatggtctcttatttgtgagagctaaaaattgaaacaattgaacccacggacatagagaaggatggttaccagaagctgggaaaggtaatggggcctgggtgggggagggggaaagtggggctggttaatgggtataaaaaatgaataaaacctactacttgaaagcacaacagggtgtctatagtcaataattgtacattttaaaataacagaaagagtataactggattgtttgtaacacaaaggataaatgtttgaggggatagatgccccattcccaatgtgattaacattgtatgtctgaatcaaaacatctcatgtgccccataaatatatacacctactgtgtactcacaaaaaaagaattttttaaaaaatcagaagtggggattccgcagtcccacatgctaaatgctaaggggcataggcagcatgacatgtttgatacatacatactatttgatacatatatatatttgatacatactcatatatatcatatgtctaattttctttaagtacccaaagtgagtagatagaccgttttgaaagtggctcccagaggccgggcgcggtggctcacgcctgtaatcccagcactttgggaggccgagtcgggcggatcacgaggcgaggtcaggagatggagaccatcctggctaacacggtgaaaccccgtctctactaaaacaaaaaatcagccgggcgtggtggcgggtgcctgtagtcccagctactcgggaggctgaggcaggagaatggcgtgaatccgggaggcggagctgacagccgagatcgcgccactgcactccagcctgggtgacacagctagagtccgtctcaaaaaaaaaaaaaaagaataaaaaagaaagtggctcccagaaaccatgatggcgccaacaacctttcaggaggcagttagcagttggtgctaccaaaggtggggacagcggccatgcactccatgatcccccgtcccactagttctcaccccgactttgggaacgtgtggggccagggacgctaaacgtcctacagttcagttccccacaaagaactgtcctaagcaagctgagaaaagtcaacgggtaaaattgtcacaaacactattagggttatttaaaagcgacagcttaataattcttcccagatctctcctatcaccaatactggtccaccactggcggaatttaaatcctgccccgcccaactgtaaacgtccatgcgcccactaccacaagggtaacgccttaagcgagaaatacgatgcctttcaggatgccagcggggacttcggagccataggtaaccgcactccccgacctctccctaaagaacctccgggatgtgggcccccgctgtgtcagtgctcgttttgcgctaggtctgtttgggagagacgggagtgaaatgtaggaggctgggcgtgctcacatcgcctggacttgtccaagagaggcgggcgacggacccaccgaggcctcagattcggcagctggccgtctggtcgccgcactccccggtgtgggccggggccgccccacaggccccccacccccgactctgaggaccctccgcctgccccgacgacctctcccactgcgagagactccctgagacataatggtctccgaggccgcagggtgcgccttttctccagattctccccacctgctttccggccgcgctcttaagagcttcctcgttgcccccttgccggcggctcctgaggagacttggcgcttgcgagcgtttttatagccccgcaggcatcggggcgtgcatcacgaagctccgcatcacaaagctccgcaccactcaaggaggcggggccacagcggccgcagccaatggggagccgaaagcgacaaaggccatgatttggccggcgagggagacttatttccccttttctggctaaatctgaacggatttaggtgatttcccaacaaatagccaggagtagctcaaagcgactgcctctccgtctttggtcgttgagcttaaaattagagctcgtttggaaagaaagtaagagatttatggcagtgctgtcttgtcactgcctcgccattccacacattgctcctggccccataaactatagctctcttcggtcacctttaggaataataatttctgccacgttgtagacacacagtgaataattgtatgcaacagagcactttttcttttgtgaaactcgcctgtggaatgggagttcagcatgaatccagaaacttcctgtttctccacagttgagatcagacaccaactatccccacaaagcacaccgtcagcaacaagtcaaggtgttactgtgtgtaacttcagctcaattttaccaaactaaaggaatactgcttcatttaaaaacgcccactctgccgggcacggtggctcacgcctgtaatcccagcactttcggaggccgaggcgggtggatcacgaggtcaggagttcaagaccagcctggccaagatggtgaaaccctgtctctactaaaaatacaaaatattagccggtcgtggtggtgggtgcctgtaatcccagctactctggaggttgaggcagagaattgcttgaacctgggaggcggaggttgcagtgagcccagatcacaccactgcactccagcctgggctactgagcgagactccgtctcaaaaaaacaaaaaacaaaacaaaaaaaacaaaaaaacgcccactctctgctctttcactcatttaggctcaggtatttgggctgggctctaaataacaccataatcatgattatcagagtacaagcagccttaattttgatccatcttcaaatgtttaaaaagcaactactttaaaccaaagagcatcgccagggcagatatctgaccaaaaacaaaacaaaacaaaacaaaaaccaaaccaaaataaaacaaaaccctattttttaattcagaaaaaattagggcttccagagcactttgcaataaaagcaatgttaaggcctcagtcagcattatctggtgccattcattaatccacttaataattattttactgagtgccaggaaagctccctcttctcgggaagtttacatacttaaaaagggagaattagcgagactccgtctcacaaaacaaaacaaaaaaaagggagaaatgcttttagactgagtatgttggtgggtctgcagatatttttcatccttcatcacttgcctccagcaccactttggtaatgtaaataaaagtgagatgaggctgtcatgatttctgatagcttggtttataacacatttaggtgtcagagacataatgaactga

SEQ ID NO: 1245077 - DNA, 4001 bp, Homo sapiens
agaaacgcccgggcgcagctggcagcgcatccctgaaggctcccgagcagcgcgcggggctgcgacgagggagggggccgcgcttctgcaggtcctcgtcgctaagacgggccccgagaccctcagaaggcgtcaccgccaccccgcccattcaccagcgcggagggggctaagacgcaggcaaagaaaaacctacgaatgcttgccttctcgccttcatctcacagcatttccttggagcagcaccaaggaacccttttcctatcccttgtttccctgctatcctctatttttcaatcctcgagatgtttttaaagtccatttaagtccctttggtacagattttatctgttttccacccacagaacaaatcccaggaatctccttggggcgaataagattactaggggggaaatgacaccacacacacacacacacacacacacacacacacacacacacacacacacgggcagtaaagccaaacacctacttccaaggtccctgcagccactagcgagcccccttgggtgaaacccctgggattcctctcttaggcgaaggaccgattccaacgacggaatcccaggcttgggttattctccagctctggtttccagaccacggggattctctctttctcagcggggcggcagcccctgcaggtttctgcgaacttacgcgcccgtctgcacttttgccccgtccccgctcctcccaggaaagcagacaggccatttcaataccagcccagagacacgcagagaagccgccccctcgccgcccacagcctcccattaactcttccagtattctttctaagaacagagaagttggctcttgataaatatccgctgtccgcagccccgatcctacatgatttcccttctctctctccacctcctccacccctcgatctggaccagggagagtcttcgttaaaatccacgcagaaggcgcttgcatgcggaggggagggcaggtcgggggtggttacctggaacatccatgctgggcgagctccgctgtccgcgaagttgctctgcttagagaaaatgaggcgagtgggagctgtcgggaggaggacacggagcgcgaccctgctcccagcgcgtggccaataaccgcgccgccccgccctgccgctttcccgcgccagcctgcgccgcttcaggggtgcaccacgccccgcgcgcccgcttaggcgccgcgcccgggaccgggaaccccgcgtctcgcccggctcagcgccccgcgctgtgcgcccaggtgcctccaacccctgggcttcgcgcccgcaccgctgcctggggcccctcgagctcccgcgctcagcgcgtccgcagcgcggctccctcgcgggtcccctcggccccgcagccccgccagtctccagagggcatagccgagcgctgccgcctccctaggactcggaaccttccctgctcccaagcccgccgcaccctccaacgccccggtcctgctcacccaaacgcccagagcaaaatactcccagacgtctcttttgaaaattagacacccttaaaagcaccggtcgcttctcttcttttagattctttcttttctttccccaattccctccaagtcttaatattgaatggcgtgaccactttcataatgacaggagcgaaaaaaacaataagttaaaaaaaaaaaaaagaagaagaagactgggatggctgggacgaagagagggaaaaaaaaagcttgagaatttgatgatttaggagctgtggttccagagtcccagttggggaactgtccggttcccgcagggctagaagaggggcctccggcccgggtctgtgtgtctgctcctctggacctcggactggtggagcggctggcgcttgcgcttatttattaaattgcggtgtccgcgctcgctcaaaggacccggggagacgcgctgggtttcccagctgcgcctggagctcggctgagggcgcaaacacggacgtggggcgccacctgcgggtgcccgggcctccctgccgcaggctgcggaccggcggactccgacagaagacgggggagtcctggccgcaaggctgaggtttgctgatggtcttctttcaccccaaaagcagcgctgacctctgcaataataataatataataataataataatgatagcaaccacaagaagaacaataatgaccagtcttcccggtatccttcagtacttttactcctggcaaaaccaagcagcacgccgcctgattttccggatcttcactgatctaacaaacaactctgccaagatgataaatgctgcggtgaggttatcatcggttattatcgtcggcacaacgtttgcacagacaactgggccgtatagtttatgctggtctaaaaaacaatcaatatttaaatctacactctatagcctgatttttttttaaaacatggttaaaaaatactttgtcctttgacatgcattatacgtcttttctgataggctaataataataataataataataataataaagttagccagtgctgttcattagagcatctgtatttcttattcctccagacttcacaccgaaccctctcccctttgaagatttcagcagtgtctgattccaccttaacaaacggaggtcttttcaggtagggggttttgaaggccttattttcccataggccctctcaccgctattctccccatttagaacagaactgccaaggcatcatctctaagcactggagatgaaattcacgatcagttcaactggaatggatatgcagaaagtcattgcacactgctgcgtgagacaaaatatttagtatgggtgtaaggatgtgattaaaagtacctctgagccaaatgcttcctggttaacctagcatgcaaaatagtagaaaatatacaatacttccaaaatctctcatcctcctaagctatactcactgtaaagtaaatgtcatacttcaacacttttgtaccatgctggagataggtactggcatttgccaggatgctttttcaaatccaccacagtttgccatgttttgttaccatttttgtgagtttaacagagtggaaatgcactcttactttcaaatagttattttattccactatttcatccatgtgatagtgtcttactgtcaaaataagcccccatccatcattccaccatagagagaactgatttaagtgtaagcatagatagcaaagaacactagatatttgaaagacatgtgagacacagacataattagaccaatctggggatgctaatttatagcaatacctctcacacatctgtaagtccttaaatagcaactctactcagcatctttcctcaatactgtaagcattccttttgactaatataaatgcaagcacacatgaactatcgtcatcaacactgggggaaaaaagaaaaccactttctatgtggcaacataaatgtttagattatatatatgtagagacacctttaatctatgtgacttattggactaagttattgaaaaaagctataagcattcttatataataaacaggttaggtttaatttagactagagattattttagaagaaaccataaaagatagcaaattgacagagaagcagattatttattcattgattaattagttgtttcacataagaagatattaaagtcggccgggcgcggtggttcacgcctgtaatcccagcactttgggaggccgaggcgggcggatcacgaggtcaggagattgagaccatcctggctaacacggtgaaaccttgtctctactaaaaatacaaaaaattagccgggcgtggtggcggacgcctgtagtcccagctactcgggaggctgaggcaggagaatggtgtgaacctgggaggcggagcttgcagtgagccaagatcgggccactgcagtcctccggcctgggtgacagagcgagacgctctctctcaaaaaaaaaaaaaagatatttaagtcaagtgttggaattttagcttgt

SEQ ID NO: 1245078 - DNA, 4001 bp, Homo sapiens
attttgttcagcattcaccccccgcacacgccaagagaaaggagcctttcctaagcccaaggagtgacttgatttgcctgattattgtcccttcactgccaacaacagatttaagagcagaagtacgcgatgtaactgatggtgcttttgcacccataaactgacagccgtggaaccacttggtctgaacctttgggtatatgaaatgctctcacctgcaagaaacgctatgattgattcacaggctacaaccttataaggaataaaacattgttttctttcaagttcgtttctagggactgctgcgttaccttgtactactcagtatttatcctggcaacccgaacagagcatgtgagtctccagagacagtcaggtgtgggcatatgatcacattaccttgtacagcgcctctaaaacgcagatatccaataaacgtttatgggtgcatgttcccctatccagtgagagcactggaacagaaccaagaattcaatggtgaaaaacctaaatcaaccctcatctccaaaaggctgcaagcagaacagtggttctctcctttcagagacaagaaccacctggggaacattttataactaccgattccctagccccatccacgcttagttttaacaagcacccgggtcactcatttaacaaatacccaggtgaatctgtggcccacatttttagaaagacttttttcctctgccccaacaatctttttgttttcactcaacacaaccactcacaatcctccccctacttttttgtccagaggccgtgacagccacactctgccccaacagaaggtcagaagacagacaagtgccaagaattgccttgttgacgctgtactttcaaaacaaaacacaaatacgaaagcagccacccgtgtttgctatgccccactgtttacacccaaaatccaatccaatctccttcacagacttccacacaagtatttcagggagcggcaaccatcctcaggatctcagggcacacaccctagacgcaaagtcagttgctcagtgttgctctgactccgatccaaccaaccctcaaagattcgcaccgcgcggcacgcacccagcaggttccagcgtaaaagctgctccggtcccaagcgcgtctccaaacccctcctttacagcgccgcctccccagccagccccggtgcgcagtggcgaacagcccgcagagcccccaggcttacctgtagcatgtggtgagctcgcctgaagacttcagacacgggtatttagtcgtcgcgattttgctctctgagcagatttctctatgaaaaagtgcagaggaaatgttcgattctcagcgggagagcggaggcgggcagcgcgcgctggggaatccctggcgcgtggggatcgccaggctccccgtcccggcgctctgggcaggggctggtccccaaacgcgtacgcggggcagactccggccacagggacgagccacgcgagggtcacgacgaagcgaaccagctccaggagaaaggaagcggggttcacgagctgtgccagccagtgtggcacccggggggaggcaggaacgcggggcgaagggtatccctgacgcgacccacggatggcagggcgcaaaggctgatacccgggagcggagggaagtgtcgcccaggacagctgagcactctccttatccccggagaagtgagggcgtgcggatcgctgtgggagtgggcgccggggaggaccgcccgcaccccgcgagccgggcgcgcatcaagcaggagctcgccctccgctggggcttgcagcgcttacctgtcgccgtcctccggctcctctctgtaggtccacgtgtgtcccaacgccaggagcagcagcagcggacccaggctcctgcccagctggcccctggcagctcctccccggctcggaggcggcggcaccatcagggaagctcccggcttcttcccagcgccgagctccgtccggaccaagcgtcctgctcctccgcggccgccgccgccttccctcttcccggcagggggcgccggagagcaggggcgtttgcaccacctgcacggggagcaggggtccggaatattatggggctggggggaaaatgaggctaggagttggggtatcggatgcaaacccagcagagaagcaggtaaagggggtacctgcggtgtccggctggcgcgagggccctgaggttcaagttgtctcgtcgggacgttcacgtccgattgacagacttgctggactcggcttggggctgcgccctcgcctcttccctctccctcctctgggagaagcgcgcagggtggggaaagcgggcggttgtttgcattttgcaccagggtctcacgaccgggaggaggaggagctgattctccaccggggagaagagggagggggaagagaggggttaataagcttccttcctgttgtccatgggtttctaaagcccagggtcaggccagtgttcgtctttcctccgtgaggacctaccctgagatttgcaactatcttagtcttcttttctcttagattatgtgaggaaggaggagttgaaaggctacaacgggcctctcaaattgttcaaacctgaaatagcgctatttatatagtgtaatcactcttccttaaaacctttagaagaaagttctctggttgtttcattggtcaataaaccatgcgctgtcttcttcataactcgagttcggaacaagtaaggaggtctttctgggagccttacatctccttgtcctgagcggctttaatactgtttccacgccgcgcacatcagagctggaaacgcccccccccatcaaatgagacacgtgggggcaaattaattacaggtgctgctacctgctagtgtatgcagccgcgttgataggtaacaagaaaacggaggaggggggccgtaaatcggctcccttgacggtgaccctaattgtaattcgtgtgtcagcaacttaacactttgttgcgctttaggagttttctcagccttttccagagaaactggggacgtggatgtggcccagaaataagttgaaaaaggaaaagttctaatgcctaagctctaaaatatgcgtggttctgcatctcacaggacaacgaggtaaaaaggtggcttgttcacaagtgaccggtgtgtaaattggttaggtaagcacatattttgatatacagaatatgctggtcaactgagaattaccacacatatcacatacacattgacttttttttttttttgagacggagtctcactctgtcgcccaggctggagtgcagtgtctcgatcttggctcactgcaacctccgcctgccgggttcaagagattcttctgcctcagcaccccaagtagcagggattacagatgcatgcttccacacccggctaatttttgtatttttagtagagacagagtttcaccatgttggccaggctgctcttaaactcctggcctcaagtgatctgcccaactcggcctcccaaagtgctgggattacaggcgtgagccatagcagccagcccacactgatatttttgatagcaatgacattgtcattcttccgtagaatgctatgtcttttcctaagatttttcatattcaagattttatttggttcccacaatatcccttcaatctgagcatctgatttcttagttctgtgaggtgtgttttttgttggcttattttacaaaacttacatattcggaagaccacccacttgatattaaaatatgacactgctacttaacacaaatgagttaatttttatttgataattcagaagacatttcaggatgttgcaaaactggagagtgatcatcatgaggtcagaaaaaaaaaaccatgaggtcagaaaaaactggattcaaactcaggctgtttggtttcctggaggagtgatctgaagcaatttacttctgacactctgttttctcatctgtaaaatggggaaatatctctcatcaatttttatgagtattaaatgaagcaa

SEQ ID NO: 1245079 - DNA, 4001 bp, Homo sapiens
atttattttatagagacatggtcttgctctgttgccaggctggaatgcagtggcaggatcacacctcgctgcaacctcaacttccctggcccaacttatcctcccacctcagcctctggagtagctgggaccacaggtgtgtgccaccacatctggctaattttttttttttttttttgaaacagagtcttgctctgtcgcccaggctggagtgcagtggcgcgatttcaactcactgcaagctcggcctcttgggttcatgcattctcctgcctcagcctcccaagtagctgggaccacaggtgtctgccaccacgcccagctaattctctgtattcttagtagagacggggtttcactgtgttagccaggatggtctcgatctcttgacctcgtgatccacctgcctcggcctcccaaagtgctgggattacaggtgtaagccaccgcgccaggccacatctggctaattttttaattttttgtacagatggggtctcactgtgttgaccaggctggtctcagacgcctcacctcaagcaatcctcctgcctcagcctcccaaagtgctgggataataggcatgagccacccatgcctgggacttgatcagtatttagatttcataaaatttacagttgaaaaagtagattcacatacctcagttgttccaaccacattaaaaaaactttccaatagctgaatcgagtgtcagtttttgagtttactgaaattaaaaaaaataaatattcagttatttcatcacactaggcacatttcaaaagctcaatagccacatgtggttagtggctacactactgaaaagcacagatctaggtcaactggcttttgttgttgtccacatgtgaacttaaactgtaacgcaaatataagaggaaattatttcactttgcatgctgtggaagacagaaaactttgaaatacatgagaatgaaaaaaaaaaattgaatatgggtcattcagagaccttgccaagaaagtagaaaagcttctgtataagagtatcgaggcgatggtactattataaagctgttccaccaccaccgggagaacattcccatcatttcaacagtccccttacgttttagtctacttttttcttaaaaaaaaaagaaaaaaaggaaaagagaaagaaaaagaaaaattgaatctgtagagggcttgcgctggataccatgctgcatgcacaaagggggtgacatttagggcttgctctcaattagagtgcaatttaatcttctagtcactaggaataacgacgttttatgacatttttgcctgttggaattttgaacctaaggtgaaccggctgacatcatatcccccttctgttgttgtcacaggttttcaaaatttggtttgatctaaattctctggtaccttatgtcccataaaaatttcatctagttcgtaagtagtgattgctgcagtaaccgtcttataaaagtatatggtttttacaaatcattgtcgtatagaagaaaaaacaggtagcaatataaatatttcatactactttatctagttccaaaataatcagaaaagagccatcaaaaaatatcctacgcttaacttcatgttctcaagtttcaagagaaagtttttaaagaggcaatccttactttggcaaaaatgcattaaagcttgctgcatttaagagatgtcccattatgcaaacaggttgaaagaatattacaaatacgttttggaaaaatacggagtgtcgcgcagctcagcaatccgcagtcttaatgcgcgcctctttccaggaatttgatccagcatcaaaacccacaggtgcactcaccacacgggagtaacaagtaaatgatgtgccagtattcaacctgcaagtgcgtcgtcagagcctacctcaccctcagcataactttcaccggtattcaccttcccggaaacgcgccccagtgaaccagcaccgttttccctagtaaagcccttaagcagggttcccacgctcctgggcgtggaggggggcaccgagagcgcaaaggattcttaagacatgactgcgcaggcgctgtcgcatgcgccgcactcccctcgcatgcgccgcactcccgcgcatagccggagacggagactggccgggtagccccgcccccgtagttagcgcggtgcttctcttccgctccgggtcggctccgtttccctttccgggcgggcaggcggcggaccccagtgtctttatccctcttttgcacagtcagcttctgcagctctcccgggctagcatggcagcgtggaagagttggacggccctgcggctctgcgccacaggtaatgggggctcagcggtcgggacgctggcgggcgcgtgggacctggccccgccgtggggccgggattggacccgggtctggggcgaggcctgcggggttcgtggagatgcccacccattcccggcagcgtcctgccgcccccgccgcgccaccctgcctggccctgacggagcggacaccttggggtccttccgccgccgctgtgccggaccaatgctggacgtgggaagggcgcgctgccttgtgtttgtgtttttctcattgtggcagaagtttcaataaagcttactcctttgatgggcaagaaggatgccgccgtcccagcttaacgaccaaatcttgccttggctttaggttccgagtcttgtcacgtttaaggatttttaccaccagtactcaagagagggtggtcgaggacagatcagggtcaggccgccgggattgtgcggtgtgaaaaggacctgagtgtgtgtcagcggttctcagctgcctcccgtcagcatggagtgccctcattctcactggggtccgctcacttaacaaccttttagagcccactctgtgtcaggcactgccgtgtaataagtattagagttgcagctcgactttcttcctacgtatctatttgaggggaaatattttgaatggcatttggagtttttacggaagaggtaattgctactaaagcaaaagaaataaagaagaatgctgtctatttgtattccaaaaagataggatggttaaaaagagacgtaagatgagagtgaaaatatggaggaaaaaggaactgtgtgtattagatttattggcttacctagaacttggccggtcacgatatggttgcatacagactaaatatttattaaatggatgaactacctttgcttttgcatcatttgcaccctgggatgcatcagtgatgaattttttggtaggttgtgaaaggtcaaaaacacttcagagatgactaagcttatacggtatgagccaaataatcagcatttattgtgtacattttgtctttttttttcagttgttgtacttgatatggtcgtctgtaaaggatttgtagaagatttagatgaatcgtgagtatacatatatatatttaaaatattattttaactgtccaactcagatatctgaatatttgcatgtgattctaatattttagattggaaccaatttttatatatcactcatttttttcacttgttgtaagtgaaggtgagggtgtgcccagaagagttttattaatagttatgagatcaaaaaactgtggcaaacttttacatattctttttttcctcattatcttaccttgtatttatgtctttttcctttaattatattgaatgggtgttagaatttggtaactgtactgtatttatcttcatagtatgacagcattaatcagccttgcttatagtaagtgaggaggttcacttcagacccaaattcctgtgtgtgatctttcaggcttgaccatagacaattgcaaggctttttctggcataggggaaggtgccctccctacaccaaacttggtgtataaccggtgcattacagtccctggagggagtggtagtcaaggattcggcctcccaggccagccacgctcatttgcatgtctacactcccaacccagtggtctctgtttagcagcctccttattgggac

SEQ ID NO: 1245080 - DNA, 4001 bp, Homo sapiens
aaattgtggatatgtatgtaaatcaccttgcaagcagaaaatgctattatgtgttggcaaaatgatgatgatgatgattatggtaaagatgatgaaaagaggcacagatactccacctcttttcagaaacttgcaattgtcccctttgtatgatatgtaaaggccacatttttctgtgtgcaatgttaagatgctctatcaatttttcctgttctatgtattgagtacaacgtctgatactcacaaaggtatattttttctgctccaatcagataaattactcaccattcttttatgctctatgctaatttgtgttcaaaaccctttttgccaattacttcttcaaagtagagtattcctcttgctttcagcacctatccaagttccactagtttttcaagactaagttcaagaagttgaacttttctttaaagcctctggcatctctttaggactcacatacctgctaaaaagggaatttctgaatattttggcattatggcagaattcaattggtcttgtaatatcagcataagagatatgacgacctgagagcatttcttgtattttaagaattacagccattgttttgtaactgtaataattagatgaaacattcataaattaccttgaagccaaacccatagtgaggcccagaaacaatgtcccagtgatcaagcaattattgaatccaatgataacatatgaaggatgcaaaagagagacaatgaaattatctatgatttcataagaacataggatattttggaaaataaagcaattcacataaagcatttttctgaatatattcaaataggtcacacaaacctacacagatattgtatcgctaacttataaatcttctttctaatttattgctttcattaaaatatgaaatagaattcaagaatatttactggatatataaaaatatttattggcaataacatattttactaacaagagaatatttactcaaaagttgtaataacaccatttcccatgaaaattattagcaaaaacacattcacattattttagaaaacagaaaaactggtattgatgtaaataagaatatcaataaatattttatatattttggtcctatgttactgacatatttctaattatattttttgacgaatctttcttatatttatatttaataaatgtactcacttgacattcaattgataatttatctttgcagaaaacgtaagcaaatgcttcccaaaggtttccagagattttttttcagttttataatttacttctatatagctaagcattactttttattatgcacaggattttattattttattctgtatccctgtctcctccacactatacaggtagcatgtaaagaaatcaatattcatgctaagtttgaaatatactttccattaacgaatacaagaatttagcatgaagactcaacaattgaaaagaattcaaggtacatgaggcatagataggaggatttccataacaattttacttttttactgtaagaatatagattacttcaaacacaatgactaattcacattcatttggaacaatgaaacaaaattttaatatcaacatatactattactgtctaaatgtagagtcgaaattcttacctgagttttgcttagtatacagttattttttaaagacaggaaatgtatgacaaattgtcaggataataacacccacagtggaaaaatgaaaggggaaaggaaggaatcactttaaaaagaaactccaaatccttctgcttcccagctctacagtagttttgctctgcatcttgtaagcaactgtctttgctctgagaacaacacatgctgtacctcagcaggaaaatataaaaattaaatagaaaaccacaaggttattaaacactcttaccctctgggcttgctgggctgctccagtgtctcagttgcagccacatgtgtaaacaacagaatttcctgcatccttttctcatccgtacagttctggagtcctagccaacaggattatttccagcattaagggcactccacacaaactcaaaaaagattcccattggttgtgaagttttattgaaaccactaccacaaccccctctttggatcaccattgagccaaccaaaataaaaccatttttaatgttccctaagtatggttatccaaagctttccatacaaccatttgaaacctgtactgtggatgaaaaagaaaaagacacccacgccttgatccacaagtgttcttaatgtttaattacaacagtataacttgtaataataatagaaaaactaaaatagcaaagcaaaaaaaaaaaaaagcccaggaagtacctatctgaaaaatatttaaaaggaaattatactgcacattacaggaacaatataaaatattcatccaatctgatttgcattagattgcacaaaagcaaaagaaatcatatttaataaaagatttgagtatacaaatcatgaaacaataactgcatgtcaaaacccttgattgtggtcacattggcaggaattgtgagctgtagtccccggggtgcccagtgaaagctctctggcccctttccctggggaaaaagaatatgaagtagctttccattgacatgactcagctgtcaggaagtgttctgatgggggttgaggggggaggcgagagatcacataaaaaagagcttctctggttgaaactagcagcaaaaaaatgtccaaagtaaaaaagaaaagtcaaaaggtaacaggatagccttgctccttttaagtagcaaaaaaacaacatttgaaatttaggcaataaatgtcttcaaattattttatttttcacccttccctaatttgtaggcttattacggtgttatcatctatctctacttaacattcttttcccacttactttctgatgcaatggaaaaggtggccatcttcctgtataaagccaattgacccatcgagctaaacttaatcatgattctctctcctctatctttgaacgttccctcctgtccggattttccccacgtgatgttaaataccatacattctctagtcaatttcatgtatgccaatgaactttacttttaattcagtcattttcactttcaggtaccattctttctgtcatggccaaatgattgaaagttctccagccaagaattttatttagtcttgcatccacctgattttaattcatcaaagtgacaatacacacacacacacacacacacacacatgcatgtacataaatattctatttatttttaatttttctaactcacctcaatccttctagttgacatctacacagcctttcatactgttcacaaccctgcccacatgaagacatctcttgtcttggcataacactctcctggttttcctcttgacctcttttgctggcccttctcaccctctttgatgatgcctcatcctccatccatcctttggtgtgcatcacatatgttcttagataaatctacatataaatggtatattctctctctggataaagccacccatcctcatagtttaaattaccatctttctttttagatgactcccaaatatctacttttagacccaatgactgtctgaattttcaatactcatatttgtcagcccactatacccctcaactagaaaattacacagatatggcatcagcttatctaaactgaaatcatcatctctccatggacctgctgtgttatctatgtaaatgtcaacccagttttacagtttcccaaagaaaaattctggaagtcatccttgactccttctattctatatcaaatccagcactagttccttttgattatacttcaataatttgcccagtcttcttttctcactgccactactctggttcagacaaccatcatgatctttctagatcactgcagtgtctctctgtctcttaaattgtctttcttctcccagctttcttctgctccatctttaaaaagatacagtagtctatttccggtacttatgcac

SEQ ID NO: 1245081 - DNA, 4001 bp, Homo sapiens
cacatctgcatcaaccagtccagaaagccaaaccataacttccacagtgatcagcatggaacagtcaggactttgttgatgactgccagctttcctaattattgcccctggttccaactcgagaccaagcagagaaagccagataagatcctcagaccagtcacataaagtatcctgcttctagttagccctccttcagcatccccatgtcaacaacctccagtcaaaacatacctgaagctttatagcttccccactcccctgtctgcatttgagtctctgtccaatgcaagtaatagtagctcactcccttcctctagcaagatctgaataaatagccttggcttgttctaatgtgagtggtcttcttctatttcagcagcattataaatgaagttaaaagttcaacatcgattttaaaatgccatatacggcatacacacacacacacacacacggcaaacacacacacacacacacacacaatttgtgttattgtgcagaaaacagacatgaagttaccatggccattagagctcacacacatgcaaccatctgcttgtagatgtactaattttccaccaggtatataacccagatgcttataaaataatcagtccaattctctccctatatcattacctcaatacaaattcttcgtctactttaaatattccagttgcttaatctttctgcttttccctgctcattcaccatacatcatcttcctttccatgttgtctgtaatctgccatctagcattttagcagccaatattctcattaacctcattaatcttcagtcccataagcctagataaactgagtagacaaatatggattttcccccagaaattgtctttcctagagggctcctgttttgtgtgtaattgttttcccactccatccacatagtctgacattgctgtcaatcgtagtaaccctatccccaacataaatgctcttgggacaggcaaattgaaccaactgaggtcaagaagaattcatcgagtgtttctagattttctttataggtgcaagtttgggaatttatgagtccagtgctcttggaaatcatggttctagactggtggaataagccagtgtgagaatgaagtccatattataaagataaaagaaagaagaatatatgcaattatcccgttcactgctatggaatatagaacaggaagaaaaattctgaggatgtggtaacaaattagttgagtctaaggttgtgttgaatctgaggtgggagcaggagagagaagtctgggttgtggataaaagctctggcagcaatcccaacccatccagggatagtgggtagactaacaatcaaactcatattttcgatagttctggaaattagacagatatagtttataataaaactttatgactgcaacagtaaagtaagaagtattatatattcaagatagaaatacactagtttctgtacgaatgtctaaataacaattgaacataaatagctgaaaatcctctggattcttggatttgtcttacaactagtcatgtctctgagttcttaaacttggtaagtggtgttctaaaacctattactacagcaggaccaagaaacaatattttgagggtaggagggagatgtcaagaatgctgtatttgggtcaagatgcccagagcaatcaatacacaacagattatccaatgataaataggagtgataagctaccaagtcaattcacaaatatttattgagcagtggatgaatgtcaagaaaacaataatagaaaatgctttgaattggcaatcgggagattcttatattcctgagtttgaagattgctggatctgacttttgtcaaatcacaaatcagctctgaatatcacttttctcacctgtaaaggggaggtgttggcgtggatcatcttatttggggtgctttcgagcaagcaagtataaaattctcagcctctccgccaggaagttgttcagtatttgacttgattgagcagacacttaaaaaattaaatatcaagaaaagaaatcaataacagttcaaaggaataatacatgagccaccacaaggcggccttataagcaaaataaaagttgaaataattattttaaaggaataagacgctagagacgcagttacagacaagacgaagttcctctaggcggccagcggagggagactctgcttcccttcccccggcagtggggactgggggactgggggactgggggactgggggactgggggactgggggactggggacaggggttggaggactgggaaactggaggacggagaacagggggacaaaacgactgggggactggggaattatgggactggggatttggggaattgttttcaaacgcgcggggcaaggactccccaccgcctctggaaggggtgaagaactagtcgactctaactccctcagggtggccagggaattgcatttggttctcccgcgggagtcgcgcaggcgggcggccagggggagtgggcgccgcccggcagcgccccgcgccgaggcacaagcgcccgcgccgaggcacaagcgcccccgactcaccggctccgcgcgtttccccgcgcgtctcccggacccgcgcctgcccacccctccggctctgctgcggtcgaggccccaagtcggttatcccgtgtccaggcaaccgcgggggcggcggcggcggcgtgaggagcgggcggctgctgctccggggcctcctggctcgagcccttagcccccgactcccggcgtttcggcgcccgatcagcgctccaggccgcccccgctccgccttctcccagtgcctttccctttctcttgtaaccgatttgccaacccaactcctttccctctttaccggagagggaaggagtggagacgagtcaacgccccttcgtacagcagtgaggttagaacgtgaggggatcacagacttcgtccaccttcgggaggaccgcaggacctctttctttcttgccacttgggatgatacaaccaggactccatgcgataaccccatgtggtttggttgtgacttcagtattgagaaacctcaacaaactgttaaggaagaaagaacttttcctagtgtctgaaagtggggaaaatgactaattcaagactaattcaagccatttctctaagggtctgtttctttcaaaaacaaatttttgaagcattgatccttctgacaaaatactaagtggcaggccgggtgtggtggcacaaccctgtgccaggcgtgtcctgtcccaggactttgggaggccgaggcaggaggattgcttgagcccagtggttagaggctgcagtgaactgggatcgtgccactgcactccagcctgggcgacagatcaataaatacataaatcagtggcacaaaatgtattacctacattttgtttcttcatctgtgaatatacactgtgaactgaaataggcttcagaggacagtcgtgtcttacactattgtcaccgtcttcttcaatgaaaacaaacactggactataaactgaagatggttaaaaaaaaaaaacagaatcagaataaagattagcattctcatccagagaaatcatttttccaggcaacactgagaacaggcaattgcctgccaaggttaaatcagcaaagtctattactttaagaggcaatttaattagtaatcctttctaagaggggaaaaccagcaagtccgtacctggaatgtggtcctttcagccaaagatgaaaaaaaggaagcaataactaacaaactggtggaaggtcttaatcttaaattaatatatgcagaagcagagctctttttgtaattaaaaaatggattcaagaatgcactccactttcccatctccctccattaattattaaactttggcttgttctcaatacaatgttaaattataaaccaaatgaatcatttgcatgccagtaaatatgtattcatgagggttcacaatatgtaaatgtgcatattaaaacaatagcta

SEQ ID NO: 1245082 - DNA, 4001 bp, Homo sapiens
acctcaatacaaattcttcgtctactttaaatattccagttgcttaatctttctgcttttccctgctcattcaccatacatcatcttcctttccatgttgtctgtaatctgccatctagcattttagcagccaatattctcattaacctcattaatcttcagtcccataagcctagataaactgagtagacaaatatggattttcccccagaaattgtctttcctagagggctcctgttttgtgtgtaattgttttcccactccatccacatagtctgacattgctgtcaatcgtagtaaccctatccccaacataaatgctcttgggacaggcaaattgaaccaactgaggtcaagaagaattcatcgagtgtttctagattttctttataggtgcaagtttgggaatttatgagtccagtgctcttggaaatcatggttctagactggtggaataagccagtgtgagaatgaagtccatattataaagataaaagaaagaagaatatatgcaattatcccgttcactgctatggaatatagaacaggaagaaaaattctgaggatgtggtaacaaattagttgagtctaaggttgtgttgaatctgaggtgggagcaggagagagaagtctgggttgtggataaaagctctggcagcaatcccaacccatccagggatagtgggtagactaacaatcaaactcatattttcgatagttctggaaattagacagatatagtttataataaaactttatgactgcaacagtaaagtaagaagtattatatattcaagatagaaatacactagtttctgtacgaatgtctaaataacaattgaacataaatagctgaaaatcctctggattcttggatttgtcttacaactagtcatgtctctgagttcttaaacttggtaagtggtgttctaaaacctattactacagcaggaccaagaaacaatattttgagggtaggagggagatgtcaagaatgctgtatttgggtcaagatgcccagagcaatcaatacacaacagattatccaatgataaataggagtgataagctaccaagtcaattcacaaatatttattgagcagtggatgaatgtcaagaaaacaataatagaaaatgctttgaattggcaatcgggagattcttatattcctgagtttgaagattgctggatctgacttttgtcaaatcacaaatcagctctgaatatcacttttctcacctgtaaaggggaggtgttggcgtggatcatcttatttggggtgctttcgagcaagcaagtataaaattctcagcctctccgccaggaagttgttcagtatttgacttgattgagcagacacttaaaaaattaaatatcaagaaaagaaatcaataacagttcaaaggaataatacatgagccaccacaaggcggccttataagcaaaataaaagttgaaataattattttaaaggaataagacgctagagacgcagttacagacaagacgaagttcctctaggcggccagcggagggagactctgcttcccttcccccggcagtggggactgggggactgggggactgggggactgggggactgggggactgggggactggggacaggggttggaggactgggaaactggaggacggagaacagggggacaaaacgactgggggactggggaattatgggactggggatttggggaattgttttcaaacgcgcggggcaaggactccccaccgcctctggaaggggtgaagaactagtcgactctaactccctcagggtggccagggaattgcatttggttctcccgcgggagtcgcgcaggcgggcggccagggggagtgggcgccgcccggcagcgccccgcgccgaggcacaagcgcccgcgccgaggcacaagcgcccccgactcaccggctccgcgcgtttccccgcgcgtctcccggacccgcgcctgcccacccctccggctctgctgcggtcgaggccccaagtcggttatcccgtgtccaggcaaccgcgggggcggcggcggcggcgtgaggagcgggcggctgctgctccggggcctcctggctcgagcccttagcccccgactcccggcgtttcggcgcccgatcagcgctccaggccgcccccgctccgccttctcccagtgcctttccctttctcttgtaaccgatttgccaacccaactcctttccctctttaccggagagggaaggagtggagacgagtcaacgccccttcgtacagcagtgaggttagaacgtgaggggatcacagacttcgtccaccttcgggaggaccgcaggacctctttctttcttgccacttgggatgatacaaccaggactccatgcgataaccccatgtggtttggttgtgacttcagtattgagaaacctcaacaaactgttaaggaagaaagaacttttcctagtgtctgaaagtggggaaaatgactaattcaagactaattcaagccatttctctaagggtctgtttctttcaaaaacaaatttttgaagcattgatccttctgacaaaatactaagtggcaggccgggtgtggtggcacaaccctgtgccaggcgtgtcctgtcccaggactttgggaggccgaggcaggaggattgcttgagcccagtggttagaggctgcagtgaactgggatcgtgccactgcactccagcctgggcgacagatcaataaatacataaatcagtggcacaaaatgtattacctacattttgtttcttcatctgtgaatatacactgtgaactgaaataggcttcagaggacagtcgtgtcttacactattgtcaccgtcttcttcaatgaaaacaaacactggactataaactgaagatggttaaaaaaaaaaaacagaatcagaataaagattagcattctcatccagagaaatcatttttccaggcaacactgagaacaggcaattgcctgccaaggttaaatcagcaaagtctattactttaagaggcaatttaattagtaatcctttctaagaggggaaaaccagcaagtccgtacctggaatgtggtcctttcagccaaagatgaaaaaaaggaagcaataactaacaaactggtggaaggtcttaatcttaaattaatatatgcagaagcagagctctttttgtaattaaaaaatggattcaagaatgcactccactttcccatctccctccattaattattaaactttggcttgttctcaatacaatgttaaattataaaccaaatgaatcatttgcatgccagtaaatatgtattcatgagggttcacaatatgtaaatgtgcatattaaaacaatagctagatttttttctcataaaataaaactttacctactagaaatctcattattgacaagtttctcttaattagaactcactgataattgctaaacccctgttgtggcaggcagaattctaaaatggacgcccatgaccctaccccttggtatacacacctgcataatccttaggactttaaatttggtggatttcattttcctgattagtttgttacctgacacaattgacttgaaaaagggagattatccaggatgggttggcctttattaggtaaacccttaaaagggactgacctcttcctggagtcggaggtttgaagcatcagagggatttatcaaagggatattctctattgtcacctttgaagattgacaagaccctatggtaaggaaggcaggcagcctctagcagccgacaatgatcccaggtgacggcgagcaaggcaatggggacctcagtcctacaactgcaagaaactgaattctacaaataatctggatgtgcttggaagagaacactgaactcaaaatgaaaatatgtcctggttgggcacggtggctcatgcctgtaatcccagcactttgggaggccaaggcaggcaaataacttgaggccaggagttcaagaccagcctggccaac

SEQ ID NO: 1245083 - DNA, 4001 bp, Homo sapiens
gtgcaatcttggctcactgcaacctctgcctccctggttcaagcgattctcctgcctcagcctcccgagtagctggaattacaggcgcatgccaccacgcccaggtgatttttgtatttttagtagagatggggtttcaccatgttggtcaggctggtctcgaattcctgacctcgtgatctgcccagctcagcctcccaaaatgctgggattataggtgtgagccactgtgcccagccaaggtaagaagttcttaacattggtttgttggagagttacacacagaaaacaccactgcttaataggaacctggatgtttaactcttggcattcatatttaaaattatcatagaagagagtcaaagcaccaaataagaggttggctcatatcagttattctcacattatgctaccatagaagctgcaccaatgtatctgttttaccatgcaaaagtatttgcagaaaggtctaccaaatggtgaacaaaatgcggcatagccatggcatggaataaatcctagttaagcaataaaaaggaaccaactacagctacatgtgacaacctgaataaacctcaacagctattctaactgaaaaaagccagatgctaaagactatatattgtacgattccatctgtatgaaatgtccagaaaaggcagatctaaacagacaaaatagattaggggttgctggggctggggtaagaacggtgagtgattgcaaacaggccccagggatatttggggaatgatgaagtgatctaaaattggattgtgctaatggttgcaccattcagtaaatttaccaaaaatcattgaattatacacttggatgtattttatggtatgtaaattatacctccaataaagcttttttaaaaaaaaatacagaaggaaaagtaagaataacttgaataaagatgctgttttcctctgggggtggggtgaatgtaactgtagtcttatttttctaatttataggaaaaaatataatttaatggatagatgtttttcagttttaaattttttgttcattaatttttgtctctagattattgtcatccatactacaagtttagtttttatttaatttgcatgaaattgatacttagctattttaagttaatatttcataacattaagcctggaacacatgattcctaagttcttccccaacctaaacaaaagagaaaaccactgagcagaataacatgcaagctcctctatcatttttagacttgactttttaaatcagtgaaaggaaatatgtgatttgaaactaatctagttttagtcactgtcgaaattgaatggatcatttatgtggtctgtaaatctatggccttgacttggggtggcctggaggactccaatgtagtaaattccaggaggatagaaatgtgtctgatttacacagggctgtgtttggcccagaccctacttcccctcccatctggttctcccacacagaacacagtgtcctcaataaatattgtttcaatgaatacatgaataggcccacaaatttacagatgtaccaaatagtttctaaaacaatgtacacacacacacacacactctctctctctctctctctctctctctctcattttccaaacctatataaatggctgtttttgtgcttagtaaatgacattcatttaaacgtgttagtaaattcatggtaaaattttgccattatgaaatgttttcaatcaataaatagccatataattttgatgtaaatatctcagttctaaagatgagaaactactattttaaaagacttttacattcccatcaaaatcttcagttatttcccctttcagtcattattccaagcaaataaacacctcatttttcaggtttgtctaaatctagcttacattttttagctttggccaaaatttggattacaactcaccttcaatgttgagcatactgtaaacaaataagctaacaaataacatgcctatcagtaattcacaaaatagcaacagtattaatttcaaaagtctctttctagttaggacaagggatcaatttattttgtaaataacaagaggaaagaaccttcttatgacgtcggccttatgacgttggcctgggtcccaagaagtgtagttgttttcattctttctgcaaacatttgaggaaccacacggggatactccctgccttgggcagaaattcctctgtgtcaggggccttccctctcaaattgggagtggggtggggaagagagtgggcagcgggggaaaagcataacaacagcaccaattgtgtctgccagggtacctgacactcctgcccagctcacatatcaggaaaaccagacttcagtagctctgaatatttaatggcattaggtaaaatcaaaagaacagattatctcctccctatcacaaacacagaataattcctttttgtattctgacacttcatccgaactatatacaccaagaaagtaaaagaggttttgattcctaaaataaaacaatcagaatataatggggagcaggtacaccttcagttatgttcagggcttgttgcttgttctgatccttatattcaattttgtcttcacttccaaaaaggctgaaaattcacagctatgttatcatccaatctaaaaactacacttgcacggtcccgtactaaccttcagtaagataagagtgttcctttgtctagccgcctagcactctgtaacttccacatctaaaatatcatgatgctactcaacattaaggaaaaggtcaagcaatgggctgctctttttactacacctgcggctgcagaagcccgcacaaatgaatgaagacagccaccttcattcatctctgctctttaaaaaatgcgagcgcagtgacctgtcaaagccaccacgctggagttcctaggtcagggcgtttaccgcaggacttttctccatagcctctgaaattagcaggcagaaatcgcggggacccctgacaaacggattgtataacaacaacctaaataaataatcaggtgtgcgccggactaagtaggggttcctctctgcggaaaagcagctcttcccaatggggaagaaacttctcgcccaggaaattcgagcccagaaccgaggtttccagggaggattacctcttcaacaaggacccttttacaggaaatgtccttgatgccaggaactccactggggaagccgctggaaaggcacctggacacccacacacatggaggggatgcgggggcgcgccgcagggaccgggcccgaaggtggccagactcgcctaccttgtggggcgcccagccgacgcggggtcccggtgctgctcctcccctgggcgatcggaccttggggccagggtcggctgccagggccctgcgagtgcagccgccaccgcccgcaggcttggctccgccccgcggggcgcgcccagggcagagtccggcgccggtgaggccccggggaggagtcgcggcaggacgcgtacgcccagcgctggagagccaggctctgcccctcacgcccctcgctagggtgctgtacaggcgggtggggggaggggatcggccgctgcttttcaagaaggttctatttgcaccctaagtttataaacttttgtttttgttttttaaataatttttgattttattgtttttagtataaatttatggagtacaagtgcaattttgttgtttttttaaaaaactttcttttggaacttaaaaaaagttgcaaagatagtagagagagtcgtctatatacccctcagtcggtgtctcctaatgcctacagcttccataactgtggcacatttgtcaaaactaagaaattcacattgggccaggtgcggtggctcacgccttggtaatctcagcattttgagaggccaaggcaggcgggaggatcgcttgagctcaggagttcgagaccagcctgggcaacatagcgagacctcatttctactaaaaatattttttaaaagacattaacattgatctgcc

SEQ ID NO: 1245084 - DNA, 4001 bp, Homo sapiens
tctcccacacagaacacagtgtcctcaataaatattgtttcaatgaatacatgaataggcccacaaatttacagatgtaccaaatagtttctaaaacaatgtacacacacacacacacactctctctctctctctctctctctctctctcattttccaaacctatataaatggctgtttttgtgcttagtaaatgacattcatttaaacgtgttagtaaattcatggtaaaattttgccattatgaaatgttttcaatcaataaatagccatataattttgatgtaaatatctcagttctaaagatgagaaactactattttaaaagacttttacattcccatcaaaatcttcagttatttcccctttcagtcattattccaagcaaataaacacctcatttttcaggtttgtctaaatctagcttacattttttagctttggccaaaatttggattacaactcaccttcaatgttgagcatactgtaaacaaataagctaacaaataacatgcctatcagtaattcacaaaatagcaacagtattaatttcaaaagtctctttctagttaggacaagggatcaatttattttgtaaataacaagaggaaagaaccttcttatgacgtcggccttatgacgttggcctgggtcccaagaagtgtagttgttttcattctttctgcaaacatttgaggaaccacacggggatactccctgccttgggcagaaattcctctgtgtcaggggccttccctctcaaattgggagtggggtggggaagagagtgggcagcgggggaaaagcataacaacagcaccaattgtgtctgccagggtacctgacactcctgcccagctcacatatcaggaaaaccagacttcagtagctctgaatatttaatggcattaggtaaaatcaaaagaacagattatctcctccctatcacaaacacagaataattcctttttgtattctgacacttcatccgaactatatacaccaagaaagtaaaagaggttttgattcctaaaataaaacaatcagaatataatggggagcaggtacaccttcagttatgttcagggcttgttgcttgttctgatccttatattcaattttgtcttcacttccaaaaaggctgaaaattcacagctatgttatcatccaatctaaaaactacacttgcacggtcccgtactaaccttcagtaagataagagtgttcctttgtctagccgcctagcactctgtaacttccacatctaaaatatcatgatgctactcaacattaaggaaaaggtcaagcaatgggctgctctttttactacacctgcggctgcagaagcccgcacaaatgaatgaagacagccaccttcattcatctctgctctttaaaaaatgcgagcgcagtgacctgtcaaagccaccacgctggagttcctaggtcagggcgtttaccgcaggacttttctccatagcctctgaaattagcaggcagaaatcgcggggacccctgacaaacggattgtataacaacaacctaaataaataatcaggtgtgcgccggactaagtaggggttcctctctgcggaaaagcagctcttcccaatggggaagaaacttctcgcccaggaaattcgagcccagaaccgaggtttccagggaggattacctcttcaacaaggacccttttacaggaaatgtccttgatgccaggaactccactggggaagccgctggaaaggcacctggacacccacacacatggaggggatgcgggggcgcgccgcagggaccgggcccgaaggtggccagactcgcctaccttgtggggcgcccagccgacgcggggtcccggtgctgctcctcccctgggcgatcggaccttggggccagggtcggctgccagggccctgcgagtgcagccgccaccgcccgcaggcttggctccgccccgcggggcgcgcccagggcagagtccggcgccggtgaggccccggggaggagtcgcggcaggacgcgtacgcccagcgctggagagccaggctctgcccctcacgcccctcgctagggtgctgtacaggcgggtggggggaggggatcggccgctgcttttcaagaaggttctatttgcaccctaagtttataaacttttgtttttgttttttaaataatttttgattttattgtttttagtataaatttatggagtacaagtgcaattttgttgtttttttaaaaaactttcttttggaacttaaaaaaagttgcaaagatagtagagagagtcgtctatatacccctcagtcggtgtctcctaatgcctacagcttccataactgtggcacatttgtcaaaactaagaaattcacattgggccaggtgcggtggctcacgccttggtaatctcagcattttgagaggccaaggcaggcgggaggatcgcttgagctcaggagttcgagaccagcctgggcaacatagcgagacctcatttctactaaaaatattttttaaaagacattaacattgatctgccactattaacactactccagacttgatgtagctgtcactagctttttggctaacgcctttccctttcaggatcccagccaggataccacactgcatttagcatcctgtgccctttgtctcctctaatccatgacagtttctctgtcttttcttgactttgacagctgtaaagaattctagtaaagtattgtgatgaagtattctggtaaggtatagttttgtgggggtacctcgacacccactcatgtgggtattgtctactgtttttttctcatgatgagactggggggaggaaagactcagagatgaagtgccttccccactgcatcctctcagggacgatggcacgatggccaggtgacttatcactggtgacttgaccttgatcccatagttaaggttgtgtctgccaggtttctctactgcaaagctgtttttctctttccatacactctactctgaatggcatgaatggcatgactcaattcagctgacactcaagatgagggcaagattaaactccatcccagagcagggagtatctatatgttattatttagaatgattctgtaaggaagatttgttccatctctcttgtttattcaatcatttatgtcagtatttgttatgtcagtatggacccatgtatatttattttatactttgggctagaattcaatactacattattaattttgttgctcaaatggttccagctttgaccactgggaactctttcaggttggctcctgtgtctctctgaaagttcataaacttttaggattgtggggaaaaaaaaaaggtgtatttcctccgccccccctcaacatctaacagattgagaaaactgcaacccaaatccttcaatatccaagggcttttcagaatcttcctgggaatcctatgattactgattcccaccacagttagagaggaatgttattttttttttttcctagcagattaacttgtagattgtgacccaattggagaagtgaaagttgatggttcttaggtaatttttttgttaactaatccttgtggttctagtaaatagatgtatgtatgtttacagacaaatcgtgttccaaagatagccatggatgtttattacaagtttcagcattgaagaaacccagctgttgaggatcatttgttacattgctttggtttgctcatgtttgcatttgcaagttggttccataaacaccacatttcctccttctgagcttggcttttgctcagcatttgacactgcctgctttctgagacctgtccacctctcttcctggccttgacccttcctggagaaggaaatctacttctccattagcttgggttgagctgggtaaacacaggatgcggtgaagtaccagtgagtactccagaactgcagagctaactcattttctatctttcaactatttttaacaaagttagaaaagtaagagttaaaggaaa

SEQ ID NO: 1245085 - DNA, 4001 bp, Homo sapiens
aggaagtcattaatcaaaatattactggatttctctactattaaaaatgtctcagctaaccacatgagcatgaattcatctcacaagcttgcctctgaatgcagactcctaggtggcctgggtgggtggggacggggaacactcttcagccacactgttcttcttcctgtaggctgtccacccaggtagaaccttccctgtcacctcagtttcattgtttctgctacctacaatatgtcctgcttccccagatgtctctatggtttctgagcattgggaggagtctcctagtgtctactcaatgaccccaccttccccagtttatgcaaaaacacctgatgtgtgtgatggagaatctgctctgatacctttcgacacttgcttggaaaactattcacatgctggaaagcagaggactgtgaacagaaaatctagctaaactcagaacaagtgactggggctgggaagattatagtgtgagaggtcgtttgctccctccactccttctcagatgcgagggtttgcctgccttctgctgggatgccccagctgttaagaggctcatacttccagtaagatttccacaggaggccgggtgcggtggctcacgcctgtaatcccaaagtgaaggccgaggcgggcggatcatgaggtcaggagatcgagaccatcgtggctaacacggtgaaaccacgtctctgctaaaaatacaaaaaattagccgggtgtggtagcgggcacctgtagtcccagctactcaggaggctgaggcaggagaatggcgtgaacccaggaggcagagcttgcagtgagccgacatcgcaccactgcactccagcctgggcaaaggagcgagactccatctcaaaaaaaaaaaaaaaaaaaaaatttcctcaggaacacaatagtctgggtttctgctcccttcctcaaataatctcattaagagaacctttccaatgtgggccacatggtctcctctagaccacgatacccttagaaccttggcaagtcatacacatgtccccaggagtgaggctactgctgagtgaccagtagaaccccacttccagtcaacgcaaagactccagttggggttcagcagggatcctctaagacagggttctgaaactatggcctgagggctgggcgcagcccactgatttccataaacagtttggttggagacagccatgctcacttggttacataccatccaccgctgtttttgtgctgcaatgctggaaccaagaggtgttaggtcacaactgacagacaccacacggcccacaaagctgtaaatattaactatctggccctttacagaaaaagtttcccaacccttgagtaggataataaatctttggatcatggacatttattatttaagttcatccttgttcagtcttgctggagagaaggaagatttaagcttgacagaccagatgccggtaaaattagctcagttttcttattctcaagaactttacgatcagatctattataaatacaattctagagacagactgagaaaaagtacttaactggcacccttttactacaaactgcacccctcattaaactaacagttcacagaacaccgagcacttaacttactccagctttttccggcaactctcttgtcctgctgcatcaacttgccatggtttcactggcagcccccaccctttcgcacacgattcatttaaaaagttgagctcagacacatccagtcttttttctgagaaggttactaaccttgagatgtgagtgctgctcgctctaacgcttcttcccatctgcgtcttggttaaggacttttatcgtatcctgtttatcgtggcctcctagcctcaacaccctcttggtcactgcaagctccccgctgctccctcccttaattagcactgcaggagctgaggggagcgttcagcccactcaggagctgactctgcccatgctcttgagctcttctctctaccagaacttcctcagatagcaactgaagtgaatcactaatatttcatgaagcggggttttttgaagtcaagtttacctgcttctggaagcaactttactattgcagctactcagactcattccaaactcagataaagttctgtccctcttttcccccaaagaatctataatttgaaaggacgcacttctcctttgttctagctctaaatagaaactacactccccgccgaaatcagtttgtttctttgccttttcttcctcgtgttttttcctgccaatcaaagcacattagattcagccctctttttaagtcaagaggcttccttatctctgcccatatctaagtatgtttcggtcttactttctagatactcttttttttttctttgtctcccattctccgacagaaaaagtacacaagtcggtgtttcctgagaacgaaccctgcatgtttagcagcttttgtctcttagaaacactaggttttttgctgcaccaggccatggcaacgttagttttattgattcctttgatttattaggttatggaggttccctgctggttaaaccaccatgaaggattgtggctgaggctttagtgtgtaaaattcatagaaagactaggaaggaaggacgtttgacaggtgagaaggcactcatggggctgccctaccctgcacatttaattatgcatcgcaggtacaggactggtctcttctgctggaccaccgcatatacgaaagcaagggagaagaaagtgcaatactgcctctcaagacacaagtgtttactaagacttattgtgggccagaggtagccagagtagccttctcaaacacctgcctgactctcgtcactcccttcaatgcctcactgtccccaagagaatatccaaatgtcttactgacttgcaaggcctgcgtcattgatgactgccattttcccagtgttatgtcttataagtcttctgctcactcctagcctttattgctcatccaacttacattgtgtaatttgaggacaatgctctaatggggcagggcctttgcacgtggagtttcctcacctcttatccctctcccatccagcaggtctcagctccaatgtatcttatactctccctggggcccacatctgtcctgtgagtttcctgagaaccccaaatatgtcctcactgaaatacttgccacatcctattatgcctattcactcgctgcattttttactagagcctgacaggcacttccaggcccaggtaaagtctcttatccctgctctatcagatccttgcacagggcccttgaccatgccaggtgctcagtcagcacttgtagaataggacgaagccatgcaatgacttccatctgtaaggtttccatattgtgatcacaatcccaattccatcttgtttccaatctgccatcgttggggctgcttttttgcctcaattttcgattttctcaaggaaaaagacaaaaacagtcttgacccaaaacacccactgatttttgcaggacacacccaaagacaagttttcttttgagtcaaaactcttcctcaaaattattcagtgggccctgaagtgaacctcacacatcggctgaaacagtcaccgtctacccacgtggttcacaatagggtgaatgcaaatcctatctatcgtgacagtagctgctgctcatacctacagggacctagcttgaaagtatcttttgcttactccctgactcacaaaatgcagattgatacaggctggggggttttcccaaattagtttttcatggtcactccctaattcagtgttcacaggcaaacacacacacacacacacacacacacacacacacacacacatccttctccttatcacccataataaagctattgctattttgttttttatttttattatttagctattgctatttttaagggaggcacaatggagataccttttgttgtttctctgtagaggtttatcctctctggtttatttagcttcctcttggaggctctcgaaat

SEQ ID NO: 1245086 - DNA, 4001 bp, Homo sapiens
tgtaaagaaggtatatagaaagatcaatatctccttttaaacagtttaacacatttattcctaatgcattactactcactaacatgctgaatactgctatgtaatgttttaaacataacatatatttaagagtacatgctaagatcatgagtggcaaaaatgatcagttgatatttagttatagatgatatgtatcagattatatgtagctgtattaggagaaattcctgaaagatggatctggtttcttaataatgcataggaggcatctgtgcacatcattttaaagcatcttcaatttatgataatttaatcaaaaatttttttatgtttcttgaggaaatgtaccttacaaacattcctaagtgaaaaacaaaacaaaacaaaaaatataagtagaagacatatgcttttcgatatatgcagatgtgtctgtgtgtgcctaaaattataaatatttcactggagcctaagtaaagaatttactaatgtgtaagactgtaaaaatcagatatttatataatgatatgagcatttcgttcactgttataaaggcttggtaaagtggaaaacatatgtaaaggaaaggagatctggtggtttctaaatgacataaattgattgtttaaaaattttgaataattgcagacaataatgaaatgcttattccttttaaaaataaattgttagttattttatttggtcaatataaatgttcacattacattgaaatttaaattctttgaaatcaaaaattatagtaagtaggcatactgctgataattacaatattaagaatttgaaaaaagaatatattaatgcatataattttacttaatattgtaactacatctaaaacataaatatatattactaaattttcaaatattttatctaaataatgtctttcttacagatatattaattcaacaaatgaattaatagagctaaaatataaattgacataatctaaagaaaacctttgccactctatttaggtattttttgttgctaaatattttatgtttttatatttaatagatttattaaatccctttggtaaacttattttgaaatattttattataattagttattcaattaaaattgcatgtaccaaattagaattgaaacaatataaaatgtcttttacagtatgcattttcctaatttatacttttcttaatttatactttcatatttgagaaattaccttttgtgttatgtataaatgttataatacatataggtaaattaatatgcctgtacaattttaggcatatatgtgtttttattcatagcaatgctaatattttaatttttttggaattataatatacttaaaatttttcatatttattctgtatatattttttctcatatacttaatgatgacaactctattgttcatattacctgatatacatggtaaatacatgataaataaaaaataaaaccctgaacaaagaaaaaagtgcaaagaaagacatgcaaagaaaggttgattcatttattctaagaaacttgagaagttttaaatatcctaacataggtgtaacttccccccaacaccaacaatctgtattacagagatggagaactgttctcacaaatacgtgttttgagaaagttcagtacaagtacacatcatggttttaaaatttttagaatattttccttatttcctatgtaaatattttccttaatatttttagaatattttcctagcaacattttgtcatgtactttttgacctattgactcattaaagatgatgcatgtagtttataatatgcctgattatcacagtcttacctttgtaacttcaacttctagaagttctgtgaaaactgaacagcaaacttcgtgttggacacataaggaagagtaggaaaaactttcttctttttgcttcacagtcttctcagcaaactctcgatgtgccccattgcccagagttacagacgcttgtgcttttagtaccacaacactgtcagtatgtcactgcttactcaatgctattttgggttctctgagtagagtcataaacactgagccttttgtgcaaaatatcataagggcactctgacgctcgttcatagtctggaattaaaatgcagacagctacgcaagtagtatgagctgattatctttgttttttttttttttcccctaacaacaagcaaaaacaaaataaagtacttattggcctgagttgataaagggagaattcaacttacatacaagaattttgcaagtagagcggacgtgccctctgtttggggattagctgatgaaacaaatgatcaatttaaagcagacccaaaacttactgaaaagagaaatgattttccactgtgtgtctatgcctcatggctgtttcttaattcggtcatttctcctcagaaatcaagtaaagacataatgagagagaaatgtctaaactttaataagtccttttcttttccttggtttattattatgtaaaatcttttattttattcatggttataattagattttgatataagctattattatttaacataaaatacatatgtattttctatgctgtttactcaagctgttatttacttaaaaaccatttttgaaccaaactagagaaacattaaaatattaaaagtttcttaaattatacctatataataagaaagtctatgtggggcaggattattcaagcatcctgttaattctgatagatattttggtcactatcctcttagcttttgaggaaagaaatggcaaaagctatatgggcagtaaagtaggacactcaagcacacacatatacacacatgcacatgtgcacacatgcatacacatacatgtgcacacacatacatatgcacacacacgcacaaatgcacatcctatgaggttgtgaatattaggaggaatcaataatttatgaacaaatcttgaagagatgaacctgggagaatagatctgtggatagcaggaacagtataatgtggaaatattttattttttcaggtagaaaaaagcattcagctagaaaaaaacacttctaagtgtttcaagatgttagtaaatagggaaaaaataaattttacaaagaacctctgaagtattcttatacatttcccccttcatattttttacagtatcaaaaaaggtggagatacctgtttaaaatatttatttacataattcactgttctgtctatgacctagtctaggatttctgtaagaatctaacattttatgagatgccaatttatatcttgatgtttataaaatatccagttgcacttaggattgaaaccacagtttagagcctcagtgtacctgtaaacatgatgtcccaaaggcttattttagagcctaagggagcaaaggtgggtcacaatttgctgccctgattattacagtaccaataaagagcaatggcaactatagaaaccacagtgagacaggattaaattttctaaagaaggtacagtgtgaaactacatgttttatgtagaatatcattaacagcaaactgattttattaaatagataatctattatcaaacacgtacaggaactagttgctgtaaattgcttaagaaatgcatgccctttctggaagaggatataagatgaacagccgatagccaaggatccagcaagattcatccgctatgccacaaccaagaatgaagacttggaagtacttaggggactggtcatcagataagcttagtgattacttctttttttttttttttttttttgagatggaatctctctctgtcgcccaggctggagtgcagtggcgcaatctcggctcactgcaagctccacctcccgggttcacgccattctcctgcctcagcctcccgagtagctgggactacaggcgcccgccaccacgccctgctaatttttttgtatttttagtagagacggggtttcaccatgttagccaggatggtctcgatctcctgactcgtgatccgcccgccttggcctcc

SEQ ID NO: 1245087 - DNA, 4001 bp, Homo sapiens
ggacaggcgtgccgcaccatggcgcaccatggacagggctccgcgcggcggcggcccacgaccgtctaggggttgcgggagaaagcgcgagagactgcggaggccagccccgtccagcccctgcccccgccccagcagcactcaccccccggcgggccggagcgcgccaggccctgacccgtgaagaccacggagcggggtaatccacaccacctgtctccacccccggagcaggcacttccgagctgcgtccgcacttttcggggctgccagctggcagtagagcacctctccccttgccccgagggcgacaggcagggggaccctccgtggattttcctgccccgcggcgagggtgggcacgcccctttcccgcaaccttcgagggaccccacggcaggcggagaccgacttgggaccagggcactgcacccgcccagctagagggtcccggccgaggctgtgtgaagtggcctccaggcctgggctggctggtcgggaggagcctgggggcatcctcgggttggaggcggcggaaagttgggctgcccccgggctgggaacccgcagcgtgcagtggcgagggaacctgcgcccggactggagcaggtgcttcctgccgcggaggagcctcttagtagagattaaatgaaaaggctcgctggctctctcccgagggtatgaaaagtacggaaggctccaggcaaaggcgcccccggggcgcatatagggcacaggcagccggacagagaaaggagcagccgcgtaacggaacttctcgcccgggggagatactaggcgtgagaggccagactcgttctacaggcaggcgctgaccggcagagactcctccgggcaagagggccagattttctttccaggtgggacgaacacagaatattgtgagggcaagagaagaagaaaaggaggcaactccagactgggataaagacaataggacagtagagcccttgagcaccgggaggcgcacgggtgcagggtggggtaaggtggaggcaagtcccgtaactaagacaccagagtgagaattcctactgtaaactcgcgacccatccctgcagaaataaacaaaaaaattggagcaaagtactatgcgaggggcgaaaggcacagaaaactgcaaaacctgggagttatcctgcctcaccctcctgctgcctggggacaccccccgcgagcttgctcggccccgaagaaggagcagaggggacccgcaatccagcccctagagccccgccaggaaaggcgcgagagacctactggccccggcaaccctgccccggcgcccggacggagcccgatgcctgcgcagctaccggccgcgcggcgcggcgcggcgcggcgtggcacctcccttcccgggtgcgcagcccggccccgcagcggcgcggggaacaaagggacccggcgccgcccgccccaccccgcccgtggcccggcccgcggggaccgccgcgtacctgaagcagggccgccagcagcggcagcagggtccgcagcgctcccgctatccggcacatggaggcggagaggggccgagcgaagagccggaggaggcggcggcggcggcggcggcggcggaggaggaggaggcagcggcagcaccaacagcggcgcggagaaacggctccaggcagtttccacccccttcccttcccctcccctccccacccccttcttcgctgctctccgctccccgccaatggagagcgagctgatgacaaatagcgggccgcggagtccgcgggactcgcaccaggagtaataaaacagacccagagatcaaggagctggggagggggcgggggaacagggagggagagcgtgtgagcgtctgcgagtgtgtggaggcggctgctgtggcagcgcaggcggctcggctccggcccggagcgcagcggaagccgcgagggatgcagcggcggggaccttggccggtggaggatgtggaggtggaagtggagcggatggcgctccccaagagctccgccacgcgaggtttcgggctcgtggttttgcttcctccgggtccccgctccagggccgctcggcgcgacgaagacgccggggacagcgccgcggggagggcgctccgggtcgtgcgtgctgcacccacaaagagcagcagtcccgccactccgcgcctccgctgcgtgggggccgaggggcgcttctcggctcctctttccggtcccccggcgagttggagactgttctccggcctcggccgcaagggggtgaggcgaggggccggcgcggtctctcccgccgcggctccgtcccgcgcagctgctgccgcagccgcccctgctgcccgcgcaccggcacccgcccgccggtcctcgccctgcgccgctcactcgcgcgcgccgccctccgtcgccgaccgcgcaccccgctcggcctccgctgcgcgacctgggcgagccgccgccgctctccccgcgctcgccccacgcgctgcctggctgcgcggcccgctcccctctcctattcctcccgccgccgccgccgccctcgcccccgcctccctcctccgccgagcctccccgcccgcgtcgtggccaatcggaggccaccaagctgcggctgtagccggccggatccgcggcagccgcccgcccccgccccgccgaagcgccccgtattttgctgcagcccgcggggggtcgccggagggaagcctagagtgcgccgagcaccgccccggcaggtggaggggctgcgggaaataaaataacttgggcaggaacttgattggtagcaggttcatctttggtccgcggtagggaatctaatggagatgaagaatggtggggaagggggggcggtgtctccttgggagcctaacgtacgcttctttattttgtcattctttggagatgggtaatctttcctggcaggggcagacacagcaaactaaggacgcaggccaagctcatcctagctattgttgtctgaggcgctcgccgggagccacctgcgggcgggggagggcggaggccgcggctcctctctggagctcgcaccttcagctcccacccttgaggatgtactggaacagcccaagtttttgtgttcttgttttgttttcttttgtcccctctgggagtttgagagtgcatgtttgttattttatttgaaatctcccgttttctatttctattactacctgttagtggtactgttcacatttggggccaacagtttcagggtacttttaccctctcctaccacccctaacaacaatttttaaaaaagagagaaactaaaagccggaacttgagaaaataggattatataaaagataaaatgactgatacagaattctcaccacgtaaaggatttctgctggcttcctttaaggcatgaacttcaagtgcaacacagtgagagactttacaagtttgagtcacaagcatttgtggaatggagcgggggatggggagcagtttttgttttttctaattctggtgaggtaataaattttccggaaccttttttaagaaaggtttacaagtaaatagaaatatccgttttatgtaagcttttcaacacttgggagatcggtgaacttcattgcagttaatgaatattttctgcctttattgcttgcttttctgctttgggtgactgaaatattaactttatttgagtttcaagataccgatcatttaagaatctgatgatgaacctttaaaaaccagctactaatttcttgacataactgatacagcttttaataatgtactgttgctggctaggcttttaaaaatttaatattcatagggaggcttattcaattttaattaaaacataatattgtaagttttttatgaaacaaaatttttcctggattttctttcttttcaaaagaataagaaaggttatgttaattaaatttaaaagatgagatgaaacacttaatatagtaatcagaagtgcttgttcttaccctttctcttctttttttgctagat

SEQ ID NO: 1245088 - DNA, 4001 bp, Homo sapiens
tgatccagaaagggatggtcttgttagctgtggggaggtgtctggaggattcaatgcacagtgggaaaacattgaagagacgtaagtagaggagtgacatgatgtgacttaaattttaaaaagaccatggtggagaacagatgggagggaggtgcaggtggacatgaggagactggttgggaggctaggtacttgcccaggtgacagatgatggtggaagcagggataagagaaatgcaggatttggggttgattctggcataggactagcagaatttgcagagggagagaatgtgtgggcaggggaaagggaggaatgatccccagttctctggttttaggaaataatgggtgggtgttggggcagactacgtttaggagaaaaaaaacaagagtttcttactggacacactacattggaaaggcctatgagtagatgtggagatgtcacatgtgcagtagaatttataacccaaagtggtctaagccagagatagaggttttgcattcattggcatagacatggcattcaaaactgcagaggtggcgagtccacccagggaatgagtgtgtggagaagaggctagggcaaagctgacaagcccaccaacaaatggggtcaggtggaaggagaggacccacaaacgcggctgagaaaaaagaaggaaaaacgggattgtgaaggtcatggcacagataggacaatgagtcaaggagagacaggtcagcagtgtctgaggttgtgactgggaggtgtgattgggcagtagagaggtcttgagaagcaatgaaaacacagctttgggtcagaggtagggaccaaagccagatacctgggttaagaagtgagtggacactggggaaagaacttgggtagacaacacttgagaaggagcagttctctcaatctcattcgaatttgaggaagccgagatgagcagggcttggtgacctgtccaaagttcctctagaaataattggcagggctgggctttgaacccacctgtgtttgaatctgaaacccatgctcccagcctctgtgctaaacaagcgtttaagttaccatttgaatgaattagttattttctaattagtttcttgtctcccattctctctcacttggttgctttcacaaaatggtctgtaattaacaccccaataaagtaaacacaggaaaaatccaggattaaagatgaaataatgatagattaaatcaagagaattcaaatataacatttataaatatatttattgtctccaactatcctaaagcacatgctaagatcttctgaaatgaaaaatgtttatttttttcattaaatttgcacctcaggcaatacctctggaaatgctctgaaaaaaaccccacaaaaacacaaagcaaaaaactctgtactcttcttgtatttccaagtttccctctcacccattctgtcattcccagacagctgctgctgcctcttttaggacttgaatagctcttgcagggtctgagccttttcctccaaatcccaattcccactttttcccattcataacagagacatggacaaggaaataaatctttcctttcagactggtctctgacaaagcagaagttacattttagctaggtgtcaagtaacgtaccacttgttctagtttttctcaggtctcagataaaggctaggtcaactttgatactcaattcatattcaatttcaatatccaatacccgggtcatttctacttggcatttcttaccttgccgacatacaaagggtcggtcccagtgtactcttccagaacgaaaaactggttccaaacccagctcctcttggtccgctgatgtgactgtggcttgtctgacaggagtgcttctaattcaccttgtggtgttggggtgtccgagagaacggtggtcgtaaggtccatcagcccccagaagtacaaggacatgccaagtccaagccagttctttgcattgctcattctaccagaagtccacatgggattgccaggttttcagaaaatgaaggagaatgataagcaactggaacttgagtattttccaaatttaaaaaaatacacagtttttgattggacacttatgcttcctaaatgagatcccgtttcaagtcaatctgcttgaagttgacttcctgtcaagttaaggaaaacacagtgtgatgatgtcagattctttcctgcaggcgggttgcaagttttcaagaaatgtcagtaaatattcaactttctactcaatgagttaaaaagtcataacaggttattgctttagaaatgtttgagtaataaatactattttgataataagacaacacatcttgctataatcaatcccaaacctttggatatagattcggtgggaataaaactgatgaataaatttcttctcattggtaacttagctggagggttatactgtattattgattggtttgaattaatagtgtgctctttgaaatatttatgatcagacaggctcttaaactcttaaaagcagcattcatttacaaaatttacagctaataactaatatttccattagcccaactgcttttctttgcttattaaaaaaatagtaaaatccaactaccttgtttttttttggtcacccacaatgatcttgtgcctactgctgttattgataatgctagaaatcttggacttcatttataagcagccagggctcacttctgactttaatcattttctgagctcacagtggatttcaagtttcacactctactgttttggctccgaagcactgataggggctgctaatgtgacctttccaggatttaaatggtcagttgatcattatatccttcacaacagactttaaagtgctattagtcacatgcctatgggagcaagctaagagaatctagtcaacaaatctcctttcttgacctgaaggactcatttagggaaaaggacttctaccgtggggacacatctttatcagtcaaacttcttttgttgctatgtggtcacatttagctggtgacctcacttctgggctatggcctcatcaatcttttcttcccttacttggcttggtttaatgagatggcataacactcaagtcaacctgtcaagacaaccaaaatgtcttccttcggcttaatattttcactgttaattcgaagaactgctgtcatctgagaacaaatgtgtgtatttggagattgcagctctgtgaaactaaataacacttcatttcttcaagtggtttgaagtgaatgcattgatgctaacttagttactaccttccacctgtcatcagaactggtttcagcttcctctcaaatactcatgattgaaatgtacaaaagaaattttaaactactttataattatttaatacaatatgccatttcatttctgtataataaatcattttaatgagaaatgatagagaaagtagctgaggagactatagaatttttgtagcagaatgggaggctgtgcctcttatgagctccagctctgaaggcagattgagtgttaagaaaaagcaagccaggtgcacctcattgagggcaatgggtttgctaataaagaacaatggtgctgctagcaggtgggttaccaaatattagctgttctctctctctttggactggtggacatcttcccttagggaacagagaagcccagttcatgtttctctgatccctgtctacagggaggtgtttgggaagaaggaatttaacccaggaaacgaattgatgacaaagattagtgagaaatagctgtgctgttttaggggcctagaaggcagactaaagggcattgccaaaacaaacaaacaaacaaacaaaaaaaaagccactgccagaatgctgtgattagtaaaccataaaagcaatattctgtatattgtaagacacaatgtatctataattcctcaaagtgcattagactaagagacagtttggttactggttctatcttcattacctctgacttatttagttgtatgaatttcagtttcc

SEQ ID NO: 1245089 - DNA, 4001 bp, Homo sapiens
gacctcttgcagcccttaattacaataatatctcacgttgtaagtgcacaatgcccttttattaaagctgcaaaccttaatagcttttagcagggtgatggtctgtgctactgattattgttttctttatttttctttcctcagacagactcggctagctttcccagataagactattgacgttggatgttacctaattgctctgctatcccactccatattaaacactaacacagaagcaagacttccacaaagttgccagtcttcctacctgtctcaattcttttgcattttaattcatactgttcaaaatagccttaaaaataaagaaaaggattcttcatgcatttccccttgacatatagaacaagaaaatatcctaggtaaaccaaagtctaactagttctttaggaaagaagtaattcttggtgagttactgaacgcttcaaatgtaattaattttttttcttagctcttttctcccataacaatttgcctttataaagactctcttaaaactatttagatattgtgtctatgcaaactttcctttagaaaaaaagactgctactgctcttaaactcttaaaatacacattttttgtgtgaggtgttatctgcttttaaaaatacatacttgtcacttggcaagggccatatattaacaagtcacttacatttttctcttattttttgtataaagttatgtttatctacttctctatgaaaaatgatctgaacacctgtctagtagctacagaaattatgaggacaagtcttacgtaaaggtctcacttaataaacgatctaatagagacaagatatttattgcaaagcaaaagatgttataagtacattcctcgttcaatttgcagatctccaaagccttgatacacccaatccttgatggtttctcaatagtttgccatttgcccagtgctgggtgaactcattgccaatctttactcacctgaactatgacatttaagaaatccgtagggttaacgatctaaaacgtgaagcggtacagaataacgggtcttttctcattaatccacactggaaggttgaataccggcaagtagcagtgtaccatgtgcacccatgaagaagtccaccatgcattcagagaagcagggcgcccttttcccagcgcacacttaaggtactgccaggcggaggggacgcaggatgcagatgaaccagatcagcagaatactaattacaggggaaaaaagcaaagcaccctgaagtgagctccaccttcacgaaaggtaaaaggtgtccagagcgaatggttcaaaggactcctgcccaaagcggcgcatacccccttccagcctcagacctctgcagaacccggcggcacagccggcgcggagttgtgcccccatcagtccgaggttgagggaggagcctgcttgtggtcctctttgaggagagtgctccagcctgcccatgtttgccgctgcacctggagagtgccgggatttgctcttaccctcaactactactcctcgtgtcgcacctggtgtctgtcaacaccggctttccgggccaaacgcccccgcctccgtccacaagcctgtcctgccttgcagagccacatctcactgcaacacgcagtaacttggggacgccaagggaaactccacacggacatccccgcccgctctccgctcactgattagtcctgcttccaaaggcgcacagcaagggcgcacatctgcccagcggcgcctccccagccccgcgcaggcagacacactcacctggggcctcgctgccctccccacggcgtcagacgccagggacccgggcgtgtgcatccgaaagaacgtgcgctcggctgccggacgcccgcgggctcttggggacccagtgcgcgcagctccgcgcgcggggcagactggaggaaccggctcgacacccgctcgggcccgcccggcacgggctcctcctccaatcacagcccactccgcggtgcgcggggaccctgccccggcctcgggcgccgggggcccgctgcgtctgctcactgcgaggggcccctccggctcgcccgggcagctgagacgcagggtccggagccagcgggagcgcgcggccagagagagggcgagagggcgcgcaggagaggaggagagagcgcgccggagccggggccgaagagggaggggaagagggcgacgatggtgggcggcgggcgcctgctgtcagcgctgtcggaggccggcccagggagccactgagacttcggcgcctcccagagacccggtgggggctactggaaaagaacgcgaagacggagccgctcggccgccacgcgcgcacacacacacgcgcgcaccctcgcgcaccctcctccacctcccgcctggcggatctgtacagatggattccttcgcaggaaaataaagaagaggggtgaaagtaggaggggctgcagcccatccatctctccgtgaggcatttgcatctgaaagcacggagctggaggagagttttgagggtattttcaagctgcccctccaacacccaccttagcctgtcgtgaaagccgtgatcagttgagctcctgaggcatgaaggcaaagtcataaaactaatcagaacttacagttttcttgcttgatagttttgccctttcaatctcctcggactgccctagttctactttttttttttttttttttttaacttgcagacaattttctcccctgctgggctctctaatgctaaacttccaaagtgtatgatttactcgcagtgcgggacagaggacccttgcaaggtgtggaaggaaggaaagaaggaaggaagaggatctggtcttttctttagagcgcggtgcagcccctggagttgagcacgctttgttttcccctgctctggtgctcgctttaatctgatgactgggtgttctgtcataggggttaggagggggaagagatcatttccaactaccttcctttcatttttctcactctaccaatggaaagtgtcctctttctcttacgcacttattcttacttaaccttagcagtaattcttcggataccagttacatgggcttaggcttgtccgtaccattatctctgatttcttgtgcagtcaagcacacttttctgtccccagtccagcctctcctggctatttaactggcgccatgcctcccccacctcgcccattcaatttagtcaatgtttaaaaccgaattctatgctaataattctgacagcaattatggactcctgttaagttccagataccatcctatgttgcttacctaacattaatgcattttaaaagttctaactccaaccccaaagctccccagatccagggctgcttggatgaccatttcatggtccatttccactcagctgtcagccatcacccaaattcaagatgcttagaaaagacctccgtatctttttttagatattagcttggattttccctgtatgttcttttctgtcaggggcactatcattcacctggtagccaggtatcaaaccttggcttcatctttgagctctttgaaatacttttctgtgttaaaatgctcaattattctggctcatgtagtacaatctttagattcaattcagatttttctggtaacattacatatatttgccttgttttgcctacgaactgacttctgggatgagattttttcttataactgttctgaactaaaagcttcaggagggctgtgattaatattcaatatcatcaagacacagcacatgttcggcccatagtaagcattttttgaataaagaagtgtttgtatcccatctagcatttatcacaaatctgaccataccaagctatttttaaactgctcttggattgcctgggttgttcatctataggaggtcatattgtgattgggaatcagaaactgcactgttttcatctaccggcttgttttggtcaaaagacattgcatagaaaatgaaaatgttttgaggccctttaagaaaaagatat

SEQ ID NO: 1245090 - DNA, 4001 bp, Homo sapiens
cacttacatttttctcttattttttgtataaagttatgtttatctacttctctatgaaaaatgatctgaacacctgtctagtagctacagaaattatgaggacaagtcttacgtaaaggtctcacttaataaacgatctaatagagacaagatatttattgcaaagcaaaagatgttataagtacattcctcgttcaatttgcagatctccaaagccttgatacacccaatccttgatggtttctcaatagtttgccatttgcccagtgctgggtgaactcattgccaatctttactcacctgaactatgacatttaagaaatccgtagggttaacgatctaaaacgtgaagcggtacagaataacgggtcttttctcattaatccacactggaaggttgaataccggcaagtagcagtgtaccatgtgcacccatgaagaagtccaccatgcattcagagaagcagggcgcccttttcccagcgcacacttaaggtactgccaggcggaggggacgcaggatgcagatgaaccagatcagcagaatactaattacaggggaaaaaagcaaagcaccctgaagtgagctccaccttcacgaaaggtaaaaggtgtccagagcgaatggttcaaaggactcctgcccaaagcggcgcatacccccttccagcctcagacctctgcagaacccggcggcacagccggcgcggagttgtgcccccatcagtccgaggttgagggaggagcctgcttgtggtcctctttgaggagagtgctccagcctgcccatgtttgccgctgcacctggagagtgccgggatttgctcttaccctcaactactactcctcgtgtcgcacctggtgtctgtcaacaccggctttccgggccaaacgcccccgcctccgtccacaagcctgtcctgccttgcagagccacatctcactgcaacacgcagtaacttggggacgccaagggaaactccacacggacatccccgcccgctctccgctcactgattagtcctgcttccaaaggcgcacagcaagggcgcacatctgcccagcggcgcctccccagccccgcgcaggcagacacactcacctggggcctcgctgccctccccacggcgtcagacgccagggacccgggcgtgtgcatccgaaagaacgtgcgctcggctgccggacgcccgcgggctcttggggacccagtgcgcgcagctccgcgcgcggggcagactggaggaaccggctcgacacccgctcgggcccgcccggcacgggctcctcctccaatcacagcccactccgcggtgcgcggggaccctgccccggcctcgggcgccgggggcccgctgcgtctgctcactgcgaggggcccctccggctcgcccgggcagctgagacgcagggtccggagccagcgggagcgcgcggccagagagagggcgagagggcgcgcaggagaggaggagagagcgcgccggagccggggccgaagagggaggggaagagggcgacgatggtgggcggcgggcgcctgctgtcagcgctgtcggaggccggcccagggagccactgagacttcggcgcctcccagagacccggtgggggctactggaaaagaacgcgaagacggagccgctcggccgccacgcgcgcacacacacacgcgcgcaccctcgcgcaccctcctccacctcccgcctggcggatctgtacagatggattccttcgcaggaaaataaagaagaggggtgaaagtaggaggggctgcagcccatccatctctccgtgaggcatttgcatctgaaagcacggagctggaggagagttttgagggtattttcaagctgcccctccaacacccaccttagcctgtcgtgaaagccgtgatcagttgagctcctgaggcatgaaggcaaagtcataaaactaatcagaacttacagttttcttgcttgatagttttgccctttcaatctcctcggactgccctagttctactttttttttttttttttttttaacttgcagacaattttctcccctgctgggctctctaatgctaaacttccaaagtgtatgatttactcgcagtgcgggacagaggacccttgcaaggtgtggaaggaaggaaagaaggaaggaagaggatctggtcttttctttagagcgcggtgcagcccctggagttgagcacgctttgttttcccctgctctggtgctcgctttaatctgatgactgggtgttctgtcataggggttaggagggggaagagatcatttccaactaccttcctttcatttttctcactctaccaatggaaagtgtcctctttctcttacgcacttattcttacttaaccttagcagtaattcttcggataccagttacatgggcttaggcttgtccgtaccattatctctgatttcttgtgcagtcaagcacacttttctgtccccagtccagcctctcctggctatttaactggcgccatgcctcccccacctcgcccattcaatttagtcaatgtttaaaaccgaattctatgctaataattctgacagcaattatggactcctgttaagttccagataccatcctatgttgcttacctaacattaatgcattttaaaagttctaactccaaccccaaagctccccagatccagggctgcttggatgaccatttcatggtccatttccactcagctgtcagccatcacccaaattcaagatgcttagaaaagacctccgtatctttttttagatattagcttggattttccctgtatgttcttttctgtcaggggcactatcattcacctggtagccaggtatcaaaccttggcttcatctttgagctctttgaaatacttttctgtgttaaaatgctcaattattctggctcatgtagtacaatctttagattcaattcagatttttctggtaacattacatatatttgccttgttttgcctacgaactgacttctgggatgagattttttcttataactgttctgaactaaaagcttcaggagggctgtgattaatattcaatatcatcaagacacagcacatgttcggcccatagtaagcattttttgaataaagaagtgtttgtatcccatctagcatttatcacaaatctgaccataccaagctatttttaaactgctcttggattgcctgggttgttcatctataggaggtcatattgtgattgggaatcagaaactgcactgttttcatctaccggcttgttttggtcaaaagacattgcatagaaaatgaaaatgttttgaggccctttaagaaaaagatatttttcctcaagttttcatattttttctcttcttatgactccacataaatgttgattccaaatgcacgctttcttcttaaaccattctatgtgccttccttttaaaaaatttcctcagtaacctctacagaatccaaaacaggtgaagtaatttcagttaaccaaaattctagccctggttcccacactaacagctgttgatcttagagggaggtctagattcttcttgtccaaaagacacaacctagagcaagggtaagaactgggaataatacagacagaaaccaagggacaccttttacctaagggatggtctctttctgaggtgatggcacataggctgaaatgtaatgatgacaatgagtcagcgttgtgcagctctgagggaagaatgatctaggcagaataaacaaggggaatgtctgcggcaggaaggggttggatgtatgtactgcaggaagggaggagaatggagatggattatgttgtagtaatagatatggaatagatctttccaggtcttccaggccctgaaagatgtttatattttatcttaggaggaagcccagcatcaagaacagcaagtaagagttcaccaggcttaagctgttgtcaagtttagggtcaacacatgttttattaggtcctttctcctcttctttctttttct

SEQ ID NO: 1245091 - DNA, 4001 bp, Homo sapiens
tgaggctgctctctatgtgggggtgggtgtgcgtgtgttttcatctttaaaaccaccagctgtaacagcatcttcggcggctctccacactactgtttattaaaaacggaacatccatacacatcccctacaacttccttagccccgtgctccttccctgcctggcgatcaatctctctcagaaagcatttaacttgcccacatagatccagcaccgattcattcccgctgcacatcctatatattactgttaggaagcggagcactgggctaatttcgtcacccaccagccacccacacacattctacaactgaacacgtttggggctctgctttaaagataataaaacaaggagaaaacaggcaggctgcggacaattcccatgaccactttcctaaaaagttgctgtgttttaattctttgattattctgtctccccctcccccaagcactcactggcaatgatcgcttcaagggagaaataatgtactataaagctctctgcatggtgagtttgggataaattagggtacacctttcaaaatgcaaatctcgcacacacatatttttttcccaaagccccgctttcctgggaaggggactatccaggcttgccagaccccccactccacccaggggatggctggttccttgctaattcttgccttaggttttatcactggttccttcaaacatccaacccccccacccccaacacacaccaccattcacaccacaatcagattattgaggcacacagctcgacagggagagtttactgttacatttaaataaaaatttctctttgaatttgtcacctctctcccttttagacggctgcgctcctgctactctagcccggagcaaaggatgaggagaccacctcctttagtattttcagcaccacggcgatggacagcaccctcggtcctcggccggccaggagcccgcgagtccgtccgctcagcgtcctgggctcgaccggtgcagccttccccatccccatctttcaggtcgctgtacccaaaaatccaagccccgtctcctcgatcccctctctctttctcttcatcggcgcccgctgctctctccatggcatcgttcctatcagcacctcgcccaaaacccagtcttgccccagcgaacagctccccacgcaccccagctctggtctccgctgcccgagcgcctccctccaccgcgcccgcccgaggcttcctctcgcttagtccgccgctcgtcagtcgccggccggccggtcggcccgccagcccgctcctgctccccggcaaagttgggagggaaaggtgtactcacctttgtgcatgcctgtgaacctgtccttcagaaccgtaagctcgtagattttgccaaactcctcgaagaggggcttgaggtccttctcatccaggttgcgggggatctgcccaatgaacagcttgatggcatcgtggtccttcatgggaatggtcgacgggttccccgggctgtggcttaatccgttcatgtgcccggcactgcccgggctgctgccgagcccgttggtactgaggcttgcgttgtcagcctgtccgtttgctaacgtggccatctttatatacatagagaaaatcttctttccttttattctttctcgctcacactctctcgctcctctctctcgctcgctcgcgctcacacacgcacacgcatacacacactcgggttctctccccctcggtttctctacacctcgctctccgctcgctctctgctctctctctttctcctcttctctcgctcgctcgcgctcgcgctctctctctgctctcccccctctctctctccctccctccctctcctctctctctccctctctctctccctctctctctccctctctcctctctctctcggtctgatctgattttttttttctttttttcttttttttttttttttttttttttttacattgaacagacaggatctctgtcctttccgtttaaacaggctggaccggttcaagttcccagccagaccaggggtgggggtggcgagtgtgcgcgcgcggaggagggcgcggggggccgggaatgggcgcgctgtgggggcccgcgccacggcgggcggcggccgggggcagggcggcgtggggcggcggccaccgcgcctcccccgtcggcggccccgcgccgtggcgatggtacagtccgagacggcccccggctataaatagcgccaggcgcatggctcttcgggaggcgctgagattccgggcccggcggccgcggggagcgggtgtccgtgaggagccgggcagccggcctcctctctttgccttttgggggttctttttgtaatagcagcaggtgcaactttttgtattttaaaaatagtgatttttattttcgtgtgggtatgtaggggggctttatccaccaagctatgctctattagggcgccaggcgggcgaagcaaaggcagggatggcgggcggggcggcggcggaggtggaatgggcgcttttttcttccatctggctttatttatttatttagactagaaaagcgagccggcttggagggagtccgcccggggatccgagcgcgcattcatcagtgtcgagagaaaaaaagctacataaatatatattatgtggataaatctatagacaagagctctctcgcgcgcgctctctccctgtctctctgtgtgtgtctttctctgtttttttttcctcctcgcacccccaacctgccagagcagccccacatcttcctcccgcccggcatctaccgccacccaagccacctgccaggatggggctgggagctgtcgggccgcgccggggggcagagggacggggagtagagactcggggtccgacccccgccccaacccgcttccgaaggcggaaggtgggggtccccgtcccgggcggcctcccccgccccggagagcgcggctggtcccccggtggctggcgggaggaaggtaggagtcgggcgcccctgcccgctcgcccgccggagggggaggaaggcgctgggcgcggtggccggtgagccagcgcgggggatggcttgatttgccctcgtctgctttacgggttcaaatagaatatatttttttaatcaccatcaaaagaataaagcccctgaatcgctatctgggttgccgccggaccgagactcgcgcggcgtgcgctgcccccgcgggtttcgttttcggcacctacagctcccgaggtgcgaggctgagtcgttcctgccgtggggaccgggggtcgagccgcccggtccggaccccgccggactccccgccaggcccactggggctggcatctcggctgcgcgggaaagggagtggcaggcgcggagccgggagcagggtccgagcggccccgcctgtaggggtgaatactggtggtgaacttggctggggtagcagattttcacgttaatgatatttacctgcaccccgtcctctctcatgtttgctttttcagggcagcctcttcgcttcagaagcctggcaaattgaaataacgcgcccgctcccccgcgggctgcggggctggggagctggggcggcggggctgagcggctggcctaacccccgccggccctcggctagccactttcgggtttcagggtttctcttttcttgccctcggattacattacgttactagaggatatgtctgcaattttaattaaagaaatgagaccccagctgcctgcaaacccaggccaaccccatttggtacaagcacaatacggagctctccagcgccggaggaggcccggaggcccgaggttcgcagccccaggccccgagtccgctcaggacgcctctctctgaggatcccgggcccaaaccaaagagcaagtatgatttttagaactgtggaacttcatcctttcattttagcttctcctgcctttgcttgccggaatcgggtgtaagtatggttaattcgtcacttggtttaccgggtttacgttatccggtgttg

SEQ ID NO: 1245092 - DNA, 4001 bp, Homo sapiens
ataacctgagggaacgaccatacttccaaatggctctctgacatctaccttacccccgaatgcaatacaaaatacaaaaccaaacttgttacctttcctccattcattcccgccgttatctttagtcttcacccaaatccatccctattaactggcaatacaagcctgacacctaggaccatcctgatccctcctgctctctcaccaaattctaatgcttctaacgtcaaatacacttctggagctgagacccacttctatattcctaatgcccgttgcccatcactttttattctgaactatcacacgagtctcccaactagcctccccaagtctagccttgtaattactaagttattcattcatatacagacatgtaaactattaaaatttatagaaaactcttcaacagttgtccctatttagaagggcctaatccaaagaaaactcagaaattatgcaaaggtcattcatgcaacattcattatcaaacacaaaccatgaagaaccctctacttggcaccaagaatgcaaagataaataaggcagctcccctcagggagctgacaatccctgtcaactacgatagtgttaagtgcttcaacagagctttgctaagggtgcaaaggtaacaaaacccacgggaagattcctcaagatgtaacctaatacctagtctcttctccagaaaagattacacttgtaaaccattcatggacataacacattcctaaaggaaatttcctttaatttctcacattattgcattacccacccctcctccatcatctcaagtgaagacaatatttttcttctatcctatttgaactgagtggctatatttgcaatttctcttgctatttccttaaagtagtgacctcaaatttcacatctggactcactaattacattcctaggtacataaaagattactgactatagtcattaatcgtaggtctatgtatacaattaaacacatttaaaagcacacgccgtggaacccaaagccgagtcaaacttccccaaaactcatcatttactcttggcactttaagatatactttaaaactaggtaggcatttggtatattattgttcaaggcttgccgtttttgcctagaaaactgaaatttggagaaaaagttgattttggagcagtaaaaacgccagtcgaatgacctcaaaatagtaagagcaaatggaaatatggtcatataaacagctgttctccaaacgactgacttgaagaggtcctcatgttttactaaacaaactctgaaagtaacagcaaagtaaaagtagagtgtattaacattcgtctcatttcacgttctgttgataatgaaatcataggcaaggaatgtaggtaaactattaggaataaatgaacgcaacctagcagaaaccaaatcaagtgagtaaacggaagacaagggcattaagttaagttaacaaggttacttcctgggtcagaattttaaacaaaaaggaggaacagaaccgcccatcacagggcacataaaggaaacatcaccggtcacttcacaagcacactgcaagaaactccagagggtagcacggagagggcctgtccctcaagaggtggaagtccccagacaagaggggaggaaagaaggacgtgatcccctaacagtctgtctcatcacgcccggccaaagcccgatgacacagaggcgtgcaattaatcccaaccaggcggagctcagctcagaggctgcgccaggcgcagaggcgcgggaagcgcggcagtccccttgctcgcgccctgaggccgccccacagcctgcgcccccacccggcccaaccgtcactgtcccgtcggtccggcagccgaaacgtaggccaaaggtgcatgcgtctgcctcccgcctaggcgcaggccgaggcaccagcgtcccccctcaccgagcccgcgtccccgacttcggagggcagtgtgcagcgggaaagtccacggactgaagaggtgtcccagggcactgcaagtgcgcgtgcgcgtggcccccgcaccggctggagcccggaacggccgtaccgcgcccgcctctggtttacgtctgttcgcggcaccaggcaaggggaggagactgagctggcttttgattggacagcgggaagacatggggcgggaagaagcccggtgattggtggggacagcgcgttcctggatttgaagcgaggaagccgcgcgccctgcgagtccggaggaggaaatggagctctgcgctgcgtgggacccgggggacggctcccgttggcgccgccttcaaggtcttggcgaatttgaaaataatgcttactttattcagtttgggtctccagggcaccgccagtcactctatgcgcaaagaagtatcccccgccaacaaatcccccccgataggtttcgtccttccgtgggcagatgcagacctttcctgttggtaggcgctgaaaggcgtcaggtttcaccttcaatcagctaattcctcgggatccaagtttcatgacatttcgccacatctagtcgcctctttgtgacagagtaggctttgtctcgattgcttcctacttttctccatccttcttaggccacaaaacccatcaccgccatctgctcggcacaggcccttaactacttcactgagaccatgcctttcactcaaaatgtatctcagtctttttcagtaaggtcccttatctcaaaatttattccatatagtcacagagggaaaagagtccctcttttccaaagctaactccttaacttcgttcaagttactgaaagatgtccggcgcaccttggaggaaagaagagggaaaacgcaaagtttagaagtccctagacctgaggttacttggtggggaaagacgtctgtttacttgaccactttctacctcctgcaaacatggctcacctgtcattcttggatatcctctccactggtttccttctctctgcctacaaaaatgcagcacctctctacccaaacacacacaccacacacccatacaccacacacaccactcacaccacaaaccacacacacccacatatgcaccacacacacgtgtgtgacacgtatacacacatccatacacaacacacacccacatacacatcacccacacaccacacacaccctccacacacaaacaccactcaaaccacacacccacacacaccccttccttgattctgtttcatcacctaatgaccattcttgtttccttcccttaatggtctccacttttttttccatagaggaagccaggcttccactttttacaccttattttgacgcatttcatggtgtctagctgggtccttaaaactttatcaggaatagactcctaattgtcaaactcagtgatatctccacagttcgacacctcttcttggaaccctgcagccttggtatttgcaaagagtaattacctttattctacctttgtccacactcagtgagcaaagataaatgcagaaaatctcaagattttctgaatcccaaaaaagtaagccaaatgctcagccctagagctgacctctcttaacctctttttctacaaagcggtcacacattggaggtgaactgcttaaatgtgtctacaggttccggactgtcactcacaccagatccttgttaataaatgtccttcctccataaatatcctcaagtcaccacagcactccccacaacactcagtaacctgataggactctattaacagagatctctgattcagagtctcggcagcaggagagcctggactctgacgccaggctgcctggatctgaatcctggctctacctccctcttccaaactgtgtagccttgggcaagtagctttaaccagccggtttccttgtctgtaaagtggggataattaaagcgcttgcctcagaggcttactgtgaggatttaaagctacttctgtaaggtatctagaaaaataatggcccatggaaatactcaacaaacattagctattatcttatac

SEQ ID NO: 1245093 - DNA, 4001 bp, Homo sapiens
aactattcagtatattcaagggcagagctagcctatacttgaaacaaggacactagtaaacagaatgaccttgaagtggttttactaaaacgaaaggccccacatcggaaccttataagtagtgttacgcattagtatatacatatatactctcatttatttccctaaaagattactcacagtaacaaaattaagttctttcatcacatcgtcaatgattcctcgacgtctaagggctttgatcaaatcttctgttgataaatgctgttgatcaggtgccaattcttcccgtatagtctcagcaaggatttctcttattctaccatggacatccatctatgtagaaaactcatattacaatttataacatcacaaagcagtcaaatactgcttctgaagttttaaggttctccagctaacagtaaatgcacaattgttaccacaattgaatgggaacaaaggtaagcttttaaagaatgaatcttttgagtacaaattctagaaatagtctccactggttatctggcacctttgttaccatttctccacaaacaacactcaaccaaaaggaatcttctgagagggagtatagtataatcagaagaacacggactgggagtaggcagatcaaagtatgatcttattactttcatactttgatctgcctaatgataagggaatcttaccagctttcaacttagtagatgtgtaacctcaagccaacttatttaccctttataaatctgtttcgtcaccgataagaatggaaaaacctagtgtagtgccctctcacgatagtgttgtgaggattaaagatactagacagcacaaagcctggcacacaagggcaccataaatggtcgcttttatcacttcagcatcttgcactcagtcgagcgagcgctgcagaaactggaggttcttctggagctccgaaatattaacaaattccgtcattacaaaccctttagtaacttctcttccatgacttatttgagaattgctgattgaagctcctggttcaacttcgctgatacccacatgtttcagcggtaaagaaaccctgatatctgccgggcgcggaggctcacgcctgtaatcccagcactttaggaggccgaggcggccggatcacgaagtcaggagttcgggaccagccacaccaacatggtgaaaccgtctctactaaaaatacaaaaattagccgagcgtggtggcgcgcgcctgtaatcccagctactcgggaggctgaggcggagaatcgcttaaacctgggaggcggaggttgcagtgagccgagatcgtgccactgcactccagcctgggcaacagagagactccgtctcaagaaagaaaaaaaacctgatatcttacagcagaatataaacctccaaatacaacttacactcgatccgacttccagaagtcgctcgctaagcgcttcattctcacggccgtcctaaaacgccaagaccgctcgttctatcgccccagactcttgctagcacctgctcggctcgttttctttctcggagacgaggacgctctcctgcctcaaactcaaagctctgcctactctgcgttgcgcaccccacaatcctcgctacagtcccggcaagcagatgccgctgtcggcccggggccgccgggcaggagggaaaggttatgggtcggcccggcggtctctcccagcacccgcgactctcaccttgctcagctgctggtggatgagctgcttcagctcggaggctttctccggaggcagcgacatgctggcagccggcgtctccccgccgcttctccccgcctcagatgccctaactgcgcggccccggccgggccagggagcgttaggagcgactggagcacaaagcgccgcagccgttcgcctagcgcagctcccgggggacgcaacgccgcgtcaggccgggggctgacctggaaatgaggccccggcggcggcggcgccaactgttttcaaacagtggcggacaaacagggcttggggctggcccgcacgctgcctgatcgtttccgcccgccgctccacctccccgcgggccccgcaccccgagacctcagcgcaccccatcgccttgcttgccagggtctccgaaagcgctgctggcccctcttcgcggccacccggcggcctctttccgccctctgaaccggcagttagctggacgggcctcaagggcccggcgcccagggactcaaaggaccctcccgcgccccgcgaggctccggggtctcgggcttccgccttcttgctgccctcgttcttgccagggccgcggttagtccctgctggccaccccactgcgaccatgttcgttccctgcggggagtcggcccccgaccttgccggcttcaccctcctaatggtgagtctccatttgcgctcggggctgccgcctcccgaggcccctgcggtgtcgccaccccgacgcggggtgtttggcggtgccttgggagaaatagggcactagtttctatttcatgttttcggccggaaaaaacagggaggttgtagccggaggcagccgtccaaacagaacctttgtcggctgtaaaaccaaacgtagtcaagtctacaatttgtagtctctgtttcctgtaaaacgtgatgtgttcgtacgttctagatacactgtacttatgttttgcagggcatccttcagttttatcctagaaagtctttctacgactagttttagaattagtcttaagctagcatattatcgttgttaaccggagaactactgatagggcaataaacattaactcttgccggtagttagcgcagttttatcgctctttatattcattcattgttttaataaagtctgttatgtgcgagtattagaataagactaggtgcgtgccctcaaagaatttacactgtagttggaaacatgtaatctaagagcaataaatgctaggctagaagcttgaaagggtatagaaaggtcctgagataattgggaggggagggacagatggcttgttaagaaaggctttatagagaaagtagtatgcaaaagatggagggcccgtgggctgggagtaggggaaagtaggcgtttcagaaagatggatgtctaaaacagagtcagtaagcagggggacttgaagactgccaagaatttggaatgacacattgagagagaataggctgtaggccctgtgaacccagaaggcaccattggaaaatgcactgtttggagtggtataaggctggagagagctggaagtgtcatccttattcattacatataaaacacacagccccagagaagagtgtttcaaaaaggagggagtggccatgtcaaaagtagcccagagatgtgtaaggtgaagaaagtgtatgtttggatttagcgacatgttaatgatggtcacctggacaaacagttaccagtgaagtggtgaagaggaaagccatattggagtgggttgaatgaatgatagaaaacaagttaaagatttgggttgtataatatatattcagtcattaattcagagacaggcatgatggctcatgcctgtaatcccagcactttagaaggccgagtacaggaggatcgcttgagctcaggagttcaagaccagcctgggcgacatagtgatacctcatctctacaaaaaaataaataaaaattagccaggtgtggtttcctgcacctgtatctcagctactcgggaagctgaggtgggaggatcacttgagcccaggaagcagaggctgcagtgagctgaaatcgtgccactgcactccagcctgggcgacagagtgagaccctgtctcaaaaaacttttttttaataagagataaagtttctgcttatgttttcgtggacgacttggagaatttttgctacatagagaaacaagaaatgaggttgcagttagagggctatgtggggtcaagggagagccttttagaatgaaagatattagagcatgtttacgtgctgatgggaataatacaatattgt

SEQ ID NO: 1245094 - DNA, 4001 bp, Homo sapiens
acttcagctagtactgccgctttgacaaattagtccctgttaatgagaattaagcccagggtagtttgttcccctgattagatccacaccctctgaagggtaaaattgctggcaaagcaagtgaaatgttcccagaatttgagcatttatcttaatggggctttgtatgaggatttaatttaggtttagttgtgaccaaaatatcctgcctctttgttttgttgcctgttattaaaacattagtcaaagcctccatctcagcagatctatttgttattttcccacaattacatttttaaaattttctttaacttcagatttgtagctatgcaaaatgatgatatcttactccaaagcaaaaaataatttataacagaaaacaagcagtattaacacataaacaagccacagtggagcagtttactgggatttgtaaaatagagcactactgaaatgccagacactctgacatcaactatatgtcagaggggctaaaagtcaagtaccaagaaccaagatgttctaaggattagcagggagagtgtctcataatcaagcagtaataagatgactaaggttataatagtccaataactaagatatttgttgctatttccaaggactataagtagcttaaaatgttatattaaggtatttgttataatttcctaaactaagatcctacatttgtaaatatttactcaaaatcgtttgttagcgtaacctcttaagcaaattatactttgcttgggccagtattagattttatttttattctgtagcccaggtatacatactagccctagataaacccatggtggacaatttacacatgaacgaagaatcatttgcaggtataaagccagtgaatagtcaaaattgcacaacgtactaccacccaagcaagtctattctttataagattatctgtcctgagctccgtaagtttgtaagtggccaccctgttttccttcaaactggtattcagctaagtggacaggctaggcaaatctactggcagattccatctcattatgctggaacaatgactggaatttaaggaatgatatatgaagcaagataatttaagaccaccaaagaagtgacaaagggaaccacatttttgtgtgtcccagaagctgtcctgcctccagatcaacagatgaacagcaagttcagcacagggcaaatggagggcgcactcaaacttcagggccctttgtttaacctcatgtgctccaggttgactcttgagaattaaaacccaaaactcacattacaagcatctttcaaattctattattgaactagagatatggaaatagatctagacaaattatgggggtgagggggtgaagaagggacaggcagccgctgtcctctaaggtttcacaaaatggaagcaggcaacccagagagtcactttagcttctgaaccgacttcagtaaaggctggtcttcttcatgatccgaaggaactcctcctcgttcacttcgccgtccccatcccgatcagcttcgtcgatcatctcctgcagctcctcatccgtgaggttctcccccagctcgttggccacacgcttcaggtttttgaacgagatcttcccggtctcatcgtcatcaaagagcctgaaggccttcaggatttcttctttggtgtccttctcggacatcttctgcgtcatcacggccaggaagtcattgaagctgatcttccccgtgccttccctgtccacctcggagatcattttcttcatctcttccttcctgggttcgaagcccagcgctctcatggccaccttcagctccttcgcgtcgatggtcccacttccgtccacgtcgaagaggtcaaatgcttcccgaacttcttgcttctgatcctcagtgagctcgggcttaggtgccacctttctcttttggccggtggaggcagcgctgggcttcttgaagccggaagccatcctgccgctctggccgccgtggtcccaacggcaccgccccgcgctctcattcgggcgccccccgccggcgcggcgcgggaccacccctcgctcactgccaacgcccacgcccgctggggcctggagccggcccggggaacctcttcctacgccctcccatctgcgggatcttgcttaggcgagaatccgctgtcccctcgggtcattaaccggtttccacgagttgacgcctgagctggcaagaacagcctgtagccacagttgtcttctgtaatccactggcgctggcagttctttccaagatatgtgctagcatccataagaccccagttttataggtttctttagggactcttcctctctctctctctctctctcctctctctcttttgacaggagtgcactggtgccactcagcttactgcagcctccaccttccaggatcaagtgatcctcccacctcagcctccatagtagctgagactacagggcatgccaccacacccagctaaattaaaaaaaaaaatttttttttttatagagacagagtctcaccatgttgcccaggctggtctgaaactcctgggatcaagggatttcccgccccagcctcccaaagtgctagaattacaggcatgagctaccaagccgggcctctcctttttataccatttaaaaaaccctcttgttctagcggcaacacccaatgaggtgacaggtcctaagggtaaatttaggataatcaagattgagtgtgatcacttgacattcaatgtggggaaggagaaggaagagagaatattaaaagtcataccatgtgttcaacttgacataaatgggaaacagagaaaatggaaaaatttatgtataaaatgcgtagaagtttgtctcctgacattacactcaacaataatacaatgtttctggcatgttctcaaatatgaaatgtaatatccaaatgtatgatttactttcagtgtttccattttacatactcagtataattgcacttgaataatggtcataatttcattcatgaggcttttgatttggagggagggaagtggaaatactacattctggtatattctagtattttcttttctctaacctcctagcagcacattactctccttgcttatcatccaatcagagctgtgctgaaacccacgctctggtcgccttcctttggcaatgggcacaggagatgatgcaggacatgttgggactcaaaattgcctcctgggaataaagcggttctcctacaaaccaaagagcaagaggaaaatggaaaagaaaaaaaaaattaccaaataagcccaccaaggaattgcctgtagaattactttgcattcttttaaatagttacagaaaagaaagctgacttatttttttagcattctccccctgccccgcccccccgcaatcaaatctcaatctattaatatatcaataccttttgtaacctatgaaggttacaaaagatgtcactttgaagagtttgtgttaaagagttttatggctgggtgcagtgggtcacacctgtaatcccagtaatttgggaggccaaggcgggaggatcacctgaggtcaggagttcaagaccagcctggccaacaaggtgaaaccctgtctctatgaaaaatacgaaaattagctgagagttgctgcgcacaactgtaatcccagctacttgggagtatgaggcacgggaatcgcttgaacccaggaggcggaggttgcagtgagcagatattgtgcccctgcactccaccctaggcaacagagtgagattctgtccccaaaaaaacaaacaacaacaaaacaaaacagtgctggatacaacacagtaggtaggttaataaatattcgttgaatgaatgcatgacaattaaggttggtcctaaaataccttctgaatacaacaagtgaaaaccccaaaagattaaatgatgccaggaatgttttacaaactgttttttaaaattagtggtcagatattgtttacatggcacatttaattagccatatatcactacc

SEQ ID NO: 1245095 - DNA, 4001 bp, Homo sapiens
actcatcaaatagctgctccttttgatgtcccattacttcagacattaaatttttcacaggtttctcctggggaattgtttagggtccaagtctcatctgctggtggctttaattcttgcaacacaattctgctacctctaacatctatctttcttatcacactcagacaccggaggagcagatgcaccaactctaacctcctccttttcctcttaattcttcttaggtgcaaagtattcaataagcccgcttctctggtttagtgtttttgtttgttttctgttccttattggttcccaacacaagtaatagcacccaacaatggctcagcccctgagcccagtgtttggatacagaacccaaagtagatcttctgtccttcatgaagtgtgtttataattatcaccttgaaccctacagcctacttatgtgtcccatctactgctttccagctccagatcttacagtacttggacctaaagaaggagcaggtctataggttgactgaagtttgctatgtgcactgtggagcataataaaactgtatcactgatctttcatccatcaactgacatcacagacaatatagcacatcattatttaccgtgctaacctttagtggtttcattctacctaagtttttttttgcaattggattacaagttgagcacccctaatttgaaaatctgaaatctgaaatgctccaaaatctgaagctttttgagcacccacatgatgacataagtggaaaatttcacacctgacctcatgtaaggggtcacagtcaaaacacaagcaaacaacacatatttattcagcatccccaaggggaaaataaaattaccttcgaggtaatgaaatataaataaattctgtgtttagacttgggtcccctccccaagatattgcattatgtatatgcaagtattccaaaatccaaaaaaaaaatctgaaatcctagacatctctggtcccaagcatttcagataagggatacttgacttgtataagctccttgaagggagggctcaggcttcaataaagagttaaccttccaggatcattgtatccacccctgtatctcccacaatactgcgcacacagcaggggctcaagcaataactctgcctacatgttagttttctggtgggtagaaactaatttgtagaaacaaaaaaatctacatgtatggaccaatagtgtctgaggttctcagcaggaaccatcaaattctgcagcaagcacattttcctggcctactaccactccagccttagaggcaggcacctgagtttttcccaggtctgaagggacacttctgtccagcaatggttactggttgagttggcacaggaaaggcgttgggtgctataaccactcacaacctaattccccttcctcagacgattttcctaggagtgaaagaccagctccaaatcataggcccgccctgcccccagatctgtctctgggccgggtgccctttccataacacacactcgccactgcatgggggacagacatccttccggtgtcttggagactgaaaaaccctaagatccctagtggtgattctccaaaaacagaacctaaatattataactttgggggcagatgaaaggctgtaaggatgaaaacagagggagatgagtgggtgagaggtggggtagataggtgagcgaccttatcttccttctttcaaaattcaacccactgcatcaggcgacacccgttcccctcgagaaggccccgggtgggggccgaagtgggataggccaggcctggagtgcggagagatggagaaagctgtagggtctggcagacatatcctgtgcttaccacgatcaccactttgggggtggggcccttaacctcccgctgtacggtgccaaaccgctggctgtacattttcgagtccccttcgggacgggggcggcgtccgccgcgtttcccccaaccgtggcgacctgcgggacccgcttccgcgacgcagaagtctggttgccatggtgcgcctcgcgggattaggggccggtagaggtgggcgggtcgggcggaagtcggtctggtcaccatgggggccgcagacgcctgcactcgggacttcctcttccagctgagaagctgagcctgcgcagtcctcaccccgcccctcggccaaatcccgccgaccttgctcccttcctccagggttcatcagaatggcagaaaaaacctctagcccaagaaaaatcaaagctctaattacaattccagttgactttgctatttatatcttgtaatggtctaaaagtatgaaaaaggttagcgaacattttttgggaagcttaaattttgcactatctgtaggttaatcttgatgacggtaataatcacaggaaaaccttatatttgtgtagttctttacaatttccaagatattttcacacacacagccttttaacctcacagattttttctgagacaaggtctcgctctgtcgcccagggtggagtgcagtggcgtgatcatggctccctgcagcctcgtcctcctgggcctcagcctccagagtatctgggactacaaagcctgcgccaccacgccctgctaatttaaaaacaaattttgaagagacagggggtcccgctatgttgctcaggctggaactcctgctcctgggttcaagcgatcctccccactgcccctcccgccggcctcccaaagtgttggaattacagggtgcgctaccgcgcgtggccgcaaatatcttacagggttgatagaatagcaagtaatactatccttattttccagctaaggcaaagctcagggagcctaagtgccttgtcaaaccaaataaccagtaataataataattttttaaaacctgttaataaaatcttcctatttgccattggcagaaaccagggcttagactcaggatatcctaggatgggggcagatcaaatggactagtggggcagtggcacgacctggtggagcataattaagagtctgagggtcacagtggaccagggtcaggatgtggatcagaagtccagtaactggtttctgagaatcaggatccaggcagaacaggaaacacaaatcagggaaccaggacggacctgcagcacaggtggtaaccacagttgcatttccagtcaagagcaaggtggtaatacctaaaagccaattaagaatgacactgtgatactcccattctaaagtgggggtgagcatagaacacttgtgagcacatgcaacaaatcagtacctacgtcaaactgacatataataagtacaactaatgtgtatgccctcttaaggacgcaatttactgtaaattagcattccttaatcatttgtaaaccacccacttcggattttgtatgtggtatgtttctaaatacgaattccatttcctgaattgctggttcagcttttcagccacgaaataatgtttttcttctcttttaataattctgtcattttgtgttcttttctataacggttctttcaattgcagttcagtaaaatacgcatttgcatttactaagagtttacgtggcctgaaacagaaaacaaacaaattaggtggtcgtctcggtttcctggagtgtccagaggggcggttctttgatcttcgagtccaacgggctccgggcccgcccgtcggtccgggcggaaccacccccaccacacatcctccgggaaggcggcaatgaaaacgccttgggcccgaagtacggcttgggaaaatcggcgcagattcggggccgcccgttggggattcccaaggttgtgcagcccaaagggcctcgtcggaatttctgaggcgatggggtaaaccgacccttggcgacacccggccgcactcgaacgtcctaggtcgtcgagccccgccctcaccctgggcgagctccgaaatttaaccccggttcggttttgcctgttttaccactatttgaagagggggactcagcttccctctggccctagcccaagtactggggtt

SEQ ID NO: 1245096 - DNA, 4001 bp, Homo sapiens
gcggtggatacatgctttacttttcagccagaaaatacgcactgccattcctgagaagatggcaggcagcacagctgggctctagccttaaagactcaagctttctccttccttccagtcctacctctttacttctcagatttccagctggctggatgtatacataaatgacttgcatggctaagtaaaacattccagcttatattttcaaggatttccaagagttcttgcttttggacaaattaataaatgcaaattagaacttaaaacgcagttctaattttatttctatttttggttgttaaaatcaaaacaaaacctacacacacacagtcctagggttttctcaaacgaaatcaacagttctttggcaatgttaagagtgtgtaacatgactgccatgctaattagcataatttataagacttctaatagtgttgaaacaggaaaataactataaacttgttagagaagttcgtttgaaagacactgtcaaatgtcacactaagtctttttaaaaactcaatttagtaagtagaaaatataaatgaacaaatttaatttttccagataataaaggaagttattcggcatttttcccagttacgcaaagacaattatcacgtgaaaaatttatagaatgtaagcagtaagagagtattatgcaaaaatatcctaaggtaatttcagtataaattataggaccacatttattaataatatacgttatgagaacaatcatttgcagtctcactgtgaaggcaaaaaaaaaaaaaacaaaaaccaaaacccaaaggataaacagaaatagcacagtccaccgaatacactgcatggtgtttataactgtataaccaaactaagtaatctttcccctctctttaacttttatgcaccacctgccattctagatactatcaatcacactaaataataataaaaaccaaccaccttcaatctgatcattctgggcaggaaactgaatacagttttgaccagatcttcgagaaagattcatatacacgaaattaactagttctgttaaaaggctgctataaaaataccatcattacgagctatacagaactttagaatccagctaagagtgcagaaatactgaatttcttaatttatgtggagggggctgtaaacccaaaggtagaagggcatttcagcattctggcgtgttcagagtttctagggtatagtatctctctaacacacagagagcatttcaaagggtggctatggccaggaaacctcagagcgggttctgccgtcacacttgatcccgaaggcgggccagtctctgagacagttcatcctgctccgccgaagccacgctcgtgcccacggagccggtctggccctgcggcagctccatgttgaggtcgaggcccgcctcatctgccatttcctggagcagcatatccacttggttctggggagtggtgagcgtcgtcgtgctgctcatcgtgtcttccatttgctgcgtctggacgtccagagtctcaaactggtgctcgaatttgtccatcaaagcagaaatcttctccagattcatggtcttcaatgtcgcatccatcgacttaaccacaccagccatcgacttggtcaccttgcccatcgtcaccgccgtctggaccctggcagccactgcatcgactcgcgcactcattctcaagaaattcaccgcctggttcttctggcggatggcattttcggcgtgtatcctcgcaacttccatgttgcccttctgaatggcctttttaattttggccttttcggccttttcctccttatcgcattttttggcactcctactcagttctttggccgcgaacttcaggttgaacaggtgtttctccatgttagacatagtcggacggctcctttgggtcggcggcccggctgagaagcgcgccgaaggcagagaaggtaaggtaagtccgctcccggccgccgctcctttgttttggtcccacttcctgtttctactgtgagcggcgcaggtggtgacgtcagagcccagcgccaaaggcggagcctgcgggacggaaggcgccggggtggggcctgtgggacgtaagacgccaggggctgcgcatgcagggggattctggctggacgctccggcgctgcggcggggaacgctcgcttcctgcgctgcgttctacccggtttttaaaattctaacgcattagtcaattcacaaaaattagtgcccccacgcactttcctagtaataaatctaccgaagtagacaggatctgtggagacccgcgtgtaaaattacccacgctccaaacttggcaggctttataaagggtgactggctagcgggctaaaaaccagccaaacatcagctaggtcttcgcactaacgcttgctttattagcatgggtaatttccactttctcaggggaactggaaaccatggatacattaaaaacaaaaacattaaaacacattaaaaacaaacgggtcattgacgcgtctccatctttgactacaatttgtgctagagttctgtaatatccttttattgcattgagtgaaaataatcttcaaaactgtggcaccaccaaatttatactttgtctggaagttcagcttctaggtgagttgccagcaattatccaaaaatcgtcccgtggtttagtaataaaaagacccatcttttgctgacaccattctgtctttttgatgttttataaatatccaaggaacttcactcacatttaagtttgacaggctaaactgtcattttaaattatgcaggcagagtatgttgagatatcaggacccacacccacgggcatacatcaaaactgtcactatgtattacgccctttaaaaatgctggctttcaaatggcagcaatgtgtgctgtcacttttctctttagaaagattcctccgatacagcaataacaatgtgagaagaccaaatctgccctaatgaggtaggctgaaaatgaactctgagagcgaattctgtttagagatcattttaatctagcagcctgccacctcgcttagcttcctgtgatagcttgccagtcagtttcacaacacaagaccttctgaagacatagctctgatgttttcactctcttgctccaaaccccgggcatggaggctaaacctgctgtgcagcatgctggctcgtctttcgcgcccctccacctccgccagtcaaagcaaaccgcagcatggaatttgagcattatttgcgtcattcggccagcggggagaatgtgactgacgcccggtcctgtggctatgctgttcctgttgcctggattttagtgtccatgcatctctgcctattgacaccctgccagtccttcaaaagccaccttcaccatggagcctccccaggactcctcctctgtgtggccatactacagggcacattgcctggcaaggggtctgtgtgtataggtcacctgttacagtgtgaactacttggatgcagacactgattccttcccctctccatggagcccagcaggcgctctgcacacagcagccactgaatccagatggcgttgctgaatttaattgtatttcagaggggataggatgttaccctagttagcagcttagctatggttcctttttgccccgcaaagcagtagaaccctttttccaaatgaaacttttctagaaatggaatataaacaaccaaaaaaaaggggaagaaatctgttcaaagtggatatagagagcttaggccccctactctgctcaccctccattccactcttcccttcttttaggtcctggtttttcttggagtttgcaaacaagtttcttatccagcttccatgtcatgctccatagttttcttttttcttttctttcttttttttttttttttttttgagatgaaatcttgctttgtcactcaggctggagtgcagtagtgtgatcttggctcactgcagcctcccccttctgggttcacgcgattctcctgcctcagtctcccgagta

SEQ ID NO: 1245097 - DNA, 4001 bp, Homo sapiens
gatacctgtgaaaataaaacattgtgctgtaagtgagtgggagagaacagatggttggtaatgatttaaaacatttatgtttttggactatcaccaagcctctgtattaaaaaatatggtgtttagttagtacataccaacatctatatgcaaggtgctcattttctggaggacggtactgtaatgaaggggataaaaaccaaatgaggtaagaggaacattcttctcgttttctgggggcattcagtgtgtgctatttcttattgacgatatgcaatctaaatgttttccatatgatgagaggattttaatttttcctcaattactagtcagctgtaagtgcctaggaatcatactgtttgatcgtatggtgtagaattgtaatattgttttgtaaatttgattcactttgattgaagctcttacaccctttgagcaataataaaaagtggtagttcagggtgctcttgcccatgaaaaacaatagcattcaccttatcctcacgttggttggcaggcatatggtgttatgattaggtactggaattaacaggtgccagccaactgaatcagaagacagataaatactaaatatggtcacaatgcatttggatgtgtatatgtgagttgaaaagaggcccctgtccttcaaaccgagaggaataataacaatgtaaataaaattgtacaaagatagattaatgcaattctgaggttaaagcgaagaaaaataaacattggtaatactctcaattatcagaaaaactgcgaaaagggagtcctgttaagcatccacggcgttttgatttggatctgatagcataatagggagaaaaaagtcacacacacacattgtgtattattcacttgccatcgctttcaaaacgctggggattattcaggcacagtatgtttgtgggagggagctgggggtggaccgcagagagagagaaaggaggaaggcctgcagctctagacttagcacctgtgaacttagttggaaataactcctgacagacatcaaccataacaccttctaacagaaacatgctgataggcaggatgttcaaacggggcagaagagggagcaggcaaccctgtgaaagtaacagcagcagaaacaaacacaccattccttctccccgcaacccacttggagcccctcctcagatcgcccctcccaacccctctgctctggccacgatcgcacctggcctcccggtccccctaacttccctcccacctctcccgcagcctgcgcctgagcctgagccaggtcgcggagtttgagactgacgcaaaggaggcacccccgcagcagagatgctcgtctttctgccacacaccctggaggacccgacagactggcagcagaaactaaagactgttcctgccgtcctctttccaacctctgcatgccccaagaggggtctgaccccggaatcctggagtccagggtgccccgccggggcgcaggaaggaaactcaggtagctgacaagttcaggcggccgtccttctccagcgccccctcaaagtcaggatcccctcctgctcccgccccccacctcccgccatgcgtccactgaagtgaagggaagtgggttggaatactggaggtaggggagatagaaaaaggaagaagcctcccgcatctccagcggcgaagcacctggaaaggtgagggcgcacgtccccgcccaccagagcccgctcccggcgcgggtacccagcagcgcgccatcatctctgcccctccagtgccccccagccccaaccccagccccagcgcggttacctcgcgggccgctgccgggcgcttgcaggtgctgctgttccaggagcgcagcttcggaggaaacttccccgcgctccggggcaaactcccgcgcactcctggcagccgtgaggtggctgagagcggagcgccgcgccgggagcggggacagctcggagtcgggcgctcaccctggccctgaccctcccgcgtccggcccggctggggctgcggcgccgcctccgcgcccgctcccgcccgcgcccccgcccccgcccgcccgggcagctccgcctccctctttttctctccctcgcccccgctgcccgccctgccttctccagctctgcctttgtggctctctggtcccctctttcctctgactttctggcctcgcctccgctggcgactcgccctcccagccccgcgtgccagggctcaggtgccaccccatgcccagtcgaggaagtgattaccctagcagttctttcccaattcgccctctcctctcccctgcgctggggtcttctcctagcttttctagaaacccagttctgaggaacacgtccataggttagaaggctgtcgcaaacgttaactccaaagtcaaaatgtgttttgctttacagacaggaggtgatgttcgtttgtttattttaatacatcaattataatagatcaataaagtgcttgttgtaagtacggctaagttcagcagcaggtttgtgtaaaccagggctccctcaaaatgagcatagtacccatttataatgttcaagacctaggagatttctcaggccacgcatttcaaaatcgaacaagctgaagttggcggttttaaagggctttgcaaagaccaacactagaataacatttttaaatcattaaaggaaacaccaggctttgggaggcccaggcgggaggatcacttgaagctaggagtaaaaggctgcagtgagctctgatcctgccactgccctccagcctgggcaacagagcaagaccttgtcttgaaagaaagaaagagagagaaaagaaaaaataaaaatggttcattcaggtttaaaaattagttctaaacattattctatcaacaatttgaccaaactagggcaaataaaaataaatgaatccttgattgcttattttgcattcagatgatttctataaattaacaaagaaaaactcaactatttttttaaaagcattaactagttaaacctaccttattacgacattagaattttgttgttgcttttgctgaaactgaaatattagccttatgcacttccagtaggtcttattcttattaatggtttagtaataacacatctggtagtagtgaactttggttctttgaagaattaccattataggacttgtttgcctgatgcaggtttctttttaaacagaagctgatttattattctgtcacaagtgttttattttcatgcatttttaaaaattggggtaaacaccacatttttatcatttttaatgtacagttcagtagtgttaacatacagtcacattgctttaaaatagatcttcagaatttcttcatcttgcaaacctgaaactttgtccatcaaacagctcccccttttcctctcccctctagcacttggtaattaccatcctaccttttgcttctatgaatttgacaatgttagatctctgatatgattaatatccagaatatataaagagctcctataactcagcaacaaaaagtcaaataacctgatacaaatgggcaaaggacttgaatagacataagagtttaatttttaaaatttgtatatttgctggggtttttttgttttatagatttctttttatttcagcttaattgtaaaggagttttaaagttatcaatgccatataaacacactattgaaaatttggaaaattgaaaaagagtaaacaaatcattccacaagcaaaccattgtaatacaacttgctgatttgttattaacttttaacccagagtcagtccttcatatggggaaaatcctcattctccaatagaataaatgtttcctgagttgaaagaaacaagctagtgttccctgagctgtatttaactgacacatgcctggtaggcaattgatgagcgctccttgaatgaactaaccatttaacttactcgctcttggtttggttccctgtgtatccatccatgttctatgaattcttggagttggtactatccattatatc

SEQ ID NO: 1245098 - DNA, 4001 bp, Homo sapiens
aattatgacatcctggacctggtttaaattaaggaaccctgagaggaagccgaagtccagcaagagcacaattagcaaatatgttaggacctggcctctggctcttttgcccggacagggttttagagaggggcagggaagaaaaggtgttttcccttcaacaagaattacagattgttttcttccagtttagtttggtaacaggtagatttcacagaatgacagtagtccagcctgggagcaggtagatttcacagaatgacagtagttcagcctgggagcaggtagatttcacagaatgacagtagttcagcctggaagcaggtagatttcaaagaactgcagcaacagcttgtccataacaggtagagtcattcactcctgggatgagccaagctggaaggaatgtgtcctaggagactcaaggtttcccaatgtttcatttgtcaacagctcataagcaagtcacttccacttcacacgacctcacagagaccccacacagatgcattttggattttggtgagctgttataatagtcagaggcagggacaggctcagcctgaatcctgctcagaggccaaccaggattggttagtgcgagtcagcccacacctccttcccccatgctccggaggaacagtgggtgtgttgtgaattcactggaaaagtggttggaaggacgcattccaaactgctaagacctcccctcctggaagtgggactgtggtgtggatggttctggaagaacgcaaaagatacagggccctgacctttaggcctaagcgtgttaatgaccatacacgaagcaggtgtttctcagcgtccccctgccaccgccccgacttgtactgtgggcttatttttaaagagaaagatgcttctaacctgcagtgtctacaacagctcccatttaagaacccgggattggaagctcatagattgcgtttcgtagccggaccgctccctttcacacatgtagtctctctgcccgccacacgtagcacacacagtgggacccggcgccgctgaacgcctgcaccttcaagcccgcaaatggttctctatccttttccaggtacttgatcttcagagaaacacgatctccctcttagaccttactttacagttgctgccacgcaatgacttaggattttaccaagaattggcttgggtctgttgggatatgaatattaacccaagcaggaaaatagccaatgctgcctgttcgaccacgagcgggtgcgaagcgcagggaagactcctcagggtccacccgccccttgtcccccctgctccccaggcagcgtctccgcccttggacccggaggcaaggaggagcgcttctcccagcaccaccaacctggagggctccgccggacggttggggcctcccctcggagaccagagcccgcgcttccaggaggggccaagcctgggcccctcccgcgcccagctcccgttgtgatttccaggacccccagaagcccggtcccctcgcatcgcggaagctttgctcggggttcctgggaccggaccctcttctgcgcccgcgactgcagcagcggccagagatgcatgcagccactcgccagctgtcacctggtttgcagacgcccgcgcacctcgcaagagccacacctggtacctgtgcccagctgcaagagggtgaggaggcgcgggacgggattgggctctgcccgcgggcgcggctggacggcttgggcaccagtggggcggatgggtgtgtgcgcggggtcgcggagcgcaagagaatgcggggagcagggggctgaagggagcggggtacggtactagaggcgcacaggggaatatgaggccaccgaacgcaaggcgattggaagcgcacggcaatcagggggacgcggggcactcgcctgatgagggctcctgcatagtcccgggcggcctccatggcgcggatcccctagcgggcctggaggtctgtctgcctgcacagcctcttaaagtgcggcggccccgcccccgcccgcctgccagccccgcgaaggcctgactggcgcaggggaggacgttttggcacgagctctccaccgccgaggatcgcgacttcgcgctctgggagcccccggtcgtcctggctcccgcagcctggagccgcgcgtccttcgctgccttgggccgtaccgaggaccttggaagcccagatgctccccgggtctcttttggtcacttgccagcctgttcgttttgcacttctgggggtcggggcagttggggtcataaccaatcctggcagcatcactttggccgcggaaagacgggtatgtggattttaaacccaggccacgggtggggcaggtgaggagacggatgtgagcgccacttgcctccagctctggagtcccccagagcccagccccaggctcagcgagccgctggttccctgcagggatgcggaagctgccgcagacaccgggacctgcagcccttcaggttctccgaggcgcctgggcttcctgcccgctgcgctgctctcaaggccatgtcatgagcatttggggacagtgagaagggcatgcagaacgggaggggaaaggagcctttggactgcatgaattgccttttagctgtagtaagggaccctcgcagagtgaggaggcaaagagtgaaccccgctggggctgggggacttccgtccacaccctgctctcatggttgttcccatcggaagacgcaattagggcctctgagacctccgaggaaggcgggcagttacaaggggttcccagaacccctcactacaggactgaagaggtgggctcagtgttgaggggtgggactcgggcagtaagaggtgtaactttctgggatggaggcttgctaggatatcctctcgtgcccaactgctgactgccgcctggaaacagcgtttcgggagctgcagcgggaccctcgccggctcctcctgagcccacctggtttgagcagactgacctgatctcttaagacctgaccctatgcccgccctcttcctccgctggctctcagaaagggtcaccgtggtcaacaagccttgtgacttgcaggactgttgaagccaaaggcaattgccttccagagtcaaggactccgcctgctgggaacacccagctccaggctcacagggggcagcttcccccagaggcactgagcggacacagctttaggaggtcattcactgcccctcccactcacagccccaatgtgatggatgagaaaatgggtccaatcaattcaggtcaacttacctctaacctttttattgtgaaaaagttcaaatatagagatacatagaaagaacagggctgagggtactggcttacatctgtaatcccagtactttgggaggccaaaacaggaggatggcttgaagccaggaatttgagaccagcctgggtaacactgtgagactactatctctacacaaaaataacgataattagccaagcatgacggcgagcacctgtagtgctagctactcaggaggctgaggagggaggatcacctgagcccaggagtttgaggttgcagtgagctgtgatcatgtcactgcactccaatatgggcaacagagtgagactttctctctaaagaaagaaaaaaatctgtttgtgtgtatatatctatctatctatatataagatagatagatagatagatagatagatagatagatagatagataagagagaacagtacaatgagcacacttacacccagcccctggattcaaccactgttaacattttgacatatttctttgttctttatatttgaatttgaacccttccaaattaaatcctttagcttgcatctctggagaaacaaggacatgatctcatacataaccatagtgacattatcacttctaacaaaataaaaataaagacctgggcactgagtgtggacatgggggtggggtggggactagcaaacatttccaggccatggcgatggcagaagggacccagcaggag

SEQ ID NO: 1245099 - DNA, 4001 bp, Homo sapiens
tcatttctctaatttgctcacatatttcaatctctgaaaaagttgccaaaagctgttaacagacaacaatggacatatttttaaagtttagtaaatcagaacaacataggcacatgctaaagattaatttggaatcatttacatatatgccttctgaaaaaaagaaagagggggtgctttttttttaagtccggaaaaaggaatgcaacctatttcttgcaagggcatatgagtggatctcatattctcacacatggctttgttttcaaattcttcaaagtgcagaaattcttttaatttaaaggtgagcccatggaaaatctggaccagctgtagaaaaccatccaagaactcagtgccacagccacttttttggttgtgacacaaaccccagggtgatctgaccctctgctcaccagtgttgtaaattatccaagagaggtacttctgttcccactgctgcctccatggaattcattgtctcattagctgatactgcctagaggatgttagagaggaactcaggcagccttgagactcaagagagactccaggctgtcgaaagaaggaagactcacaaagcgtctaaattcagaccctttacactggagaggaagacttgggaaacagccacatctcactgtttgagggacctggaaaaacagatcatcgtgactttcttcaaggtcacgcaaagtttaagtgatttttactgtcccacattccagcatgtcctcttctatgcattcatttcccatggtagttcatcattctctatttatggcatttttattaggtaacagtatctcatctcttcccgataattgtgctgctgcatatttttagaaacttttccacccgccattgtcagggactgaggagttgcattaatgttgagtttgaaaattctgttcttgcatcaggcaggtaaaagtggccttattagtatttctgttttcaatgtctggagaaaagtcccagggagagaaaaacaagataaagcatcatgttgtccactggtaaaatctgtacgtggaaagtaggctaagctagagtaatcggtttaaggtagcagttaatagtgtctgcagctctttacttcgttaacctcagttaaccaggacctggcacaatggggattgaaatcagggggcttatccacagtttcctcaaatactgattttatcaagttgggctgataattccataaactgtatgagcattgatagttagatgtgatcgttttcagagtgattctttttctgcttgggtttatttatttatttattttgagacagaatctcactgtgttgtccaggctggagtgcagtggcgcaatctcggctcactgcaacctccgcctcccgggttcaagcgattctcctgcctcagcctcccaagtagatgggattacaagcatgcaccaccacaatcgactaatttttgtgtttcaccatgccggccaggctggcctccaactcctgacctcaagtgatcggcccccctcggcctcccaaagtgttgagattacaggcgtgagccaccacacccggctccgcttagtttttgccagtagttttgcagggatggtgtgtctccccgcctctacctcctcctcctgttttgaaaaagagaataaacgtattggaacagcccaggagattgcctgagttttgctggcagcctctgaagcagcccacagtatttctaccttccccggcaagaacagtggctttgttctgtccgcgccggaggggccgggcgtctgcggagctcggccttggacttgggagcggctttctctggctctccggagaaatgggcaagagcggcgaggagagaaatctggggcccggaggatgttctcacctgtcattcctaagatgcgcttgagtgctgccccctggaggcgtctgtgccaccggctggaagtcagccgagggcacagggtgtcagcaacctccagggtggaaaccaaccccgcggcccgggcctgcaggtgacgcagggtgggcggggcctgcagacgccgggtgggcggggcctgcaggtgacgccgggtgggcggggcctgcagacgccgggtgggcggggcctgcaggtgacgccgggtgggcggggcctgcagacgccgggtgggcggggcctgcaggtgacgccgggtgggcggggcctgcagacgccgggtgggcgggacctgcaggtgacgccgggtgggcggggcctgcagaggacctgcgcgtccggatctgaagcgagcagagccctctctactccagctgaacggtgatggtcgtcaggaaggaatgtgggctcactgtggaaagaacattcagtttttcaaaagaagacagaaatagggatgcttatgtgaaattcctgatttttcaaacttggcaacttaattcagttaaaaaaaaaaaagcatttctatggcaggaccacgagtcataggtagaacgccttgtacacattagaaagagagcctcgctctgggcagataaagcaggaggggaaaaaagtagtgggtcaaaggtgcctctgagcagttgctcccctgcccgactgctgggcttaatgcgatggtcatggctggatgtcagcctccctgtggggacactgacacagctgcagcagccctgagagagtcgccaagtgggcctgcccatgccaggtgctgtccttgggccccaggttcacaaactctggatgctggaacaggtagccagagagggcaggaaaggcagtgcaacttgcaagtctacccttgttaaagggccctacaattgtaaaatttcatgccccccatatcccaaacatcctctccgtattcctggatgatgaacgttggcttgggaggcatgtttactctaggcaatatttttctgaggttattatactctgtgtgtgaggaagattcatctatgtatccactttatcttttgggagtacatttcacctgttgttatttttaacatcttcccttgattgacctgctcgtgctggacctctttaaattatttctaattctgacaacatcctgacaaggtaatataattccacttactttacaaataaagacactgaggcttcaagaagtaatttttccccagaccagctaggaaatggctgtgcagagcttcaaacccaggtctgtcttactaggaggctgatgactttgatacttctacctgagatggcaaagtctgtgtctcttctccctgacgtcatctaatgaagatctatgctgtctgagcacttaatgcctaagaatcttccatttggtgccttcccctttcccctttttatatctttataaatttaacaacagctcttttgtatagcaaagaatgcatctttgtggcacataactttaaaaataataacatcaccagatgcacacatccaaatgagtgtgggttgccttgatgattagagacgtattccagtgaggctgttgccagtcaccgtctttcttgtgcttcttttttaaagaagtaccttcaaagccagtttacaaaacattcaaagaaagtagccttctcatttaggtggcatttactgttttaaatcacgaacgaaaatatccagcttccccagccgctcttttcatcagatttgacctcaaacaacttcaggctaattcaaaaaatgaagcccagtctccatggagaaagacttgcctctggagaatgttcagaggaatgtactggaggttttttggttgccaccaaaatcgtagttccaaaaatgttctgagcccagtagcaccattggttaagtatgtaacctttgaaggggacacatttattgactgggcaattatccccttaatttacagataaataactgtaaaataatttgacaaattgatcaaactaaagagttggggtggtggatagtatattggctttgagcctggatcctggagccagaatgggttccaatctttcctttaccacttactaggtaggtaatattgcacaaattactcaatctct

SEQ ID NO: 1245100 - DNA, 4001 bp, Homo sapiens
gtttaaaattcattgtcattccctgttcaaaatagccaacgtggcctactgaggagctcattcttgactctgattattacagaccccaaatcagctgcattttagctaatttgttcttctatatattaagtacccaaagtatatatcaccaagcaaagttgcaagttaatggccacagaacaaccagattcaacgtaattataacccattctttcactagtttaagaacaattgcacagattactctaatggtttaaatttttcaaatgctagaaaagtatttcactgttcattagagctgtgctgagatgacaccaaccatctggatgatacaaaaaaatgcagtgaaaaaactggcaagttgtatctacatgatacaaacatctggaaaggtgaacgcctgcagagacgtgattggaattttctatttttacccagatgtttggcgtcaggatgacctggtttaagcgccttgagaacgtttcaccgtgaaaacagcgaatatggttatctctcaactgcgactcactataaacgccagcaggacaaccaacatgcaaacaggacacagcacagataagaaaccaaacgtactcttcaggttttcactgatagcagttttgtccttccaagtgggtgcgcagtgactgtctttcaaccacagcagacacacaataaacaccaagagtggcggcttcatgttcccgctgttactgcaaaggaaaaataaacccgcatcaaatgtcttccatttggttagtttctgttggcatcaattgaaaacacctggggctccaaagcatttttctgtcaatttttccttatgactttagacaacttatgctaatgtgcctgagacataaggaagcttgaaatgtaagttaaaaaaacaaacaaattctagtccctatttggtttaaactcttcacgacagttaaaaaagcccgccatgtgaagtacttgaaactcaatgcaatggagaggatagatcacatcctctcagagtccaagcttcattttgtaaacatctcgaaacacagaattaattcgaatctgttagagggatttttttccctccaaaattcttttttttttttttttttttgagacggagttttgctcttgttgcccaggctggagtgcaatggcgtgatctcggcccaccgcaacctccacctcccaggttcaagtgattctcctgcctcagccttcccaagtagctgggattataggcatgcgccaccaagcccggttaattttgtatttttagtagagatggagtttctccatgtgggtcaggctggtctcgaactactgacctcaggtgatccgcccccctcggcctcccaaagtgctgggattacaggcgtgagccaccacacctggcatttccctccaaaagtctatgttctcaagtgagtttttacctacgtggttcgctattatttttaaagaaagcaaaaccaaccacacacatttttctcatactccttataaaacccattatgctatgtgaatagtgcacagttaaaattttttcttctcagttaatgaatttccctttgagtttaattcgatacacattagttataaatattctaaatacagaggttaaaactttactaagaaaagttaaataagttagaatagtcgtatgctttaataaagttaaaactataaaataagttagattattttaactcccacaaaggggatatttatctgctttacgtatatttactattttaaaaagaaaacaaccacagaaacctccattatttgatcaacatttggaatgtctttttaatacagtcgtaaactagcaactgtactagtaattatgcagttatcacattttacatacatcatttcaactaactcttcttctatcattactctatttacaaaacaaaacttattaatatagtgtatttaccactaactttgcaatatctccccagtgaagttgccaccagcttctggaaggaccttcgtttttctctgctttaattttcatccgtgtcagggatttagctgtgtcctatcagtttgatgacacagtgtttaatcctattaacccaacattttgagatttacaactatgatctaaaatttggtactgttcagaagaaaacactagagggcaggctgtgtacacaattggcaacagtgaccttgggctaccttcctatatacaaatgtgttttgataggactcattaaaaccttaaaaatatttttttaattttcaatttaaaatatgtagtttcctatgtaagcaaaattagtctcttagattgaaaatactataagccacaatgtgaaagtgagtaaactcttagataaaacagttcgaaaagtgtatttacacagtcatgtggcatctttgtttgtttgttttctcgtttggcattttttgactgttagtatatgaagcgatataaccaactaaagtgataaagtctagcatatacataatgcaatagataagtattttagacccaccgtaatttgctacttgattagctgaactgaaaatgtagcccttaatgattcatttaaaaacaacttagacagctgttagtcatgatagccaactctggaatctacacgatgggtctctctggcaactgaaatctcaagatcacctgcgccctgtttgcaagttttgagagactagccaatccatccttactatgtactcagcacttgtccaagcaggtcagaccttgacaattctgaactgggccacctgccttttaggcgccctatgacgttggtcctggtctctgagcaacatgcagtctggagtttatctttgctctgcctgggcacagagagtgacacacattcaaggcccagccacaccccatgtcagctgccttgattacccactaattccctcttttagctggaaaactcttagctctcttggaaaacagatcagctcatagcaaaactcgaactattattattttaaacagcctaatgtcacttatgagcaactacaatccacacctataaacagatgtgtcctatcctgaaagatgcatggttggccaatggaagaggcagcactttgggtatttttctcaggaagagcagagcagagtcctggaaaagttggtcataggaaattgtccagcttttaccctgactctgtgcaccattgctcattagtttaccactgtccaagtttgggcccgtttgacatcaaggctggcatctgcgtgttctttttcaacagacccaaattttgttgaaaacggaaccagttttcaggaagcaaaaccaatcacacacatagaaagatggcttacttcctagtagcagatttttttctttaatccatgttcctcctttaagagcaatttctcagaacagaactttattgctaactagtactaattactttgaaaatatctcgaagcttccaaaaaggctcttcctctaattacttcatctgttttcacagctgccattttgttcttaagattaagcaatacttcatgtgaatccggtcactttcataattatgacatcattatgctcaagatttaaggggattacaaaatattgtagatagctgcttgataattaaggagatttagaagcaaagtcatcttaattaagaaagatggcaagaggatgcatgtggcatcaactggaaaatagaggaatcagatggatttcaaaatgtcaggtttattgttgctaagttcaggcttggacagagcatcttagatgcatggccataaaggtcttgctaatatgtcacccttgagttagacttgcccatcctgccactggcatagccagacaacctctgggcttccaactgggacatttggccaggagcagactaggaagcctatatactgctcaggctgtgtcttatatagaaccagctccaggatacaatgacagtggtccctgcagttatgtaacctaagagtgcatgtgtcctgtagacaccagctaggatttgctgtcctgcaccag

SEQ ID NO: 1245101 - DNA, 4001 bp, Homo sapiens
tgcaggaatatggatggagctggaggccatcatccttagcaaactaatgcaggaacagaaaaccagacactgcatgttctcatttgtaagtgggagctaaatgatgagaacacatggacacatagaggagaacaacacacactggggcctatgggtggaggacgggaggagggagaggatcagcaaaaataactaatgagtactaggcttaatacctgggtgattaaataatctgtacaacaaatcaccatgacacaaatttacctatgtaagaaacctgcacatgtactgctaaaccaaaaataaaagttaaaaaaaagtaaaagaatagcaaaggggaaaatatatagtacaatctcttcctctctttcatatcaaagggtattatattgagtccaaaacaaaatatttccttcttttttgtttcagacagggtcttactctgcctcccaggctggagtgcagtggcgcaaccatggctcactgcagcctcgacctcccaggttcaagccatcctcccaccttggtctcctgagtagctgagaccacaggcatgctccaccctgcctggctacttttaaaattgtttgtagagtcagggtctcactatgttgcccaggccagtcttgaactcctgggctcaggtgatcctcctgctttggcctcctaaagtgttgggattgcagacataagccaccatgcccagccagggaaattattttctttcatgttgcttttaactttaatgttttgaatagatactatcatgacacagtttaaagattttttaaagtaagacagtattcagtgaaatgtcctcttctaacccccaccccaatgccctggccagtcatgggttctttaaaaaaaaaaaaaagtcagcaatggaaagcatggccagaccacagggtgaggttctttctctcagagcagtgattttgcagcatggtgtgggaatctcatggtcttgcaggtgggcaaagcccacttctagaatccggctgtggtcaggtcaccacctgcctgctcactgtgtctccagcctcgcatttgcatgtatttgtttcagtatgtcttttgagagtcttctacgtatcaaccttccacaaaattctgaaaatttctgtgtgtgtatgtgtgtgtttgcaatggaaataaaaagcgtccatgaattttatctttccaagtagtctggaacacaaccccacaaaacctcacagccaaaggtacctgcctgcttgttttcctagagagaagccttcccgccacacccacactcaggtttgcacctgaaccatggaaacctcgccgagaaaggcctggggtgatttagcccggtgattagctcttgcaaactagcccttaagtcgggaacctgggaccaggacaaacagcacactgtctgttaccattatttaggcaaattcttccaggaagcaaactcattttttttaaagagaaaaagtacagaaaaaaattgatttaagaagactgagttcatgaacaatttgaatatgaactacttgacaataatgccatttaattattgttaagaacacacaactacccaaaagcattactgataaaatataattccaaataccacattcctcggccaagacagcacctaagaacaccatgaggagcagcatctggggccacgctgggtgcctgccctgcccaactgggcttaacgcacatgctcccgggacaaatggaattctggcacccaatgcacggactctgatggaggaggtcctactcaccattctcccgagtttgggatccattaggctggagttctgaagcctctagcaactttcccaacctccaaaaaatgtggcagagggagtcccatgaaagccccaagagggtgacattaaatatctctctgtgccctgacccacgttgtcccccggaaggaagacgaggctggtatagtggagctattcacatctggagaacaaagcggcttcggaggtattcattcagctcaactgcagaggaagagacaatgcatctcatacgcgcagatacgggatgaggcagtggccccaaagtcatgtgatgtcactggaagccagcagcctggcccagcctgcgactcctcgggttcttctttgggggcacttgtgtgtcatctctgagagggagtagggccccggccagcaggcagagctgagccagcggcacagccccctcaggtgacagccccctcacatgacaggcccccacacactgtggctgtgggcccttgtgatggaatgttacggccgaggattagcttcctagggctgtgcaggggccgagggtagagttttcccagctctctgaaggttcgctgcaaaatcagcttgcaaagggcagttgaattggagaagaggcataacagattgatttgctcctagttttaagtgacatgggagccttcagaaggaaggaccaatccctaatggggttgggaagctgagacaccctcttgaggttccacaaggagtggcggcttagattctcgcgcaacaggttatgggaggagaaaagaggacttcagctgagggcaatcagcgctcacgagggaggattcagtgggcttgaagagcacgccacggtcttcgttcaagtctgctgggccccggagcagacaatggtcttgacaagtctgtccagcgtgttcggtgtcagccttccttcctgagatatgggttcagttaacgaaaactcagggaagggactagaggtcattcctttcttctttggtgggtcagacttgaaggagataaggacacttcaggaactctgggagagatggtgggggtgggggagccgagaggccttgaagttccttttcagttcagcttgaacaaagcaccatattttggggtattggcttctgagccccaacatctgctctaacaaaagtaccctacactgggtggcttaagcaacagaaatcggtctcaattctggagactggaagtctgagatgaaggtatgggcagggcaggtttctcctgaggctgagcgggaagggcgtgctccaggccttgacccgcgtggctgctggccgtccttggtgtcccttgtcttgtacaagcatcacccgatctctgccctcatcttcttatgatgttctccctgtgtatgtgtgtgtgtccagattgtcccttctcataaggacacagttgtgtgtaatcaggggtccatcctatgcccatgtgaccttatctaaagataagtaattcaatctgcaatgaccctatctccatagaaggtcacattctgaggtcttgggggttaggatgtcaacatataaattttggtgggaaggtcaggggacagtagagaaaaggaggcagcagggcacaggccagagccttgggttgaggggtcccggggcttttctgggggactgggattcttttgcatcatttctctctgaataactcttgcagggattggcacactggagacttactctaactgtttgctgaatgaaaggacaaataatcaaataatttttaccaacaaagaaatctctggaaaggcagagttggaactcattatccctgctagttaaggctagctgtggctatcagggccgggcccctctcccttgcagaggggcagcgtctccaccagctgcgtctctgcacctcctccccatcctcacaccctttccctgacacttgccaggccgggctccttgagctccaggcccagcacagcagctcccaggaagtgggcctggcccttcttccgaaggccaagttgctgggatcatactcagaattccgagggctggaaaggaaggagagggtgaggctgggcccaggtgtgggctgtgatcctaggagggtgggggccctgctgcctgcagtcatcagtggaaaaccttgcccctacccagccaaagtcacctctggcaagagcatagcgcacgggcgagcccagggcttcaaaagcccatgtaattcagatcagagaattcctctttctcagcc

SEQ ID NO: 1245102 - DNA, 4001 bp, Homo sapiens
ttaaaggtgagtggggtatgtgaagcaaaagatcttttaagaacttgtggcgtcttgtcaacccctcaggcagaatctgtctacggtcctgcaatgcaaagaatgttgcctcctaccttttgttttccgatatccaccagttccacagagccccccaactgcttaacatctgcagcagcaacttccatcatcctcctgatttcgcctctcttctccggccacgcagacacactctggatagccacccattttgcgagtttctgtttgtggacaagaagcaacgagggattctgaaaaggtgtccttgagggagaagaggctcccgtaacgttgccacattccaggctcaccctctgtggctgctgcagttgaacaggctgattggaaataggacagacccatcacgtgtgctttgggttaaagattttaaaaactgtttgtactgagggaagagagagaccctctcatattgttttacactcagtacctgtttaaaaacaaacaaaaaaaaaacaaggaagtgaaatcaaagacaggcagcccggcgccaggcccaaaaccggacccgggcctgcctggcctaaacctagtagttaaaaatcaactcatgacttaaaaaccgatgttattcatagattccagacattgtataaaagaacactgtgaaattccctgccctgttctgtttctctctgaccaccggtgcatacagcccctgtcacgtactgcctgcttgctcaaatcaatcacgaccctttcatgtgaaatctttagtgctgtgagcccttaaaagggacagaaattgtgcactcagggagctcggattttaaggcagtagcttgccgatgctcccagctgaataaagcccttccttctacaactcggtgtctgagaggttttgtctgtggcttgtcctgctacagtactaaccctgtaccaagaactagagtacaaaagaaaaatgtcacatggtttatttttaacaattaaggaggaagtaaatgtaaaatgtaccaggttccgtaaataagtttttatctgaatgtgactaaattacaactgaaagatacagaaaatacccaatgttgccacagtccaaattagcttatttatcatcccgacaatggccaaattttctaaagtataattttagcatgagaattctaaagatttcatctgtaatgtatgtacgaagaataactttaaaacataatgctctaagttaacatcaagaaacagattaatatataactattgaattacttagaacatacttaatgcaaactatttaatctgtaactatcacaagaaattgttgatggagatgaaacaaaaatttcaattagatttgctattcttagaaacatacattaacactttgtcaaaaaccaaaagtgtaacctatgccataataagaagctaatgaacagatctctaggcagatcttctaaccctggatttaaatggcataattcatattagctcttgacaacttctctgggccccatgggattaaatcagattttactgtttcctaaaatgaatattcccttaccttaatgtagcgatcctgattttcatctatgtacttaaacagggtagtgagggccgccatctttcaaccagaccccagaccgcagatctcgaaggttcttggaaggaagagcaactggtcagtcctgtctctagtggagactgaggggcgacctgcccagaaagcacgtgttcagaattgtaaattgttgccccaccctcccagccagcactgcaacacccagccagagacgctccaggaagtgactgcggcttcagagacaaaaactttgggaaccagttagaggctggggctaaacttcccttctttacttggaaggaaaattacacaaaattccgtgtcagatggcaggtaacaacagagggagggcctgagttgaagaaaatacagtgaaaactaaaagtaggcacttttagttttactggtactttaataaaaatttttacactcttaaagcacaaagataagtttcactttctgttattgcagaggatatagtcacttcagggatcccagcaagaatgtcacatcctgtgtccaccaccacaaacccacaacacagacgacagagcccaaggaaaaccagattcagtttaagaaagttgatgatcttagtccagaaacagccaaagggcatcagctaaacctccacaagcacctgaccaagaggccacacaggctccagcgcgcatgctctcaccccacttccatgtgtgacacccagcaacttccgccccactcacagatagaggtgaaaacacatcctcagactctttttgttagtcacaatgaatacaatggaaaattgattctggtattgggacttttataattggctttccgcagcagaaagcacacagctgtacggagcaaattcaaaactgcggggacatgaagtgcctcagagtcacagctgtggagtgacaggaccctactacagcctcgtgtctacatgccagacaaacgcctgtgcattgacatgctgcaggtaaagagcattgtttccttggtataggctttcaaagtgatttctcaacagagaggtgactttatccaccacgacaccaagcgtggcaactgttcaaaagtggctgttgctgtgcagggtgatgaaatcgcagggcactgcaagttgcaaatgtgatttctatgtgggtgggacatccaaccactgccttctcaagtgccctcttcctcctcttcaaacactagccacagagcatggaatggttatatacctcccagccagctcggatctttctgctgaggcactcatttggaggagcctcaagtaagatggagcccatgagcacgctggagaggcgtttatcagtgttaataaataacactgtcatccacctgttgccaaaaatgtacgcagggaagctacctgttcacattaaaggaaatcctatttagcaggacaatatgctacatgtggtgattttcatctgggttcctggttattaaatgccacaaatcccaagctcactgtggtacattctcattaatattattctcttgtagtcaaattaaccagtggcattgtagctaaagtcactcaaaaatatagtcacgtgccacataacatttccatcaacaacagcggtggtcccaaaagattataatggagctaaaaaattcattttctgtctagatatgtttagatacacaaatacctaccactgtgttacaactgcctacagcatccagtaaaggtacatgtacgggtttgtagcctaggagcaataggctacaccatatagcctaggtatgtaggaggctgtaccatccaggtttgtgtgagcgcagctcaggatgtgcacacaacaacgaatcgcctaacaatgcattttcttggaatgtatccccatccttaagcaacatatgactgtaattatctaagttacgactttcactaaaagagaggaaacagggatcagattgttccaccatcagagatgggctaaaaagcaactcctgttaatcactcatccagtcaaaccaggctaggccaggttccagtttctcctcccattcacacttctgggttactcctgtttcacttccccccacctcccccgttacaaagccattaaatggaaccatttttatatgctctggagaacaccactaattaaggtaaaagcagtatgctgatttaagcaaaagcattatccttttaaatgacacctcactcccctctaaaaatctaaagttcatacggagtaactttatttatttatttagagacaggttgtcattctgtcacccaggcaggagtgcattgctgtgattttggctcactgcaacctctgtctcccaggctcaaatgatcctcctgcctcagcttcccaagtagctgggactgcaggtgcgcaccaccacacccagctaatttttgtattttttgtagagacggggtttgctcgtgttactcaggctg

SEQ ID NO: 1245103 - DNA, 4001 bp, Homo sapiens
taggtatgtaggaggctgtaccatccaggtttgtgtgagcgcagctcaggatgtgcacacaacaacgaatcgcctaacaatgcattttcttggaatgtatccccatccttaagcaacatatgactgtaattatctaagttacgactttcactaaaagagaggaaacagggatcagattgttccaccatcagagatgggctaaaaagcaactcctgttaatcactcatccagtcaaaccaggctaggccaggttccagtttctcctcccattcacacttctgggttactcctgtttcacttccccccacctcccccgttacaaagccattaaatggaaccatttttatatgctctggagaacaccactaattaaggtaaaagcagtatgctgatttaagcaaaagcattatccttttaaatgacacctcactcccctctaaaaatctaaagttcatacggagtaactttatttatttatttagagacaggttgtcattctgtcacccaggcaggagtgcattgctgtgattttggctcactgcaacctctgtctcccaggctcaaatgatcctcctgcctcagcttcccaagtagctgggactgcaggtgcgcaccaccacacccagctaatttttgtattttttgtagagacggggtttgctcgtgttactcaggctggtctcgaactcctggactcaagcgatctgtccgccttggtctcccaaagtgccgaggttacacacatgagccaccatgcctggcaagggagtaacatgatttaaatgttgagactagtggagggcaggagaaattgctgtggcacctggaaccgtcagtagtacacacaaatgagtcttctagttctgagaatctcagtccctgtcccttgataattgaaggcatatataacacaaataactgaatcacaccttcatgtctgattaagaaccaataaaagaatctccaatctgcccaagctagaacttgatccctaagcataatgtggacttctcttcctccactcctgcctgcaaacattagggacaaggaaggtattggtagcaggccccgggttctccgcctcttcctgcagtctatgcttggatgatctacggaatctgaccttggcaggcggtggggagtttggtttggtggccctgtctgtgaggaccaaatattgtctctatttcacagatgaggaaactgaagccaattgaataagacacctgccccagaccatcaagctggcatgggaattttgtctcccctcagacgcttcctcctatagccttaaacgctgcctcaaatgctggcgggagctagggacgctgtccagggccctttgaacctgggaggcttctgtcccgccacactccccaccccaggtctccgggaaagggatccgttggagaaaggctggagttctcagcaggcccctggggaggggtgtggcctgaccagcgctcggctccccgcaaccccatctccaacccgggtcgttccactcgactccaccagggagggccacgcaggctcaggccaagtgcgccgcccagcttgtccctgcgtaccggggacgcgctcggcgctgctgggacacgagtggcccggaggtgcgagaggccccggggccatggccgtcacgggcctccgcccccgaccgcgcgctcgggaacagcccggacaccattgttcccgcctggctgcggccgggcgccccacgctcccccacgaatgaggcgtgactctcgccgctgacccgggtcctccccgcccagcccgttcccagctcagggcgcccacccgggaaggaaggtccatcaggaagacccacctgggaaggaaggcccactaggcaaggccctgttaccagcagcaagcgcggcgccggttccgtaccacgtgtcccggccacgacccccggcgctggcccgccccgcggtcgccctggccaccaaccccgccttgtccggagggcaggcatcgccacgcccccgccacgcccaccaatccagccacaggcagaggggtggtgtcactctctccccgccccatttccgccctgagccaggtgcggaaggtgacgtcacctctcccagctccatttccgtcccgcccaccaatcccggcctggtccacaaggctttcgcctcgtcgcccctccccgacggtagacggggatgtgggcgtggcgagggggcggagatttcgtgggttgggattcaggggaggcagggcacacgggagcgcgtgtccggagctgtgggcttgtgctgtgcttcccggttgctcttgggtgggcggggggcctggtgcttcaacggtggggtccgagaagtcgcctgcagtgcggcaatggagtccaaaactagggggccctgactccaccctctgatctcccaggctccggaggtcccacgacgctcccattcccttgcgcatccagcactgcactttccgttgcgtttcagtcccggcggagtcggggcacggactcctgcgggtcacacaagctccaatgagaggtcggtctgaactggattaggaaagcgttcgccagcatcgttaccagtagtggaaatattttagtatttgtgtcccatgaccctaggaactgatgaaggaagcagagccagcaccgtgtttgagcgtctgcgacagcgctttcctttttaatcttaacaacaattcttgggggtaaaattgttattccctagtctgctcacttttccaatagagtgttctcaaaagactttctttaaacttgtaccactaccacattctttaaggagtgatggctcgggagttattattttttaaaaatgaatttaatagttgtaagagatgtatacgttcccacataaagtaaaatgttaaaattgtctcctcccttaaaatttacatggtttgtttcctctttttatatttatttatttatttatttatttatttatttagagacagagtcttgctctgttgccatgctggaatgcagtagcccagtctcagctcactgcaagctccgcctcccaggttcaagccattctgcctcagcctcccgagtagctgggactgcaggtgcgcaccaccgcacccagctaatttttgtatttttagtagagacagggtttcaccatattggtcaagatggtctcgatttcttgacctactgatccacccgcctcagcctcctaaagtgctgggattacaggcgtgagccaccccgtcccccccatccctgcctcctcttttattttttatttctattccacatccctcatagaattttgttaaatgtaacatttttatacttaatagtcttactcatatcctaatcatttctctacaacagactatgataaaaatttaaattaatatttactttgctataaccagatgagattaggcatgttcagggtggtatggccatagacactttgctataaccaaaaagctttaagtattaacattttttcttctggattaaattctcataataattattgtacatgaatgataaaaagaaaaaactatattacacattttgcaaacattgcaaaaagtaaacattggtggaagatacatcctttaatcatatctactgggcttttaaataaattcgttcaggtatccataaatgagattattgctgaaaagagggtttggttaaaaaaaaaaacaaaacacacacacacacacacacacatatgtatatagcaaaaagaagtgatttagagtagaagccataacacactactgttaccaaaatttaataggctcaaggtaagaataaataatgagcaaagaagtagttgagaactttagagcaatcagatgcttcagtccaagtgaaaacatgaaaatgcatttgcagtactcagtgttgaagaagttggtgaacatgtttctcctatgaatctgaataaatgttaagaaaatacaaaacacaacatttacccttaatatagaaccctgttacctggaaatatgttaattgtcat

SEQ ID NO: 1245104 - DNA, 4001 bp, Homo sapiens
ctccatcaacctccccgactggggcggaaagtgtatggggcttctgggcagcgctagaccacagcgggtaggccaccatctggtccagaatgcagcataaatctctccaaaaatgtgtttaggacttctgggtatgttttccagtgcaaatgtaaagtggaaaagtgtctcaagtgcaatagcggtcctttacccagtaaaaagcataacaaaagtttcagggtttaagaacccacgtgggagctgatggagtgggtaggtggttaatcttcccaagttttaaaaaccactggtcttaatgaccagcagagaagattcacttctggctaaaatgataactgagccccagataacttttagccatgtgaaattctttcctttctagggagtctcctcaatcagagccagctaaggaatgtgtgtatttcctagaatgtaaatgagggaagagaaactgagatggagacagaaggaaagcaagccactgcattttgaaattctctaggtaggcagttgtatcgtgtcttttgtttctttttccctggggcagaccacttttcacctggccatcagtcacctcccttcccgaggtctcccgacgtggacacctaacgcccttggaaagggagtgaattggtaggatatcatcgctccggttagttccgcgggagctgcccttcagaaaaaaaactttccagagccaaaagttactttccaagcgccttggggcttcccgggcgcctccctcggacggcaaccctagaagtcaaagcgattgcatcgccaggtctgtggcggctggaagcggggtgaccgcggtcagatggcatttcgcacccacgcagggctgtgttatcctagcacagaaccagcaactctcacacgaagccttgtgtaaacaccacgcgggcccattcctgaacgactctttgatgcctccgctgcggttacttatctcatacataaatcaggattccgctgacaaatctccgtgtttccactaaacagaaggctgccctgcagtccttctcgtgcttctttctaaagtacgataacatctgacacttccataaaccggcctgcagaggacaccgcgcagggggcgactaaccagctgaggtgtgtcaccccaaaacaccagtgggcacaccccaaggcgggcacgtggaagggacgcggaaccgagggcaactattttccagtcggtgaatctgatggagaaagatgccaaatgcacttcccgagccagctgaactcctcgggcacctaatcattgccagatgtggcgagggcgcacggagaacatccccagtcccggagaaaacacccggccgccagcgcggggaccgctcgggccgggaaacggctagaggcgggaggagagaggactgggcgagcgtggggagcgctgcggcgtggaaaagcgaccgggagggatggcgatgcctccactctcctcggcaggttttttcaattaaaaagttggaaacgggaatccgtaaacaacgacttagggcttcaaactacttgcaaagacgcgatggggaggggaatacttgcgcgcttcaaaaccccaacctcgaggtctccagccgcgcctgacccgggagccgggtgcgcccccagtgtccgcgcacgaacccggcgccctggcagccccgactccccgggcccgcagcccaagggaaggttcgcgcgggaggcacctccgtggcctcccgcgcgccccgaagcccgttccccccgcccagagccccgcggagctgccgccgccctacctttcatggtgaccgtggggacgcaccgccggccggggagctccgcgcgagcgccgcgcagccgaggaagtcgtcccgagcggctgctcaccgcacgcccatggtagccgcgccgcgcgccggccgtctgcgcccccgtcctccctcgccgccgccggcccgcgctccccgcgctcccggctccgcgctctgctgcctcggggctgccgcgcgcgccgctctcgctctcccagcgcccctccccctggcccgacccggccgagcgagcggccgcgcccacgcccctctcgcgccctcccgcgcccgccccgccctcggcccgcgcctgccctcgccgggcactttctcgcccgccctctcctgcgcgccctggccccactcgcgcgggctctctctttttcccgttgcaccagcgtcgggatgaagtcgggagcaaagcccttcccggggcggtccagcgttcaccttcggcgagcacctaaggtgccgctgctgctggggtcgcttctacaccccaaactacctagcaagtgttgggcgagaggatggggagctgctgtgccccgggggtggcggggggtaaggtgggcccttccccaaacggctctggggcatggagaggtacagaacgtcctccgggttcagagtttccaagtgcgtgcgctggttgacgcctgaaggagaccaagcagcagggaacactctctctgtcacccagggagagcccgagtggccagaatccgaagtcaccattagacactctctctgcgctcttggacacctccagagaaaaagccagcacatcctgccttggctggaaaagccagccttccacccagcgcccctaaaatgatcgggttgactccagttttgttacgaaaggaggccgggctgctgagaggctccctgagttcccttcgtggtcgcccgtcacattgccctgctgtatacttaataaagcccgtgtttatctttctctttagaaccccctctaagcagacccatcgctttattgctttaaaacatacactaagtggtgagtggagctggggcgagggaggtgcggagaaactttctgccacatgttgacattacagatggctactcagacgcactagtccaccaaaagcaatcgaacactggccgggcagtgcttgcagcttttcagtttgccctcctgaggacttggtaacacggtgtaaccaatccattggttccctctaagtaggggattctttgctctagtaaaaggtagtgccccaaaatgaatacatattgaaacatttcatagattctccgttccaggagatttcttttttctttctttttttttttttttaattttttaacataagggggcaccttgaacatgacgaacaaatgaaaagaccgaaatgctttttcccccgcactgtctgcagttgatgaaactacagggtcctggtcctggagcatgtttcagatctcactggggcaccagccttgtctttcagggcaaatggggatccctgaagggagcttaggatatgaattttcagcccggagtttactaaccaatggcgtgacctcggctcactgcaacctccacctcccgggttcaagcgattctcctgcctcggcctcccgagtagctgggattacatgcgtgtgccaccaggcccagctaatttttttgtgtttttagtagagacggggtttcactatgttggccaggctggtctcgaactcctgacctcgtgatccgcccacctctgcctcccaaagtgttggggttacaggcgtgagccaccgcgcccggctttcttttttttctttctttctttttttttttttttttttttgagacggaatctcactctgtcgcccaggcacaatcttggctcactacaacctctgcctcctgaattcaagcaattctcccacctcagcctcccaagtagctgggactacaggggtgggccaccaagcccagctaatttttgtatttttagtagagacggggtttcaccatggtggccaggctgctcgcaaaccgtacctcaagcgatccgcaggcatcagcctcacaaagagctgggattacaggcgtgagccaccacgccctgccgaaaaaaaaaaatcgtttttaaaacccaaattatgaatatgacaccaaaagtacaggcagcaaaagaaaaaatatagataaattgtacttcatcagacttttgtgcctcaaaggcc

SEQ ID NO: 1245105 - DNA, 4001 bp, Homo sapiens
atatgcaaaaagctgagtagctgacaactcagtctgctgattgactgtatgatttggccattttgagctttgatctgtccagatataaaattaaggaaaactaggacattagttaatcaaatagatgccttatctgcaatcggatctgctgcttgaacatattaggtgatattttgcatgctcacaactgtagtctacatttctgttttcattagcctacttgatctgagaatgtttgatgctgatttttgtcttctatccttcattacacagtacttattttgcttttaagctttttgttcttttgcatgccataggtaaaatcagccaatattcaaggaatgctgcttcttttgcccaagtcttagcaccatcatttttgctagttgcattgactgttttttaaaaaccaactttaagttactgcagaaccaagcataatgtattctaggtagtctataagccatgatttctttcagaaaaatacaatagacaaggtttccactaaacgtagtctttgtactttctttgtttcctccaggtcattaaccttttcacctataatcatcttagcgataggatttaggcaactattatgtaattgatcattagcaaaagagtcctggtggcaaaaaagaaatacttttcttttgaaacatatgataaacatttaacctctagattgatgtttcatttcttaactgattattaaaagaatcttaattctaccttaaacatttaaaaattacacagagattacatttatttcagaatcagtcttcaagtggtgaaaagttgttggtgatattcacattctataatacccaattaaatgttgcttatattttatattttatttttgttatattttatatagccaagaaaatgcctttattttttggaggaaggtggctgaagtatttgggggtgaagtacatgacatctgtaatttactttaaaagctattatctaccatctatctttttaatctttaagcaaatgtagcaaactgtaagctgttgattttatgtcataggtatatgtgggtatttgtcctactattctacttttctgtatgtttagaatttccatattaaacagtccacaaatccattcatagtctttgataagccaagtcttatgacataattgtcatgttatgcttcctgggttttttttttttttctcacatgcaagatcaaagaagctgccctctatgttattttaggcccttttctaggtataaggtctgaattcttacaatttgaagactttctacgtgctaagagggtgaagtttagaaagaatgtaaagatagttaaacctaccacttttcatctaaataattaaattgaggtcaatcaaaacatgcctagaccagaaagtgttaagctgctttaagaacaacatatagattcatttattattgttcatttccattcatacatgtagaacatagaacatagtagctgctgatgttagggaaccgtttactttagaagaacaacctttccttgggttagaggtaaacggcaaaaggaaaggcatcttaaaaagcaaagagaaataaactggagaactgaagaaggtatggccagaatgaatttcctttgctttttaagggaaatgaaatagcatgtactcacttctcctcaatcatttgcttttgatactcctcatactcctctctagtcatcccttgagctgctgcaggatcagatgcacctccttcttctttattttcttcagacccaccaccaaatcctaaattctttacctggttacttatcatacttttcataaggaaagccattttctctgccccagaaaaataaaaccaaaattcagacaaaagctgaaaaaaaaaatccaaacaaacccaagagaaaacctccaaatattctcaatgacagcaatacatttaagagcaaaggactttgcacaacctcatctattcaagggcatactgatagagaagagtggtttgtcggccgtaagctggattaaagtggtgaactccttagtatatagaggcagatggttcagattaccgaagcatacaatcagaggcaactgcctaccttctgaattaatacactcagctaatttcacaggaaaaagaaatccccacatcatctacccctttctaaatttttaattataagcacagcagggcttcatcaagagtcctgtttcaattaaattaatcagagctgactgattatatagctgttgtggaatttccaaattccagcccttgagcaaaacatcctgttgaaaaactgagtccaatgagactcaaaacccagaatgcttcattaagcaaaaataatcctttcgatccatcattttatctcattggactttaagtactatgcaaggatttgctttttagtttgcttgaattcggtttgcttcaatagttactgtgtcccgcacataaatacacaactgacaaatgcaaagacccagacagcaggtccttggtttacatctggaagattatcttagccttctcctgcatggaaatattacttgtctatatggaaatgatgtgcttgacacttcaaggctctgatccagaaggtaagaccattatgtgagtcaaatcatcaatatgtaaggggtcaccttttttctcttgcataaagagtgcacctcctgggtgctctatttaagctcactggtgtacttggatgaaactgacaatgttttgtatcccaccagattctctatggctgtggttttcttcaggtcaagggaagagttgagtatggctaagacttcaatctacactagtatctttctaattaaagcctgccaaagagggtggggtgggaaggaagagatgtaatccattgttattttatctgaaggcatgagtcctctcagaaaccaggtgattatctctctgatcatatagaattacataatctggattcttgcctaaaatgcttgctttatatattttatcgtctgctttcccttttagtaatctattttaaaatgctgcttaaatggtctcaatatgaaaggctaaaaaagataatttagggtgaaatataagctgtactcagggcttcgaggagaatgcccatcaatattgagttccactttctcttttagatgggttgcttggaacttaacacgttcataccattatctctaaattaccatttataataaactacattgcagtccactgaggaatgttactaattaatgttgtctcatagaacttttcaaaccataaaataaaagccacagccttgtgtttctgtctgttcggtctacattttattataagtaattatttagatttattataaaatctattctaaaaattccattgtatgaggaattaggaaatattaatggtgagggtgtcaattctaaactccagcacccatgtgtaaaggagtttctccctgtcccgtccttttctgaatgtatgtttgtgtggagggggttaggaagagggggtgtcatgcattatggggactcttcggtggtagcttcagcagggtcgccgtggaaggtctcctgagagtgctttatgaaatcaaatatcttattatttcctcaacaggtaattccattgagaatgaggtcacgacttaaaaaactttttactccttgatttattacaatgacctttgcccttggacatccaggaactactagctggtgtgtaggatctttttttttggagacagcctcactgtgttgcccaggctgtagtgcagtggcaggatctcagctctctgcaacctccgcctcctgggttcaagcgagtctcctgccttagtctcccgagtacctaggattacaggcatgcgccaccatgcccggctaagcttttgtatttttggtagagacagggttttgccatattggccaggctggtcttgaactcctgacctcaagtgatctgcctgcctcagtttctcaaagtggtgggattataagtgtgagccaccaagcctggctgtagaatcttg

SEQ ID NO: 1245106 - DNA, 4001 bp, Homo sapiens
tctactggattccatttctgaaggcattgacccatccattttatccaaagaaggcatattaaaacttctgagttctgctggtccagagagtctagcacaattagaataaaatctgtcttgcctttgtggagggagagctgaatcaggatatgattgtcctggtggaggaaacatcatcctatagtcctgttcccacggaggtgccaggggcccagcgtcagaaggagccctgtgaggatcagttaacctatcacagcttgattctcctctttctttggtaatctgatggtccggaggattccctgggcctctggagcctcttcctcctccccgtggaagcaaaggtgagagtctgagaggaccttccaacaaagttggaggatagagagaagctctcgtttcagatgaaggccaacccaatggtgagggaccatatggggaatgctgtctgccaaatgctgtatttggaacatcaagtccataaggatctttttctaaaagttttattttaaactctatttcagttaatttttgtctgttgtgagcattttctttccttaaatcattgaggtttctttcagcagtccaagctgccgaccaattatcatgtgcttttttctcatggagaataatcttcttttgataaaaatgaatagttttctcaaattctttaagatctttggctcgctttcggtaggtctccagctcttcagtggcatggctgatcatttcgtctactttagaaagtttctcttctttctctaaccggcatttttcctctactattaatttcctgtagagtttcatttcattttcttgatataattcagtcattactttaagtttctgctgaagcttctgattctcactttcaaaatgtgtgttttctgactgcaaagatgcttgttcagtctgaagatttttaatatgctctgtaagctcttcctttgttttatcaacttcagataattgaatataaatttggtttctttctccttctaaggtttttaaggaagcatttaacttagcagcatgaatcagtttcttcaaagctccttttggaggattatctaagtaagcaccatcttccgattcactgttcatttctaattccaagttatcatcatccgttacatcttcttcaagcatagcaaccccatctttcatctttagcaagcgttcagtcagagtcttgatgtgattttctttatcatttagaacttgttctgcatgtactttggagtcttcaaatgttcttttctgtttaataagttcactcacttgttctttccatacttcagcttcttgcaaaagctgtttctggctttcctgaagttcagaattttctttccaagcatcttgtatttctatctccaaccgttcttcattcgcttgaaatctcttgaaggtcattttggcttcagctacttgtgatttgagggattttgactcatcttctagcgactgtatccttttggaaatatccgccatcaattcattttgttcagaatgtttagatttctcttcttttaactctttttctagacagagtatttcatgcacaagttcagaattgaacctgttcagcttttcgcaggttgcctccaaactttgtgcttctgttgcctccttctcaaagctggcattctttaaagatgactctacttcatagccttcatactctttttgaacaaggctaaatttttcaagtagtttacatttttcttcaattagtccagaaagtgccacagcaaactttttctctcttctcacataaagccgactcgtaactgatctaaaacttctccacaagaagagaacagcaaaaaatccagcaacagctgcacgtatcaccaattcccatggaaaaccataaggatgagaatcgggtctcataccttcagtcagtgctgccacaaccctgcgtagcaactccaggaccagccccaggtatggctgagggttagccctaggctcctccgtagcgccaaggctgctctggcggttgctgcagtaacctcggccacaacaaacgctggagaagacgcagcattccgtttggaacctgaatccctaacgggcaaccggagcgtaccactgcggagccggctgcggggggagttaggggacgcgggcacccgtaggcctcacagacccacactgcccaccccggtacctttgttacactttacatcctgaggaagcgctaaaacctatattttaaaacagtaccacatggtgagaaagactcaggtgacccagcatcccagctatgcccatcccaagctgacaccctagctaaatgtagccttgtgcatgaccccaggtggggcgggcagaagaacctcccagctgacagaatgataaggaataacaaatcattgttttaagtcactaagctttggggtcatttgttatgcagcagtagctaactgaaatacctgcccccttatccctttggtgtttcagtatctgtggctgaaataatgaatttgggtgcttgactaagattatgccctatggtaaattctgataggtaattttatagctaaaatacaaattttctgattgacctttgcttcattgaagagatatttatttagctcctcccaaatgagacagattatgctttttagattaacttcttccaggaaagggctcaccactccctagcatgagcctcagctgtcccatgtacaactgaaaaacgctaatctcatccccagaagatccaggactcttagaacagtgctggcacatagagagtgattctcttacctgtccatcaaacttacctgctctgtgtccatttctgaaacactggcactccttcaacacggatgacgccttgccctgcaataagtcatcatctcccgcccatgcacatatcttcaactcatctggaaagcttgctcctgcagcaatgggtatgcccactaggttataaatcagcgccaggaccagtttgatgcatatcctctggacagtcatcttggaaatatgaatgctagccaccacatccagcaaatcatttttgatgaggatgacgttggctgcctcgatgaccacatccgtgccagtgccagtggcaatgcccaagtctgcctgggccaaggccagggaatcattgaccccgtcccccaccatggcgactttcttcccttcattcaggagctcctgaaccttggtcaccttgtgtgaaggcaacacctctgcaaagactttgttgatgccaacctgggtggcaaaggctctgactgtcttccagttgtcccccgtgatcagaatcacgttcacatgcatgctttgcagcatgtgcacagccagggcaacctcctgcttgacagtgtctgtgacagccatcattccacagagcacacctcaacaacttgcacaagcaccagctccctttgccatcttccgcccgcatatttgtatagttcttatattttcattattaaaagacaacaagctgactgcattagaatttaaaggcctctgggtgacaaaaccgttataagcaaaataagtaacagatttggaaaatatatgcaacatataaattgacaaaggaataatattcagaatatataaagaactaggctgggtgcggtggctcatgtctataatcccagcaccttgggaggccaaggcaagaggatcacttgaagtcaggagttcaaggccagcctgaccaacatggtgaatccccgactctactaaaattacaaaaatgagccaggtgtggtggtggacgcttgtaatcccagctacccaagaggttgaggtaggagaatctcttgaacctgggaggtggaggttgcagtcagctgagattgcaccactgcactccagcctgggcaacagagcaagactttgtctcaaaagaaaaaacaaaagaactacaaatcattaataaaaatatagttaattgagtagaaacagtagacaaaagtatgtacgaagagacaggcaattctagaggagggaaataaaatgtc

SEQ ID NO: 1245107 - DNA, 4001 bp, Homo sapiens
agccagggttggagcctccacaaaagcagttgtggattctgcccatgcttgtctatacaagtgcgtgttatttgcataatctgaaaggggtactctaaggatcaatacacgataatcagtctataaacatttaaagcaaacttcaaccaaatgcttgctctcccagataaagatctcaggaatctgtaacttcaagagaacttttagaggtggtcaagataagtcaattataaaacagcccacgtgcaattctgggaacttgcttagtaaaaatcaaacacctgggctggtgagcagagtcaatgacggttgaaggcagttcctcttccctgatgtcttcaccttccagcctccaagtggtgggacaccgcagaagagaaccgcggagctgttgctggaaatgaccacaccagcaatcagagaaaaaaagaaaaacagaggaaaaaccttttaagtgaaagtgactcaggctctctagaggaaggcagatgctcttcaccaaccgacgtcccagaggcgtcgcagggatgagaactaaactcacacctatcaccttccaacatcaggatggaattatgcccaatattctctacttcatcacaaagcggcacaatctattatggaaagacttccatatttaatcagtccctcattctcacgggggacgggctgcaggactccttcagataccaaattccacatccacagatactcaggtcccgcagtcaacctggagaacccactgatccagaaagtcagcgctctgtataaacaggctgggctccacacccagcaaacagtgttgggcgtggaacccatggatgcgaacagcagacgatttactgaaaaacatctacataaaggtggccctcgcagaccaaagcaagttgttcgagggttagctgtaaattgtgtataaagagctgctgagctggaactcaacgtcctggagaaatccatcactgttggctttaagcaaaagctgcggagatttctacctgcaactctctatggagagacgtcagcaaagccaccacaagtccacactgcagggcgctactcccatcacaggggtgctgccagagaaacgcacttgtaacccaccctgttcacaaaatctgtcaacaagtgactgaatctagtaattttcaactgtgttccacaaaggtgcagcaggcattttggggaggccaacacataccggctcccaacggcagccccccagagccagggcagtgtcatctggaccacacggagccgaccgtcagcagcatggactcctgctgcaaatgcacctcccgaattcagctggctaatgcaactgcgaggcaggaacctgattccaaacagacgaccagaactgccagggcacatgcacacagggctttagactaaagcccttccagtcgctccttcctggatctatggcacccacgcccactgcacgggcaggaacacctccggaaatgctgacgtcacaccaccaccaccacactccccagaacgctcataaaacccatgtacacaaacccacaggagtacacagaaacggggaagaagccacctcaaattccaggcagcaccgtctgtggctttctctaaggcaaggatttacctgccgcccatggactggaggcagagagatgagcctcctggaaccagagggacacctggtgccacacagacgctccatctgaggagaaatgatatcacatcagtgtctcaaagggccctgtgaggtaccccaagatctcaaacagcacctccctgtaaacactactgactgctgggaacccgtcatcaagctcatgacctggctggctgactgactgatgcactgggttggttttattcactagactgactgaacatggaatttcaatactaacttgccacataaccaagttactcacctgtctaggccaaagcagccctttctgtacaatcagaggaacagaatgaaacctcagtagggatcttccatcctggggttttctgtccagggaatacaccagcattgggatctgcctccacaatcctcccaggtacggccagtgcccactgaggaagccgtgaaggcattttctgggaggcaaggccctgaacctcccagccccacccaccagcacgcagggggcaggagtgagtgcccgtgccgagggtcaaggacccaggctctgtctccaaaggaagcggagccaggacgttctggggctgtgacgggaagactcctgtcccagtcctcactcttgcggaaccagatgcagagaagatcctcaacaaacacagggtcagggcaagccaaagggacgaggagccgcggctgccgaggagggaagagagtggcatccccagaaggagcggcacctttcccagagggagctcacgcccggcccactgcgggctggagtgtccacctctccctggagtttctgttctcacaatcaaaactaccagagccaggcgcacacgcgtgtccacttgcccgcccatcccagaacacaagggtagattcaaacatggctggacacttcggtgctacggaaacatatccccttctggggtcagagcacagctactgagagctgtggagtctgtcacaacgcccacgtcaccctgaagcagcctgcgacaatgcccactgtggtcaaccacggggctactgccttcgctgcaggcctgggttccgcccgttccttagccacgaaacagaactgcaccaggttttacaactgcgtttcacaaagtttacaaaaatttaaagatgtgcacacacccaacagtttatatttcaataacaggtctggagcctgcctgatgactcttgtgctcacagccacccatgagttttcctaagtcacaaaggtggagctaaaggaaggggcggggactatcactgcagaaagaaagaaacaaacatagcttttccaaacagtaacttcgtgtcgctacgcaggaccctttccttttatctcaaaatgctccccgttggtaaaaccacaggtggtgactatccagttttaggggagaagcgcagtgcctgcgtcccgctttatcgctccctcaccaggggcgcccctgcccaccgcggacgcagcagcccgggggtcctccaggatccctccccggagccgcccgccctcggccccgcccggctcagcacactcaccctggggcgaccacctggcccggctgcgcgcacagctcccgcaccacgcccgcgcgctccgacctcagcctgcgttccggccgcgcggggcgcacgcagcccccggaggctacacgggactgagaggccccggaggactgcgcggaggcggcggcctcgaacacggccagcaccgagccgatgcgcacggccgcgcccgccgccaccctccactccagcaggcgcagcggcgcgggccccgggcagcgcacctcggccacagccgccgtcggggcgccctcggcaggaacgcgacccgcggccggcacctccatcgcggacagagggcgggcgggcggtcggtacggggcctgcgctgcgctcagagcgcagcgcctaccgcggcgacacaacccaggcggcgacgctgtagttcctctcggtaccggcttccacccgtcgcctagcccgcgccgacttcctggagggcgcgtgacgtcacgcaagggcgccgcgtacgtgcgtacgtgcgcgtgtaaatacgagcgccgcgcggggccggagccggctccgtcctgggaccaaccctgcgtgccggccgtgaagaactgcgttcctgagccctacctacttttcctcggagcgccggcaccgtggagcagcggcatgcaacgcgggccgctgtcgcccagtcccagtgacggtcttggcgcgctcggaactacgtatcccggcgtgcaccgcggacagagcatggcgggactacgagtcccagcgttcaacgcaggcctgcgtgccattaccccatcacgcgctgagacccagcatcccgagactacgagttccggcatgc

SEQ ID NO: 1245108 - DNA, 4001 bp, Homo sapiens
ctggaggcagagagatgagcctcctggaaccagagggacacctggtgccacacagacgctccatctgaggagaaatgatatcacatcagtgtctcaaagggccctgtgaggtaccccaagatctcaaacagcacctccctgtaaacactactgactgctgggaacccgtcatcaagctcatgacctggctggctgactgactgatgcactgggttggttttattcactagactgactgaacatggaatttcaatactaacttgccacataaccaagttactcacctgtctaggccaaagcagccctttctgtacaatcagaggaacagaatgaaacctcagtagggatcttccatcctggggttttctgtccagggaatacaccagcattgggatctgcctccacaatcctcccaggtacggccagtgcccactgaggaagccgtgaaggcattttctgggaggcaaggccctgaacctcccagccccacccaccagcacgcagggggcaggagtgagtgcccgtgccgagggtcaaggacccaggctctgtctccaaaggaagcggagccaggacgttctggggctgtgacgggaagactcctgtcccagtcctcactcttgcggaaccagatgcagagaagatcctcaacaaacacagggtcagggcaagccaaagggacgaggagccgcggctgccgaggagggaagagagtggcatccccagaaggagcggcacctttcccagagggagctcacgcccggcccactgcgggctggagtgtccacctctccctggagtttctgttctcacaatcaaaactaccagagccaggcgcacacgcgtgtccacttgcccgcccatcccagaacacaagggtagattcaaacatggctggacacttcggtgctacggaaacatatccccttctggggtcagagcacagctactgagagctgtggagtctgtcacaacgcccacgtcaccctgaagcagcctgcgacaatgcccactgtggtcaaccacggggctactgccttcgctgcaggcctgggttccgcccgttccttagccacgaaacagaactgcaccaggttttacaactgcgtttcacaaagtttacaaaaatttaaagatgtgcacacacccaacagtttatatttcaataacaggtctggagcctgcctgatgactcttgtgctcacagccacccatgagttttcctaagtcacaaaggtggagctaaaggaaggggcggggactatcactgcagaaagaaagaaacaaacatagcttttccaaacagtaacttcgtgtcgctacgcaggaccctttccttttatctcaaaatgctccccgttggtaaaaccacaggtggtgactatccagttttaggggagaagcgcagtgcctgcgtcccgctttatcgctccctcaccaggggcgcccctgcccaccgcggacgcagcagcccgggggtcctccaggatccctccccggagccgcccgccctcggccccgcccggctcagcacactcaccctggggcgaccacctggcccggctgcgcgcacagctcccgcaccacgcccgcgcgctccgacctcagcctgcgttccggccgcgcggggcgcacgcagcccccggaggctacacgggactgagaggccccggaggactgcgcggaggcggcggcctcgaacacggccagcaccgagccgatgcgcacggccgcgcccgccgccaccctccactccagcaggcgcagcggcgcgggccccgggcagcgcacctcggccacagccgccgtcggggcgccctcggcaggaacgcgacccgcggccggcacctccatcgcggacagagggcgggcgggcggtcggtacggggcctgcgctgcgctcagagcgcagcgcctaccgcggcgacacaacccaggcggcgacgctgtagttcctctcggtaccggcttccacccgtcgcctagcccgcgccgacttcctggagggcgcgtgacgtcacgcaagggcgccgcgtacgtgcgtacgtgcgcgtgtaaatacgagcgccgcgcggggccggagccggctccgtcctgggaccaaccctgcgtgccggccgtgaagaactgcgttcctgagccctacctacttttcctcggagcgccggcaccgtggagcagcggcatgcaacgcgggccgctgtcgcccagtcccagtgacggtcttggcgcgctcggaactacgtatcccggcgtgcaccgcggacagagcatggcgggactacgagtcccagcgttcaacgcaggcctgcgtgccattaccccatcacgcgctgagacccagcatcccgagactacgagttccggcatgcaccgcgagccgctctcctccactcccatcgcgcactgtgagtcgcaacgtcgcgggactacgggtcccggcatgccttgcgcgccgcgggcccagagacgtgaggctgtcggcgtcctggtggccccgcctcgtgtccccccccggaccccacgccgcgggagcttgggggttgcggtcttctcttcctccgacctcaccttcgatgcggaagcgcaggggcaggtgcgccgccctcggcccgcgcaggcggtgggcccgtctggggcaaggcgcccggaagcgcctggttggttcagaaaatcggaccgcagcgggagggcgggcaccggcgcgtggtctcagtggccccaggcgaaccctgatgagcagcagccgcaagtggcttactaaaggagccactttctacgtttgtctggaatttacgtgaattaagctggcgggcgggcggccaggcctgtagtctcagcactttgggaggctcagcacttcgggaggctgtggcgggcggatcacctgagcctgggagttggagaccagcctgcgcaacgtagcaagaccctatctctaaaacagattcattaatacttagccaggcgcggtggctgaggtcccagctactcggcaggcccaggctggcctgagccagaccgctctggactgttttaattttttcagccttaatacctgccagaattttttttttactatgtatctttgtccttacgtatataaattttatatacaattgagattatcctgtatttgcttttcccccctcacttttatatggtgacttttctcatgttaggctgaatactaacattttggaaactgtcggcctgaaaacgagcggagacacagtttctctaagtagagagtttatttgggccacacttgagcacaaattcaaggcgccctgaatgtgtactccgattagcagttaacagtggattttaaaggcaaaaaagggggccagggagtggactaataggaacttgtttgtgaggaattctcactggtttacagaaataacattgattagtgactgactatatgttgttcagctattgagtgtgggtatagtgtccattgtggcgtcattaggttaatttatagctgtttgtggcgctgttgccaccagtagcagtttaaagaggtgaacacaggtcaaggggtagtagggcgcgattgtcgcctcatttgaatgtctctctcggcctgataattaaaagaactcgcgttcctcagataaaaattctcttttctcaaaaccatttaaatgtggtaattagaatggcccagaaggggcacagtgccttttagccctcgccattacttgctcttaggagtgcattttttgtagctgtgggtttttgactatctctgctgctttctccagcccctaccctcgtgactacaagggaaaacgtgcggtgctcacgagagagcctttatgggatttttaaaaaatggggattgtgggaaaatggctccagcagtcacagtttttcagtttctcacaatcccataaaaacagagcaaccaggtaacaaaactaaagcatgggcaacatttacagaccactggatggtgaagaattcccatgaacccctggttcacactgtaa

SEQ ID NO: 1245109 - DNA, 4001 bp, Homo sapiens
ggcgcagccaaaccaaccccccgcgccgccgggtggacccccagtctgccgggtcacggggcgtcgcggacgcggagggaggggctgtgtgactccggccgcacagcggacctgggactcctgcaccgaagaccagcacacgcgaccctacggtcttccccggcccacagccgcacggtcccctctccaagtaactcgggcgcgcgcgcgcggggacacacgaccccgacttagacaaggagggggctggcgggacaggtcgcgcggaggatcggggcccacgcttgtccccactacgccgcggtctgcggtccccgccccccacacacaccggagccgtgtgtacacacaaacagccgggcgggggaggcgacgcctcactcctcggggtggagacgcacgcggcgccgccagtcagccctcccctctacacgccgcacaccccgcggtgctcacaccccccagccccaaccctgaaaactccgcggaaccaaacagagccaacgccgcccagataacgggctcggaccacccccctcccgattgtcttttaccatcaatagagaaacactcggctcaggcgcgcggtgtcccggacgccccctccggccacatccaggcaccggcacgcggccctccgaggccccagaccttcgccgcagcccaagccatcgcccccccgcccgccctcccccatgaccggcgcccgggacagttacctgctcgtcgtcctgatgaacccgagccggagcccaccccacggcctctcgggtcactcgccacccagaggtggcttttcagagcctgtcaagtgaacccctctccgccgggcgtatctattccccaggcccgattgcaccgcagcgacaggaataataaaaaaagccaacagaaccacaaccgttgggaataaccaaaggggagaccgcaacgggtccaccgatttggtttcttcctctgctcccatcccccgctccccccgcggcccgcgggctcaccggggacgcagggagggggctgcgccctgtctagacgacagccatccacagacatccccgagcccgcggggacgggcgcgcacactcacacacgcccgctgccacagacacaatcagtcaccggggaagggaggggcggcgtggcgacacactctcggggtccctcccgcagccccgagtgccgcagcccccggcccccaaacgccaccccgagacgggctccctacctcggcggagcgcggtctgaacagctgcaagtttggctgatactaaaccaactgctcgatgcagcaaatgcgggcttcaaaacaaaagggagaggaatcgcgctcgctcttttcctcctcccaggtcggaacccggcacatgacagcggctacaccgcgcagctccaaagcgagccgggctccagccgtgcgtcccccaagagccccccttggcgccggagctccagggccacgacaccccgcggggcggggaacccggcagggaatgggacaaacccagggagggggcgacactgtggagtgcagttccccaccgagggggaggaggggatggtagatgggtgcggacaccccgctggcccaggagcagggatggggggaagggggctgattgtttggggcggttttcccggatttatctataagcacgcccacgtcacgcagccctcctcccgggtccccgaatcgatcagcaagctgagatgactataagaggaggacgggcgaggagatgctcacctcggggttcctctggccgccgcgccaagcccgagtcgggggtgggggaagggggcagggaaggggaagggagggacgaggctccggagagccgactcctgcctcgagttcggagcgtcccagctgcggaggggatcgggcgccccagcgcacagacccagcagagaggggagggagggagggaagggaaacagggagggaggggcgggtaggggggagggagtagaggaaggaaaaaaaatgatccctgatctgacacagggaaagagaatgtaggagagtgacgttcaggccccgccctcccctccggccacgtgcaaagacttgaaaggaaagagggcggctggaggcctgctgggtaatgtagttcgcctttcttttccaggatggcgggccctggagagcagggtggccccaggacgctcgggatgtcgccttagctgccaagacagcccagtctagcgacgccaaaacccgccgcccagcgaccccacggcgctggcgcagccctgggtgggggcctctgcggtgggagaactgggggcttaggcgcagtccaggcttacagggaaacgttggttttagagtccgaaaggctttaaggatgagaacgtccgtgccgaaagtgcaaagtctgtgctaatggcagatgaaaaggagctttgtgtatgcactggggggcccaagtggcgtgattaatgctgcactaaatgccaccgtcggttattgagatgcatatgttataattaacatttgagcatctctgtgtcgggggctggctgttgtaattagatacgcactttgcaaccaattaattttccttcggccaagctaagggctgggacggggtggttgggagaattcaacgtagtggataattcagtaatgacttaaccagatcaccaatgttttggttaaaactgagcttggcacagagaggccttcaggagaaatactgaataaaatactgtatgccccaacagggaagggggctagaaattcattagaggaactgtgtgatgcagtataaactgctgtagaaacccatttattcattagtttatattcacatttagtgagcactttccacagaccaggtgtgtctaggaatgccaaaacaggtaagactcacagtctctgcgctcaaggagctcagtccagtattagggactacagtcaatgaaagtattatacaagggataagtcagcgcttaacacaaagtgctgtgaaattccccccaccacacaacctggagcagccaactggatggagggtgggtggggtctgggagagggtcaggaagacttcctggaggaagtgatacttgagcaaagaatttctaagtttttttttctttttttttttttttggagactgagtctctctttgttgccctggctggagtgcagtggcgtgatcttggctcactgcaagctctgcctccctggttcatgccattctcctgcctcagcctcccaagtagctgggacttcaggcgcccgccaccacacctggccaatttttttttttttttttttttttttgtatttttagtagagatggggtttcactgtgttagccaggatggtctccatctcctgacctcgtgatccaccacctgagcttcctaaagtgctgtaattacaggcttgagccaccgtgcccggcaagaatttctaagatttttaacaaagagagaggaaaggataagcacctgattaaggttaaagggtacaaaggcttcagatgagagaagagagctaattcgaaaggtcccaggcctacaatcccagcagttttggagcctgaggagctcaagaccagcctgggcaacatagcatgattccttctctacaaaaaatttaaaaaattagccatggagagtggcatgggccttgaaggatgggtgggattttgttttgtgtggagaacttgtctcccgggcttgagacacagaacagcatagacattcacatcctatagaacaactcatttgattcttgtaccaaaggccatggtggctgtcattccctcccttcaggagggaggcaacaggcccagagagttaagcaactcatgcccagccatgattcggtacagagtgggtactagaggccagttgtctgggtggcaggcaaccgtcgtccactccaaagcaacaggtttaagcacacctgactcttcccgttggtttgtccctcttagcatttatgcctcattggctcagcagtgagttatttgtatgctttaacatct

SEQ ID NO: 1245110 - DNA, 4001 bp, Homo sapiens
tttcttcctcttcgctcccttactgacccacccacctactctgcacccctgtccagggcagagctgcctcttcccgtgggatcttctattactcacaatggagccccattccagctcaccacagacgtgtatcactaatccccataacccccccttgtggctcctcctcctcccttgaagccccacctgccttccctgtccatccatggccctcacctctgcactcccgacagtaccactcccggatggccttggccatcttctcagtgatccggatgcagtccccatggaaccactcattgcagttgtcacacccgctgcagaggatggggcaggcgatggagatgtgaggggcgcggcccatcggcctcaccccaccctgccagtgtcagccccgcccatctctcccgcgctcacatcatgaagcagttgatgtccggtttgcggcagatgcagtagatgggcgcattctccccattctcggacttgctgtcctccccggcatctggaggctctgggtctgaaccatctccctcctgcaggacacccccattacggatccttaagcagcccccaccgtggcggctcatccccccattacaactccaccgtggtcagcagggatccccactctgcctgcagatttcacatcggggcccccaaaaaacctctccatcacagtccccactgacccccatcccttcctctgacatcctattactctgctccatacttcccatcacgcacccaccgacacccgctccctgcgtccacactcgctaatgggtcatggcgaccctccatcgtggcgcctcacagaccccgcgtaactcactgcggacttcccatcgcggttctccacgcacccctccctgtttatctcatagacccacctggcacccgcacccacccccagtcgcggctgtccacggatacccggacacggactcctcgtcacggctcactacagaccactcaatgtgactccttacaacccgcttatccctctgccctaagaacccccgatcatggtttcccacggaactgccacacggagtccccactaaacttctattaaggagccccccaccgtggctcaccatagaactcccagatggttcatcattctgcccatagactcccgccgttcagtccacagactccggttatggctcaccacagacccctgagtcggccgacagaccccactgttgccaaccgaccgacctccaccgccgaacccctccctggacccgctacttaccatatctccgctcccggcgcactccctcacgacccccgccagcgacccgcgaacctgcacagaccactcggcggcgtcccaggcggttgcaaaggcgcccacaactacttccgcttctagtcacgcctcccaggcagcgtactcctattgcgcaggccccatgcgtcgtctccgctgcaaaccagtaggtggccggcctagagcccccaagacccctcaggcgccgccatcttgcttatcgtatccgtatggtggccgaatccatatgttcgccgggaacatggccgcgctctaatgtggctttcccgagggcgccgccaccttgtcagtagagtccgtacggcggctgcttgtacggcctcgacgtacaggcaacatggctgcacctactgcgtgacttcctcatagatgccgtcatcttggaatccgattccgtacgtgggtcgaattccgtacgttcctaggcgacatatgacggcgacctaattgcggattcttcacgggcgccgccatcttggtggttgattccgtacattgcccgtttgtcaggcagagaggttcacaggtaaagtgaccgcttccgaagcacgacctggatcaagttgtattcattcctccattcagtctctttccccttccacatgtattaatggggcgtcggcaggctgtgtgccttgcggggcggaggaaaccagttcctctgtcgtctccgacttcacctgccaccactctttccggcttttactcctcccacttgtcattcttctgccaggcctggcacggttcggcttctatttattttatttttatttaaaaacaattcttaaactaatatcaaatcttattttagttctataagctgcacaataagcctaaacacagtttacttatccatttctttattgtttagcatttagaacattttcaaatattattctaaataaagttgcaacgaacattcttaaacatagatctgtatgctcatccctgattatttcttgtgaaatgtgatatacaaatttacaaatatacaaatgtgatataccaggtgtaactctggttaacagctgtaagatggagcctggaagccaggctttatttatttatttatttatttatttatttattttatttattatttattatgtatttatttatttatttttatttatttacttattttttgagacggagtttcactcttgttgcccaggctggagtgcaatggcgcgatctcagctcactgcaacctccgcctcccgggttcaagcgattatcctgcctcagccttccgagtagctgggattacaagcatgcaccaccatgcccgtctgattttttttgtatgtttagtagagatggggtttcaccgtgttggccaggatggtctggatctcccgacctcaggtgatccgcccgcctcggcctcccaaagtgccgggattacaggcgtgaaccaccgcgtgcctggcccgcctggaagccattctatggactccctgcaaacttgcaaaaaggaaaacaaacaaaacaaaattaaaacacaacaggaacttgcctcgaacctttgaattggtccaaactgcaatgaccacacagtcctggaaaccagctatatttcactagtgctgcgtctcctgaacaacaaccaatgaactatggactgatgccagccagccgcctccaccaataataatttctttaaaagaacttgtgtaatcacccttagcttcctttttctttttcttaaaaactccttctccccttcctatctttggagtacaatttgacttcgagctgaatctgtgtctcctgaattgcagttcctaatgccccaataaactcctgcattgcagcttggtctcttgcctcttcttagttgactctccttagagataaaattctaaaagtagaattactttgtaattggctataaatattgtaagacatgttcaaatttataggaggtcattagtttggacagagctcctgctctaggccccaccaaaatggagtcactcacgctgaagttccatgccaccaagccaaaactaaattgttcatctgaccttccaaggagaaagagacaggataatagccaaatccccatacaagccacttttagcttgaaagtcccctttgctttaacctttataaaaaagcaacctgaagcaatctgatgttaaccaatcagctttaaaaaaaaaattgttctttttccttgctccaaccttacaaaattcactgctctgctatttcccaggaaaagctctcgttctattttgtataatgggatctgccccaattcatgaattgcaagtaaaagccattacatctgtaactaaatttgttgtaattttgtctttcaatggttgatacatatatttctaccagcagtgtatgaaggttcctatatcagagccttattaggttattagattagtgcgaacttttgttgttgttgttgagacggagtctcactctgtcacctaggctggagtggagcgggcaatctcggctcactgcaacctccgcctcctgggttcaaacagttctcctgcctcagcctcccgagtagctgggattagaggcccgtgccaccacacccagctaatttttgtatttttagtagagatggagtttcaccatgttggccagtctggtctctaactcctgacttcaagagatccacccccaccttcggcttcccaaagtgctgagattacaggcgtgagcc

SEQ ID NO: 1245111 - DNA, 4001 bp, Homo sapiens
gcacaaatagacaaagcacacactgtatcttaaaattccacatttagagttaatgagaattgatgttatatgacaagatctgcagccgggcaggagggagaggacaggtcagctctgatttcccaacataaacccctccttactaaatggtaacatgactttatcttcgggcactgctccagagtgaaataccttaccaataaacatcaactccagccttattatttaattttatttatttatttagagacagagtctcactctgtcccccaggctggagcaaagtggtgcgatttcggctcactgcaacctctgcctcccaggtttaagggattctcctgtctcagcctcccgagtagctgggactacaggcgtgccccgccaggcctggctaattttggtattttggttagagatggggtttcgccatgttggtcaagctggtctcgaactcctagactcaagtgatccacccgcctcagcctcccaaagtgctgggattacatgtgtgagccaccgtgcttggcccagcctcattttttaaaacaggccttttgattttaacattttctgcaaaaacaaagtcctctgatataaactgtgatccagctcagaccaggcatctatttttgtcccctgctccccgactatgtaaaaaattcccatcactaaaccttctcattattgggagggggcgtgagcatgcgttaagatttatgattgagactcccccaaaagtagtaaaacacttccagaggatctaagacaatcaccaaaagcgccccttagcgtgtgcggcaaaaattataaccgaatgcaaagaatcttatcaaaggaatgtcttcaagttaaccaacgtttcctattacaccttccaaagctgttaggggcgagtcccacgcagaacgtccgctgctctgcctggcctctgtgttcttgctccagccacacaccgcggtctcaggagtcaagcacggcacctggctgccaaggcgtgactggaaaaggttaattaacaccgagcctcttccaggtgaacgcgaacgcgagtgggtgtggaccgcaaggtcggccagtggctgccgcgggaagcgcaggcccggaccacacccgacctccgcacttggggtcccctccggcgggatccgcagctctcggggtgggtggtctccagccggccactgcgggaatgccgccggtcctggaaggacacccttctattcaaactcaagggagaaagggatcatttaaatcccccgcatggctgcgcgctatccccggaaggctgctccagcaccacctagcgaggatgccgccgcgcagggcgctcccaggtgtgcacgcgcaggtgtacggattcggggagcgctcccaggtgtacacgcgcaggtgtgcggactcagggagcgctccccaggtgtgcacgcgcaggtgtgcggactcgaggagagcgcccaggtgtacactagcaggtgtgcggactcggggagcgctcccaggtgtgagcgcgcaggtgtgcggacttggggcggtggggggcgcccaggcttgcacgcgcaggtgtgcggactcggaagcgcgcccaggcgtacacgcgcaggtgagcgaactcggggggcgcgcctaggcgtaggtatgcggactccgggccgcgaaagacaggtcatgccagtgaacccccaaacccggcccacgctccctgcgccccaagccgctcatccccaactcacctcttccagaaatttggtcaaatcgtacaccttgtggtgcaggatcagccaggtgctcttgctgtggttgtgcttctgaatctcctctagggtgtagtacttcacggcctcgtccgactgctctgccatctcggttcgccgcgagccaggcccagcacacacagccccgtcgggtggagcagagcgcgcgactcagccagctccacccgggacattccccgcgccgggaaccccactgggggctgggcggccggctcaggggcggggcgcagtagaagggcctccgacggttggccatcatccttgtcactcaaaagtccccgccttcggtcgaccccctccgcctgcccaagcgtggtcccgcccagtatgcgggtgttaattggctgccggaggtgcccttcacaatctcccggctgccgcagcgcgcggagagcgtgacaggactccacggagtctgcgcggaagggcgggactaactgtggcgagggctgaggtgggaggtcgggggcgtccccgcgggttaagcgtgcgagagagcgaggtgcaccagcgggcatggatggcctgtgcagagtccagtcttgtgagggcggcgaactaggcagcgaatcgcgggagtttcctattggcagcagtccgagtcccagacgttaatttgtaacaaaagtagcgatggccaagcccataaagggggcatctcggaaagccgttcgcatgcacggaagagatgaaagccccgtgcgcgctagaaaacggtttcgcaactcacttcgggaagcaaatgcgctgccccccaaaacataaagttggcgaactgtgcctgaccccgctggggttttggaatgcctcgtcctcacaggaaaaaaatccagggaaatcatcttttccttaaaaagcaaaagtgtccaaattatttctgtgactgaagtagtttgtctgcggttggccagtgacatggcaaggccttgtttgtgcatttaaggtaaatcagattctcttctaggagtctggaagagaacttccccaaagggcaccctctttcccttctgacacagaggaaataccacatataaagagctacaaatgtttgaaggagaaaaaaaataaagaaaaattccagcatgttaaaatttgatattttatgtaggcccttttcagcaatggtagttaattccaaaaagaaccacacgagaggtttcacatgtggggtcatccatccttccagggatgcagaaggttcctacacatactaggtgtctgatgaatgtgagctcccttccccctgcttacctcctccataggaatgcatgcctatccagaaaaacacaaaacacacgcatgtcaggcctctgagcccaagcctgcacatatacatccagatggcctgaagcaactgaagaatcacaaaagaagtgaaaatgctgaagcaactgaagaatcacaaaagaagtgaaaatggccggttcctgccttaactgataagacagtcacctgtcctcctgctctttgctctgtgagaaagatccacctacaacctcgggtcctcagaccaaccagctccaggaacatctcaccaattttaaattgggtaagcagcttctttttactctcttctccaacctctctcactatctctcaacctctttctcctttcaattttggcaccacccttcaatctatcccttcccttaatttcagttcctttccttttctgatagagacagaggagatgtgttttatccgtgaacccaaaactccggcactggtcacggactcgagaagacagtcttcccttggtgtttaatcactgcagggatgcctgcctgattattcacccacatttcagaggtgtctgatcaccacagggacacctgccttgatccttcaccttggtgtcaagtaccgaccccccctgtgtctctgccctctcttttctctgggcttgcctccttcactatgggcaaccttccaccctccattcctccttcttctcccttagcctgtgttctcaagaacttaaaacctcttcaactctcgcctgacctaaaacctaaacaccttattttcttctgcaataccacctgaccccaatacaaacttgacagtggttccaaatagccagaaaatggcactttcaatttctccaccctacaagatctagataattcttgtcgtaaaatgggcaaatggtctgaggttcctgacatccaggcattcttctacacatcagtcccgccctagtctctgctcccaatgcgactcatccca

SEQ ID NO: 1245112 - DNA, 4001 bp, Homo sapiens
ggctttggggagcctcgggctgccttggcgcttgactgtctgaatccctcgcgacagtgagaggcgcattttctgctcgcgttcgcaacccttggccatgcagcacttagcagagaagagaaagccggagctgcggactccggggaggctgggggcttggccgcgattgatgtgccattccctgttaatttcccaggcacgaactggggagctcctactcaacgcccggtctctgcctgagcctgtttttcctttggatttggaaaaaggtcgtttccgaagggctctctgaatgctcatccagccgctctcctctccttctttgccaggaccgctcactgtaccccagtgcccatctacacttgcggtgaggtcccgcaaaacaagtggaccttatcatgagtcattttgctcttttctattcttttggccgtcgaagccgccagctccgtattcggagattacagcagtcctgatcagccagcctccaggtccctctttctcctgcactagccagatccaatccccaaacagttttgccatttttaattagaaactgagctaggcaagtgccagggtcagggcgccggttctctggaatatcaatcacttggagtttggaggtgtcctggagctatatggagactcagcttgcgaactacattcaccgttaaaaaataaaacaatattaaacacacctcccctcctccttggcaactctgtgcctccttcagtaccaggatcccctccttggaagtaccaaaacatattagctgtccctttccctattctcaatcaccaagtccaaaaatccaaaccaaaaggagatgtattcacacaccaacgactcagccccaccatctacattctgcgcagacttcctcaaagcccctggatgtcctcctcgcctgctcctgttgccccaatcctccccacttggtaggtttctggggctttaaggacccagcccagttcctttcaacgatatccccagcacctgccccagcccgccggctctccaaaccaacccaagtatttgcagaagcaaaaatgcgtgaagcatcagattttaaaacagcgaaggggcgccccttgtaccacccccccaccatcatccgcccccagggaagaaaaaaactcttctatcttttatcatcggtgcgcaaatgggggcagcgcaagcgccaaatctcttgctatcccccaccccaattctactactcgccaaatgaaatgagaagggaagtggggtacggaagggggtgcgacgagaagaaaggaaagagccacttaccggttacttgaagatgcgcgctgaacaaggaagctccgaagagtacaaaagccagcttgggtacccaaacacatctaagactattctccatatttcagccaacaccttcggggccaggggtcgcgggcagcggcagcactcacacacatgcactcacacacgcatgcacacatgcacacacacgcgccgagccccttcggcttcctcctcctcctcgtcctcttcctccacctctttctccacctcccctgcgcctctgctgccttcgaagcctttttccttgtccactgacagaatcagcagcaaaagcaggcagcaaaaagttccattcggtccaagagatcccgagccccggtaaaaccttagaaaactaactcaaggaaacggagggagccagaggagggaagacagctctctgaggggctcgcaagtcatcaataaaccacatccaggagggaccaagaggagatggaaggcaatcctgtggccgggctgtgcattaaaaggttgaggctggttccttgtcgtcggttgggtaaagttgaagagacaattccgcgcgagagctggagatgctgttggtttttcttccgagagccgaggggacccagggaggagaggcgggggggactgcggggtggagcgctctcacttgttactggggtgtccgccagcggtgtgcgagctgggagttggaaccgtactacacattgatccggagaagtggagggctggaagggaaaatgtggagaccggagggaaacgaactggatcaggcaaagattccacgggaagggggtgggggcagacagactatggcttagggaaaaaagagcggaccgaggaggcttccaggagctgcatttgcctggtctgcgtatcaatgcgcagggatgccctctgtgggcaaagcgtgggaagtcacttttgtcaatggagcctgcgaacatcctgagcgtctggaggttttgcagcgaccgtgtttgacactcagccttcaggaaattattggtatttgactgtaaaacctaggcgggcgtttaaggcggaggaggtggccaggatgtttacttccttctctgcccttggcattatttaaaatacaatttttcatttggaaagaatcacctgatccaactcccttctaggacgggagggaaatcgagatcctgaaacacacagcggacaggacaaaggccagagttatttcctgacataatagctaaggggcctccttttgtaggacgtctcatgtcgtctgtgttctctcttctctcgcaattgttttctttaacatatttaaaagcacttatcatgttccaggtgttctgttggctcccaggaaatagttgggacatccagtgagactcagtctctatcctcaaggggtttgtgatccgtcaggagagaagctaaatggataattataaagtatcgtgataaatatgatggttcacgtaatggagggggtgctctgggaaaacaagagagacatttctccagtccctggcagataaagtgaagcaaccatacacacgcgtgtgtgtgcacacacacacaagcacacacacagcaggaaacttaggaagggtgaacagtaaagccctttcaggaaactgttttaagctgagttcctttgcataacttgtctctgctgcgggaactcaagctcctttgagaagagagaggttgtatgccatccatttttgcactcctcacagatgctagcatagaacttggaattctgcacatgccaatacgtttctgcagaataagtgaacttacaaaccaattaatttggccgggaaggataatgaatagaaatgtcattctggtaaaattctgtcgtttaaggagatgttcagctgtggattcagaccattccttactagattcttccccacctgttcttgtcaccctcccatgctcaccaggctgtgagcagagagaatgtgaacatctatttaagaagaaaggcgtgagggaaagcatgaaaaatccaggataaaatcatcatcagggaaactcctatgatgctggaactggacaacagtgttttagatccctagtcatgcccattccttcctgtcctggaaaagttaaaatatgaagtgcctgtgttcactaaagcaaaaccttctgaaatagcttacatggatggattctttagaattggatgaaactctttggttacccccaaatttcttgaaacactcaaaacttccattagctgaggtgaagcctctagtggttcaggactgggttctacagcaagggttcttaactcagtccatgaatcttcccaggaagtctccaccaacaaaattcaggaagtttgtgaatatcctgaaattttatgaaaagtgattggcttgtgtgaacatgctgtttaactgggaagggaatctttagctttcagtaaatgtataaggtgagttcaagcctgcctccctgccaaaatgatgtaaagaaccattgcataagatagtaggtatgagggaagagttgcaacttcttctcaagactaatgaagtcctgtatttcccatatcagtaataggatgtcttcaacaagtgggagggagggtaggaaaccaaaaatggtccatgttgctcagatctggatttttcttcaaatttattttaagttcatggtacatgtgcaggatatgcaggtttgttacagagctaaatgtgtgccatggtgg

SEQ ID NO: 1245113 - DNA, 4001 bp, Homo sapiens
aagttggttttatgtagcaattgcggataaaaagctctgctggtataaaaatcttcttattgtacaaatggcaggaaatagaagacaacattgcggtggttacaaaaatttgtttcctagtttgtttctgccagctttaaattgaacatagatcaatctataggttctgaattagtaatattggggagacatgaaatgagaaaaatagcagaattaaataagcataacagtgcacggggcagcccagcatgctctggagcgatgaggggtgagagagaaaggaagaaaagaagaaaacaaaatgaacacctttcaaatccaaaacaatgcaccacgtttgagcctccaatatagttttacaaagacagaatagccatgaaatcaaacatttaagtataaataggtaacatatgtctgtcttattgttgttaaaaattaactgtgatagactgaaattccattccacattcctacttcttgatgacttagtaaattacaggcatttcaagagaaatgcctaaaaattttaggtgaaccatcgacgatattttgggtggaagtaagttatatgtggtagctaaatacttgtgctcaagctctcagcatcctgtttatacttctaggaaagacatatgaaatgtgaacaatttcaaggaatgaaataaatgttcttctttatctataaaagtctgattgtggtgtttaaaggcttccatgaaacaaaaacacctgtgcccacagctcgtctcccgtgcataaaaacagaatacaaagatgagacagtaggaataggaggaacattttctatttctccaatatttcccacatgctttggctgtttttgaatagaccttctgaaatatcttttgaggtcacctactttgtgaacctaaagtctctgatttttcaggtgacatggcagcaagcccgaatgtctgaaaacataaatcttagttataatttccatttttgtcattttgctagaaaagaaaaatatgataatttcttccccagcttgctaagcctttgctagtttcaggaatttctgctaccatctgatgaaaatcaaaatccccgtattaaacaccaaaaagctatatcacaaaaaagtgaagccatcctagtaagtgcctcatcacttcttgtttttgagatagagtaaccaaggtagcaatagaagtctcagagagagctgatggtttctaattccataaacttagtggacaagtacattttccacatgaaccaaaatcattgccgccatggtgaatcaaaaaagtaataacaaaaattcacattaccagcacgctgttattttaaaaatccaattttacaaaataaaactcacctaaactgaagctgtggaataattttagcaattgaaaattactaccttctctagaataacatgtacttagaaatgaaatgattcagaaatcaacatgatgtacgtattctgcttttctttgcagcttagagcaaattcaacatcaatttacactatatcatagtaaatatattcaacaatcagtgcttaagtaatttagcctgtctttgctgcatctaaatattctgctgtttaactaaattcactccatactatagatgataaaaatattaatatacacatttcattcttattaaaaagctggatttctcccttagccctgcaagtaccataagcaaccaaatcagaggaaaagggtatgttggggctactctttataaaattgttcatccccagttcacagacatcatgaaacatgaaattaactccagtatgttaaaagaaagatgatagattagcacagaaatcaagcacaaagaaacgatttattttcctttccatagcccagaattgctattagcttaccttattagctggaatgccaaacagaatgtctttatggaaaattaagttcattattcatctcagctttgatttggtatagtgcagctgagagcatttagcttctctctatgatttgccgattctaagtggttgagtgaggcagtaaacacaggacttgggggtggggggagagtggttggtcatggctcacaactcaagatttgcaactttacattttcattcatataaagatacttaatgaaataaaaccctatagctgaagaataacacttaagtgaatacttagtgcagatttttcagcctgtgcaattttgcatagcagttgtacttacagagtctggcatgctcactgtcccagcaaaatcatattgctatctttcattatctcagtaaattctgggctattgatcactttgcagcccatatagggggtaacgtatattctgtcaaatggaagtccccatcagggaacgatccttgcagcttgctaaaagaagcatgcctgattgtctgactagtgatggaaagacagatgccttttacaatgttgaagtgtgcacatgcacaaattggatagaacattcagtcagctaacaaacagagagattttaaggagtaaaataacaatagatttccatccttgagatatcaaattctcttttagagaaaaattaagtaatacttctcaacaattcattcattttcttcaaaagaattaaacgtgttgtagaaacctcttggcaaacacttttcattttttaaaaaattgacttccatagagaaacatcccagaaaatcttattgaaagtgtggtgtgtgtgtgtgtgtgtgtgtgtgtgtgtgtgtgtgtctcatttcgggatggggcaaaggaactgttgcagcgtcctcttccaagtatttcactttataagttttaagtgggcagcatttactaaaatccagctttactgagtgcaatctgcaaccacatcagcaagatcacttttaggttatcaatagacaaggacaatacaatttcagtagagcaaagacttacacctttcctttcttcgtcaccatacaaaaccaaaccctaaaactttcctctactgaattaataaaagcacaggtgcatttaataagaaatgataaggaaaattataattaaatgattggtttgtttcaaagtgttaagtatagtgtcaccatatgacccagcaatcacgcttttaggcatataccaggagaaatgaaagcaaatgtccacacaaacacttgtacacaaatgttcacagcaccattattcacaatagtcaaaaagtggaaacaacccttgtatccactaactgatgaaaggattaaaagtgtagtatatccatacaataaaacattatttggaatgaaaagaaatgaaatattgatacctgctataacatggataaatcttaaaaatagtatgataattgaaagaggccagtctcaaaagatcacatattacaatattctatttatatgaaatgtccagaaaaggcagaatctatagggacagaaaagtagactagtggttgccctggacctggggtagggggaccaggaagtgattgctaacaggtacaggattccttattggagtgaagaaaatatttttatcttagatcttggtgatggttgcacaattgtgaacacattaaacccattaaattgtctactttaaatgggtaaataatatcacaataaaatttattttaacatgatgcattacattgatttgtgaatgttaaattaactttacatccctaagataacatttgcttgctcatgatatatgatcttttaaatatattgatgtattcaatttgttaaagggcttgcatgtctattttataaggaagctaggtcagtaaatttcttttcttgtaatatctttttcttgttttggtatcaggatagcattggcctaagaaaataaatcctgtttctgaaaaaaagagatgttataaaattattaatttgccaaaagaacgttgtcatatgtttataattatatgaatgagttttatataacacattctacacaaggcagatagggagaggttggggaagagaaaggatgaccccaaatgtgggatgctcttgaagactagaa

SEQ ID NO: 1245114 - DNA, 4001 bp, Homo sapiens
tttataacttaaactttttaaaatcatacattttgcatagacatattcattatttctttataggcttgaatttccttttaaaaacttaaagaaaactttatattcttctggcatgaaataaattaggatcttgtaaaatttcttgcctccatgtcatttccgttcaagttttattcaaggaataaaaagtattgctttatatgcaaaatgacctaggccaatagaaagtcgtttcctgaactgaaatcgtgctataaataacagtcaaagggctgttctttttagaacagctctttcagggtaaaaaataatttgcaggatgtttgccttaggacctaaaatcgctttcctagttctcagcatttctcatctccatgtctaaccacatcttagactgatctatcctcaccttctacgaagccattcacgaagaccacaaaagctaaaagatctgtctttaattggtacttttattatatgtctttcctcgtaattccctaacttcacgtgttatggaaggaggcagggagcattcacctcccacgaccgggagtcagtctctgtgtcaggagtaaggagtgaagagtctcgcctggatccacaaaagacgtgacatctcccacccagcgtcccactgcttgccgcctggctacctttaaccccttgccctccgcacatcctccccttctctagcagaaaattccgcagcgctacggtcgggctggaggcaagccctgcagccgggggcgagcgcggcactcggacacaggcactcagtgtctccggcgccggcagccgagccacgggccaccccttcccacggcctcccggtgccacccagcgaggccgggacagcgcgccttccgcaaaaagcgcagcagccgaagtcctgaaagcagggtcttcatcgccgcgggccctccgaaggtgcctctcccagctgcagccgcccctcaatgaaagtgcaatgtgttatctcgcccagcccagaggagaggtccctgtttggccttggttccagcccggctcattcaattcgctgaatgtcgggtctcccggcccgccccgcgattctccgggaattggccttggccgcgggcagggggcgactctccagtgacctcctccttggaccccatttctctctctctctctctctctgtgcctgtctttgtgtctctgtttctttggctttctcttacaaacgcacgggggagttggtccttttccacaatgccaaaatgtcacccaaaaagctagtgcaacaacttgctttgcaaacgacccaggagcctgccgagaaagccctgcggggagcagccccctcctcccctgcaaggtgcatcgggggtggggtgggggtgcgaatttgaccggtggacatgaccgggacaggggaccggtgttctcctcccctcccccttccgggaccctgtcgcaattagaaatccttcccctgcctgggtccccgtggggagccgcgaggaccgcatggccggagaggacgcgctcgcccccgagatcccaggttacccggagggcccgggagtgcaccccgggcggctgaaagggtaaggagcgcggactctcgagccagcggccgggggagcccagcccgcagcccctccgcgggcgagggaagcggcgaccgcgcggcaggcagcagccaggagccacccagcgcgccgcgaccgccgccgccgcgcacgccccagccccgcggcgcagcccggcgttacctggccgcgtcccgcagtccggccctcgctggctgcgtccgtccgttggtcccacgagcctcggaggaaggagagagatgtccccgcgaccaggaccggctctcagcgaggtgacgggaaggactcgagagaggagccgaggcggcggcggccgttcgcgccgcctatgctgccgattccccgaggcggaaggtgtccgcgaggccgtgtcctggagattgcggcgcccgaagcgcagcgctcgcctctggagcggaggctgagcgccgggacgcggcgggctggggctgcaaggctgggctggtgacccgcccctgggtgcatgttaatacggtggggaggaggagtcccgcgcttcctccgcccaaccaccggagccggcgggcgggcggcggccgcggcccggagccagccgctcccacccgccccagctactacggcgcggcgcgaccgcgggctccggccccagcccaggcacgtgcgcccaggccgcggggaggcgccggcgcctcccggaacgcgctcctggcctgcgagtgctgcccgctcagtctccgggtgggaagtgcgctcgccccggaccgaggggaaagcccaacatccccgggatggaacagagaggcggccacccgtgagtgggcgtgacccattggttcccttgcgcagcatctgtggagaattaagctttcccctcctctcttgccagccgttgttcctaatcttgtcttttttaagggaggaaagcaggagaactcatgacactttgtatcacaggaaatcaagttggtggacagagggtttgctgacctctcccgtccctcctcagggtccctaggagaatttttgaagaagtaatcggcagcaaggagatgggggcaatagagagtctcagactcgcagggacccatgttcgtccccagcgccactactttcaaaccgttatccctcagagctgtttcctcacctccacaacaactctcccgggttcgatgacactatatatcccaccagttcatcttggtacaggccaaaaggtaattcaaaaagcgaaacgaatctcatctcctgacctgtgccctcggtaaagtccccaggttccaccccaagtacacttggaagccaggcccctccacacaggctgagcaccacgcttccacaaactgaaaacagagagaatccacttggtttcaaagttagaatagggatagcggcgtgagtgggtgaattgcgatgtgggtcaaggagagaaaaaagtaaatcaattaagtatttattgagctcctgcgctgcccacttaattgcaaacgttacagtagttaaaataatcgtggttaatcactgccttattatttccttctattaaaaaaagaaatggcatcttcatggagaatgtcctttgttctacagcttcctgagggaatattatgccaaaaagtacataatctttatgtaattttatccagaagttatagcataagatttagcatctgttttgtgtgatgtctaattataaatattaatagaatatccttttaaagacaacacttctaaaaatgcaaggaagtgaaaaacagttttcataaaaatatgactcagataaataacctctttcctgcaatttcactgagtgattttccattaaagaaaataacaattactgaaaccactaaatggaggtaaattctcagcattgtaatatcatgagcaccgacgctttagcaatgatctaaaagatattctcagacaattcaagaattactataggggcccagctcagtggctcacacctctaatcctggcactttgggaggccgagatgggcagatcacttgaggtcaggagttcaagaccagcctggccaacatggtgaaaacccatctctactaaaaattcaaaagttagctgggttggtggtgggcgcctgtaatcccagctactctggaggctgagacataagaatcacttgaacccgggaggtggagattgcagtgagccgagatcacaccactgcactccagccggggtgacagagcgagactctcaaaaaaaaaaaaaaaaaagaattattatagggacacttcaaatcggattccctgaaaaggcaaaatactgatatgtgataatagccttcataatttggaaaatttgcctttccagatttgtaaatatgtttaattaatagattttcttttctaatttttaaattgatatatcacagttgcacatattttgcaggtagatacaataatttggtatatatat

SEQ ID NO: 1245115 - DNA, 4001 bp, Homo sapiens
tgattaccttgatttactgtctttaatttgcaatcaagcaaactgtcttctgaggagaatggaaaaaggggaaacgaaatctactggccactgagagatccaaggctagtttttctctttcactctttgctaactaatgctatgcctttaattagtagattggaattctgtgagatcagaaagtgtgtgttacaggcagaaacctctgactgtggctaaccaagcactttggtgttgccgaaaatgtctttagaaaacagtgaaactgaaggccaagaataataaagtttctttaataacttccaagaaggctttcctatatatttttgatcttccctttactaccactgagtctttctggactgctgctttctcacaatgttttgtcaatttttttttccctttattaattggacctgacaatagtgagaataaaagagaatcagagagagagaattaacagaattctgctgctgatcactgattccacatccaaagttagcaccaggcaggagcaatctcatctttttatgaatgaagaggggcatctctaccaagatcagtgaaaaacagggagaagattgtgcaaacccaataggaaatccattcaggaaccttgacattcacttgctggattattagggcaatttaaattaaaaataaagaaaatcatcaatgaatgtggtggatgggatttcagaaaaaggcagcaaagaaacatcccagtagccaaagtcattagcagaactgttcagcactttcataaattgcatgtaaagtagttttaactgaattgggagacttaaaattgttctaacacaagagggaggaaaactcagccagggaaagaaaactcccactgggcaaagatggaaataatcttgaaccaattattgaaaaaaataattttacctgtatttaaaagatcctggattcatgcttatgaatgcttcctcagtgatcttgtgtggtaccttatttaagcagacccccacccccaaaaagagcaatcatcataaatgttaattttgcaaagcaacagtaactattcagaatcctggtcctggaaaacaaccgatcatatttcaatcaccagccatataatatcctctaagagcacctagcagatctaaggagatcatgtgtcaattaaagattttataaagcccttgtggagacacagatttgtagatatctgatgtctccatctgcttttttactatctgtgcacacattaatttgtcagctcttccagtctttctagccattatttagaggagaaataaaatcacaaatactaccccttcctttccctaccacaaaaaccatccaaatcaacaccacactattaccaaatacaaagtaataaaagagttatacccaaacctggtcagtccttccatttcttgaaacttgcacacaaactgaagaaacccactcagccttaaaaaggtcgatcattttgctttcctaaaatttcatctctgggagtgctttccttctcggtctgtcttgctctctctctcgctccctctgtctctctctctccacttctaccgcggagagagcgttttgtttcccttttcctgtttctacggctgaatgaatgcaaaatacactgtttgaagggatttttcttttaggttaacagttggaaatctaaaatcttgctcttctgaatggctttatatgtcagtcactcaacatacaacatttacataaagaggcataaacagaaccaagaattctgctttttaaaagcaaaaacaaaacaacaacaaaaaccaccttttattctatctctgaacctcttcctattttatttatttaactattaagcacttaccctgagatgtgccataaatgctttattccaaatgtataagagccaaccacatctcaactgagaattaaacagttttaatgtcttcaaatccatgttcctgctcccaaccctaatacagacagtcactggcagcggtacaatagttctaaacagcagacatctgattcttgacatttaaaaataacaatattggaaaaaaaaggagtccctttttttattaactgcagacagcttgtgagtgagcacttatcactcataatacaattgaccgtattaactgggacttgcaacgatttcaagctacagtatttgattcctaagtcaatgtcaggcagaggctaaatacttatagacttctcattttctatagaatcatggcaatggcctaaattaagcgaattctaagtgataattccgcaaagagagaagcagagctttgctagtatttagactttattattggtgattactaatttcatctttgttagtcttgaatcaaattagggacataatcagttgtttcattgttagtctaatttcatatccatgccctcttaacttctcacatgcatatgaggtcaaatgcacacatacatttaccacaaaataaatcaagtaataaaataaaaaatacgcactcatttccattactgaagcatattacggagttgggtagatttgggatcaagtgctagctcccccacttactgtttatgtgttcctgggcaaatgatttaagcatttgtgcctgttttgttgtctataaaactaaagtaaataatactctacaaagttgttttgagtacttaatgagacatacacagtttctggcacataatagatatttgatatacactgcttccttcctctgctttgtatttggaggaggtagagattgggcatagtaaatgaatacagactttgaaagcagacaaatcagttttgacccaacgtgttgccacatactagctgtgtgtccttgggcaggttacttaacctaatttacgaaatcttagcttcttcaactgtgaaatatctctagaattttaaagagcaaattagacaacatctgaaaaacatacagtaggcatctctgaaatgagagtcctgggacttccaattcttgaaaatagttctaattagtactctgacacatgtaatttacgagtttgaaaatgcatactgagatcatacatcttttggaccaagcgcctcattttctagcagaggaaggaggtccagagagctgaaagcatgtttccaggtcatgttactagttagcagcaaataaggactagaacgctccgggaactagaagaatagtgctttgcctactaagtctctaatattgaagttaaatccatttgtaaatccagcttcaatattagttggcaattaaggcaatagagctgaaaaaaaaaaaaaaagaactccaaagaaaccctctttccctctctgttttcccaaatttacttctaagaatgagcctatagatgaaattattcccttggagctagctggcacgggctaaccctatcttcctcagcagagcttgcacggggtggcagatcctcttttcatttcctagaagcaagaagggagccagaagcccagttctcaggaggtattttctattctcctctgaccccatatgaatatatggctctttcttccctttctttacagcatctcttcagcctcagcacaggggttgggaggtctacactgttttacatttaattctcttactaacatactacctcccaacattgaaatatagattttttcccctagtttgaaagtcttgcataaatagaagcttaatacattcaatatctattaataaggattaacttggagtttagtttaaaaggttgaactagcttggttaattatttcccaatgtaggacagaatatgttaaactgttttcaacctttcaataatttcagaattgaaaacaaaggtgctttggtgtcaaagacagatgagctattactctggggaagaagggaagtaaagggattaatatgagtgtgtctgtgatccattgtaatgaatgttttagttctgtatgacgggtgatgtatacatgggtgttttattttttttctttatacctttctgtaagcctcaaacgtttcattacaaaaatg

SEQ ID NO: 1245116 - DNA, 4001 bp, Homo sapiens
caagaatttggtcaaaagtaacagtaagagtaaatgttatgcctttctttacacaatattttctcctttatctctgtgtaacagtaattaattgattctttatatcattaccttttagtttataaacatagaggactgggttgaatataagtaaatcagtcactgaaaaaaaattaatgcaattacctattgtggttttaatttaagaatttggaaaaacacttaaatatgaatttaccaaaataatgtgaaaaaaaaattctccctgtgtgataacccactaagacagattgttgtctttgaacctaaacccaaagtggtggaaaacataatctaattacaaattaaagtcagcctggcaatactgcatatattttttagcagttcctaaaaaacctgacacaaaagagcaatgtgttctaccattcacaaatcactgtgtaaaattgtgtaatgccatgatctcatgtgggctagagactgtgggtgaatagttctcttaaagaatggtgaatgattaccttgatttactgtctttaatttgcaatcaagcaaactgtcttctgaggagaatggaaaaaggggaaacgaaatctactggccactgagagatccaaggctagtttttctctttcactctttgctaactaatgctatgcctttaattagtagattggaattctgtgagatcagaaagtgtgtgttacaggcagaaacctctgactgtggctaaccaagcactttggtgttgccgaaaatgtctttagaaaacagtgaaactgaaggccaagaataataaagtttctttaataacttccaagaaggctttcctatatatttttgatcttccctttactaccactgagtctttctggactgctgctttctcacaatgttttgtcaatttttttttccctttattaattggacctgacaatagtgagaataaaagagaatcagagagagagaattaacagaattctgctgctgatcactgattccacatccaaagttagcaccaggcaggagcaatctcatctttttatgaatgaagaggggcatctctaccaagatcagtgaaaaacagggagaagattgtgcaaacccaataggaaatccattcaggaaccttgacattcacttgctggattattagggcaatttaaattaaaaataaagaaaatcatcaatgaatgtggtggatgggatttcagaaaaaggcagcaaagaaacatcccagtagccaaagtcattagcagaactgttcagcactttcataaattgcatgtaaagtagttttaactgaattgggagacttaaaattgttctaacacaagagggaggaaaactcagccagggaaagaaaactcccactgggcaaagatggaaataatcttgaaccaattattgaaaaaaataattttacctgtatttaaaagatcctggattcatgcttatgaatgcttcctcagtgatcttgtgtggtaccttatttaagcagacccccacccccaaaaagagcaatcatcataaatgttaattttgcaaagcaacagtaactattcagaatcctggtcctggaaaacaaccgatcatatttcaatcaccagccatataatatcctctaagagcacctagcagatctaaggagatcatgtgtcaattaaagattttataaagcccttgtggagacacagatttgtagatatctgatgtctccatctgcttttttactatctgtgcacacattaatttgtcagctcttccagtctttctagccattatttagaggagaaataaaatcacaaatactaccccttcctttccctaccacaaaaaccatccaaatcaacaccacactattaccaaatacaaagtaataaaagagttatacccaaacctggtcagtccttccatttcttgaaacttgcacacaaactgaagaaacccactcagccttaaaaaggtcgatcattttgctttcctaaaatttcatctctgggagtgctttccttctcggtctgtcttgctctctctctcgctccctctgtctctctctctccacttctaccgcggagagagcgttttgtttcccttttcctgtttctacggctgaatgaatgcaaaatacactgtttgaagggatttttcttttaggttaacagttggaaatctaaaatcttgctcttctgaatggctttatatgtcagtcactcaacatacaacatttacataaagaggcataaacagaaccaagaattctgctttttaaaagcaaaaacaaaacaacaacaaaaaccaccttttattctatctctgaacctcttcctattttatttatttaactattaagcacttaccctgagatgtgccataaatgctttattccaaatgtataagagccaaccacatctcaactgagaattaaacagttttaatgtcttcaaatccatgttcctgctcccaaccctaatacagacagtcactggcagcggtacaatagttctaaacagcagacatctgattcttgacatttaaaaataacaatattggaaaaaaaaggagtccctttttttattaactgcagacagcttgtgagtgagcacttatcactcataatacaattgaccgtattaactgggacttgcaacgatttcaagctacagtatttgattcctaagtcaatgtcaggcagaggctaaatacttatagacttctcattttctatagaatcatggcaatggcctaaattaagcgaattctaagtgataattccgcaaagagagaagcagagctttgctagtatttagactttattattggtgattactaatttcatctttgttagtcttgaatcaaattagggacataatcagttgtttcattgttagtctaatttcatatccatgccctcttaacttctcacatgcatatgaggtcaaatgcacacatacatttaccacaaaataaatcaagtaataaaataaaaaatacgcactcatttccattactgaagcatattacggagttgggtagatttgggatcaagtgctagctcccccacttactgtttatgtgttcctgggcaaatgatttaagcatttgtgcctgttttgttgtctataaaactaaagtaaataatactctacaaagttgttttgagtacttaatgagacatacacagtttctggcacataatagatatttgatatacactgcttccttcctctgctttgtatttggaggaggtagagattgggcatagtaaatgaatacagactttgaaagcagacaaatcagttttgacccaacgtgttgccacatactagctgtgtgtccttgggcaggttacttaacctaatttacgaaatcttagcttcttcaactgtgaaatatctctagaattttaaagagcaaattagacaacatctgaaaaacatacagtaggcatctctgaaatgagagtcctgggacttccaattcttgaaaatagttctaattagtactctgacacatgtaatttacgagtttgaaaatgcatactgagatcatacatcttttggaccaagcgcctcattttctagcagaggaaggaggtccagagagctgaaagcatgtttccaggtcatgttactagttagcagcaaataaggactagaacgctccgggaactagaagaatagtgctttgcctactaagtctctaatattgaagttaaatccatttgtaaatccagcttcaatattagttggcaattaaggcaatagagctgaaaaaaaaaaaaaaagaactccaaagaaaccctctttccctctctgttttcccaaatttacttctaagaatgagcctatagatgaaattattcccttggagctagctggcacgggctaaccctatcttcctcagcagagcttgcacggggtggcagatcctcttttcatttcctagaagcaagaagggagccagaagcccagttctcaggaggtattttctattctcct

SEQ ID NO: 1245117 - DNA, 4001 bp, Homo sapiens
tccagtcgtaaagcaaagggcttcaaaggtcaagctaagaagacgactcccttccacctccagctctgcacctcccttggctgacagctgtgtggtgacagacttgagcattccgtcccggctgcgaggaacaaccagactcctggagaaccgcagcttttcccgtgggttcgtccttatatgcctggaaaagaatgaggcgctttcttctacccaagaaaagcccttgaaacctggccgaggatctgactctggcgcctgctctctctcgccttggtggggctcacggcagcgcacgttggctccaggctggaggaaggggggcgttgctgtcacccagctccgcactcgctcttgcagcctcccagcctactacagagctgctgaagttccagaatgggcccctgttgtccttggggtacagtctgcacctttaatgcgaaacccagcagaggcagcaccaagagtcaagtctgcctttcccgtcctcctgtccccaacacctggcgccgccaactcccgacaaagcgactcctggtgcttggtgatctgccctctttcggggattctaccttatctttcttccactctctaacactacccttcttttgctttcttttttacacaaaaattagcaaagtcctcccctctttttccccttctccaagttggaggattcatccagtcatcagggaacacaggaaaggttctagctcaaggaccctttgccccgggaggcaggagcttggtagaactggaagttggagaacagtgaggtagacacaaccagagtctggaacaggggccctttctttcccagacgagtttcccctcgcttttctggaccagccagccggggtcagcctcccaggccaccctacatcgcgcgctccccagggacctcctgcccatccctccatcctctctctcgcgtcccaagtctaggctgctcccgcccaggtgacagcccctcctgtcccgctgcctcccgtgagtccctcctaccgcctcgtctggtcactagaatagttttgaacccttgggttctacacggtttccctcccaagccaggcagcgcatctctcaagaatagggaaaggtctccatcaactttgccgtcacggagcagtgaccgcgggcgggcgcggggcacacacctgcctgcacgcgggcgcgggtccccgggtaggggagcacttgcggggcgcgggagccgccctcggccacggcgaaggcgccctaaactacagccggcagggacgcgcggcgctgggagggcatcagacgggaatttcgaattgagcttgggaagcggagaccagaaaatggtgattctaaacacacgcgagcgtcgccacacacagcagttccacccgaaaggcgcacacttttgagaacagaccatcgtggatagcaccgcaaagaaacctcctccaaggcacgttcctcgttggaactgacaacccctttcgtctactgacttccccgcacggtcgaagacagcccggtgcactcgaggatggggactcaggcgctcctggagtccccaggtccgtctgcggagccccccggcaggtgtgggcccccacctggccaagcaacaagcgggccatccgcctaagggccgggtccctctctgccctgtacccgcacgggtcacctctccctgccccccccccaggcagccagccgggccgaacgagcgccggggaaggagcaagccgagcgagccactcaccccaagcttcctgctgcggattttcacgtagccctgcttgactatgtcgttaaagttggaggccatggccagcgcgatcgggctcctgcgccccgcgatccgctctccggagtcgagagccgccgtccgccgccgggtctgcgcgggtctcgcatccagccggccgccgccagcagcagcgccgccgcccgctcttccccgagctcccgccggtggggacgcggggtcgcctgcagggccgccgcggacggggaacggggcccggcgccgcgagccgcgccagccctccgcgttctggcgctcaccttcgctccccgccgcgagcccagcgccgcggcccgcgcctccgccagctgcgggagcccccaccgcgccgccgcccccggcagcacccacgggctggcgcctcgctcggcggcgcacagctggccggagcgcaccaccgcggctccccggcgcggggggagggggcgggccggggggggcgggctgatgcgccggccccgctccctccccctggcccgtggggtggctgggctcggagacgctcgcaagacgcgctccatccctctccgcgcgggtgggagcgcctccgccgccgggcgccccgaggcccgctccccacccggctccccggtccctcagcgctccccgggcgcgagattcctaaggacacggcgcctcattcccgggctctaaatctccactcgcaagctgtgcagcggggaaagggcagtggggacacttccaacgcggaaggccagcgggagcgagacacttatttcattggccttgtttacagtacatttttattcccaagcactcgcggccgttccaggtctctgccccgttaggaagtgtaaatcgacgccagacccttcctggtgcacacaaagagaccaatcgtgcgcatgtgtctaatcctcccgcagcctagagacaggcaggcgggcgaggcagccgggcgccgacgtcctctgctgaaggagtggagaagaccgaccgacccgagtggttgatttatgcatgcgttttcgttaactaggactgaaagtggctcctggctcttctgggaaaatggagaacgtggttgttatcaatggataccaatgacttcctgaaatgctcaacttgtacaaacaaaaaatgaaaaactttctccccttaatgtagaaacacatggcattttaaaagtaggtttttcattattgtaaagatgttttaatttttaggattatgtttttgtgaaagattcgaggaaaaagagcgatgttgagttttggccggaggcaacatatggatttttactataggctagaacatttagtacttacttctaaggatgtttctaattagtaaaatgtataaagattgacaatttttaaggtgactcctgcaagagttatatttagtaaaagttcaaaagatgatgtttgtttattacggtgagcagtatttttccaggttctcatttaaaatttcctaccccatttgaaacacaataatagaaagaaaggaaacttacttgaatgaggttgtggggggaatgtaaaaacttgaaggacaaggtagctcagtccaaccagatgagcatccaagggagatttttgtctcatcctttgcagaaatctccatctagagcccgtgtaaaccaatggaaattcttacttgctttaacagcacactattcctattcattcattaatgtgggctagcctttttttttttttaaataaaaaaaccttccaccgtgcaaagtaccagatgctggggcagatcagatactaaggataacatggtaaaatcctttccgctgtcactctggaatgggcccaaactctgaccttcccagaaaatttgcataaactccctggaatgggctcaagctctgaccttctcagaaaatttgcataaactctctgataactccttgtaattctttcctctaaatacctggcacagcttgtctattccacccacttcttactatttcatacgctgcatggccattttttttagaaatgtaaagactgctttaggtttgtaaatgctttaaataagtgatttcattcagccctctttgcaaccacatatgttaaatgtggttgccagttactagaggaaattgaggctcacagacattcagttgcagagccacacgtttcaagattgatttgaggtctacagtgatttctatgaccactgactccttctcctatttatataatcatctgtttcacaagtcaattatcagttctttgaa

SEQ ID NO: 1245118 - DNA, 4001 bp, Homo sapiens
tacctatacctatatatgtatgtgtatgtgtgtatatatatacacacagtcatatattgcttacattctaagaaatgcaacgttaggtgatttcatccttgtgcagacatcatagagtatacttacatacacttagaggatatagtctactacacacctgggttatacctacatggtatacaccatgatttatatatgtatgccccatggtatgcaccatggtacagcctaggtgtatagtatatagtatagcttattgtaagctacaaacctgtacagcatgttcctctactgaatactgtaggcaattgtaagtatttgtgtaactaaacatttttagatatagaaaaagtacattaaaatacaatataaaagataaaaaatggttcacctatacagacgagctccattataatctatgggaccactcatatatgtagtccatcattgactgaggcattgttttgcagagcatgactgtatatgtgcgtgtgtgtatatatatataaatgtacatatatatatataaatatatgagacattcttatagttatatccacacttccactcccacccccatcttctttccttcttgtcctaggattccatgttgatggtcctccctctgcaggcagagccactgaaggtttccattcattaaatactattcccgtcttcaggttaaatcactgactaagtggcttagtgacacccttttagtcagtttcagagtcagaaataaataaacaggagatgaattgtccaagagatattagacagtacagggatcagaagcaaaagaaatgtgggtagaatcctttgaaacatttttaccacattttaccaaacttgtactaacttaagatggtatctgagttatcgtctccctaagcagttacaggatgagaaggtgaccatcaaccctgcattgtatattatttacatggagaaaatgtttgtcctcatacctgccatttctaaaaatatattttgaaactcaagtattttgctaaaatgaaaaaataggaaactcacacctcagaaatgatggacggatgtgtgaaataacccccctctcttccctcacctccaaagaaaaaatagcaccttacacagttacaaagctattaaaaacccaagtggaagccaagttgaggatattttcaatgacagtcacatttttgttatttttcttaaactattctttgcttaaactgcttcgtgggtaaaattcaaaaagtcctggataatttgcatgttcacccagaatcctttctctttttttgcagcttagtagaactcagcatgttaaataacatgagtttatgtaatcactggtagcagaagtaaacctcagaaacttctgggccaaatgcctaaagaatgaattcacttctctactcttagaaaatcaccacagcaggatggaagagggattcccttgaaaacttttaacactctggcagtgggtgcttgagaagtaagctgaacactttccatcctgaatcccaagcctctcaactcttccctgaatcttcctcagatctgcttttgttttccccaatctctcttctctgcctcccatcctcactcctagtctctttcaagcccaaactgcagagaggaagcaggtagtaacatgcttgaattccctaatcctttggttgttactcaccaggagagagaaaaggagctgcttacagaagatgctccctggggcagcagaggccagagccatcagaagcagtcccaatggccagggacggtggccagataacagggcagcctgggatgcacagagcggctaagaagacgctggcacttgcacagggtattctgctgccaccttgatgcagctgagcttggtttggaagacagtccggaggcaagtgataaacagtaggaggagcaacgggagaatttctttccccctattccctggccagtctccttccttccagttcaattacgtctaaatgcaaagaggctttcctacaagtgaggagggtggggtacaaaacaccccaaaacccagtcagtagctcctcctcacagcagctttcaaaatttctcttgccacttaacacataggcagaaggaggagggaacacccttcatcctcagccctcctccctttcccccaggttgatgctgtgaagtcctccccagttattacccactcccacagcctcccctccttcttggccttattaacctgtcttgccctcgggtacaaacataaattgtgcacaaacgccatgcaaggaagtgatgcctcctcaactgccattggcaaatcagaggacctaagcgtgtgtaatcacactcatcagaagttatctcccatctaagcatttaagtgtcatcggtcctgtagaacactgtagttctgctagagaactggcattccagtttaaagcagcaacttcataaaggcatggtatctacttcctgttattgactattcactgtggttggttctctagatgtcacaggaaacttatcagaatgtaaagacttcataaaagaaagagaataaagaaatagctagcatataatctttcttgtggctttccttttgttgtacaagatgccactgctttttacctttatattttttcaaggacaactacaatctttgagagcaagtctctctaaaatcactctattcaccctaattacttgtacattacacataggatatcctagcttaatagtacaatcaggccatcaagtgtagatttttttaaaccctaatgattcctctaacaagagctttagcatcattattcctgtcccaaattagtgagctcagtgataccaattgcactcaatggcagtgatggaagttaggacagaaggataaatattttcaaatgttaaggtagagcccaacacccatgctgctgagaagggaggaaagaaaggttttcttcagcttatttgacaatgggaacaatttctccttgtatgtagagacagaaataaatgtaactgcttcattagaattagaagctaggaagatttggaaaatgaatgacccaggagaaaaaaaactaaaagatatcttgtagtattttattgctagtggtatacccactaataaacatattttgtgactgcattggaatttgatttctcaatcagaaaatacagtcattttaatggaatatttttatatctggcgttttgggagaaaagaatgggaatatagaaatagaaaaattacttagatgtatatgtgtacagccaagtgtaattctgtgcatgtttaagcatcatctaagtatatatttagatagatagatagacagataaatagatagtcatacagcttaaataattcaaagacaaattctccaaccctagaaaatagaaacacatttttttcagctaatgaagttatcattacctttttctataacatgatattctccactgaactaggaagatatagaagagcaaaattaaattggtgttactgaaaaaatggcatatattggttggatgaagagattccaggcactgctcaattcaaatgaatccagaatactctccacagttctgggaagttgatgttctgatcctacttcttttggcctactttctgcgtgctctcttttcccattatctatctttctcaaaggtaatagaaaaacttgtgtaaaagctaaccccaaattattggtttgcaaatctgttacattactatttctcccatattttgtatttgcacacaaaggtttcctaaaaataaaatataggcactttataggaaaaaataatttattattacaaattattgactcttccttaaacgtgaatctaccttaaaattaaatgaaaacaagacatatttcttccaattttctggcattagatcattcagtaagagctctgtcttagtctgttttctgctgctgtaaagaaataccatagcctgggtaatttattaaaaaacaaaacaaaacaaaaacagaaatttgtttggttcatggttc

SEQ ID NO: 1245119 - DNA, 4001 bp, Homo sapiens
ttaggagtctaatgaaaatttatttcttactcatcaacatatgttctgaccgttatttattccattcttggtttcctcatctgtaaaatgttaactgctgtgtacttggccctttctatgttattaatatgccctgagaattcagttaagggtttgaagtccattgagctcctcgagaaagacattctaataacagtaacaattaccaattcatgattgtaaaatgtggaactctactgcgaagtgagagcggaagagaaggggaaattatacgaatatttcagcccccagttcacttctcccagaaggaattagccttccgggttcctccctttgtccttcaagattgattggcgcccaacgccttctgcttaagacaaggagcacttttccacacctgtcgatttttttcctcttccagggagccaggaaaagtccaatcggactttttatatccccaattccccagacgctgctcccggcattggctttttgcgtcttcaggctccccaacgagatcccatcggtcaagcctgggaaaggggctgtcccgccccaaataaggccaaccacttaggctcccagctctgggaaggggtagggtcattgctgtagtgctctttaaagaaagaaagaacctggggcaaggggcggtggcgcggggggcgggtggtgagcagaaaaatcgagtcgcctctggggacaagaaatcagaaagacccttccttcctccgaagatttagggaactgaagcctcgcacgttaagaaaccactgaaactgtacaaatgctcacctagggctcgccggtcgacagtcctcaggagcaaagggtcaagatcccctcccccacccgccacttccccccgcccttctctcagagtaaacaattcccagaaaggcgagcagttccctttttcacccaaggacactcgctctccgtcccggccgcccagcggttcccctttccgtggcctgggcaggcgctgaggcacagggagccgcacgttcccgaggcacagggagccgcacgttcccgaggcacagggagccgcacgttcccggggaaggtgccagaggccagctggacggccccggcgcactcccgccccggcgcactcccgccccggcgcactccgaccccggcgcactcccgccccggcgcaccctgctccccggcgcgtacccaggggccacgattttggctgggcgaaagcggcccgctcccgcctctccttgagtgcgctgattacatctaccggagacaccttcccttcccttggggatcccaactctcaggtcgcgatcctcttcctatctgccctcccccacccccgccaactccattttctagccacccagaggccccttcaccccagcttttcccgccacccccacctatccccgttcccctagttttcctctgcaccctaggcgatcgcccccttccccggagcggtggccgcggctacactcaccgcgagggtcagcaggagcagccggcagagggctccgttccaggagccggaggggcgggctgcctccatggagagggctcggggcaggtcgcgggccgagcgtcgggccggggtaggagggctccgcggggcgagggccgcggccggagcgcagtctgggcccgctgctcaggaggagcgcgaggcggaggaggtggggcgcgcggagaggtgcttttcttagcttctctgaagcgcctgcctctcatccaaggggcttttcctttggcggagggaggggctccagacgcgtccaaaagacaccgatcggcccctccttgttgtctatttaagacttaagacttcatttctctaagaaagccacgggtgggaactccctctcgccgccacccttttacctgcgcaaggtgtttctcaccagcggacgccacctataaggcccatctcccccaccacgccccggtgtccgctccgccaggcgagattaacagccggccctgcccagcagaagccctgactgcacaaagactcactcctgagtgcgcggtcggccccggctccgccctgcccgctgccctcggcgacggccgtggtccctgccctggggtcaattacagagcgaggtctgagccgcagaggctgggttttaggtcacagctgcctgaggcccacctgacagaaagttgactccagggagactgttacacactctactggagtgaatttcctacacacacccacaagcagttcagacatcatagtcatctgaggcaccattctttggggtcttgtgtttttaggaatttactggcatgacaatgatacaagacaatcgccataatttagagacaaaaatacatatatacatacatacgtacgtaaagttagggaatcaaggcgactgcaaaataataaaatcgagggtgagttactataagaaatgcatccattgaggtcctagtcgtgggctacatgtggttactgattttctccaagaacatccctggtcacaaatagagttataacttatttcctataccggactcctgaacatccagtggagagttctcaccttctttactaccatcaaaaccagagttcatggtgagaaatgaataagaatgggataatttacatttttatttgaagtgcacttaaactaaatgaattattgcagcacacaatctggaagattaagatataaatgctgtttcttttagctcttcagaaagcaatgacaaggcatctgactcatcctcctgcacctcttttcaattactgacttaaaccaggtaagcctgaccacaaaagagaaacttgtctgctcccttttatttggtttaagtttcctcagggatgtcctgagaatcctatgtgaaaagccaaccctgacactcacaccatttcgattcttgaaaatgttcaccatcttaacaccattgtatgccgagccagaattactgcaatactgagtgtatatttaaattaaaaattaatgtcaaacagcgcatgccttacattctctgtgtctgtgctatgctcatgccctattttattaacgaatgccactaatgagctgttctgtctccatatccataaaattatcattgaccctttgctagtaaaataagcctgagtcatcagcatgagactataattgacatccttccgtttccatattttttaacactcatagttttccatcaatgataccataagcacacctcatcctattaaagatgacatcatggtctctagcatgaagcttttcagaggacaaaaagaaagctataagcgtttcaggttctggagatctactcagactatcatcacaggctttgactataggacatttccaaactcttgcctactctttaccctctgatgccttaagggcagctcatgtttttcctcattccaggaaagggcggaagagcaatttgactagaattcatcttagatatttattttcctctttcacattaattgatagaggctattaaaatggtgatttgtttgttttattccaaaaaaaactttcaacaaaagaatggaatataaagtactttctctgagcaagtacccaatttatttaatgtatttaggttaggctatatggtcactgaaatagatccctctaaaacataggtttgaaacaaagggcatatatttaaaaaaaaaatggaatgtgagtagatgtgatctttttttaaaagaatgacttttgcttatgaatatgattctgctgcatgaactagtttcccaataaaaatatactttttatagtaaaaagtacaccagaccgaaagtaagaagcaacttcttttgtgttgcttaagtaatctctcaggtctcaacactcccatttgtccatctgttaagtaagataatcaataataataaggtaatactggaggctatctatggtactttctacatctaaaattaaactatttagactgcttatgacagatttttgagaagcttggctggaaatggatgttcatttcagagataacataga

SEQ ID NO: 1245120 - DNA, 4001 bp, Homo sapiens
cgtatgagtcaaaaggaaggaaatacatacatgagatggtcaagagaagtgttaatttacccatccggtccgaaattgcaagtgtttgtaaactgacaattgcagatgaaatagtcattttctgtgcactttccggtatttaagtctccagatacagcatttaacctaaactcaacggaattattttaaaaaaaaaaaatcttaaacgagtatgtgctagatcaaagctgaagcttcctccgtttagatttacgcgcaccttcttccttgccacagctcgacacccccacccatgccttgccgggaaagctcctggtcttccatggcctctgggagcctcgagcgaatgcgagaaattctgagagcagcacccgtagtttcgttccccatcctcaatcccttcgcaaaggaaacacaaaaccccaaatgcatgcttgtaaactgaaaagctgaaaatgcttttaaatatattacaaaagaacacattctctaagccgtttccatttgtagtcacttcataagctcagatactttgttggaacagttcccgggcaaatggatgcgcttatttgtccaattccttctccataaacatatcgtagatcataactaccaatcccatattcatacctcgctgaccttaagggaggacaacccttggacccactcccacttgccagggtggagggccaggaagcagtaagaatccgcgagaccagactcggctcactgccgacgcgggtatagacctcgctcccatcggaccccatgcgcatccatggatgcgggtaagtcgcgggtccgcggctcctttctgggcgtgcggaatgaaactctgttgaagcctgaagcttcgcgtgtaaccgcgccgccagagttccgaacacttcaagtctcccgtgttctcagagcatcgtctctaacttcctctcctagaggatttcgtcctgggcggcaggtttccgtagactcgaaaccccaggctgtgctccggccgcgcagtcctccccggagccggagtaagtacgacgcaaccccaccgcatccatcatcccccaccactgtcaccctctacccgcctccacacctcggcagcatccccaaaacacaacacgaccccaacccccattctggcccggtcttcccacactttcgcgcccccggcacatcccgcccccagctgggtggctggcgggggtggaccgcttgggtgagcttctgaataccctttaggggagataccgagaaacccacttctcaggggcagccccaccaagggacccagggacacagccccggctccactcactaacgaaccaatccgggtcaactgcgacccagagctggggagggggcagcccctaaatcccttttcaagtctgtgctttgagctctcagggatcctctccacccaaaggcgccctccaaccaccatcaccaccagctccaccacctggggagaagcgtgaatcccaaccccctgcccaacccgcgacggcgcccgccagagcgcagcgaagcctgagcgcgactcagaattccaacaatcgaacaccttgtctcaaaacaaaaagctcagtccagagtcgacccgcaaacacacgttttctctcctcactcctgcaggcccgaacttggggctgctaccagacccgcagcattgatctgagccgcggttgtcacgtttcggcccgctttgtccccagctccgtgcagcgtccagggcggatccacccccgtccccaccccagccctatccggcgagatctggcttaccacgagggtcagcagcagatgcaggcagacggctccgcgcacggagcgccggggcccagcggcggccatcgggatgccgggcagggccaggagaacgcgggcgccgggagggtgccgagagcgagacctgccgaggtgcagggcgcgggaggtgcttttctcgccgctgcttgtttttaagtgtatttggcctctctcaggcttgcctgcccgggagcaacttcacttctgaaaccggattggacccagaggacgcggagaggccactccttgttatttctcaagttttatcatcgccggcgcggctgaggagctgcccgagcctgcccctctgctccccagcagccacccgggcgttcgcgctcgggaaagcggtctctggcgcaccctctgccagttctcccacgcccctcggctgccccgcggcgctgccgccccgcccggcccgcagagaggccctggcagcccagatcgtcccagggcggccccatcgccggcgctgcgcggtgcatctcaatgcagaaccccaatccgcccgcagggatccctgcctcgacacgggctctgctggatgccaggaacacccttgtcattggatcagcggatctccccttcgacgtctgaacaaattctgccaatgttttcagattaaagcaaaatacatgtactgtattctctccggatttgactaacatgacaaaatacacgacagaaggaatttatcccagatggcatgataaacagtttttggcatgtcagaaattaaaaccaaatttaagaaattctaatctaaccatttttacgcacccaaaatatgagtgattacactcagcgctctattaactgtcagtttgggggactcatatgaaccttctaaaaacgactttgttcttagatgtgaattattggtttactacttactggtaccaaaatgaaatttttcaggtggtcaaaggaatatctaccacacaaaaccttctaaaacgaggcttacagattctacatcatgcaacgactatttatcagggcccgaagtcggccaagctttgtgtgagggcatggaagaaaggaaatgcagaaaatctagttcctgtcggaaataattcaaagtcagaaagggacgaaagacaatcattcctagcccagtaggctacactttttaatagagatgtcgtttgtaacaccagggggacatcctcttatttctccctaaactgaattttaagttccccgagttcccatctactggattcaggaggaaatccctctcagacatgagatgctactcctcgaagtccattcaaaagttgcaaggtcgggaatttcagacagccaattaatcatgaaagggtgttatgaccttcattcatctcactctggctcaagtctaatagactcctcgtcgtctaagccatgtattccctgaagtctggggcttccctgaaactcatgaggctcagctttaagggctcagacactctaagttgagcttcccagtgtgaatctcccaggcacccgtcagtggaggtctctgtatgtaagagctcttccagtctcagagaaagttctccaaacttctctccactccagggttttcacctcccatcctccacgtgcctccagcatgacctcagagaaagcttctcaaagtcacttccagccccccagccctcagaaactcaagtagaatggttttcttgaacttagatgagtaaaggagatggctagcaccaatctccctccctcaccactttgaattcactgttagagtgaagggttgaggtgttaaggcattttagaggagaggatctaacttagctgaagaaagctttgaagaagcaaaatgttgcgataagcccagcaaagaaaagggaaagggtaggagaatgcttcaagataacacaacatcaacaggacatgagaagctctggagagccttgtgagagtgccccagggtaagaaagcagaaaggggttggttcagaatggttacatgcaatggctgggaattcggttagaaagatggttcatgacaaaccatgctgaggaatttaatttcatcctgacagaaatggagaaccatccattcaatgtgtgaaaagggttagtaactactgttacaaaattgtcacttttggtgagtttgcacatatgaacccatttgtgctgtaatatggctttctttaatacctagggaatgaaagactttgaagtgtttgtctttat

SEQ ID NO: 1245121 - DNA, 4001 bp, Homo sapiens
atgctgtgaaatccagctgacattcagtacattttaagcaagtgcagttgccaaaaagagaaaacttaaattgtatatctctgtccctggcacagttttgcttccagtaaaactttgaataacgttaaaatctctaatttttccataatacacagggaagtgatacaggtaaaaaacactatgaatttagcatttacctcctttacttaaatctatttaacacaaagagttggaacacacattgtaaaaaaagagaaaaagcactccaaaattcaaattaagagtcatttctagcacagaaaaccatcactggtgataagctcaccacacatgtatgatgcatttgtgtatgtttgcccaaagaagatgatgaagtactgacattcttcgagtgagtggactcagttgtcattcctctcaactttttatacttcttgtcttgtgaatacgtttttctttcatttatgagagagaaacatcctcaacaagtgatcaaagtcttagttggtttttaaaaattcaaaattcttgccttcatttcaaatatttttcaggcttacttactcatcagcctattatgacaaagagaaatcatgttcacatcttcttttatcagcttcatgtgtacaaacataaaaatggaatatcttcagtcacctagatacttctcgtccgatcatgaagtaaccgccaacggggaaagaaaattcccctttcagcaacagtgaggtctctcttctgctcttttttcatgacacttttctggggatgggggacaaaataaaaattctctgaggcttcaggtatgctgagaatgaatataaactgatgacttaaacattctgcaatcacttaatagaaattttagaatcacagtaaaatctcatattatctgcaacctaagctagggcaagtgatttttttcttatccatttacacgcacttatttggaaaccagtgaccgtcagcagaagacaagcaactaacaatacaaaatatacaagatagaactctcccgacaatatctatagtttaacgccactaacgtggcttcagtcacttaaaaaatgtttgtattcaaatgcagtttacacaaagatgagtcctgctatccttgttatttcttgttcccaaggaccgagggacaaaaaactgaaagttgaaaagatctttttttttttttttttttttaattccgggggaaggtttagagttcatgggatcagaaggtatcttcctaatgagaactactcggaccagtcacttttctcggcggggtaaccgcgaatcgtgaccaggcgccaagccgaggggcgggagctccgcgctcggcgctcacctgtggccgagtccctgtcctcaggtggagccgccagagggagctcggaccccggtgtcgaaagacgcctctccgtgcccgtccgcggctggaagaacctaagcaagtttcagtcttggacaagtctcccctctgtaggaaacattcaggctaggagtttcctgatccgccccgcctgttgcattttttcactggcgtcctccgaccctgccgcccccattctccgctccccgctctggggctgagtgaggcaggatggcgagagacccctgagccaccaagtccgcttacctcaggcagatcccgacgggggctcggcgccgcactgggccccaagggagacggaggtggagagttccagaaaactgctctgcacggcgggccaggctcccgcggggctccgcaagacccccgcgtcgtctcccgcgctacggcaggcgctgccccagctcggtctcctcagccgcgctcggtccccgcgacccgcacggcccggacacgcccgccctcaggaaacgccggacgcttgtgggggcaaccacggaccgcaggacagagacccgcgggcggcgggttctctcggtggcgccgtatccagagcagcgcccgcgtgcccaggcggtgatgtcgccgcggccgaggatcctctgtgccagctccggccgcgcagcccggggagggtgagacggcgacgcgggccggcaagcgggggcggggcggaggcaggacggggcggggttgaaggcggggctgaaggcggggcctcagggaaggcgagagacagcgacgctggctggcgggcgtggggcgggacggagacaggacagggcggggtcagaggcggggcttcggggaggacgggaggagccgtgagcaggccggcggcgggcggggcggggccgaaagcaggtgaggcggggccaagcgccccgggtttctaagcggaggaagctctaggcgtttgtgttctgggcttgcagcggtggccgcgcgctcccggaggagtcgagctggaggaggggacagtttgggagtgcgagagtctaaagacgctgccaggctggcgttaaaaccttttggttatgggaagacgacaactatataatagagccatagtgggggctgtgggattgactcaaatgatgggaggagctggagtgggaggggataagccctgggacgacagaaatcatccttttggaaagagcaagggctggggaaggagggaatgagcactcccttggaactgagaggcagcctggctgagcttgctgtcctttggaaaagcaaaaccgaaatacccagattaatataggaggacaacttctgtagcccagatgctaacaaagatcaagggaaaacagaaaagactaatcagctttactgatggaaaacaatttctcaggcagtataaataggggaagcatgggacaaacaagtagaaggagcctcttatttaaaaatgggacctggtattcggtaaagacctacatgcagacaggagaaggcagtgtgccccggctactacgacatgtgagtgcagtgccaggtcgtggaaatcctagagcaggctgggactcctgttgcactccacacatggagcttctcacagatagctgagatgacactttggcataaaccaacccaagctctgacctcaaatgtaaaaaataatagcttagtagtaataaaaatacagggaaatatcaagcttcacaaatgaacaattccattctcagttggggattagtaacacattcagtctcttcatttcccatactattttggtaatatttaataagatatattttaacattttaaaaataaatgtcttgcttagatcatttgctgctgaaaatcaaacagtagacgactgctagcagaataaatttcaaatcatttaactttgaggtgaaatgtggcctctaactcctcatcactcttctgttttggccccgtagtaacccctagcccagtccaaatagccacacttgcttttgcttgggtgcttcagtaactatgcttattccattctttccctcacagtgtcctttacccaaccaccccacttactagttaaaattcttctgactgttgaaattatctgatcatccaggtctcaactcagatgcttacattcttctgtaaataactcctaagtttccctagccagaatgtattactccagaactatatcatttgtacctatattcggccgtttaggttgtttattttctgctttctatttcaactggttgactcctgtaccctattcaaaactccttcaagtcatgagtagcactcaagtcccctttgtaagtactatatctgcttttgaaatgagttgaacctcgaacaattgggctgatacagagcctcgtctcctccactgaggtttattcccaaacaaggatcctcttctgacacaacttcctgtaaaatctggattgtgcctctacatggcccctgatagaggaagaggacccatggcctccaaccacatttatgagagagtagagttgggggaaacggggagctgactccagagattcctatctgtttgcagaggggagcctagaatttagggttagtaaacacagctactagatgtacagaacatttctcagaacaaagtgtggggcagggttatttctatggattc

SEQ ID NO: 1245122 - DNA, 4001 bp, Homo sapiens
aagtgaaatgttttccaaaaaaacctatgatgtcaacgtgaaaatgaaacattgtaattcatgatagtgtaagttctttgagaaaaaattttcataaggcatgtgggagacttgtgattaatttcaatataaaataaggtaacctcctcttcccccattcccaaaaaaacccccataagccaacaaaaaaaaatctaggcacagctagagaaagttcaataaagatatatgattttgatgatgatacattttattgaagaatgactaaataggaagtggctgtttaaagaaatttgatatgctataattaatttgaaataaataaatcaacaaataaggcacatcttagagattctatgaaagttagtgtacacctatctgaacaagctgatcaactaaaactataatagctcttaatggatcaaatttatttgaaattttaagtaaaagtgcttgattactgacaatatgaaactctcatatttcaaatgacatactgtataatgatcagtgatccctaccaaatcctaagtaatgaaatcaactgatcctaaatatccactgaaaagagcatgggataggactaatgtttgaaggaaagcttggaaccaaagccaccagcttactgatgctcatttataactaaatccactgattatgtcccgccttagttaataaaactgaattcaaactaaccagcatactttgaatcaaagatctaacttattataccaaccaacccaacattccagttcaaaaattaagcaagtagaaacaaatgtgaaccacagcactatacatcctgccaagctggagggcaatttacttggcacctgcctttttgaattacattaaccttactatgagagagattacaattttcaaattttcactgaaagtgaaattgacataatacattagtggtgcacttagtattatctctacagcaagaaaactaattacatgtaagggggcaatgataaagtatttcattacattcgtcagacgatcaagtgcacaacttttatatcgcagtcatcactgacattccagtagtaagatcgagtgtaataataattatacttactctttaattatagccacttcttcacttaatatgtcatttataaacctcctgtactgccgttttttgaaattaaaaatgttttaaataaaatcatagttaaatagtgcggggctttttatagtagtgatacagattctaaccaaatatgcaactgatgactttatttggatagcgagaccagccacaaactgctacgattttaaattatgtggtgctatttttatgttttaaaaattagagtaattccaccaccaaacacacaaaaaaaataaaaaaaaaaacaggttaaaaatccagacacacttgtgatatttagtttaaaagccctcttgcagaagagattttgaacgacaaagtgctactaactagcgataggaatttcctaaattcagtcttttcccagcatgacttagcaatgacttcagtgtcagagatgtaatacaatgagttgacactgaggcattaacatgatcttgagtcttcaattaaagagagaaatgctattgaaaaatctagttcataaaatcatcttgtcattaatatacattttcaatgggtttaggttagaaataatgcccactaacattttctaaaaagttttcacttgtttacaatgggcacgattatgaaggacttttaccagaatccactcaccagaaaaatgaacagcattgcaactactctgaagaaactccagtccatctctgctggattctcttacatccaagaccaagggagttttgtttgttcttctctgttctttttctttctcccactcagctggtgtctgattaaaataatttctcagtagatgttcttacatgcaggctttgaggtgtttctgccttcctctgggagaaggactgaaggtacgtataaccagtctggatccccaccctaaaaacttgggctggtctcactgaaatgcttgacaagatcatcattgctcccaggtaaaaacttggggacacacccttcctccagctgaaaagcgactcttgatggggcaaggaagattcactcctttactgaatgttttcagtggcaggctcttaaagtgaacagaaataccgagggttatacaggtgatgggggcttctcaccccatgctttctttacaggtggtttagtttctccccatattaaacaggcaggtataacttgaatgctcatcttattcattccattatctgtttgtagccaaaccctcaggtcatagtagaaaatgacaaactttccattttagtagatgttgggaaagtttcagttattttcggttgttaagagacagaaaatatgctaatgcaagactgagattttttaaagttattaattcaaacaagtaaaaccatgatacttacaattattagatcctctgcataagtcacaattcccattaactgaccagccttcagtctaaggaatcctccattttccctctaaagaaattattttctctccctaattatttttctttctttatgattcttttattaaatgcaacaaaataaaaatttaaatattactaaacttaagggtgaatagtgagaaccaccaattaaaatcctgataataactttaaaaatgagattcggtgcctgaaatactaatgaaaacacagaaagctgctcagcaggtgaggtgggttaaaagtcaatgacaattcctaagcacagagccaagaatctgtacagcgagccaattagaacatagggaatacactgaagaaatggctgcctacacaggtagacgggaaactgaatgcagccctgaggtttgtgaaaataaatagcaaccttcacagggcagcatttggacatatttttggactctcttctcttcccctggcaacgtctagtataaatattgtgagtggcaggaagctcatagacactggacaccctcagagtttgaaacggctacttagaacaagagacctacctgataagatgttgattatggtcaaaaagatactcaaaatgtctccaaaaggaagaaaatctctgagggtcagagggtctatagaaggctgtcatttcactacagatttgtggcaaagaagatgtgtggtttgaatttccatattatccatcatacagtgtggaggggaggagataggctgcccatgtttatttgcagtgaataagaatgtttatgattgtaaatagcagatgtaaataaataaaatttagaaagatgagctggccgattttctctaatgagaaatgtcaaataaaatagactgtattaacctatgacttagtctgagcaatatattagtatcatgttgtctgaccatgaatagcagaagactcactgggcaccagagacaactgcacctactcttgcagctttccagtggcgagtcaatgttttatgcatctcggattctgggcatgatgctagggcatgcatgggggcctccttcatccattaaattacctttccttaaacctaaccctggctccacccctaactcaatgccttgctccaacaatcctatatgactaggggattcataaggcagcaatctctcaaacatctttctggagaggaggtgtgatagaactccaatactgcagagcagcgtctgtcttggcagttacatgagagccaatacgatgttaaacacagcgggagagggaatttgttaatcactttctctcccttgcctccttccctgcctttttctctttcttactcattttaacgtcctcagaacagtgctatccagtagaactttctgcaatacgaacatattctctatctatgctgtcagatatggtagccatttataatatgtgactattgaggatttaaaatatggttattatgactaaggaagagaatatttaactttgcttaatttaaatttaaataaccacatgtggctagtggctaccatattggacag

SEQ ID NO: 1245123 - DNA, 4001 bp, Homo sapiens
ttccatttttttttttttttttttttttaccaaaaaactgcaactgcaaacacactgggggtaaaatgctgcattgcccactactctctggacaaaaataaacatattcaaatttatactgcagaaagttttatagaaaatacatagaacagtccaagaattttgctcctgttccattggctatagtcgctttctaaaggagatgtttattactgcccaataaggtaaaagtatcaaattgctaaaatgaaagatatgcctaatttgcttacctgctactctgtgagtgtacaaattggcctgattgctacattatttgaagattaaaggtcatttattttcatatatggaaagaatatgtaactctcaaagtaagctaggtgttacattagcttgggattctccttaaacaaggaaacatcaaggtgacaggattagttgttttgccagcccagaggctaaaaacgacgtcccagatcacgtcttagaaaagttttgtcaacaaaatgaattttcattgaaagttacctcaaggacacggggaaaatgaaatggataaatagagcatgaaaatgaactgtgtgctaggcctggacgccctaattatcatgctcttccacctgagagttcatggaaatctctagactggattcagtcacgcctttttccgttttgagacacacacacacacacacacacacacacacgattttcttccacatcccaccaaaactcgaggatagaagggctcatgttttggaagttagaactttgaatatagtgaatgtatttgcatttttaattattacgtaagaaaactgagtatgattttgcatctaatctctgtaaacacatatttgtgaactctctggaaggtgaactcacacctatatttgcagcataactgtcactttattaaaacccctttagtaaacccctataagcgagatacatacgtgcaaccccttaaacaaacagaaaaccaacagtttaaaatccaatttgagcaaaagaactctaaatccagggactgaacgtcgtttccgggagtgaggggtggggcgtgggggagggggcgctacacttccattttctgtaaccttttaaatgaataaggcttcaaactattacatatgtttattatctttaatattggaaaacttttgaaacaccaacttcataaactttaagttaaaactatatgtgggtgatccacttaaaattaagctttgtaaattacacctttttaaaaaatttttagccaactttttgcactctaagaatacaagtatgttcctggtttccccagttcactggcttgtgtcggcggctagaggagctggggaatcctagggaaatttaaggaacgtggaagaagcgcgaggttgttccctattgcctccacgtttctcgtcccagagactctcaacaaagcctccgacccccagcaatggtgttccccgccccagggctcactacacccacacaccacagaaaagggcgctggggcctgggtgacgcgggaaggaaaacacaacttcgataggtcgcaacttactctcctggctccagccaagaggattttccgaagccccaggtcggatctcgccgcagcctgcccggcccttttcccccctcgggcagcaggaaggagcgccgggcaggtaacgcgcacaagggcggcgggcaagtctggtcgcgaggtctagacctcgcctaccgacgccctccccggcggtggctcccctgtcccgcttgcggcacttaccaggagaagcagcagggcgtacgcgcgtcccgggctccgcgccatcgcaccctcgcctccgcctcccgccgccgcaccgctccgcgccgccgcctgccccgagcgcgcactcggctcctccctggccccggcctccccccggcccggccaccctctccctccccgccccgagggctgtcttcccgtggcggttgcgcggcccagcccagcccaacccaaaggcgcggctccaggtgtggccgccgcgagaaaatggagccgggggccggcccgggccgcttttacagaggtggggagttcagcagaggagggaggcgcggggtggactcccgcccgctcgcactcgcacctgggaccgtgacgtccttgggttggggactgtgggtggcaggccccgccccgccgttctctccttcccgaccccctactctctggagaatggcgggaggagggagcctcctggcggggctcgacctgggtagcgcgggtcgcagggccccggcccaaggacaaaagctccacggagcagagtcctgcgggaccaaccggcccagtggctgcggggccaggccgcccagcaccgcccaaaggtcccgcactttgtgattgtgctttgggcccggagcgcaggtgtcgctagtgacatggggacccgtgtcctcaggaaagctgcgaccgcggtgcgttcggcccgctctcctggagcggaggttgtggagcagaatttcaggtggctgtctccccaaaggctgctcttccctatggcccttcactgcttccaacaggtttgcagcttatctggctcaaggagaaacaatcaccagaggtcaaaaaggacaattcttgggctaggagaaaactctagggtgttacgggaaatatatatattctttgaaatgatttacaatttctattacaccactagctagatcagaggccccgctccaagagtgactagctgagtggcctggactagcctctctgggccccagtttccagatctgtcaaatggagttaatagcgaccaacgcacggggaagttttgagaacgaaattggaaaatcttaggtaaagcattctgcagtgtctagaacttaagggttcaataaataattgttaaaattagaacaacgtgattgcgaggtgagatgttaaattgacatcttgaaaagcagaaacttagtatgggcatccaaacactagaatcagcaccggattacgaaacttccaagaaatgtaacgactgaaagtaatggacgagcctattgttctgtgcgagaaaggcgcaaggggagaagaaaagacacacacaccatacttttaagggtaaacaacctttatcccaattaaatggcaacgcggatataataagcaaatgatataataagcaaattgcaatgggaaggggagaaggaaaagatatatttataggtacactcaccagactgtggaggattcaccaccacaccgggaagcaacagcctgggctccagagtcggacactacactcaccagactacagaggattctcatgaagtttcctcatggtctgggaccctagctcttatcgtaacaagttgtttggcatgagacccagtcacaagggcccttcccgactggactcaaggaacacaaaaaggtcaacttgtgtttgcgattgtctgttgtgtttcaataactaacaaataggaatttaaatagagatttatttgaaacagcgctcgatgaattcctcaaggggctcacaccacctgttctgggacttggtggccattgtttgtgtccatgttcaattgagttcaaatttaatatttaagttttcctccacattcggcttcaatctgatactcaatcgcaggaaaatacccctacagatacatggggaaggcatagttgatagagattacagatacagggtaagcacaggagaattaaaagcaaaattaataacacacccatcatggctttgcaaggagagtaatattgtgagaattgtcagggatatacacataacatccagtgcagtaaggtgcaaacccctccttgggctgcagtaagcatatctaatgcctttccatttgcaacacaacagtacatagctgagcaaattcatctgataacaacatacatccagtgctactatcattaagagcttttcttagaagtgagcttaatgttttaatttgttgctgaagcaggattgtatcagctgcaggggagaatgctgtgatag

SEQ ID NO: 1245124 - DNA, 4001 bp, Homo sapiens
ttgtttaaacagcatgtgtatgtaaaattttcttgagtggaaccaaatacatgtcatttcatagtttcctttatgactagaattatagggacattgtgcgggggttttttagtttagagaaggctcattaaatcattcatttactcattcttcaaacaattgcatgtccactctaagacagatataataagcattgagaatataaaaataaaaattagcctcaatataaggatgtcacagtcactccagaatcagaggagtaattgagagtgtcctatatgtcaaattagaaaaaaaaaagaatcccccttagcttatggtggcccaatcctatgtcctcatggcaatactatcccgacagcccatgctgcatggcccctaacttcctgagctttgccattggcttggacataggggttatcagaccacctggggttcagcccagacatttcccatctggaaaggtgggaaagtcatacaactgtcacatttctctttaacaacatcctcctttcaaataaaatcaggtactgaacacagttacattgtcgtaatagaaatagaatcttagaggctgggtgcagtggctcacatctgcaatcccagcattatgggaggccgaggtggacggatccattgaggctaggagtttgagactagactggtcaacatggcaaaaccccatctctactaacaatacaaaaaaattagctggctgtggtggtgcacgcctgtaatctcagctactcaggaggctgaggcacgagaatcacttgaaccccagaggcagaagttggagatcgcaccactgcactccagcctgggcaacagagccagaccttgtctcaaaaacaaaaacaaaaacaaaaatcttagggagagctaagaaagtcctttcttgagatctatctccctgtgacttcttgaagtccatttatctcaatttttttcatgaagaaatgaggtaaattgatgcctaggccaacccagcttatcatggaaaccatacaaattagcattaggaattgttttgacattcatttttaaggtatatttaactattttgatatctccgtgtaacagataatattgtgacttttctttttttttttttgctataagaacacagttaaggagtaagttagtctgtaacatccaggttttaaacagtctgtaacattccgtttctcttttagataatactatgtacgactttctcaatcaacagaagtattacttttctgaaaaaaatggctttaaaatgttgtatgtctttccccccatccccaaaggctgacattttcttttggcacataatagctaaacataaatacttacttaataatcctcccaacttctctagagtcaaacactgctttgattttaattctgcgattttttacttttaaaagcgtgtcaggtatcaagcccaggcgtgtagagttcttagctatatgctaagagacatgtaatcttggaaaatagaagtggctcctgtgttcttgtttgtgggttagaaaaactagtaaaagcataactttaaagaaagtgaaaatgttgtggaaaatataacctgtgattaagattacttaattcattaactaaaaaaaattctaaatggtttttaaaactcatttctttctggtttatttttctatgtaaaatacaacataaaaaacaacaaaagaaggaaattggtaatcttcacgatttcatttcaaagtgttgatttccactgcactccttttagaatttataataaagattgtgcaatcaaatataatattctttaacaagggaggaagcagggaagtttgtgattattaggaaaatccaggacttaccacgaagatggccagagcccctgtagttctggggaagagccccatcattgtctctgatttccctggtgaaaaagtccaagtgagccgctgcttctatcctgccagccgtctgcagttgatgtctaagaaaagccctctgcagcgtctctgctgctttccgaaggagtctacagatggtctgttatgcggtccctccccaccctaaaccaagggtaggtctcaccagaaacgcttgcatcacctttgctcccaggtaaaaacttagccacacctcgattcctaaagcaatgaaatcctttgttggaagctgaaagaaaagttcacaggctaaagacaaagtttaataggaaggtaccagatgaataataaattaatcatgatgtggaagtgcaaaagctagtccggactacactttgtcagtgttgatgtcttatggctgaatctagttgactatggttacaatgaaaaccgaaaagcaaagcaaaacgtacaaaatcccccaaaatctaacttgtaaaagagcatttattttcagcctgagtatgtgtgggtagatctaaagttaagcaaaatgtagatgttaagcaatgatatattttattgaaaggcactaaaaatatgaagaagaaaaacatcccattaagcaactatgaatgtaggctttgaataaaaaaaaaaaaagaaataaaattgaacagttatatggtgccttgaatatttgaaatatataaataatgcgttgcaaaattactctgataatactcaaatgacatcttttatactgtatttcttttcatttataactttcaaaaaagcctagattgcctaataaggtagattatcttggtgctcttttcattactcaagacattttccccagtgtggtgaacctgcttgctgttacatactcggaagtgcttaaatacttcgactctaacccaagataaagcagaggggaaaaattaccagccccattttagctactttgcttataacattagaatttaaagtactttttacagtttcagaaatattgaaagaaaggtttggtagaagagcaattttatctttgcaagtattacacattaggttttagaaaccacttaatcacagttttttttttgaatcggggtctcgctctgtcgctcagactggagagcagtggcgcgatctcggctcactgcaacctctgcctcccgggttcaagcaattctcctgaattgaggaggctgtctcctgcctcaggctcccgagtagtacagaaaatgaaacattattcttatttatttatttatttatttacttacttacttacttgagactgcgtctctttgtgttgcccaggccggagtgcaatggcgcgatctcggctcactgcaagctccgccttccgggttcaagtgattctcctgcctcagcttcccgagtagctgagattacaggctcccgccaactcgcccggctaatttttgtagttttagtagagatggggtttcacgtgttagtcaggatggttttgatctcctgacctcgtgatcctcctgcctcagctcccaaagtgctgggattacaggcgtgagccaccgcgccaggccaatcacagagtattttaagcagaaaggactgtgtagtctaggagttagaaaaaacatcttgtgaacaaaattttgtttttgtttctttttaaattgtggtaaaatatacataacataaaatctatcattttaactatttttaagtgtacaaatcagtggcattaaatatattcacattgttgtgcaaccatgaccattaccactcttcatttccagaaaagtcttggttttgaaataaagactttgtaaataaagttttattggaacacagccatgcccatttgttcatgcattgtgaatggctgcttttgtgttgtaacaacagagttgatatggatagagactgtatggccacaaagtcaaaaatattttcttgttctttacagaaaaaaagaaaaattgctcatccctgagttttaccatatatcttaaatggatttgtgacaaatctgatgagtgttgatgctaatagagaaataattagagaacccttaaaatctgcttccactaggaaagaaaatttcaaaagatcaaatttggtgttctctgtagagttcccact

SEQ ID NO: 1245125 - DNA, 4001 bp, Homo sapiens
atgccagaagtctctacctcccaattccagacactattaattgatatggtaagggatcttttagacaagcataaagaaaaaaaatacttaaagaactttttcacaattaccgtgaaatgtcaaacacaaagacttcaatatcaatgaggagtaggaggaattaagtattaaaaacgctagtattaccaaggaaaataaataaatactaccaaaaaaagatcctgagagtctgaagtataatactctttcaagatcaaggagaagaatcaactcttcaattaaataatattatcataaatcatgcctgtgcagaaggcaatgggaggcaagatttagtgctcagaagtggcctctaaaatcttgacacatacaattttccttacagaaaaccaaaagtttatctgagtcaaagcatgaatatactcggtagaagagtaacaagaggtatatcctcataacttactatttcaattgaagaccaagtccgattcttgcctcttcttttagtaacatttattttatttagtaaataaataatgatcattgtaacagaatattgcccttcgtcttatgtttttaagtttaaaaatatttttcaaaaatggtattgtttaataatctgtctcctaaactcagaggatgcaatattctaccactgttgtcacgttcccttttgagcttggggttgtgtgccctttggcagtgttcggctcccgcactgctcttgaagtttagaaatgtgaattccagaagagtagctctcactgtgcctcttggacaatgacgtgctcccatctctcccagccctagctactctctgtctcttacaactgatgttcagaggagtctggtataattgccacttgcctaagaataggatgggaatcactttctaagcttaggttgtagcgctaacctggatactcctgggagattgaagtgtggccaactataatgcatttgtcttaatttactttgaaaaatttgtacagttcctaataatcctgtcctcttaccctcccagaattggcaatagtttgttgattggccaactggaactttgttcttctttggagttggaattatctctttctagggtaggatatttgctatgcatgctgcctgtctggaaatcatgtcacaccttgggcacccaaaggttagaggaaagaaatataatatccaagatgccatgtttactgtaaagaaataagtcatttaaatatttctttgctggtctgtaggaatgcattcataattccagaaaagttttgtcttgatggctgggcttcatttttctttagcaatatctgactggaaaaagttctcatgactttagtatgtcatcattagttgcaatgtaatttcaacatggctatcattcctccactttgaaagaaactcatagggaaataactattgaaaagaaatgggtttgattaacttcccttcaaatttagaacccatttgcactggcagttttcacagcaatctatctgatttatttatatgatcatagaatatgaattttatttccaatttaaaattttagaatagtcctaacactcaaagtgaagtagattatgtctctgagggcatataaatttaattcagccagattctcaccccgcttctctatggcattttgttcctcaaggcggagagagttgtttgaaattaacagaggctggacttctagaactctctttgcaggaaggagattaaaaatggaataaatcccatgtagaaagcccgacagttgacagagacaagaccttgaggctgcatttccttcccacctctttaaattctacttaccattagaatgatcaaaaggcaaatgtttctgaagaagagccaatccattcctttgggtttctcttgcacgcaaatcctgtgagattcaatttgagccctcgtcttctcagttccgaattctgctctacagaaagatatgctttgagacacccttttaggagggcatgggtgataactgtggtgatctctgggcagagagatgaagatattctataatgactgtttccccaccccaaactcccaggctggtctggaagactggcattgtttgggctctgggtaagaatttagacacaccttgattcttattgcaatgaaaccctttgttggacaccaaagaaaaaccttacagagcgaggacaagatttacagggaagatagccagtgaataataaattactcacaacataaaaaataattaaaatgctagggcctatcatcatgctgaataaaattagaaggcttcttcttactgccaacattgtaaaagcaaaattacatatactgacaacacatacacacacatgtccactgcagaacccacttcaaggaatgatacttttagcagaggccattgttgaaagtcatcaggactcaagtatggtataggaagaaagatagaataatgacgctcatttcaattcagttgagtcctgcttctctctttaaaatgtcttgtggttgaaccgcactctcaattttaaagattttctgaaataacaaagttaagatgaaggaactctgatttaactagtaccagtatgtttgtttccatactttggcattttctttcttgattattcagtcaaacctctacaatatgatatttacaaaatcattttaaagtaactacaatacaacattctcacttctcatagtattaccactgataaaaagtacataatgtgggtgaggaacacattttacaccaccacaaatatttattaaggagaaactgaagttggaaacgtgagaatttaatgaaaaaaagcccagagtgggatctggatatttttgaatattatttccctttttcgtgtctcccttttcctttgttagtatgggtttgaaacagggtatagagtgtcctgatgcaaacattgcaggctggcagcaacatcaataaacttaaaagaaaatgcagttaactgttctctgattgatagataatacatgttggttggagaatttcaaagggagactgcctcctgtcttcactatcccatcactgtaattcagaaacaaggttgaccctggtaatagaatgtattctaagtattgcttagtttcttgagaaaagtagttttagtatttttggaagccagataaagtaatttacttttgcattatttcatgtcatgttgaattagataatttaatttgcctaagagaattaatgaaacaactccaggtctttaagtgacattgctttttacaagggaaaaacaacattcttctctattgttgtgtttgaaggagatatttcacaaaggtctctatcttttgtttacactatagatgatttcttctacatataagatttttcttatattttcttctaaatataagattttctatctacttgaatgctatttataggatgagttttaaagaaaagaaacaggaagcaatagaaataggtactagatcatttatgtgggtacctctagctttctccatttgaaactcctgatttcaatggtatccagaatttgaatccagattataattatgaacatatttaaaagattcttcagtaactaaggaggaactacctgaagccccatcatttcatttctgtttactccttggagatttgtgggaatgatcttttgctttaaagttttttttggagacagagtcttgctctgcttctcaggctggagtgcagtagtggtctgagtgcagctcacggcaacctctgcctcctgagttcaagtgatcctcccacctcagcctctcaagtacttgggtttacaggtgcatgtcaccacacttggttaattttaaaaatattttgtagagacaaggtcctgctatattgtccaggctggtctcaaactcgtgggcttaagtgatcctcctgccttggtctcctaaagtactgagattacaggtgtgagctactgtttcccacaggggatggatgattttacagtggaattcccaaagacaaaacttgg

SEQ ID NO: 1245126 - DNA, 4001 bp, Homo sapiens
attcaataaaaaacatattagttacataaaaggtatgcctacatgtgttactgtgtgtacctgagtgtatggtgagcacccaggtgcatgcattcacaaacttcttggaagcacctgtgatttctgccaggttcattcttattgtcaaccattcagtacacaactggtaatacaatgtcacaaggcacccagtatgaccacagaaaatttacaaagttaacacatgattatggggaaatgaaaattaattgcaattgcttgcaacctaaaggggttaattataagtattacccaaggttaactatcatttaacaaattgtctaaactgtcacaaggtcagatatttacactgaaaagcaaatattactgggggacttagtacattgactttaaaactctcttaagtcagattctttcttgagtataggtcttgcttgacaagaaaacgggggcgctgagtagtcatattcatcaggggtctggagggataaggaggactgagagggagggaaaattggacagagaaaggaggaaaggggcatcagaactgagctctgccaacttcacatttgcttggcctcactagattactcagtagttgtaaaatcaaatgactttatcaatataatgcccatttttcattttagaagagtgacacagtgtattacttattctcatcaaagttgaatgaaaaatccataagaagcccttcattgtttgtacctagtttagccaacttagttcattagaatctggtctatttgacaagacaaaaaactggccagttacatttaacaactgttcatctgtgcactctgtaataacagcgtcagcagatttattttccccatataaagtagaatttccaattcacaccatgtactctgtgactattatggacagtatttattcagaaggaatgctgtgcaagtttggaagagctgtctctaagagcagagggagaggtcatttgacaaaacaagaaacaaaacctatacatgggcaaaacatgaagagaactaaagtttgtcattcttttcaagaagaagtttgaagtcctaaaacagtgcgacaatagcaaaatcagacaactcttcctctcccttgtcttctctcaagctctgtaaaatcagaacgcctccatccacttagcaaatttcagcttttttttttttcctgaaggaggggaacctgcttggaattaatgagataacactaaaaaataacttctattaattcttctcttcctgaaaagtgcctattttttttctcagttgctttttaaaaagtagaatatcttctaaaggctccttacgcagtttaagccacctttagagcacctttcctctcctttttcctttttttgtttctcaaattgggaagtgacttagtaacatgcaggggaaactgaactccatctcacaataatatagtttcatccaatggcataatagacacagtagcattcagtctgtgttgtgacataaaactattgagattgtaactcagtaaactcatagtgcttaagagaagaatagagggaaaaacaaataaggataaagtcaaaactgaagttacagacttgcaatgtaaatttcaaaactaagcaaaaatcctctttctgctgcacaaaatgtaaaataccaagtatcttaagaaaggtaagcaagctacaacactgaaaaatcttgaccttttcattcacacagataaaaagaaaaattcaatattaagcatcccagaaaagcgatgcactttaaaaaccaatcttttcacttaccctagaacatgcacaccatgatctcttaaatccttttaattccagtacatccagaacatatgtgaattctaagcatattcatttaaagaacaaacttgaaccaaattggtaattacaacagagatcataacagaactctctgaaattctagggagagctatgagtatgaaatccagcctctagatcctggtgtgtactgtgtctatctttaacttgaaaatgatttggtttcacattccattgaagtcccactggcagatgcctttggtaagctcgccaatggcaggctttcatgcgccctccctccccgctccctctgactgagcttccgctgttacatctaatgctgatttactcagctgtctttttacctgtctctacgtgggtaaaaggagatgctttcattgacggatattacggaaacacttggaagctgaacatcagcccgaggactcactatgcttcccctgccatcccctccccctactcactgccagaaaccaactgacttccaaacttggctgcctgaaaaagaatgttctctgattggcattcctggaagcagaaagcaaggcagctcaagttttgtactgttactcagcatgaataacttcccaggtacacaaaatacaaatagtaaattttttttcttaactttgaggagggcattaaaaatattttcattgtaggacagcatttaagttttaatgtccacatgtaattttacagaggatggcaatggctgtagtaagaaagagaaatgacaaattttttgttaaaagttgaatgagtcttagtaaatgagttgggatccgttagaagaggaaatcatcatgccgcctgcttgccagtgttttggagggcaactgttcaatctgtgcattttctgttagagaaaaacttgttgtaagaattgtggaaaaactgatttcaaccaaacaggagagagtgcaaaaaacacttctatctccccactgaaacttctttttcaggactgtcttgcaaaacttgagtgcggactggaaaacaaaatgtgtgtgtgtgtgtgtgtgtgtgtgtgtgtgtgtgtgttatacaagtgtatatctaaaagaagagaaattgagtgaatggaaacaaagaaaaagatacatttcatcaaatagagactgacatgaattaacaacatggggtccctttaaatcaccattaattaacttgtgtttaatatttattaatatttagtggtcactggggccaaaagatctcctgcctctgaaaataactaacctctttatgttcaaaacatgcaattctacagaccacacaacttcttcaaaagcctaatgaaggctttataattttggtaattggacacatctcaaccctaagcatttgggggtttccaaatttcagctagctgtggctgccaactctaggcaactgtcagctggctgggctcagggtggtggtgtggctgcagctgctccttggaacttatgtggacatctcaaaaatattcaacggcaaaacgtagatgccagaaagcaagctttctgtttttgtttgttgatggttttgaatcttctattttgggttatattttatcatatctagggcaataccatcttaagaaaccatgagggaaaacttgattaattggcatcatattactagcctattttagtgatattttgatgccccatatagattggtggcttaccagcttttagccttttagcctaactttgttactagatgtcttttaaaaagatcaaaagatagaaacagaggagtaagaaactttccttatttttgtccccaaagttgacagtttcttagggaaactgcaggctctatgtaatgctgatagacgggcattctaatgacttcacaaataaatgggaagaaataaagcaatagtccagaaagtacacatttctgtcactgtgtttctttatccctctgtcaaaaacacgccttcccaaggctaatggatggtgccaaaacacaaatgaactaagaagggtggacagacgtgcggccatcaatggttcacattcagctgctctgttcacctctgttgtatctcagagtgagcactagcacataactgatactcaaaaaatggttgttgaaactgaagaactgctcatgtgcaagtgtatatcttaacctatggaaaatggttatttgttggcctacatcttagataaatatgttttgtatttgtcttgggaaa

SEQ ID NO: 1245127 - DNA, 4001 bp, Homo sapiens
ggtaagagatcatttacacttttatctttaccttttgtatatcttttcatttttttgtctctctctgtgtctctgtcttgcttcttctttccctcttttatttttcttttaataaaacataacactttctacctcagatattgtcagtttcaataatttcatactttagaatagtttaccaggtaccatctttcactgatttttagaaactccctattctctagtagtaacaacttatgtttatgaaaatatctcatgttttgaaagacatggtcatagctcatttgtactcaaacaacaaagggaaaaagaaaggaataaattcagatacaagcatgaacatttacaatattagatgctattatagtacttttgatatctgtcatcatggaaacagttctctttatttgaaatcatggcaaataatttttttgaataatgattataattccttgcttaaacttagaaaatggcttggacatatggaaactagagagatcaaggaaatagcgacgaaaatcacagagcataaataaatttaataaaatctaagttttccttttgtaagaaagcatgctgtatgaacaaacttgggaaaatttattggcttttatcctaattagtgccaattaagggcacataattgattttagttcactaagaaagtatttttcaaaaagattttcctatatctgcactttttcaggtggacagtgaatacactagaataacagtagggctttgctactatttaattaggttttatttctaaaagctgctaagacagctttgttctaagaggaaggaaagaagttgcattaagtaaacccctggctaaaattagagtaaatcctaatatcttatgagaaagtcaaacatcaaacatcaaacatcagtaaaagccatgaaaaagtaattaaaataagttattattaaagaaattgttctcctttaacttgctctgtgtgtaccaaagcctcccattttgaaacaagctgccagggtgatatgtaaacaacgcatgagaaggcgtctgcgctctgggaattgatgctccacacagccacactgaattgtttacattcagttcctaccagcctctaagcaaaagagttcattttgcactcacccatgttgtatttacttctatttttaaatcctgtatcacacatacagccacaatgcctaaaagattagaatgctaatagaaataatagatgttttaaaaaatatagataaaaccggactatacatgttagatgaggctcgcaataatatgatgaaagaaaaacaaaagctcacatacaataaacacactagataactttgctggaaaactttgtcctactgcttaatttagtagaagagacaagtagctttggacaaatgccactaataaggtgtcctctaagaaaagcggaccattttcaaaaaacaaaacaagaaaacactttgttcaggtctacgctgatttgaagacaccagttattgcattcttattacttcctttgcagttttctttctttgacttacacacacacacacacacacacacactcccacacacacacactgccataaaactataacatttcacaacatcttagactttcaaattaaaaacagctgaaaccggaggtggaggagctaggagggtgggcaggagaaatttatcgggtgcccatgtgggggtgggggtgggggcgacagtgaaattccacccagcaagttatgccactgcgacagaagtcagagagttcagtttcatagattcaattgtaccttacctggttttgtagttaaatgcaccaacatgccccttaattcttcctctgaagtactacatatgctgaaaactatagtatttgaccttacacatttccaaacaaactccaaagtaacctttaacttcaataaaaagctgtgttcattcttccccttgtgctcaacacacagcaatctaatacacctcatcatgtggtccgttaccatggtagcaatgaatccagctgctgaaatacaaaagactgacaaaaagttgcttttttcccctccacccaccctgacaaagtcagatttttttttctgtatgacaagtctaatttgaatatgcttctcttgctgactcaacttcatgaacaagaaaaaaataacagaagtataagaataaaaggtttcccaactaactaatgaaatatctctatgcattttaagtcaccattaatcttttgaaatactgatcattatctactacatcagccaactaaatatttttaaatgtcagttactaactcaataggaaatgcagcaataatcccacagctcctttagaaacattaaaaaatgcagtaatgtattcagtaaacacagatgctgaaaacactacatcagtgtatgaagggctagtttcaaagtgctttttttctagagcaaacttctaatcacagcttagatgtgggaggtaaaattcttcattttcttttcatcaaaaccctgtgtttaactgttatttaaacagatttcagttcttttaaaatttatcatttaaatttaaagcaggcaacacagcctgctggaatcgatcaggctatatttgctgaggtggggagggctctatattaagagcagcagtcttggatttgaaacgatacaaactctgagcaatcctgggactccccaaaccaatggctatgtagttaggatttaaggaatcaccttcagcgcattaccagtcctttagggaaaagctgaaggagtcccaggtgactggagcttccccgcttgccagcatgtcagcatggtccttcctcccaccatggtacattaatcagccagtgggtgcccccgtcctccagggatggctacttcatccctcaggcctcgcataatcactctgctcttgcacaaccttccttatttcccaaacttagcttacatttcacaataatttgtttgcatatctatcttctctctttagagatggactcccagaggaacaggaacattgtcttactcatctttctctaccaagtaaccatcaaaagacttggcactaggtagggctacttcttcaatggataaagatggcatctgaaagctttccctcaactcctccaggactgtcttcagagcatggcttgctgtggttaaacccttcagagatctgcacagaatttttcttagtacatcacatcacaaagagaggcaaggcagaggagttcttaagaagagcaattgtggaatcaagcagatgcggatttgaaatctggctctagcccatactacttttgtgatcttggataggttacttaacctctctaaccctcagtttactcttctgtaaaattcctactttaacaaggaatggaaatggattaaatgagatagtccaagggaagcaccaagcttgaagcatactaaatgctcaataaattctggctagtattatttagtcaatatgtgatttttgaacaagagggaccatgagaaagctgactggcacgtgacttccctttgctgaataaactgtcattttcaacaagatgtgcattaacaatcctatgtttcctaacataggtttacataacaacacagcataaatatagagacctttttaggcaaagagcaagggctgcttgctccaacctacaaaccagctaggagcaactgatcagtcagaaggttaagcatatttctagtatgaaatggactgtgggaagaatgttaaacatggtagttaatttttttcatctttaaatatggaagaaaaacacaagtacagcagttcattgtggtattcattttggattcttaaaaaatggtctatatgttatttgttaatgatactttctcaaattaagatgaactgtaaagaatcttcatcataaagggctttaaaatataaattatatacatagattacatttctagtaattaaccaatattgtgtcaatagaagcctttacaaggtcaccttgatctctaacaagtactgtaaactg

SEQ ID NO: 1245128 - DNA, 4001 bp, Homo sapiens
tttgtgaggaaataggcttggaatgaagatgagtggaagattttgcgggaatccaggtgcaagaaagatgtttcaggtgtggctgaacacatccagttagaagtgaaaatggaacttcaatctgagtcttcagaatttaaaattcaggttatttccagagaatcacgctgcctcttcttcgtttagattgttgggaaatttatcctgatgttatacagtcaaaattttataaaaagtagcctaccacatacattaggttggtgcaaaagcaattgcggtttttgccatttgaaagtaatggcaaaaaccgcaattgcttttgcaccaacataataataaaaccttaaccatgtttttcctttccataagaaaccatttcaaattttgtcactttcttttatacctagagtccataattggtaatataatgaagtgactattgtcctcattttttaaaagctaagtaataagagcattgctcaagaaatccctctggcttttgttaggagatgtaattcttagaacagttaagacagcagcaacagcagctctttgccccacaaaccacagggccttctgtcctctcaaggagtctgatccttctttgtacagatagtgccctggaatataatgttaggtctacaacccctaagaaagaggctccttatgtagatttagcatttatgtaaaacaactaaatctgattagttttcaaacatcaaatcttttaggatatggggtagaagtttgaaaactggtaatatgctaacaataagaaaatagaaagttttagctcctttcttctaaactaagttgtagttcatgatccgtgttaatgtatctatctgtcctcagcatgacataaacaacagtgaggagttgcattggaattggcaagttctcagtatactcttccttagtgaagaactgttgcttgaattcagaatctgaccggtgatgaagtactagtatatttacactgaatattggttcccaataataattcctaggaagaacattttgatttaagatgtatattctgaagacttctttaagtaaagactaaaggttgaattgaaatatattaaaatatagaaaaactcataaataggttggattttcttgtgacggaactattccaagaggtgctggaagggctgatggtatatcccacaagaaccaatctgtacaccttacaaaaaccaatccttgaagagatgcacgagggcaacattgctggaactgatctttgagtttaacgaagataaacatcagtaaatcataatccatttgaacagtgagcacatggagtcacatttcctcccacagacctggtaccacatgctcctgagaatacatctatcacacagacactcacatgccacctttgccaggttggtcactcacactcttcatgaaaagatggtttgctaatataaccacaatctcccctccccaccctctgcagaaaagtaaaatggaacagtattattaagtccacactctcctctcatacttgtttctttaatattctagtcacgcacttaaaagaactccagaatctaagaaaaataaaactaacaataatttttaagccgtttccacaaaacaaaacttggaaaagattttaacttactgtgaatgtaagattatgttccagaaggtccttgctattcagttgttatttaaatcagtactgaattatctatattccaagaagtaacatagttttgagtcttcctatattttaaatctcaggaagctacactgggttccaacagaataagtaagagcacgcagtagggtggagagtgggaggaagggggactgaatactagacctgggatggaaggtaagtttgccctttaattctgccaccatccttgatattccctttaactctgggcaacactcacacatccaactccaagtattgcctggaccttgccttacccatgacgtgtactctttcatttggtgctggttgctatgagaaccaccggcatgtcccctccagaagcagtcctgacagagctggtaattgtgacactgttggcatcggtagcgaaatcccatcatactctcactgtggcagtaggaacactcaaccggatggaagactaagggggaagtaagtgaagaaaaaccaagaaaacaaaagtatgaaccagaagaaggaaaaatacagccttacaggaattgcacctttcttctctgcaccacgatttcagatgatagttgatttgggctcagagaaacatttagttcattcctggaatcttacaacccttttcaatcatgcctgtggggaaatgaaatgaaatgggatggagaagaggtgtccttttaacaacaaaaatctctgtaatgccatttgctctttctattcccatctctcacattacaagaatttaaattagccaaacagacttgcctttaccccaaactgctctctgtctccaggagaccagcacagctcactggaagactcagaagcacaaggggtgaatgctgattgtccagtgggaagagagcgaatatcagagacacggagaatgagaggaagaaaaaagaaaggaagatgggcagagaatggaaaactggtgtggatgagataattaagttattttttaaaaaatagagtgactaatggcttacttaacgagtggtgttgcctacatctgacaaacagatttttttttctttcctgaggcaggtgtatagggccctaaaaaagatgtgcaaattatctgaaaacagttctaaataattcaaatgcctcaagagacggttaactttctttggtaggaaatttgaattataaagcaggcaaagcaaaatactagatttgaagcaaagtaaaatattagatttaagtgatcaaatccaagtaattgtctacatgctatgagctagatactaaaacaacaataacaattcttgcctttggtaaagctattctccggcctaaccagtcaggaaaaacaatgaaaataataataaatgaagataaaaagcaaagtgtaaaaacaaagacataactagctctggacgcattgtcttctaaacaagtgtcataacctttcttcccggctcttgagaaagactagagtgggacttcaatctagggacaactgttctgggatggtgcctaagaaactgatctcctgcagcaggaaatgctgagagagaacgaaagaaattatagctttatgattggaaaatgactagttctagaactgtaaacagtaacgtgaactcattttgcataataacatggaccttgattgctcttcgcttctgcatatggataaacataaaaaaactatgattgttagtgattgcaaaaaaataaaataaattcattctttaaattttctccatgagaaaaacaggataaattcataacttctaactaacagataaataagggcagatgctaaaaattctgaatgataatttaaaattaagctaactttagctgcaatgtatattaaagaaatacacagaagttgagtaatatatagagacttaagttaaatctcagtaagagatagagactaaattatttcctcgtcaagtctggagaaatttcagagttacattgaacaataagtaggaacacctaaagattagatggaggcactgaactgctccatgtttaattttctgtaaattttgccccaaatggtatttcatatttaaatctggatatgccaacagtagttccttttatcctagaaatacttgctttaaaaaaagacatgatacgaaagttattttactcttatctttaacgtaagtacaactattgaaagctcacaatctggaacatatgactaaagattaacagggtgctatcatctatttttttttctcatttctcccacctatttctggctgagtgcctgggaagaaataatcagtaccgtgtatgcaaatatgagaaattcggatctaaaacaaatacaaaataatgtcacactccttgttgaagttcg

SEQ ID NO: 1245129 - DNA, 4001 bp, Homo sapiens
gcaccaacataataataaaaccttaaccatgtttttcctttccataagaaaccatttcaaattttgtcactttcttttatacctagagtccataattggtaatataatgaagtgactattgtcctcattttttaaaagctaagtaataagagcattgctcaagaaatccctctggcttttgttaggagatgtaattcttagaacagttaagacagcagcaacagcagctctttgccccacaaaccacagggccttctgtcctctcaaggagtctgatccttctttgtacagatagtgccctggaatataatgttaggtctacaacccctaagaaagaggctccttatgtagatttagcatttatgtaaaacaactaaatctgattagttttcaaacatcaaatcttttaggatatggggtagaagtttgaaaactggtaatatgctaacaataagaaaatagaaagttttagctcctttcttctaaactaagttgtagttcatgatccgtgttaatgtatctatctgtcctcagcatgacataaacaacagtgaggagttgcattggaattggcaagttctcagtatactcttccttagtgaagaactgttgcttgaattcagaatctgaccggtgatgaagtactagtatatttacactgaatattggttcccaataataattcctaggaagaacattttgatttaagatgtatattctgaagacttctttaagtaaagactaaaggttgaattgaaatatattaaaatatagaaaaactcataaataggttggattttcttgtgacggaactattccaagaggtgctggaagggctgatggtatatcccacaagaaccaatctgtacaccttacaaaaaccaatccttgaagagatgcacgagggcaacattgctggaactgatctttgagtttaacgaagataaacatcagtaaatcataatccatttgaacagtgagcacatggagtcacatttcctcccacagacctggtaccacatgctcctgagaatacatctatcacacagacactcacatgccacctttgccaggttggtcactcacactcttcatgaaaagatggtttgctaatataaccacaatctcccctccccaccctctgcagaaaagtaaaatggaacagtattattaagtccacactctcctctcatacttgtttctttaatattctagtcacgcacttaaaagaactccagaatctaagaaaaataaaactaacaataatttttaagccgtttccacaaaacaaaacttggaaaagattttaacttactgtgaatgtaagattatgttccagaaggtccttgctattcagttgttatttaaatcagtactgaattatctatattccaagaagtaacatagttttgagtcttcctatattttaaatctcaggaagctacactgggttccaacagaataagtaagagcacgcagtagggtggagagtgggaggaagggggactgaatactagacctgggatggaaggtaagtttgccctttaattctgccaccatccttgatattccctttaactctgggcaacactcacacatccaactccaagtattgcctggaccttgccttacccatgacgtgtactctttcatttggtgctggttgctatgagaaccaccggcatgtcccctccagaagcagtcctgacagagctggtaattgtgacactgttggcatcggtagcgaaatcccatcatactctcactgtggcagtaggaacactcaaccggatggaagactaagggggaagtaagtgaagaaaaaccaagaaaacaaaagtatgaaccagaagaaggaaaaatacagccttacaggaattgcacctttcttctctgcaccacgatttcagatgatagttgatttgggctcagagaaacatttagttcattcctggaatcttacaacccttttcaatcatgcctgtggggaaatgaaatgaaatgggatggagaagaggtgtccttttaacaacaaaaatctctgtaatgccatttgctctttctattcccatctctcacattacaagaatttaaattagccaaacagacttgcctttaccccaaactgctctctgtctccaggagaccagcacagctcactggaagactcagaagcacaaggggtgaatgctgattgtccagtgggaagagagcgaatatcagagacacggagaatgagaggaagaaaaaagaaaggaagatgggcagagaatggaaaactggtgtggatgagataattaagttattttttaaaaaatagagtgactaatggcttacttaacgagtggtgttgcctacatctgacaaacagatttttttttctttcctgaggcaggtgtatagggccctaaaaaagatgtgcaaattatctgaaaacagttctaaataattcaaatgcctcaagagacggttaactttctttggtaggaaatttgaattataaagcaggcaaagcaaaatactagatttgaagcaaagtaaaatattagatttaagtgatcaaatccaagtaattgtctacatgctatgagctagatactaaaacaacaataacaattcttgcctttggtaaagctattctccggcctaaccagtcaggaaaaacaatgaaaataataataaatgaagataaaaagcaaagtgtaaaaacaaagacataactagctctggacgcattgtcttctaaacaagtgtcataacctttcttcccggctcttgagaaagactagagtgggacttcaatctagggacaactgttctgggatggtgcctaagaaactgatctcctgcagcaggaaatgctgagagagaacgaaagaaattatagctttatgattggaaaatgactagttctagaactgtaaacagtaacgtgaactcattttgcataataacatggaccttgattgctcttcgcttctgcatatggataaacataaaaaaactatgattgttagtgattgcaaaaaaataaaataaattcattctttaaattttctccatgagaaaaacaggataaattcataacttctaactaacagataaataagggcagatgctaaaaattctgaatgataatttaaaattaagctaactttagctgcaatgtatattaaagaaatacacagaagttgagtaatatatagagacttaagttaaatctcagtaagagatagagactaaattatttcctcgtcaagtctggagaaatttcagagttacattgaacaataagtaggaacacctaaagattagatggaggcactgaactgctccatgtttaattttctgtaaattttgccccaaatggtatttcatatttaaatctggatatgccaacagtagttccttttatcctagaaatacttgctttaaaaaaagacatgatacgaaagttattttactcttatctttaacgtaagtacaactattgaaagctcacaatctggaacatatgactaaagattaacagggtgctatcatctatttttttttctcatttctcccacctatttctggctgagtgcctgggaagaaataatcagtaccgtgtatgcaaatatgagaaattcggatctaaaacaaatacaaaataatgtcacactccttgttgaagttcgccttctatcgtgccaagtcttttaaccacacctgacttgtaattgagaagaagaccatgagatttatttttggaactgacagtcctaatttttcagtggtcctttaaggccttcccgaacagggagatgggttagttctaccctaaacaaaactaagagccactaaataggcttccctaaaacaacagcctgggcttactaactgtagaactaatggcctaatttcaataatttaaaaaatcacctttgctccttagtaactactcaccattttccacatttgctagtcgatgcagaagaggcaaccagaccagacactgc

SEQ ID NO: 1245130 - DNA, 4001 bp, Homo sapiens
aaacgttatttgccataattttagtattgaaagttagaagaagaaaaagtagaaaaagagttaattgttctgaacatgcagcacatacctattaaggttcatcttcatagaaagatgtggtcagtatagaagactttaggtataatgagttgattaggggcgcatgaaaagcccaactagactcctaacacttaataaatgtatgaccttgggtaagttattttatctctctgtgcccggattttctcacctgcaaaagttgtttaataacattacctactcccttggtggtctaagaattaagacagtgaataaatctaagccatatagaaccgtggaacatgtggaacacttttttcctaaagtttccacctttggaataagcaaaagaaaaaaaaaaccattattttttaaagaaatcagtaactgtacacttcaacaatacaagtatctctgaggttcaaaaggaaatacaaacacattaaatgccaagtgatgacatataacaggaaaacataagcatcaactcaaaagacaatttttttagaataagaataaatgtaaagcatggtaagcttcactgcaaggcacatccaatatttgcgcctcccctgccccctccccctgcgcccctcacggccaagttctacagttatctttccaaagccataccccaagcctactaaacagcaaagttttaccttcaagtcccaggagtggtaccactgagtcccagcctcgccgtcgccacccctcttctctctttggctttggtcttttgacagacacctctcttcaactcccactccggataccagaacgaacctcccgcctgccctctgtccagcagaaaacttcgaagtgggcaacaggctataaaagccgaagacactcacccccgtgcccacccgcccccgccgccccccgtccccggggcccggagcccactcccacccaggcatcggcccgggcaccgcagtgcactgcaacacgaaaggacgccgctggctgcaaaggaacccaacgcggatgtcccagtcagtacccctcagactgttccccgacgtgagtatcatccctaatggaggtagacactccacctcccaccagctcagcccgagaggatgaccaagagggcagcgaccacaacgaaaacaactcaacccgcgacgcgaaggagccggctgccatagccaccccccgagcggcgccgcggcagcagcaggggctgcggcgctgcgaaggccttcgagggcgggggagatttacctgcgcggccccgcgcccccgggccggacatcctgcagcagccgctaccgccgccccgcgggcctgaggcgccgcccgccgcccggggaggcgccgcgccgcagtcctggctgcggcgcccggcacatgcttcgcgctagccgcggccggcgccggcgcacaggtgggaaccccgtgagtgggcgttgaggcgaatccctgcccccgccggcgctctccgcccgcttccactcttgactttgctcggtgcgcggcgcctgcccttgctccagcgccgagccgcctgtgtccgcgccccggcgccgtgggcggctgcggtccctgcgcagccggggctgcgcgtcatgtgcacctcccgccccgcggcgggctcctctgcaccgggcggccgggggcagcgcggcagcccggcctcgcgcccactcctcgcccggcacacggaccccctccacccccgcgccctcccccactccggagctgtcaaagaagaaaacgccgtgcacacaccttggaatggacgggcgcttcagtcactgactcgccaaactcttagaaggtgtccattggtctgcagggaggtttgagcctggagtaggagccgctttcttattatttaataatgttggaagtgccgggtccgctgccagagttgtgggtcatgtgggcacagcagaggctggctgctgccagtaccagggtttcctgaggatcctgaaactatgatctcatcctcctcatccgcctcccccgcccctctctccgcgggcgcgcacgcacagcacacacacacacactcacacacacactcatgctgaatgcactatcttccttcctggaccgaaatattcctctagggaaatagtgggcacgctcgtcattgaaaaaaaaaaaaatccttcagatagagatttttctcttccaaagcttgatttatgtgctttgtttatttcctacagttttccctcacacgtgcaggagattggaacagagaatcaggtttaaaattaaaaataattattctcttatgttgacccagattttggtcagaacccaagaacttaaacagtacaatttcaatttaaaacagaggcaaaatatacaaggcttgaatatggaatattcttagatgtatgcagtgggtttctttcccaagctgcaaacattccccaaacattacctcatttatttgcagagcatctttgcagaggaggtggatgaaaaggcaaatagtattgtcacttcagagacacagaagcataagtaagataacatgacctatccaagtacacataataagtcagtatctcactataaatattaattgcatagctactcacaggttgctttttcactatgatcaattcccagatacttagtttactgaaaataatgaaaacattgttgattatttttaagttaccaagattgaaaattattttatcttactatatgtatgttttcatataattttctcttgtattatatttccaatttcacgttttcatataattttctttctttttggaggaatgtggcatgtatatgcatacatttatatccaattgcattgtttaaatccttagatagtaatttcaagcaattttagccaatgtttctgaagtagtcaccaatttcataatttgtatatgtcattcaaacccctttcacctggtgtatgtgaagagctacgctacattttgaaggatagaaagaagtttaatataagtatctgtctttagtttacatctagttgttgaaacaagatacatatactgaatgactgcagataaaaacctttattattttggtggtgtgagttatcacaaagaaagtacaaaatacacttattttctttttacttaatttctgttccatgttcaaatcatctcatttgcctatgtgccctatatttcaatctgtcattaaccctcctaccttctaaatggccaaggtaattatgtctaaccttgcccttctcttacactggcaccatactcacataaacagtaaatggggattgttttatgtcgtaaaatttcccagaaggaacactcttgggtagcttctgttcagtgtagataaggaactccagcagctaactagccttctaataacccaaaaagaaaacaaatagtatgaaagagagaatggtcagagaaaaggcagaagagaaagcagtcaagaggggggaaaaggagggggaattaagttacaagataagaaagaagagaaggaaacaaaaggagaagaaaaagaggatcaactttcgtgtgaaagctaaaattttccaaattttggtgcatggaaaacaaattcaggaaattgtagactttcttattgaatttttttttcctaaacaaacttacaggaatttggtggcaatgacaccaggtgttggttctgcagaggatgtgctgaaagatctcaagtttttaaaaagtataggatccgctaaaagaaatatgtagacctattagtatagtgtaataataaaaatgacaatgggatcaaatagccatggtatataaatttttaagaagaaattaacactgaaattaagggagatagatgggaaagcaaaggcactggtataataaagtaggcaatgaagagataagtttgcaatatttaaagcaaaataatattaataatatattttaaagcactttcagatttttccagatcttttcatacatttttatggagtctaataataatcagaagtagtcccc

SEQ ID NO: 1245131 - DNA, 4001 bp, Homo sapiens
atataaacatgttgctcaaactaatgaattattaaggtcagacgtatttagctgtttttgccaacatttgagttggaacacccagggaggaaagatatatatttgtttggcttgtttatctattctgaccgttaatcacaagaactcacagaactaataaagctgcaagacatcactgtgatgtttctatgaaaacacaaagttataatttgggaaccgaatgcacaattttcctaagtctctgtcacttgaagaaaaacttagagttgtcttatttctatgtctctaaaaatcatatcgagctttctttgagttgggcaattttaatccaatagacatttgtaacatatgtatttgtctgagccaggcactatatcaggttcagaaagcactgggatacttaaactcaaagaaggatttacaaaatcattgaataagcatacttttatagttcttacagtgtgctgtctgatacagtctttagtgttataatgataagttcaaatatttttccccagattttattgcctttttatggtaaatattttttttctactgtgtctgagaagacattgtcccatgatgtcttataatataagacataattttatgcctttttaatataagaatgtgctgttggaggatacctgtgctgctttggattttgtttagatggacaagtactcactaggctccttgctctgttggatttgtaactgcacaaaggtcacaattccaggtgaagacacagtaccacacatggggtctaggaaattggaaggcctggctgaaactctcccaaacactctaagcacatctctaaaagtggaaaaagcaaggaacacgactgagattccccacatcaattttaattttctttcctccttgttagttctaatgctatcttggtaccaccagattattggggaatgataaaggaaaatatgaatcttattatctgggactttcctttttctgttctgaccctcattcttgccagtcacttccaatctttagtagaaacctaattttgtctactgccttcttagggaaaaaggcttaccactcactcttgctcatcctcattccgtatgcaggaagaagagataaaaagacatgaagagaaccatgctttttcctttataatattcaacttgagatgtgtggttttctccctaatgtcaagttctttttctttatgaataagaaaaatggtctacaagggagatgctaccaaccaattacttatacagcaactgtgcacttacataaaccaatagcctttattgaatagattcttcactggagtcagtaacttagtttggtttcccttgtgtagcaggtcaactctaagctccttttatcttttattttccttagtatttttaaaaaaaccagtttgcagaatagattctccttttctacatgaggtctgaatgacaagtttatagtttggtccagtaattgtgcctaacttctcctttccacataaacatatgatatcactttgcagggaagaaagtcaataattcatttcaaaaattttatctagtgcctacaatatgccagctgctgtgacagttcagggtgatgaacacagactttaaagtttagtggactgtattaatgtcaacactaaatagtgtttatcaactgtctgtgtatgtgcatatatgtgtgaatgtaaatatataaatctataaacattttcttccacataaaatagacagtctaatagcaaattaggatgaattactgactaactgaactcttgccaagtaagaagtaaaaaaggccaaaatgtacacttcatgaaaggaacttaggatcctaaggaaaagtacaaatatcataaagataaatggttatttctagcctttccatgagtattcaatggaaactatagggtgttccttaaaagatccatacttactcatctctgcaaacagctgtcttctttctgccatggtatttcctcttttcccactatcttcaatcattctatgagacaaaatagttacaatgtgtattatcctcacgctattgaggcaagaagccatttctctgtaaacgtacttgctgtacttgtgacacaaacacatagaaaacctatttaaaactgtttgttttaaaaagtacagctttagttttactaacctaaattgctgcgcatatttttccatatatattattgttgtagttgttggaggggggataaaatttttattgtctaacataaaaataactactgtagcaaatgaccttgtgctataactaaatacaacaatctaccatctgttaggtgactcgtttcccattcagtttctctttcaattttaagaatacctatgactggagaacagatattgtggatcccattcaacagatgatgaaaccaagagtctgatggacttggtgaatgaaggatgcagacgtttggattctaagaccagtatggcttccatctcatcctgttgccagttgtcccttatacactcaaaacctcaatttataaacaggtaattttctaaatgttcatttctaagttgagtgtttggaacttgcaacagttcctgtatataacaacttcatgcaaggtggttagattcaaatatctttccttaaccatactattgtctgcagtggaactatttaaaatatactactaaaatgccaacagttaaaacagagaattaaaatgtgatagaaaaaataaacttcagcttgaggaaaaagaaaataatgagaaagttaatggatatgtttaatcatgtagagggctttgggctaaatatcaagagttttagaggctgacggatttgactttttattgcatctaattaaactttcaaaaaccaaagtttcctctcatgtgcacatatatagatgcacacgtatgtctaccacactgacttctgccttgattctcaggcatagttaacaaaaggtgtagctgcatggttttttgcctatggctatggcccctgctctttctcaaatctaggactctgtccatgctcttttttgacaggattgtcctctccctatgccaagctaacttgctgtcacccttcaaatctcagtttgtctatcttcctctgaaatcttccccaactttctacaactgcctgggtttggtgcctgtcctctgcacctccacagcacacaatgcctttcaattctgagcactcactcaacaaacagcatgttcaccacaaaaaataagttggtgaggtgatggatatgttaattagcttgactgactcttcctacaatgtatacacggatcaacacattacattgtaccccataaatatacactataattatctgacaattaaaaataaacgaatggaaacaaaacaagcctttactgagtgcctttcatactccaggaaccctactacactttgagtgccccacagtgatcaagccaggatcacactgtcctatgagcgcatcacagtgatcaagccaggaccacgctgtcctctgagtgcactacagtgatcaagccacagtgcttgtcctcaaggtgcttatactgtagtggcagagataccgaagcataaaagcaattaagacacaatgaggtaattatagccatagaagtggaaagaaaggtgtgaccatgagaggggttgatttcctgaggataaatttaacaaaactacagcagaagactgctcaaaaggtaatgagctgtgtacaaaatgactcacctgagggtaaaattaaaaaaaaaaattggtggtaaaagtgatgtttatcaaattggtccagtagcctgaccagatgcttttatgggtgaagcactatttgcccattgccaggaagggagggaaggacgtagagtagctttggtttatggagtcaagggaagagtgtgcacatattaacaatgggttagataatataccagggactatcctaaataattattggaaaggagtagagttactaatgaagcttcatcaatttggtaacaatttgttgctgaa

SEQ ID NO: 1245132 - DNA, 4001 bp, Homo sapiens
gacagcatcagacctgattctagaaggactgctctcacttaagaacagaaaatggtttgtgaggaaataggcttggaatgaagatgagtggaagattttgcgggaatccaggtgcaagaaagatgtttcaggtgtggctgaacacatccagttagaagtgaaaatggaacttcaatctgagtcttcagaatttaaaattcaggttatttccagagaatcacgctgcctcttcttcgtttagattgttgggaaatttatcctgatgttatacagtcaaaattttataaaaagtagcctaccacatacattaggttggtgcaaaagcaattgcggtttttgccatttgaaagtaatggcaaaaaccgcaattgcttttgcaccaacataataataaaaccttaaccatgtttttcctttccataagaaaccatttcaaattttgtcactttcttttatacctagagtccataattggtaatataatgaagtgactattgtcctcattttttaaaagctaagtaataagagcattgctcaagaaatccctctggcttttgttaggagatgtaattcttagaacagttaagacagcagcaacagcagctctttgccccacaaaccacagggccttctgtcctctcaaggagtctgatccttctttgtacagatagtgccctggaatataatgttaggtctacaacccctaagaaagaggctccttatgtagatttagcatttatgtaaaacaactaaatctgattagttttcaaacatcaaatcttttaggatatggggtagaagtttgaaaactggtaatatgctaacaataagaaaatagaaagttttagctcctttcttctaaactaagttgtagttcatgatccgtgttaatgtatctatctgtcctcagcatgacataaacaacagtgaggagttgcattggaattggcaagttctcagtatactcttccttagtgaagaactgttgcttgaattcagaatctgaccggtgatgaagtactagtatatttacactgaatattggttcccaataataattcctaggaagaacattttgatttaagatgtatattctgaagacttctttaagtaaagactaaaggttgaattgaaatatattaaaatatagaaaaactcataaataggttggattttcttgtgacggaactattccaagaggtgctggaagggctgatggtatatcccacaagaaccaatctgtacaccttacaaaaaccaatccttgaagagatgcacgagggcaacattgctggaactgatctttgagtttaacgaagataaacatcagtaaatcataatccatttgaacagtgagcacatggagtcacatttcctcccacagacctggtaccacatgctcctgagaatacatctatcacacagacactcacatgccacctttgccaggttggtcactcacactcttcatgaaaagatggtttgctaatataaccacaatctcccctccccaccctctgcagaaaagtaaaatggaacagtattattaagtccacactctcctctcatacttgtttctttaatattctagtcacgcacttaaaagaactccagaatctaagaaaaataaaactaacaataatttttaagccgtttccacaaaacaaaacttggaaaagattttaacttactgtgaatgtaagattatgttccagaaggtccttgctattcagttgttatttaaatcagtactgaattatctatattccaagaagtaacatagttttgagtcttcctatattttaaatctcaggaagctacactgggttccaacagaataagtaagagcacgcagtagggtggagagtgggaggaagggggactgaatactagacctgggatggaaggtaagtttgccctttaattctgccaccatccttgatattccctttaactctgggcaacactcacacatccaactccaagtattgcctggaccttgccttacccatgacgtgtactctttcatttggtgctggttgctatgagaaccaccggcatgtcccctccagaagcagtcctgacagagctggtaattgtgacactgttggcatcggtagcgaaatcccatcatactctcactgtggcagtaggaacactcaaccggatggaagactaagggggaagtaagtgaagaaaaaccaagaaaacaaaagtatgaaccagaagaaggaaaaatacagccttacaggaattgcacctttcttctctgcaccacgatttcagatgatagttgatttgggctcagagaaacatttagttcattcctggaatcttacaacccttttcaatcatgcctgtggggaaatgaaatgaaatgggatggagaagaggtgtccttttaacaacaaaaatctctgtaatgccatttgctctttctattcccatctctcacattacaagaatttaaattagccaaacagacttgcctttaccccaaactgctctctgtctccaggagaccagcacagctcactggaagactcagaagcacaaggggtgaatgctgattgtccagtgggaagagagcgaatatcagagacacggagaatgagaggaagaaaaaagaaaggaagatgggcagagaatggaaaactggtgtggatgagataattaagttattttttaaaaaatagagtgactaatggcttacttaacgagtggtgttgcctacatctgacaaacagatttttttttctttcctgaggcaggtgtatagggccctaaaaaagatgtgcaaattatctgaaaacagttctaaataattcaaatgcctcaagagacggttaactttctttggtaggaaatttgaattataaagcaggcaaagcaaaatactagatttgaagcaaagtaaaatattagatttaagtgatcaaatccaagtaattgtctacatgctatgagctagatactaaaacaacaataacaattcttgcctttggtaaagctattctccggcctaaccagtcaggaaaaacaatgaaaataataataaatgaagataaaaagcaaagtgtaaaaacaaagacataactagctctggacgcattgtcttctaaacaagtgtcataacctttcttcccggctcttgagaaagactagagtgggacttcaatctagggacaactgttctgggatggtgcctaagaaactgatctcctgcagcaggaaatgctgagagagaacgaaagaaattatagctttatgattggaaaatgactagttctagaactgtaaacagtaacgtgaactcattttgcataataacatggaccttgattgctcttcgcttctgcatatggataaacataaaaaaactatgattgttagtgattgcaaaaaaataaaataaattcattctttaaattttctccatgagaaaaacaggataaattcataacttctaactaacagataaataagggcagatgctaaaaattctgaatgataatttaaaattaagctaactttagctgcaatgtatattaaagaaatacacagaagttgagtaatatatagagacttaagttaaatctcagtaagagatagagactaaattatttcctcgtcaagtctggagaaatttcagagttacattgaacaataagtaggaacacctaaagattagatggaggcactgaactgctccatgtttaattttctgtaaattttgccccaaatggtatttcatatttaaatctggatatgccaacagtagttccttttatcctagaaatacttgctttaaaaaaagacatgatacgaaagttattttactcttatctttaacgtaagtacaactattgaaagctcacaatctggaacatatgactaaagattaacagggtgctatcatctatttttttttctcatttctcccacctatttctggctgagtgcctgggaagaaataatcagtaccgtgtatgcaaatatga

SEQ ID NO: 1245133 - DNA, 4001 bp, Homo sapiens
gtgcctgtaatcccagctactcaggaggctgaggcaggagaattgcttgaacccaggaggcagacgttgccgtgagccgggatcacgccactgtactccagcctgaatgacagagcgagactctgcctcccaccaccaccaacaaaaaaaagcaattcaatcttctacagatatatattgaaatatttacagatgaaattgaatgtctatgatttgctttaaaataattgtgagtggggataggaatgcatagggacatagatgaaattaaattggcatgagttaactgctgaagctgggtaatgggtacatgggagtaccctttattatttcactgtgtgaacttttctatggttaaaaggtgcaaaaacataaaaactccttgacctatatgtcgtaacaacacagacttcttaatagctgaatctccttcctattaacattgccccaactcagttctctgccatttaatccacttgcgactgatagtttcatcaattattccaactcattttgccctatgtactcagtttatgagcttaaggcagacacctaacctctaaaagactagttcttcatttacagaatgggaatattcatacttgtccggtctatctccaagttgctgagaggattatctaaaataaaacttcaaagcaggataatcactccagaaatccatatattcataaatttcatcctctgcaacaaccattcacccattcctatagattctcttcccttccacctcgttcttctcttgagccctcaactcatcagcctaagcacctgagttcctctggtggacgctacattcctctccacggcctccaccctccaggttttcatccttcagcacatcacccttgctctacacacccctctctccaacttcccctctcctctttcaaggaactcactccatctgtgccccctaatcagtctatcctgggtacccgctttgctggccgattacaatcatcccatcacttctctacccctgttcagtagagaacagctttatccaatcagctttaccacaccaataccctcaaaccccactactgcccccagttcacaaacacccaccctttcacttttcagtcaaaacacaattgctcaggcaaatccacggcgactgaaagtagatcaatagtgtaggggagagaaggaggagtgactgctaatgggtacgagcttctttggggcggggggggcggtgattaaaaatgctctggagttaagggtggtgatggctgctcaaccctgtgaatatactaaaaaccactgagttgtacttttaaagggttaattttctgatatgttagttatacctcgataaactatgaatgtaaaaagaagaaagaaaaacccaacagctattgctcaccctgcccatcacacgcccatttgtcagaccaacaccgccccatctccggaagcaccgacttggccttcggtatcccccaactcccaacagcggactcggacagaggtccgtccgctgtcagcacagcccctccgggtggcccaggcgcccgcgggcagggaagggagggtcccttcgccgccgccccggggcgctggccgggttgcggagggtggcccctgaccccctctgacaggaggccggggacagccaggctttcgggcccggccgcgctgaggggggcggcgctacagcccacctgtctcagccggctgggggatctgctccagctccacggacccgcggacggatgggagggtggcagaggggtcaggagaagtcgctgtcgccgccgcagcccaggtggcgcacaccggctcaggcctccatgtttccacgtctcagcgggtacagatccggctccggtccggcctgcagctcggccccggctcggctccagcccgggccgcgtcggtgcggaggccaggaggcggcgagagaagagggaagcgaccgagaacgcggctagggaccagacccccaggcgcgcgcgccagccaggtggtcacgtggcacgcggcgcgcgcgggcttctggaaactgtagtcctttgggtgttattcgtgcctccgccctcctagtacctcctgggctaccgcaaagccacgtggcgaaatcgagaagcgcaaaaacagccgtgcgcggtggctcacgcctgtaatcccagcactttaggaggccgaggtggacggatcacgaggtcaggagatcgagaccatcctggccagcatggtgaaaccccgtctccactaaaaatacaaaaagtagctgtttgagacaggataatcgtttgaacccgagaggcggagattgcagtgagtcaaaaagtagctgtctgaggcaggagaatcgtttgaacccgagaggcggagattgcagtgagtcgagatcgggccactgcactccagccttgcgacagagctcgactcttctcaaaaaaaaaaaaagagagagagagagaagcgcaaaaacctcacctgccgggtgctagagtcaacctcacctgccaggtgctagagtcctcgctcatgctacaccgctcgttctggcggcttaaccttattaaggcctctgttaattgcagctgaataaccatcccaaagtcaagcaatattgtgtgggattctggagaattgagaaatagcaaaataatttttgatggaggcagctggcagggctagccctgcctgcaaagttgtcggaaaggacaggtcccacgggaaagagtagcaatatgagatagtgccaaaactatggaatttgaagtcaaatgagctgaggtttccacactgacgtctttgagcaattacttcacctctctcagccagtttcctcacctaaaatatatgcatgatgatgattctgccattacaggaaatgttgacatgactgtagtaataacaattcacattatggattattttctatttgccatgcactattatttcgcaaaatgaccctatggaacagatagcaccgttattcccattatatagtcaatatgtgccagtgtactctgtaaagtactatacaaatattaggtattcttttctagcatagactgccagtaaattcactgagcttgcagaattatgacaggaaaacatattaaaacccaaagtagactgggccctgtggcttatgcctgtaatcccaatactttgggaggctaaggtgggaggatcacttgagcccaggagttcggaaggaccagcctgagcaacatagcgatacactgtctcaacaaaaaatacaaaaattagctgggagtggttggcacaccctcggtcccggctactcgggaggctgatgtgggaaaatcgcttgagcccgggaggttgaggcttcagggagccataatctcaccattgcactctaccctgggcaacagaacgagacactgtctcaaaaaaaaaaaaaaaccccaaactacctaactaaaaagccatagacactactatgcagtcattgtaaagaatgctatggatgcatatttatttgaaaacattttcatgatacactgagtggaaacatatatagtatcaaattttcataagtgaattatattaggttggtgcaaaactaattgtggttttgccacttaatataatatttatattaatatattaaatgatatattaatataacatatgtaatatatgtttactataatatttataatacctatgtatatgtgctgttggaaaaaagacaaataatattaacaatattgcaactttgggtaatgagatcctgtgtggttaaaattagtttttccctatgttttctaatttttctgcaaggaatatgaagtacatgtacaattttattttaaaattacagcaaaaagagactcagggctgggcgtggtgactcatgcctgtgatcccaacactttgggaggccgaagcaggcagatcacctgaggtcagcagtttgagaccagcctgcccatcatggcgaaaccccgtctctacgaaaaatacaaaattagccaggcatgcgcctgtag

SEQ ID NO: 1245134 - DNA, 4001 bp, Homo sapiens
gacaattagctaagttaattttttctgtaaatataatataaaagaaatagatatcagtcccatgtttatcaaatatgaataaacaaaattctacctactattcattatgcaaatttgaataagttgaatttatctttgttaatacccttgcttatttaactaggtgctgatcctgttgttttcattacatccaatttgcttgtggctgatgaacctgaacattttaatgcctttgcaaacaaagtgaaactcactcagtggggcagtttcccagaattttctggccctgttagaatcccagccctttcagagaggaaggtgatgggtgggtctacactaaggatggggaacctgtgatctaggcccagtttgcagcctaagtaataattttactgtgtcaggttgctctgactcttactacaggtggagtctctattcaaaactggaagagttgaagagctgtaaataatgttaaccagcattagcataatcagcattagctaataatggccacaggcaactgaaatgcattggttgtacttaactaaagtacattcggtaagttttttacccaaactttataaggattaacttgagatttcttagatccctaacagaaaaacaaggacaccaaaatttattttctgtgtgtttataatcttcaaatactttttaaattccattattgaatttggtttgaagagaaaaatatagttatatctatgcctgaataatataataaagtaaaatatttagtcagctatccagatatatgctgtaaaaaaaaacaatataagctaatatttgtaaacatctttacatttgttattatctagaaaaactatcaagatgatacatacctgaccaaggataatttttttttccatctgagtatctgaacatcttgaagatccaattacagtgctgcctgagcaactgaccaagcagacttccagacaccagcccagggagtgaagatcttggttcttttggtgaaccagaaatcctctataggattcttgtattaacacttactgagaaacaggactttcttctttggtttatctcatgagttacacaggctgattaccacagctccatatgacaaaagcaagctatttcttcacacatgtttcattcattctgctggcagtgaattttaactcactattttaattctcattacatgtccttccttttctgaagtcaaagattatttggttggatataaatagatacataaaatctgtatatgatacagatatatgattatgataactatacactgaaggcttggtttttggtataaaaatattttttaaaaagcagacaaaatagtcatattttgacacagagcaggtatttttggaagttttctttcttaggaatattaatatctagaattaatatctggtttttcagcatattaagaaatctgagttctgacaggtctaaaaattctaagcatccaattgtaaaaacagaacttaataaataaacactgacatcattggagtttatgtttacatgaaggtgaatatagaaagttaaatggatctatttgtatatcctatggccatagaaacatttctaatactttatagctatatatatttaaattaatacctaaatatataacatagcaaaataaaacatgaaagttacagcacaaaaattgatacagggttgctctttattttggagaagaatgcaaaattatgatgttggctagatagtaataaagagattaaactgcttttaaatgctgaaaatgaaactgtaatataggcaaactatcaaaatggagcaaggacactcaccggctggttttcagagtgctcaacgttcaatatgtattttccatgctttctgtccattcttgagctgccagtatcacaagcttctctccaagaatatttttcaatttgttcattgccctttatatctgcaaccatgaaacaattaaaacactggtggaagtcaactatgatgcatcagtacaagtgtggattaaactaaatactaattattcactaaaacaggatccaccttagaggaggaaatgaaatgttaactgcagaaagacgcaagaaaaccagtacttcctctgaaagcttttgtgactactccctctgaaaaccttacattattgttccgtctctcctctttagtcccatcattcaggaactcaccttttattttaggaccgaccccagaaaaacgttctgagatagaaatgtatcattgcttgctttctactcaagcacaaaagcctctctccccttgttggcaccacctcttaggtacccatgaccttagggacacttcaccttttcagtccctgggttggtgtctggaagtctctttggtcagttgctcaagcaattcacactcattaaaaactattagaatcaatttcctaggcaataatgtcaaaggagtgatggaatattgaaaatctttaagaagagggtttttttattttggtcaaaaaatctagtttgtcttaaattgtaaaatgatcaattcttgtattggtttattcactcaacaagtgagaatactgtttcaaaagtgtgccaggtatgtttgtagtgcagaaagttccataataaaaaaaaattcctattctctttgtatatgacacttttggattctgaatatttttaaagtttaatctttgaaatttctcttataaatgtattcaataccttcagcttgtaagttttaccctcaagctgtagaatataaagaacatggaaagctgtcaaggaattgaaaaactgggaaaaaaaattgttctaaagaggagtttaaaatacgatgatttgctacaacacagatgaaccttgaggacattgtgctaattgaaataagtcatcacaaaaaagacaaatactgtaaatttcacttatataacatacctagaatagtcaaaatcatagagacagaaagtagaatgttggttgccaggggctgggaggaggcggaaatggggagttattgtttaatgaatacacaatttcagtttgggatgataaaaagagatctggaaatgggtggcagtgatggttgcagaatattgtgaatgtatttaatactcttaactgtatacttaaaatgattaagataatgaactttgtgttatatgtattttaccacaatttaaaaagtgaaacacaaagaaaaacataaagatttactcttcttgaagcaaagcaaacagccatggggtacaagggaccaacatgggttgaaggtgtcaataatattaaaaatgacttttgaaagactttttgattgattttttgattcatttgaaaatcagaagaatataattaaaccaataatatatattaattgtatatttttaaaatattactacaattttattctgcaaaaacatttcatttggcagtagagccacatagccacagtggaagtgaaactccattactattgatggcatccacacattacatcaatggcataaagagtggaagattattcttgtcactggagtctcaccctcaccatctctaaccggccaagcagttacatgactcagccacaaaatttgggagaaaattttaaaatttaaaatcaaaaggaatagtaacataaaaatgagacaacacattgttctatagctaaatataccatgtgaaagtcagatttttattttgcaaagaatatttcttcaccatgtattatgaacaattctttgaatgcctcaatctaaaccttaacagaaaaagcagagcacacctggattgttagcatgacagacagcatggatacctctcattaccttctcagagtcgccaataaaggatctttgttctgagcaggatttataaccaaaaagaaatctgaaagtcttgttggctgacatgtgtttgagagaactctgatagctggccattttttccactctaaggcggcaaggggaggaggctgtttttcagtcatccaataaagaagtgaattggctgttgtct

SEQ ID NO: 1245135 - DNA, 4001 bp, Homo sapiens
gttttagtattaaaaagtaaataaataaaataaaaagccttctcctgtgatcctaacatggagtccgatttgagaatcacttagtgaaaggctaacagagaactgcaatgtatggatcaggttgacctaaactcactactcaactaatcaatctttttaaaaaaagttttattctgaaaaacttcagacacatacagaagtagagattagcataatgcaatgccatacacccatcattgaacttcaacaactgttaactcataggcaatcatgtttcatctatacacaccacccccattactccaagaatacttgataagacaaacggtgtgctgtctgatgggagtaccccattaggcagcacgcattgtctagctgtctctctttctgacgttaacagccgctagtgatcattgccaggatccattatttcattaggggttgccaaaaggtgatattctctcatttcttttgcatgtatttgctggcattccctggtcaattgttaccctacggtgctacttgtacataaaaggtccacaaagagaggcaagatgctatctaactcctggtatgatacaatgtgaaaaacacagtaatcccccattaagttctcttgccaaaaaatcgaacctgacctgaacaagtctgcaggtctaaatacctgcttattaaaggataccagagatggaaaaagcaaaatcctggttgtagaaaacgtgaaccgtacaaatgacttgttcaagtaaaatacagggaacaaaataaagagcaagagaaaaagattaagagagatctaagagacatcaaccaaatataacgtgtgtagattgtttggatactgatttggacaaactgggtaagaggaaagagacaactaggaaaatgtaaatgctgactggatagtagagggtaaaatgaagtgctaagtacactgataatggctttatgttttaaaaaggtgttattgtgttttataaacatgaacaaggtaacagatggaatggtacatttcagatttgcttcaaaatactacagtgggggagagggtaacagatgaaacagaattgatcatgaattgggagttcagttactattcaattttcatatatgacttgaaggtttccataataattttaaaacaaatataatgaaaaccctccaaataggtcgggaagtaatcagaaattatttaatcaatggtgcatgttttgggacatgcaccattctaggcactaggaattaaatgcgagcaaaccagattaggtccctgtcttcttggaaaaaaaacaaaacaaaaacccagctgcttgctttctcaagactgtgatccacgttcggcgaagtgcatattccagtcgtgatcacagtactgtcatttcactctgggcccgtggatctcggtcctggccgcagatcacaattccccggtgatgatggggcatcagcatttggaggcttcccaagcgattctactggttgccgggttgagaaccggcgctccttcgttttcaggcaggcagtgtcaaccctgcaatcaccctgtggtgtgcctagggcagatatcgctgtcctccatcttagagctgaaagaaccgaggccgggcggcagagagtaagaggccaaggcacaggcagggccagaggccagatttccggcctccagagagcccaggctcccccacgagaccgtgttggcctcgaaaaaggctgggtgggcggcggcgccgggcggccgaggctccggcccgccgagactccggcccggggcggtgaacgaggcgcgtcctcgctcccgggcgctccccaggcttaggtccccagcgccgggccgtgcctgatcgagccggcgagtcccgaggaagcgcgcccgcccccctctggtatgccctaccgcactcaccctctccccgaggcccgcgccaggagccgagggaggcgcaggcccgcaccctggcccagctgtccgcggggctacaatgcgcccgggcggaagtgcgccgccggccgggtcccgcgcggccgctctaggatgcgagggaggtccgcgctcggtggcgcccgcgcgggacctggctctgggcgcgcttccgggctccccccgggccgcgagggcagtgattgagtttccctctttcccaggtcgctgtgtgtcaggtggtagctatcgccctgaggaccagagcgggataaaccaaaagggaaaaagttactcttcttttgttttccgtgtaatattttccacataagagtgttcttcctgatgttttgctcatacatatgtgtcatttttggtctttggttgggatgaatctttactgtctttcatccactaagatcctttgcctgaccatgcaccttcataaagccccgtccatattccattttcctactctaggttggaatatttgcttaacatctgaagctgattgtgccatactcactccaagccttggtgttctcttaggtagcggacgtgggattgaaaaacccaggctggctgtatacagaacgggcacgtggcgattacagaccacagggaaaaactccttcagtttgaataacaacttttaaaaaaagtatttcaagctcctgtgtactgccagatgcactgatttcgtgctcagcgtacttgaggtggtcaaaatatccagcagctggccgggcgccgtggctcacacctgtaatcccatcactttgggaggccaagacgagcggattgcctgagctcaggagttcgagaccaacctggccaacatggcaaacctcgtctctactaaaaatacaaaaaaaaaaaaaaattagccggtcatggtggcacacgcctgtagtcccagctactcgggaggctgaggcatgagaatcgcttgaacccaggaggtgcaggttgcggtgagccaagatcgcaccactgcattccagcctgggcgacagagcgagactctgttaaaaaaaaaaaaaaaaaaaaaaaaaaaaatccagcagcttcaaaataggaatcggagtggtgtttcttgaaactaccaggacagagagactgccacttgtttaaaaatcattaactcatctacttctacttattgggctcttttaacctttattccagtattaatggagctctgactttgtggatagtattatttttggggctgagagattttaaaaatttgtcatggtccctggttttgggtttttgtttgtttgtttgtttgtgacagggtctcactctatcacccaggttggagcgcagtggcgcgatctcagctcactgcaacctcttcctcctggactcaaccaatcctcccacctcggcctcccaagtatcagtagctgggactacaggactacaacctcccaagtagctggcactacaggcaagccaccacacccagctatttttttttttttttttttgtaaagatggggtttcactgtgttgcccaggctggtgtgaaactcctgaggtcaagcgatccacccgcctcagtgtcccaaagtgctgggattacaggcgcgagccaccgtgccctgccggtccctggttttaaggagcctacactcagtcaggaaacaatccacttaaaaggatatggaaaaagggagatcactagctaagagatgagtgaggaagaggtaggatttgagctgaatcttgtaggatgatgacacttgaattaatgtggaaataaaaaaaataaaatggacttggtcaagtggggtctaaattaacaaagcattgaacactggaacttggacttatctctcctgacacttgcctagctaaaagttccttaagaagacacatagcattctacagcttggtcttgatcacaatcagcgaggacaacagtccccaacctttttggcaccaggtaccagtttcatggaagataacttttccttgggagcagggggtgggcatagagttttgggatgaaactgttccatctcagatcatcaggcattagttagattctcataagaagcatgcaacccagatc

SEQ ID NO: 1245136 - DNA, 4001 bp, Homo sapiens
gtcaatatgctaaaattcactagctcagccaccaggttatcatttaaaatctgatggaatacatggaaacaaatccattcaactgctgcaaaaagatgggattctacagctgaatcagaatttcatttcagtgtgttaagtacatcaaagcatgagtataatcatcttaaaagcagatcttgtcctgtgatatagcggcaagtttgtccttgcagactttaccaagatgcttcctctgccgtaaacatctcaggaccgtgggttgactggcaaagagtgtgccttgctaattttacgacggagttgattttaaaagggtgtcaccctggctctcccgggctcctgcttccctgacaactccacccctatggccgcccctcttagggtcctcccagtgcccagccatggcggaacggtgccgcaatgccgcaaggctccgcgctcacggcgctggatgaggagacgctgtgggagatgatggagagcctgctgtggtctctcccattctacagtcggtccttgcctcatggtccctttaaagtttacccttgttttttgcactttctcttgccattcaagaatgcaaataacaagaaacaaaaaccaggaagaggcaagcaagctcaagatggggtaatgtggttacaaatatttcatatatatatttgaatctccaaagggtgtgagaataatgtttttttgagatagggtctggctctgttgcccaggctggagtccagtggtgcgacccccgtccactgcagcctcaaacttctgagctcaagcgatcctcccacctctacctcccgagtagctgggactacaggcgcacgccaccacaaccagctatttttttttttaaactttttgtagagactggggtctcgctctgttgcctaaactggtctccaactcctggactcaagcgatgctcccacctctgcctcccaaagtgccgggattacagacatgagacacgctcctggccaataatgaaatttttaaccaaattaataaagccgtatgaacagaaatacatatagccatctcctgcgttgtatttgaattttcaacattttactttttacactgagcctccttttgagatgcaagactaactgtatagaccaacttagccattgggaatggagttataatgaattccggggagcatgcaaaaactattcacttgagaaatatggtgaggaaagcaccaagaaaataaccaactgactgggtgaagtcgagggaagtcccgccttataatcagtgcttaggatccccatcccctatgacctttcccccaaactgacactttctctaaaatgtccattcccgtagctaaaacacaggtaacatttccttgaaattcaatacaacaaaagttcattaaccaaaactgaaggaaatactgaaatgagattgcacctgtgggatgatggttttaatctacatataaatttcaattgttttaaaacccaaattgattaacggtactacagttcccaaggaaggcttcaggtaagatgcttatcattcgggtttctgcgtgggactaacaggttactagcagctcatgggcagcaatgaccctaggatgacgccacgcgtgagacggcaaagggtgaggggtgaggagcgagtccggcaggtccactggagactccgagcccaaaccccgctcccctgagccgacccgactcgcctcctaggtctggggcggcaactaacagcgcgcccggagcacgtccacaggttcaacccgaaaagcacaagggtcggccgtccagcgacctctcttaccagggggtcatagagcaccacggagcaggacgtgccaaaggccagaagtcctctgggcccagagctccagttcaggactccccgcacccggtttgggcagcaaaacacgtgagaagtctccagcacgggtgccaccatgtcgccaactggtcagccgcacaaacaagagacgcgcacttccgccctcggagcggaactactagggtggtttctcctgaggcatcacccagtccacgtttcgcagccagccgagggccagacggaggcagccccgcccccctgagactctccgttcccaccgcaggctggaacccctgtgcaaggccgccgctttgctagctctgctcttggaccgtggccccgctccgcgaacgagccaggcctttgtctcaagagcgaaatccgacccgagtggctcgggaccctcccgaaggacccggggctcatgtgcctggggcagcgtcagaaacatctcgctgccccttacgacccggctcccagcagcagccagggctggccccgggggcgctggctagcgagtagggcctcgaggaaatgacccccaactgcttacaatgcgctagggccgcgccacgcccccgcggcgtcggcgaacacacggaaaagcggatccgtctgcggagccgggttccggggtcgcactgcgcatgccctgcagtcctgggcgaagggggcggtggttccccgcggcgctgcgcgcggcggtaattagtgattgtcttccagcttcgcgaaggctaggggcgcggctgccgggtggctgcgcggcgctgcccccggaccgaggggcagccaacccaatgaaaccaccgcgtgttcgcgcctggtagagatttctcgaagacaccagtgggcccgttccgagccctctggaccgcccgtgtggaaccaaacctgcgcgcgtggccgggccgtgggacaacgaggccgcggagacgtgagtctttcaggtccgggagcagggcggctgggaggggagctcctcaggccagacaggcgtggcggggtaggggtggttctgcggagaaccggatcctgcggaccgggcaggggggctacagaaagaggatgctggggggagcccgccgcaggcgcccactcaccctagagagccggacttcttaaggtgctcagatgggcttcggggtgcaacggaggattttttgaggaaaagatccgtacttttcatcccatattcgaagaagggactgacgtgtttagaaataaaaagcttttagaagagagctttgtgccctcttttccgttttctgtactcgcctttttctctaaggcccttcccttctgctttcctttttcctccagcacacaccaacttgcaggaaaggagatccttcaacgggtccacgaccgcgctcagcatcctccctggagaaaggctcggagctgtcccctgtgctagtcccctcccaccccgctcctcgcctctctcctgggaatgatttctaaatgtttatcttttacctagtaaaagaattcccgaaacttcaagccccaaagattcctctttcaggagcctcgttctacgccgtacctccatttcccactgttccctgtatgatacctcgcacttgtgcaacacatgagtttaacgagtacttgtaatatacattccttcatgtgttttcctccttcgccttgcaaaataggttttaccggtattttagataaggtaatgaatgcgagagccctgtccaaagaacagctgaccgtggtagagctggatagccccatgctcttgcttagttgtaaacttgacgtctgcgtcttttgctggagatgtgagtttgaccaccatcacctccaccgttggtgctggacatcctgctggatctgaattaactgaattctggctctgcttaactgaattctgcttttcaagctccaactcaattgcttcctcctctttggggcacaggcctttggttccaaacactactgtggatgattaacagcctgtgattaaatgttgactggtttgtagtaacacaaggatgctacagtgagtttttcatgaagttcagtttactttaagaattctatgtatggacataatgtgtctgattcattgtcaagtcggaaaaaagattcaatgtgtatttaaagtatacacttatttgaggctgggcgtagtggtcacgcctgtaatcccagcactt

SEQ ID NO: 1245137 - DNA, 4001 bp, Homo sapiens
ctgtttgttttactttgtttttgccgagcaggaattagctgaaccctgttggcagctcctccagaagcccacgtggggtggacccagcgaccacttcccataagactacaggctcatctactgttctctggaataaggtttcctggagtacaagttccagtctgtcccttggttttgccaaagacagatccgcctactgactattctctgctgtaatgacaactgtgctctaagacaaacaacttattcttagtggaaaacaattaatttcagccatcacatgtgttcctcaacagccatttattcacactggcccatcttccggtatcagactgatacaaaacccccaaagacttgcctgatgacaattgaatgagtgtcatgtatttaacggcatttgtactttattgcattgcttcctgtttttttttttttttaagatggggaaatctttataagcaaaaagatgattaattcttccccctgtctttaacggccattctctcccacaatctctagagaatctccaaatctaagttgcggggagggatgctggggagccacacttttaagcaaagtgttcctgaggttttagcttagacatctacaaaactggaagattccgttttatggggacatacggacagaactcactcgttttagaacactacttagccaaacctctcagcgaatcctatacggaatagtctttagcagtatacattttggaatcttctgtgtgccccagaacacacaatatggatccaattagattcagctgccttatgttacaaacaaacattgaaagggagaaaacagaagtgggagtgggagctttgttcatcctctcctacgcccccgcgaccccacactcccgaggcgcgcgcatcctccccactcactcgggcagcacccactccctaaatagcccagcgtggccggtgccccgcgagcgctcggagcgcttttccgctgcgggcttttcaccggatctggaagggatttaccggagggactggagcccagcgcagcaaccccaccccacccccaccgccccggcccgggcgcgccccgcccgctccccggctccaggacttacaccagcgccgacggacagggcatctggttccaggcacagttgtactgagcctgaataaaactctcacttccctccagcacggagcagctcacattcttgttcacgatgtaggcgcaccagttcctggggtgcaggagagagagggagaggggcacggggtaaacccggagaacaatgaggccaggggagaggggactgcggcaccagaccgagcgagggtcgggggggcccgtcgccctctgcggaggcgggagcttcaccgagcagacgccggagggtgcccgggtgcgcctctggagagcgcgcgcctggacccgaccaagacgggaaagaaaagcacccatggtcccaggggctcatggaattcctgggagtcgttttcggatcgcccgggtctgcgggacgctctctgcgcccacgcccccggagtcagctctgcctgaggcgccggctgcggagcgcgcggtcccccgcagagggagccgcccggggaagtccaagggaggcccccggctgccgctcgtcgtctttggcagggcagctctggggctcaactgggggccggggaggggtaggcggtttggggccagccaaggggcgcgcacttacttgttcctggcgctgggccgcgcgggatacccgggctgcgggccggcgtggcacagccccgcgccaaccagggccagcagcgccagcgcccagcgccagggcacgcggggccagggccgtctgggctgccacatcccgcgcgcagcgggcgcgccccgcctgcccgggtccggagcgcggcggatcggggcaccggccacaaggctgccggcggccagggcgccgcccgcgaaggcaagaggctcgggcgcttcgcggcgctccaaccagtgctccgcggccgccccctccggcttctcgttcctacttctccttctgcagccccgtgcgccctgcgcttctccccggtccctcaatgacgcacaggtccccccgggtgccgccctctttatttcacttccctctccgaaacgtgactctccccccaccaagtctccccgtctccagtcccttcgcttctcggcagggggctcggggtggaggggcgaaagggtttgggataagggtctacgttacagcatttccaatgactcattcctttggtctcttcccagatgccgagcgactccgcctcccaccttccgacaggctcgctcccggccccccgggacgcggccgccgtcggcgagtctggccgtcctcgcgtcgtgcctgggtgccagcctcccggggcgaatgagggacatgtttatcagtcccgcggggagaggagtgggggctcgactcgaatttcctcctcgggcaagacagggccgttcccccaccagctccatggacctagagagtccaggaggaaacgaacgctggttctttctttgcccaactctgccttaggcaccatctgacagtttccgaggccacgcggggggcggcaggacaggacaagccacagccccgccaattcccagaggctgctgcagctcagcgtccggctctatcacttactgcaattctcctccaattcttgaaaggtgatctcacagcctctgcttctgaggtcccactgtgaactttctttttctattgaaactaaggcatttactcacgtttgcttcttaacagttcaggcactgctagacatccgtcttaaactttcttgtatgttttctgcctgttgttgagttacactaatctctaccgatgtctttttgggatgaagtaccagaatgttaagtaaaatcaccacccaagtgttgtattctaaggggtgttggagagagctgtgtgtttgagatgacctgctgcatctaatcaatgtacagggtcgtgagtggcgtggttaccagactccacagataaaactgtggcctctgtgagctaaccagacgctgttggccatgactcgttaagtgaataaagctttgctatgggccaggcggggtggctcacgcctgtaatcccagcactttgggaggtcgaggcgggtggatcacctgacgtcgggagttcaagaccagcctgaccaacatggagaaaccccgtctctactaaaagtacaaaaaaaaaaaaaaaatttgccgggcacggtggcacatgcctgtaatcccagctacttgggaggctgaggcaggagaatcgcttgaaccagagagatggaggttgcagtgagccgggatctcaccactgcactccagcctgggcaaaaagagtgaaaatctgtcgcaaaaaataaaaaataaaaacgtttgctatgttcctactttactaaatgaagccattggtctattttgtttctaatattctttgatggtgttgttggaccttttgatttgcagatgaaagaaagagaagtccctaagtagaaactacaagggccaagcagaacattataccatgtaaggacatcatctgtccctggactcttaagcggaagatcatgcaaatagtggactgaagtcatcccagccttcaaaagagccaccgtgggggggaaataacagaaagggataaaaagctgtctttcgtaacccaatctgtatctttctgtgtgacttccctatcctgcctgtcctaacaccatcttggccgtaaagactcatagagtagaaacagagtatagaaatgaagaagaggaagagggggggaaatgggggaaacacacaagttgtgtgtgtctacaattagcagagaacaactccaatgtgtgtctggtacaggtaaatctcaaacttgaaagtgcattgaactgatcaagtcaatctgttttttccgtcaaatcaaagttataataggaagttgtctaagagtataagggccaacttgtcattgagatgaccacaatactatatttaat

SEQ ID NO: 1245138 - DNA, 4001 bp, Homo sapiens
tgcctggcctatagccaactttactgacggccttctctgagccaggctctttacaggtatctcatttacatgtataaagtgaatattattatacccattttacagatgagaaacctaggcttagaaagattgtgtgacttagccacagctgctaaagcttcacagaggcaaaggcagttgcatgagatcgagtgtttggattctataagccagtaaaatttccaacatttattttgagttccataaaggattgcctgctgggtgtttaagttatttaccaacatcatgtaagaaaggaaacatgaagattttaaagaggatgacagcctgggccctgtctctacaaaaaatacagaaagtagctgggcatcatggtgcacacctgtagtcccagctacttgggaggctgaggtgggaggattggttgagtcagggaggtcaaggctgctgtgagccatgatagtaccactgcactccagcttgggcaacagataagagaccctgcctcaaaataaataaataaataaatttaaaacataaaatagaataaaataaaaatttaaaaatgcaggatgaacttaatctcaaaaaggacattgttttgcatttaataactttaacgagagatctatttttataaaacatttcaggtacaaaaagagtatagataatgtaatggacaccagcttgccatccacccaatttaggaagtaaaacattacaatgggaattagagacctcgtggtcccctccgtgaccccatttccttccctccctactggtaaccattttcctaacattgccgttcctcacttcccagcatactttcacacattcactacatacccatacaactctgcttttctagcgcggccaatctcatcagtggactacgaggggcagtgaggacccagtggggaacaggctccctgaaaaccctgcacagaacccactgtatttgggaaacaccgctctagacgggggcaggggagggaaggcctgacattctaacaccctcagtaagcaaaaaagaccttcaatatttaggtaggagtcagagttcctgcccttactttattacatctcttaagacgaactgacatttgcatcagtcctttctaagcgtgtttgcgggtaatttcacgagagcgccctctcatgtgacgcagttagcacgcgcttggtttctcaacccgactgtgacaccttcattacacagacgggtccaagagacccagagaggtctggaacttctccaagtcacacagcaagttgtggaagcgggatcaccactcaaaactcccagccccgggcttcccgttctccctcagcgccaaccccgtcgcgttcagggtacagaggaagccagcgagcgctgtgctctagggtttccactggcgggaacccaacaaaatcattttgctgctattgcctattatgcattctaccatttccagcaaaatgtgagtcgtaaaagtaaaaccaggatattctaaactccagcaaagaaaaaacccaggagagtggaaagtttctggatacttatacaattgctccaaggcatgaaaagcgagtgtctcccccaggcgcgcctcccactttacagaagcaatgggttcgaagtcgggaagctgcccggggcccgcagagctgcagtcggcggggcgggagggacccgggccgcaagccgcgcgtaccatggcgtccgcgcttaccatggcgtccgcgcttaccatggcgtccgcgcttaccatggcgtccgcgcttaccatggcgtccgcgcttaccatggcgtccgcgcttaccatggcgtccgcgcttaccatggcgtccgcgcttaccatggcgtccgcgccgtggcccccaagcgacgtggggaagcgcacgtcccggaccgagagccgggagatcctgccgcgcaccatggcccctgcgccccgtggccgcggcccccgtgcggtcaggactggtcgggatcccgagcgcgcggcgggagggcgggagggcgggagcgcggcagcgccgcgaggcggggcaccgtcagggcatagagggcgctcattggccgcgcggccgcaccccgtgaacttggccccatgggagctgcagtcccagctccgggctcccgggggcgcactccgccttccgccgttcccttctcagcctagacggagctgaccccgagagggttcgctcagggtcgccggggaacctgggcaggcaggaggcctcgcgcccggtcggcgcctccgcgggaccctgctctgctcggatggaagactcgtgaagggacctgcccgggagccgcgccctagagggagaagtcgggtctgagcgagtgcattcgctcagcggcagattccggccagtggctcagctcccaagccgaggccgctggttgtcgccagcgtacccaggagagcggtgccctagaaaatgctaggtctctttcagtgcccacagcctcagtttgccacctgataaattaagaggcaggtcatcattgattacacccgtactgatgcagatgaggtccccgtaccgtgcctcagcctgtaatcccagcacttcgggaggccgaggcgggcggatcacctgaggtcaggcgtttgaaatcagcctggccaatacggcgaaatcccgcctctactaaaaacaaaaattagcagggcgtggtggtgcgcgcccgtagtcccggctactcgggaggctgaggcagaactgcctgaacccgggaggtggagcttgcagtgaactgagatcgcgccactgcactgcagcccgggcgacagagcaagactccgactcaaaaaaaaaaaaaaaaaaaaaaagatgctgggcggctcacgcctgtaatcccagcagtttgggaggccaaggcgggcagatggcgagtcaggagatcgagaccatcctggctaacacggtgaaaccccgtctctactaaaaatacaaaaaattagccgggcgtggtggcgggcgcctgcagtcccagctactcgggaggctgaggcaggagaatcgcttcaacccaggaggcggaggttgcagtgagccgagatcgcaccactgcactccagcctgggcgacagagtgagactgtgtctcaaaaataaataaataaaaagaaataaaaagaaaatccaaagtaagcagaagagaagaaataataaaaattaaagcagaaacctgtgaaattgaaaacaggaaagcaacaaagaaaaatcaatgaaaacaaaagctggttctttgaaaacattgataaaatcaataagcctctaaccaggcaagaaaagagaacgcaaataactaatatcaaaagtgaaataaggaacattactacagatccgacggacattaaaatgataataaaggaatactatgaattctatgtccacaaatttgataacctggatgaaataaaccaattccttgaaagacacaatctgccaaaactcacacgagaagaaatggacaatctgaataggcctatatctattaaataacttgaataaataatagccttccaaaaacaaaaagcaccaggtccatggtttcactggtgaattttacaccaaacatttaaggaagaaattacaacaattctctataatctatttcagaagatagaaacagccacaaactgactttatggtgaatgattgatgctttctccttaagatttggaacaaggaaaggatgtctgcttccaccacttctattcaacatagtactgcaggttctagttagggtaatataataagaaaagaaataaaaggcagattgaaaaggaagtaaacctgtttattcttggatgacatgattattcatctttgttgaaaactgtcttcattggacttaacgaaaaaagctactggaactaatattgagcttagcaagtttgtaggatacaaggtcaatttaaaatctatagttgatgtgctagtaataaaaaattggaaacaaattagaaaacagtatctcttaaaacaattgcattg

SEQ ID NO: 1245139 - DNA, 4001 bp, Homo sapiens
tttctttagaaacagggtctcactgtgtcatccagtgcccaggctggaatgcagtggcatgatcatagctcatgtaattgaattcctgggctcaagtgatccccctgcctaggcctccacttaggattagaggtgtgagccctcatgcctggcctatagccaactttactgacggccttctctgagccaggctctttacaggtatctcatttacatgtataaagtgaatattattatacccattttacagatgagaaacctaggcttagaaagattgtgtgacttagccacagctgctaaagcttcacagaggcaaaggcagttgcatgagatcgagtgtttggattctataagccagtaaaatttccaacatttattttgagttccataaaggattgcctgctgggtgtttaagttatttaccaacatcatgtaagaaaggaaacatgaagattttaaagaggatgacagcctgggccctgtctctacaaaaaatacagaaagtagctgggcatcatggtgcacacctgtagtcccagctacttgggaggctgaggtgggaggattggttgagtcagggaggtcaaggctgctgtgagccatgatagtaccactgcactccagcttgggcaacagataagagaccctgcctcaaaataaataaataaataaatttaaaacataaaatagaataaaataaaaatttaaaaatgcaggatgaacttaatctcaaaaaggacattgttttgcatttaataactttaacgagagatctatttttataaaacatttcaggtacaaaaagagtatagataatgtaatggacaccagcttgccatccacccaatttaggaagtaaaacattacaatgggaattagagacctcgtggtcccctccgtgaccccatttccttccctccctactggtaaccattttcctaacattgccgttcctcacttcccagcatactttcacacattcactacatacccatacaactctgcttttctagcgcggccaatctcatcagtggactacgaggggcagtgaggacccagtggggaacaggctccctgaaaaccctgcacagaacccactgtatttgggaaacaccgctctagacgggggcaggggagggaaggcctgacattctaacaccctcagtaagcaaaaaagaccttcaatatttaggtaggagtcagagttcctgcccttactttattacatctcttaagacgaactgacatttgcatcagtcctttctaagcgtgtttgcgggtaatttcacgagagcgccctctcatgtgacgcagttagcacgcgcttggtttctcaacccgactgtgacaccttcattacacagacgggtccaagagacccagagaggtctggaacttctccaagtcacacagcaagttgtggaagcgggatcaccactcaaaactcccagccccgggcttcccgttctccctcagcgccaaccccgtcgcgttcagggtacagaggaagccagcgagcgctgtgctctagggtttccactggcgggaacccaacaaaatcattttgctgctattgcctattatgcattctaccatttccagcaaaatgtgagtcgtaaaagtaaaaccaggatattctaaactccagcaaagaaaaaacccaggagagtggaaagtttctggatacttatacaattgctccaaggcatgaaaagcgagtgtctcccccaggcgcgcctcccactttacagaagcaatgggttcgaagtcgggaagctgcccggggcccgcagagctgcagtcggcggggcgggagggacccgggccgcaagccgcgcgtaccatggcgtccgcgcttaccatggcgtccgcgcttaccatggcgtccgcgcttaccatggcgtccgcgcttaccatggcgtccgcgcttaccatggcgtccgcgcttaccatggcgtccgcgcttaccatggcgtccgcgcttaccatggcgtccgcgccgtggcccccaagcgacgtggggaagcgcacgtcccggaccgagagccgggagatcctgccgcgcaccatggcccctgcgccccgtggccgcggcccccgtgcggtcaggactggtcgggatcccgagcgcgcggcgggagggcgggagggcgggagcgcggcagcgccgcgaggcggggcaccgtcagggcatagagggcgctcattggccgcgcggccgcaccccgtgaacttggccccatgggagctgcagtcccagctccgggctcccgggggcgcactccgccttccgccgttcccttctcagcctagacggagctgaccccgagagggttcgctcagggtcgccggggaacctgggcaggcaggaggcctcgcgcccggtcggcgcctccgcgggaccctgctctgctcggatggaagactcgtgaagggacctgcccgggagccgcgccctagagggagaagtcgggtctgagcgagtgcattcgctcagcggcagattccggccagtggctcagctcccaagccgaggccgctggttgtcgccagcgtacccaggagagcggtgccctagaaaatgctaggtctctttcagtgcccacagcctcagtttgccacctgataaattaagaggcaggtcatcattgattacacccgtactgatgcagatgaggtccccgtaccgtgcctcagcctgtaatcccagcacttcgggaggccgaggcgggcggatcacctgaggtcaggcgtttgaaatcagcctggccaatacggcgaaatcccgcctctactaaaaacaaaaattagcagggcgtggtggtgcgcgcccgtagtcccggctactcgggaggctgaggcagaactgcctgaacccgggaggtggagcttgcagtgaactgagatcgcgccactgcactgcagcccgggcgacagagcaagactccgactcaaaaaaaaaaaaaaaaaaaaaaagatgctgggcggctcacgcctgtaatcccagcagtttgggaggccaaggcgggcagatggcgagtcaggagatcgagaccatcctggctaacacggtgaaaccccgtctctactaaaaatacaaaaaattagccgggcgtggtggcgggcgcctgcagtcccagctactcgggaggctgaggcaggagaatcgcttcaacccaggaggcggaggttgcagtgagccgagatcgcaccactgcactccagcctgggcgacagagtgagactgtgtctcaaaaataaataaataaaaagaaataaaaagaaaatccaaagtaagcagaagagaagaaataataaaaattaaagcagaaacctgtgaaattgaaaacaggaaagcaacaaagaaaaatcaatgaaaacaaaagctggttctttgaaaacattgataaaatcaataagcctctaaccaggcaagaaaagagaacgcaaataactaatatcaaaagtgaaataaggaacattactacagatccgacggacattaaaatgataataaaggaatactatgaattctatgtccacaaatttgataacctggatgaaataaaccaattccttgaaagacacaatctgccaaaactcacacgagaagaaatggacaatctgaataggcctatatctattaaataacttgaataaataatagccttccaaaaacaaaaagcaccaggtccatggtttcactggtgaattttacaccaaacatttaaggaagaaattacaacaattctctataatctatttcagaagatagaaacagccacaaactgactttatggtgaatgattgatgctttctccttaagatttggaacaaggaaaggatgtctgcttccaccacttctattcaacatagtactgcaggttctagttagggtaatataataagaaaagaaataaaaggcagattgaaaaggaagtaaacctgtttattcttggatgacatgattattcatctttgttgaaaactgtcttcattgg

SEQ ID NO: 1245140 - DNA, 4001 bp, Homo sapiens
atgtacaaaaatgaccaaagaagagagagctaaaacagaaaatagttttcctctctttagttgaatgctaggagatcaatatcatctcccagcactaatccttttcagcttttgtcaccctaccatttgatccctcccctcttcagaggacaccctccacactgatgtcctccatgacaccaattagagctggcaggaaaggaaaccgactccctgcagttcttccctcaaagaaaccattcttcttttctcttggtacctgcagaattctcttccctgatatggcaaaacctctaggatctaccaatttgagctacagacagaggtaacaaccttgttatgaagaggaccacgccattaaaaataatgactacatacatgagtctggtaattctcatttttaaataaagcagcagtgctttttaagctttctccaagatttttttttttttttttttttttggtagtaaagcgtaagttacaaatggccccattttttatacaatttcgtaagtatttactgaatgctttaagtgtctagacctttacttggtttgggaaagaaacctgaagagaaataactccctatcctcatcaagcacccacccaatataactggagagaaaaatatatactcaaggcaggttaaatattacatttgttttctaggtctaatatagacctttctgctttctctctctctctctctctctctctgtttttagtttgtaaggcagggttataagaacaatgtatcaaaatgtcagcaatctaaaaattaagttgtcagctttttctctgtactgcaaattacaaaagaattggtgctaatagaagcttacaattccaaagtatgcaatttaaccaatcatcgcaaggactaaaaatgcaacaccaaagacatttcaaccaagtaatctgcagttctggcatctaatttcaacttgtcttcttgtgccattcttcccaatttgtttcttctttatgctttgaaactgtgctctggaattgctacatagttaagaaagaactgcccagagctcctacatacataatacactcacatgaaaaatgtcagtcatggaaaagacaaggaacatctgcagccattctgtggttcttcattttttatgctgatattactataaattcagaaaggaaaacatgaaatatactttattgcttccgaatttcagtcttatcatttattcaacactaatttgggtgaaatatgtctctgatcatctctgcactagaattctaaattaggattaaaatgctaaattataaaataattagtacataaaacaaaaatggaaatggaaatcaattactccaaatcactgcagatatcttctacttatgaaacacctttttccattttttcctattgccaactgcaatcacatcacttaaaaataaatgagaacattgcctacccaataagtaaattgcatctttagagagaccacatactttttttaaaagacattactaataacctaaatcaagaatttaaaaagaatgctgttttagtacaaagaacagtaagaaatatgttgcctcaatatataaataaaaatatactcatttttcttgttctttaattttgtaaatggcccttctaaaaaattacagttttctctacaaaaggaatattcagtgctttctactatttcacaaaaaacaaacaaacaaaaaacgtctccttccttactcttggagacacattttcccatgcagtcttatattcatttacacctttcaattctccaaacaatacctcgcaatgcagttcaacttgagaaaggagtctcattgattgatcaggcaaagttttaaagccagcaagatgcttcagatggtctggttttgcctgccccacccttgtttcctttgagccatagtgatgtcacaacaccaggcaggacaatgacttcactgctccagtccttgcttctgagcacagaattccccacagccaaggcaaatcaaataacagcagaaccctcccgggctgagtgcctgatgaattcccaacaaatcagcagctagctagccgtttgaaagaaatagatgcagcgattgcacgattaaggatctctctaactgaagtggtgctaaagataaatttgattcataggtttcaatggtgagtctatatttcacggaaaactgatggggtacttaggggagactatgggaattaaagacggccagggtagattactcaagaaccctctctccgccgggcgcggtggctcacgcctgtaatcccagcactttgggaggccgagacgggtggatcacgaggtcaggagatcgagaccatcctggctaacacagtgaaaccccttctctaccaaaaatacaaaaaaattagccgggcgtggtggcgggcgcctgtagtcccagctactcgggaggctgaggcaggagaatggcgtgaacccgggaggcggagcttgcagtgagccgagatcgcaccactgcactccagcctgggcgacagagcgagactccgtctcaaaaaaaaaaaaaaaaaagctagcagggtgtggtggtggtcgcctataatcccagctactcgggaggttgaggcaaaagaattgcttgaacccaggagtcggaggttgcagtgagcggagaccgtgccattgcactccagcctgggtgacacagaaggactccatctcaaaaaaaaaaaaaaaaaaaaaaaaagtctctctcttcattatatatactcaaattctcacagaaaggaaacatttattcttcagtctactcttggagttctattttactggagtggacatgaattctaatttgtgaattttagggaaagcactaacttaaaagatgaatgcacatcatacaacacggaagaaaatacttttacagcaagttcctgccacacttaatctaatatactatataagtccagaaaagattcacaagataacagcatcacatctctcagtacatggatagttgcctctcttctacctaggtggccctttaatacatttgaccaaccagtttttaaaaaacaattataaataaaattgcatccgatcaagttaaaaaaaatcctgatcttttatttcaacacaaagttgtccaaagtccaagcagtgtacatgaactgataaaaaattgcttttaacctaaatcgcattcatgcagaagaaatgtcttaaaaattaaacgcaaatatttcattgagacactgacatttgacctacagctcctgaatccttcagctaaaagcggtttacaaattaaagtggctactcttcttgttatggatgaattattcacaaaacatgttctgttttgaaaaacttattttggctaaagtgtattaactaaataaacttgatgcagtaagttgtgcatctgatattttgcttttctaaaccaccagaaaaccataatgcaaatgagacagtattcagcattcagctatcaatgccttgcaaattaacaaattgaagtcacgcttctccaatttagtatttattccctctcacattaattttgttactccaactaaagtttttaaagtttgataccaaaattaacatgcattttttaaacactcactctgagccaagacagaaatcacctctcagtccccagagttcactggagcttgatgtgctgctctcttttcttaatagggcttttctgcttaatttgctgtaattgggactacgtccatggctcacagacataagcagaattttatcatttttgtttccttgagactttaaaaatcaaggtaaatttcaaaaacaatgtttttaagcacttggtgtgacgcttcctgtactatagaagttaatgctaccaagacaaactccagcacacctggccacctcaggcagcctaaaattctcactgtgccccactccccaccccccctcaacaaaaaggacaggcagggtatctgcaaaagcaattccgcgagactaatgtaaaaaagctgaaacaactta

SEQ ID NO: 1245141 - DNA, 4001 bp, Homo sapiens
ttttgtttccttgagactttaaaaatcaaggtaaatttcaaaaacaatgtttttaagcacttggtgtgacgcttcctgtactatagaagttaatgctaccaagacaaactccagcacacctggccacctcaggcagcctaaaattctcactgtgccccactccccaccccccctcaacaaaaaggacaggcagggtatctgcaaaagcaattccgcgagactaatgtaaaaaagctgaaacaacttaaacacgcaatggaagcactgcattagcaggactgcccggccctctcaggacctcccagcccaacctccacaagtaattaacaccacatgtttcctttatcattctatttgttctgttccgcaacaatctctaccaactttaaccctgggctgcaactaacggaaaaaccctagaaaacttcagatccgtaatataaaaagaaaattgaaaagaatactctcattgcaagggaccacagttacaatttactaggtaaccacacccaccgcattgcagaagccatgaacttggcgggcgtgggggggaaggggaagaagtccggcgagattagaggggaaatccgaaaaagcaagcccctgcggcagcagccaggaaacactcgccaggaactggctgcgaccccaactccagcggtccgaagccctagcctccccacccccaccgcggcagagccgccttcgcagacacctcccgaggagaatcgcggccccgagggcgccaggtgagtcgcgccgccccgagcccccgggccacggcaggccgacccaggcgcccccggcccgcccgtgctcccgcgcccgggtgccagaggcgaggggccccggcaggtgcccaggcccagggcaaccccgcttggacgctccctcctcctcccccaccggccgggggccgctgccccagtttggggaacgaggcaagttatataaaagcggccggcccccctgcccagcggggatgctttgtgcggagcgcaccttatcggccccgcgctgcgcccgcccgcgcctgcacccgggacgagcccgctgccgccgcgcgctgagcgcagggcccctcccgcggcccgccagccgccacccgcccgggcggcgccgcagtgtcgccccctgtcccccgcacctccccgggggaggggccggcccgcgctcgcccccagcccgaggggcaacttaaaacatggcgccccgggcgggggatttgtgcaaattggcggagaagggacgcggggaccgagtcgccccttcggccagggatcccagggaggcccccaggccggaggccggggctcaggctctgcgcgccggcccagccactactgcgccgcggcgggcggagcgggcggggggcgcggcgcgcaggctcggcccggtgggggtcccggcgagcgggagggcggttggggaccccggccgcgccgggcgcggggctcgggattcgggagaccgcgcggcgccgaagccacgcgtcagccccactgtcccgcgcgcctcgccccaggcctcgggctcttcctccgcacctcgtaaagccgagaccccctcgcagtcccccactccgagaggcggaaaagttacctgggatcagcagggagcccgggcgcgccgcggcgtggggactaggctcgggcgcgcgtcctcggcggcggtgcgcaggagactcgggcgtggggaggaagccgcagcccagggctgctcgccgctgttccccccgccccctgttgcaggagacaccgaggctccgcggagctgcggcgggggcccacgcccagagaccgtgcgaggaaagccaacctcgtcctgcctgccctcccagccgcgggggagggggccaccgcagtacttcaggacagttacatgggcacagcctcctccgtcctggcgcagggtcaggctccgcggacgacgcctggagacagctgccaatgccaatagctttagccctttattcccacttagatgatggcctggcctctccagacccctctcccctcccagacatcccctgtgagaaaggagggagagggtgttcctgaccttcaggtgagttatttattggctagggactgcagtattttttttttctttttggaaagaaaataaaatcaagttggtggtgtcttcaagtcatgttaatagagaagatctgaattaatgcttgataagagaagtcgcccatttttcagcaactcagctactccgtcctctccagtatctataaagctttccaccgaaatttaccttgattttaaagagcggaggtggctcactgacttgtaagtgaaagaagtaactcctggtcatctcacaatatcttaagatctaaccgactaaccaagatatttaagaaatatttttatgggcacaaaaagaatagagtgaataagacatagcatctgatagcacaacagggtgactatagtcaaaataatttgattgtacattttaaaataaagtataattgaattgtaacaccaatgataatgcttgaaggatagatttcctgttttccatgatgtgattattacacattgcatgcctgtatcaaaacatctcatgtaccccataaacatatatacatactatgtacccacaaaaattgaaaataaaatattaaatttttttaatttttaaaataaattgtatgtatatttaaggcatacaacataagatacatatatagtaaaatggttattatagtggaacacattagcatatctatcaactcacatagttatgcatttcccccaacacccctctacttgtggcaagagtagctataatatactcatttagcaaaatcctgaatacaagacacttcttagctctagtcctcgtgttgtacatcagatccctttcatgttgtacgttattaatttttttaaaatagagccttctccaaatcatccggttgcccctccaggagctcagggactcattaaaagagggaaaaaaatggattcacaaaaatattgcatttgctactgggtgccaaagacaagatacagaacacgtgcctctgggaaagattagtgggcctgatctgtcagtgaggcccggagacgtggggagacttggcgcaggtttctagaatagggaagactttggtaggaaaggaggatggtatttgatttccttggctggagtggaagggttttttcatgttgaagagggagaaggttggaaaattatagttactatgttgctatggagtttatgggactatattctatagatgtgtagctttgggaaattttgagcaagaaagtgtgacttaagtaatgttttaagaaaactaatcttatggctctgcaaagactagaacagatgggcaaataccaggttggtgttcggaggagactatggtattaagacagttaccagaggtaatgagggcctgaattgtctttcaggtgacagataaaggtgacagttccaatagtggatgtttgggaattaactgcatttcctgtcagaaagtgttgcgtatgagtattagagacatatatgcacatatcacatacgcacctgtatgactctgtgtgtgtgtgtgtgtgtgtgtgtgtgtgtgtgtgtgtgtgtgtagcacataaggtctgtgaatgaagaaagaattcattttccttttttgcatgtacactaaagcactccattgaaagtggacttgaataaattgtattgtttacaataaacactcatttggcattatcattcaagacacagatggctccatattttcattcattttgttgcagtatttttgctattctttaaaattgaaagcaaactttttcttatgactcatgaatcttaatctttgtggtgatgaaaatcagcaatagtgtctgaatggcaattttcttgggagaaaaatgttagacaactaagtatttttttaattagaaatacctatctaagccaggcgcagtggctcatgcctgtaatcccagcactttgggaggctgaggccggtggat

SEQ ID NO: 1245142 - DNA, 4001 bp, Homo sapiens
agagaaggcagggtgttatagctcagaaggtggaactggaaggaagggaaagctatgcaggctgaccttccgcggacttctcattagtctgtttacgcagtgctccaggagaacttttcttcaaattcagaccacaggacccatcctctgtgaagttcccttgctgttgctgttcaaagtgcgaggtcactttgctgagatcccttaactttctcatgtatctacacaatagcctcaaaatcataacgcttccttcctttttggcctaccaactaggatgtgagcttcatatgggcagatgtgaaccatggcatgttcatccccgtgttcctaacatttaaatacaaaatttctctaaaatggaatcaaacacttctgaaagtagtgagatcccagtttctctaggtattcaaccagagactgttataaagggactttaaccatgcaactctaccactctgtaacttctaaatttccaatatcttaagtgccttcttatttgaagtgatttcaccaatcccaaagagtttaaaaacacaactcatgaggaccagtgtgcatggtttaattctatttttaaactctttgggatatatagtttaatattctgattttaataatgattgacctaaaaattattaaatgtattttcagtgcagtgtctttaattataagccctggtctacacaaacatttgttgaacacctactaaatgccagactctgggaataaaagaatgagaaagagccctgccctcaataacttaacattccactaagagctgtatttccattattgggattgagaggtcatagcctagctgcaaactcggttttatacctctgctcctcagtactgagaacgttttcctaaggtactacacattctaagaagactattaactaatgttaatagttaacaagagaggctctttgaccccttggtgtcactaagtctgaactgtaattgatccaactgggaactgcctatggccagtaagggaaagtgaagacggagactcccaaggtcatttaagaaccgacctgaacttgactctttccttgttctagattatgtgtaacgatatgggcacactggagcccaccccgctcctacgccgcaaagcagcacaattacagcctgggaggggcaagtcttgcggggcccgtcggtaactgccattatttgaatgcgatataggagatcccacatagaccctgctctaccgggttagaatctgtttctaatcacgtggaatttagatttaaaccacagttagatttgggatttaccatcgtttctactttcattcatttagtggcttccagccctctcgcggcccagtcttaatccatcgcacttcagagggaattacgagggagttgcggactggcgggggcgggggtctgtaactaacaccaggtgcctgtgagagagccccaagggcgggggcagcacctcctggctgggttgggtccgcctggcctcgcctcgcctccgggatccttggcgctcagcgccgccctcccgctactgcgctacccgccagagcccggcgtcttccctttccttgtcttgtggacgccgcccttcgctcccgggaggatttcgcctccagcacctcaggcttttctggcgcaaaggtcgccagcccgagcgagcccaggcggcggcttcacttctgcagagggaaagcgaaagacgcggccggcgggccgagggggcggccgaacgcgccgcgtggttgctgctcccgaatccgcagcggcggcgccagggcggtcaccgagccctgcggaccccggctcaacttccagcgccactcgggtgccccgagcccgccgcagctcccggcgcgccctccagccgcggcacgcagcccctgacgcgcccggggcgccctcccgcagcaccagccaggccaccccacctcccgcgccgcgcttccccgccagccgccggccaggagctccccggcttctgagcaggacgcgccaaagggagttgggaggctcagcagcccccagcgtcgccttctcgggtgacgtgacgctctctctggagcgcgggcccgcctccgccaagcctccaccgcaggtccttacagccgagccacgggaagatgcaacgccgggcgaggggcgcctcccggattttgaaaaacagcctcattcgcctcgggaacgcctcgatcccccacccgcaccctttggccagatgattttaatcctgggattccgcgttggtcgtgggggtaccgggagctggagctggaggagaggagccggcagcgcggagttgccggggtgcagctgcgcgcagctggcggcgaggggaggcggtccctgcggctccgccgggctgggggaactggctcctgcgcctctgcctcccggaggatcgcactcgctcatccttacacaccacacacacacacacacacacacacacacacacactgccgctagcgccccccacgccacaagccggaatgcggaggtcagagccactgtccacttgaaagcaggaaagcaggggctgaaacgctgagatggaggcggaggctctggcctcatctgcgaggttcgcaccttcccggaaggcccccccctcccccgcgtttccccagggcgagcaaggtctagcttctgagactccgctctctgggctagcggttcgagctgcaggggggcggggacggattcggagggagcactagagagagagcccgcgctcactcctgccctcctcgcaaagaactggccagccccactcgcgtccagcccacaactaggctgccgggaccggggagccagaccccaggtcgctccaactccggcgagggcggggaggggagtgacagcagcaactagcgcgcgctggcaaaagcacagagtctcggaataggctaaacggccggcgcggaggggtggaggcaagagggggcggaggaggagttgcccgagcggagagggatgacgtcctccagggccttgggctccgaggaaccgaagactggtgcgctcgccgggccccgcgcactagctctggggttcgcagaggcgccgcgcccggcttccgcggcagctccaacacagcgcgcaggcggtcgatcccggtcagcttaaaccgggcgcaagccctctgtccccctcaaagcacctctctgctcgtccctagtctccaggtgcccgtctgagagtccctgtcgcctccgggcggacccggccaggcagcccccggtcgggccagcctcgccccttcctcgctttctcccccatcgacctcgagccaagggcaggcggcccgcacccgcgcccctgcccacggggctaggcggcgctcccggcctacgcccggctgccaagaagagaaaggcgctcacctgagtcaccgaagccttcctttggggcccctcccggagcttgttcgcagcccgcaggcacaaccttccttggagaaaaaaagtagcgcaagggcagagagaggtagggctgctcacaggtccctccgcaggggctctttccttcgaattctccggggtccagtctcgggctcggcggcgggaaagagctcctggaggctggaaggggccgccagacccgggctcctcccgcagctgcggtggcggcacctccaagttgccacctgcagcgcgcttcgggcgcctgtgacagcccgcgccgctcagccctcgcgggcccgccctccccgtccgctcgttggctgcgcccggtgcccgggcggtccccgcgctctgccccgccctgagcccgcctcccagccgcgcgctcgcaaagtatgggtctccttacaggcctcctccctgggctttatagccagcgggctctgcaagcagggatagaattacacacacacacacacacacacacacacacgcacacaattttgtgtagatagggagtggagggaagggagaggctatgataaatgtcccttcgtgtgccttaaggggacctggtaacttggtttcttttgct

SEQ ID NO: 1245143 - DNA, 4001 bp, Homo sapiens
gtcaagcactatactcattacctgggtgacaaaataatctgcacactaaaccaccaaggtgtgcatttgcccatgtagtaaacctccacttgtaccctctaaacctaaaataaaagttggaaagaaaaaaaaagagcatcataatgaaagaaatccacataagtcatctacagtctactaagtatggtacctatgaacactaccctcctgttaaaaccttgttcccatgagaaaatcggattacagtatcatgcttaaattacacctgctttggaacatcacccacttctggggaaaaaaatgtcctgtacttgtaataccatcctccttatttcccaaatgtaaactctgtttcaggtaagccaaaattatgaggtctggccatgcgggagcagcatttaatctgttcatcttagaaaatatatataaatagggtgggcgcggtggctcacgcctgtaatccgggcactttgggaggccaagatgggcggatcacctgaggtcaggagtttgaggccagcctgaccaacaaggagaaaccccgtctctactaaaaatacaaaattagccgtgtgtggtggcgcatgcctgtaatcccagttactcgggaggctgaggcaggagagtcgcttgaacccgggaggcggaggttgcggtgagccgagattgcactccgccgagattgcactccagcctggacgacagagcgagactccatatcaaaacaaaaacaaaaacaaaacaaaacataggctgggcgcggtggctcacgcctgtaatctcagcactttgggaggccgaggcgggcggatcacgaggtcaggagatcgagaccatcctggctaacacggtgaaaccccgtctctactaaaaatacaaaaaattagccgggcgtggtggcaggcgcctgtagtcccagctactcgggagggaggctgaggcaggagaatggcgtgaacctgggaggcggagcttgcagtgagccgagatcgcgccactgcactccggcctgggcgacagagcaagactctgtctcaaaaaaaaaaaaaaaaatacatatacatatatatacacacacacatatgtatatatgtacgtatatatgtatatatgtgtacatatgtatatatgtgtatatatgtactataataaaatgaaaatccagactgcacttataaacaaatcaacttaaaatcactctaataccacatgtagtctaatacaggaaactcagaaaattcaaacacttccctactgtgtgagtcccgccctgggttaatttctagccattcatgccccttataaacaatcaagacaataagaaataaacagaggcagcactactatcatcttgaactttcaaagtgatcagaaatggcacagcactagtctacttataaagttctgccaaaggtaccttctccgcgtggaggaggggaacattccctctttatgcatggcagggactaaaaatgttctaggatataaaagagtaaagagagagtcaacgatggggctggaaagagaaaaattatttcacggcaggaaaccagacccaggtgaggaaagccaagagagcagaaaaggaagaggccagtgaagtcacaggagggagaaggaaaaatggggtcctgacagagtgtggcagggggatatggagaaggaatggaggagaagggccggtgtcaacgggtggtgggatcaaatattggaaggtggaggcggaagatgcagagggctcagggaacgggagtagaattggctggggaggccgaagagaggagcaaggagacacagcacactgccagagcctcgggagggtgggggagatcctcacctttgttttagtccggctggccttggccttggcccggcgctggggcttcaccgcctcggccatagacccttccgcggcgccgtcaccgtttgtttttgtcaaacccctgcgcttcaagcaacctgcccggttctggcctccggactgtcacatgatcgaatctccgccactcccggagaagaggcggtgagtcggcgcctctacgggccgcaacgtaggacaaaccactccaggacgcatttgcactggaggaaggcaggcccgcccccttcccggagcccaggccccacccctagccctggctccacccggcgcgcaggtgtcttgggttgcgctggacaagggcagcgacccaggctgacccacctcctccgtctcccggctctgcggaacctcactcagtgcggatcccgggcgcgctcgcacacctcacccgcgtcggcttgaagaaatccggaaagtgggtttgccattcttttttttcatcttcagataaaccagatccagtcggttagcctaaatccgcactgcgcgcaaggaagaaaccctgacgcccatcggggtgtgcacttcggcgtcctcttttgtaaaggggaatgatcacacctgccttttcggatgtcatgagaatttaatgggctctcccagaaaggtgcctggtagcggcaggcatgtcggtacatggtagttattaattatcattactgtacaaattcccagactggaaaaaagacatgtgctcctaaaaggacaggcaaacaggtaacaagataaataagatccgtaaaagtattcttagtatacattttacagtgtgcttcatttgaaatttccagatgtgaaaaacttgtccacatcttcccttcccagctctaggatttctgtgatttgcttgtatccttattgttagtgtctgtcaatcctcccagaatgtaagatcctcaaaggcagggttcttaattttgttgcctgatgtatccaagggtctttagaacactgcacgtagtagcacatagtagatactaaataaatatttcgtgaatcacacaaatgagtatgagttttgtctggcggtggggtaagatcgttgaaatggagtgggccaggcgcagtggctcacgcctgtaatcccagcactctgggaggccgaggcgggtggatcacctgaggtcaggagttcaagaccagcctgggcaacatggtgaaaccccaactctactaaaaatacaaaaaagtcgccgggcatggtggtggacgcctgtaattccagctactcgggaggctgaggcaggagaattgaacctgggaggcggaggttgcagtgagccgagatcgcaccattgccctccagcctgggcaacaagagcgaaactcccatctcaaaaaaaagaaaagaaaagaaaaagaagaaaaggaaatggagtgtatgggagggaggaaaaagaccatccacccacctgtagcataccctagaataaaaaatccagcaatatggcatgaaaaatggaaaagacttcagagatgcagtttgcttgtttgtgatgatattttaattgagtatataatacaatttcgtgtattttgttcccaaatcctcaacaacaaaaattattaagctactcagaatatacatgtactttgtatgtcctggtgtgtgtgtgtgtgtgtgtgtgtgtgtgtgtgtgtgcatgtatataaagttatcacctgcaaagagttggccaatataaacaaaatctttataccaccattactatccataacttttgctgatatttctcccagtctggaatacccttgctctctgacctctcccagtttaagtcatttatgacatttaaagttctctatgtgctacccactacttggtcagcaaaacacaactgaccctactctcaatttgcatgttttacagtttagttgggaagcagacacaatgcatagatacattgtgatacgtgtatcatcgcctaactggtaaaagaggcatacattggaaagactgaatgaagggatgacaccagggcaggggtgagttccacacaaaaaagaggttaatcagggaggatgggagaaagaggagaaggaggaaagaaatgaaggttctttaaaaagcacctcagcctggcacagtggttcacacctataatcctagcattttggg

SEQ ID NO: 1245144 - DNA, 4001 bp, Homo sapiens
tacaggattataatattgattgagaaaggtgagacaatagcatattttcctcagttagcaatgataaaggagttctagctcgtaagccaggacaaattttggaattgtgcttccaaagtcacatatctgacccaacagtgatactctgcattctgcctaaaagggaaaaagtggctctattacagtcctagtttcctcatttcctcacatgctctaggcctgaatttgcgacttccaaattaagcacgttttaaagcacttctcatcctactcccatgtctaattccattgattagattttttgcttttcaaaaaaaaaaaaaaattcaccaggcacagtggctcaggcctgtaatcccagcacttttggaggcccaggtgatcacttgatcccaggagttcgagaccagcctgggcaacatggcgaaacgccgtctcaacaacaaatagaaaacttagcctaacatggtagcggacgcctgtagtctcagccactcagggaggcggaggtgggaggattgcttggggccggggagggaggtcaaggctgcagtgaacagtgattacaccactgcaatccagtctgggcgacagagcgagaccccgtctcaaaataaaataataacttaaaactttattcgtgttggtgtcctgtgtaaagcagaaactaagtacttgaccagaagacaaagtgaatatagcatagttcactgcaacctggatgttttcaactgaaatctatgttttatccacttttttaaaaaagccaatgctggtggggggactaaccacaccttatgccaccaagtagcgcttttgtttcctgcgaagcttatttattgagatatcgttttgtaatactatctagatactgtgtgctgcgattcctgtttaaaggaatctcattgcagctaagactacagaaaacatggttcatagtacttctcaaatcgcaaagcttgagctccttcctcctcctcttcctccctcccctggtccccgctgcgtccccatcgccccggaaaataaagcacacgccggattttcggacgcatcattgagaggcggagggagaggaggtagtcttcgaattgttggacttgctatcccattctgcctgtgcaaaataaacccccatagtaaaataatcttaacccgtgataaaaatcgaggacccaattctctttggttcgcctctctccatcgctataaacttcactgcggccctcaatgcactcatttctactccagagccgccctacctgtgccgagacccccatttgcagcatgagttactctatgaccttgggcccgctcccctcccaaactgaaggctgtaaaaccaagaccccacatcgcgccccgcaaactgcagaggcctccaggctcaggccgggtcagcgggttgcgccaggaggcggcgagggactggctccggtgaagcgccgggaagagaaaacgcagggggcggagacggggcccggagctacctgcgggaccagcactggcgctgccccggtgctagcaatggctgcgcgccacctcggggctcccggagccctcgcggcagtgctgggaactccggccctgccccgtcggcggtcacgaccccttatgaacttcgaccgcccagcaaacagcggcaggtggtgcgcggacacgcgagcacgttagctgcctacctcaagcgacggcgtcttggagcctagagcctcccacctccctcccaggggcgcgaagagctgggaccggagcagtaggaaggggcgtgcgaggcaacacgccaccgagggtggaacaggaagagggagaactgtccgctccctgaaggggctggcaaaagagaggtgaagacacaggcggcggggaccgtcagggacgctcgcgtaccttccttttgcctggcggagggtcagactagcgccagcggatcgcctcacatccgggtatcaggagacactcagctgcttctgctgcggccgccgcctcccccgcggcgcaaacaccaaacttccggcgacgacggcgacgcctcgctcgtcagatgggagttacctgtgaccgtcttgggtgcgcttgcgcaacgctcctcttcagccctaaccggctcagctgacgtgcccagaagacgaagatggccgccacgctcactgcgtgtcacgcagtttttcaccccggcccggacggctgggcgtcgaggaaaggcgagctagtgtccatcctcagcgcaggcgcggtgggaggcctagcgcgcgcgcctccgcgggtggtcgcctggcagggaagtggcggcgccccctagcggcggccgcttgtcgttcctggggtcatcgctttgagctgaaaaccacccaggcccccagcggttgtggtttaccttggaaatttgtcgcaactggttgccatgtaggttttggctgcttctgtctgcgatgtataatccaagtgcctttggtcttccatatgagccaatgtaaagaaggagggtggggccgggcgcggtggttcacgcctgtaatcccagcactttgggaagcagaggcgggtggatcatttgaggttaggagttcgagaccagcctggccaacatggccaacatggtgaaaccccgtctctactagaaatacaaaaattagccgggtggtagtggcgtgcgactgtaatcccagctactcgagaggctgaggcgggagaatcccttgagcctgggaggcggaggttgtggtgagctgagactgggccactgcactctagtctggacgagtgagaccctgtctcaaataaaaaaaaaaggagggtgcagtccctacactgccctccagcacctccaaaaaatgcagggcttcgccctctccttgcacactttcttcctgtgtatcagagtgcaagaatcatcagaaattgtaaaatattctgctagacttagtcagactgagtgttcagacaaagctttggctcgctcttggacgcctctagagatagaatccaagattctatcactaggattcatggttcccacacttctttcttttgtgacaggaaggatcttgctgtgtagccctggctggtgtgcagtggcacagtaacggctcactgcagcctcgacttgggctcaagcgatcccacctgcctcagcctccctgagaactgcatgtatgaagcccacgacaccatgccaggctaatttttttttttttttttgagatggagtctcactcttgtcacccaggctagagtgcaatggcacgatctcggctcactgcaacctccgcctcccaggttcaaggaattctcctgcctcagcctcctgagtagctgggactacaggtgcctgccaccatgcccggctaattttttatttttagtagagacggggtttcaccatcttggccaggctggtctcgaacttctgaccttgtgatcccacctgcctcggcctcccaaagtgctgggattacaggcgtaagccaccgcgcccggccgccaggctaatttttttatattttgtagggataaggtctcactgagaccagcccaggctgatctcgaactcctggcctcaagtgatcctctcttctctccttggcttcccaaagcgctgggactacaggcctaagccactgctccggctactagactgcttttgaacatatgttctgtgctaccctttgcttatttgcggaactgtgaggctagttcggtacttctgcatttcagaatgggaagaggtgatcataaatgggttttccccttcctgccctccttctttgaagccaagtacaaccaaaatgtgctctaagtttgtcaaacctgatgtttttctgacaattcatcttccacgaatagtgagctgcctgtcagtttgcgcagggagatgttatggcttaaaaacaaaaacgaggctgggcgcagtggctcacgtttgtaatcccagctgtttgggaggtattgatgggtgaggccattcttcacattaccatagttgtgttacttggcaaaga

SEQ ID NO: 1245145 - DNA, 4001 bp, Homo sapiens
tatctggctcatttacttacattaactgctttcaagaatccttcccctctattctcaaatgaatttacacaacttctagttaagttttataaaaactgaaaaatgtaatctctatatatcccatcatcgtggagttttcataaacacatagttaagaggcttttaatctaataactttttttgttttgtttagttttttttgagacagtctcgctctgtcgcccaggctagagtgcaacggcgcaatctcggctcactgcaacctccgccttccgggtttaagcgattctcctgcctcagcctcctgagtagctgggattacaggcacgcgccaccacgcctggctaatttttgtatttttagtagagacggggtttcaccatgttggccaggctggtctcaaactcctgacctcgtgatccaaccgcctcggcctcccaacggctgggattacagaagtgagccactgcacccggtgtttaaaaacattaaaacatgtttttaaaagtcaaaattacactcattttctgtaaaattacaacagcaattatctcaagaaacttaagcatcaggaacagggaatgtaattgcctggttctaatgcttgtatatgcctataatgcattcgatctgtaagacctacacttttgcagttgtcaatattcatgtaatgagattaattctcaacttacctcatttcatataataacaaatacaagcagtcatcagaaattgatgggtcatccttatttgtgaaaaataggcctcattcttggttcaaagtttgtaacctcaaatgggctaatgcccacaatttagaagtgattagattggaaagcacaacgctgcaaatgctgccttccccaaagccaggtctattcattaatatacctgtgcctactgacaagaaggaaggctggtaaagcacattttcaaagctgttttaaatggatcaattttggtaaagagtaattcaagacggattgtaaatctgatcagttttacaaccttggaaggtggggacttgacgcacgacgttaatatgcacacgcttcaataatctatccacaggtagttttgaccctgatctcaggttgaaagtcctcaactatggagctttcgagtttcagtacagtaggcgctttcactccccagtagaaatctggggtgatggccaaaaaaagtgtgttgtctcccccaaaccacaccatgccaagttcagccaacgcagactaatgcatccttaggtatttgtcaagaagaggtataggcggtcccttttctcagaatctaacaggtaagaatggcctcttgtggcttcccaaacacggcggtaaggaccagtctgccagtccctaataagaaattgctaattttaaaaaccattccgaacgcgggcgcttccgggcccctcttcaactggcttcggaagaaggggggagaacacggtgaagggttacagcaaaggaggctgaaaaacagtcccaaagcaagatttgccaggacactggctcgacccggaagggcggggggacctctctcggccgccggggtctgtggggtcggcgagtgtggacgacccgtctggcagtcgtacactgccacagcccgaagagcggcgcacgcggagcagttgccgggttcgcgccgcgagtcagctcccggacacacgcccagggttgaaggtgccctctagacccctcccgctgccccacagaggcctgggcccatgctacctcttaggacgctggagccgccgccgccgcttcccgccgcgcaggctggaccacagctcctcggatgccacggcggtgtcactcagcagagcagcccgacaaagcgtgggtccgcgtgcaggaacccgccgggctcagccggacgctagccccctgccgcccccggccccgccagccgcgcccactagcaacgtgctcgcgacctccagtgcccgctcagtgaagcttctgcatgccgcgcgcggcacgtcgggactcgtagttccggcgcggaggacgtgcgtcgcggcactctcgcctgaccgtctccacgtgactctcgcacctccggaagtgacgtaagcagacacgcgtggcgcgggccgccgtttccgcaaacagaatcgcgtttggctgtgctggtgagtgtgacggctggaactccggcccttcctttctttgtgtttgtccctcggccgccgtggaggggtggaactggcactcccacccctgacatgggctcacttcgcattagccctgtgcttcactacccaacgcgtgggtctattgccttgtgtcctcagtcccaaggaaaatgggaactccttggggtgggcgggcgctgttcctcctccagactgggcgagcccgggtgggagaagcagctcgaagagctgctccagctcgcgccccagggccgtgctggggaggggcgtggggtccgcaggtttgtcttcagcggcgcttcggaaacctgaaccagaggttgagtaacaggccgcgctaatgacggagggggtgaacttggctggagaagtcccttctcgcctctgtgcgtcctctcgggccccgtggtagagggtcaagcgggcgggtcgggacttagagcttatcccgcttgggctttatcccggcggccctggcggcctgctcgctcgtaccctgaggagctgaaatgacgcagagacatagcttgcttcggaggtgtgactggaaagccgggtcgaaatgttcgtgtggttatttatcgcgtgtccatctccatgtcagtcgaccacctttcgaaggtttcttgaagattctgagggacagctctcttccctatggagtgttttcattattccactttgagtttggtttgggttttttttcccccaatttgttaaattgatacatagaagttgcacatatttgcaggtgcaggtgatactttgatacatgcatacaatgtgtaacgactaaatcagggcaattgggatatttgtcatctcaaacatttatctttatgttgggaacattccaatttttcttttagctattttgaactacacaataagttattgttaactgtgtccaccccactgtactatcaggcactagattttatttcttctggggttttttgtacccattaaccaatttctcttcttcatcccgctcctcttcctgctacccttcccagtctgtggtaaccaccaatccactctttacctccatcaggtccacatttttagctcccacatgagtaacaacatgatattgtcttcatgtgcctggcttatttcagttaacataatgacatccggtttcatccatgttgttgcaaatgacaggatttcattctttttaatgactaatattccattgtgtatatatgctacattatctttattcatctgttgatgaacgcttaggttgattccatatcttgactattgtgaataaacttgagactgcagatatttcttagatatactgatttcccttcttttggatctgtacccagatttgcaaaactgttcatcggacaggggattaacaaccagaatatagaagaaactcatctcaatagcactagttctattttttgttttttgaagaacctccatcatacttttcccagtatgtaaattagtggctgtgctaatttacgttctccctaacagtgtacaagtgttcccccttttctgcatcctgcatcctcatcagcatctttttttttttttttttttttttttttttttgtgtgtgtgtgtgtgtgtgtgtgtgacggagccttgctctgtcgcccaggccggagtgcagtggcttgatctcagctcactgcaacctccacctcccgggttcaagcgattctcatgcctcagcctcccgagtagctgggattacaggcgcacatcaccatgcccggctgatttttgtgtttttggtagagacggggtttcactatgttggccaggctggtctagaactcctgacctcaagtgatctgcccacctccacctc

SEQ ID NO: 1245146 - DNA, 4001 bp, Homo sapiens
caaaggtaaatgaaaaatggcattcgttttctatcttaatctaaaggattactacattaaatttgtaaataggtattcccctctagttaaaccatcaatgtttgtttactataattagtctatcagcactcccttcacaaaaaaagaaaaccaggggggaaaaatttataaatgaaaaggacttttatgggttactaagaaaaatcaaagagctcttgcaacttaaaacttcataaaactggcccggtgtggtggttcacgcctgtaatcctagcactttggaaggccgaagtgggcggatcgcctgaggttgggagttcgagacgagcctgaccaacatggacaaaccaccatctctattaaaaatacaaaattagccaggcatggtggtggaggttgcggtgagccgagatcacgccattgcactttagcctgggagacaagagcaaaactccataaaaaaaaaagaaaaagaaaaagaaaaaaaaaaccaaaccaacaacaacaaaacttgctaaaacttcagtgtaacactagaaggggtcaatagaatctatgagtgactcacctatgttcaattcacgatgacacgatgacacgcgtcagaatcaattaggagcataacttgtcttagctagtatacctggctcatttttttaaaaaacaatttcaatctcacttaaaaaatcatttactttaaaaactttgtggtcccacattttgaaaatctacaatctcaaaaggcccacccatatgtaagcaactggactgaaaacttcccatgtgtttcttgaagattttttagaaaatagatctcttttcaaaccaaatgcttagatggtcactattttaggaaatgaataatcgcttaagaagtcatgtaagagtagctgctactatcttcccctttctgggatttaggggactcccacctttactgaagtctcctttgcgcctgaaagaacggctagccaagtttccaatcaactaaaggtgggcgtttcattcatatgatgtgagcccagcgtacgcagcagtctgcaaaatgcgaaatgtttctttctctccctaattctctggctcagctgaggagctgctgggtgcgagctttcgggccctcccaggttaggaggcgcctgtcgaggaccgggacccgggatcctcccggtcccagccgcctccgcagcgctctctgctcgcccgagcgcacactgcgtcggttcccacagaccgcgaccgcggagagcctgggctctggagcgcaggggggccggggtcagaccagccctccgcatgggctcggtgagatagggggtgacctggcagctcagggtggaatcacagaacgcgggctgggctggagcgctgcggacccgagagacagaggcgtggcaccccggatcccgaaccccgcactggcttgcgccccgagcccggcggcctgacaccggacgcggcacctccctggacactcggatcagacccgcaaactttcttccggagctcgggctcaggggtggcgagggtaggacggagaggctgtctggggacaaagggcgaattctggcgaaaaggggagagacacccccagcgcgcccacagagcactgccggctgcgtccccattcgggggaccggggcgtgcgcctctggcactccacgcaggtgtcgggaacccatgtccccggcgggtgccaccgccacccaagtccccgggaaggctggggaccgggagcgggtgtgatcccccctccccggacgcgcggcgcggggcagagcggcggcgggacctaccagcgcggccaggatgcgccggctcttctcgtcggtgcagcgctcggagaggacacccgggtgcgcgcggagcagcagcgcggccgccagcacccagcccgcggtccacgcggcgaaggcgaggagcgtgccccgcccgcagcgcccgcgcctcctgcaccacccggcagggccccgcgcgcccgccgcccgcgccatggccagccctgcccgcgcccgggccccaccgccgcccgcgccccgagttccgcactcgcgtagctgctccgcggctcaggcccgctcggcggggagggggaacgggggaggggccgcgcgagggttggggcaggccccgcgcctggggcggaggtgcggggagggcgtccagcagcagcaacaccccgcgcgccccgagcacccactgggggtccactcgccgcatcccctgctccaccctctctacttttctttttgcacttttttcccccaagaagaccagctccccacttaaacgaaatccgggtagattcaatcgcctctctctttggggactgattcctcaagactacatatctttaattgtcacattgccctcccccaccaacttctctgagaggccaggtgcccttgcccccagcgctctgtagagcgcaccctcgccccagggggctgcagcgttgtccccccccgtttacctctccactagaaccgcccccctctgagtctcaccccaacttgggttttctccgggccctcccgggagtgagatccggagcatgcagagagtcgggggtcgaggacagtcagtaggttctgggacgacccagccctccccttcccacgggcacccctgaatcaaaccccccgccgtctcccaggctgcacaaactctcgggcgtccttctcagggctgcaaagatctgctctctggaaacatctccgttaccccggggaggagaacacgtccaccacgtgtgtctaagtctatatttatagattcgcagtatcatctgggagagcaggcatccgtgttcccatcccaattgttctgtaaagcaggctggccctgggcccacagggcgtccctggttctcaccagcatcccccaccccacccagggatgcttctcactccctgaacgcctttccccaggatagggggaggcggcgccaccccaggggaactgtcacagctgaggggctgtgaaagccgccacgcccggggctcctgcattcactgaacaaaagcttattcagtgcccagtacgtgccagcccatcccggatcgctctcccgcctgccctgcgcctgaatttcacatgacccgttcccgagtttagagataatagaaacatgccctgatcactgcgtgctgtgattgtcccacaggagctggcttcttgcccttgtctcttctgcaactcgctgctttaactttgttttatggctggctcggtggtaggagtccccaggaatgaccaaacatcagatgaacaaaccctgagccccaagaagcacttcgggcacatcacaaatatgccccgaatgcaacagacccttggggtttgggtgtcactcaatcaacagcagggtttgggtgtcactcaatcaacagcggtaaggccaggtgaagctctctctgtgtgaagcttccccccacctccatccatcccagcacacgcccaaccagaagtaccatattttcacaggctggctgtatggaaactgtgttgtttcatttcaaaataggtgtggagcatagaaagcatcctagtaaaatactgcattaaactctcaattcaaggccaagcctgctggctcatgcctgcaatcccagtgttttgggaggccaaggcagaaggattgcttgaggccaacagtttgaaaccaacctgggcaaaaaaaaaaaaaagttagcaggcatggtgatgtgggcttgtagtcctagctgctctgggggtagaggcaggggacctgcttgagcccaggaatttgaagctgcaatgactgttatcacaccactgcactctagcccggacaacagaacgagaccctgtacctaaaaggagaaaaagaaatctcaacctgatgtgaagttgttttcctttcccaagaattgtatttggtgtggggaggggagtgcaggaatgggaagaatgagatgaagcagtgtgactacttatcttttaaaacataggaacagaaattacaggggggaaagcagaac

SEQ ID NO: 1245147 - DNA, 4001 bp, Homo sapiens
gggatcacaggcgtgagccactgcacccggccccaattgcacatttttaaggtccacataattaacaaatcagcaagttctatttatgtttttatgcgaatctatacgtctacaaggttaagtgtagacatacactgatacatttagcaagataaatttagtttgaaaacactttttttcaagtgacaggtttttgtctgatagctttcaataagtccaatattttaaaaacctaatgactgtgcttcattttaaatatctggcaaatcaaataaattacagcaggtacaaattaagccaacttaatacgctttctgctacacttcttacagtttgtgatatttatacatattcacattttgtgttaaaagggaacactgattccttaacaacatctaattttccacagcgatatattaaaataaccacctgctttgaccatagtcaatcattctatttttagcagcggacttttctttaccaaaaataatgcatacatttccaaatcagcttgaaatgcaggttcccatgccaggcataatgacaggccctctaattatatcaatccaggaagttcactcaacttacaaaggataaaagattcatcatataaaaatcattctgcttccccctaatagagcactatgtaaagactaattttagtaatagcagcaaattgattaaaagttcaagtttcctatttaaattcctgctttttctcctacataaaagaatttttgcaggcattgtcaccattctatttgtgacaaggcttgtggtatgtctagcattataggtattcaattaagaactattatcacagcactaagcaacagggctgggcttctgaaaacaggtaagtggaagtaatggagacctagagaggacacaggacatagttctggagattcagggggaaaaaacaagtagttcaactagtatgtaatagactccctttgtgtgcttaaacatagaccattggtttattagaaggcaaaatatgcatgactttccctatttataaatcaaggagtcttacaagcagaaagataatcctcaagaatgtaaaccattcttggcattatccctccatctgtaaactaactgcagtgatgggtacacagctagggaacagctcacgatataatgagagggatttcataaggtaccattatgcatgctgatacttctgatgcactggctcattttacttcttcacgctgaagatgcttctggaaagcagatgagcaagacctggcaatgtagatggcaacttagccttgacgttggaggtgcagaaagtgctgccccccacccgccagaccaacctgcctgcccgaggtatctgcttgggggatgagggtgtcaactgataaggttttgatgaacagactctacttccctaagttgtaaggtcatgaaaaacacgaagggagattcttggttacagaagagcgaaaatacgaaggcaggggcggagcacacgtgaatttagggcacgcatcccggagaaacgacctcttggacctgcacctgtcctggcaggtgcgcgcatccccggccacaggcgccgcaagaaaaaatatttccccgagaggctactctatttgtgtcataacttagggtaccccacgttgcagggtagaaaggatttcctccggtcgttcttccatacccttctcacgttgaagacggccacgggccttgcgccaagctggacgaataaaatacacggtgaagagagcggggccgcgcagtgacgggcttcccgccaggggaccccacccgcaggccctacagtcacctgcacccaaaggccctggcgcgcccccgggccgcgccaccgcccctgctgggcccgcgcagcgtctggaggccgagccagtgctgctgcaagatccgaccgcgtccagtcgccatagagacaaggagttcaccacaggaccgcgccagggctgaaacgaagagtgcacgcaccgcccccacgcccgcacgtcgccacaccccttatgcgcatgcgcgcgtgagcaaaagtaacggtatgcccacccttgcgcagacggcaccgcgccagacacccgctcacagagcgggcttctagaaacttccgggcctcggcttccttacccacccctaacattctgccgcctagggcgccaagccaagttcgcggcttaaccatttaggaaaccggtgcctgctttgcagcggcctcgttcatccccacttgctgactctttattgtccagtttttctgaaaacacagtaaaacgcaaaaactaaatcatttgcccacgcggaattggcaagaccacagtccaagggggtatttcccactgtgcacagtcctctctataaggatcaggaaaacacgtagattgtaactgctaatttggcttttgcaagtcccgcctgaaccacgtagggtgggtggtaccaattcccccaccaacaccccactttccgccgctccagggacgcgcagcgtctgcgccgacgctgggcgcggaggcgtctgggggcgcgggaaggacctgcgccgtgctctggccgccttgaattgtgggagatgtagtctcttttgcgcgcctctttgccgtatcccagttaagagcgaggttttcaaactactattcccaggaagacgggggtttcccaggtgactttgcgaaggcatggcggggacactgtgaatgtcagcccagaaggtgatcagagcctgttaattaaaatggaaagaagacagaagggaaggtagacatcaggttctccctggagacttttcgttttcatttacgctgcggaaactgacgtttttgcctaacaccccatgtaatgtaaacgtataggcttgagtacgtgtccggccgcatgtgtagtgaaccctaaagctttcctaattgtagttagcatcgtccctaagcggaacgattttccgtgaacatgatttgtacttttctacgagccgtacagtatacggagaagctgcacaggtcctcggcaaagcgattgcttttgccatacatcgtgcttaacaaagcgtgcttgaagactgagcccagtttgagatgtgggcttcaatatcaaaagaaaacgctgcgacctagatgtattcttggagtcacccagaaaaccatctggacgcagggaccgagcccccgaaaagcaaaggaggatggcagcaaacaagtgtctgtgcacaggagtcagagagggggaaccgccgtcccaacatcacaaaaaggtaaaaaggagtactttaatgattgggctttcaacagacatgacaagagctgccaatgcccttttataccaagttcactgctaaaggtgaaaaagcaattcacatgaatttttaaaaaccgtttaaacataatttagaactagaacatatagatctacagttttcttcacagattggaactcagatgtgaaagttgatcttgaatttgatataactttttttcattatgtttgggaaatttttctcaagttatattggctctgttacatataataaagagtaattggataggataaaaagagagagagagagattattgactcataactggtagggaaaactttcacatgttacctgcagtaatagaaaaacataaaatagggaggatggaatgtaagttgtcagggaaagtcagagatgtattcacagatattttaagatttttttttaatgtcttcatttcgcatgtgatttgtaggaaaaaaaaagacaaagcaatttagaccgccatgattataccacacgaagatgactatttttaacattttgcactttcatacacataccttttaataatttttaacccaaaaaattggatcataccaattgttttagagtctgctgactatgccaaaaacctagcttttcattcatactagttcagcacgaaggaacaacctgtatgcagaggtgaaaggcatagaagtggcaaacagcatgtgcatcaggtcatctggctcaggcaacagtgctcatg

SEQ ID NO: 1245148 - DNA, 4001 bp, Homo sapiens
tttttttgtatttttagtagagacggggtttcacagtgttagccaggatggtctcgatctcctcacctccagatctgcccgcctccgcctcccaaagtgctgggatcacaggcgtgagccactgcacccggccccaattgcacatttttaaggtccacataattaacaaatcagcaagttctatttatgtttttatgcgaatctatacgtctacaaggttaagtgtagacatacactgatacatttagcaagataaatttagtttgaaaacactttttttcaagtgacaggtttttgtctgatagctttcaataagtccaatattttaaaaacctaatgactgtgcttcattttaaatatctggcaaatcaaataaattacagcaggtacaaattaagccaacttaatacgctttctgctacacttcttacagtttgtgatatttatacatattcacattttgtgttaaaagggaacactgattccttaacaacatctaattttccacagcgatatattaaaataaccacctgctttgaccatagtcaatcattctatttttagcagcggacttttctttaccaaaaataatgcatacatttccaaatcagcttgaaatgcaggttcccatgccaggcataatgacaggccctctaattatatcaatccaggaagttcactcaacttacaaaggataaaagattcatcatataaaaatcattctgcttccccctaatagagcactatgtaaagactaattttagtaatagcagcaaattgattaaaagttcaagtttcctatttaaattcctgctttttctcctacataaaagaatttttgcaggcattgtcaccattctatttgtgacaaggcttgtggtatgtctagcattataggtattcaattaagaactattatcacagcactaagcaacagggctgggcttctgaaaacaggtaagtggaagtaatggagacctagagaggacacaggacatagttctggagattcagggggaaaaaacaagtagttcaactagtatgtaatagactccctttgtgtgcttaaacatagaccattggtttattagaaggcaaaatatgcatgactttccctatttataaatcaaggagtcttacaagcagaaagataatcctcaagaatgtaaaccattcttggcattatccctccatctgtaaactaactgcagtgatgggtacacagctagggaacagctcacgatataatgagagggatttcataaggtaccattatgcatgctgatacttctgatgcactggctcattttacttcttcacgctgaagatgcttctggaaagcagatgagcaagacctggcaatgtagatggcaacttagccttgacgttggaggtgcagaaagtgctgccccccacccgccagaccaacctgcctgcccgaggtatctgcttgggggatgagggtgtcaactgataaggttttgatgaacagactctacttccctaagttgtaaggtcatgaaaaacacgaagggagattcttggttacagaagagcgaaaatacgaaggcaggggcggagcacacgtgaatttagggcacgcatcccggagaaacgacctcttggacctgcacctgtcctggcaggtgcgcgcatccccggccacaggcgccgcaagaaaaaatatttccccgagaggctactctatttgtgtcataacttagggtaccccacgttgcagggtagaaaggatttcctccggtcgttcttccatacccttctcacgttgaagacggccacgggccttgcgccaagctggacgaataaaatacacggtgaagagagcggggccgcgcagtgacgggcttcccgccaggggaccccacccgcaggccctacagtcacctgcacccaaaggccctggcgcgcccccgggccgcgccaccgcccctgctgggcccgcgcagcgtctggaggccgagccagtgctgctgcaagatccgaccgcgtccagtcgccatagagacaaggagttcaccacaggaccgcgccagggctgaaacgaagagtgcacgcaccgcccccacgcccgcacgtcgccacaccccttatgcgcatgcgcgcgtgagcaaaagtaacggtatgcccacccttgcgcagacggcaccgcgccagacacccgctcacagagcgggcttctagaaacttccgggcctcggcttccttacccacccctaacattctgccgcctagggcgccaagccaagttcgcggcttaaccatttaggaaaccggtgcctgctttgcagcggcctcgttcatccccacttgctgactctttattgtccagtttttctgaaaacacagtaaaacgcaaaaactaaatcatttgcccacgcggaattggcaagaccacagtccaagggggtatttcccactgtgcacagtcctctctataaggatcaggaaaacacgtagattgtaactgctaatttggcttttgcaagtcccgcctgaaccacgtagggtgggtggtaccaattcccccaccaacaccccactttccgccgctccagggacgcgcagcgtctgcgccgacgctgggcgcggaggcgtctgggggcgcgggaaggacctgcgccgtgctctggccgccttgaattgtgggagatgtagtctcttttgcgcgcctctttgccgtatcccagttaagagcgaggttttcaaactactattcccaggaagacgggggtttcccaggtgactttgcgaaggcatggcggggacactgtgaatgtcagcccagaaggtgatcagagcctgttaattaaaatggaaagaagacagaagggaaggtagacatcaggttctccctggagacttttcgttttcatttacgctgcggaaactgacgtttttgcctaacaccccatgtaatgtaaacgtataggcttgagtacgtgtccggccgcatgtgtagtgaaccctaaagctttcctaattgtagttagcatcgtccctaagcggaacgattttccgtgaacatgatttgtacttttctacgagccgtacagtatacggagaagctgcacaggtcctcggcaaagcgattgcttttgccatacatcgtgcttaacaaagcgtgcttgaagactgagcccagtttgagatgtgggcttcaatatcaaaagaaaacgctgcgacctagatgtattcttggagtcacccagaaaaccatctggacgcagggaccgagcccccgaaaagcaaaggaggatggcagcaaacaagtgtctgtgcacaggagtcagagagggggaaccgccgtcccaacatcacaaaaaggtaaaaaggagtactttaatgattgggctttcaacagacatgacaagagctgccaatgcccttttataccaagttcactgctaaaggtgaaaaagcaattcacatgaatttttaaaaaccgtttaaacataatttagaactagaacatatagatctacagttttcttcacagattggaactcagatgtgaaagttgatcttgaatttgatataactttttttcattatgtttgggaaatttttctcaagttatattggctctgttacatataataaagagtaattggataggataaaaagagagagagagagattattgactcataactggtagggaaaactttcacatgttacctgcagtaatagaaaaacataaaatagggaggatggaatgtaagttgtcagggaaagtcagagatgtattcacagatattttaagatttttttttaatgtcttcatttcgcatgtgatttgtaggaaaaaaaaagacaaagcaatttagaccgccatgattataccacacgaagatgactatttttaacattttgcactttcatacacataccttttaataatttttaacccaaaaaattggatcataccaattgttttagagtctgctgactatgccaaaaacctagcttttcattcatac

SEQ ID NO: 1245149 - DNA, 4001 bp, Homo sapiens
gttgctgatatggagccaaaatgttctaatgtctcttatgtaaaccctacaactcttttattatcctagaattgtttttctaattacataagacaatatatgctcagtgaaaaaaaatgtttggggggccaggcacactagatcatgcctgtaatcccagctaccagggaggctgaggcgggaggatcacttgatcccaggatttcaaggctgcagtgaactatgatggcaccaccgtacaccagcctgagcgacagagcaacactccatctcttaaaaaaacaaaagaaacaaaacgtttaaagtttggaaagaaaaaggcaccaagaaaaaaaataattcatatagatagctaaacagacagataatatatggcccacccccggaagcttcttattaattctgtaatatgctaaatacataaagtataaaactttgcttttccacttttactttcagaactcattttcggaaataatcctcagtgttttctcacacagaagttgatcttttcctatcaaccaaaatgatgaagtattataactatgccttcaaatcaaagtctgtaacacaaataagactccaaatctacttctgctagcgtttctgaatctttccacttttaacctagactacaaataatttaaagtttcacatattgttccacgacctcaaatctaggacctgtcagactttatttgccacaggaaaggtcagtgaaagaaaagattagttcaatacttctttcagccccacgactggcactgtgctgcctcttcttaaaaaacaatgccctttgtcccccagcgcccttagtgagctagcctcattgtacactgggtccttagtattttcctaacaaaggcacgtctaatgagatatggaggttcagaggggattccctccactccaagtaggtgtcagactgacgaacgtcttagaaaaatatgtccggtctgtgtccagtcaccgttcggatgcattgaataagcatcttattcgtggcagccttctgcatgaatggctagacatcttgaggatgcctgtgtactactgtgtgccaggcaaggtgctcatgttcaaggcaagccttaaaaaaaaaattaggatttcaatgtacatttaccaaagctctggcgaggttaggtgccttgttcaaggtgtcacagttggaaatgctgtcccagccaggtgtgtgagatccacagtcccatcagctcatcctgtggtcacaacctattcacggtttgcatcagaaacgtgggaggctgttcctgggtcttacaagttccccagatatctctagaaaacgctagcccaggctgccccacggggggtcccgctgctaaggagaagtgggcacagagggaccaaggaccatgggctttcctcagcagggagggaactgcagggcagatgtccatggtggtgatgatgaagatgccttccttactatcctctatggcaggcccataacataccttccctcgcgtaatcttctcaacagcctggttattgcaggtgacaataaccaaggctctgggaaattccagccactgctccaagccacccagccgaccgatgggacttgaacctgcgcctcctggatccgggcgccctccccgcggcctcccgagccctgagtgctgccctcagccctcccttctccgcgacgcccctcgcccggttgctcgcagcacccccaaggccgctccccgaatcccccgggcgcgagggcccgggcgccagctgcccgctctgcccacgccttctcagggatcctggccctggcggccgccgcgacagacccacttacgcggatcgcggagcaggacgcccgcggcgcgcagggccgcagccatgtttgcgccgagtgaacgcattgcctgggcagcctcggcccgagtccgggctcctcccgcggcggcgcgcccaggtgtccgcccagcagtggccgagccgggtagcgatccccacgcgcgtccccagccccctgacctcgcgccctcccggcgcgcccgctcattcgctgccgggccggggcgggcgaggccaggcagagacacgcccctcgcggagagcccgccccagctgggcgccgctccctgcgtgaaaatgggcccgggggctgagctagaagcccgctccccaccaccatcgcaggtcactgcaaaacctgctggactcctagttgcgtgccctgtttgcatctgccaaactagcgaagtcaggatcctcagccatgactcagcaaataacttttttcgacgtttccattactattatttagatataaggatgcttttgcctcagttctccagtttgcctgcctagtcacaacacaagtgtgcagatcctgttttgttttgctttattttcagaatagaaaaagggattattcagtttctctgcaccctctctgtgtagcagaatttgacaggtgaaactcactgaagagcattaggaaaagtgaaggccagcctggcaagtgcatttcttggagggacggtatgatgaggtttgtctgtatcatatccgcgcaccttcccagtttagccgcccgtcccgcccccaaggtcgcacactgagatcactgggaggaacaggcgcccatttcattcctacacctccgtcagcccaccctgcctatatatgttcagtgcattgtggagtaggaaaccagcccttggtacagaaaggtctcaggcatcggtattcattgaacaaatattgagcacctactatgtgcactgggaaaacagtagtgaaaagagtagacgggggcttacatggggttaggggagacacagaaaataatcacaacatgtaatactttgaatgatggagcccttccacggcctcccctcttctttttccctctcaggacaaaagaagaatgaagcaaggtaaaagagatggggtagggtgggggaagggactaatgcaatttgaagcaggtgggtcagagtctcacacattcgagcaaaggccttatacacatttgagcaaagggggcaagccatatggaacattcagggaagatggagtctagattcagctgaaacccagttttctgtagcttaaatatgtgctactgatggaattagtttatttcttattaaagttggtcctcctgatggttataagcccaatgcaaaatgtcaaattaaatggatagcctttcatattacctacatgatcttcatatccaagcggatgtcctgagaaaagcacagtaaaacctgctccaggtatcaacccaccttccttatatgtgtggctattctctaccctcataaaaaaattatagtcttcttaagttgccctgtaaagaggtgatcttcatggataacatacttctctacctacagtctgaacccatttttgttgttgttgttgttatttgtttgttttgtatttccagtagatacagagttttgccatgttggccagactggtctcgaacttctgacctcaagtggtccacccacctcggcctcccaaagtgctgggattacaggcgtgagtcaccatgcgcggcctgagcccatttcttctaaagaaactaaattgaaaggctgcacacctcgcaatgctgtgctggcagacatgtagacaaggccagagaataaaatggccgggggggttagacgtctgagctatgaaggctcttcttgtcccctctgggaggccctggagaaagtcatcccctccatccagggtgctgggccctcctgctgggtagagataagggggcttctggtccctcccaggcaaacgctgatgattagtgacaaggcataaaggtgccaagtctcaccagtacaaaatcaatggctggcgtgggttaaatttctgtccagaaatgattatggaactagcaagacatactttattaaatattttaatgaatcagcatcatttcatttcttttattcgcatcttgcactttcatttttactgacttctttttttattttttattttttcattaattaatt

SEQ ID NO: 1245150 - DNA, 4001 bp, Homo sapiens
ttctagttgggggtgaggaggggggcagtggaggagcatcaggattttctcctaccagaccaggatcaagactgtggggctgttccatggaaacatgaaaacatactgcagctcccagcttgaaaggtcaacccatgtatataaggtttgaaatccaaggaaaccacttcaaggtcacagggccacaattatgagcctttggtggtttcaacaaaagatcactgtaatcagagaccgtagtggcctgaataatcatgatgtagaagaagctctttgaaaacttttcactgaatcaactaattgagaagaaccaaataatttacaaaagtgattctgatcagctgaatccagaatacatcactctggatgatgacgaccctctgtctcccaatcaaatgtgcttttgtggccagagaggtttccacgactgtatccgtcctgaaccaaccaggagagaatgagatggaaatgccccattccttattcctgaaaacgttactaactaagtagaggaggaaagcactgatacattaatagagaggaaactaccactgctaaagtccaccagtttcctcacacaaccaacctcctcctctacttgcaaagcaggtcaacatcatacagaaatccgaggtttttttttaaatcaattttgttcttttgggcatcaacgcttatctcttccaaatatgtgttaatgtcgaccctcaagaaataaatcatctccaagctttgatatgaatcctaggcagaaaaaatactgggaaggtaattttgcaagctgcattcaatctgtctaagtgagagtaagggttttcctaggtaacgaaatgattagctttcaatacccacctctttgcaacaaatgctttgcaagaggcctatcctcctgcaaaaggttttatttaaataaaaataacaaataaaaaaaaaaaaacctctctaacgggtagactgagcagccattcttcccaggggacactcatttcgggctgccaagctgaggctttgtgagcgcgccgcccctccgcgcccccgcccctcctcccacagcgactgctcctccgaggttcccaaggccacctgcttctcagaagaaaagggggataccctgagcgctatcgcagtgtgcggccggcgtccccggcggcgcccccgggggaaggaggaggcggtgtcgccgggaagcgtgctttgtcgcgagggtcgcgtggccgcccgcagcggccccagaggcctgagggaggttttgtcccggccgtcgctcagagctctcctctccaagggacctgagtctcgcggcgctccgcttcttcccgcgccccgcttggtgcccgcccgagtgccgaggccgactgcccgcgtcctagccccaccccgcccacccggccgagctaacggcgcggctcgggggagccttctccatcccgcctcggaccggctcggcacctgctctgccacgcccgcccccggctctagctgttccttcccgcccgccccggagggtcctgcgccaaccagcgggtgcctcgagcccttctgtctaacggggagggggatttgccctcgagcgatggtccccccgggccgcgcccagcccagcccagggggcccacgaagccccgggacccaccccggcgcgcaccgcggcagggggctgagtccagggggcccagcccaccccgccgggtcgtaccttgtgcggcgcctgcagcagcctatggacccccgccagctgggtgccgagcgcgaggtcctcgcggaacgtgaacagcggcggccggctgggctcggggaagttggtgctgttgaaagggtccgtgtcgtccaagaactgcacccggcaagccagcgtggccatgatgcatccctgccgcgggggcgcgggccccggggttagcggggccgcgggccgggacgcccgggtagctgcgcgcaggggaggccgcagccgcagctcgctggctcgcggactcgcaggctcaggcgcgccgggctgcagcccgggctccggccgcggggggcggggcgggggcggggccggcgggccccctccttcccctctccctccggctcctcccctcctccgggtcctctacccccggccgggctgccccgaacgaccggaccgcagccgggaaagtgcaaaggagacggctcgcgcggcatccgcagccctgcgccaaaggccggcggcggaggcggggcggggaggccgggcggccggactctgctgcacgtgcgccccgcggcccagggccgagctgcacccctcggagcctggaggaccgagttggggagttggggggttgggggacggggagacaggcggccttctgacttcttccccacccggagaaggcttaagcctttccagatgaaggcggcggcggccggcttctgctgcccagatttggaataccccggcagggcaccaggtggccagggagccggcttcggcagcaagaggggtggtggcagtgaccgggagccccacctaagggtacggggaggtttcccttagggacaaagaagctaagaaagaggagggtgcgccagggaacccaggccgcttttagggcacaagcctagagtcgagaggcgtgggggctgcgaggcttcgctgcgggactccagcgccgggcctggaccccggggctcccggcggatgctggttaaacctctgcatcaccacggcctctccccagttaggccgccgaaagccctaattggaccttgtggggccgcgggggcttggggaggtgggagcccttctggcaaggttcccgaattgcagagagccggggatgccctggtaaccgagggactgggaaggaaggtttgcgtcctgcccgcccctgccaggcgggagcggcaagactcggcgctgcctcccaccgctctcctcgctgctcacgggcgacccccttcgttttcaagaaaaattcacggttctccctattcccaggccacagccaagttcctggttcctccccccttatatagatcgccctcataacacccagtctctcttaacatccgagtgttttcaaggcgactctataacgcgtctatctccctttcctctggtttcaagggaaaagaaacccttatccctatttagcagcctcacccacatctttaacctctccctctccgtgatctccctccctgccacacatacacacttatgcctgatcttaaaataataattccacgacacttccgctccttccagacgaacttctagctctactttctttgttatttaactctttgaatgaatcctctagattagccgtccccaatctttttggcaccagggaccggttttgtggaagacgatttttccacggacagtggtggggtgggggtggggggcgtttgggggaggaagggcagatggtttcagaatgaaactgttccacctcagatcatcaagaattagattctcatacgagcgcgctacctagatccctcgcatgcgcagttcagaatagggctctctctggcatgagaatctaatgcctccgctgatctgacaggaggcggagctcaggcggtaatgctcgctcactggccgctcacctgctgtgtggcccggttcctaacaggctacggaccagtaccggtctgcggccgcggggttagggacccctgatctagactggatctccaccaacttccgcatctcctcacagccagaatactaaacgcacgaattcttcccctctgagatgggccgcctgcacttccaccttcacgtccacctccctcctcactgagagagccctccagtcctggccacctcatttcctatcacttttccaacccggatcccagcccatcctctcaggggcctcctctccacacccctccttcagtcccacctgtcctttgggtacctggcttgcttctgccccatctaccaagtgcctgctgctagtgggaccactcagtgccccacttccaccccaaagcccctcagcctcttactccac

SEQ ID NO: 1245151 - DNA, 4001 bp, Homo sapiens
tccttctttcctttgcttggaaggtcttctcctctcctaacaaacacctgctcaagctgatactaagctggaacatacttccttattgcagcttctcagacaccccaaggcattccttcctttctactcttgtgcacattcctaaagtgatatttattacgctgatatttactattgttatttctattccattagactgtgagttccctgaagggaggaattttgtcttatttttttgttcagctgtgtatcaacagcacctagtaccttgcccagcacatataaaagtcaaaaaaaattcaagtgaatctacacatgctatagagcctattctttctcactgtcaagtctttacatttaagatagaacaccatgagcttattataaatggcaatgaattaaggtagggtgaggggaaatttattccattctatttgggaaaagaatactcaagtttctgactgatgaatcgtaatacctgttctttgatttaaacatagacagtatgaatacagttctagcaacagttaaggtggcaacattttgtcacccaacaaagatactcaacagcagagctataaagtaaatattatgcaaactaataggctgactttggatgaaaaatgtattaaaacatttggaaaaagtgaaaatttaagttaggaattagcctaggcattactggaattcagtgctagcaactaagcctaattttaggcagatttcccaagaagatataaatagaaccagttatgtaagcccacatataacaattaaagttaagttggtacagttaacaatacaaatcaatattttttttctattgtaaattttgggggaccaaaggcccttctcatcataaaagtataaaaaatttaaatgtggctatatgcttaaagaaaacatgtttaaagagtaattatttgtatataatttctaaaaatagtagaactgctgtatagccatgtattctataactaatcacagagttcagagcccagaacaactggattactgactcttgcaatgcagtcattttcattatggttaaaaacaaaaaaaaaaaaaaagaattttttaaaaaatggcaacatttgtttgttgaataaaaggagtttaaaactgaattttccaatgtcctctgccaaaaatatcagtactacctattacctccctcctttatatttgtatatttatttcctttccatactagatattgcaatgatctcactgcagcctctattctatcacccaatcttttcaaaaaagttctccctaaaagtgctaactgcagctatctaaaacattaacaacaacaacaacaacttctacagatcacatctatctataaaaatttcttccccttaggaatgagatgggaggggaggagtaatctcttttgataccttataatgcaattttaatgctccactcagcattttggcattagactaatcttctgtacaattttgatatcccaactatgagatacccacattatttagtaacataaagtaacttacaggaaattaactacactaaatattgaacacaaaaatcgaattcagcaattctatatatgatactttcatgcttttaactgctggatgaacccattggagaactatcaatatgatcctcatatctcccacaggaagtcacagactacagttaatctaaaaaagttaaaattttatattatccaaattagttagtaaaaaccagtgatatagtagttaaaacagctctattataaaatgtcactcaccatctccagcaggaagtcctctctcctttttttcatcacatttgttgcattcactgaagtaaagcagcaggaacatatccaagagtacccaaatcaaggaggtggctaggaccaccttgcagtatgcaaattttctcatggcactttaagtcaaatgcaaaatttaaaaatatatatatataaatatacaaagatcatgaaaattattccaatccagtttcatcagaaatcacgttcataccctatagagaaagaaaggaaaaaagattaacttaaaaattcagaacatcaaaagtgaattataaaattaatttaatattataaacattaagtaatatgaattattaatttcattaagaataagaaatttcactatgaagactatgtttgaaaatcagacttggaaaaatgcttataaaatatataaagagtatcaggactatataaataattcctacaaatcaatatacaacaatccaataggaaaataggtaaaggacataaacaggtactttgtagaatggaaacctaaatagccaataaacatgtagaaaagtgctcaattccctacaattaggaaatgcaaattaaaacaacagtgagctactatttcacacccatcaaacacctgggtcttaactaccttcctactcaactgctgtattatacgttaaggtaaaagtcaagctattaattaccatagggggttaggcaactagtgattcccagtgcatttcaactgtccacattcagtacccaggctcaagaattaatagagttctccttgtagcctgcactacagcagcttcctgagttaactctcgttcctctttcacactgaatcccattctaaaactgcaacagtcaccaatcattcaggaaacagattcgtggaaagtataatggaaaagaaaagtatatgtcataagatctgacatttagtcttggctctgacaataattttatacacttccctgatttttagtttccatttcccaccctactacctccctttattatgttataccatgatgagaaaatgactagaggaatggttaccaattttgaaaagtcatttgggatagtttgagcataggtgtcttaagcgtaaggaattcatcttggagcatgatgaagcagcctgagagacctcagagaggtagagaatctcctgctcagcagctgactctaaggctcaaagcctgtgtcactgaagaccaggagaaatataaaccaagtgcattcctatgaagtggagtgaggaaacagagtctgcactgtgtctatgctgaaagctacaaatgcagatgccctggaaggaccagaatgtgggcaagataacagcttcttacaagggcaactttatgcaacaagttccatggtggccaacagagatgcacttacctgaacaattcagggcaggcctgtagtttatccatgaaatatatacagcagttcttgcctacttcacaaggttgctagagagcaacctgagaaaacactaagtgatacttataaatgtaaagttattatttatgctcatctctctaggggctttgatctcttgcctatattcctcctttcatcaaaccaatactccctgactgcaagatgaaaacaaggatgctactgtcatgttcttacctcaaaatcatgcttactcaatacctgatactgggtcacctgtagtgagcaacttactgataactatggtaactgaggtgaggggagaacctaaagcattagagtgcacaatgtcatggaacaaaagttctcaccagataaactatatacatacatttatattttgtgttatttcatatgaaaagctgcctcttttgatcactggcaaagcagtctgattgctggtgcaacatctgaatttcaaatgtggttttacggtctctaaaatcctatttgaaaaaaatgcctgcagaatagttaaatgtaagtataacttttcatctacttctacttaagtttcgcaagggtgcacaattagcttttaagattgaaggtgaagtgcagtgaagagggagtgtttgggagaagaggggtgtgtggcacaccctacatggagtatggggagaaaggaagataaaggagaggcaaaaaatgattcccagatttaaggccaaggtaactagctagacagatgatggtaatgcaacaatgaaaggaaatacggactaaatcatcagttcagttagttcacactgaatgtgaggggcct

SEQ ID NO: 1245152 - DNA, 4001 bp, Homo sapiens
tgaagacccgccgcctcaaccacttcaccctgttcaggagacctttctaaaaaggattgaaatggggaagccgaaagctcgagtccattccattccaagttcctggagcctgcggtcaagactctgtaaagaaacacccttttgcacttgggtttacaaagctaagcttcagaataaaataaaattcgaggctctgtccccgggagcagcggcttcacagagcccggtgtgcgcaaagccttcggagcgagggcaaactgcgcaccccgggggagaggggccgccccgcgagtcccccccgccacggccagctgagagcccgggagggagctgtggggacccgtcaccctcgcaaaaggtccgcgctctggtgaccaccagagctctcctcaggtcccacagcgccgcggcggtaacctccccgcgcagctgatctggttgaagagttgctggaaccgagcggggtttgctgtaccgggaaggatgcggcagcgcccgcctacctaccgcccaggcaacctgggggcgttgaagggccgcagggccgaggaaggggaggggaggagaaactggttctactggaccatgcgaagtgaactgcaaactttccccagcatctctcagactccaagtaactttcttgcgcaagccaatggcacgctccagcagcggccaggaagcctctctgcacagatccgtaccagcgccgccagagtggggaccaccggggccaggctgccgccaaggctccggcagggccgcgggacactgagaccccagggcccccaccggccctccgccctccctcgcgcgtctcggccccgcgaccggcgtgcaccttggcatagcagaagcagatgagcaggagcggcagcaggtagccgaagacgaaggtgcacaccacgtaggccttcttgtggcgagggtcgggccactgctcccagcagaaggtctggttgctggcgcgcgggtggaagaggccctggtggtaggccacgggcgaggccatggcaatggacagcgcccagatgcagcccacgcccagcagcgcgttgcgggacaccctgagggaggaggagcgccgcgagtgcacgatggccacgtagcggtccacggacatcgcggccagggtgaagatgctcaccagcatggacacggtgaagaagtagtggatgaacttgcagatgaaggcgcccagcacccaggtgggcagcgcgtacacggtggcctggaaggggatgcagaagagcaggtaggccaggtcggcgatgctcaggttgaggatgaacaggttggtggtgctccgcggcttgcccggcttgctgcgcgccagcacggtgatcactaggctgttgcccagcacacccagcgcgaagatcaggccgaacaccaccagcgtgacgaagttctccacgccgatgccgaacagcggcccgggctccggggcggggggctccggccagctcgcgttgccctcgctgaggttcccgaccgccagctccatggcccgcggggctgtcccggcgagcggcggggcgcgcggggagggagggcgggatagtaggcgccgggggtggccaggggtcccggcgcaaagcacggagagtgcgagtttaggagtctgagcttcccccgaggcgcgagccagcgggagcggggatccggtggccgtgcctggtggcaccgtctttgcgccgggaccttctgagagagggtgggttcgggagcccggagctggaccttctcgggaagggacggtgatctcgagagcactggggtccccttcccgggcgcctccgcccgctgcgcgaccacggagcctgggaagagggatccgccggctgcagccgcgcaggtggaaagacccttctctccgccttaccgctccagatcttcgccggcggttttccctggctcccggaggggctgcgtgctgcacctgttgctcggagccgctccttcccgcggcgcttccccgcactgcccagcgcgcagcagtgcactgtgcggctcctgcagagaaggctccccgcgcatcccgcgcgcccagcgccacctccccagtgggctggcgcctccgactccctcccggcttttccagggattccgagtcgtccacagggcgagagctcttttgggaggcttcctggtggtggatagagtcgggtgccaggggcttctctgctgcaactgagaggcgaaaacagctcggctgaaatccgcgccccttagaagtcacggtgcgcgagcagagactggacggattctagcgggatgggtcgccgcccacctcccggctggaaccggagcgcgctcgcctctgcggagtgcggacctgcccggcgggctgaaggcggggctgccggatgccgcgggccaggcgggcgagggaagccgggcgcgctccagggcgttccagggcgcgccggggtgggaggcggaggggtgcgcgggcctcctcatccattagtgcctttcctcctcctcctccccagggtggctgtccgtgagaacgcctctctcccaggaataaccccaggaaatcgaggctggcgacgctccctggagttttgtaaaattggccgcctaatcccaccctcaccccgcggcctgctacagaggagagaagtgcaaagggaaagggccgcgtgagcttctctatagacgtggctgacatggaaggggaaggctgttcacaccacccaacctcacttcatttttgccttgtattactcatctgagggacataaactgcagcagtgacaaacgaaatatttttaaagtgaaagaaagtgtttagtatcttactgccgtaaatgtggatttgccagaaagaaattaagccgtttcggtatagcagggccagtcacgttagctttgtaaccttggtggttcccagctagagagctgacactgattcctttatttgcggtgatttgtctgttttcactttcaaaaacaccgatgcgtttccagcattcaccatctggtgactgtccattatgcgcggacgcagtgcctgaggggatgggtaatccaaagaccaaagagggcaggggctctttgccttgaggagttaaggaagtaggatcttgtttttctaccttgctagctctgttctgcctcatttccagataaatcttgatgcagttcattgaacatctatgtattttatctacattcattgctagggagttccttgcaagggaattgttctattcacacacattttctggaagacaaaattgagtgtaagcaacttgcctatttgggtatcctgctaaagccaagaatgctcttacctgccccgacctgagagaatgccttgaaacttcctcaggtgatcttgccaatccgtattgcttttcttccctgagacgctctccgacccaggctttcaaagtatcatgttgtatttgacagctctgttgcattgaaagttagtagtaatatgatttgggagagtttttaaattatgaactattttcacatgaaacagatatgataaaattacattgaataccaatgcacccaccatctagcttagaataatttttaaatattatcactagagttgaagtcacttttatatattttccagtcacaacctccacctctcccactatctccaagtaacctaaatttgttgtctattagtcatttctttatacatttttggcatacgcatatgatcttaatatattgtggtgattttttttttttttttttttttttttgctttaacattatgtggttggtattatggtacatgttttgtttgtttttgccttaaagtataatttgtctgttattgctataagtacaacaacattctttgctttgtatttgcctgttacatcttttacagccttcctatgttatgtcctgcaatttaaaggtatctctttaatatagcacataactgaattattttaaaacacaattttaaaatctctagtttttaactggtgagtttaggtcatttatatttattgttatta

SEQ ID NO: 1245153 - DNA, 4001 bp, Homo sapiens
ttggaattacatatagtgatcaaaatccattccacagcttgaaaggacacagtgttaagacttgctacccacgtcctcattttagaaagaagtgtgggatgagtacactgctgattcagatcctttttatgaatggcagggatagaaaagtgggaaataaaactgaaagtcatgtcggaaagtgagatattccacccctttaaactttcagtttaatgaagcttttgagtggcttttacaccacatgcagcaatgctctctgcctagctagcaaatgtggcagtgtgcagagatgagagaaggtaggaaaaggtaaggactcacaatctgccaatatacacaattttggaggaggaaatgaaacgctgtgaatacaaacacacacaccagttcaggtctgcagatgctatttaaagcacacaacattttcccacccccactcgaagcagaaacgcctcaacacaccacctgtgcgtcccccccccccgcccccaccccaccgcttcaacagctactgtgatctgcacttcattactagttttaaaacttccagcttattcccaatgcaccctactactaccaacaatcaaacgaggatagcaagcaagccaagattgttttccagccttcacgaactttcctgcatctatttttcacatcagatatacaaatgtctaatcaaaccccacagataagaaacagaataaaaactcctttgtgtatgtatacatctcacgttacccactcttctaccccaggaaacaaggagtaaccctagtgcctgtgactcgaaatgacatctttctgcttagtgttcttctgacctggcctgtgtagtcacagctctgcctgcctgccagcctgggcccgtgtacttccacagctgccccacagcagggcaggcttctttctgcaaacagtctaaaatcgcatgacgccaaagcccactgaagttatgatgaaaacaagagaagaccaaacacacctaaattgccaccttacgtgtcatcactctccaactgaaaggtgtctacttgcttgacagtatgcgcaactatgtgtttgcagctgtcacaccgcagaataaacagttggaggaaggagttgggtgggtttctggtggtcagtttcaggaaatacacccttcttagttctgagctcaggttccgaatcaatacgttttggagacttatttttttttccagactggaaatgcgctaaacctaatagttaaccttaagcatgccatcacttctgctgaaaacattttctacacacagccccaaattactttcagttgggttaaacaaaacagacaagctgtaatacaaggtctctgagaaatgtgatccttttcaatggtcacccaggagcttttcctttaaatctgtttggcgggggatgggggagatagggaggagagcacccaaattaagatgccacccggagcacaatgatattctcaagaaagttgcctaagataactcttcagggtttccctggttgagtaattcttgcaggagggtggggagggatatctggcgtccaagattacgatctgcagaggtctccctatgttgactttttttttagggcgtcctttttaattatactgcaaggactctgatttccacctccttgtctgctgctggggggagttgagagcaacgcgccagggctgcggcagccgctcgggccaactccggcgctcaggggcgggcagcccactccccgcgggtcccaccctctccagcacacgcgcgcacacccgcgtggagacggctgtcctcgcccgtctgccccgcgccccagctgggactcaccgttgtccaggcgcgcgatctggggcagccggtaagtgctgaccaggaggtcgagcggcacggccaccgagctccacttcacatccttgaggctgcagcccagcgagggcgccgggtccatcttccccgaagcctcctgtcccgcgctcccccgccgccgccaccggcaccacccgcgcctcggcggccgccgctgctcgcgctcgcggtctggggcgcgcgggaggcgccgggcagctccggccgcgggcagccgggggggcgcggcgactggggcggcccggagggagggggccggcgcccggctcagctgccgctgcggggcatggctggggcgccccgcgtgccctcacgcccggagaagactcagagcagccgcgcggctgcgggcggcggcggcggcccgggtggctgcggcggctcccgctccgcctcctcctctggccctgggtctgcagctgcggcggccgcccgctcgcctcctcctcctcttacccctccttccctccgcctcgagcgtgtgaggaggagccgcgggtctgagaaacgccatagcagcgctcccagcactgactaatcaacaaggtgcgagcaacgcctgcgcagctctgggagacaccgcctccgcctcccaggcgccgcccgctccgcccccagctcggcctccgcctcccgcagctcccgcggcccggcaggctcgcgtcagctccccggccggggccgccagcgcccgcggctcggcgcgctccgcaagctttagctctcgctcccccgtccgaccactcgggcgccctgcagtctcgccgggtgctgctgcgcgccccggctccttccccgcccaggcccgtccccggagcccgggaattgccgagcgagctcaggtatcgctccctgagtcgtggtgtcgggcaccgtccgcctccactcccatcctggcaatgcggtggctaaatacaaggcacaaaagatacctttagtggcgctccctcttgcttcccggtgacccagactttggtcagaagagtaccacagcccaacggggctgcggacggcaggcgtggagcacgccttggcgtttcccctcaaccctactcctctaccatcggagctggaaatgactcccaacagtctcagctttggctactagataagataaaaagggcaaagcaccgaaaagcggaaaggtggtgggtgatgagtacccacatacaggaaggtggccattcggtctaggaccttcactgagtgaacgagctgctggaggcgacgggagttgatgaggccaccaaacaccgtagacacggagatgggaagggaaaactaggttactgggaggctgctggggtcagctgttctcacccgcttttcccattcagttctcttctcatcttaaaggttgggatcattctcgttttctaggtatatgtaccaagacattaggtagtttggcaagattttataactcgtagatggccgtgctgggattcaaacctacagtttgctttgcatgatcaatcattctctgtctctcccgatgtttgacacggcctgctcactgtggacagagctcagaatataaaggtggcatgtcctgccttgtatgctaatctgctttctttctttctgtctttctttctctttctttcgcttgcttaacattttgttaaaatagcagaggtgagtggttgctaaggttgcgtatctgctctgttttcaacacgtattcaatgttcagtgcttgataaggtacagcaagtacccgcttcgccagcccaaggggacttgaaaacatcccgctgccttttcgtggcctggcttaaaaggtctgtgctaataaaccactccattaacatttgaagaaaaacacagattcttctacacccaccttcctgatcctctcactttgaagcattagcgataattttcacaaaattcatctgaaagttttgacctttgggtcattcacattgattttttgaaaaagtcttggaaaaaagtgggaagtattttactatagagtgtatgcagaatcagaagtccataaagttctaagaattgctcacatagagtgtttcggccgggcgcggtggctcacgcctgtaatcccagcactttgggaggccgaggcgggcggatcacctgaggtcaggagtttgagaccagcttggccaacgtggt

SEQ ID NO: 1245154 - DNA, 4001 bp, Homo sapiens
ccaggcgccgaaggtccgtggggagccccgaagggatgcgaagcgtaggaactgagcagcagcgagcgggccgggggtccggccgccgcctccgtgtcgagctgaggcgtcccgcagttgctggcgccgccggggccccgctctccgccccgggagcaggaggaggacgaggaagagatgggggaaggcggcgtggagggctcccgcgctggaaaggctctggagtcgctggcgtccgcacccgcggccccgaagcgcttcggcaagcaccagccgccgtcagtcaaggccatccacggtccggcgccgctccaagctgacgtctagctcctgaggtggggtgggggagacgggtatggtaggagatcgacgggttaacaagagcgtaggctgcacgctacctcgcctccactcctttttctagttcaaatgggatctgacttctcaaagatcccatttgagacttctcaaagatcctatttctgccccgggcgtggagatcaataagggaggggaagggagcctgcgcagccgccacagggccctggaagggctgggataccagccctccctcaaaggcaccgctccggtccccgcgtcctccccgcccaccccctcggccgcatcctttctccgtgcgcgcgccagatcccaggggtgatctgcagaagctggctgaggctttccttccgccctaaagtgtctcccccgggctgatgacacacaaaagaatttaagtagctgtgcgtgtcggcaccgccgcatcccgcctctctgcggatgcccctctcccgaaatgcctcggggtgagggttccccacgggaaaacccttcgcgtaaggaaggcaacctgtccccgaaaacgaaaccgccgcgttctcctatattggctctcccagagcttcccggactgcgctgaccagcccgaacgcgagccccagagagaaatgcaactcggcccagggaaagtgggacgccagggcgggggcagcagtctgggtccttcccagcagaggcaatgcggagagcttgtggggcgggaatcgccagccccaccggcgtccccgcggcgccgcacaccttagacacggcccgcgcctgcagccaccagcgtgcgcgctcacgccggccgggccacccggcccaccccgcggtcatctccagcagcagaaacgccggaccgttccggaatcggacgtagcggggtggagcggagagcagagaaaaggagggggaacgcaacgggctggggaggggggagcgtgagaccgccccagagccgaggcgaccccaaatgggagagcaggaagaatgacagggagactcggagcgagtgggggagggaggtgaaatgcagccgggctggcctcctccaggctgctcttccaaatcgcctcggctcatcggagattaccacactaaaattaatgcccacacacagacctggctagatagcaagaaagaagtttctctgcctgcctaactaccggctcccgcccctttgcgccgagataactcggagataaggctgcgcgcagataagcgcttcgaggagagaaaaagagactagaagttggtccgcggtgtcccgggagcctgggagccgcctcagcccgcccggagggaaggagggaaacaccgtcggagccgaccgcggcctggagagggccggagagccggaggccaggggcccgcgacgagtaggggtggaggggaggaaagcggggagatcgcgcgaggaggaagcagccgaacctcgggcgggcgctgcgcatggagaacggccgcggcggagggtgctcccaggcgcggagagaagccgagggcgccagcgggcgagcgcgagtccggggtctgcgccgcgctgctggtgaataaaaaggagagaggaggcgcctcttactgctctgccggaaaactgcagcctgggctcctgattggactcaccgagccctaaacaaacagcgctcgccgaagggtgccaggctgtgggtcggaactgcgctcagcgagcagctgggcgctggaggtgaagaggaggaggagggatcgaggggaggagagaaaagagggtggggaggggacggcgaggggggaggggagcgcgccgcccaggcagacaatgagagccgcgctgcctgcgggcgtgggctgagccgcaagccctgtccccggagtgggggcgagtccacccggggggcaccgagcccagggaccccgggggaggggcggaggccacagaacgcctgacctggctagcgacccgcacccatccagcggcggtgcaccctcccgctcccgcagtcgcacacacacacccacacgagggagggggagggagccttggcacgggaggagttggcagtgcacagtcccgcgccgccgccgcggcgggaggggcgctccagaccttgggtcagcacgcccccagaaggaagggggaacgtgctctgcgcccccccgccccccaacccccgcctagccccttcacagcaaatgcgctttttgccctgaagttgtgtgagaccgaccttaaactttctccgaccctatctcgggatgctacggctcaggtcgtggtggtttcgggaacctcaagacaacattccccagctgacctttgggaactttaactcgggtcgtcatgtacggaaaggtagtctatggggtacgcagaatggaaaagggcttccacatcagtcgtgtccgaggacgctctccaacttttgatgtccctggagagtttctgatatttccctggagagtttcaggtaagtcacagataagtcactgcgaagagggggtgtcaccttccctggacccagcgctaaatgctgcttccccacccccacgttcatatacacaccccctcttcgctccctccaaacagttatcacaactctgtacaaactgatacggtccctagcgggcaaaagggactggaaatgaacgtcgcggggttatcagcgccgatctgtcagcggcaactcgcgcggccgcaggctcgtccgctgcaggagccgtgatatatgtctcgctccctttcgcttacagaaaggatttcttccgacagacgtgaccccagaaggctgccgagggagactttaggacaagaggcgttgtttttgtgagaatgaatttttatactttaccccgaccccaccccctaccccccgcccaggtaaatccaagtaaatgattttctgaaggtcggtctcctagaaagcgtttaggctctggttttttgttttgtttctattttcgtgttttcccagttagggaaggaagaggagcctgtgcagagttgaactggggtggagaggtgccttgtaaagtatggtttccagagatggtgagacctcgtagctaagcgttgtttcctctgcacgtaactgtgagttgtgaacttgtggctcctgggggagcgggacagggcctggcagtgcgggggagggggcaaggaattcaggaagttggcgagaattcttcgtttttcattcttcgttgtaaattgcttctaaacacttctgaattttaaattgctaccgagaaggtccagaaaccgttctcatccaatttagtcacttttattacgttccactttgcctcccccaatcactgcggcggctcccagtttcagcgtggccgcatttggaaaaggctgaaggtagaaaactctggaatggagaggctggcgactggagcaggatccaggggctttaaattttaacctgaatgcgatcgaatgcgcgactcccagaagagatagccaggcgtccgcccggccgctcaacccccgccaggactcggaatgccttgcttttggttcttttcgtgagttccgaccaaatgtttaagtggactgggttttgcagaagctcatttgtaagcactgacggaaatgggttgtgggcatttgatttcctttgattccaacgttttgaaataatgtttctcggatttgctattcgaagcaattttctaaaaactcatatcttatt

SEQ ID NO: 1245155 - DNA, 4001 bp, Homo sapiens
gggaaaggaaagcacccttcttttctaatttgtactctaaacaaacttgaatgcacacatttttttaaaaatctatagctttaaacaactatgcaggttacagaaaaactaggcaaaatcgctatggatattgcatataaatataacatgcagttacacctgtaaatgtattttacctagatctatcccatggataatatgttgacagttataaactgaaatagatgcaaacaaataatattatattgaaaaaaatatatcgagatattggttaagtgtgctcagagcaataccagtaatacagatcaacactccaagaatacctataaatcatattttgttaagcaagtttttttttcattagacactagcagaagaaggatttgcctaaatataccaaatccaacagcaaatatctaattttttcccccttgaatgtctactccattatcaaataaattaaaattgtttagagaaagcacttttgggacgtctgggagagagacgaagtttgcatgcagtttggaagcaaactgaacattcttactcgggattaaacccattgacgtgcaggatcctcatctgtttgacgatagtgcttttcccagactcaccagcccctgcaaacaaacagaaagaacgctgtgatctgtgtccggatatcgctgccatctctcaccactagccgggtctgagcaatcctcctcccccagcacggggatttcctacacgcgggttcctggctggaggagctcgccccggccgccgtctgggctccgcggcccagaggtgcgcgcgaccctcgcccggccctgcccgcccagcctggcgctcgccgctcctggctgtgcgctccgctggggccgggagccgccgcgcgcccctcggccttacccaggagcagcaggcggtgggtagccttgtaagccaggcgctctttctgcaactgcttctcgatctttttgttggcctcgcgtcgttctttttcatcgacgccctggtcttccgtcgtcttgctgttgccgcccaaacaccccatgcctgcccgctgggatggacgtcaggaagttaggaatgtgcgcaaaaagcaatagagagttggagacgtgtgcggctcctgcgacggctcctctctttcctgctgctgaaagagatggtctggtctcttcggtgttttccgattcagagcaggcgtttcttctccctccccctgcccaccgcaaactcccaactaaatggctgtaaggaagacgcgcggagtaaaatgcctttttacacgagaattgtttcaaaatctgctggatgaatacagcacaatgaacggagacggggggcgagggcgccggtctccgctggagacagccgaggtggcgcagcgccccgggttcgccccacgtcccttcgcccgcactccaagcctcgctcagccccgcccagcgggtccccgagggggcggcgcgctcggctgggtgccgggtcccaaacagccggggtggtggctgagcgtggcgcggaggacagagcgcgccaccggggtcccagagggcgacgatgggcacctgccgggccggctcgcgccctgctattcctcagccgtcggacgtgcgccccctccctggtctgggatcccggtgcggggaagggagagggaggctggctttgggggcggccgggccgctggtcccggagctctcggagaggcgctaccgcgctgtaggggtcagggagctgaccccccacggagcccggccggctggggcgcttacacgctgaccggcctgggttccgggcccgcagcccctccgctgcgccgcggccgcctggctctcttgcaccccgagccgggaaagtgcgtctgggcgcgcgccccgtgttggctcggacgcgtccctgctcctggcgggcgaagactcgcggaggatcatgcatattctagcagggaggaggatccctccgaggctcaccagtcacaccgcctttgttctgctcagcttctagactattccagctcgcccacgtcgccgcctcccgagcctcctgtctttacctccagcccccgtttctcctgtgcagtgctcccaagcagcacaacaactcttccagaaggcactgtggcctcgaacttggcgttgtagcagaggaacgaactagggcgcgagactggcacctgccctccgttactgagacccctccaatagggccagagccggcagcttggcgtttgcagtgttgtacttgggggaaggaggtcagaagagggggccgggccgaagtcgtggacaccagccgtgggcgtggagaaatcactgttccttgtgtgtggcggctcccagttgaccgtctcgggcttggcgctgcgctgtctaacttgcctttgctcagctctgtcgtcgagtgcctccaccttccaagaaacctacacggtcttcttcactgcggagctggccttcttcaggagaacagaccccagcccgccccggctccccaggcggcgcttcccctaccctcaggcccgccgctgccctgtggaccttcgcccctcacccagcgcaccttcccctctccactcttgcttcaacctctcctgctaccggctggtttccctcaagcaagcgaacacattcaactctgtcccacctgaaccacacaacacctttcatctcacgccccttgttagttccaccagttttcctcctgcccaccgcagccaagagttagaaaggtcgtctgactccgcctgtattcccctcctgctgctcccacctcagtacctggcagcctggcttccacattcaccccatagggaaaatactctcatcaaggtcatctagggccccccaggggccaagtctcatccatgaattttggtctttattttctttccgtctctgtggctcctgctttgatccctcctagagactgcattgggtttcaggctgtccctctggccggtgcatccgggctcctccacccaggggtccgaggagccgtccccacagcacagcctctcaacccacacacgttcctgacgggctgactgcatcctccatactctgcccactcagctctcaccgtgcccaccgcggatccctagcccagcccatcctgctgaccaccaccgtccccagacacaccgcccccacggtgccgcaggtgtctggaattcaccttgccaaggattgagctcatgccccgtgccaccctcacgccttctacctgctcctttctcagttctttctctggaataagggcccctaattttccaaaccagaacggtgggagttatgccagattccattttcttacaaaccccaacagttaccgcatcccgttgggtccgtttcctgagtatctgtcctgttctttccgtggcgtctgccactgctgtggtcttagattactaacagagagctggatttcagaggcctccggacggtttccactgcctgctgtctcatttcagtgcaccttgcacaatgctcccactgcgataatacaaatccagccacatcactgtccccatcatctaaggacctgggcctggtccttctggtggggttagtataaactctccccttcttagggcttaccccatccctcctaacactctcagttcctgaacaggctggtcgggtgcatgtgctgcttgtgtcttgggaatacctggggactctcttttctgggtcaacccccctagttatccttccagcctcaagctgggcctcactgcctccctcacattgggggttaggccacaccttctcaagccctaagggagcaccagattctccgctggtctcacccatcaccttgcattgttatggtttaactgtgtcctcaaaactccactagactgtggactccttgagggcggaggctgagcctatccttgtacctgcggcaccggtacctggttcagtgcctgacccagaggagatgcgctgggaatatttgtcaagggaatgaatgacgtcatgaaagcgaaagataactccagctca

SEQ ID NO: 1245156 - DNA, 4001 bp, Homo sapiens
gaatgtggtggggtgaagagcgtggtggaaggacacactgagttcctgaccatccagcaacaaaggagcaaaaagaccttggaatccatgagaaggtaggagaagtttctgccggggtgggacgggagctctgaactggggctggacagtcagatgggtttctgggtgagaaggctgcttccctcacaggctacaacagttgtaatcagaaatggtcgcaacttttgacagggtccagagcaaaggatacagaaatgaattcgctctgatgaaaagagctggaaggaactgaaaattaaatatgaagcctgtggctatagttagagtttaggaagtaacctatttaaaatgggatgcacataggttggaggtaggtggtgaatgtattcagatgataataactagtctaagtagaaagaatgaagtatggttaaccaaaaaatgcctctggagtgctagagagatgtgatgagaggacgtgtgagtgcatcttcctgtgcactatgaaagaccagtgactttgagatgctgacagtgatgaggctggtgggtcttctcctgtcgccaacctccaaaatggatattcagagtccttccagctctgattctcagagatctaagtgagacgtgggaggtctcattgaacatttccaagagctgcttctgatttgttgctgatgctgaatggtaccgagttcatgcatttcaagtttgtgcaatgaaaataaaatgtgaatattcaccccaaaatgtgaatatgcccccaattctttgaaagactttctaaggaataaataatagagtggtagatttctgccagccttctgccttgatccttgtttcaactggcatatttccaagcatgttgcaggagtactttttcaaattggggcttctgtgattacatacatagagagaattttaaaggggtctcccaaatcatacatagaattttgcatatgattacattttaaagggttataacattgcctccttaaatatgccactgcatgctgaccagaagaattaagcagatctaaaaatcccttgcagactattcactccaactattagatgcagaggtgcaaaactataccaaattagcattgtaaaaaatcacttgcattgtagacactataaggaagtagttaaaaagaaatttactctgatttttttttcattatttcctgtgacagctgaggacactcatgtttgcagaaatgttttcattttcatttagatcccccttctgtttgatattagcaaaagtaacaatgcactgtttatatcccatctgttgttggcgtcaaagaattcttatggccatggaattgatcatgaagaggaacaaggagagtcatgaaaagatgaaaactattctgttaaatgcctttgtaatcaaactactggatctgagaaaaaaagtaccaactgaatttccatgtatttaaaattttttgtgtgtgaaaacatatagcaattggaaatctgtcaaggcaagtaaaaaacttttcccaatgttaatgaaatttgactcatgatatttatctacaagacataaaaatatagatggatcccagatactcaggaggctgaggcagcaggatcactggagcccaggagttcgtactggtggagaaaaacattactcacgtggtgacaaagtaccaggcagttgtaatgcacagccagagttaagattccctgctccttaaaaggggttcccagactcgcagcatatcggcgtcactggcagacccactgcgtcagcatgtgcagctgaaccatgtcccaggtgatcagtgattcatggtgactcgtcatccaagagcgtgttcctcttggctttccccacctccctgctttatgctctaatctctgcctgaaccatcatttctcatgactcctgcgcttcctccttcccatggggtaaagtccacacttttaatgtggcctccagccctttgcagtctgtccagtctccccttcagtctcttttaacatcacgtgaaccctccactccagtcaaaactccctgtagtttttggcctctcagatcctgtgtcattcctgctttttttccccctttgaaacctgagattaaaccctgctggctctgggaagccacttctaactgccatgacacagcacaatatccctttcctccggcacttactgtttcacaatttggtgagcatggcatgctgccttatactgtgatttaatcctttttaaaggttgaggtataaaataacataaactgtgtaaacagtcctgatcttaagtgttcttgatttttttttttaacatctgggtacgccttgtccatttttctttttctttgtatgttttatctacctatctgtactgaatatcatttaagggcagaagcatgttctcatctctagaaagaagccccacatggcatgcatgttttggactaaatctttccctggattgtcatttaaaacgtttttaaatttaaaaaactatttatttttatttttttgagacagtctcactctgtcacccaggctggagtgcagtggcacaatcatggctcacagcaacttccccctcctgggttcaagggagtctcctgtctcagcctcccgaagtagctgggattacaggtgtgcaccatcatgcctggctaattatttttttgcatttttagtagagacggggtttcaccctgttggccaggctggtctcgaactcctgacctcaggtgatctgcccacctcggcctcccaaagtgctgggattacaggtgtgagccaccacgccccacctgtattgtcattttgagtaaacactgctgaattgtttgtcctggcatttctcagcagggagaggatgtacaaaccctgaagaacagaggcaaacatttcattgtggacaaatgctgtgaaggaagaggacacagctcttgagtgtccatacttgggactctgtgcgcttagggtgcctgctttacctgcctgtctgctgtcatcagaaagctcgaggcactatcaggagtgaccacccaggccaggcacacgtttgctatgcagtgcaaggagcccactgtgggaggcaccacaccaggcccagagactgacactatgacagacattgcctggcccgggctccctatggaatttgcaatctaatgtagaaaaacaaacctaggtaaaccagacagcattttgctaattccagtcagttgattcaacacaaaaacaaaaacaggggtctgctcatcagtttccttagtgtccactggcttgcagctttttgctataaagatcttgagctttggactttggctacagaattgccaagaggatgttgtgtttttgcagaggaagtccctcccttctgctttatagtgtgcttggccagctgatgctgatactatgctcagttaataaggttctcttatcagactggtgcttattttcagcacttttttttttttgagatggagtttcgctcttgttgcccaggctggagtgcaatggcgcgatctcggctcaccgcaacctccacctcccgggtttaagcaattctcctgcctcagcctcccaagtagctgggattacaggcatgtgccaccatgcccggctaattttgtatttttagtagagacggggtttcttcatgttggtcaggctggtctcgaacttccaacctcagatgatctgcctgcctcggcctcccaaagtgttgggattacaggcgtgagccactgcacctggcccagcagtcttttccaaatcaaagacagcagggcgggcacacagtgtccaaacctcatggtctgcctgtatttaaaaggcatctagatacattggcattccttcagcaagaaacagctttagtaagaaaattccccagcagcacacacagtatcatctgggttcctgaactgaaataaactaaaagtagaggaaagtattttgtgaattaatccagtctaccttttttctttcaatcctaaatccatgttagaa

SEQ ID NO: 1245157 - DNA, 4001 bp, Homo sapiens
ctagaactagaaataccatttgacccagccatcccattactgggtatatacccaaaggactataaatcatgctgctataaagacacatgcacacgtacgtttattgcagcactattcacattagcaaagacttggaaccaacccaaatgtccaacaatgatagactggattaagaaaatgtggcacatatacaccatggaatactatgcagccataaaaaatcatgagttcatgtcctttgtagggacatggatgaaattggaaatcatcattctcagtaaactatcggaagaacaaaaaaccaaacaccgcatattctcactcataggtgggaattgaacaatgagaacacatggacacaggaaggggaacatcacactctggggactgttgtggggtggggggaggggggagggatagctttaggagatatacctaatgctaaatgacgagttaatgggtgcagcacaccagcatggcacatgtatacatatgtaactaacctgcacattgtgcacatgtaccctaaaacttaaagtataataaaaaaaaaatgcaagtgcagctcaagttctttctcaaaaggcagcaggccacacccacccacaacactgtgattggaataaaagctttgcggtcaagctaaaaggccttataaatctcctttcatctgtgttcttaaaacaaactgccagcctcctcgtgtagcaggaagtgagaggctagggtagacatccccggggattcgaccctgtggaaggtgatcaatcgagggggagacttcccagagaggctcattaattagagagagcgagcggcagtaagctcaaggcactgggaggggcagaatcagcccgtagtgtcctcccggctaggtcaggggaaccattccacccacagtttaaacgctctgtagcccgtccgcgcccgccgcccgtccgggtccagtcccgggattcaggagcccctcccgccgccgctccccggtgcccgccaccgctccccggtgcccgccgcccccgcgggcccggcgcgctgtccccggggcgtcagccgacctcgcggccgggacctaccgagcagcaggagccggtgcgtctgctgcaggtcgcgcttctggtcgcgcagcatgcggtcgatgccccggctcactttcctcgcctccttgaccgcctcgcgctccttggccgcctcgcgctcctcggcactcagctgctcggtgcgctgccgcttctccttcggcttgtctgctttgggccgagcgcatgccgggctcccttcgccgccccgagggagcagggtccgggccgtgtcccttgcggccgcccggactggggccagggccggggccggggcgggctgcgcgtcctccaccggcggctccgaggccgcgcaggggtcgtcccctgggcccccgaaaagcagcggccgcagactgtagcacagacccatgtgggcgcggcacagcgggggcggcgcgcgggactagggcaggctgggcgccgagggcggcctggttcccgcgcccagttcaggccggcgcctcagcggaggggcgggagggggctgcacccggaccctgttcggcgctgccggccgccagctgcgggaagggggtgcggcaggccggggccgagggccacagcccctcactgccccagagggtcattttgcattttctgctgtgtgcaaggggtggcggccgccttggctggagatcacttgctaacgcccagagcggaccgaaccgacgggcctccgcgagcccggcccccgttaccgtaaatgccgccgccggtccagccctcgctaccgtaaatacagctggctttcgttaccgtaaatactgccgcccaggctggtccccgttaccgtaaataccgtcgcgcgggcgagtattctgtaccgtaaataatgccgtctgagcccggcgcgcagctgcggacagtgccgcagtggctgtgcactcagcacctggagccgcagttgcggcaatcagaaaaccagggtggctttgatcttgggcgatagtaaccgaggacggaaagctgggtgtaggaatagagaccgtggctttaaagccttcaatttccccaatccatttcttgcagagatctctgcaccttgccactcccttttctgttcattatcttacacccacgtctgcacactctttatccctactttaatagtactatacctttgatctctacaaaatctccaattctggagtctggtccacgacaccattttcaacaatctccacccttaaaaatgaaaaccgagcacatataattgccatgtactatttatatttgctgaaatgagaatatgagattatacactgtattttcttaatccacaatatagggcagagaggagcagatgcgccttcagactgggtgcgctctctccatgacgctgagaaacaagcctgccagaggtgctatgtcttcggttatttcccgctgaatgcatagcatcttatagagcttctgcaacaggtgaacatttcaatatagcttgtgaaaaacctgctgtaagatgtgttccttggaaaatgacatggaatattatagctgatagttaaatacatctctcattaacacaccagattaggctgcttaatgaaacacagcatgcagcacagtgtgcactgtacccgttggcactagatgtaaatactacattggattacattttttctttttgaaacagtctggctctgttgcccaggctagagtgcagtggtgcaatcacggctcactgcaacctccgcctccccggttccagtggttctactgcctcagcctcccgagtagctgggactgcaggcacccaccaccactcccagctaatttttctttttttctttttttttttgaatttttagtagagacggtttcaccatgttggccaggctgctggtctcgaactcctgacctcgagggatccacccaccttgcctcccaaagtgctgggattacaggcgtgagccagcgcgccgggcctggattacatttttaaatcaagaagttggagatccggcattcacatttcttttgggggtcctactgataacaaatgtgcatacatgtactacttttgacctaacattgttccccaaattttgctaaaattatggcatacttttagatatttgagcaaaagaaaggaggactatagaaaatctaacttgggaaaatagaaaaagttactaaatatcactgtcattttcgctattcattcactcatccatctatccatttatccattcatccatttaattaagtgcctacagtaccctaggcattcttgttggtgctgggtgaggcaaagacaggggtcctcatggaatttatagactaatgaggtagaaatatactcaatcataaaaacacaggtaaatatattaattgtaaattacgctaatgccatgaagggaaaaaacaggattctcagagtataaaggaaggtcctgtttaaatcgagatggggaagagtagtgtgtgaggcaggaaaggcttttgaagaaactgagacccaagagacttacagcaattgcttttctattataacttattagctaaactttatcaatatcatacaagaaggataatattttgtatactaaagtcagctgaaaatgaaaacaaatattttatggatttttttttttaagacaggatctctctctgtcacccaggctggaatgcagtggcatgatcatagctcactgcaatatagaactcctgggctcaagtaatcctcctgcctcagcttccagaatagccaggattacaggtgtgcaccatcaggcctggctaatttttttaatttttattttgagtaaagacgagttttcactatgttgtctaggctgatctgaaacgcctaggctcaagggatcctcccaccttggcctcccaaagtgttgggattataggcgtgagccaccacaccaggcctagagtggatttttatacttaagtacgtcagtt

SEQ ID NO: 1245158 - DNA, 4001 bp, Homo sapiens
aattcaataaagattgcaaaaaccagtgtagggaaactggtgtgtgtgcaggaggagatattagtttaatagttttgctttccactgcatactgttctaagatttttagccctctaactgatcttcaaggtaataattgtccacatttggctaaataatctcatgtcatcatgagtgggtatcaagttaatggtcatcaccacgaatatatagttcagtcttatattcaatccctttcatcatctataatgtaattccattttaatagacttacggaaagatatacaaaaaatatacaacagtggctgcctctgagaaggatgaaggcttgtatggaggagaggaaagagggcttaatttacactgtatactcttcactgttgtttgaaatgtttaccctacttatatattcattcattaaacattttcctcttgaaatacatacctatatgcatgtaactgtattactaaatatttcaacaatttaattttttctcttttaaataatttttcagtatcattcacaaaacctcctagaaaatttcagcaaagagaagaaacaacacagtcacaacactcaaagcagagttccaggatttaaagtctaagaacatatatagatgaatgagaggttttattaagggggactgagttcaaaaaccttttgtgggaaagctcttccctgtatttaaacggctaggtttaaaaatgtgatttaagcagggattcccgcctcgaggcggggggaggcggaaaaaaacaccttacggtgtgaaaagcagaaattaaaatgtggtttctatcctctcagccggggccagaggagtgggtggggaggataaggaccttggaaccgtcacgttcaccggagaaaggggcaagactgaggagtttctccaggacccgcagcctcggttagaggcagcggcagttccgggcaaacgagtcgcgttcggggacgttccttggactcatgtaactgagaaaccccacgcactgaatctccacatggagtttcctcttaatggagctgggaagagggacggcgggaatggatttcctttaacgagtctccctcaccctccccggccagggcgcacctcactcgctgtctgcttgtgtcagggtcagctgtcaacacaactctttgtgtctcattcggaataagagtggtcctcagccatgcacagaaaaatggacatgctggccggaagacacgcgcgcccgctcgtgacgaagtgacatttggtgttgaggaaaaaaacccacagacgccgagcgagcgcccagccacctctggacgttctcaactttcccaggctgaactccatccatcctctccccgccacctccgcggcgccctacctgtcgcccgcccgcctgcccggcaccccctcactgcccctgggctcggggagacgaaccaggtgccccctcgccgcctccgccgggggaccccgcgctactcggcgcgccgcagctccctcgtcccacccccgggccgtctcgctcccgccacaaaggcagcgagtagagcccggtgacaggccttcggcctctgggcgcggacagcacggccgggtcccttcggtgggcgacgcgaggcggcagggaaggcaggcacggctcccaggttggcactggcgctccctcgccacccgcacgcgctccgctcacacccccgctgagcttcccatccctccggaaaagtccgctgcggcgcttccccgcgcggccagggcgtccagcccgccaaagggcagctcctgccggtcacaggcgagctcccgcgcccggttcgcgacctctcacctcctgcccgcgccccggagtccccgcggccgctcacctggccctagcggggcgcgagggcagaggaccagggggtggccctcggctcggccgggctggtctccccacccccagtgccgttccctgcgccgcgctgcgctccgctgctccggccgcccgactccgaggtgctagcgccgccggcggctggcgtctctctggcaggcgcgcggtccgcgcgctcagttccccggggcggagcgaggcggcggccgccgcagccggaggcggattcctcaggtgctgcccctcccgcccgccctggcctccgcagcggggacccccgcgccccctccccccgccccgcctcgcgccttcccgctgcctcggcgtccgcgagtggcttttgggggtccctcgccctctgtgagggtggtgggcgcgcatttctcccctacccccctccaacgacgccccccgcccagcctgtggagccctcgatgcgcggtcctcacgcctccattcccaaaccccgccgcacagacgaacgcgcagccccgcgggggtgtacagggggtcgtgcggggggggggtcttctgtgagggagggctgcaccccagtgtgctgacgcgcgaagccaggaggaaaaattatttcccctggagcccgcgttcattcagcctgctctcgcctctgcgcaattgctttctctgttcactggacggcggctgaagagccccaagcgtgaactcggcctgggcagtggtggctcggaaacccttggccttttgcatgaagggggtagggtgggggcagggcgcggacaaaaccaaacaaacccgggagctccgggcccaagccgacttttgcacctcccggaggagcacgccctccggccccgggccccggctcgtcggtagcctcccgggaccacggggacggctccaccccagggcagccgcgtccagctggccctgggccttgacgggtgctgcggggaaaaggttcttgagagatgctgcggcccggtagagagatttagctccacttttcacagctggaggcttttgttattagagatgcggctccatttttaaaactaattgttgccacagataggcgactacatctctggaagcagcagctccatgctggatgtggtggaagaatcgaggtaaggaaaggctgatgtattttgagtgcctttagtgcagtacagcccgggggagctccccgtgtgcgtgggagtggggaggcagccgcggcgcccaggcccgggtgggttggaatcattgtcaagtgataggtaccatttaaagacattgtcaattaaactagttctcatacgatgtcccagtacttttgtttgcttgtcttgcatttttcttttttgccatatccgaaatacatttttttctttcctgtcacttttgatccatgcagagggaatggactggaagtttggaatcaccggaaaataacaaggcatagctaagctgtgactagcaagataaacgatttgttcgaggtttgattgtcctttccctcctccactcggaagacatagttgtctttttttaaatcatgttttgtaccgaaatatttttattttataattgaatccctgttgttgggcctttaaaaacccatagaaacattgttatgtgccacgaaggtgggaaacacggctttctcagtcattgctgtactcccacaattctgggtcatgcacacaatacaggtttagtaaataaaatccgtatgtttttggccccacgcggtggctcatgtctgtagtcccagcgcttttagcctgggtgacagagaccctgactcaagagtgtgtgtgtgtgtgtgtgtgtgtgtgtgtgtgcgcgcgcgcgcgcgggcgggctttaaaataactacaacagaaaggtgcagatgattagcaatagctaaaagaatccaaagtcacttagtaaactcatcatgagaactggccatacacgtggaaaagacagtgctgtagaaactgaaattttaagttcacctggtgaatataaactaagctcatagaagttaaagcaggtgagaatcttttgaaaaactcaacccatcacaaggtctgtagagtgtgtgggggttgggcagaagcaaaacaccttccaatttaaagataaggacactgaacaaggagccgctttaaagtaaaaccaccagtgcagtt

SEQ ID NO: 1245159 - DNA, 4001 bp, Homo sapiens
gctttattagtgcaataatatagatgagtacaaagagattgggaatccagaactttcattccatctttccagccccattggctggtggctgggccagataatggccacttgatctaagctcccagaagccctctttaagaagcatcaattctaagtttggattcttcaacacctgctaagcatccttcattcttgaaatggagggtttttcagcttcacccattccaacctctcctctccacaccagactgctgggttcctcctgtccctcagcgatcacacatcctctcatctctggaactgtcaagacttggcaaatgattattttagcaacagtggaaaccactctattgcagcccaaagatctcgacttccctcacaaaagcacacacgacacagacgagctgaggaagcaacagttccagtcccactccttcccccaaattatttatcttctatcaagatttgtgaatcagccgatatatgaattagcaagtacttgttcaacacaccgttccccagcgcccgttctaagtagatggctaaggaaatacacacacacacacacacacagagacacacacacacagagacacacacacatacacactcttaaatctcttcagggattaaccagcttcccaagaagctggttggggttgttgtagttggcttttgtggggcgggtaggtgggggagtgaggaagttggacgctctgcgtttgctggaagctatgctcggcgacgccgagagccctggggtgatgctgggtgagccgaggctgccaggcgcttcctgcctcccagctgagcgaaagcagcgagtgcgcgcagggcggaatcctgaccccacccgcaggcgccctccgcacccgcagcgcggccgtcctctccgcctgggttctaggggccatggcgagggagcctccaagccggtgcctagagagcaggacctgttgcagagggaatgggaaaggagcgaggggaaagggcgaagtcgtgggtcaagaagggcggagaaagagcggagctcagaggggcagagagatcgggatgagcttggagagcaggcgagattccccaagctcagagcctgctggctggaaagagggagggcaaaagggcagggaaaagaatatcgctgcaaagcgaagagaaggactgaggaaactccagagagtcacagacaggcgggattcagggcactgcgcactgaacagatgtgaaacccggggcgggagcgctgcaccctaggtccccacacctgtggctttgcggggagcataggcgcagcttagatttcagcccatgccagtcgctgttgaggccaccgagctggaccagggttctgagatgctttcaagggacaacgctccccaagattattctaggagagtaccgtgccagacaggttgagactaggcggacaaaaggagatgtaggatgggcgcagagggaaggtgatctgcaccggggttggctgttgggagctcgggtgccctggggaagacaggctggaagcgagcgggaaaggatcagcggaccagcctgcggctgactagggactcatgggctccctagaatggggaaaggtggggtggagttttaggagaacggggaaggtgtttgccgatagaaaggtcacaacaaacccagctcccaaagctgggccagggaaacgcaaagaaatggggagacaggtcccctccggctggctgatccagaggaggacaagcgcgcggctcccgcggccaggacactcacccaccgcccagtggttgccgcgcgggtacatcttggtcagcacggtccctccgcccgcaggcagcgggaccgctcgcccccggggcgccaggcagaggaccagcgccagcaggaccagcgggagctcacggccgcgcatggtcccgacgggaagcccttggagcgcgccggagaggctgggaagagcagagactggtgacccggacctcggaggagctccgccgccgcagccgctggtgctactgctgcggcctccactagggcccctactttatatggaagcccgggcgggggggctggggggctcttctatcgcggaccagagcgctctgacgtctccctatagctaaccggggcgctgggacgcccggtccggaaaaccatccatctccccgccgagtgatgaaaaggctgagtgtacattgccccctcttttttcctcgtagccccgtccgccttccccacatcggattaattcctccggtcctcgacgccttccatccaacacaatttagtgaactcctccctctccaggctcgccggcgcctccagccttagctgccttgagagtcctggagagggcgaccccgctgcctgatctgggccgggaggggtggggggtgtagctggagacgggtgagctctaaagatggatgggctttgctggagggatttggaaccaccatttgaaggccttctgattctccagacctttctcttcgtaggccacatctttgctgtcccagcccatagattttggaaccttgcctccttgcagatctctctctctttttctggaccttgcctctttcttgcagatctcctcccctcctctcccctcctctcccctcctctcccctcccttcccctcctctcccctcctctcccctcccttcccctcctctccactcccataccctcccctcccctccactccccttctctcttctcctccccttcccatccctctctctctcccctcctccccaatctctctctctctctgtctctctctccccctctgctgccctccaccttaaggttaagggcagtatccttaacccacctggtattcccaggcagctctgcccacttgtatggcaagacagaagatagctggcccttttcacaagcatgcaacttccatggaatagagaaagaaactgctttatgccagtttccctaggctgcctctacctgaaagctcaaactgtccctaaactgccacatacacacccctctagagttgctcaacgttcctctgctccttctgttctcagatctaaagaatggtcaccagcccaatccccgaggttctaaataccatggatacaaaggggatcagcaccatagcaatgcaacaataaatagaagctggtaggatgctgttgcccacgttttggctgccagagttggccgtgtggttggaataggtgaggtctattcctcctcaaatgcttgttaattgcctccctgttgggtctttagtgttccatgtcaacatggtgttgatattgatatattgatattgataaagttgaaaacatacacttgtgtctgagtatctgctgattcaatacattcttcttcttcttttttttttttttttttttttgagacagagtcttgctctgtcacccagactggagtgcaatggcgtaatctgggctcactgcaacctctgccttcccggctcaagtgattctcctgtctccgcctgtggagtagctgacatcacaggcatgcaccaccacgtctggctaattttgtatttttagtagagatgagttttcaccatgttggccaggctggtcttgaacttctgacctcaagtgagccgtggcctcccaaagtgctgggattacaggcatgagccactgtgcttggtgttcaatatattcttaagtgattacacactcacattgcatgactgagtactcttggatctgaagagtattttcatgcatgtgtctgggtctaagagaaaaaaagtcaattttaagatcattaatagtttggtagccaaccaaatacaataatactatcctcagtgagtgagctaagtgaaaatcaaaagaaaaaggtccacagactggcctgggctccatccctcccgggttcccagcctctctgcattccgttcccaggctctgtcagtaggcaagtgttccattggcaggcaactgatcatccctaggcgtgctgcctcccacacagtgagcttgcttcaacacagg

SEQ ID NO: 1245160 - DNA, 4001 bp, Homo sapiens
ggtctcgatctcctgacctcatgatctgcccgccttggcctcccaaagtactgggattacaggtgtgagccactgcacccggcctgaagtgcaaatttttcataacaatcttttttcaaaatattttgaaatattctctgctgttcagttataatgatagctggaggcattatacaactttattttgtaacatatttttttccagtacagatgtgaaaagcttcacatctattatttagtactgcaatgtcaaataaagttagagagaagtttcagaaaaaaagataaattcgtaaaaggccatagtctctgtgaggaaaagtgacataggacatttctccattggcagcagttaggaaatgtaggaagagcgtcagagtttctgagtcagctttcagatgcatgtcctcactttctcttcattatacccaaatgaagatcttgtttgaactttttttaaattatactttaagttttagggtacatgtgcacaacgtgcaggtttgttacatatgtattcatgtgccatgtgggtgtgctgcacccattaactcatcatttaacattaggtatatctcctaatgctatccctcccccctccccccaccccacaacattgcggcactattcacaatagcaaagacttggaaccaacccaaatgtccaacaatgatagactggattaagaaaatgtggcacatatacaccatggaatactatgcagccataaaaaatgatgagttcatgtcctttttagggacatggatgaagctggaaaccatcattctcagcaaactatcgcaaggacacaaaaccaaacacggcatgttctcactcttaggtgggaattgaacaatgagaacacatggacacaggaaggggaacatcacacaccgggatcttgtttgaaatttacagatagagaagcgaaggccttggagatacaacgttcttcggaaagtggtcagagcctcctaacattgcttcggggctgcgcccctccccgctccctcctgttttggcttcttgccagcctggatgttcctggtccctgcaatgcttgcactttcctgagtcaatactgtggaatctgttgacccttcttcttggaaactgttttcttccatttttttttttaagaaaactgtaaagttaatgcatactcttgggaaaaaagaattctaacagaattaaagattataattgaaacatactttatacacagttttatataccattttttcttaatactatgaacaagttttctgtgtccttagaatggttgtaaataccatagtggttacaaggggcgtagccacattctaagagtgcatcgccattgacttaatgctccactgtatcctctaattaggccacagccttggctgacccatgctcctgcctaaacgtgaccagtctgcacctcagaaggccaggctctccccttggctgccacctacagccaatctaaccagctgtgcacccgagtctctgtttttttttttttttttttttttttttttaatgttttccccattacttcaaggtttggataaaataatgtactatggtttgcagcctggcttcccaaataatgaggctggaagtcacaatctgaaactgagtgaattaaccccctgttcagggaattgagtaataaggaaaaaagaccttgaaagagctaggaagattcatttcctcttctccctttttctgatgaacaaactgtttcaggaaagagatcttgcttacctctgcagtctctctgagatgtccctcatggccacatgagtgcacccagcaaaggacccaacttgggaagctgtggccaggatggtatatgtcactttgcattgcttctcatccttccctccgtagctgttttcctcaccttcttgccatgagtttgcacgtccttaaacaaaataggagcctttttagtcattgcctcagaccaggctttttagggaacctgagctcaggcagagacctagatgcagagggaggtagaatgttccaggaaggagatgcagaatgtacaaaagctttgtggggtgagggagcatgatagggtaaaagcaaaggaaggttgaaatgaaaaaaaaaaaaaagtaaatggcaaatgtgaaatgtgatggagaaaggaagaggaggggcatgtgatgtaaactagctggggacaaaaccacagaaggtggtatagaccccggaagcagtctggtcttgattctaagagtaacagcaatctactgtagggctttagggaggatggcagtgggatggagatggggtagcatattagtccattttcacactgctgtaaagaactgcctgagactgggtcatttatacagaaaagagatttaggtgactcacagttccgcatggctggtgaggcctcaggaaacttacaatcatgtcagaaggggaaggagggatgtcttacgtggtggcaggcgagagagagcctatgaaggaggaacagtcaaacacttataaaccatcagatctcatgagaactcactcactgtcatgagaacagcatgggggaaactgtttacatgatccagtcacctccttcccttgagatttggggattacaggtcccttcctcaacacatgggggttacaattcgagatgggatttgggtggggacacagagccaaaccatgggggttacaattcgagatgggatttgggtagtgacactggatttgaattttgaaagggacactctggttatgcagggcagaatagatcgtctgaaggaggtttgcagtgtggatattgcttgatcagttagcaagtgatggcatattactggagaaagatgacattagcttggactactgtgggaataatggaaatggagaaaaatgagagatatttgggaagtaaaatggataagatcgataaaggttggatatgtaacctggggcagtggaggagtcttagataattcctaggtctctatattgagctatttattggatgctggtggcattcacagaggtcaaacatttgtggctgaggtcaaacatttgtgatgtacccggtataactgctccctgaagttccctgaagctgagagagtgaacagatggtaaggagaggcaagctggccttgccttcctggattttatgttttcaaatgactgagagtactgtatggattggacatgtgactaaaagaattccctgcccttccccaccttgcaacccccttccccagatctgaagttgaattatacactaatgagcacatgtctggcccaaattaggtctagaatgcatgtgtctaatgtgggccttctaatattcagtcttccctgtatattagtgagctatttcatttttcaaataattggagtcatgttgtagttcttccagggaaattccaatcaccagggctagtgtctctgcccttgatcacactgatttatagaagtcatcttcttcatttgtaaagtatttgttgtgtttattatgagtgagacactaagtagggcacaatatgaatatgacatgggtcttgctcactaattttcagcaagataagagattatattgtccttcatcacattgatttatggaagagtccatatgcaggactcaatctcctatcctttctgcattgctgtctttgagagcttgcagtcatagaacagattttgaaaaatgagtggcagtcaattttgactgcctcagaaaataatacccatagtgtggctaagagggtagagcatggttgggtgcaaaaatttgaatatgcctaaccactttcctgtaacttgtatattccatatttctgaactgggttattataccaacttgtaagatgacatttctgagaacaagttgagtataagtcactgattatgtttaaaactgaagtgttatctactctatagttataaattttctcagactcctgcaaattgtttactaatagcttgcttttccatgtgattcagattttgtctttatagatatgtgggtt

SEQ ID NO: 1245161 - DNA, 4001 bp, Homo sapiens
cacgcccggctaatttttgtatttttagtagagacggtgtttcaccgtgttagccaggatggtcttgatctcctgaccttgtgatccgcccgcctcggcctcccaaagtgctgggattacaggcgtaagccaccgtgcccggccttgaatgcactttttcaaactatatatgcccagcagaaaattctaatgcaatctcctgatacgtagtcatagagtaatttcgtccaagtctcacatttcatggccaccacctcaggtgtcctgataggtccgtatgactaaatcatggagaccggaaacagaaaaaacagataggtaagtaaaaaaccacaaggcatcttgtgtgtcagactaacaagtttagactcttttaaggcttactgttttgctatcagagtaccaataagatatttagtataataacatttattacttagagaattactactggccaggcagggtggctcatgcctctaatcctaccactttgggaggctgaggcaggcggatcacctgaagtcaggagttcgagaccagcctggccaatattgtgaaaccctgtctttactaaaacacaaaaattagccgggtgtggtggtgcaggcctgtagtcccagctacttgggaggctgaggcatgagaatcacttgaacccaggagatggaggttgcagtgagctgagatcacaccactgcactccagcctgggcgacagagcaagattgtctaaaatatatacacacacacacacacacacacacacacacacacacacacacatacatatacatatatataaacataaaacaataaagttactactataacagagtggaagaaaatctgggaaaaataaaggagcaaaacaagtagtctacagtaaattaatcctgtatactttagtgttataaaatttggttacctctatttattctcgttcaaaactctggacttaatctcaccttctgactcgtattcacttgctttctgcttcaagtcctctattaccaggtagacatccctgtcccggaccctgttgcgttctgaaaggtgatgtaaaatctctgtggtccgtgggttcacctcatactgtggaataggatgatctccaaatattttttttaaccacgcagcaacctaaccattaaaagaaagacaaatattataagccttgtttactgtaatggctcgatgagaatatgacaaagaagtgatcaaaagcaaactaaatgctttctgtgactattttggagtcctacttcacaacctcacttgtctttagggagatactagatatcaggaaataaaaagtgagcaagtacacaaagaaacgtacaatactgaaaattaccagagaacaatccgttcttttccaaatctgcaaaagcggtacaggctaacaatttgcctcgcttgaaaaaccttaaagcttaatagaccataataatgcgaacgcattattagaccgtgcatggtctgaaaaaagcaattgtccctcgatcaccagaagccccgccgcgccgggaggctcccagtgttgggatgcagggcgcggaagcagttcagatgtggaagccgccgggctgagcagcgaaccggaaggcgggtttggcttcataagtcccactccagagtctgtggacacgggctgctcaacgcctctcccgggccagatccaaacaaggggaggcccgggcaggaagggaaaggccttcaggagagtctaagcacggggggcttgcagatagtgacggcggcactaaaagacggatgtgtggaataggggagagaaaagtagacgtggcgcgcacaggagacccgctgtcggcgcgggggtgtcaaaaacgcgttttccaggaggccaacgatccccattcccgccccatcacctgcgtttctctctcctcctgcggctccatagctgcggctcccgccactttactaggaactcctagcgggagatgcgccccgctcactccctaggccccgcccacacgccgttggcacccgcccctcgccgggcccgggatttctgggagttgtggttttacctgagactcctggccgttgagcccctgtgcaaggctggtcgaaggctctggcattgcaagcctcgcttcgttgccacttcccagctcttcccgccttccgcggtataatcaacactacgagagatagagccgcctagaaccaggttgttttttctttcttttatttttatttcttgtttgaatcacttgtcgttaaaaaaaagtacttgaaacgtttggttcttgcttagcaagatgtttgtgtttcttccacattgattgcatccactcagaatttatattctaccctggcaatatgagctgaggcaatcttaacttgatccgttagttcccccaacctaaaaactagggacattttttttttttgagacagagtctcgctttgtcgcccaggctggagtgcagtggcatgatctcggctcactgcaacctctgcctcctgggttcaagcgattcttctgtctcagcctcccaagtagctgggactacgggcaagcgccaccacgcctggctaatttttgtgtttttagtagagacggggtttcaccatattggccaggctggtctcgaactcctaacctcatgatccgcccacctcggcctcccaaagtgctgggattacaggcgtgagccagcgcgcccagcttttttttttttttttttttttttgagatggagtctctgttgttcaggctggagggcagtggcacgatctcggctctcggctctcagctcactgccacctctgcttcccgggttcaagcgattctcctgcctcagccttccgagtagctgggattacaggtgtgcatcaccacgcccagctaattttttgtatcttagtaaagatgggatctcatcaggttggccagcttggtctcgaactcctgacttcaggtgatccgcccgccttggcctcccaaagtgctgggattacaggcactgcgcccgaccttttcttttctttttgagatggagtgtttctctgtcgcttaggctggagtgcagagtgacatgatcttggctcactgcgacctccaacccccgtccccaggctcaagcaattctcctgtctcatcctctctagtagctgggattacaggcttgtgctagcatgcagggataatttttttatttttagtagaacggggggtttcaccacgttgatcaggctggtctcaaactcctgacctcaagtgatctgcctgcctcggcctctcaaagagctaggattacaggtgtgagccaacacacccagcctaaaatgattttcttttcaaaggaaacttactagcaagccaagcttatttattatttattttattttatttttagagacagggtcttgctctttcgtccaagctggagtatagtggtgatcacagttcactgcaaccttgaactcctgggctcaagcaatcctcccgcttcagcctccttagtagctgggactataggcgtgcaccaccacacccagctaactttttgtattttttgtagaaagagggtctcactatgttgcccaggctgtttttgaactcctggccccaagtgatgctcccacttgggcctctcaaagtgctgggattacaagcatgaggcaccacacccagcctgtcttgcttattctttttgcttcaaacatatctctgctctggctggatgcggtgcctcacacctatattctcagcactttgggaggccgaggcaggtggatcacctgaggtccggagttcaagaccagcctgaccaacatggcaaaaccccatctctactaaaaatacaaaaattagccaggcatggtggcacgtgcctgtaatcccagccacttgggaggctgaggcaagagaatcacttgaaccctggaggcagagtttgcagtgagctgagattgagacactgcactccagcctgggcgacagagtgagaatccaccacaaaaaacaaa

SEQ ID NO: 1245162 - DNA, 4001 bp, Homo sapiens
tattcaatgcaaagaagaaaagccatattctctcatcccaagaggagaacttccagatacttcagaggacatctgggcttgaatatcactggggcatctcaatccaagtcctttcaccctcaaaggtgctctttcccagccatccttatgagtggttggcagcaccatcaatccagacaccaaattatgtcagttctacttcctttacagtcttatatccacttacttctcttcatcgtttttaaaactacctttttgaagttggaaatcaactctcatctagactatttaaacaacttcttaattgtcctctctactttgcatctcctattaccagccctaaattattccctacaatgcaacagtgcagtggttaaggacaagaacaaaggagttgtataaatttatagcctgggtatacatctccactcactagctgggtgaacctgggcaaccttcttaacctttttgcctcagtttcttcattgctaatgtagaaataataacacaactctaatggttgataagaggattaaagaaagtaatacctataaagaattgtgaattgtgtcccgctcagagaaaggttgggttatgtatgtggagggctgggagagagaagcaaggagggaacattatggatatatcaagggctacaaaaatcacaggatacacatgatgcaaagttctaaagcattagtataacttgaggatttgagaaaacacatctaaatatatattatggcatattattcaaaacttgcatacttacaacaagagattttaatacaaattttcccttgggaaattggggcgctacaaaacatgcctcctaaaacccctgggaagtacaaattttctttccttccctatatggttccagacttttctggaaccactgtaggcattcaataaatgacggtattattcagccactccccagttaaaactcttccagtgactccccgctgacctctggataaagtctgaacaatgaacactggtggacagagtcctggtttaccctctccaacacatttgtctctactagcacccaagttccatggtactgcaggcggccaagagctctacactttgcctccctcgttgcgggacttttgtctgcaactactcgggcccctctacaccctcatctcctggccaatccctttagccctcagtctctgataaccatcacttcctctggcgtgcctcctctgggtccaactccttttctcccagagttaggctaggagccacctgtggtcctactacatttaccactgtcctggttaccagcccgcgcctctcctactaaactgttaagctctgtgcataagggactgtgttgcctttcccactgggttatttaggcgttcaataaagatcgtgaattaactcatgaatcccggtgtccacagctggaaggccccaacaacaaactctttcagcaccaactcaacttccatccccccatctcttggctgggaaggggcctcaagactggtcactgcactcggttctaaaccaagtaccagggccttaaaaacgccaaactgaccaggagggacgctagctccaaaatacagcccaagagcacgcttcgaggaatgactgacacactagcttcacgatccgccccgcagagacccacagcgcgcctcgcgcccagctatgcgcacgcgcggggccactgcaaagagggcggttccgacgcggaaaacagggaatgcgcacagagcaagagcgcacggcccggctcgagaggaggggcggcctgggggcgccactagtagttcccgaaccctgtcacaaaatctgcagcctcccggccccaattgcgcttcttcctcttcagtcctacagcggcttctcacccacactccgtacgccgtcctcaggaaaggcccccgctaatggcaaagccagccacccgcactggccgcgggtcctcagccgggatagacagccccgctgctgcccgacggacgccggaagttgggccctggccgcgccggaagccccggatttcccggctccgccccaccccttcgcccgggatttccgccgaggcggtgcagctaccgcgccgtgttgtcctctgtctgcaccgccgctgacggaaagctaggcccttctggagacccgctttcccaagggcgcggcctcctgggccgggatgcacgaggaaaaataatcccctgcctttcttcggtagctgttttccagtccacagcaccactgctgaaccgagcgttactgagtagcgttctttgccttcacccctcccttcctctaccacttgtccactctcgaggtttaactaagaagtcatactttactagacaacccaatctcagaagtcgtcatttcccccttagctacttgaatagtacctggcacctcttgcttcctccattaactactccctcgggcagcgacgtccctcctttccctcttctctcccgattagagccactacgggccgtgccttcctcttccacgggagctctatcttggtacacccagaaccacctccctccctaacccgctgccacactcgtgggggtctctacctgtctcctcttgatccaggtaagttatgtggacctgaataatagagtacagaaaagtcactcttatgcactcactatgaaaatgactgaacaactttctggagccgtgttgacataataggatactcactcgggttacaccttatacaagggttataccccttgataaaaccactgctctgtccttgactagggacccatatatgccacccgtatgccacaatctaacacccccactacccaaggctgcagtcagccctgttaggagctgtgacccattctgtcccttggactaggagccatctgcttttcctccccactggatctgaagtttttttgtcttactcatatatgctaagtttaagttttctgtgtgagggtctaattggttgaaggaaaaaggatttggtcctagtttccccttatgagccagctgtctttgaccagattaagacatcaccaaaggattttaagtgggtaatataagaagtgtatttttctaaatgcttcctctgcctgcagtatgaatagataggagagatgccagaatgggtgagaccagataagagacccactgcagggccacaagagagatacttgaactagaatgtgtggaaacaaagcaaagaggataaattcataggaggcaaaacagaaactggtgacagattagattggggttagggagaaggcatcaattatcaggctccaagactaggcaattgggtagtgtaactgatttttttttttttttggagacagggcctcactctgtcacccaggatggagtgcagtggcacaatcatggctcactgcagccatgacttcccaggctcaagggatcctcctgcctcagcctccccagacagctgggaccacaggtgcacaccaccacaactggctaattttgatttttgtagacagggtggggtcccacgatgttgcccaggctggtctcaaactcctgggttaaagcaattcttccacctcagcctcccaaagtgctgggattacaggcgcgggcaccaatgcctggcctcattcagattatgtggaatcatgggacaggactaatggctttctcctctccaaatggatctacttgatgaaaggcaagctaagaagaaattcagcccctccaaagggagggactggattcagaaaaaaaaaaaaaaaaaaggagcgggggggcaaaaaacccaaaggagtgaagccataaagcagtatctgaactggaacaaaaacagtaggaaaaacttatcttgatcgttgatacccttggacatagcccactgtgtcccaggtccttgcatcgaatgttttcacaatatttgacttctaatgaaaaatcaggggccaagagaaatcttagcaaagaagaattccattaccattggtatcaaaatgttatttttgttgttttga

SEQ ID NO: 1245163 - DNA, 4001 bp, Homo sapiens
ttatttagtcaatgatcaattaatttcttgttaatttggtaaacaaattgttttccttaaactttaaagcacactgctaacacagcaaatacgttattttaaacatttaagcattgatgataaagcttaatgtatcagatgttttaaagatgtaatcactttaaagaacaaacttacaaaattaacaactatatcattaatataagcatttgtacaataataaactgaataaatcaacacttataaatctgttaaactagattctcctaagactttcaaacatgttttaaaatacaactgtacaacagtgattataaaacttatttctagcaccccactagtaatactgtgggttttatacactttatcttcactctatctttttatatttcctagggtgatggtaatgcttattttaatacttttctggggttaaattaataacagaccatctcctattcacaaaaacaataggatggggctgccagattgatggttgggacatgggctctgactgacctgacactgctacttttcaggtcatactgctttttaaagccaaacaaatgtaaggaccattttgcagtttggtcctacattgggattttgcaaagacaactattaaatttgcttttttcttttttttgccaaatgcctttccttgaaatgaaatactatttgaggttctcgtgcatctgatttgcgtaacacagagttctatccacaagttggctttcaaagtctcctggtttaatatttaggccttcaggttggtttttgtaaccactgtgcctgtcaacctaggtgcctatagtcactattcctacacagcagtcgtatatgaatcatcacacagcatttcttgtaaacattattgaaattatttcctgcctcctttaaactcatcttacatttttttttttttttttttttttttttgagagagagtctcgctttgtccctcaggctggagtgcagtggtgcaatcttggctcactgcaacctctgcctcccaggttcaagcgattcttctgcctcagcctcctgagtagctgggactacaggcccatgtcacgacacccggctaatttttgtatttttagtagagactgggtttcaccatattggccaggctgggtctcgaactcctgacctcgtgatccgcccccctcagcctcccaaagtgctgggattacaagcgtgagccaccgcgcctggcccattttacttgttttatctgaatttactaaaggactctttcttggctttgttgtaacatgtatttcaattaacacatactggtttttgttcttgagcaaattctcacaacttgtctactgggaatctctgtaaattggttactttctttttacactatcccaacacttttgctttctggcaacagtatcgtcctcattttgatttttttccagtccaaaaacatactatcaacgcctctcctggtttcttttaaaggaggaggaatgtcaagtacaaattctgaatactgagagcatacgagtttcggtaccgacaaataaatactgctgctgttgtttttcctggaggtcccaggcctcacagccccttccagcgcccaacataaacttcaccagggtgggaggcctcattgtacctacttccagctcctgcaggatgagtggagcccaggcaggactttcaccccccagctccgcgcccattcgccctggcctcccctccccgcgcctggacccatagggcacacagccaagtgcagccaagtccctgcccttagggagcccccgccagagaccgagtaaagaaggacagccccagggaaaggtctggagcaacaggtgcgctgagcacttcactgggcttccctttcgtaggttcccgcccttttcctgggctcaagagcaggtaacgagaatccagcgtgtgggaaccactcccaaagtcaaacacctaccccagttctccgcgcagctgcccaggagcgaagtgagaccgggtcggagaggcgggaatagagatgtctgagcggcgccgggtgttagttcccagtgaatggggaggcgggcggagtcgggcccagccaggcaccacctagcgggcgcctgggcaggagggcggggcgggtcccgcaggccgcggggatctcctgatgtgcaggaagtggccaatctctgtgcaggaaaaagccccaactgtccgggagttttcagtcaagaagcgataatgcgctttggctatttggggtttttcgtggttccatacaaattatagggtttttttttttttctatttctgtgaagaatgacattggtattttgacagggattgcattcaatctgtaaattgtttgggtagcattgtacttttaacattaattattccaacctatgagcatgaatatgtgtccattttctgtgtgtgttcttcacgtttttctcatcagtgttttatagttgtccttgtagaagtctttcacttttttaattaaattgattactaggtattttatacatcatatttcttatagctattgtaagtgggatttctttcttgatttctttttcagactgttcactgtagatgtatagacatcttacggatattttatatccattttgtattctgcaactttactgattcatttattagttctagtagtttttgaggggagtcttttggtttttccgattataagattataccattggtgagcaaagctaattttacatctttctttccagtttgggtgtcctttgtttctttttcttgcctaattgccccggccaggacttccagtcagatactgaataaagggggtgaaactgggcatccttgtcttgttgcagatcttataggaaaggttttcaatttttccctgttcagtatgatattagcagtgggtttttcattttggtttttattgttttgaggtatattccttctatacccaatgtgttaaggatttttatcataaagagatgtaggattttactgaatacattttcggcatctattgaaatgatcgtgcagtttttgttgttggttcttttaatgcaatgtatcgcatttattgatttgtgtatattgaatcatacttgcatacccgggtgaatctcacttgatcgtggtgagtgatctgtttaatgtgttgttgaattggagttgctagcaattttttgaggattttttctgttttttacctgttgatatgacggattcctttgattttcaaatgttgaattagtcttgtacacctgcaatcaatcttacttagtcacaatgtataatccaactattttacacatagtttgatttcatttgtgaatatgttgttcaggattttgcatctatactaatgaaagatattggtctttaagtttcttttcttctaatgtctttgtctggttttgttatcagagtaattccagccctatagaatgaattagaaagtagttcttctgcttctatcttctgaaagagatttagagaattggagtaaacgttttcttaatttgtttttagaatttaccagtgagcccatctgggtctggtaattattttagatggctattaattattgattaatttttttagtagatataggcctattcaaatgttctatttcctgttgtgtgacttttggcggattgtgtctttcaagaaattgatccacgtcatgtagtttatcaaatttgtgggcacagagctgtcctgagtattcctttatgattttttactgtacatgggatttttagcatttcaccactttcatttctgatattagtaatttaggcttttctttttgcttagcctgggtacagtctcatcaattcattggtcttttaaaagaactagcttttgttttcattgattttctctctggatttcattcatttctgcccccatttttattatttattttgttttgcttagttgggtttaatttactcttctttttctgatattctaaagtagaagctgtggtgattgattttagagtt

SEQ ID NO: 1245164 - DNA, 4001 bp, Homo sapiens
cctgcccaaatacttcctgtttctttgaagagcaccgtaccgttcttagtctcagaagcccaatctttaactcagctttctcttttcccgcccaaccacacccttagctgctctgcctgttggccttcctttccaatcatcctagctcaggtcctaactgcatgatttctgcctagattgctgcaggatcatctctgaaagcatgccgccccacactccagtttccccatttcctacggctcttccgatgtctctaaagtaaagctttgatctgttcaaccactctcctgttttaaaatctttaaatctccacaaggcctgctgaataaattccactccacactcacgctggtatttaaaggccctcactttatagatttcatcttcatctctacggctcccctgcacctatctgcacaccagccagctccaagctcactcacccttaggaagataagcacaatgattttctaccagcatgcctttgctcattcttggagcaaagaatccttcgccctatctctgactatggaaattctatccatctttcaaagttcatgttaaatgcctctattcgctaactaaacgtgctttatccctcctccaagtgaccatagcacttcttaggtcttcgtggggtctcgtgttactctatactgctatagtcatttctgaacatctcttgtccactcttctacatcaaaaacttactggaagagactaacctaatcttctatagatcccttgattacctaatagtgcttgcatacctagcagtattatacaggctagatactatactaacatttgtgacctagattggggttgacccatatctgcagagaaattaaaaaaaaaaaaaaaagagaactaacatttgttgagtaacaactgtattccagggaatgaactaagtattttgtgtgtttatttcactttaacataaatgtaagctttatgtagttatagacaaaaataatctgaatatgccagattaaattatactagaaactcctgtaaaatagtatcatcagctgacatttctgtacatctacttattatgataagcattgtttaaaaataagaagcatcaggcagtgaaaaattataaagtgcgtgttttcagagaaagttggtttgatttctatggtctcttaacgatgatataatgctatgatatcatattatatgcaaggcagtttacagttgggtatattttacaaaattctatgccatatcattaaattaatactattaatcatattatttaattgatctgaatacgctattttctgattgcactggttactagcatatacataatttcttattactccaacattgtgataccaacaaaaccatatttacttaaagaggaatacttataagcctaaacatatgaggaaaatagcaccagaaacaagtaactcttacattaaaattttggagctatactggacttatctttattctataaaaagaaaataaactgttttcagctgaaaattcccctaccacactgatttacatatgtataacattcccttacagtgccatatagccccctccaaaatttaatacttaaactttttgtgtttatttttccccagttgtatacagtcccctgaaataacaaaagcttattttaaggatttagaaataaattaaaatcggaaaagactgtcttaaataaagacatataacttacccacaaagaagtcagagatggccaagttaagaaaaaaataactacttcgatgtctaaggtttttgtccaccacaaaagctaaaatgaccaaagcatttcctagcattatagcaaaagctactaaggacataaaaaatgctaaagtaacacgagtgcttagtgataaattgattgtgctattagtatctggcatcacatcaaatgatgaagaaggtcaaattagcaaattaatccagccagacaattctgacaagtatgttttctaatcacatacctaaaatgtgtagtcttccactcaaaacaacactgttttaatctaatgctgatctcatagtacttcctgattcttgataaagtaagcttgtggtaacagtttccctttaactgacactgagaaagtatttccaaaaaacagtgaaatgttttaccttaaacattttactgtgatgcatccatctccattattagaataaaatcatgtaatatctataaaatataatcattatacaggaaataaattgggctcacacaaggttcattgttgttgttgttgttgttgttgttgttgttgttgttgttgtttggagatggagtcttactctgttgcccaggctggaggccactgatgtgagctcggctcattgcaacctctgtctcccaggttcaggcgattctcctgcctcagccttccaagtagctgggattccaggcactcatcaccatgcccagctaatttttgttatttcttgtagagatggggtttcaccatgttgaccaggttggtcttgagctcatgacctaaagtgatccacccacctcggcctcccaaaatgctgggattataggcatgagccaccacaccaggccatttttaaaactcgtgtagattcagttcaatattctcatctggccatgatggagtaacaggggctgaatttcacaatcccatctgaaacagccaaaaaactagacaatggttttcaaggcacttgtcattaacaaggaaggacggtgatccctgagagaacggatgaggtctgcagttgccccaccttactatcttgagagttcccagggcatgggcagagaggggaaatccaggcagagcccaggagactccctgggatgaggaaatggagttgagagtacaggagtaccagagaggattctgaactgcagagccacactgagcagaactccagagatctgcagaggacccccttcaagtattcaccagagtactgattagcacttgtggaggaactgtttttaggcaagaaaaagaaccactcgaaaatattagaggcaatagtacccaatgctcacagagggctggttatagtgcctgctcccattagccaaatggaaaaagttcctaattcatgggacgttgggcagtacattcagaagggtcttgcctcagtagtcaggaataattagccctatactaaatatttcttgggttcttcctagcaaatcttaaaagcaaaacctgaaaggatcaaactgtttccaagcagcttaattgcaaccctgaacacagctcaagaatatttatataacataaaaatatccagtacccaacaatgtaaaactacaatgtcttaaatccaattaaaaattatctgacatgccaagaagcaggcaaatgtgatctataataaggggaaaaacatcaatcaattgaagtcaactcagaaatcacacagatattagaattaacagacaagaacattaaaatagtcagatggaatatggaaaaacgaaaatggaatatagctgtattccatattttcaaaaagatatgtaaagatatagaagattttttaatcaaacatctagaaataaaaactagaaggtctggactaaacatacattggaaaggattaatggcagagattgcagaagataagattagtgaacttaaacatgtaatgatataatccacctacaatgaaacacagagataaaagagattttttttaattaacagtgtatcactaaggtagaagacaacttcaagtgacttaatatatgtctaataggagtcccaggaggaaaggagaaaggaaaggacagaaaaaaatttgaagaatcaatggttaaaacgtttcaaaatgtgatgagaaatataaaccaagaagctcaatgaaccccaaacacaagaaacaaagaaaactacacaaggtatatcaaataaaattgctcaaaaccagtgtgaaaaagaaaagcttaagaacagcaggggttgaggggggacacataacatacaaaataagaaaggtatgagtgt

SEQ ID NO: 1245165 - DNA, 4001 bp, Homo sapiens
taaatatttactgttggcatatgagtttttttttttttctgagatgaagtcttgttttgttgcccaggctggagtgcaatggcgcgatctcagctcactacaacctccgcctcctggattcaagtgattctcccacctcagcctccaagtagctgggattacaagcatgtgccaccaggcccagctaatgtttatactttcagtagagacggagtttcaccatgttggccaggctggtcttgaactcatggcctcaggtgatctgcccaccttgacctcccaaagtgctgggatcacaggcatgagccaccacacctggcccacgtatgacattttaaatatcatgggataaggccgggcgcggtggctcacgcctgtaatcccagcactttgggaggccgaggcgggtggatcaggaggtcaggagatcgagaccatcctggcaaactaggtgaaaccccatctctactaaaaatacaaaaaattagctgggtgcagtggcgggcgcctgtagtcccagctactcgggaggctgaggcaggagaatggcgtgaacccgggaggcggagcttgcagtgagccgagatcgcgccactgcactccagcctgggcgacagagtgacactccgtctcaaaaaataaaaataaaaaaaataaatatcatgggataaacccatccataaatctgttgacttctgacaaaggtgctaaggcctttggattcagagggaaaggaaagtcttttcaacaagcagcgcgggaatcatgagggccacgtgcagacggggcagggacccatccccctcctcacaccacacaccatgaatgcaggagatcacacaccttggcccagagccaaggccataaagcatgcagaggaggatgcaggagaaaatctcgtgaccctgcgctcctcaagaattcttatgaaattacttaccaggtcacacagaaataccaccattgctactgaaagcgtttcctgtttatatactgctttgtagtttacagactgacgtcccacaccattcacggtgtaatctactcctcaccctgcgaccgtgtccagggtgagatgagaacagtgaggctgagaagcacaaaattctcccagctgggggttcaagatcccagggagccccacgtaccatggtgtgaatctagaatcccgtcgacataggaggaggccccacctctgaaccatgccagggctttctacctttgtcaggaaatttacgttagggtttgcacaacgcccaacacattccttcagattccaggtctcttcctcatagccagtcctcttgtgggcctggaactctttggcaagtaggaaggcctggggagcgggaggatttcccggaagaggccggagccctgggcgctgcgacactcgtgggtcccctttcgggcaccctttggcccagttgtttccccactgaccccgacctcaatgccccccagtactgcagggctccccccaggacctcaggccccccgaggatcgcagggtcccccaggacagcagggctcccccctgcacctcaggcccccccaggaccgcagggtcccccaggtcttcaggggcccccccaggaccacaggcctcccaggcactcaggactcctcaggaccacaggagtcctcaggatcgcaggccccccaggacctcagggccccacgaagaccgcagggcacccccagcaccgcaggctccccccccaggacctcaaaaccccccagaaccgcaggggcgcccccatccagagagaagcaggagtcggggaggggctcaccgcgtcccgcagcgcgcgcccgccgggggcttcagggccccgcacgtccatgtggaccgctggccgggggcgtcagtggggggtcccgtgggccgcgcggacccggcgcgaggtggcgacagctaagctccgcgattcccgtatgggccgccgggaggcctcgggcggagcgcgctgcgttccagggcggaggcggggccggagcggagaggcgggcgctgcacctgcagggacgcaatgtcaccgagcggccgcctcggaggactggtccgcgcccccaggctctgcggcttcccgagccgagccgagccgaggccccgggacggcctgggcggagccgccttactcaagagggcccgtgggcgccaccggccacctacacccccaaaacgctccgcacgggcagtgcatgggcctcggtcacccctgctgcgtttctcagagacgggggctcgctctgtggcccaggctggggtgcagtggcgactatggctccccgcagcctcgacttcccgggcccaagcgatcctcctgcctcggcctggccagtagctgggaccacgggcgcgcgccaccaggtccggctgatcttttttattttttgtagagacgggatcttactatgttgcccaggctggtctcgaattcctgggcacaagtgatcctcctgcctcggcctcccaaagtgctgggaccgcaggcctgggccaccacgccgggccttccctggcctctttcacacctgggttgtggctcgtcaccttgtgggtgacctcccaggacggtgttttagggttaccagtcttgttgccatgtctgtgcccctgtgcagcgctgtgggaacagggctatgtctggtcaccccagcatccctagggcacagcccagtgaccacacctggaagctctggtgtctccatgtgcggataaataaaacacagccacccagcaccaccgctgtggcgtggcggttcccgccaggttacttcagggcggatgtctgtggcctgaaccctaaaggccaggcggtgagtccaggccacggtgcccagcgaggagcaggtgtccctgagaacccaaacagcccggaggggatgtgagaaccaccacagggagcaggcccatcacacagacggcgcaaagaggcagaaaattagctcaaaagcagcttagggacagaagcacgctcatctctagagttgtcctgctgcccacgagtgccccacatgtgagtcctaataaactcacctactcaccaagctggactccgcccagtcattctttggtctctcagcaactcccactttagggtaaggttttaaatgtgattctcggtttttctcattacaaccagtcatcaggaaaacacaaaccaaaaccacaatgagctcccactgcaacccaccagcatggctagaatcagagagacaaacgtaagtccgagaggcgtgtggggattgtggccccccccacgcagccggtgggctgtgaaaggctgcagtgctgtgaaaaagtcgggtgggtcctcagaagtgaagcagtttccacagggcccagccgcgccacccctaggcatataccgaaacgacagcgcgagtgcaccaagtctactgcagcatcagtaatgctcaaaaggtggaaaccacccaaatgtccacccccaataagtaggtgacaaaatgcagatgatagaatattcctcagccacacaaaggagtgaggcgctgacgcacgctacgaagcaggcgggcctccggaacaacgctgggtggcagaggccaggcgtgaagaccctgagtggtaagtccatggagagttggaacaggcaaggccacggagacagaaagttgacttctgttgctgggggctgcagggacgagggagagtgcggagagatttaggaggtctggggtttctttgtggggggacaaaaatgttctaaaattagatcgtaagaaggtttcacaaccctgtaaatatactcaaaactgttgaattatgccctttaaatgggtgggttttgtggtatgtgaattacatttcaatgaagctgttaaaattattttttaaaagcatggccattttgccactttttgtgtgcttttagcatcctcctctttttttctgtctctgagagaggctgagatacaaacttagttgtaggggccagtgtggacggctgagaaagacgcggtgtgggtggaaa

SEQ ID NO: 1245166 - DNA, 4001 bp, Homo sapiens
attgttgtcatacccacttgtatctacttgccctatttagaattgttcttccttgggaggccgaggtgggcagatcacgaggtcaggagttcgagaccagcctgaccaacatggtgaaaccccatttctactacaaatacaaaaattagccaggcttggtggtgcgtgcctgtaatcccagccattcgggaagctgaggcaggagaatcgcttgaacctgggaggcggaggatgcagtgaaccgagattgcgccactgcactccagccggggggacagggtgagactccgtctcaaaaaaaaaaaaaaatgggtcttcccacatccactgctttcccttccaatctttcctccgtattgtagcctcaaggatcttgcaaataacacaaatctggtcatgtcgctgtcttaagaccctcttctcacctgcctcagttttcacaccaggtctacactgcttaaagctctcctcacccttccagctcctcccaacccttcaccttcaccgagttaatgtttactcatgtatcagatttcaggttagacacgcttcctccaagaagctttcgcagatacacaagttagtatctgcccgtacttctcttacataatactctctatacttgttattgtcatttgtttagtttttatttagattaacttccatcagaagggcagagtagctgctgtaacttcagttactataaatgggcctggcacatactttgcactcaataaatatcttctgaagtaaatgaaatgaatcaatcttgctcctgggtttacgtttcagtgattcaaacgggcatacttggtacacaacgtgaggtcctggaaggtataacttgtgttttcatttttgaatttctaaattctagcagagtttttggcacactctatgcacccaataagctatctgaataaacttttcttggaacatgagtgtctgaatgtcctgataactccaacacgttcccttcctgtaattcctaaagcccaggaacacttattgccttccatcagttagtgaactactgatgctccaaaatgggtcacgcctccttcccctccacacccaactcgttttgttttgtttgttttgttttgttagacggagtctcactctattgcccaggctggagtgcaatggcgcaatctcggctcactgcaacctctgcctcccaggtttaagtgattctcctgcctcagcctcccgcccggctaatttttgtatttccaccaccacgtccggctaatctttgtatttttagtagagacggggttttaccatgttggccaggctggtcccaaactcctgacatcatgatccgccggcctcggcctgccaaagtgctgggattacaggcgggagccaccgcgcccggccccacacccccaactcttagcccgaaactcagaccccgggttttcgactattaaaagtagtcacaggaccgcgacactgcacttcagcctgggcaaaagagcgagactccccctcaaaaaaaaaagtagtcacagaaaactgaattaaattactgacctgaagtaatcgcaagcagaggcgtccctgactgacttctatatccctccaccccaaccccctgggccctgcacagcgggtgtctgttgaatattctcccggctgttgagcccaaacctgatgagaggaaaggctcggcttccactccaagccgagccttccgctgttcttctgtcccggcccttggtgtcccctcacgcggccccattaggttacgcgcccccggggactccgccgccgccccagcccgcgccccgcggtcccactcactgttcttgaggaatcgctcctcgtgcagcactgcgatggcgttgacgcagagcagggctgcctgcagcagtgagtacagggtaaaggccatggccgtccgaggccgccccgaagtccaagcgatttctctcccgccgccgcaagggacgtggcgcctccacggccggcgccttcctacggaagccgatggggcccaaaacgaactctccgggaagccccgcctccatctggctaagaaccgcccctcgctgaagactgcaagtcctgccgcttgtctagaccggtgatgtgcaatcaatgctctgatgtggccagtgctgcaggtgcaaaatacacaccggatttcacacacttggaactggaacaaggatgaagaatatcccaataatttttttttttttgagatggagtctggccctgtcgcccaaactggagtgcagtggcacgatctcggctcactgcaagctccgactcccgggttcacgccattctcctgcctcagcctcccaagtagctgggactacaggtgcccgccaccacgcccggctaattttttgtatttttagtagagacggggtttcaccgtgttagccaggatggtctcaatctcctgacctcgtgattcccccctcctcggcctcccaataatttttaaatgttgataacatgttgaaatgaaaatattttgaggccgggcgcagtggctcacgcctgtaattctagcactttgggaaaccgaggcgggcaaatcacctaaggtcaagagttcgagaccagtctggccaacatggcaaaaccctgtctctactgaaaatacaaaaattagctgggtgtgatggtgggctcctgtaatcccagctactcaggaggctgagagaagagaatcacttgaacccgggaggcagagactgcagtgagccgagatccagcctgggtgacagagcaagaggaaagaaggaaggaagggaggaaggtttcttgtttatttttaattattttatttaatgtggttatgaagatactgtaaatgacatgtgacgcttgcattatatttctattgctcagtactgcacttgatgctcccaggagatacaggagatactaatattcccatttcagatttcagaatgctaaaacaaaataactgttttaaaattactcagtgagaaacatcccctccttgaccaaactccaaccaagatcctctgagcctcttctttttttttttccccccccaggaacagggtcttgctctgttgcccaggctggagtgcagtggcaccatcatagctcaatgcagccttcagctcctggctcgagcagtcctcctgccttagcctcctgcttagctgtatgtgatggttaagactgagtgtcaacttgattggattgaaggatgcaaagtattgatcctgggtgtgtctgtgagggtgttgccaaaggagattaacatttgagtcagtgggctgggaaagacaggtccactcttaatccaagtgggcaccatctaatcagctgctggagtggccaggatataaagcaggcaaaaaaccaatgaaaagggtatgccaagaccagctcggttggggagaccctaacccagcggtgctagaggaattaaagacacacacagaggtgtgaagtgggaaatcaggggtcttatagccttcagagctgagatccccgaacaaagatttacccacgtatttattaacagcaaaccagtcattagcattgtttctatagatgttaaattaactaaaagtatcccttatgggaaatgaagggatgggccgaattaattgcagcaggaacacatccttaagacacagatctctcaggcttttgtttgtggcttaagaatgcctttaagcagttttccaacctgggtgggccaggtattccttgccctcattcccgtaaacccacaaccttccagcttgggcgttagggccattatggacatgttatagtgctgcagagattttatttatggccagttttggggctagtttatggccagactgttgggggcttgctctcaacaagggtagactggcttagcctcccagcctacatctttctcccatgctggatgcttcctacccttgaacgttggacttcaagttcttcagctttgggactcagactggcttcctcagcttgcagacggcttattgtgggatctt

SEQ ID NO: 1245167 - DNA, 4001 bp, Homo sapiens
ttacacagcaatgtctgaatcctaagctggcttttcactgcctcaaggaagaaaagttttacagtagaacctaaaagttcctaaatatctggctgatgcttgctctggaaggaaagctgggaggcagggaaggatggaaggagaacccgtgttccatgcacacagcagctctgctttccaggaagaacgcttgcactgaagctacaagcttcatctgccttgcaggaaggtttagggtcctccttttcctacaggagggaaaggtcaaagggtggagtttcgcaacactcttaaattcattcattctttacggtctgaggcttgggttcttcaaactacaaagggaaggaaggcccttcaacaaaaaatgagtctacttagtattgcagattaatttttaaacaggattagaggatttgcaccaaggtaaagcactatccactttatgacgactcacttcaaatttaagattgataacagtccgatttcaacatctagggaaactggtagagcattttcggactgtcagacctcaaaaaagaaaacaaatgtttgaatataaaaggccaatctgctctcagcacacctcctgtctctaaaatccccgaaaacaatcactttttttttttttttttgagacggagttttgttcttgttgcccaggctggtgtgcaatggcgcgatctcagctcactgcaaccttcgcctcccaggttcaagtgattctcctgcctcagcctcccaaatagctggaactaaggcacgcgccaccatgcccagctaattttgtattttcagtagagacggggtttcaccatgttggtcaggctggtctcgaactcctgacctcaagtggtccacccgcctcggcctcccaaagtgctgggattacaggcgtgagccactgcgcccggcccacaatcacatcctaagagacaaacatggagtaagccatcttacagtcctgggagaaccaacactcgcttgcctaccactaccgtcggtgtgtcaggcactgctaaaggtactgaggaaagtggaaggaacaatcacaaaaatgaaaaagagaagagaggaactgcactccattttaaactctgctcgctggttttcggtagctctgcggctcggttttcatccttccgggcagtgtaacaagttcctcctgaactctgagtccgtggccgtcgcggagctgagccactttcagggtgtgggtcagagtaagtttgggttgaggatgctgcagccaggacaatcaaacggcagcccagccagatccccacgcggctggggcttagccccgggcttcctaccgcgagctgaatccgttcataggtccttaaaaatcaacagccccgtacgctacccctggagagatttctacattctgaccactcactcaaacgcaaaggtcacgttagccgctgaactccaaagcagaggggctcgccgccagggctccgggagttggagaagggcgcgggaggtgtgtccaggacaccagcacaaaggctcctttcaccgctccgcgccccgcgccctcgggtgcggaccctgggcgcccgccggctgcgcgccaggaccccgccactccaggcggctcccaaggcccacgcgcttctgctccgcccggacttccgagcccagccgtggcgctcacctgtcctgcccgcagcgccagctgcacggccgcctggaagcactcctcccaggggccggccgccagcgccgcctggtcctcgccgctcggcttcatcgcggcctcgccgggcccctccacctccagcccccctcggcgggactccggctcccaccggatcccgccgtcccgccgccaggctccacactccctgtgcctgctcccgcagctctgtgcctagtccgccgcccgtcccacacctgcgctggcgggaagggcagccagcgggccgcgggagccgtgcgtcctgctttccgctccccaccctccgccccgccccgtgccgagcccagcccagctccccgccccgctccccgcccagctccctgctcccgcgtccggccccgctctgcattccccacctcgcccctcgcagagctcggccccgcccattcccccctcttccccgccccttgacgctcccggccccgccccgcacccgttgctgctcctggcctcttcccgcgccgtgcccggccccgtcctgcaccgcccctcccgctcccggctgcgccccgtacctggccccgcccctctgggctagccctgaacacaaatcagtgccgagcctggtccctctccgctccgcgctttacctccagccccgcccctgtggtgcagcatcaccctccccgctcgaggcggacccaaccctgctccgccgtgccccgtcccgcagcgcgcagagcgggctccaactcctctgagcctcgagccccgcctccctcaagttgagccgggcccgtgtccaagccccgccccaccgccgcgcgctgagacaggccccacccccggctcgtgcagaactccgtactgttctgggtcaagcgcgcggagggcggcttgggccaccgcagagctgggagggaggagctaggagcggctgttttgggggcccggggcagctactgtctgggtgggaccgtgcggtgccggcccagccccggaggtgccggggagcgtcccgtccgcggatccccgcgcacgtggtgccgggcgtcccttcatggtctgtggccggattcgggctcgagcgccaggggcggctgggccagcaccttccgaccggtcgctttttgttcgcggaggccgctgggcgctaggcgtcgttctcggcctcgcaggagctcagaccgccgagcgcacaaggccgcagtgttcctgcaagcggccgccccgcgcggcaagtttggtcgcaaacaagctctccctccgctaaccccaaacactgcgaggacagcggctggactttataaactcttcacacccaaaactcgaatttggagacggaactgtgattgcgatgagcctctgtagtgaggaatgacctttccaaccttggattctcttgctggcccatgtaaacataaataggaggcatttcccgaaagagtggccgcgtggtttccaaggttaatttcataagccgctctgcctgcccgttttataaaagatgctaacccacgtaaaattattctggagtgccacttcggagtctgggagaataatgggagtttgtacaagaaccttgatggggcattttttacacacttaacctaataatgaaattaaacgtttttagtttttgagtactttatgctgaaacaccttgtggagaaactttaagtgtaccgtataagagacaaaaagtacaaacaggaggaattacaaacaggaaatacaaacacgcagatatgggtacaactttagggactctggcctcacccagagccctaatcctacggctcagaaaactagaccaattgccctgcctcccaccacgccagtttggggcagctaagggcgcactcccctccatcttttttgggttcttatgtttttatgatgtttaagacagaggccgggtgcggtggctcacgcctgtaatcccagcactttgggatgccgaggcgggcggatcacgaggtcaagagatcgagaccagcctgaccaacaaggtgaaaccccgtctctactaaaaatacaaaaattagttgggcgtgatggcaggtgtctgtaatcccagctactcgggaggctgagacaggagaatcccttgaacctgggaggctgaggttgcagtgagccgagatggcgccactgcgctccagcctggcgacagagtgagactccgtcgcaaaaaaaaaaaaaaaaaaaaaaagacagcaggacttcagaatgcacttaagattgtgctgtgaatgcgttactttaaaagaaatgcattctcttgttgattttcatgacaggttttcattagcggtcacttccaacaccaagcaaacaaagaagtggcaaa

SEQ ID NO: 1245168 - DNA, 4001 bp, Homo sapiens
ccattaactatatgaaatagctaacatataatagagaaccatacatacttcttttcaaatcagtattataaaaacaaacactggcaaaaactgttttgcatcctttatgttgaaagtacatacaagcagtcatcaaagattaagcactaagaaaagccatagctgaccttttcatttattttatcctaactacaactgatcattgatcattgattctcaattaataaagaaatgactgtctcctctacgagtcatctacattactaacctctctttccttttaaatgttagccatctttccaggtttggaccctctcctaccagatgaagagaataatgaagggaagcaaaactacagtctctcaagggtacattaacacttttaaatgattaaaagcattggattagaaagactggaactatcaattaatgtatgatttgaaagtgatctgagatgtaactgcccatgtgtttaatcattgagaaaagccaagaacaaagataatttagaaaacaacacaatcattagaatacagaagtcaacaatatagttcatactgtaactgaaagatggctgcaaggaagggggaaaaagtacctgcaagcaaagtgtccatttggggtcatctatatcgtcgctaattctaatacaaaatattttggcacagtcatcaatgacacaccactcctcgccataaatggctgccattgcttcaatttcctcattctgaaagaaattgattttttaaaagtcaacaaatgtacacatcttaaaatcctattcttactactttataaggtattcaaattcaacattaccagagtagatcaaaaattcctagatgagcctcaccaggccaagagtttcttaagagcaggtcaccatgttctgctctctgggtggttgctaggcgctactgcaatgactggagccagccttgctactgcattactgtgcttttggccactattgagtcaaaatataatatatatgcactcccatactttgtagtgaccattcacacgtgaaaagataaacctatcttctctgttccaccttctcttttttaacaggtaatctccacccctgactcccacccccaatagctctgccccacattatctgtgtactcctgctgggtgtctcactggttccttcgtattaaattttgtgttggggggaggtggggagggggtacacaaggactagatgggtgggtggttgcttggtaatcaaacccttaaaacgtttcataaattattctttgggcttggggttaaaaaagaaaaataactggaggacctaaagggaaaagatgggaagcaaagtatccattcgacttcgtagcatttcattttgtactcacagccctgtaggaaaagacttatgatcgcccacgtgaacaaggcacagggaaagctcgatgccaaggaccagaaggagtgagattcggtgggctctcgggacctgcagggtctgggctattgccattttgcaaagggggaaacccgaattcttaagtgatttgtccaagatgactcggcggcggcagggtggggatcgaaaccccggtttttgccttcggcccagagctgcttagtcgcgtgttaatggttgacgaggacaccgtccgagacaggccgagaccgcggccgccgaggagccgccggcctaagagcgctcggccgacgggaagcgccgggaaaatggaacgcggtggagcaaatggcgtggccagtgctggcggaacccggggcggccccaggcggagggcccctcggctgaggaggactggcatggcgaggcgagccggagccgagcctggagagacagcaccccgccggggcctcacctgcctctggtcgctccctgcgtccccctcagccatgtggcccctggacctgccctgcagccgccgcctgccaggtccggagcgcgggggcggggcgctgcggctgcgagccgagagctggctgcggcgcggcccgacccggaaccacaaccctgccacgccgcgccgccggcatctgcttccgggtggcgggccgaagggtgtaaagggctcctggcccccgggtttggggtggggttctcggttggggccttgctcccgccttcactgtctcccgtagggcggagacccagggaaagccgaccctcgcgagttgcagccagaggccctcacggctctgtctcctaggaatgcgccggggcggggggcttttgcttgcccattgcggccttggcgccatcggaatggccaggagactttagggagtcatttaccaccgcgtcccgggaagggactcaaacctcagtccacagtcccagactcgtctttacattcctagggagagtttttgtgtgtttgtttgtctgtttttaacatgttttaagttttgtcggattttggcaaagataggtttgatttaccaaaactggagaacagagaaggcaggcggtaattttgaaagcgtgagggggaaccttattctcccattcactgttgtattgcgatcgttttctttagtctcgaatattttgggggcaacttttgtgccagtcactagttatgccagtcaacataaggagcattgattcattttcccaaaaaaatgaatcagtttgtcattactccctcgcccacaagttcaatgacattctaatacattggttatgaattatatcaaccaccttattcgagacgcctcagtcaagacatctcttgattgcaaggcatccttgcttgcttcacttttcgtcacacataatatacaaaaactcaaaatattacatctttctcccttaatcatgggtatttttctgcccctctttaaaaccgttgtcttaagataaatcattgtagagaaaaataaaactcttctcaagagttaggagttcaacacctgtagagaattccacttacattactttgagtataaaccttgtggatttactagttcaacagacattttttaggctcttactgtgctaaacactggagatgcaaaatcatatgtcatacatagcctttaaggggctaagatgtgaagggaacaaaagtaaacctgaaccagaagtacagtaatgaatctcttaaagattggataaattctgagaaatttacccttaatttcatcgtgatagtgcgaacttcatagaataatacacttacacaaacttggatgttatagcctactacttatctgggctatgtatcgcctgttactcctaagctacaaacctgtacagcatgttactgtacctaataggcagttgtaacacatggcatttgtgtatctaaacaaagaaaaggtacagtacaaatatggtagtacaaataccataatgtatggtagtacaaataccatattacagatatggtattggacatgcaagtggtcttatgagaccactgtcatatatttggttcatcagcataagtcactataacctcctgggctcaagcaatcttcctgcctcagctcccctagtagctaggactataggcatgtgccaccacacccagctatttattttttatattttgtagagatgggggtctcactatgttgcccagactggtcccaaactcctagcctcaaatgatccaccctcctcaatctcccaaagcactaggtttacaggtgtgagccaccacacccatccctgaactctttcttcactgaccttttcatatttctgcagcttctatgcaaacataatggttttcacacttttttaaaaggccatggaaccttttcttcaatgaaagcttatgtaaaacaaatttgttctggctgaaatgaaaataggactgattgttctggctgaagtggaaataggacagaagtcccaagtacttagcagtactccctccctcccagcagccccactaaaactttaaaacccaagtttgaaaaacgccatgttaaaacttaaccttctaaacaaagcacaatatattcaattagttacacatagtacctctattcttacc

SEQ ID NO: 1245169 - DNA, 4001 bp, Homo sapiens
gacaatgaaagactgacaatactctgtattgttgaggatttcgagcaactggcactctcatactttgccggtaagaatgcaaaaacagtgcaactactttgagaaatactgtttaacagttactgagttaaatgtatgcctaccttctgactcagcaattccactacttctcaagagaaatgaaagcatctatctacacaaagacttgtacaagaatgttcagagcagcttctgcacaaagccaaaaactgtaaacgttcaaatattcatcgggtgtatgtttatacaatgcaacagatgtactaaacgactctcaaaaacattgtctcaaaaaggaacctagacagatgcaaaagaatatgttccctattgtcctgtattattccatttatattatgttccaacccaaagtcagtctattgtgaagggtggctgaacagtgggtaactgttaggaaggaaagacagtactgacaggaaaatgtcacctgctcttagaaatgctatcttgatccaggcagtggccataggtgtatacaaatgtaaaagggcactggatctgtagttttgttttgttttgttttgtttgcgataggctcactctgttgcccaagctggactgcaatggcacgatcatagctcgctgtaaccttgaaatcttgggcttaagtgatgctcttgtagttgggactaaaggcgtgcaccatcacgcccagctatttgtaaatttggatgggggttggggagcaggtctcgaactcctgtcctcaagcaatcctctcaccttggcctctcaaagtgctgggatacaggcgtgagacaggattcttgaagatctgtggttcagccagtattcttgaaaatttgtgcattgtactctgtgtaaatcttactatagcaaagtatttaatattaaaaggttaaaataaaaagcactaccaatcacctacagaagaaggaacaagatttctagaacagccactgactgactgggtgaacggtggtgtcacaccatatgctgaggagcacaaagtaacacactctatctctgcttttttgctttgaataaaatgcaggagccagagaaaacactaatcaagccactccctgctgaaaattcattgctggaattacggaacctagattgttcagaggccctgacgtctgagccaggcgctgagctcagtgcctttacactcattacttcataaccttaacaagcccatgagttaagaccaaacctgcctttggattgggaaacccagggtcaaaaaagcacttttctcaggatgagagaaagcatacttatcaatacatcttgtattcatccatgcaggacattacagcgctatgcgcctcaaagacactgggtagatgtctgcagaatggacgaggggaagacacgcaaatttctgaatgactgacactcattagtcctgaacctcatgctaaaggcgacctcgaggggaagaggcagtccttctattaatactaagtcagtaataacctccctacttcttcttctctccttacaacacaaggcgttgtaagcccatgtgtccaaacgaagggaaagagtagtcattcactccgcggggcagcgtctttcaaccccaacggagaccgcacgcgcagcgccccacattacgcacgcgccctggctcggctccgccccgccaagtcccgtttcgcgacgcgcacgcgcagcctgggagcgcgactgcgtacctgcgcaaagctggaagcggacgcttttttcttcttactggcgccatagcccccgccgctgctgccattgtgggaagggctggccggcctcttcttgctgttccggactattccgggagtggaagtggtggccacaattggaatttgcgccgccatcgcactccgagtcttcccctggtccccccacctttttcccagcgcgggccttggaacttcctttccgctgttacttccgtcttgatgcttgaaaacccggcctggactccaagctgtagctggcttctctcggtgcaatctaaaaggcggagctcggagtagcctgtgccgtcgggacgggaagatgtcagcgggcgttgtcctgccactcgggcgctctgggcgtgggccttgggtggggcacgtgcctggaaatccccattgatagaggaatagaaaatctcccaatctttttaagtaactacgttttaaaaaattaatgagcgtgttgtcttttctcatatagaagagtgattacttttgatgtctgtaagcctaaagctggggtcgttctcagtagaccgccaagctactggcttctccctctatccctccctgccttcccacgcggaaaaggtttgtatataaatagcgcccaaatggacatgaagggtagagtggttcttaatctctccctttttttttttcttttatttgagacggagtttcgctcttgttgtccaggctggagtgcaatggcgcgatctcggctcactgcaaactccgcctcccgggttcaagcgattctcctgcctcagcctcccgagtagctgggatcacaggcatgtgccaccatgcccggctaattttgtatttttagtagagacggggtttctccatgttggtcaggctggtctcgagctcccgacctcaggtgatctgcccgcctcggcctccctaagtgctgggattacaggcgtaagccaccacgcccggccggttcttaatctcttaggattcacagactcttgagcatggaatctgtgcttcctatccctgccgcacacccccacctccccaccaccccattaaatgtatacagacacagacaaaattttacagatttcagggaggtcacagatctactaaaacctatttaggaacctgagtccccctacccgccttgttctttgcctcattctaccctatatttttacagaacctttgcgacatcatataactaaatgatttataatcggatggttaatgtcttttttggctcctgctagaatgtaatctgtatgagggaagggtcagttatgtcttgttaacttatcagtccccccaatcacagtaccttgcaagtcattggtgcattataagtatttttaatgatgtatttaacgaatgaactaactccctgcagtgattggtggaagctactatgtttgaatacaggaagttgatgtatatgagtcttgatatttgaaataaacaggctgcacaatgacttagaggtgagagagaaggagcagttagggaaacttgcaatattgttactgacatattttttcctttagagaaaggaataagcctaccagtgttgaaatgttctttcccacaccccatctccatccctatcctcatctaaagctagtcttttcctcattccttaactcaaggactcacctccaacaagccagtcacctaagcaaactctactgtccccacctcctcccattcctcacctcctcagctcgcttctctccttcacggctcctgccctggtgaatctgtatcccatgtctacatctcagcaacagcctccagatggacgtttcggccgccatctttcccttatccattcctgaccccagaccatccttcacactggctgccagaatgggatttctaaattacaaatataatcataccacttactttcttacattcttcagggcccttttgccttcagggtaaaattttttttttaccttcagggtaagaacgttttggcttgtcatacaaggtccttaatgactgggctctgggccgggcgcggtggctcacacctgtaatcccaacactttgagaggctgaggcgggcagatcacaaggtcaggagataaaggccatcctgtccaacacggtgaaacctcgtctctactaaaaatacaaaaattagctgagtatggtggcatgcgcctgtaatcccagctactcagaaggctgaggcaggagaatcgcttgaacccgggagattgcagtgagcagagatcgtgccactgcactccagcc

SEQ ID NO: 1245170 - DNA, 4001 bp, Homo sapiens
tattttatcttctggatcattggtctggggcttaacaaagaagtccagttgaggtaggttgggggagtttttggtatatagatagtattagaagtttggccgagcatggtggctcatgcttgtaatcccagcactttgggaggccaaggcaggcggatcacctgaggtcaggagttcaagacctgcctgaccaacatggagaaaccccatctctactaaaacaaacaaacaaattagctgggcatggtggcacatgcctgtaatcccaggtactcgggaggctgaggcaggagaatcacttgaaaccaggaggcagaggttgcggtgagccaagatcacaccattgcactccagcccgggcaacaagagcaaaactccgactcaaaaaaaaaaaaaaagaagaagaagaagtcggccaggcatgttggttcatgcctgttatcctagcactttgggaggctgaggggggaagattgcctgagctcaaaagttcgagaccaaactgggcaacatggtgaaaccctgtctctactaaaaatacaaaaagttagctgggcatggtggcgcataactgcagtcccagctactcgggaggctgaggcaggaaaatcacttgaacccggcaggtggaggctgcagtgagctgagatcatgccactgcactccagcctgggcgacagagcaagactctgtctccaaaaagataaatttttaaaagatagtactagaagtcatgaaaatatatgagaacgtttacggctgtgtttttcaaacgtagagttcgtgcttaaagtgcaagtttcaagaaatcatcccgggggtttctgattcagtgtcttcatgaggcccaagaatctgctctattaaagggtaacccaaaagattctgaggcgggtagttcatgctgagattaaaataggcttaagtacaatccggaggtgaggaattagcaacaacatgtgtagccaaccttttctagaagatggagagaaataaacagaggctggtaaccataatgggtatgaagccagagggttacctttttgtgtattattagtttttaaaaggtaggagatactagagctgtggttcataaccttggctacacactgtaatcacctcttgagctttctaaaaatactgatgcatagaactcatcccaagccagtaattctgaacctctaggaatgagatccaggtagaagtattttttaactttatttttatttttccttccccccgcccccacgttgtttttatctccccagtgcctggcagacaaatgtgtcctcaattcatgttcatcgctgtggaaagaattgctggccagtagcaggtgatacagaccacggtaaaccacttaatgtattgtagagctcatgtaatcttcgtgtgaaaaagattacagtccaattccctgactttcagatggagaaactgaagcccaagaggggaattaaatgcctaagatctctcgccttagtgatggcaaatcaggatcagaagccaatattctaactaactcccaggtcaatgttttcctgtctttcaacaatctaattttgaccactccccaaatccattcacccaatcaagatccagagtctaataacacctccccgtcaatacctcatttcctcaatcaggaaccgaccctgccgtccctttcatccgacccgttgtcacccccaaacccgcctgtgtctcatttatttttccctccatcacggctgcaagcccagcccgggatttaaccacctcggccgagcgcctctcactgcgtttgcgcttctctagtagcggactctgtcgccatagcaaccggagactcggaatcgtcccgcagcaacagtaggagaggggttcttggtataatcatgttttatatatgcgttccttaccgcttcccgcgcctgatgcgtgaatttcagggtctggtaggaaagctccatcagacactgtgctaggaccctagagaagggagaaaagtagtcagttactgggctgaccggtcgatccaaggaacctgacgcttaaccagcccgcccctttccggattggctagagcccagacacgcccgccaatcgctggccacagaaggattctttaacatgccaatcaatgttagaccatgcatgtttaatccagagtgtttgcatgacactggccaatgaagagatcgaagagggaagattgttagagcacagggcgggctttgcaattgttttggttttcttaattcgtttctaaaatacaagctgacccagggccatgtaccataatatttgtccttgatttcagccgttgttcaggtctttgcgacccaatgcttctatacccaagactatattttgacgtcccgtcttctcctccctggattagggtaaaggtttggaaatctattctgcttttctttgaaattctctgtgcatggtctatctagactggacgaatctgctgtggacactttggttgtcaagagccttctgggatgcaaactgtgcatcaccaaacttccccttctcctccaattcctttcacatcagacctgttctcattagacgtggaaaaacatggacgtgttttcctctgctctatttttttcatgtgttaactagtctgtttcttcaatgtctttcccttctgtctctcttgctgtgaatcctattccaaattatcccttcatcattatcttcggtcttcttcatccatttcttcttcatccatttctcccttcaggatacaaaaatattcaagtttcctcaatctacaaaaaaaaaaaagttctcgtaagtgttgaactgaatcacctttctcccattcagggcaagctttctgaaaggactagctatcctcttcctcatttcctcaccttccacccatttctcaacacattctggtcctgctcctttgaagcagttctttccagagtcgtcaataacttcctaattgggaaatccgattacagattatttaatattctttatcttattccaacttggcaccatgtgaaattgttgaccactttctaattaataatcataactgtaatttattaaacatctacagcaccaacgtactatgcgatttacttggctatctaatataatcctaacacaacatggagaagttattaatgccccaatttgcagttatgcaaacaggcccaaaaagccaaattattaataagtagttctagatagagttaggatgcaaacctgtttcctgactgaagccagtgctcttttcactatgccttgcttccacccttcctgtccagtctcacctctaattcccacctggatacaggcaaccccactctaacacaagcgaactgcttacaatgcttgtgaatgactaatgagtagtttatttggcttggagaaccactctcacccctgctgcataagaaaagtctatattgcctgctaagacagctcaaatgtcactttctaggataactcaatggcgttttcttctaacaatcactatacttaacctaggcgaagcttaggcagagaacaaattagttcctgattccacaacatacttttcatactgcacttatcacattgttttgttgacatatggttttcaaaaagttaaaaatgtgattctttgatatgaatgaacacctgtcaatgattttgcctaactcattaatgagggagccaataagatggtaaagctggtttaaagagcattataaggaactgaatatttacagacatttttagaaaacaatgttagtatagtgtcccttagcatctactggaaactggttctatggttcccactgataccaaagttggggatccttatgtgaaatgccatgctacttgcatgtaagtacgcacatcatcctgtatactttatttatttatttatttattttttgagacagagtcttgctctgttgcccaggctggagtgcagttgcacgatcttggttcactgcaacctccgcctcccggattcaagcaattctctgcctcagtct

SEQ ID NO: 1245171 - DNA, 4001 bp, Homo sapiens
cacagatctctcagcatgcaaacttctcagaacacagacctcagcacccagacctctcagaacacagaactttcagcacccagacctcatacccagacctctcagcacccagacctcagcacccagacctctcagcacacagacctcagcacccagacctctcagcactcagacctctcagcacccagacctcatacccagacctctcagcacccagacctcatacccagacctctcagcacccagacctttcagcacccagacctctcagcacccacacctcagcacccacactctcagcacacagacctctcagcacccagacctcagcacccagacctctcagcacccagacctcagcacccagacctcagcacacagacctctcagcacacagacctcagcacccagacctcagcacccacactctcagcacacagacctctcagcacagacctctcagcagccagatatctcagcacccagacctctcagcagccagacctctcagcacccaggcctctcagcagacagccctctcagcacccagacttcggcacaaggtcctctcagcacacagacctcagcacaaggtcctctcagcacacagacctcagcacccaaacttctcagcacacagacctcggcaccgagacctcagcacccagacctctcagcacacagacctctcagcacccagacttccgcacacagaactcagcacccaaacttctcagcacacagacctctcagcacccagacctctgcacacagtcctctcagcacacagacctcagcacccaaacctcagcacccagacttctcagcacacagacctcggcacccagacctctcagcacacagacctcagcacccagacctctcagcacacagacctcggcacccagacctcggttccatagccagaagccttcctggccctggcactgtcctccagccctgaaacaatgcggttgggtctccttggtccagaatgaccaaatgtcacacaattctctaggccccggatacccaatattttagctccacgttgtccaaactttgaaggcctgatgggctgagcagtttccggcggcctgtggaccggatgctgcgtcggaaaccgaatgtaacttggagcctctgttgtctcccgctgggggtggaggttggccaagaccaccatcagcggcgctccctcagcccggccgcctccagcccggccccggcccaccccagtcccggcagcccccagcccggtcctaggccctggccatggctgcccccgcgccccttcccccacccacctccccgcagcccagatcccagcccagccccagctccggcccggtccccgccacccccggccgcgctcacccgctcctcctcggcgcggatgtccggcatggtgctcaggcagaggcccacggccgtgacggccacgaaggacacggacacgcaggcgaagagcttgcccgccagccccgagtgcgggttgtccaccacgtcgcgcaggcgccgccggccgcgctgcagccgcccccgaggtcccagggcgcgcgccgggctcccctgcgccccgcgctccgtcggccccgcgcgggcctcggccgcctcctcctcgcggcggcgcaggcggcgcaggcagcagcgctccaggcgcgcctcgtcgatgccccagtaggccagctcgtcgcggaaggccagcgcgcacgggccccgcagcagtcgcagcttccctgcgcgcaaaagcgccacgatggcgcggaaggcgcacgggctgcggtcgaagaagaactcgtcgcggctcacgtcgtagtcgtcacacacgcgcagcaggtcgtcgtggccgcggcaggcgcgcaggcgctccaggcgcgcgagggggcatcgcgccagcgcggcccatgccaggcgcacgcggcagccgcccacgttgatgatgacgtgccgggcgcgggtcccgccgccgccgcccggggagcagggccatggctccatgcgcagggccggaccggaccgaggggctcctgcccggctcctgcaaaaggaacggaccgcgttagggtcgcgagggctgagctgggggagcgcgtccgcccgcggggatccaggggccgggccggcaccgaaccctcggaggtgagctcggagacccctccgcccgcccacttcccactcctccgcaggcccgacctctgcacctggtccgcatgggggaccctcaagcgtccagcggaccccgccaggtggtgacccgccttgagttatcaccaagggaacagccgggttcttacactaggggacttggaacacggggtcgaacggagctttcacaaatcgacgcaaactccaaagagccagatgtttcagggcggaccccaccgaccggtgaggacgccgtgatgtctggagggagagacgcagtcctagcttagtttctcacggtgtgtcccgcggaccagccacgtcagaatcagccaggggacctgctggaaaacggcattcctggccctactcagcattctgtgaggcggagaaactgcagaataaggagctccaaaagtccatccctaccttaacacaatggaaaacctggtgaaaactgtcaagagtcaacttttttggaactctggaaactaaccaaaagcttgcaccaaccgtggggcactaagaaagaacagctgagtcttcgtcacaataataagctttgtcgctccccagctctgcggggacagcaacagcctgcattcccggtaccagcactggaaggagaagctacaggactctttgactaggaatcgtaattactttgactccgtggaagactggctcaaactcctgccttcatctccggtgtcttggaactccgtctgtgcaaaggcagccacttggggagtgtgtgtcaaaaacattgataggaaagtgtttcagccattgctgcctgaggcaatggattatggttgccgccacaggctaaacaaaaagctggggacgaaaggctggggaatgagatgatttaggaaatgaaggcctgataaagttctaagagttcccgggaatctggaatgccacgcacacgcctcggctgcgcacatgccgggaaaaacccgagaagtccctgaagtgcctcctcgggctgaccttcagattctgcgagcaggaggtgataagacagaggcttgaccagcctggatgagtgctgaaggttgctccaagacacgcagagcccatctgcaaaaacaagtttcagttttcattccagacgtttaagaatctatatgtcccaccacttgctgccctctaagctattggaacagacatcagtggccacatcagacaaagaatatggactttacaaaattagttcacaaaagttactcaacaaaccacagtagctacaaaaactcctggggagaggggagagtctgatttccagaactgccacttattaaaaatttcattttcaacaaaaaattacaaggcatacaaagaatacaagagtgtagctcatagacaggaaaaaggaactaaaacagaatatcactgaagaaacacagatattggactcaccagaaaagatttcacataagcttatttaatatcttcaaagagctagaggaatttgtgagaatgatgtctcaccaaatacagaatatcaataaagagacagaagttatattaaaaaaaagtgatagaaattctggtgttgaaagtgtaatagctgaaatgaaaagctcattagagggtctcagcagcagctatgaacacgctgaagaaataagcagagaaactggagatacatcatttcatgctatcctatctgaggagcagaaagaaaacaagtgaagaaaacggaacagagcctaagagacctgtgggaccatcacatgtaccagcttttgcatagtgagagtcctgaaaggaaagagggaacagggaagaaagaatatttgaagaaatatggtttaaaaaccctccaaattcgatgaaaaacatta

SEQ ID NO: 1245172 - DNA, 4001 bp, Homo sapiens
ggcgcgcttcttgctccacgacgacgagcgcgacttgtggtagggcccgagggacttgaagtagacgaacttgcgaccgtcctcgtccatggccagcccaaaagagtcctcctccaactcacgctggttctcgcggccgcgggtacagaagtacatgcacgtctcgaaccagaccttgttgagcagcccgaagggcgtgttggtgctgaagacgctggaggtgtacagcttgcgcaggtcggcgcgcgtgatggcttgcttctgcaccaccggcccggcgccctgctcctcgagcttgcggatgaccgcggccagcgtcaggttggcgctgcgcagctcggggtccttggtgaggtcgagcgtgcggcagtacgggggctcattgaggtagcggttgagggagctgcggatgctgatgagcgacgacttgctgtagagctggccgcttttggagcgggcctcggcatagaaggagcgcagcacgcggcacagcgcccccttgtccatggtctcgaagtccgggctctgcgccttctcgctcaggtactcccggaagatgcgcacggcgtagcgggtggccagccgggtgttctcgctcagccgggcccgctcggggcgctgcagcacgtcggggtccagctcggagccgtccccgggcggcccaccgcgggcccggggcgccagcagtcgcggcggcgcctcgggctccagcgcggcgctctggtccatattgatcatatggaccggctcgggctccagctcctccccggccgagtcctcgggctccaggggctcgtcccagtccagccccatctcctcctcttcctcctcctcctcgtcctcctccagccccccacctccgtcctcctcctcctcctcgtcccccgttatctgcacctcctggatctcgtcctcctcctcctcttcctcctcctcctcgcccgcgctgcagtagtgcggacggctgtggcggcggccgcggccccccgcgccgcgctcgccctcgccccgctccccattgttctcggcggcggcggcggcagcgctggcgctgccgcccgcgctggtgttacagtccccgctgccaggcattctcgccatattgccgtctctctgccagtcctcgggcagggcgcatgcgctatattggaccgcagcgctgagagcttttgtgtttaatgaccttcagctaccgggaggcaaagccgggctcttaaaggagccgcgctccaattgtcattcccgagcgcagctccggaggggcagcggcgcgcaggggatggaggggaggggggagggggggacaagttagaccggagagatagggtaaaggacggaggctgaccagaccttcttcctcccccacccggctcccacttctaagaaaactttgaaggaaaaaaaaaaggaaagggagggagagctgtcggtgggggcgaaacactcccaacttaccctctggcggagaattgcgcgggcccgggcgggagagagggagggccggcgagagggcgggacggtctcgtttctctaagtaatgcccgaggagcagtgccccttccactgccccctcattgccccccggagccggggggtcggggcggcggctgcgccgggcgggccgcgggtgctgccgcgggaaacccgtgtctggggccgcccggagcggagcggagcaggcaggttaatgagcagggtggaggaggcacggcgaggccccgcaccctctcggcgcccgcggccagggcgcagcgggcgaggcttgggagcgggatggggctggcggcggcggcggctcccccacctacttgctggcggcgaggcgcgggggcctggggccagccgcgcggctcccaactccctttccgactcttgcaaaggagcgaaacacgccccacgtcagccacatccctttcgacttttccaacagccacatttaagctgtcattaaagacctggggcgctccccgtaggtctggggcaagtccgcgccggtccagccagccccgggaaggagcgaggcagagaagactgggaggggccggtgggaggggagacgagggaagaggcgcttgggaccccaggggccacagggacccttccccacccgcccagggcgccgccctccctgcccctgagcaaagtgacacaactccctcgggcgaggcgctccaccaagctggagctgaagtctccctaaggcccatcgggcaggcggaaaaagcgaacttgtgtctcggccgaccctgccgcagccacaattcggcaattcggatccggagcgcactctcactcaaagtttgccaaccgccattcgttcgccctccgggctgcgctgcctcaggcgcgcgggggcgggcacctcggaaactggaaaagcagccaaagagctcgccgggtctcgctttcccataggagacactgccccacttccagccaaacgcccgcccccggcgcgcccaggctccgggcgcgtccttgcgtcgccgcctcccgctctcccggcccaggggcagcttcccagagccgccggggacctcggctgttctcttaggaggcacagcccaggccactctcggagctcgtgctgcatcctaactttcaccttctcccgcagcccgtgtgtaccctggcgcgcgggccagctgcgagtccctggggtgaggggacacgagggagtcaggtccccagcagtgcgccccggtgccaggccgtcctgctgggaggcagcctcgcctgctcctcgggtgcgtcctcgaatttacctccaagtccgaattctcggcagttaggctgtgagagttatgtcaactgcctgtttcccccttccctggccctcctgtcttgctctcaagggaagcattttacgcatcaattgaaacccatccatcaatttgcattttttttttttaagaaagaatgaaagaccaggtctcagggcagtgtgggcttctgagtgggagttgacgatgtctttttctgcagcgaacgctgctggtcctccgcgtgcctgcccggccctggacgccacccgagcttcggggaaaccgcgccaggtgtgaaacaagttagagcaagtccctgcctcgcgggccgcctccggctccttagggaaacacaagacacacagacacacacacacacacacacacacacacacacacacacaccacgctctcatccgcccggctctccgcggagaaccgtccgggaatcgtccccgaggtgcggcgcgggaggtggccggctttgttcacaatgcactgcccgccgcacccgccctggacacgtgcagaaaggcgtgctcgtttctccgaggctgcggtgagcagctaagttagttgcacactgggacccccacatacgagctggcacacactagtcacacacggctaattccagagggctggccctttgtcctgggacgctcccaggttttcgggccgcggtgcggagaactcaggtgggtgcccggcaagttacctaccaggggctgttcccccgcgaccctcgccataagcgcagggacccgggggccgcgctggctccgggctgcgctcctggcttggcaggggaccaggcccacgctgcagcctgggagcggagccgccccccaggtctccccacctctgcgggcggcggggtccacccccctcccaccagctcccctccctactgggcgagctgctttgaattgctcgcagtttgccggaggcggtgtgctgggttggacgctccgggaaacaaagcaacccaaaacagctcccagttgacgtcaacttatttccagaaaagaaaatagttttgtgctcccaggacaaaatatcccccagggcaggtctctactggcaaaagtcaggggaaggaggtggggtgtagcagaaccgaaaaaccccaagcgcaaataactttttaacggacttggaaaagcagcagttttgggtgctgcttggacagtttgcaaacaacgggcaggacccgcgcttaaattcgatatgaaa

SEQ ID NO: 1245173 - DNA, 4001 bp, Homo sapiens
tcttttaaggttaggtgtaaagtttcccaaaaagcaccaagagagttaacttctaagggtgaaacgaaatccgattcagtacattacctactttttaaaacttcccccctacccagagctgcattagcacaaaagttagtcccgaagtggtaccaaagaaacatttcatgcatagagtttggtttggttacctgggtgggggaaacaatagcaggtgaaactattgtgggagaattggtgcttctgtgcccattggcttctggaagaagaggcagggggtcgtgtttcacggaaaccaccaccaccgcatccacaggctccgaggggcggatacaaagtcttttgggggaagtggggccgcagatttcccccgacccgaacacagactcgtacagggcgcgcttgggcgcagcctcggatttcacgtcgggcccgacctggctgtctttggggaggatgtaagtgttccccagcgagggcggctgggggcggtggtggtgggagggatgggtgggggggtggtgggagtggtgccgtgccgccccgttcagagcctcggcgtagcagccctgcggggcgggcgagcccagcttggtgccaatgcccgcgatgctgttgagcgtggcgatggagacggcgccgatgcagtggttggtgtaggtcttggagagcttggccgccttggagagcatctgcatccgagtgcctagcaagttcttgccgatggctttgttctcgtaccaggtcacatcgccctcgctgcagtggtcccggggccgctggaagaacgccttgcagagagggttgcgtttcgacaggtacttgacgaagctggcgtaggggcagaactcggtgcccgtctcatacatgcggggcaagttctcctcgtcgctgctctcggcgcgcttcttgctccacgacgacgagcgcgacttgtggtagggcccgagggacttgaagtagacgaacttgcgaccgtcctcgtccatggccagcccaaaagagtcctcctccaactcacgctggttctcgcggccgcgggtacagaagtacatgcacgtctcgaaccagaccttgttgagcagcccgaagggcgtgttggtgctgaagacgctggaggtgtacagcttgcgcaggtcggcgcgcgtgatggcttgcttctgcaccaccggcccggcgccctgctcctcgagcttgcggatgaccgcggccagcgtcaggttggcgctgcgcagctcggggtccttggtgaggtcgagcgtgcggcagtacgggggctcattgaggtagcggttgagggagctgcggatgctgatgagcgacgacttgctgtagagctggccgcttttggagcgggcctcggcatagaaggagcgcagcacgcggcacagcgcccccttgtccatggtctcgaagtccgggctctgcgccttctcgctcaggtactcccggaagatgcgcacggcgtagcgggtggccagccgggtgttctcgctcagccgggcccgctcggggcgctgcagcacgtcggggtccagctcggagccgtccccgggcggcccaccgcgggcccggggcgccagcagtcgcggcggcgcctcgggctccagcgcggcgctctggtccatattgatcatatggaccggctcgggctccagctcctccccggccgagtcctcgggctccaggggctcgtcccagtccagccccatctcctcctcttcctcctcctcctcgtcctcctccagccccccacctccgtcctcctcctcctcctcgtcccccgttatctgcacctcctggatctcgtcctcctcctcctcttcctcctcctcctcgcccgcgctgcagtagtgcggacggctgtggcggcggccgcggccccccgcgccgcgctcgccctcgccccgctccccattgttctcggcggcggcggcggcagcgctggcgctgccgcccgcgctggtgttacagtccccgctgccaggcattctcgccatattgccgtctctctgccagtcctcgggcagggcgcatgcgctatattggaccgcagcgctgagagcttttgtgtttaatgaccttcagctaccgggaggcaaagccgggctcttaaaggagccgcgctccaattgtcattcccgagcgcagctccggaggggcagcggcgcgcaggggatggaggggaggggggagggggggacaagttagaccggagagatagggtaaaggacggaggctgaccagaccttcttcctcccccacccggctcccacttctaagaaaactttgaaggaaaaaaaaaaggaaagggagggagagctgtcggtgggggcgaaacactcccaacttaccctctggcggagaattgcgcgggcccgggcgggagagagggagggccggcgagagggcgggacggtctcgtttctctaagtaatgcccgaggagcagtgccccttccactgccccctcattgccccccggagccggggggtcggggcggcggctgcgccgggcgggccgcgggtgctgccgcgggaaacccgtgtctggggccgcccggagcggagcggagcaggcaggttaatgagcagggtggaggaggcacggcgaggccccgcaccctctcggcgcccgcggccagggcgcagcgggcgaggcttgggagcgggatggggctggcggcggcggcggctcccccacctacttgctggcggcgaggcgcgggggcctggggccagccgcgcggctcccaactccctttccgactcttgcaaaggagcgaaacacgccccacgtcagccacatccctttcgacttttccaacagccacatttaagctgtcattaaagacctggggcgctccccgtaggtctggggcaagtccgcgccggtccagccagccccgggaaggagcgaggcagagaagactgggaggggccggtgggaggggagacgagggaagaggcgcttgggaccccaggggccacagggacccttccccacccgcccagggcgccgccctccctgcccctgagcaaagtgacacaactccctcgggcgaggcgctccaccaagctggagctgaagtctccctaaggcccatcgggcaggcggaaaaagcgaacttgtgtctcggccgaccctgccgcagccacaattcggcaattcggatccggagcgcactctcactcaaagtttgccaaccgccattcgttcgccctccgggctgcgctgcctcaggcgcgcgggggcgggcacctcggaaactggaaaagcagccaaagagctcgccgggtctcgctttcccataggagacactgccccacttccagccaaacgcccgcccccggcgcgcccaggctccgggcgcgtccttgcgtcgccgcctcccgctctcccggcccaggggcagcttcccagagccgccggggacctcggctgttctcttaggaggcacagcccaggccactctcggagctcgtgctgcatcctaactttcaccttctcccgcagcccgtgtgtaccctggcgcgcgggccagctgcgagtccctggggtgaggggacacgagggagtcaggtccccagcagtgcgccccggtgccaggccgtcctgctgggaggcagcctcgcctgctcctcgggtgcgtcctcgaatttacctccaagtccgaattctcggcagttaggctgtgagagttatgtcaactgcctgtttcccccttccctggccctcctgtcttgctctcaagggaagcattttacgcatcaattgaaacccatccatcaatttgcattttttttttttaagaaagaatgaaagaccaggtctcagggcagtgtgggcttctgagtgggagttgacgatgtctttttctgcagcgaacgctgctggtcctccgcgtgcctgcccggccctggacgccacccgagcttcggggaaaccgcgccaggtgtgaaacaagttagagcaagtccctgcctcgcgggccgcctccg

SEQ ID NO: 1245174 - DNA, 4001 bp, Homo sapiens
tcattgaggtagcggttgagggagctgcggatgctgatgagcgacgacttgctgtagagctggccgcttttggagcgggcctcggcatagaaggagcgcagcacgcggcacagcgcccccttgtccatggtctcgaagtccgggctctgcgccttctcgctcaggtactcccggaagatgcgcacggcgtagcgggtggccagccgggtgttctcgctcagccgggcccgctcggggcgctgcagcacgtcggggtccagctcggagccgtccccgggcggcccaccgcgggcccggggcgccagcagtcgcggcggcgcctcgggctccagcgcggcgctctggtccatattgatcatatggaccggctcgggctccagctcctccccggccgagtcctcgggctccaggggctcgtcccagtccagccccatctcctcctcttcctcctcctcctcgtcctcctccagccccccacctccgtcctcctcctcctcctcgtcccccgttatctgcacctcctggatctcgtcctcctcctcctcttcctcctcctcctcgcccgcgctgcagtagtgcggacggctgtggcggcggccgcggccccccgcgccgcgctcgccctcgccccgctccccattgttctcggcggcggcggcggcagcgctggcgctgccgcccgcgctggtgttacagtccccgctgccaggcattctcgccatattgccgtctctctgccagtcctcgggcagggcgcatgcgctatattggaccgcagcgctgagagcttttgtgtttaatgaccttcagctaccgggaggcaaagccgggctcttaaaggagccgcgctccaattgtcattcccgagcgcagctccggaggggcagcggcgcgcaggggatggaggggaggggggagggggggacaagttagaccggagagatagggtaaaggacggaggctgaccagaccttcttcctcccccacccggctcccacttctaagaaaactttgaaggaaaaaaaaaaggaaagggagggagagctgtcggtgggggcgaaacactcccaacttaccctctggcggagaattgcgcgggcccgggcgggagagagggagggccggcgagagggcgggacggtctcgtttctctaagtaatgcccgaggagcagtgccccttccactgccccctcattgccccccggagccggggggtcggggcggcggctgcgccgggcgggccgcgggtgctgccgcgggaaacccgtgtctggggccgcccggagcggagcggagcaggcaggttaatgagcagggtggaggaggcacggcgaggccccgcaccctctcggcgcccgcggccagggcgcagcgggcgaggcttgggagcgggatggggctggcggcggcggcggctcccccacctacttgctggcggcgaggcgcgggggcctggggccagccgcgcggctcccaactccctttccgactcttgcaaaggagcgaaacacgccccacgtcagccacatccctttcgacttttccaacagccacatttaagctgtcattaaagacctggggcgctccccgtaggtctggggcaagtccgcgccggtccagccagccccgggaaggagcgaggcagagaagactgggaggggccggtgggaggggagacgagggaagaggcgcttgggaccccaggggccacagggacccttccccacccgcccagggcgccgccctccctgcccctgagcaaagtgacacaactccctcgggcgaggcgctccaccaagctggagctgaagtctccctaaggcccatcgggcaggcggaaaaagcgaacttgtgtctcggccgaccctgccgcagccacaattcggcaattcggatccggagcgcactctcactcaaagtttgccaaccgccattcgttcgccctccgggctgcgctgcctcaggcgcgcgggggcgggcacctcggaaactggaaaagcagccaaagagctcgccgggtctcgctttcccataggagacactgccccacttccagccaaacgcccgcccccggcgcgcccaggctccgggcgcgtccttgcgtcgccgcctcccgctctcccggcccaggggcagcttcccagagccgccggggacctcggctgttctcttaggaggcacagcccaggccactctcggagctcgtgctgcatcctaactttcaccttctcccgcagcccgtgtgtaccctggcgcgcgggccagctgcgagtccctggggtgaggggacacgagggagtcaggtccccagcagtgcgccccggtgccaggccgtcctgctgggaggcagcctcgcctgctcctcgggtgcgtcctcgaatttacctccaagtccgaattctcggcagttaggctgtgagagttatgtcaactgcctgtttcccccttccctggccctcctgtcttgctctcaagggaagcattttacgcatcaattgaaacccatccatcaatttgcattttttttttttaagaaagaatgaaagaccaggtctcagggcagtgtgggcttctgagtgggagttgacgatgtctttttctgcagcgaacgctgctggtcctccgcgtgcctgcccggccctggacgccacccgagcttcggggaaaccgcgccaggtgtgaaacaagttagagcaagtccctgcctcgcgggccgcctccggctccttagggaaacacaagacacacagacacacacacacacacacacacacacacacacacacacaccacgctctcatccgcccggctctccgcggagaaccgtccgggaatcgtccccgaggtgcggcgcgggaggtggccggctttgttcacaatgcactgcccgccgcacccgccctggacacgtgcagaaaggcgtgctcgtttctccgaggctgcggtgagcagctaagttagttgcacactgggacccccacatacgagctggcacacactagtcacacacggctaattccagagggctggccctttgtcctgggacgctcccaggttttcgggccgcggtgcggagaactcaggtgggtgcccggcaagttacctaccaggggctgttcccccgcgaccctcgccataagcgcagggacccgggggccgcgctggctccgggctgcgctcctggcttggcaggggaccaggcccacgctgcagcctgggagcggagccgccccccaggtctccccacctctgcgggcggcggggtccacccccctcccaccagctcccctccctactgggcgagctgctttgaattgctcgcagtttgccggaggcggtgtgctgggttggacgctccgggaaacaaagcaacccaaaacagctcccagttgacgtcaacttatttccagaaaagaaaatagttttgtgctcccaggacaaaatatcccccagggcaggtctctactggcaaaagtcaggggaaggaggtggggtgtagcagaaccgaaaaaccccaagcgcaaataactttttaacggacttggaaaagcagcagttttgggtgctgcttggacagtttgcaaacaacgggcaggacccgcgcttaaattcgatatgaaaaacgcaccttggaaagtatgccttggcctgattatcgggcaactgtggatctgcttcgttgcaccagctccggaaaggctaccaaaatgatctgcccgtaggatacttcattaaatactggaaaagaagacgtctttgggctactatctataggagtcacgggaagaacacccagaaaaacagatatataccctgcttcccctcgaccaaaagaaaaaaaaaagttgcttaatttttaaaacccaataacacaaaattacagtggagttcataaagtagttcaattccaagtttaataaatgatcccttaaaaacatcctgtggttccatacactcaattccaaaatgaaagaatcaaaaaagctttcttcttattatt

SEQ ID NO: 1245175 - DNA, 4001 bp, Homo sapiens
ttaaactgttatgtctcccagtaccactcaggatacacacacacacacacagacacacacacgcacacataccgcatagtcaaggatttgcttgaaagcagccagttctattatctaaaaggtaatacatttgtaccaaattactcctgcctactgcggtgcaccttttagcgaagaagccagtgccactgggatcctggacagttctggtgtgccattctccacgtacaaagccaacggccccatttgcgactttgctaacttagttggcttccgcccagccgaaccccgaagcacagtcactgaaaacgttttgataccagaaaatcatttccacgacagtgcaagtgttcgaaagcacaaaggcagactgtctacccgcgacagttcgcaagttgcggtggcggggcggctgtgcggagcgcgcgtgcaggtaagggattcctgcacccaggtctgctttcctcttcctggatgttttggggctcgacctcacttttaacgcgaattcaccattacgcgccccccaccccgttctttttccaggaggcgcggactgttttccagccaggtccctcttgggggcgggagaggaagcacacttcacattcaataaagaagggtggcgggagtgggtaggggggcggcggcagttgggggggcggaggaggaaagaggtcagaaaggagccaaactgaatccctcccgcccacctctgcgccccgagcgctggttcagacggcggaggccagaggcggccgggaaactgtccctttaagggaacctaggccgccaggaggggagggaaggatgcgggctcctgacttggcgctgaccgcagcgccgggaagaggcgagcgcagcaaagccacagccattacctgcagcgctcgcatccttcccccgtcccagcgccgcccccaccccctccccgcctcccaaggagacttctaatccggagcatgtgctgtgccctttatccggggaggaggtggggaggaagaggaataagagctttttaaaaataaatgaaacgtttgcatccaaaagggggaggagggctggagatgggagggagtgggagggggctttaaaggcgcctgggtgggcggaggcggcgaatctggaccagcccggccggcgacgaagagcgccgggcaccggccgcggcccacaaaggggagcggcgtggtccggcccgggcaaaagggggaaggaaaaaccgccccgggccccagtccgctcggccgccacaatggcgtctttcacggggcgtccgggggcgccgccgaggctgcctgcgagaagggggcggcggggcccctacccccggcaggagcgcagccccgggcgccgccgccccctgcgcgccccgcagagatgtgcgcttggctctgggcgcccccgcggcgctgggcgctctcggcggggccggtttgcgggcgcggagctttgcgccggggaagaaagggacgcgcggggctcgggggaggagggaggggctcggggagggcgggggagagccgcggcggagcggccgcggggaggctggcgcgcggagcggcgggcgggcggctctggcacgggctcccagagccacggcggctcctctccgagatccggaacccggcccagagatccggaaacccggcccccggccgcggcccctgctggccgcacccgctcctcctgcccgctctgctccgccctgctctcgccagctcccactggaggaagaaagccgagaaccgggagcggcagccccggaggaggcggcggcccctgccccgccgcgggtccaagcggattcctagtcgcccgccgcggcgggcggcgtgtgtgcgagtgtgccgcgctctcgccccatgcctggcacatgcgtaaaagcgagttgcgcccaaagtcccagccataccctccttagcaaataataacaaacccaaaccgtcagatcttacctgaaacattgaagcacaaagtctctctccaagtccccttttccttttcctctccccccttttccgatttctctcccagcgatctgctcggctcgccacaccagagagaaatgcaatagcttggctaaggtagacagaacaaaatacagagaagagttgctccagggctttgaaacccctcaaggcaaggatcaggatacaattagctcatgcctctacctctagtctaaatcaatctccaaaataaaacttaaatcaaattaaccgatcacagggcaaacaattgatctccttcaaaaataaagctctacatatacgtatagagaaatatacacataggaaatttttttccagatttttttttggtggaaaaacagtctcattccagcctctaacttgctttttaccctcctcttgcacagaaaagctgattttaatcgttgtgattagttttgatgtaacgtttccgcgggcgatttctgcaaatggatggagtgtttctttgccaaaagagggaaaagcagcagatgatgataattataaggattgttggttgtttctttttatttgtgtctagggctctctcttcactttctcaagttgacctgacattgctgttacactaaggtcgcacaacttgttgaggatcatcgccctgtctgataaaaggataggtgataatttggcaatagagcagcacatttttggttcctttggcgacataacgtcccaaatgacgtggataaaaataagcacatgcagtctgctttgccccaatcaagtctgaatcagcgcctgagggtgatacacaaactcatttcaaatgttcaaccatgcagaattgtagaaagattgaaggagtgacaccgcattttttttaatggcaaaattaaaagaaaacaaaacccacatttggtgtagccaaggacctaccattcagttttatttgatcaaccttctgaacacacctcacctcctcctcccttctctttgctattctccacctggtatcttttatagggggggttgtataattccattatttgacggaagtgctcaacagagctcgacaggctaacataaatacatttccccagattgttactctggttctgacctcccccactcctcatcagttcttcctctctaggtctttgttcagggagattgtgcctgggccagtggttatcttagttctttttagttagggtgggatatttggttataaactcaaggatcacctcccattactgttatatccttgtaggatactttttgaaatggtatgtttttgagcacttcacagttcattaattcaaagactttgctgacatttcttatggaaaagatcaggttatatggccaaggatgctaaagaaagaaagtaaccctaaatagaaccagacatgtcctgcaaatacctgcaactggcagcatttcacaggaagtattttttaaccatcatttttcctttaaggtaagcaactgctgcaatgccaacagaaaagggaaggaccgagcttttaaaaagtaaatagagtcaatcagattagtgcataatacatgaaagattaacatcataatgagaaccaggggtgttggcagattttttttaatgtaacaagtttatattacatgagaatctttgcacattctttttctctctatccccacacacaaggttgatacattctctgatctacaataaaaaattttaaatgtccacaagccctaaattcaatggaataaaaactttgttcttgcccctaaatggcactaaatgttaatacaggagagtgtgagaagaaaagagactatggaagaaatatccccaatcactgatatgatgactgaacacattaaaggtgtggcctaaagtgacttttaattaaaaacaaacaaacaaaaacaatcaagtgtcacatagagaaccatgcatcattgtcctagaattttagaactggaaagatcctttgcaggcatctagtcctttggcatcattttatagacgagggaaataggcagcttgcccagtgtcaggag

SEQ ID NO: 1245176 - DNA, 4001 bp, Homo sapiens
aaaaaaaaagtcttaaaatacaactgcaaaactattccaggcctaagcacagcatacaattcattttttaacctcagcatttctgaaggccaagagatctgctggctgttcaagctgtagcagcagccgcagtggaggaggcttagttagcagcccccattttggggtcagttgtgtcaggtttgaatcacgtctctactgcttaacagttagctgtgtgactgtgtctcacattaggtggctacgacattcgtattggtcacagaggctggtggtagtcattggatgtgtctggggaagtgcccggcagggcagcaaagggcaggtggctaggaacaggagctgtgggagctcttggtgctgtcttcaacagccagtccacctgagaacaagacctcaccccttttgattcaactacagccaactgcctctttcctgactttctgacctctgcacattattcattttgcataatattattgcccatatctgctcctaaaaatgttgcttttatcatgctgtccttaaaaaagtcttgcaaaattccctcttgctctgtcttgtttttagagtcctgcatgcaacagcctccgttccttctttgcctctccatccctctatctctcttcaaacctcagaggattctacagatgtctggagatgcccacgggactgcggcccagcctggagacttagggagctctcggtcttggtgagcaatgcatgttgccccagagtcccctggggagaaacatctccccacagaaaagctgggttctgaaccatggagattgcttgagtccaggagttcctagtgtgaacaggggtctcattgagcagtagtgaagtcagaagagctgagaatctctgcgaagtaaggacacaagaaaaagagaagacgatgcaggacacagcatctgggagcaaagaagtctggagaagccggagcctagagtgcaagtgaggcagtgggaggagtcgccagtctatctggctgaggtcagcagatgcggggctcccgaagccgggcccagggctttggttcctatcttgtaggcagtgggaggttattgaacctttttaagcaaggatgtaacatcatgtcatatccaaagaaaagatcagtttaatggttgtaaaaggatttcatggttattatagagaattggaaaaataaagaaaaaaatgagaaaataaaaatcctagggcccagagttaaacgttattgtgtaacaatacaataatgataaacattatcaataacattattgtattcttattatctctctcccccatcccatcgtagttattgtgtaatgggcgctgattatgtgcctggctccgttacaaagatttgctttgtttaatcctcacaacaccgctgtgctgtaggtcaaatgctgatccacgttttcagatgaggatatgttcaaaccctgggtcgcatagttggaagcagcagcgtaggggtctaggcccagataatcgggctccagcacctgtattccgaatccttgggccacactgctgcttggggatcacacagcatagaatcaatacacacgtgcatcagtagatggccagttttgtttaagatagagtttggcatcctaatattctgaactgggttgtcaaaagagaattttggtaatagcaggaaggagcttgtgttggtggggagtggtttacagggaggaggtaggtgggacaagcgtggtggccacggcaatggtccagagaagagaggtctaaaggaaaaattccagtggtccagaggagagagggtagatgagtaagtgtagagaatgagagtgtggctgcagtggctcatgcctgtaattcgcacttagggaggctgaagtgggaggattgcttgagcccaggagttcgagaccagtccggaaaacatagtgagacctcatccctccagaaaatttaaaaatgatctattcatgatgcctcccacctgtagtcccagctactggtgaggcaggtggtggggtagctgaggttcctgggagctgaacctgggagattcaggctgcagtgagccgtgatggtgcccctgcattccagcctgggtgacagagtgagactcttgtctctgaaaaacaaacaaacaaacaaaaaggaatgacagtgagaggggatgggggcatggaagtaggaatgaccttgatgagtctgtgtgtgagcaaatgcataggcaccatgatgcatctgcacatacacgtgtctgtgtgtgtccaggagggattgagggaaagaaaagaatcaggaaaatcatggggattctgtactgagcacctgagcacttataggagggagaaatgttcaggacaggaggaaggtgaggagtttactttgggaccttataagagtgtgtgctgtctgtcaagtgggggtgtgcactgggcaggtagacacacgcaggcagaaaaacagaatggagtcagctgcactggtttgttctaaagtcaaggaacatgaggttccctgggaagagtggtcaaaatagaaagaggaggcatctgcggaggaagcttggggacacagagaggacaaggacggcagagttggatggtatcgtgggatctagatccgagagagtagccaagatcccagaagcagggtggataggaacaggaaagggggctgaatttgtgtttctcctccccaaactcctgtttctgccagactgatttcttacttgccttttaaaatcgtttttacctgcagttcatctcactgtcccagcctggcttgctgtgtgtgtatgtaaggcctgtttataccctcacctcctccaggaagctttcccaacccactggccactgggccttgtactttgttcaagttccctgccccgctgtcatttaccacgtttcccccaagattccaaacatctgggggcagagcctttgcctcccttgtagcgccacggtgcctcagaaccaggtgctgattaattggttgcttgtaacccacagcatagagtgtaatattttacttgtatagtttggattttttaaagtattctttctctagacaccagaagctcctctgccctttttagctcagacacagctttgtgaatgcttcccatggcatattctttcctgttgggctagcattttgctactcttcacaggcagcccaagagtgaattttcaccttctgttcagtttccttttttcatttccccactggtctccattgcagtaagcctcccacccctcttatccccaagttatgacaacccccatcctagaacccctggtgcagtccgtctggcatgccatatttgcctagctgtttaactctttgtaggtattcattgatctgatggggttaggtgggcagagcctgttccatgccccttctttaggcacaaaatcagtgcctaaagtgacatttcaaccagccttctagacaactctaatggcaggtatcagatctcgagatgagcttcaccatttcaccttgggttccttcaagactcataggttccatttagagccagaaggaatcttcactcatatacacatgcatatgtgtacaatacatatgcatatgtatatttatatgatgaggaccagtaataattatactgacaatggcactgatgacaatgactaccatgttctgagcacttactacatgccgggcactatgcaaagtgctctctagatgttgctctatttaatcccctcttccctgcctgacacttttccatgccctatggaattgggcttgatcttaaatcactgcaatgctgggtgggtttttttggctttctttgtggggatgtgacagactcgacccaggaactctttgtaatcagtgcaggagctttggaggaaatccacagcagtggaagtgaatgtcctaatcctgcctcatctctatgtcttatcttctctccttagagcgagtgaccactgccctggatgcaaaatgtccacttggggaagcaatgacacttgtcccctcccagaaat

SEQ ID NO: 1245177 - DNA, 4001 bp, Homo sapiens
tgttttaaaaatgaaacaattgttataagtttgttcttaattatgtatgggcagacagtttaaccatcagctccctctcccaacaataccacagtcaactcctaacaaatctcaagaacaattacacttttcactcttcttatgacattaaaaaagaagacagatggtgacaccatgtgaactattcatgtcattctcacattacttagagtgtgaaataataatcctgcgtattaaagcgggatggtaaaaataaattcttcttggtccacctgaacagacacagcatttattatctcacctatgacctgccgcgggatggggctggaaggactggagtcaaggctcagtgaaactgtcttacaaataaggaattccaattttcattctgcgtttagctttagtttttgcaaagttatgctctataaactcaagctctgaaaggatccaaggtttaaagccacgcttttgaggcagcagttctcttgcggatgtaaaactttcagaatttagagtgtcaagttttgcctttctcttatttattttttgtaatgaatccacactctttccccattaggaacaggaggtgttggaaaaagctaatagctttacaaaggagaaattaaacagatacattttctcattcacaaacccttgtacagatttaaagcatactaagaaaaacgaccatcttattttataccagctcagcggggaggctcggatctccggtgcagagataggacaggaagaggtgtgcggccaattttgtaaccaaccctccttactcctaactcctcgcctcactgtgcctcgggtttgggagatccaaacgagaatgctcgtgagaaagccactgcaaacgggaaagtgctgggcgcaggcaaggaggcattctctctgtttaagaaaggtgccacatttgcagaacagggatcgctgaatatgcgagcttccgccaagaaataaatcacacctatccacctctccttcattcctcgcacacaagccttgtcgtttagctcatccttcccactagaaaacagcaaaggattgcattggagcagcaatcagcagatgccacgctgagctcagagacaagcagtgtagacgggacaggcgtcccaataccgctaagccaccaccgccagcccgctgggttctgagcagtttccccaggtgagtcacttcctggaatcctctggcagcggctcttcccgtcactcgcacaggccatcttccagttccgagctgcctcggcgggtcccggcggctgggaccccacttccccgctgtctgcccccgcccggggccgcgcgccgcaccctgcacaccaccgaccgctgtgtccttggcaaagtttctcagcctctctgtgcctcagttgactcatcggaaaaactgaggacaaaacatccacatcccagggatgttgcatggattcacgagcagccacagaacccctggggccccgggaaccctgcggccggcggggtcccccgtcgcacgctctccggccctaggaggagcccgaggctgcggagggcgggtccgcgaggccgggtgccggggccgggggaaaagcgccggggtggacggcggcaggtgaccttccccatttggccatgccttcctggggaccgcggcctggaaaaagggacgtaggctacgcggcctcggcggcggaaaggccgcgcgggccggtaagtcggggggcagcaacaggaggccactcaccaccacatgcgccccgggcagggcgaggggcttggggctgatgagcggagacaccatgtacagcagcagcacgaaggccacgaggaaggcggcagccagcagcagcatcgctccgcggggccaggggcccggagcggccgggcgggggccgccgggcaaggcgcgcagggctgggctgcggcgaggcgagaatcacgcgcggcgggcgggcgcctggagtgtttgggtttgcgggccggggcgggccgcggcggaggggaagaggaggagccggcgcgcgcgccacccaggcggggcggtgcttccagggggcgagtaggccgccaccgccaccgccaccgccaccactgccagaatcgcctctcgggggtcgccgggtgtctcccactcccccggcctcgggacggggcccgcagtccgcagcctctcccgtggaaaccgggcctcccgtccctgtgcgtcgcgagcgggctccggacagcgccagatgcgagcgcgccgggaagggctgcgaagactcgctcttcgggagctcgaatggcttcttaggaccccgcagggcgggtttccaggcctgccacggcctccagtgtgggcgtgacgagcgctcctccctggagttcagccctcggcttgggactgcccgctgggttgctcggaggccccggagcatcggaaagggcggctggaggctcccggagcgggctcagcctgggagcccagcgactacgctctgaaatcccgggctccattccatattttttggcgtttttagaagatggtcacggcccactttcgcttttcagaggaccggaaagccttaacagggagttttgaggaatcactaaggtaattcaatttcattgagttcagagttcatctttaccaagcaggttcaaaacaaataaataacgcaaacaactcagctttattaaggtctcattcacgtactataccatacaattcccgatttaacgtgcgtaataggccgggcgaggtagctcgcgcctgtaatccccgacctttgggaggctgaggcgggcggatctcttcaggtctggagttcgagaccagcctggccatgatggtgaaacccccgtctctactaaaaatacaaaaaatcacccgggcatggtggcgtatgcttgtaatcccagctaccctggaggctgaggcaggagaatcgcttgaacccgggaggcagagattgcggtgagatcgcgccactgcactccagcctgggtgacagatcaagactccgtctcaaaaataaataaataaataaagcttataataaattgtctttaatatagtcacagttgtagacccatcactaccataaattttagaacatttttgtcacaaccccccaaaatcctatactcattggcagtcacgacccatttcctcccaagccccgcccaagcctaagcaatccctcatgtttctgtctctataatcttgcctattcgggatatttcacataaatggaatcatataatatgtagcctttttcatcctatctttcacttactgtaatgttttcaaggttcatccatgatatgaagtactacatgttaatacttcatttatttttattgccaaataatatcccattgtatgactatacgacattttaattttccattcatcaattgaggaatatttaggttgtttccactttttgactattagaattatgctaactgtaaatattcatttaccggtttttgtgtgggcattatgtttcatttctcttgggtacatgcctagtaggggagttgctacatcttacggcaactctatgtttaactatttgaggaattgccagaagttttccaaagtgagtacaacattttgtgttcccaccagcagtgtatgtgggttccaatttctctacatcttcactaacagttgttatcatccgtctttctgattatagcttttttagttggtgtgaagtctcattgtgattttaatttgcatagaggcacatatttttgtttgcttacttgcttttcatttttgttgttgtttctagaaatactagggagcgaaggagaaaaaaaagtttttcttttcctttttttcttgacttacagcagttagccaaactgcaaaatttgaaggcataatgtccaagacttctgatatcaatgcaagtttagaggttcctgaaccaccctcaggtttgatcattcactggaaggactcacagaactcactgaaagccattatgctcatagttatggtttattatgggg

SEQ ID NO: 1245178 - DNA, 4001 bp, Homo sapiens
aggctctagggtggtctgggaaataatcaatatgacaaaggaatcaagatgcaaagacatgtaactaaatcaaatgattaataactatcattatgcttttcagcaaatattcagtaacaaatttacatttgacattgcttacagtgacattctctatggagatttaaaatgaaaatatctgaggctcgatgttaactggtcattacgtggaatagtctgaggggaaaggtgacactagcaactttgcaattcctttcatacatctgaattagatcttataggatataatcgccaccatttttcccctgtacaatttcaattcctcactatctatgagaggacgaatattttacattaaatgttgggagtcagaatacaagagataacggagtatatatgacttctacataaaatagggggtgatataactacatgagtaagtgaaagtactgggtgcgaagaccaagagcttaggttcagtccatatatctattaatacacttattcagtcccattgcaatagcttgtcccccccccaaaccattgattctatatttgaacagtaccataggatgctataagctaataaccttcaagtatctcctccatcacaaaattatgtcaatgcagaagcagtgtttcttgagaaaagacttatcccaatttcctaacttcctaattcagcccagttgtccacagtgcacatattctcttctgaaaggtaaaggaaaaaatatttaatttgcacactgcactagtatgctttcatccacagtgtatgtacatgatttcatttgcttttcaccaacctatcagagacaaatggtaattatgtctagtaagtgcaaacactaaacacgagcagcacagaatacaaacatatccctctctctacacatgacactaatcctagtaactcaacaaaggagttgataacacagttttgtaagtttcactgggagctaagaagaatgcccagtgattctgccaaaggtaacagcaacgcctcaattaatgccatcaccaatcctagcaaacacaaaaagagctgcctctgcaagcactcagtaacacagattgccgtccctctttcaagtaacccctctaaggaacgtgaagtaaattatcaggaccaaagctcaagcgagaagagtctacctactccaaggaaagaaacactcctgtcacacaaacatctcatcactgctgctgaactggtaatactaccactggactaaaaagttccactgcttctccacctcacaacgatccaagaacttcaatgactgccagtgacccgcactccacaagtaagtcaacaatacttccaggcacaatgattcccatcttacgcagtaaccagcaccaccagaccacatcccagtaaccaagctccacacctctcctaaaaccccagtattaaaatacatcatcactggagggccttttaagtccgaaaggtcctgacttgctcctagcaatgcagactaaagacaatcctaaatcaaaacaaaaaggctccctgtccagccaacaccgactcctccctcaacttcgagctagctccgcacactcaagtcagcctgggggcactctgacagggtgggcagagggacctcggagggccatctcagccctggactgagcctggactcaaggctatctttctcgagctcaccggtagtgagcgctgggaagcatctgagccgtgtccccacacctgcagacagtaccagtctctcggccacctaacacccaagcaaggggagagcccagcacctagactggggccgagcagcacgtccccatccccggggttagttcggagcttctcctccgctctcggactgccacgcgacggctcgcccctcgccgtcccgtggagggcgccggcgccccctgtcaggcgggcaaaggatacagtcccggctccagaacgccgcggcactggggcgggaggggcccgccacgtccgccatcttgaaacaaccgccactcggggcgtcgcgcctgggccgccacgcctcggcctgcaggctcggtccccattggccgcaccacgcagaggcccgcccccgcctgcgcggccggcccctgcggggcgagagggtgggggcgaaggggaagctacgtcccggaggtgcggtgtggggcaccgggcggggccgcgggaaccggcgccccacggagctgctgctgtcagaccaaccccgggcccccatcatcactgcgccgcgctttcaggcgccgagaactaccgttcccggcatgccatgaaattggcctcggcgctgaggcggggtccggccctccacccgctcccgccgcgcgcgaatcgcggtcgcgagccatggaggaggaggcatcgtccccggggctgggctgcagcaagccgcacctggagaagctgaccctgggcatcacgcgcatcctaggtgaggaaagggggcacggtgccgagagggtgtggaggagaaggaaggaggagcggagggatgaggtgcggggtgagcggtgcgacgctggccccagaacaggagtggacatcgctgctgggacttccgttgttacagaggaaagtgggggacctgggtttgtgattaggccttgaaagtgtttgccaggagtgttcggaggcagagctgggaagcctgaagtttcccccactcaccgccaaccaaggtcccacccaggaaggacgggcagagacgtgcaaagggaacacagcaagcacctgacggttgggaagttggatctccccctaggaggcattctcagccagggcattatccccgaaacccaagacctttctctgggggaagtaatgcacccgacctcccagggcgacaactacgtcgggtctgaaaggaatccaaccttgcaccactgaatgactcagagtttttcttttatcgaacatttctttgtttgcttgcttgtttgtattttgagacagagttttgctcttgttgcccaggctggagtgcaatggcgcgatctcggctcactgcaacctgcgcctcctgggttcaagcaattctcctgcctcgcccagctatttttttgtatttttagtagagacagggttccaccatgttggccaggctggtctcgaactcctgacctcaggtgatccacccgcctcgacctcccaaagtgctggaattacaggcgtgagccaccgcgcctggcctatcaaacgtttctttagtactcaccactatgttagacgtgaggttaaaaatatgaaaaagacacagttctgtgaaaaaaataaacaaatgaggtcactaggagtgtgaaaagaggtcagtaatctgttactcagagatgtcacagaggaggggactgatcttaccagggaagttaaagaacatgtcacagaggagatgatgctagattttgaaagacatataggagttagccagaaaactaaggaggagaaaggtcttttaagaaggctgaaaagcatgcttcagtgccttcccatcacaattataataaaatccaaatgtctgtaccatgacccacaagtccctgtaagatctgctctcatctctttctgactttgtttccactcttgcccacatggccttctagctgtaccttaaacacactaagcgggttcctgcttcagggcttttgcagtttgctagtccttgcacctggaattatctttctctgaatgtctcgcttcttcaggtcattcagatctctgatcaaatgtcattatttcagagaaaccttccctgaatatagttcgaataaccgccgtctttcttgctctctctttccttaccctgctttttcttttattcttatagcactttcactacttgaaattatgtatttgtttggttgatttttaaaatttgtgtctcttttaatagaagtccaagaccaagtgtgatttaggaatgagtggttttaacatatgaaaatcaattaatagctgggcatggtggcccatgtctttagttccagctactggggaggctgtg

SEQ ID NO: 1245179 - DNA, 4001 bp, Homo sapiens
aaccaaaaaaaaaaaacaacaaaaaaaaaaaacaaaaaaagacccaccaccacacataacaattttgttacactactgtctcattttatagtcttaaaggtcagcaatgagaaaatcttttcccgaaaaagaagattatcctacatattgggtaaggaaattataactactgagaaaatcccatatccaagggggaaatatatttaagattcaccttgatagaaaatgcactccctaagcttccaccacgtctacgtttggcaatttaagtctctggcactattcaaaagcatagtgattaaaaaaaaatcaattaggctgcagtttaaaaattctatatgaatacttgttaatatagaattaatatatggcctcatactaaaacatctccatacattagtaagggaatatttaagatacctcccaaaagggagacactgggaatcctacatacagtacactacatctttgacagtaagttttcaagccataagagatgcttacgaatatatggggtaaacgattactctatgctgctaaaaatcattccaaggtaaaaaggtcaattcctatctaatgcaaagagaaaagcctgcaaggtggtgggatggtgagacagactgctggtagaacctgtctgccttgctccttggatttcctgtaattttggacattacttaaattaaggcattgaaactgaattacatcaactttatctcaacagaacaaattttgtgcagcagaaaacccaattttggcggtgaaaaagtcgtcccaaagacaaagggtcttaagtacatctgacttttcggagacagcagcagtgtgtcctattctttctctcctggctcagactcaaagaactactgcaggcaattcaggtaacactatttcctggtagtgtgattcaggtaactggagaaaaaggaaaatgcttaaagcaataaactagtataaaagggaaccttctggagtcccgtaatagccagtgaactagaaactcttgatattttatagatactgacaccagtaggggagccaggagccaagtgcaacaccagccaagggttggaagcaggcagagagaacagtcattgcctgatcctcttgcttccaccgcaaaagagcgcccccaccccaatactctcgttccttaaaatgtccctatcgggacccacgcagaaataccccctctcccctacagtaactccgtacaatcccaaataccctgccggagtgtgacaggctgcgtccacttactgagctgtcccccgcccgacgctgtactcggttcccgacctccagcgcccccaacgccggctgctccagggacccctggcgcccccatccccggcggggttccactttgcctctcgaagttgcctggattggagaagtagtcgcgcagccgaggcagctcccggccactctctaacagctcggtatgcagctccagggcggtcagcaagtattgatcgcgcaacagctgagcagcgatcgcatcaattgataatcgggccggggtctccccggtgccccccagggccactgcagccgccgacgcctccccagggagccctggccgcgcactgcttcctaaggccacgggatcctgtggcgacagcgagcccgcagagccaggatctaggccacttccggcgcccagccgaagtactgcccgccgttcctctgttgcagctacctcgtcatcgtcctcatccgaatcactgagaaatggattcacgccgccaccactgccactacctccaggcgccatcgccgccatcttatcctgtcaggagtgtgggcgcctccctgactggttccgacgggccgcagcccgaatcctctaggcctcaggggacacagcgcacctccacagccccggcctgaccacgtcctgcctcccgacttagagacaaggagtacgctccaaggcaggagatccggatgcagctgcacctgatgcctcagcctctgctgcaccagcagcccggctctgcaggcgtcttcctggtctccagtctcgcgagaactggagcgtgcccctgcccctctccccgatctagccccgccccagccccgccccagcccacttcagctccgcccattcccagcgccagatagcaaagattgaaggccccgctctccgctcaaaagcaaaactccacccacgactcctccatgattggtcagagaaggaaggcgtggagcggactgacgggagactggcccgagaattatcgcgatagcagcagcggccgggcaggtattgggggcgttccggaattgaggggtggttgtagtggtggcttaggaataccctcccggctatcgcttcagtgggtagaggggaccactgcccgagagctttaatggagctgggtcctgccttcgcgctgaggagccctcgttttcgagatcaggcctgaccgggataagctccaggtaaagttcagggaccagtgcgcggagggtgtcggcgcccaaactgtggtgtcgcgcccgcggacgcgctgtttccctactgcgctgcactttttctcgctatttgctgccagtggtgacattttgtccccatggatagcaagtgcccaggcctgtagtcggaatgtgacttcctttcttttcccttctctgccacatgcttgcacactcgggaggcctagcgacagcacgacttctcagccccggaggtggtcctgcctgtgggtggggacgggggctggagagactaaacggaaaagggaacgctgaggttggcatttgcctggatctgggaacatcgtcgagttggaaaacaaattgttaggtactcaataaacgcttaggatttaatacacgatttacacaacagggacccttcagaatatctaatgctgtctcaccagtagacagataagtaaacttaagccaagagtggttgttataaaatcagctccacgccgggcgcggtggctcacgcctgtaatcccagcactttgggaggccgagccgggcggatcacgaggtcgggagttcgagaccagcctgaccaacatggtgaaaccccttctctactaaaaacacaaaaattagttgggcgtggtggcgcaagcctgcaatcccagctactcaggaggctgaggcaggagaatcgcttgaaccccggaggcgaagattgcagtgagccgaggtcgcgccactgcactccagcctgggcgacagaacgagactccgtctcaaaaaaaaaaaaaaaaaaaaaaaaaaatcaattccgctaataaggagtcaaaggaattaacatcatttctcttatgtcccaaacgattctttatccactgtctcctgcaacatttctgactcgttcatgcaggctagaatcaaggttttggaacttagaactattttaaaagttgaatgcttcagagagttttgatttttttgatgaaatgttagcatataaagtacatatcctaagtttagaagatcaacgtttatcttttatgtcattccttgattatgatctgaaaaggtaaaggaatttccagtcaatacaattagactgctatttcttatggctcctatttttttcacacacaaatgaccacttttccaggctttagatttcctttcttagtgtacaggtaagtgacatattacattcagtgtgtagtaaacattccacagtaaagtatctcccgttagctccatggaaaaattaaaatagacgattcttacataaccttaggtcaggttattggtttacatgtaaaagtatgccaacagttaagagtaggctttaatttcaatatacccaggctcaataaactaaaattttcatttgaatggggatttgggtttttaaaattttatttttgctagaagtttaaaaaaaaagtaccaagaatttaaactatttttttataggacattagttcccaatgttttaatgataaatagttttctgtgccatatattaaaagtaaaacatggggaaaaaaatccccccaaatagaatt

SEQ ID NO: 1245180 - DNA, 4001 bp, Homo sapiens
ctcgtgtccatgccgggccagatgaagggaaaggccgggaagtggggagccgggggtgccctgaaagctcagaggcgaccgacggcgaaggttccaggtcaacttgtgcccgaagctttgcttttcgcagttggcccagtttgggggagggggtaggaacaggggcccgaccagcgtgcggggtgtgcgaatcttagctctccaaaagctgggacccccttcgattatccatgctgccccgagaaactcctaggctaatagtctgagggaggagataaagccctttcttctcccgggaaagtgcagcggagcgcggtgaggacccgctcagtggaatcggcagaggcgggagctgtccttatcaattcgagctcatttccctcaacctggccctgcccgcttccccgcttcgcaaactgttggcttccccgtcaccactcagtttggctaattttccagagatggctttaaacctggcaggagaatccttccaccaccgccacccccacccggtggccccctctcccccgtctcgctcatttcaaagcgcggaagttcaggcatcaatctccccttccagcgaggggcggcaccgaggactcagggggaggaagtggggctgcgaggacgcgtttggagagggagccgggaggcctggaggccgggagggattcgtgtgcacggtttcccctcccgggcaccaggcgcagtcgctttaactccagtaactatgagaagttcaagttagaaggcaggtgttgggggaggggtgggggctgtcgaacgagcgggggggcgggggagcagtggggtgcggggtctctgcgccccacccagcatcgtcgcctgcagccgcagctcccttctgaccccctcggtagagcccccagcggccccccactcgggcacccccacttccccggccctggaactacttctgtaaaaagtctgagccgcccgcatctaggcagaggagggcagggtgggggaggcgaggcgaaatcgatacgccaggtccttaacctgtaattgcaccttccagggctgagcagaaagggaccctctgcttgcatcccgcccgcgcgccggcccgccggcccgccggcccgcccgcccgggggagagccgccgccgccgcccggctcggagggatcccggcggacctgccccttccactgcggctcactctgccctgcctggcgccggtcctggatcgccggcttcctatttataccggactgggctcctttcgactcactttaccatcccgttccaggtggaccctaccctccctcgcgctccctccgccggcagcacccccacgcccgcccccaaagctctggcttgcctgaaacatcttacagagtctctctccctttaagaggacccggtcatacctctctctagctctctccgcttcgttgtctccccccgccccatcttttcctattccccttccttcttgttcttctcccttgcctttcctcctcatctgcttatttcttgcaataggagttttttctttatgagcgtttgccatacaactacccccccgccaacccctctgaaagactccctccccggcccttccccctccaacaatccaaaagacagaacaaaatacacacaaggcagacacaaggccagaaacttacctgttctcaaccagctgcaaagtcaaggctcacttaagctccccccaaaaatcaattgtccttcctttttaaaggtttgctgtctccttgggagggggaaaacaccttctggttcccaactccaggcagtcactctttacaatttattttgtcgtacatcatttgatcaccatgaattagcaacagcaagaaaatgtaggagagggagaaaagagagaaagagagagggagagagagagggagcagagctttctgcaagagaagaagaagaaaaaatgtacgtgtgacaaattatgctaccaagaaacaacacatcattatccttgggcctggggctcagtgagtcgtaacgagagtaataggaaatccacggttggggagagaaacggtcgtgcttggccagtagagagagaccatacagggggatggatgctggagagactcgcaaaattatggctcaaggctattgtaaaaattgtcgagcgtaaatgactgcgatttcaaacatctttggaagaaagaaggggaaaaagcgagccccccctccctccctctccctctctctccctctctcttctctctctctataaagaaccgtcaagttttagtgcgcattgctaattagtcaatttctctctgccttcacaggctggcgacttcgctgctgagctgaaactgctaatttctgtgaccagcttttttcttagctgtgatctggatgaatgagtagctgtctcacagagatgacaaaaataaactctaatcccccccaaaatttccactacatctttctcatgcatagatttatgatcttcaagtgctctgtgcaatatgcaaactttttttgtgtctgtatatatgctgttgtttccagatttcactacattggtatgctgcttttcccttccccccacacctcccccccacccccagcactgtgaaatgcagaaacagtctgatctcaaagtatgctaagacactactttattctgttttggtatttggggtttgggtctgtcctgaaagacactagcccttgcctaaaaggtgagtggctgaggatacacaccggggtgggggagtagagctggtagacagaatagaggacagccctttgctttacatttgcttcccacaaggcactgttcaaggtttatgatcttatttgaaaacatattttctctatcattttgtctggttaaacaactgcctctgaacttctctgtcagctcttcaacagataagggtgcagaagtcacgttttttttttttttttttttttactgaaagattatcatattgttggatttgtatttcaattaggagtctttgatttgcaggagctagaatcaagtgctaggaaacccagccgcaatttcacaaatgtaacctttcaactttagagctcatctgatatataagggcaaccacatagtgctcacatttttgaccctgcttagcatgcaaaaggaaccccagcatgtttctggaattttagctgtaccagagattcatgtgcattttggtagaggacatgttctccagacttatctcatgatgtattgcacccttatgtttatagccctgcatttcggttgtcaatgggggttggaggtgtccaagaaagaaagaaaaaaaagaagcagaaaaaggaaggtatgcccttgagtaaaatgaacacgaagaaagctggacatgaactaaattgagctttgtttgctattaactatatgactatgattcattctaatttatatgtgctctgattagtaaacttattaaaatacgtatcagggcaccattgcaagacatctattcagaccccccatcatcctctttgatttgtgagagatggaaagacacctgcttaggaaagggaggaaaattaaaaattctgaggttcagaaatagggattccccatttacaatgataacattaacgtgcacatgggatagtcacacttaaatgaattaagaaggatcaaactgaagcatttaaccctcacaaagcccccccactttttttgtcaaggttctagattatctgagagtaagacttctttattcagatcctgttgagatgctgcattctcatatttatgtttatagtggaaatgccccaatacatgattaaatcatagaaaagaattttgctgttgttgttgtttagggcagaggagagaaagacaacagattatacaattctcctggccctattattgttttgatttttgtttaaatttcccttatttgggtgttgaacaggaagatcatgtgactctaagatagaacatttttggagttctgtgtcactagcaattaaagctatcaagtatgtggagtgtc

SEQ ID NO: 1245181 - DNA, 4001 bp, Homo sapiens
ccgtctctacaaaaaaaaaaaaattagaaaattagccaggcatggtggtgcacagctaccctcccagtcaataggctgaggcgggatcctttgagcccaggaggttaaggctgcagtgagccatgatggtaccactgcacttcagcctgggtgacagagtgagaccctatctctaaaaaataaaaataaaatgtttaaaaagtgaaagttaacacagttccttcactttcattacctctgtcttcaccagatcaccttcccaccaataccctttctttggaaactgagtgagagcacactgcagaggttaaccaagctgaacatttcttgtgaccccaatattgtacagcaaagtgctaagtgattctgcagtcaagggttacatgcaatacatcctcaatgttgcctcacatctaagagcataattaatagcagttttatgttcatcttccttcctactcaaccattacacaccaagtcagtgtagtcgaatccaatccctttggatactccaagaaaaaaacctctcctctttcaaccgtttctcctaattctgtagtaatataaggaatgcattccaagtttttaatattaccaagggccaaaaacaactctactgtacccaccacctgtttgtcaccttaacctttttaggtggaatagattagaaaaccgaagagccacactacacttatttcagccaaggactgaaactggagcctgccacaagcatcttctagaacagctccaacagaaggatccaggagatgggccaccagcaagtcatagtggagtccaaacaagtgtgaagtgagagcgagtcttcagcatgggaatggccgagtgggtcgtggtgaccagctgccttcctctgactgttaagtacagcagtctcaacagtaacaatgaccaggccttccctttatttagttccacctcggggcattggcgcattaagaatgtccctctaaaggcatatgtaagataaagcacacttcgcactttaaccagtgactaagggagatcaaaagcaggggacaatacccacccggaatttgcgacctcgcgaaaacgctctcaccaatcccgcaggtaagtgcggcgctggcccaggtgtgcccagctcgactcgcgtccacctgggaccaagcgggcccaagaaggcccggagagcaggcgagggcgactgtggccggcgcgccccccgcagttccaggcggtggcaggagcctgagagccgccgtcccaggctggccaggcgcccgcccgccctgcgcgcactccctgggctcccgctcccgaggctgggcagaactcgcagaggaagacaagggcagaaagcgggtggagggaggcagcgctcgcccgtccgggcacacgacacttgtcggctgagggggacacgcgggcagacgggggcgttagccccagaggaaacaaaagccaaatgcccaccgccgggcgctcgatggccggaggactgcctgggggccctcaggagtcccgtcccgtcccgctcccccggtcccaggctgcgctggctccagggcgcccaggtagccgcgcctggcaccccgaccctgccctcgcggctgaccgaggcgccgggctctgcggcggccgcgcccgtccaaagtaggcgacaagtgaggcagcgcctctcgcggggagcccggcgcgcgccccggcggcgaaagagaaagagaaagagcctgggccgggaccggggctatccccaaccgccaccgcccccaccggcccggccctcgccgcgggagtcgtgcaggcccctctacctgcccggggatggggccaccccgcgcggcggcggccgtgggcacccacgcgggctcgcgaccatcccacgcgggcggcggcgtccttcttacccccagcggagcggcgcctgcccgcaacgccgaccgagctacaggcggggggcgagtcggagcgcgaggttccgccagcccaggctgcggcgccgctgccccgcggtgcccggcgggaggggcgcgagggtgcacgcgcggggtgggggcgcgggagccgccccctgcccgccccgcgcgcatgctcccgccgcacctgcctcgctcagtgttccacaccccggggagccgggtggcgctgggcccgccgaggtcggggctttcccatgggagggaggtggctgcggcggaattttcagatgcgtccttctctgtattcgttccctgggaaggattcccccaaatcttggctacttcctgcctgccagcttgctccctggcagcgaagtcccagtagctcacccatgcttcatcccagctcttggggttcaccgtctgaaggctctctcctccggatccctctcggtcctgctgctcgctccgattttgcaacctcccccactcccctttcctgctcttgactttgctactcacgagtacctggataccatttccaaataaaagaatactctttccaagtggcaagcagtgtttactgaccctgttctaactgcttggaattgagcaggaaacaggagctgggtagatcctgccctcatggaacttatggccttactggctagctttggcctttctcaaagcattgtctcccagtttgggaggactgtattaaatcatttattttggcttacaaataaaggtagctgataattgaagactatatgttgtgacttttgaatgaaatgttctttcataggacgccttgtgtataaaccctagtatgcaaataataaatagtaggtactaaataagtattagtttgttgctttcagcaggaaattgaatcatttagcaggattaacaatgataccatccaaaatgatctttttggtttgtcgtgggctaccataaacagagaatgaaaacttgctttttaggtgagactgggcattgttgaaacataatttcgtgtccttactgaaaagagaaatataaacccctttgctaatgaagtttttaaactaggaacaatgatcatagaaatttgtaagtgcaaacacacgatttgtgttctgtgctctagtcagttaagaaaaatatattagccaggtatggcggctcacatctgtaatcccagcactttgggaggccgaagagggcggatcacttgaggtcaggagttcgagaccagcctggccaacatggtgaaaccctgtctctactaaaaatacgaaattagctgggtgtggtggcgggcgcctgtaatctcaactactcgggaggctgagacactagaatcgcttgaacctgggaggcagaggctccagtgagctgagatagtaccactgcactccagcctgggcaacagagcgaaactccaactcaaaaaaaaaaaaaagaagaagaaaaagaaaaacaaaaagaaaaagatattagagacaaagagaaaaagaaagaagtagaagacctcagtagcgagaggaaaacatttgaaactcagttccaaccaattttaacattgtgctaaggacttacagtgttgcattactgtgacaatgggcatgcctgcaggtaccacctttggttggatacttgttcaccagattggatgaaattagaacgggactcagcaggtgagagttccacctccctgctactcacaggaacacggataccatttttggtgaaggataaagtgcttcaattattgcagtgtatccccagtccatcccagaggtatttatttatcattggagattctaggtattagtaatagagatatcaaaatgtccccagcacagaaagagttaagtgcacttctggttccaggagcccttcagaaaagtgaatattgatgttataatatatgaaatcaaagaagaaagctggattgaaatccaaataaagtgaatttacatcagcttatcttcacttcttggggggaaacaattgtttttataacatgtttattgactatatttggtttaagtttatgaaagcagacacactgttttcaggggctgggtttacataaggaaaaggatacaccaa

SEQ ID NO: 1245182 - DNA, 4001 bp, Homo sapiens
aaaaaaaaaaaaaaaaaaatagccgggcgtggtggcacgcgcctgtagtcccagctactcgggaggctgaggcagaattgtttgaacccgggaggcggaggtcgcagtgagccgagatggtgccactccactcctgcctgcagcccggagactgcaaaaaaaaaaaatcaaaactgctcaaggaggctagttaggaagggtgagggttggtggggtgcggaaggcaaaaaggcaaacagggaatgcgatatgaaacattaaagggctcctgccctgggaggttttccgcagcatctcaaagcaggaaagccccatgaggtcccactttctccaaaaaccactcataaccgccaggccaagtgccgagccccgaggggccaggacaaccttcaggccatctcctcagtctaagactttcaatttcggggaacaataagctgaggcaagctgctctttctctaccctgtgggaaaccgggacttgttcaccttcagcagcctgatagacaggagtcccctcgcaatcctttaaggctcctctccctccccaaaggctcctttcttctggctgataactatgtaaattccctcttcccagcctggctctgcgcagcagactcgcagctattcaatgctgcgtttccagctccggtccagtgcttccatcatgaatgcttgaatgaatgagatggtcgcgtttctgcagagctcacaactcagcacaatgcccaaacacacgtttcccacgagggcactgcaaattccgcccactacttttgactcgaatttttttttaatgaagtttatattcgtgggaatacgcccattgtcatgtgctgcatacattaagatgttttcaacaaatatttgtgactgcctagccaacacgaagccacgctgcgaagacagctctaggggtggcgtgggtgactagggttgtcccccaaaagggaaaagaattctttctttctttttctttctttctctctctttcttttctctttctctctctctttctttcttctctctctctctctttccgcccgcccgcaaaaacagaaaatgaaaattcgctctgagtttctcttctcaatccttgcaacgcgcatgcaaggtgctcccttctccgctggtccctcgccccggcgcgcccacggtcaatcccgcgcagtgaatgagcgggtttggccacttcgcctattgcacaaaaagcgcgggtcgggaaggcgcatcagtgccctggacgccgcctgcgggtccccctgcccgggacggctggctaggggcgcccttctcgccgcgtctctccccactagcccgcttggctgccaggggccccgaggaatccgccctttcccggccgccgcgacccagcttgcgcagccggacaatgagggcgactcgggagagctctttctccattcatcccccgcgcccggccaacagccccgccacccccgcccgcgcagccggggcactaaaagcaacccccggcgccccgctccgggcgccccgctcccgccacccccagcactgctcgcgtagatggcgctcctgggtcgcgaagtcccgcaaaagccagaggcgaggctgggctttaaccccaaagcccgaggaggttaaagcctaagcctgcaaagagcgggcagcgtccggcaggagcggcgtccccatccagccctccccggcaagcgcgggagacccacgtggccgagacacccactccgaggtggatcaggatgcgcgcccggactccagcagccccaacgcgacgggctttgtccgcggccgcccccgcccgcccgcctgcgggggacagggaccctaggacccgggccgggctcacctctctgccggcactgcgcggcgacacacagcagcaagaccaggagcacgcccccgcgcatctcgcctccgccgccactcggtgggtctggggagaaagccgcgcgcccgcctggaacgctccacgggacgcgagtccgcgctgccctggccccgccgctcctggagtcctgccgcccctccctccagccgccctcggacacacccctcggctgcgccccgccccgccccgtcccgccccggcttggccccgccacccagacccctcccccgggggcgcccagcttggcctctgggtcccggcgcacgcggaccccaagtcggggaggccgggctgaccgcggccgcctccccggctccgggtaggaggtgggcagagaaggtgggctgaggggaggagaaactgggctgcgggggtccgggagggtggattccgagaaactatgtgcccagctgaccctgcccgccccgccgcggccctgcagtccccgggccaggacccacgcgcccctgccaggagctgggcgagaggcgacccctcgggaagccacccaggctcggccgacccgccgccctttccgccgtgggcagaggacttgaggattttttctgaaaatgagttgcaacttgttcccgactttgtttgcctaaagaaggcaaggtcacttggacttaattattataattagatacccttactgctggagagagaggacgcgctcctgacacgcaacttcaactgctgttattataattattattattttaaaactatgtctggtccccgataaagaatttttaatttcctctgattttttttttctatcaaaagtattggatgggtgcagtggctcacgcctgtaattccagcactttgggaggccgaggcgggtggatcacttgaggtcaggagttcgaaaccagcctggccatcatggtgaaacctcgtctctactaaaaacatacaaaaattagctgggtgtggtggcacgcgcttgcagtcccagctacttgggaggctgaggcaggagaattgcttgaacccgggagtgggaggttgcagtgagctgagatcacaccagctgcactccagcctgggcgacagagcgagactctgtctcaaaaaagaaaaaaaaggtattcataacactttgtagatttcacattttctcaatataaatatacagggacaatatctcattatcatcccaccatcttattttgcagggtttttttttcttgataggaagataatttcctctcacttgtgtgaatctatttgacaactctatcaattcctgtttttctgaggacacttccttacacatctagtgagtagaacttagttatagtacttagccatcgattaatttttaaaaatcatggaacaaaatgatagtttggccgttttaaaaggatgcaatatagttcagtgaatactccatacagtactaaatttaaaatgcagacgttcgtaactattaaaatgttactaagtaattattaaataagtaaacttagtatttaataaatgatcaaatattatagtattaggcacatagctattaaaatgcagaattataagcatttatgcactgaaataactgcacacacagacctagcattcatatagattatcttttgggatcttcacaactctatgagatgcttgccaggagataaggaagtgagttctcagtgtcagcaaatgtctggtctagagctagaccccatgtctggtttctagtccatagtcctttacaacaccacgctgaaatcacagaggatgttgatcaaaagcaaacttggaggtggtggctaacgcctgtaatcccagcactttgggaggccgaggcgggtggatcacctgaggtcaggagatcgagaccatcctggctaacgcggtgaaaccccgtctccactaaaaatacaaaaaattagccggggggcggtggcaggcgcctgtagtcccagctactcgggaggctgagacaggagaatggtgtgaacccgggaggcggagcttgcagtgagccaggatagcgccactgcacccccgcctgggcgacagagcaagactccgtctcaaaaaaaaaaaaaaaaaaaaccacactggaggaatcacaaggggtgtccccatattctgggtctccccat

SEQ ID NO: 1245183 - DNA, 4001 bp, Homo sapiens
atggtggcacatgcctatagtcccagctactcgggaggttgaggtgggaggatcgcttgaacctgggaggtggaggttgcagtgagccacgactgcgccaccacactccagcctggacaacaagagtgaaaccctgtctaataataaataaacaaaatcagatattgtccctaatttatttctctgatctcctatataccctatcttgaaagcatcaggaaaactatttcaagataaaggatagtcttttatcaaatcttctttaaatagcacatatgtctgtaaaacttggaaactatactcaaaggaaatcttgaagtagacagtccattcttattcactcatggccataaaggtctctacctggtccagtggaagtgagaaagaagccacctgacaggagagagaggcagaagcctcatgtgctccgggagtggaatctcccaggtgttgctagaaccccttccaaaattaccaatgaatatagatcatgcacaataagaccacagtttccaatataatgttcctttaagctattaggaaccatgtttagggcaaagagtatattgcaaataaatagattatgttgttatatgaacaggcttgcctaaaggagaatcaaagtatgaaaggaatgttattttgctgaaagcacaattgagatttacatgtgaacgaaatgcagccaatgatggtgtcattctatctattatacaatctgtcctaataagtggcaagtaacttataattatcagtgtatatcacattacctgcttacaaaataatcacatttggtaaagagcaagttattcaaataagcagatagatctggttagtttatgacaacatgcctgagaaaaaagccttaattaaacatgctttgggggagtatagtctgtcctgattaaaactaaatcacccatcttaatttgcttttgattacaagcagaaaatatactctgcaagagttacatatcatgtgactctgaggatttgtcagttactaaaatagaatcattttttcacctcttataaagcaagcaaaaccacattctacaaaaaaatcagttcaagtactcagattatattgaacactcacttttaaatgaaaacgaatgtgttctaatgcactatttcaatacaggggttttataactagttaacatgatgatgttttatgttaagttttccagtaaacttttgtaatacatattatatacaaatgataatattatgtccctaatccagtttccagggctgtatctgtagccataggatctatttctctgtaagaatacatgcagcatccaggaagtttaaagagagcagaatttcttaatgtttcatgcctggcaaatggaagcatgtcttttaggtattatgcaaactttgatcacttttctcaagcattggatttcactctttcccattttctcccccccgtgggtaaattttcttccaagtagcatttggaaagctataggcattggactcttttgttctgaggcttgggatggtctctaaagggcataaagtttcatcgtatattaacatcccgcaagcattcaagctcttaactgtctcggcatttccaggtgggctgatgttaatggggtttgcggttaatagctcgggagagcaatctgtcaggcactgtaataaacactgccagtcaaggtgactgggaggccatcagcccctcctcagtccacccatttactcattaatcaccgtaactgtaacttaaaatgtcacaaagctggaaactcttccctatcacaaaccaaaacttaaaaggacgttacctggctgggtctaaactccacataactcgcttgcagttgactttgaccgggaggctgaagaaatggcaccctttgctgctgtgaactgtagcccagacactgccccagggctgccccaaagatccacagccatcccatgctgcaggctgaccgcctcactgctggaggcatcccggttcctggacgtccgctggctgcgcaggaacctctgcctcttcctcttatacctgcccttcctgctcagtgcccgggcctgcctgactcaggtgaggaaggctgtctgcggcaggggccccacctttaaacttcacacatgagtcagcctgtgccagagcgcacataacagtcccgcaggtaagcgcaccgctctgtaattcctgtgaggtggggcgggcatcaccttccacccacctcaccctgcagacgccctaaatcacaggctgagtcacgggcagggaacacgccctgggtaggagggtggaaatccagagtccctctctttccctcgggctatcaattttaatcaggctagaaaagagatggaggaaggggaagaatgtaggcaacctgtgggctaaatattacaactttggagtccccagaagaccacagcaggtcagatttgtttttgcaggtttaaaaagtgggaactcgtatgcgcagatcaccttggggttttcggctaccagggggccaggaaagaaagtgaaaggttttgctaagcctacgtacttatggatgtatggaatacacagaatgagtgtttgctacttttattaatcatgctaacgttgtgcttttgccctgatctttaagaaaagacatacttatagccagagaaattaaacagtttcattttatggcacattttaatcatctgaagacagctctggttgactggacctcaaacaacgagagtcctgctgcaagctagaacataatgtcctctaagaaatccaggatattctctggaattcaactctactggggagttgagagtgggtagagggaggctccggattagagaaaggtataaggtcagttattgggaaagcaggggctcaaatactaagatgctggctggtgagctccttcatttaaaaaatatgttattttaaaaactgataaataataatgataaatacttatggagtccatagtgatgttgtgacacatacaacgtttagtgatcagataaggtaataacatatccatcatctcaaacattgatcatttctttgtgttgggaatagtcaatatcctccttctagctatttgaaactatagtacattattttcctaccctggatttctctaaccctcagcatctattgaatctctgtggctttcctatgaattctgagacactgatgatgtctttttcacacttaattcctgaagggagtctaagtaagatataagataagccctgcagaaacttgaacagagaaacaatagacagagggccccaaaccatcccacagtgctggacagcagccaaaaacggccacaggagctccctagggaaatgttgcggatgggaaaacttcctacctgacaagagtcaccagcgtaggcaggggggcaggcacagatttccacagcaagtgctatgcgcccacttcctgtgtcagaggcttcctctagccccacctcgctcagggtgagcctttgagtctctgtgaagtagaggccttggatgcgcacatctgccagtctagacagcactgtcatcagctcctccctagacactggggcacggctgctggcatgtctgaagtttccctacacatggaaacagaaagtcagggtcttccttaggcaggctcacttccaggggttccttagaggcagacaccccgaatgaatcaaaaacaagacacttaaaatgcatagggagaaatgaaataagacggggaaatacctgcctcctggagtatttacatttagaagtcaggtgtcctgggttattcccatgaaggaaggaaaaaaaatgaaggcagggaataaggggcaataaaatgaaataaaattcccagtgtccaacttatcttttaaatgtgcttttgtttgtgcaaacataaggtgagtgagaaagagggaaggaaggcatatggaaactgactgagtcatgcagctcaggtcattcattaaacgtacacatcggtgacagaaaatacaatcttttcttgcaca

SEQ ID NO: 1245184 - DNA, 4001 bp, Homo sapiens
gttaaaagtattttcatcattgttattttatatttttagtttcttttcttgcatgttttataatatagataatatataaatatggtaaaaatattttcatcattgttattttgtcttttagatttctgtttttgcatgttttaaaatatgcacaacacatatcaatataatacatgcatgtagtttataagtaaataagcacatatggcactagatgttcaacaacttgtcatttatggaagtgcatggtcaaaagagtttctaaaacactaatctagacacccaatgataaccttgctcttttagaacccaagctccaaaatcgctccctcttcccacttcctgttcctcaacaatactttgcagaagaaggaggcaatttgggcttagtgtccaggatttgaagtcaggactggattcaaattctcctgcccctttgggaggtcaagacagaaggacagcttgaggctaagagtttgagaccagcttgggcaaaatagccagactctgtctctacagaaaaataaataaataaataaataaataaataaataaataaataaataaataattgccaggcctgaggttgcagtgagccgagatcgcaccattgcatttcagccccggcgacagtgcgagactctgtctcaaaaaaaaaaaaaaaaaattgccaggcacgggggggcacgcctgtagtcccagctacgcccaaggctgaggcgggaggatcccttgagcccaggagttcgaggctgccgtgagccgtgatcgcaccactgcactcttgcctggctgagacctgtgagtaagggccaggcactgcaagatgctgcttaacatgcaccgcaatgtcgtttgccccgggtgttcgcggtgaggctcggatctctgagagcctttctatctctgtccgcctaaggtctcattcgcccccaatgactggatggtggcacttcaggcagtgcagtgaagtgaatcttttcagtaacattagagtgataccgctgttataacctaaaaattctctcttaaaatacaccacagaaggtaattgccaccgacttctccgaataaggcccgggaggtggggcaggaggcgcccctgaaccctcgaggactcaagcctggcgggacgctccgtgggtgacggaggcgggaagggccgaggcgcctgcatctcttagagcgcagcctcacactttcccctccaccagcccgaacctgaccacagcctcatgtcacctcgcgtgctccccctcctcgcctcgggccggtggtgccggtgcggtgcttccacgagatcgctcctgggtcgtgggccctcgcgcgcggggatgggggctgcccttcccagtcgcccggagccactagcgcgcgtgaggaaagggcccgatcccttctccgggtgtctggccggcgcgggaaggaaaaggcgcgcccaccccggctctctccgaggccctcacctggatggtgtggccgctgcctggggcggtggggcccccgaccaacttgcagtagagctcgggctggggcctcccctcgccgggtcccctctccccgcaggtggcggtggcccaaatcctcgccgcctcggccaggttgaagtaagtcgggtgaaggctgagcccggccgcggccccgggatcccgagcggtcgccccgcaggctggcagcacccgcagtaccagcaggagcagcggcgtcggcggcagtactggccccagtgcccgaccccgaggccgcgcggccgccgccatccagccgcgcggggtcctcccgcctgagccgtccgcagaggggctcgggggcaccgccgctctccgcctgcgcctcccggacctgcagcgccaggactagcgcagccggggatatgggcggcgccggggccgctccccttgctccacgcgctggaagcccgcggcgtgggggtggcctctcagctctggaacctgccgcggctggagcgggcaccagccggatcaggaactgacagcgctcagccgcgcgccagcagacggcgtctctcccgcgcgaggcgcgctgcaaacttcgcgggcggggaatgggagaggcgttcccgggctcccacccaggcggcgggaacgggagcctgggatcttcgaaccctccaggcgccaggacagaaattaattagatcgttctcctctctggatactcaccgctcaggtcaaagccagaaaagccacctgtgacctaagagtaaaggaggcttgtaaacgaatttggttgagagcagaggaaactgccactacctacagaactcacatcaaagacatttcgatttcccagccaagtgttgagtcgtcaactcctcaacactgtgcacctaggatccctgtggcactgcagccacaggctgagccagggaactgggagtggtggaacgtacatatttaaaagacagccaataatgcaagttgtaatttgccaacctggaaaggaaccttagaggaaatcctttagatgcctaatctgctcaattttacaaataagctaacagagattgagtgaggtacgccacctgccatgatggcctcagaacagagaagaccccctccccccacgaccccggactgatgcttggtcttatatgcagaacaccctactaaaacagaacccacataggccctcgaagaaattagaggaatgcaatatttgtacaataaaaattgcaaaacctctttgaaagaaatgttaaaagacctaaatgagtggaaaagcctcccatgttcatggattaggagacaatattgtgaagatggcaatatttcctaaagcaacctacaattcaacacaatggattttgatagggatcaaaatcccgacttttttttttttcagaaattgacaagctgatcctaaaattcatgtggaaatgcaagagacctagaaaatccaaaacgattctgagaaagaatgaagtcagtggactcacgcttcctagttttaaaacttaatacaaaactacagtaatcaagacagtgtagtaccgacataacgataaacatagatcaatggaatagaattgagagctcagaaataaaccgttacatttatggtcactggattttcaacagggtgccaagactattcaatgggaaaagaataatatttttaataaacgctgctgggaaaactggacatcccaaaataatctagtaggatccccacctcatactatatgcaaaaattaactcaaaatggatttaagatctctaaattttacatttagagagctaaactataaagctaaaactataaaattctaagggaaaaacacaggagaaaatcttcatgactttggattagcaatgctgtcttagctatgatatcaaaagcgcaagcaacaaaagaaaaatataaattgggccgggcacggtggctcatgcctgtaatcctagtactttgggaggccgaggtgggtggatcacctgaggtcaggagttcaagactagcctggggaaaatggtgaaaccctgtatctactaaaaatacaaaacttagccaggcatggtggcatgtgcctgtaatcccagctactccagaggccaaggcaggagaatcacttgaacccgggaagcggaggttgcagtgagccaagatcatggcactacactccaacctgggcaacagagcaaaaatctgtctcaaaacacacacacacacacacacaaagataaattgaaacttaccaaattttaaaacttttgtgcttccaaggcaccctcaagaaagcgaaagatggccaggcacagtggctcatgcctgtaatcccagcactttgggaggccaagatgggttgatcgcctgaggttaggagttcaagaccagcctggccaacatgatgaaattttctactaaaaatacaaaaattagctgggcatggtggtgcacacctgaaatcccagctactagggaggccgaggcaggagaatcacttgaacccaggaggcagaagttgcagtgagctgagattg

SEQ ID NO: 1245185 - DNA, 4001 bp, Homo sapiens
aagccataattccccctataggattcatttaaaatccaccctcacctccacctccacattattaatttaggaaagtgcatcagaaaaaaaacacagctgcacatggaatggaaccttcatttccacaggggagagtggtggcttctgaggctctcatcccacagccagtctgtctgtctctcactttctttggctctctatctctcagagtcacagttctccttcctaatagctcctgtcactacatggatgacctaagaaagtgttcaatgaaccagccacatcctgagaaataccttttctttaaaatgcagttttcagctcatgagggtgaagaaaaaggaattattaacaagtagcagaatttccaggggaggtctcagccttatatacagacatttgaaaaaaacaaaactccaaagcaacaaactgtgtactcatgcataacacctccaacaggaacaaactaattccaggcttgaaagaagatgaaaaagcctgacatgcatcttcctaaagggagtcccacccggaaatgttctgagttgacagacccctcttaggtagaaagaaacttcttgagaaagagcttctcctcttctcagctctgtcctcagaccaaactccaagaagaaccacagcaaacccgaaagagcatgcatcatccatagcagttcttgggaaatgtacctttttttaagaacaggtctttgaactgagcctccttcagtgtgctgttgttcaggtggtcactggacataatcaggtcctctgcaagtgggagtccaactgtgacgcagcccccccacgttcaaagcatcccttcagcttccggcaatctcctctccaggcagctcagagctgcagttatagctggcatggggtgtgggagagtgtgtgagcgtggagggggggggggtgtgtttctgtctgcctcgttcactctctctctactgtatcagcagggcccaccccaggtgctagactcaaatgctgtggctccgaccgcagactgtggctaccaattatcaactgccatcaacagaaaccaggagctctgcggcaggaagccggccgtgtcaccgagcagagaataagtccggggtctccgatcctgagaccagctgtacacccagggcactactgtttacagcaacgtctatcagtgagcagtctgcacttctcaggtttggcctcacacctggacgtgtcacacacacaggcaagcagaacgcagctagacggctcatcttgtcacactgcgttcagtaatcttttcaacaggcaaatatcaaaccagtccagacagaaaggaggaaatctgcaagtctcacacaatactccttcccttgatctctgctggaagctttcagtgtggaaggaccggagagggcgcttaccaaggcaggacacgcgacaggcgggacgctcacgttaggctcgcgtgcttctcccctgcagatccgctcccagagcgtgctcgcccggctgggagcacccacagcgtccctcaggctgcgagccaggctgcgggctgtcctcttctggtgctccctctccacatcctctaactgatgggagcagctcccagcggctcttgccaccgagctctgtactggcaaggcgtgaggtcctaaccgcagcaggaaacactgcgcgctcctttccccccggctcgctcttccctcttggctctcccattcattccctctccctctgcctcacatcattattccccatgtatggtagcacaaaaacaccacagagactccttcaaagtcaggatgctcaatgttcctaggcagttttagtttataaggatcagaaattagagaacagaatcccaggcaattcaaacatgaaagcagagacatgtctcaggagggcgctttctcctggttcattttgttcaagcacagtctcttttccccgaggtctaaacagtttgtttcatctgagtgtaaaacatctcccgtgcattcggatgcccccaggctgtgtgaagaaaattcagggcaggctgcgagtctgtcgcagttttcagagaaaatcacggggtggccgtggtggaaagggcagcctgccatggtaacgctgcaaataacccccaccacaagcactgccgggagcccagaatagcctttgtttttccttatttagggtaaataggaatgacatgtgggccataacaatagttttggctgtaggaggagttgtcaaagcaaaactaaactctgttggttactaccagcgttagaagccaggacagtgacgttagcggccagccctgctgtcagcccagcacgtcacctggggcatgacagcagggactgggccctgatgtcaccgcagggtcctccaggtggctagaagacatcactttctcatgttctcatttttgggggcaggggcagaaaagcaacagaagaaccacccagaagagtttccagaagcttcacgtggataaaaggaaaccagagaatttcagcaaggaaagtgaccatttattaatatacagccgcgagggaaatccggatggtatgattcttcctgagcaatttccgaattaaaaatggaactcccctccctgtgccagactttccctgacttctcagagtcaccctgctgggtgaatgaagagggagtcaccctcagaaagaggcagcttcagaaagaattagaagctgcagccacttcaagccgcccctccctggctaccagcgccccttgtccctggagccccgaggctccttgccacctgggccagcacttcctggtcaggctcagtcacatgataggcttgccctcaagccagggccttagtgaggagcgctgtaggccactgtacctgtctgtttcttaaaattagggctttgtggggcaggcacggtggctcaagcctgtaatcctagcactttcggaggccgaggtgggcggatcacctgaggtcaggagttcaagaccagcctggtcaacatggcgaaacccgtctctactaaaaatacaaaaattagccaggtgtggtggcacacgcctgtgatcccagctactcaggaggctgaggcaggagaattgcttgcaactgggaggtagaagttgccatgagccaagatagggccacttcactccagcctgggcgacagagtgagactccgtctcaaaaaaaaaaaaaaaaaaaaaaaaaaaaaaaaaaaaaaaattagggctttggtgaacttcatggaactggaaaagttcttctctcctttgctaatgaacatatttgcattttgaaatggttataaatagcccgctctgggatttaacatggtgtaaaatgaatatttcatatataaaaaaagaaaatcaacatttttttctttcatttaacggccatcagctattccccagtgtctcaacacacttactgtgtttggctagcttccctgtcactgggcatcttggccatgggagccaatctttttcttttcttttttctttttttggatgcagtcttgctgtgtcgcccaggctagagtgcagtggcgaaatttctgattactgcaacctctgtctccccggttcaagtgattctcccacctcagcttcccgagtagctgggattacaggcgtgcgccaacatgccgggctaatttttgtaatttttgtatttttagtagagatggggtttcaccatgttggccaggctgtcctggaactcctgacttcaagcgacccaccagcttcggcttctcagagttctgggattacaggtgtgagccaccacgcccggccatggagccgatcttaattaagctccttgcccactcagtttaatgttctcacagttcaacctgtttaaaaaccactttcaaaacttttgactttatgaatacaagtttactttgaaaacattgcccacacctaacacacacacacacacacacacacacacgcacacacacacgcataatgagcgctcctgtgggtgtctggggacatggtgtagagtctgtcttggg

SEQ ID NO: 1245186 - DNA, 4001 bp, Homo sapiens
ccgtgatgactggacggactagggaatccctcgaatgcagactccacgagcccgtccagctggagtggcatctcctcactttatgaaagcccaagccttcatccactacaattacttctcaccacgcattttagaatctagagtttcatgatctcttcagaaagaaatttacctaaatatgttctgatcaaagatgactgacaggattttctaaaaaatcagcagaggagtaagagcaattataaaccttttaaaagtctatccctctgccatgctataaatggaaaaaaatacatacataagccataattccccctataggattcatttaaaatccaccctcacctccacctccacattattaatttaggaaagtgcatcagaaaaaaaacacagctgcacatggaatggaaccttcatttccacaggggagagtggtggcttctgaggctctcatcccacagccagtctgtctgtctctcactttctttggctctctatctctcagagtcacagttctccttcctaatagctcctgtcactacatggatgacctaagaaagtgttcaatgaaccagccacatcctgagaaataccttttctttaaaatgcagttttcagctcatgagggtgaagaaaaaggaattattaacaagtagcagaatttccaggggaggtctcagccttatatacagacatttgaaaaaaacaaaactccaaagcaacaaactgtgtactcatgcataacacctccaacaggaacaaactaattccaggcttgaaagaagatgaaaaagcctgacatgcatcttcctaaagggagtcccacccggaaatgttctgagttgacagacccctcttaggtagaaagaaacttcttgagaaagagcttctcctcttctcagctctgtcctcagaccaaactccaagaagaaccacagcaaacccgaaagagcatgcatcatccatagcagttcttgggaaatgtacctttttttaagaacaggtctttgaactgagcctccttcagtgtgctgttgttcaggtggtcactggacataatcaggtcctctgcaagtgggagtccaactgtgacgcagcccccccacgttcaaagcatcccttcagcttccggcaatctcctctccaggcagctcagagctgcagttatagctggcatggggtgtgggagagtgtgtgagcgtggagggggggggggtgtgtttctgtctgcctcgttcactctctctctactgtatcagcagggcccaccccaggtgctagactcaaatgctgtggctccgaccgcagactgtggctaccaattatcaactgccatcaacagaaaccaggagctctgcggcaggaagccggccgtgtcaccgagcagagaataagtccggggtctccgatcctgagaccagctgtacacccagggcactactgtttacagcaacgtctatcagtgagcagtctgcacttctcaggtttggcctcacacctggacgtgtcacacacacaggcaagcagaacgcagctagacggctcatcttgtcacactgcgttcagtaatcttttcaacaggcaaatatcaaaccagtccagacagaaaggaggaaatctgcaagtctcacacaatactccttcccttgatctctgctggaagctttcagtgtggaaggaccggagagggcgcttaccaaggcaggacacgcgacaggcgggacgctcacgttaggctcgcgtgcttctcccctgcagatccgctcccagagcgtgctcgcccggctgggagcacccacagcgtccctcaggctgcgagccaggctgcgggctgtcctcttctggtgctccctctccacatcctctaactgatgggagcagctcccagcggctcttgccaccgagctctgtactggcaaggcgtgaggtcctaaccgcagcaggaaacactgcgcgctcctttccccccggctcgctcttccctcttggctctcccattcattccctctccctctgcctcacatcattattccccatgtatggtagcacaaaaacaccacagagactccttcaaagtcaggatgctcaatgttcctaggcagttttagtttataaggatcagaaattagagaacagaatcccaggcaattcaaacatgaaagcagagacatgtctcaggagggcgctttctcctggttcattttgttcaagcacagtctcttttccccgaggtctaaacagtttgtttcatctgagtgtaaaacatctcccgtgcattcggatgcccccaggctgtgtgaagaaaattcagggcaggctgcgagtctgtcgcagttttcagagaaaatcacggggtggccgtggtggaaagggcagcctgccatggtaacgctgcaaataacccccaccacaagcactgccgggagcccagaatagcctttgtttttccttatttagggtaaataggaatgacatgtgggccataacaatagttttggctgtaggaggagttgtcaaagcaaaactaaactctgttggttactaccagcgttagaagccaggacagtgacgttagcggccagccctgctgtcagcccagcacgtcacctggggcatgacagcagggactgggccctgatgtcaccgcagggtcctccaggtggctagaagacatcactttctcatgttctcatttttgggggcaggggcagaaaagcaacagaagaaccacccagaagagtttccagaagcttcacgtggataaaaggaaaccagagaatttcagcaaggaaagtgaccatttattaatatacagccgcgagggaaatccggatggtatgattcttcctgagcaatttccgaattaaaaatggaactcccctccctgtgccagactttccctgacttctcagagtcaccctgctgggtgaatgaagagggagtcaccctcagaaagaggcagcttcagaaagaattagaagctgcagccacttcaagccgcccctccctggctaccagcgccccttgtccctggagccccgaggctccttgccacctgggccagcacttcctggtcaggctcagtcacatgataggcttgccctcaagccagggccttagtgaggagcgctgtaggccactgtacctgtctgtttcttaaaattagggctttgtggggcaggcacggtggctcaagcctgtaatcctagcactttcggaggccgaggtgggcggatcacctgaggtcaggagttcaagaccagcctggtcaacatggcgaaacccgtctctactaaaaatacaaaaattagccaggtgtggtggcacacgcctgtgatcccagctactcaggaggctgaggcaggagaattgcttgcaactgggaggtagaagttgccatgagccaagatagggccacttcactccagcctgggcgacagagtgagactccgtctcaaaaaaaaaaaaaaaaaaaaaaaaaaaaaaaaaaaaaaaattagggctttggtgaacttcatggaactggaaaagttcttctctcctttgctaatgaacatatttgcattttgaaatggttataaatagcccgctctgggatttaacatggtgtaaaatgaatatttcatatataaaaaaagaaaatcaacatttttttctttcatttaacggccatcagctattccccagtgtctcaacacacttactgtgtttggctagcttccctgtcactgggcatcttggccatgggagccaatctttttcttttcttttttctttttttggatgcagtcttgctgtgtcgcccaggctagagtgcagtggcgaaatttctgattactgcaacctctgtctccccggttcaagtgattctcccacctcagcttcccgagtagctgggattacaggcgtgcgccaacatgccgggctaatttttgtaatttttgtatttttagtagagatggggtttcaccatgttggccaggctgtcctggaactcc

SEQ ID NO: 1245187 - DNA, 4001 bp, Homo sapiens
cacattattacacttggagatgtgggaatgaatcatgctatgatatttataaaccatgcccacttgccaaggcacattagtagaagcttacgggatcatgtaaagataagtgattctcaaattgtttttgataaggagctttagactagcaggaataatccctggaagattctaggggaagtcccctcccgcttttgaccaaagttctaggcaatgccttcctccaaaagtgtcagcccacgtggtgaggcccctccccttccaccccacgtggcagggacacgcccccttcatccccacccaccccccccgccccccgcagccatcacctcctggggccccttacctccgaggcgcccagccgcggtgcggcgctgtctgaaggccacaggcacccttcctggcggaggggaaggggaggagagtggggggaacaagaaacagaggaaaatcattagccccgccgcacctaaaaacatgaagcacaacttctggaaacggggatctgcataaaacgtggagcgaggccgggcgccatggctcaagcctgtaatcccagcactttgggaggcagaggcggatggatcacgaggtcaggagttcgagaccagcctggccaacatggtgaaaccccgtctctactaaaaatacaaacattagttgggcgtggtggcgggtgcctgtaatcccagctactcgggagggtgaggcaggagaatcgcttaaacctgggacgcggaggttgcagtgagccgagatcttgccactgcactccagcctgggcgacagagtgagactccgtatcaaaaaaacagaagaaaaaaaaaaaacaaaaaatagataaacaaacaaacaaacaaacaaaaaacgtggagcgagaaagagcccgtcccttttcagacctcttgtctacatggagggctgtgaacaaaaggaaacatggaaaagttgaactcctggccagattagatttgaagtggaatatggctcactctctacacctgtgtgcttgaaatacattcaagatgactgtccaaccgcattcagtggccgcccgatgagggcaggctgggttgaggaagccctggcagaggtggcccggggcccgcccgtgccctgcccggcctccagcagaggcgcaagtccgcgctcgcaggtggacggccctttccgagcctgggctcaggatcctccagcgagtgtcttctccagtccacctattcacagggcagatgcaacttcacatctggtgagttagcatcctttttcaaaaacgtttggccagattgacaaggtgacaggccagccacaggcctcagtaaaggttctttccaaggccccacgcgtgctgggaaaaaaagtacgcgtggtacccttttcagcccagagtgtggctgtcagcagggtccgcggggctgtcggccgtcacgggagagcgcgaactcagcgtgtaggggcccgcgtttggggaattctcggaaacgggcgggctgggccatcactgagcctccgacggccccggcgccagcagcgagggacggcgcggaagaaacaccgagccccgcgtttgtccaacacggccctttcctaagatactcggggacatcctggaatcagtggcaaacgtatacggcggtccagctgctcggagacgaagggtgggctcagggaccgcctgtgacgggagggaagggcccggcctggcaggcacagacgagggcgggggtccggcgccagcggggcggaagcgggaagggggcggaggccctcccaccgcccagggcccaggctgggcccgcaggggcgctcctcgctccgggagcccagtcagccgtagccaggaacgccgccaggtccatctgcggggcactcagaggggctgagcggttcctgaaaacgtagtgactgtccccagtggccttatttcccgaaaaaccagcaaacccggccaagtgcccacaggagccgccgtccagtccggctgcgcccccgaggcccggccctcggctgacccagcgccccgctccccttgccgcaccccacgccgactggcggccccgccagcccggacaggaaaccgccagaggcgcgcctgctgctcctctgggccgccgcctctctccctcaccccagtcctcgggccccgcatttccctcgcccgccacaggccccggcctccctcctgttctgcagcactgagtgtctgggcagaggccgctgccctaggcggcacctgctgtggcttgcctgaatgcaaggactatcttaacctatctaatcaatcgatggatccatctatctctgtctaatctgtttctctctattcattcatccatctaatctatccatctatccttctaatctatctctatccatttgtctctgcctatccaacttatccattcatcaagcaatctaggctatctatctaaatatctgtatctctctctctctctatttacctatccatccatctaatccatctattgagatggggatctcgctatgctgcccaagctgatcttgaactcctgggctcaagtgatcctgcctcagcctgctaaagtgctgaaatcaccatgcccagctaaaggactctcctcctctctgggaaattcacagcacccacaactaagaattgttgctgttgacatctcatcagacttgtctcatcttttcctctatatgtgtactttaaaaaactacacacgtaatacatgtatacattctcccttgtaccacacacaaccaaagccattttagagtcccaaatccacccgtatgctggtgctgcacctctgcactgtgtgtttttaataatgcatttcccagacctacatgcgtgacacacattgtttaatttgttaaataagtaactaaattctttcttaaggcctgtgaacccaggtgcccctcttctccgttccctctctcattggccttatccggcctgtcggcaggtcttctaacgcatcccacagagagttcctgaggccaggaaaggggtgcagagggtaacgcagggcatgcctgcagccctggggtctcctccccgccacaccaccttcctcagccttgctgcccgggccaagccagccctggacctttcccaggccagcccaccagtgtaggtcccatctgctcctgttgctcaaaacaagggcacaattgttacctattcattttgcttgctggggtggaaaaaggtgttctgccctgaggttctcaaagcctgagaaccaagcctggagcaggagagttggccactggtagagaggagttcaggccattcctgccttgggacatctgccagacgggatggcctggagatgggaacttttcctgcctggcttttgttttttgcaggaatgtaacagcaaaattaaaaatctaaaatgggaggaaatgcatctacagtcccatcatcctaatacttgaacggatttcattttttttttttttttttgagatggaatctcgctctgttgcccaggctggagtgcaggggcgggatctcggctcactgcaagctccgcctcccgggttcacgccattctcccgcctcagcctaccgagtagatgggactacaggcgcccgccaccacacccagctaattttgttttttttgtactgttagtagagacgcggtttcaccatattagccaggatcctctcgatctcctgaccttgtgattcacccgcctcggcctcccaaagtgctgggattacaggcgtgagccaccgcaccttgccagtttctttctttaagtgcttttctaatgcttgttcatttgcatatattaaatttatacagttgtaaccataatgtggccagagttgtgtattctcttcttcacagagtataacataagcactttcctctatcaccaccagttttttccagctttattgaggtataataatataacaaaaattatgactacataataatttatttaactatttactgacaattgccccctgccccaatttatttact

SEQ ID NO: 1245188 - DNA, 4001 bp, Homo sapiens
aaataaatccactgtacaaggagacaggcacatcctgcagttaacgcaaagctctaggcctccttgggccctcccaggcaagcagacagaaagcagaagaaggcaataccacctgtccattttatcagctcttaggaatgtctcacagtccagctgtgagctgcttaagggacaaaattttgcaagtaacagagcaaatataaattccaggacagtcagctgtaagaacctattttagaggtgtgaaagttcttacgacgcctcgcaatctaagtctgtgcttgaaaattgcccatgacgatgaagcgccacgcagttctgcagagatagtgatttcttctttagctgctctgattatcaggagaagcaacgtagctctgtatttaatttaaaatccacatataccagtacagtcaagacaaagttttccattaccaattttgaaagttgcttaaactaattgatgagtgaggtaaccccacataagggggaaaatcagatacttatgtcatttgcaagaattatttttacttttgctgaaatgttgtaactcaagtttcagtcttcgggggcatagtccagtggtgtgttccgctacctagtaaaattctacttgaagacagtgctagtttttggtgggtcaattcaatggcaactgtatttgagacaataaaagagaaatgaaactgcacccacgcttttgtcagccctggtagagaggcgctgccgccgcccacttcaaactggcggtgggtgtgccaaacgatggaagaaaaacagctcctccacacccaccaagccagcgaagagcagggattttcaaacaccgtgctgttctgtcaggttaataaagggatcgtgtgaataacaagcatttagtcagtcactgaacatccacaaggcgtgcggtctgggtgttccccgtgagctctttccaccccagcttcccgagagccaatcgattgggcatgaaattcactcaggagagaggagagaaacacacgagctcagcagtggaggagctgcccccacacagaacccaggcgtggtttgctctgccatgcatactgctttgcacccaactgtaaaaagtccatttacattccagggtctgtgtgcctcagcaaggaagcaccacaaatcctcctggattctccaggtgcctcctctgctgccaacagcaaccagaaaggaaaaggctgggttatgctccaagagcttcaggggggattcctcatcaagttgtttcatttgccaaaagttttatcgagctcctgacactgcaggcactgttctagaccctgaagaaaaaataaatggaaggaaggaagacaagcgggagagagggaggtccttgccctcataaggcttacattctagaaagggatttcccataagcaatgagtcccaccaccaggcacattaaaaatatagggaaaaaaatggaccttatattttatagaatgtcttaccttcctgaaaattctcatgtatttcttcacttcatgttctttgacatcaagtgaagcctgacaatgagacagaataagcatcactaaaatcacagatgaactgagaaaacatggcgtctcgagcggagcagggcatcctgaggccagaggctgaagctggcatgccaggtagggggctctgggcatctcccagctctgccactgactgtcccccaccagggctggctctgaaaacacacaggtgtcacccaagcttctactgtgaatagatacccaagccccagccattaacatccagccccaaagaagaaacacacaaatgaggcacacccttgtcaaaacaaacgcagccagacaggtccaccactgcagagcagctcctgccgcgacaagctctgcttcccagacatcatcacaaagaacagtcacaagtaattccacttaccttttacactatacagaaactgatgggagttctcggaaatggcccaacaggaggtttgatgtcacgaacgtagagcttgaaccgctagaaagaaagatgaagaacttctgtgagccatgtttctttttgtgtgtccccctctcaagtttcaaaaacagttaaatatttgagggctgtcacgagaagaggcataaatatcaaaatgaatacaataaaaatgcaataataggcatcaagtaataaagggaaggaagagagaagaattacagcacagaattaccaaactgggacaaaatccccctctgcctccactcagtcacaggggcaccgagtcctcatctgttaaaggacacacgcttgttcctgcagaggcacgggcctcctctttgatgagaggccaaataacagatagtatccctgttggactggtcttcttaaaattcatacacactctaaaagctgtgaaaagaccatcttctttcacgacaatccagtctcaagacaacatgggcccacctaagacgggcaggccccagtgattcctctgctgaaatacatgtctgatttcatggaagaggcaagccctctagcagtgacactgctgggatggtaacgttcgtgactctgcctgcaaggctgcctttacctgcccaccatcctgttaggagagtgtcctcccagctggtgcttcagattttgtccattccatacaacctgtcactggcatccccatcccaactgagtgagcatgctctgtgggcatcgcaccgtcccaggtggagcgccgggtatcctcgggtgaccgcctcgagctccaaagcagtttcaggtgaactcagcaaagctcggcctcagacaccacaagcgcctctcagcaccccgccctccagtgtgcaggacacactcttgtccaagggggactaagccaccatctgtctggcttgtgtgctgcagttcattctccaggaggctcgtaccccaaagcgtgctcctgccatatgccactcctgagtgatcagcccatgtaaagacagccggataaaacacggctgcacctagctagaggagcctgggagattcctgcggagctctaccccagccaaacacctccttcccatcagtgttgggagcctacagacattcctttctcctcctgtttcctgcctgctgagagatgaaaacaacccactgctgattttccagatcttagtttttattcctccactggggctgctctcaccagtcttcctaggacgcaaacgctcagatttcttgggaacggaagtccatgaaataaccagaaaggtactgtggtgggcagaattctaaggtgactccccaaattgcttacaccctgtacaactccctccccttgagtgtaggtggaagctgtgattggcttctacccaaccgaataccacaaagaatgcttctccccacaccaggcgacctacataggagtccgcaacgagggagtgacagactcccttgctggcttggagaagcgagctgccacctcatgatggggcctgtgaggggccacttggcaaagcactacaagggctccccaggacctgagagcagcccctagctgacaagcagcaagggaacagggacatcagtcctgcagttacaagtcaatgaattctgccagcaacatgaatgagcctggaggtggattcttccatactcaaacctgcagatgggaacacagcctggccaacaccttgactacagcctgaccagagaaccaactaagccatgcctgactgtggagccttggaaactgtgagataacaaatgagtactgttttcagctcctaagtttataataatttgttacacagcaacagaaaactgataaatgtaacttagtaattaggccaggtacggtggctcatgtctgtaattcctgtactttgtgaggccgaggcgggtggatcaggatgccaggaattcaagaccagcctggccaacacagtgaaaccccatctttaccaagaaatacaaaaattagctgagcgtggtggtgcacacctgtagttccagctactcgggaggctgaggcatgagaaccacttgaa

SEQ ID NO: 1245189 - DNA, 4001 bp, Homo sapiens
tgccaggctgctaagtcaaccaagactacagcacagtcccaaactgtaaacacctctgcagacgggcccttgctctccgcgtgccaggcaagaaaactattcttagaacactgtcagcagttgggggaaaataaatatttgtctatgtatgtatatactccagtgggagtagggtggggtgcaggagtctcaaataatgtgccaacaaattggcacaaaatcccttaataagcagctggcactggctgcgttccactgcaggattgtggtcttgcaaaccaagcccatgagaggattcaagagacagccctaaaaacctgccgggaagagtcttctccaatgtaaatacaaacctacacgaaccaggaccatggccaacaatggcaagcccttccaagggtaacagcagaatgttaagaaattagagaggtcatttaaaacaagggaggaaggtagctacaattccattacagcaaatcccttactggcatttacattcccagccctaattcctaacactgtgttcaatgtcaatagcaaaatgaagctcttaaaaagaattaagctttcaaagatcataaggaagttagccccctgttttaaaaagcactgcttagaaaggtccatcaaataacatttcaagggttgatgggaaaccaaatataattcaataaatatacatgggtaatactcagacatcctcatttgtctatgtaatgactcagatttgacactctgatccttgactgaacacaaagactatattccagaagaattgtgcagagtacaaagggagagttacagatgacaacacactcgagttaaagactagaaaagacaataccatatacagaatgcagacatgacttgatgcaatggcagtctccctgtgcagactttgcagaaccttctctgtcattcaatactcagtcctgaagctccagggaagatacagagaggaggatgccattcttggctagccaaaccggcagaaagggccgtttttaaaaggaagcttcccagcactagcccttcgagaaggcaccaacctccttaccagccataggaccctatttttgagagtcaatgctgctcaccatctctatccacctctactgcaaataacttactaatactagcgctcagaacccacattctgtgcagctactcttacctcacatcctacaatgcctaacacatagtaggccctcaataaatatgtattgcaatggtaattaacatttagaaagcagcgctggtccggggatgagaagatgccaaaataattagaaaagagaaaaagagaagggaatagaccaagacacagaggaaaagaaaagaagcaaatcaaaattatctaattctagctaattaaaaaattttgggggaaaaacaaaaatcatgctagttcatgcggctatgggcacacagcaaccattcctgtgcctgggcagagctaaggagtcctgcttgctttaaagagcttctagctgccctgactggcgacgaggtgtccctccaggtaggtgacccaagaacgctgtactctcggatgcgccttcccccagtgccgcccacccaccatgcgtccctgtcgtcctgaaaacctctgcctcatcgggaaaccttctccttttccaattaaaaaaaaaaaaaaaaaagtttaaacaagcaaatgccctctccgccacgatagcgatttaacctaaaccgaacccactgtcttccaccggtgtactcacagggcgcgcccccaggcccacccggggcggcgcaccgggaaggggtcccgaggaagcttcctaaaggctgtgcagggcagaccccttcacaaaggcaagtgccgggccgggctgggtgcttgtcgcttcctgtttattccaaggtgaggggcagagagaaattcaacacacgcctgcttcctccggggctcggagacccagcctaagtgcaacagcagcagccccagacaatcgacttcccagccaatgccgggagctccgggcggtcccgcgaccgacgtcaacgcgcgcggggggacccggggggacgccgggtgaagcgggcccgaggggccggggccggggagcgcgcggtgcaggatgcgggactgaggggctgcggggcttggcccgccccctccttcccgcaaactccccggtcaggtcctgcaggatcttcccgcttcccgctgacctccagtccctgcccgccacggctcgccgaggcctaggggcgcggagacagttggggctgccatccgcgcgcccatcctggcctccgggcggtgcagaattcagtcttgcaaccgcgggacaccctgcgccccagggcaccaggaaacagaaaacggggtgggggtcggcgaagtccctccaccggcgtaaccccgcccgcgggccagccccggatccccgccgtgcccaccggcaagcccacccggaccaagcctcacagacctcgcgcgctcggcgcccagcttctccctccggccccagccgacggcgcaggctcgcggacgtccagttcccaaagcgtccggttcccgagtcccccgccacccctccctccggagcgcagcggtgaacttgggccagaagccccgaccactgcggccacctcgggtccgcactcacctgggccgcccccccggagcggaggcggggactgcccgcagtgcggctccgcggccaccggccctgctggccagggggaggggcgctgtgcggggcgcggcagggggcgcgcggcgggccggcggggagcgcggcgcgccggggttctttaagagctgaggacctcacccccgggcctcccccgcgctccccgccctgcttccactttcccaggcacccgcagcctgtctggctgcagcggcggcagcggctcagtggcttgcaggggatccccggccggccgcggcggcgcgcggagcgggcagggccaacgcactcgcctgctaatcccgccgggcccggtccgcagcctcagcgcggggagagaggggacgcggcgctgcggccgccggggaggtgtcccgcctccagtcgccggaggggggagtgtcccgcctcccgccgccgtcgccgccgtctgtctccagccgtgactgcgcgccgcggctgtgtctgtctccaactcctccagtctctcctcctccttcccactccgcggtggggacccggcgcgcggccaggccgcgggtaccggggccgccgtggcgggggctcaggggtccccggctcacaggctgcgccgacccctgcggggggcgggcccggaggccgggggtgggcagtgggggaggcgcgcgggcgccgaggccgcgggacccggggccgcactcccgcccagggctcgggcccgcgtggcgcgcgcccaccgccggccgcacggggaactccaagccgagcgcagagtacgctgcaggggcgcccggaggagccggctcgctgcccgcaggccgggggcggtttcgggaggctgggggcgcgttccagcacagagtacctcgcgggctgcgtgtgcaccacgggccgcgggacctcgggcagccgcctagagacgtgcagtcgggcggcaggacacttagtaggacggagcagtgctcggcgagccttgaggagcttgaggcgcccccggaccccacctggtcgcccccttagtatcctgccctctttaaaggaaatggctcctgcctagaaggtcagatggattcttcgcgctgtgaccctttctccttgaaggacctacacctcctgtgaagaccatttcggacttgacctccacctgagtgcagactttgttcagaagtacacgcattgcctccagccacccctaccatgtttgatgggggattggttactgccagagcatatgagcattttaacccaattttattgcagtcaccaaaattagttcgcctctgccaaaattaacccccctgcagacatatcaaaatactacactaagcaggggtttcaggctgggtttaagataga

SEQ ID NO: 1245190 - DNA, 4001 bp, Homo sapiens
aagtcaggttaaccgtcatgaaagtaatgaacaaaagccccaaccagcagaaatttgaaccacggacataatgagttcgacaactccccaccttctacccagatagccactcatgcagaggccagatggggaaacctaggagaaaagaagtctcctggattcctgagacagatctgcggataaacccacatatggacaaagactcttcctcttagagtctgacctgctctgaccccaaagttctctaggtacattcctactacttttggcctgggtcacttcagcctctgggactttctgattgttcctcacccagatgtcctcatggctccttctctcacccccttcagctctttgctcaatggtcaacttctccagaaaggccttccctgaccacatcataaaatcgcaccaccttcccccaccaacatgccccaccttcctcctctgcttgatttttctccataatactgagcaccactgatactttaatcagtgcactgtctgtcttcccaccactgaaatgtaagtgtcacaagggcacagattgccatctattttgtccactgctctctcccctgctcccagaatagtgtctgacactaagtaggtatgcagtaaatactttttgcaatgaaggaaatgactcacacatactcagaggcccagaacacagaagttagaaggaactttagcattttacaggtgaggagccagagatgagacctgccctaggcaatgcttctagttagcaccagagttggaaacatgttgagtaaagcaaggctttccattcattcacagtaaccctcccacacatacacaagcccacacagaccatttggcacaacctcagcagactagaagatgagatgatggggttcagtttagaggctccccagccctccactgcttatcagctgacttagttctcactctgattctgactcccccagagctgactgactctggctcccccagggcaagctgcctccactggcaaaggctgccatacagaacccaagaggaagagaagctaaaagccaggaggaggaaagggaggaggagtgggaagaggaagagtcgggggagcacaagagtgttgaagaggaaaaggctggcaacctgggggaataggcccggcagcttctaagcacaagcgacccaccagacgctccctgcaagcacgaatcaaaccaaagccagctaccctgccacctgaactttcaagacacctacaccaagattaaaaggcagctccaggagacacagctctgacagccttcttgcctctcaaacctccaggttcaggcatgaggacaaggtttcagagctgctgccaggccgctcggctggctggacagcaccagcactggcttagggagccgtataagggaaggaggtgggggtgggagggctggcaagagccagcgcaccctgccagcctttgccttttgcatgacttgccgggaatgcccccatcagaccagcagagagacaggtggactccaaggtggattggaggagagaatgggcagcgcagtgggaaaggaagaatttcataggaacaaggagggtttgaagaatcagcaagacagaggggacccagcacagagaagtggctggggggaataaaaacaaattcacgttaccttccagccgtccctctggaccaaaaggtacggggctccccgcagcaaagcaatagcagaggctccagaaacagagcagaggaacggagttgctcatcctgccccgccacaccccctcccaagaaacagaagttttaaaaaacaaaaaccacctcttggtgtttccagcaatcccggccggtaagacccttctctcggccaggggctgggggactggaggcagagaaggtggaaaatgaaaacttggcggcacggagcccgggcggtggcagggagcgagtgtcaacggcttgccccagaacgagatctgccctcgtcctgagccgccgggaggcaaggactcgctgctgtcacgctcctatagaggtagtttttaaaagtatgggagtcatctgacccatcgccagatggtgatttgcataatttattcccgtctctgggctctgattggtcacaccttgctgacgccggaaccgagactggagaaagtttgaatgaaagcgctgcacactcaccgcgtggacgccgcacgctcggccccgcttcctcccgggcccgctccgcaggcagctgcgactccagcagctccagctttctcccactgccctcctccggacacccagatcctcctctccccactgccatcccaagtggcggaggcggacatttccctgaaactctgcgtccgctggggaggcgatccctggagaaggagagcatcctctccaaggctcaaagccacactctctctgggagtggtctatccgctccctgggccgggagtccgtcgggggagagccacctggtcatcccctttgtcctcctcttctccctcccttcccgcctagcgagggccgcaacaggtgcagaaggcgcggccgcacaataacccggcggagctaaggggctgtgagctgcggccggcgctggaggatcgcacagtacctgctcggaatgctcgctccgccactagctgcaaaactccaagcgagccagccagcttctccgaggcggttctctcgtccgcaatacgtgggtgataatgtatcggcggcttagggatgttgggaaaactaagagttcacgtagcaaagcacttagcgaggcgcggagctcgtggcaggcgctctcctacggtggggtggagggctacgggaacaccaggcgacctcctcaaagggaccagtgagccgagatttggagtctaagacgcgtggccagagcccagtgtctgccgatgagcactcactccttggcgagtgaaatcaagcatctcctttctctctgttctccatcatttcctcccggctctccttccctttattgatccgggtcctgcggcagaaagcagcgagcggagggagaacttggcccggagtctgcgtctggcgctggggagcggggactgagcccggaacaccgacggggcggctgcgccaacaaccactgcggacgcagggcgggtacgagaggctgagaggctgcgtcccgccatccagcctcgctccagccgggaggatccggctctttaagacgatacccttaaccctgcagtcgcccggaacaggtcctgcccctgcctggggagggaaaacccccacagcagtcccgcgccccttcctccctagcgtcgaggatccagctggagagacctgtgcgaggaaaccgagccggagccagcagatcctgttccgacctcgcctcattacttttgttactccagctgccagcagagcacgctttgtccctcccgtgtgctatcattcattaacaagactcaggcgggctttagttttttagtatagaactcaatggtctgtgtgcgatggtaaatatcacccccggatatgttgttcccactctgtctctctcttcatgaggaaactatacagacataggtctaatgttatctccattttacagatgggaaaactgagtcatggggacaggctgcagatttgaagaaagtctcaagacaaccaggtctctcttctctgctctaggttcaatttggccaattgacctttaaatgtgagctcttggcaacctggtctagtggctgaggcagggggtaagctgtagtcaaaagtcctcttccctaaccctggcaacatagacactcatctctaccaaaaaaaatttttaaattagccaggcaaggtggtacacctgtagtgcaagctattaatacttgggaggctgaggcggaaggagtccttgagcccaggagttcagggctgcaatgtaccatgatcacaccactacactccagcctggacatcagaagaaaaaaactccttccctgttctgagttgctcatagccatggtccctagaacattaactggat

SEQ ID NO: 1245191 - DNA, 4001 bp, Homo sapiens
gttggttccggctctgtaaaggaagtcaaggtagctgatttgactagttgattaacattcctaattggctaatgtagtgtatgtgagtgtgagaaaaagagaaaagggatagaagaacaggcaggcagtggagaggtgtagaagtgaaaatgtgtgaacaaatccatcactactgaataattcatcatcccacaaatagaaacaaaaactccaaaaacttgtgtttgatatcatttgcatcacctttgtgtatcaagaatagagataccttgataacaaatgcccagtaatatacccttgctgcatgggcacataataaatgactgctgagtaacgaaataactgcactctacttcaactacttaatgacttggtcattaagtcaaattaaaatctatacctttcaattacacattaatttgagagaaatagcgcttcctaaaagggtgcttcctattcagtaattactttctagaaatgaaacattttgtttcaagaactggataatctaaagtgatgtataaaaaccttatataaaagattacttatgggggaggtgggagggatagcattaggagatatacctaatgttaaatgactagttaatgggtgcagcacaccaacatggcaaatgtatacatactaaccaacctgcacgttgtgcacatgtaccctaaaccttatagtaaaaaaaaaaaaaaaaaaaaagattaatcacacacaaagatagaattcaaactgccagagctcctcatctcatataaaggcatttgccacttgttcaacgggtatatctgatggtcactgaacagagcttatgtcatgccaagtgctacgattgactccttagtcagcagtgacacatcagcactaaaaagtgcagatatgttttctttcacgtaagtaaatgctctagcaaggctctcttatctacaaaagtgccaaacacagagagtgaataaaatatgaacccaagattatttcaatgcttccaatttttttaaagggctaaaaatgtaatgctattcttagtctcaggttcagaaacaatcaatccctaaaaatatatcccttctcctaaaaagttacataatgtgttactacgagagaaaagatcaaagaccacaccaagtcactgagaggaaaatgtgtagttccaacagtataagaatgtcttctgacatacaaagacttaaaaaattactctaatactactatatgccatctcaggagccgtcagtgggcatggggttcaagcgaagcattaaccattgctaacaccggagcaaagaaatcggggatcgggggtggggggtggaagcgggaaaggaagtaagggggcttctagaacatgtctcaggttgggatggctgggggtagggcacatttctcctagagacgtggcgttgtgaaacatgatacctagaagcaagtttgagtgctaggaagtgtaggaggtaaccaaacacctctagatccaacggaaagtaccgacgagatcaaagaagggaagacagcaggcgggtgagagagaacagaatgggtgagggaaagactcggggacaagcggagggaaccgtgcgaaccaggagggacccggcggaggggctgccaggagggtcccctccacagcgcatatggtgtgcagctgctggaacgggaacctcagcacaccagggtagccgcggatgaaaggcgaagaggcagcagaagggggagaggaacccggcccccagccctctgctccggcttactccccgcgtgggcccagaagggcacggtcccgtcgctctgcaccaggtgcggccccttgaagctgtatttgtactcgaaacggcgatgtggcaacgcgaccgcggggtctcctcccacgccgtcgccccggacgaagcgaccgagtgacagcagcaaggcgcagaacagcggccgaactctggcccggagacccctttgcctggatcccgccatcttggattctggaacgcggaggagggcgggagagggaggggcgcggatggctgcggatggccaacagggcgctcgctgattggcagagcccgggggacccccaagggcaaggggtgagccccgcccccggcctccgctttccgcgcggccgcacggccaggagcagctgtgggcggggccacgcgcagggggcgggtctggggcggtgcggtccttcggccccgcccaccctccgggggtggggaaaggactccaaccttcgcttcccgcgcggcagagtgcgggaagcgccgatgggtccttacctgcagggagctttctccggcttcttagaatacctgggagcaggaattggctagccctaagacctctggacccagcctgtacaaaacctttttagtatattagaagaaaggtgttccttttgatgtgacatcagtttttcagtggcacaatcccgaatgcttatggtcccagcccactgagctctaccaagctatgttagagcgttgcaaactagaaaccagcacccacggggttgtaggatgccttaggatttataagttggtgtcggaaagagggtttctgtgaatttgtcagccagcctttacatctcaaaatttaattccaagagctttccaaattttgaaaccatggcaagagtgcattcaaatgaaactgactttggtttggtttggttttggtgagagggataatgtgctatggacccaggcgtctgtagaacctggacatttgatataggatcggtcttccactcaatgaatacgttctatattttaaaggggactcctctttcccttgcttaggaaaaaatatcgtcaaaatattcatggtaatccaaagttttgttttttcaaaaatgtgtcatgatgagtttttcaagtccaagaaacagcagtatgatttatattgtttttacacatggctttttattagctctgttcgtgtgggctacatgaacgccacactagccctagggactcaatacccgcattacttaaacttatttttcattaacttcccagttttggaagttgaatcccatcttcggattcatgggccattactgttaaatctctttctagtgctcaaataaaaccttcaagttgaatatggatttaaggctttccgcctgctagtctcgagatgtaatttaaatgaaagtaccatacttactgctatctcagcagcagcagtaacaaacatttatccactgtatggtgtatgtgcgtcattgccctggactctccatggttttcaacccataggatttaatcattttattttctttggttctctcattgctctggcaaccagctctatgccttgcacagagtgaagattccataaatatttgttaaacaaacattaatgttataaaaatggcaaacacttactgagtgctttctgtgtgtaactgcactaagccttcaacatatgttaacttattgaatgctgacagcagccctctaaggtagatgccattaatatttccatttacagatgaggaaacagaagcatagattaaataatttgcccaatgtcacacagtaagtggcagaggtaggtttcaattccagccattctatcattgaagccttcaatcttaagaaccgttttatgttaaacattatgtatattaagtattttcaattcattacgcatgatttgaactcatgagggacctgaatttcaagcataatacaagtaaatatttgtaattttgctgaaccataaatgtaaatctttatgttctgtgaagctgtttcttaaaaaaaaaactgttttattgaagcatattatatagagaaaattatgccagccttaagaatgtaactcaatgaatttttcccaaaatgaatacctcccatgcaaccagcatccagattttttttttaaaaaacacacatttctagagttaatgggtgcagcacaccaacatggcacatgtatacatatgtaacaaacctgcacgttgtgcacatgtaccctagaacttaaagtataataaa

SEQ ID NO: 1245192 - DNA, 4001 bp, Homo sapiens
cttgaaggcagcatgctcgttaagagtcatcaccactccctaatctcaagtacccagggacacaaacactgcggaaggccgcagggtcctctgcctaggaaaaccagagacctttgttcacttgtttatctgctgaccttccctccactattgtcctgtgaccctgccaaatccccctctgcgagaaacacccaagaatgatcaatcaataaataaataaataaataaataataaaaaaaaaaataagaagcagtggtaagccagagcatacacagcctggaaagcctgtaaggatgttgaggtgaaccctgagagcaaaaggaagtccatggaaagttgctagatagagaatgaaatgactgtgtttatatttgtaagtgttcgccctggctggagtgtgaagattagattggagaggtgtggggaatccagaagatgggtggagaggttagccagagggaggatgtgacttgcattgcactagagggaaaggatggatgccaaagcacgagagtttgcaggtttcaagggagggctgtcagacagcatccatttaatagcttgaagcaagagactggtcatttgctgagatttggggctgtgggaaggacctacggtttgagacattctgaaatgctgaccagaaagcccactgttgggggaagacaggtttagtgggaagggcaaattgagagacgaggtccaccaagcagctctcagcagtttgaaggcttcaagttgttattcatgcatatcatggaacaaaagaataacaatgattaaccattaatgccatttatatcctaattcagaaagcttactggatgtcaagtacatgttaggcatattttggtatagctgatctcatattatcctcacaataaccttcccagtgaagggttattatcactttataattgaaacatctgtggctcagaaaggttaagaaacttgaccaggctcaccaagccagaaaatgagttctgtgatctatggaacgtatctggcttcattcagagctctaacggtacaggagttaccattgttcaccctccttaaagaatgagcatccagcgggactttaaaataactgtaattttttttagtgagagacaaggtgcttacaagcaagcagcttgcaatcatgaagcctgggaatcactgaagcaaatctaagtgcttaaacttaactacaggaaaaggaaagttaagttttcggttcctcaaattaatattttcattgtaatgataatttccacttttagtttgccgtttacaagccaattttattttttattgcatctatctatcatctatctataatttatttattaattagagacagggtctctctccgtagcctcaggctggagtgcagtggcgtgatcacagctcagtgcagcctcgacctccatggctcaagcgacctcccacctcagcctcctaagtagctgggaccacaatcccatgccaataagcccggctaattcttgtattttttatagaggggcgggggcgggggtggctcaccacgttgcccaggctggtctcgaactcctggcctcaagcgaccctccacctccgcttcggcctcccaaagtgctgagattacaggcgtgagtcaccgccctcgatctcatttaaaatataactgagattttccaactgcttcactgatttgttaactaagtgaactctgcttggacccctccccgattcccggtactgggacagggaaacgagccctagaggcgcccgcagtgatgtttgcctgttctcttaccgaagcctgttatgaggagcaaaaagcagaatgtccaagaaggctctttgaagatgtctgtgagtttgcctggggacagctcctggaaggcggtgtccccgcgactagggcgagccccggattccccatcatcccggactccccaacacccggaggcgcggcgccacgaacaggaccaagtaggaaatgcaagaccacgcgccagaaacgcggaagtggcccggagacaacatggcggcgccggcgtcaagtgccctaaccccggaccggcggcctggtacggtggcctgtgggggacgccacattaaaagaacagagacgctcatcctgcgcctggtagggcgaagtggggtccggtaaagcgaccttcagcgcaaagctgagggggcgcagggacctaacagcaaggaccgcagggggaggccaccccttgctggccagaatcagaatgaagagacagacgataatgccgttcattctggccgtcccgagtagctgggactacaggcgtgcgcccaccacgccaggctaattttttaaaaattttatggagacgggggtcccactatgttgcccgggctggtcttgaactcctggcctcatgtgatcctcccaccatggcctcccaaaatgttgagattacaggcctgagccaccgcacctggtcattcaactattattttaagccacacacttctgcataatagagcatgtattattagtctactattgccacactaaagaggtgtaacaaaatgcctcccaaactcagaggcgtaacccaacaatcgtttattctcacttatgcatctgcaggtcactgatgtgggctgagttcagctggacgtgtctccaagctgaagattgggtccctgtcttctccatgtctcagcttccctggaccagtgggtcagtcagggcgtgttcttctcatggtggttgttcacagaaaaagcggtcttgatccagaccccaagagaggcctcctgaattacacgcaggaaggaattcaagacaagttgcagggtacggtgagagtttattgaaagcgcctccattacagagtagggcgtccttaggaagcaagcaaaggaatgccccgtctttgttttagctttttcttttttttttttttttgagatggactcttgctctattgcccaggctggagtgcaatggcacaatctcggttcactgcaacctctgcctcctgggttcaagcaattctcctgcctcagcctcctgagtagctgggattacaggcgcccgccaccacgcctggtgaatttttgtagttttagtagagacagggcttcgcatgttggccaggctggtctcaaactcctgacctcaggatgatccacccgcctcgcctcccaaagtgctgggccactgcgcctggccattttaaatttttcatatataggccgggcgcggtggctcacgcctaatcccagcactttgggaagccgaggtgggcagatcacaaggtcaggagatcgagaccatcctagctaacacggtgaaacccccatctttactaaaaatacaaaaaattagccggctgtggtggtgggcgcctgtagtcccagctacttgggaggctgaggcaggagaatgggtgaacccgggaggtggagcttgcagtgagccgagattgcgccactgcactccagcctgggagacagagcgagactctgtctgaaaaaaaaaaaaatttgatatataggggttttgtctatgtaaaggctaaactaagctgtgtctttgtgcatgtggtctgacagcatgacaaaatttattattttattgatttaaagaaaactctccttgacattttagtgtataagtacattaaagcataactataattatcttgaaagcatatattacgggtattgggacatctggtctttctgttgttacaggattgtgtccttgcaggtatctttaggctgttttctcaactgtaaacatcttatgaccatgggttgtgactggcaaggagtctcaagatggagctcaacttaaaatggtgtcactctggccctcctaggcctcggcttctctaacaatggcagaagcaagaacacaagtccaactgcacaaacacattgtaaacctttgcttgcatcacacctgccaatatcctatggccaaagtaaatgcacatggctaagcccagcagaaatgaagcagggaagtatattccttctg

SEQ ID NO: 1245193 - DNA, 4001 bp, Homo sapiens
agagtaaataacactggcacccatttaactcgtatgcacacgagaggttgcataagcaacgctttgtacatggcagacttttctaagaagtctaaatttagaagacctctgttgaatttaaattaaaaggcaggattccagtaaagactagaagattttatttccataattggcacatgcaggtaacagatcctcagaaaatatttgtacagtaattgaggacaaaacaggaaggcacctgaagcggttgggaaaggcttgccaagtcaaactgagtatgaaacggcacttgtatgtgtaagggtaatagcatttactgagtcatctacgatgtgccagttaccgagttaagtgcttcacatacatcaactcctttaattctggcaacaactctatataaactgtattgtcagtcctgtgttaatagatgaggcagagaaattaagaaacttattcaagctcctaacacttgaatcgagcagatctttcatgctcttagccatctcactgcagtctgaattcttaacttatgctagagtgaagtttaatgactgcttgtgctagaatgtggtggagactgtatggcgcacctacctcgccaacatgtataagaatataggtatccaaattactggtcagaaaatcctgcggccttgggtgatgaaaagctaatggcaacagaaattgggccaggaagcctcgtgtagggaactacctgactggtcacatttcgtaagttacttcctttttgtcccaaacgaagccatagttttcaaagggataatggccttggatgttgctaagattggcagagagagctcaggtgtcgtccattccggatcattccagggaaaggcatcctctacagggttgcctgctttgatgacggagattgcgggcggcagtctgacgcggtgtaaaccagatgattcctgctaaaaacaatcatttccaagatctgattagccctaaatatgccacagctcagtttgcaaagtagtaattgtttaaaagtctaggcaaagattttggccaattccaactcaagtatccggatctccagcactacttccctctagcaatgccatacacatctaaccctaaaacgaggaagcgtccgctgaggttgcccactgcaggatgctggtgtgtcgccgggcacatgaaagtccctgagtcaggggagagcgctcgccggggactgcgggcgggagccggcgactgagaaccgcttgccccgctctctggcgtgagtacgcaggcctcctcccacggtctcaggaagcccagacgccgcaggcttccccgccgtagaggagctgccggggcgtaattcctccaccgcttcctcctccagctgcacccacccgtcctttcctgctcgggagggctgggtttgaagcgcgcgccacggccagcccgggaccgcgggggagggcgagggaggcgcgcagccgcacgcacgcagtaggcagccccgccccgcccctcgaggcccaaggtcccgcccctcgaggctccgtgccccgccccccgggtgccccgcccctttgcgcggctggcgcggccagcaggccaggctcccctcggcaaacctgtctaattggggcggggagcggagcttcctcctctgagggccgtgccgcgctgccagatttgttcttccgcccctgcctccgcggctcggaggcgagcggaaggtgccccggggccgaggcccgtgacggggcgggcgggagccccggcagtccggggtcgccggcgagggccatgtcgctgttgggggacccgctacaggccctgccgccctcggccgcccccacggggccgctgctcgcccctccggccggcgcgaccctcaaccgcctgcgggagccgctgctgcggaggctcagcgagctcctggatcaggcgcccgagggccggggctggaggagactggcggagctggcggggagtcgcgggcgcctccgcctcaggtgagctcagggccgcggcaggccgggcgcgcgggtcgagcggggtgggctgcggtggggaggtgggggcgctgtcggtggggctgagcgcggcgggggccgccggcgtgagtgagcggaggtggggaggacttcggtcattgaggcggagcggaactcagcagctccccggaacgcctggggtttgagagcggggcccagggctctggagggtggaggcaaaagtggcccagcggctgcctcgctccctgttcccacccccgcccctggtgaaagggagaagtcgaggttgaccccggaggatagtgagagaaggaaagctgtcaggggacccctaggatggggcagtcatccagaggacttaaaatgcaaaagaaagggatgtggacactgctctgggagacctaaggaaggctgggaagaagcgcaggcgaggtgatgaatgcagagggtggggtgcaggaattcatgaacattttgcaaggtattgggaaagactgacgccgaactcatcatctccctccatcaaaccaggttaccacgttctcttcttgacttcaccatgaacatgaaactcgaagtaaaactattttccttgttaggtttggaatggctgtattagggttcctgaagttttggtctcgagactcctttaccctcttaagaattattgaggaccccagagagctcttatgtgggttagagataatacatacatgtaatacatactgatatttaccacctttgaaattaaagctaagacatttaaaaaatattaatttatttaaaaagaataacccattatatggtaacagaaataatactttcgtggaaaaacaaattttccaaaacaaaaaagtctattagagaagtggcattggttttcattttgaagatctctttaatgtcttggcttaatcacagagctggattcgtttatgtgcttctgcattcagtctgtcgcactattacaggtcacagaacgctggaaactgcagtgtccactcctgaaagaatgaatgaaaaagctaaataaagtcttaatattgttatgaaaaatctttatgaccttgtggaccccgcgaaagggtctcaggaactgcactaggggttcccagaccccacttagaaccattactttataccattgttgtaactttggcctgcctttgaaccccttagcagttttttgaacttctcaaatgacaaagatttgtcttacagtataattatttgtacacatctttataaatgccttaagaacaaaaactgtctcttaatattctgttatgtatagaggttagtaaatacttgatgagaggaaagtcattcattcaaaatggtatttattaagtgcttattatttgctagaaattttagaagataaaaaactaacaaatattcaattcctaatcataagggtttatccaggaatggactattatttggggacctttacaataacatattaaatgctgtgttgggtatgaatgataatggatttttatcttttattgaggacatggtatgtaccacaaaatatactaaatgtttacatgctgctgctgctgcttcattcttctttattcttcttatttttgcattatcttttttttttccgagatggagtcttgctctttcgcccaggctggagtgcagtggtgtgatcgtggctcactacaacctccgcctcccaggttcaagcaattctcctgcctcagcctcctgagtagctgggattacaggcgtgcgccactacagcccgctaatttttttgtatttttagtaaagacggggttttgctgtgttagccaggctggtcttgacctaaggtgatccagccgcctcagtcttccaaagtactgggattacaggcatgagctaccctgcctggccacattattttcttaaaccctcctgacaactcttgtttcagagtttgggattgaggcaaaggataatagtgacttgggattattgcttgtgcaaaggagtaatgatgtgaggagggaataactagca

SEQ ID NO: 1245194 - DNA, 4001 bp, Homo sapiens
gcctccctcagagcaacacccctccctgcccactgcccccacactcacgtgatctcgttgttcatgtcagtaatgtctattctgtccaggaaccagcctgctctgttgcctgtgttgtcgtggcgaatccgaatcttggtcagggcccccaggtcaatggcatagatggtgaaggtgtctgtctgggaagggccagggaacactcagtggggtaagacctacccctccccacatggccatcagccccatcctcccaagaaccagggcagccagccagaggccaatggtgagacccaaagcaaccaggagtggggatgatggagaatgtcacttagtagtctggtgtttggtctgcacaattgtttccctaacttgtccctgccaggagatcttctcactctcatgtccaggaaggtggaaggaggagaggaagagtgaaggtgaccttgagaggcagaagagaagataggtttgctggatgcccacatctgtggtgggtgttttgtgtgcaagagaggggggtgcactgaaaccctctgcaatgtgtgcaggtgtgtgcataatctgcttcaatcacatatttgtattaagtacctgctatgagctggtgctgtgcaaatccaaagtgactgtcagaaactgaagacggatttgcccaccatttaggtgtgaagagggccatatggatcacaccatgtgaatgcacacactgctccatgcacgggaggaagcagaccacaccaggaacctataagtaaatggggccttcttggatataacttttttgactcttaattttgaaaaagattttaaatctacagaaaactttcagaaatagtatgatgaaagttcatatgccttcatttagattctgcacttatttgtaacatttgctttctcactctgtcatctctcttgcactctctctcttgctgtatgtttttctaaatcatttgaaagtaagtggcagataccatgattcttcatccctaaattcttcaacatggatttcccaagaacaaggatattctcatataatcacactagaatgatccaattcagaaaacttaacatcaacataatgctattatataatatacagtccatgttcaaattttaccagttgcacaagttatgtagtcctctatagaaattttttcctaatccagaaatatgtggctataatttttaaaggagaacactgaaacgcagaaataaactacatcctcaagtcaaggggaagattctttaaagaaaaagcagggggcccctgaaataaatcaagaaatgagcccagaaatatgttaattaatttagttcatttttaaaaaatctgtgttaatgagagaatttggctttcgggtagaggcaggaatgggaagggtgagataagagatagttttctagccaggggatattataaaatcttgaagggcaaagatgacggctttatttttcatgactttcccactacacctggaagagtaaggtatgtgtatttcttttcatggattcccactgcattaggatacagttctggcttctcagcttgtctcttaagcctctcatgaccccacccaccccacaccctaaattgttcttatccaagcttatccactggggcttagcaccgaccacagctcagctggaagacacactgtcctaaactggcctcccccatttccacctccatatctttgctcatgtggttccatcttctgagaacatcttccactgttgcctttatatgtctacaccatactcacctgccaaggcccagtttaagttgctccctccccctagttttcccccaagacaccatcttgcggcgaggacttcctcttgaacccccgcatccctaccaagtgcctcagcatctgccactcaacgccattctctgtttgttcctgtgggtcagctggcccatgggctctaggtgctggggccctgcctgcaattctctcataacccctccacaaagtatcagtgttactgaagaggtactgccatgaaacctggtgggatgaacaagtcacactgccaaacacagcagccattgtgctgcgatgggctgccatgggaatctcagagggcaccaaacccacagcccccacccaggggccagagaccctcaccctacctgcccctgctcaaatttgttggacttgtctgacttcttcaggggtcgttcgcccgtgtctccatactcctcgccgtagatggttaggtagacgttagcatcagtgccggccttgggcacattccccgtgaccacctgaacctcataggtgtttcctgtagacacagaaagatgcagtgtggagggcctcatggccatggggtgtttggacctgaggcacagcctctcagatccagccagatcctagaacagagggatcttcagatgcatctacactaacctgggactgaaactgcccacactcccaacccaagactcctttaccatgaagccagcaggcagccctcctacctcatgacccctcagtcagttgtattgagtcatatcagggctcctcccaaagtcatcaattcttcctgagaacctcagaacaagcgccatgcttatccccaaacagcagtgtcaatggtggcatttcacacacaggtcaagagagctatttgggaaccatgatgggtgcccacctatttggcctccacgtgagggggatctaggccccctgcccccagtgggccccctttaggggaactgtctggccactccctccccacccccaccccccacgacccacttacgctcaggacccggcttgccagctggcaccaactccacgacaagttcgttgtcctccttgccccgggccagccagcggtgggcttcgaacttgtgctgctcaatcacctcctgcatccccggcccaaactcctcctcttcctcctcttcttccatctcctcctcctctgacgaggactcctctgatgaggacgactcctcttcctccccctcgtcctcttcgtcgctgcccttcctcttcttcttcttcctctgcagcttggccttcagccgctccttcttgagcagctgccgcagcttgtccttctccttcttcttccgggcctcctcctccggcgtgaggtccacctcccgcaccaccaggtgccgcagccacacggtgtccacgaaccagctgggcccaaagccctcgcccgtgtgcccgagccggagcttatagacctcgcccacgtcggccgcctcaagctgttcaaagggcagggcagcggctgtcgtggccccagcgtcctccccaacgcccccaacacccccgcccaacaaagagccaggcacaaggcctgtttgctaagctgcaggatggagagggctggggcctctgtgctcagatccttccaccacctccctctctccggccacacctgtcctgggtcccctgggattacctggccccatcctccaacaaagtttatttcttccaacttctgtgtgggcaagctggtctccctcttctctcttaaacacatatgcctgcacgtatacacacacacacgcacgcgcgcgcgcgcgcctcattcctatgatttctgtccctatcatggctcatacagtttccttacttggcctgcctttatccccctcctctacttgcagctaaaatctattcattcaggttcctgtgtttcatcactttttttaactttgtgcctctgtgttctctttacaaaaattttcagtgttaaccgtatataactttcgtaataagcaaaaaacaaaagtgctctttttcaataacaaaaatttcacccacacccacagaggcccaagctccctcctcccccaaccctgagcacatggcctcagcctgactgccccttccccaagagcagagagggggtccagggtttagctgtggtgccggtttggcctggatgccctcttcatcctcacaagctggtctctgccctcttgattatgagttccttaaaggcggagaccatcattttcagtc

SEQ ID NO: 1245195 - DNA, 4001 bp, Homo sapiens
gtgtgttcagaggcaagttgctgtgggtgggtttttaaaatgttaagcttaggatccgagtctgtcatctctggttcttaagatgtcaggggccagggatgtttgggggacagtggctgaacatgacaaaccagcccaaacccaggactgtctaaattgggaatccaagggaggacagggacaatgagtactataggagggccatctttaatgtcattactaatcactaatgagtgattaggactgggggccatctgggtatagtttgcagtgccacagcttaacggccatgggactttgagcatatgactttaccttattgtgcctcagtttctcacctgtaaaatggggatgataataattgggttattattatagggttgaggaaaagactaagtgtatcaatacatgacttatgatagaacaatgcttggcacaaaacaagcttctataaatgttagtgttgctgttattgccctccttaggttaagctgtgtaagtacaaggacccttgtcttcttggttatatcatctcttcagtgcctgagtcagtgcctggcatatactaggtgttcagtctttttttaatgttttgaaaattgactatattttattttgtaatcatttgagacttacagaaaagttgcaaaaatagaatagagcttctgtgcccccttcacctagctctccttaatgttaacatcttatattgccatagtacagttaatgaaaccaagacattaacaatgatacaataccatcaactaatctaccaaccttacaataaacaattttgagtaccaaatgaaagaaagaagaaatgttatgggtagaggtgatcaaggaatacttcctgggggaggtagatttgagctggcccttgaaagagaaaggtactgagacagaatagacaaaggcagaggaaggaaggcctcatggtctgcagcgggcatgtgagaatcagcctggctgaaggcagggtggggcagagggggagagttgaatgtgggaggggtgaggggcaggggccgcctccaggtacctggctttctttttgtccagctgcatctcctctgtgctcccgttgatgccgtagagggtcatgaagatgttggagtcagtgcccccgccaaccacatcccctgtccacaccgtcatttcatagagaacctgccatgagaggaatgcaggtgctgagtctcagcctcaccctccaaccccacctgacctgcctcagtctcaccagagaaagagacacactgtccaagttccacagctctggaaagagcccttcctcaaatcaactgtaaatgcctggacagcaaaaggcagccttgtcactctcttatataccccactgtgcccagtcccaccctagaaaggagttctgacagcccttctgcaatagaaacatgatggaaagcctggcgttaactgacgctgtcagttgaattccaacctaagtccaggcatgccagcagcgcatggtggcaggacagtggcctttggagccctccagagctccatgtgaatcccagacctgccacctgctggctgttagacccgggcagatgcccgacctcaccagcctctgctcccctgtggtaaaatagggataagctcccttgcagagtgagagctgctgacaattcgcatggcacctggtgctgagcctgccacctgtgcagccccaagcagcagccaaagctctgggtgtcagttccccttcatgccacagcctgcacatgccctgcagctgcgaatgaggggtgccatcgggagtgattcttacagagggagcactgcctcaatccactggagaagtgagacaatcccctagttccatgatgttcacttgagattggggttttgccatttagcctgaggtgtgctccaaagagaatgtctgccctctgtctccactggagggtgaggcgcagcctgctcttcctggtgtgccttcaccaagcccccacctcggttcttcctctgtgaggcagcctcgtggcaagagaaagcacttacactgatgttctagaatgttctttggtcccagattcttactcccttccttctcaccaagtgcccctggactcacagtgaagtctgaaggttcaggagaggctcagacacacggttggggaagggccatcttgactgtctcctttgaacgtacctggtccagtgtgtcccttctctggaggctgctacattcctctatcacctgtgcaggggcctggtccccattacccagaagcctggacctccaaaccggagctattaatcacagcggtcatgttcccatcattgtcctggtgggggttgcatgcttttctggcagcatctagaatctctgccaggacactgtgaggtttgaagtattctgtgcaggcctggcccgcaggagaaattcaggacatgtttgctgagggaatggatgaagagcctcttgctttaccaagaaaatccccttaggccacccaacaagggcattcatgatgggcaggaggagccactgggaacaaaagtgcgagcctgacacttttttgctcttatccaggcaggcataaaaaatagaatgatcaaaatgagtgcttcagctgccccatggagactggcccctgagagctggtccgtccgactcttgtgttctctgcatccatctttctctcctttacacagatacatctctttttatgtaataagtgtgcttccaaaaagagacagaaacagtgctcttgtaattctagtctgataccaggtgtcctggggagatggccagcccaaagaaccctgcagttctttgtaaagtgacaaacctgtgttcctttgtgccatggataacgggtgtaggtctggattttcctggactaaagggctccaagggagctgcagctgcactgcgtggggtgtgcatgtgtgctgggcggtggcacagaggcacacacaggctgggaagtgggtcaggcggaggtccctggatgaactgtgtgctcacccacaccatccgtctggccacagatggagatgtctggggggtaggggaaggatgtgcgctatagaaagtgctgctctctgagtctctagcaggcgagaggcaggagagtggcaggcccccacactcctgcctgtcaaggtttttagagccccacttctgtttccatatacaatgtaggcagagcacactcaggtccaggtgatttcttctcacctttgtgggacagcttctgacctggtccaagaagcccattggttttgattcagtaccagagataagggctggggccttctgttgaccccatagccatgagccaaaaagagaaacccacagggtcaggtgaaacagaggcttctgggccaccaaatggctgtgtgtcctcagatcctagcaccaggcatctgcctcctgcctggcctgacctgtgcgtttatataatttatcccaggtcatttgaccagttagagatggagccaggaccgaagctcagacctcttgccctccaggctttttcagttaaggagggtattgtgtggacaccattggctgcaccgtgagactcagagattcacagtatcccagatgccatctttcctatcaccactctactgctgttgatggtggatcctttggtgaacaatgaccctgcctgtctacatagagctgcttactcacaaagctcttcatgaattgtgatctcattaattctcaacaagaccatacatggaacaggccatgagtagcagggatgcattatttctaagcagtgtatgggaagaccaaggcccagagaaatgagatgacttgcccaaggtcacacggcagcagaccagaagagagttcagtctgcggctcctagcaaagtacatctggctagcacaccaggctgcagcgcctgcggatgccccagtgatgagtctcctacttcttccacttctgtctcccctgctgctccccacctcaacctgcactgccctggccatgcactgcacactcacagtgc

SEQ ID NO: 1245196 - DNA, 4001 bp, Homo sapiens
aaggataacacatctgctgcaatgtgtcatcatgaagatgaaattagttaacatgaataaagtgcttaactcagtgcctggtgcatggtgcatgatcctatttggcagcatcatgagatgaaatggggcgcttgcctcgaaaaagatatttgaggttcttgttgtccatcctgtttgtgaccttgctcaagtcacttaatgtctcagggcctcagtctttaacttgtgaagtggtgctgatccgcctgccttgactgtgctcagggatcttaaggatcaaacatgagaacattagtaaaaaggcttctgaaaggataaaaaggagaacgatcattatggccacactgaggcatgcagagcccgtaaacagaagtcaacagtgtgctgctggctgtgagaggttctagaatgatctcaccaacagtcacgtggctggggagaatcacctgggaagccaagcacacatggtggggatgctgccctgatgtctcacctcccagcccctcccctcacaagagggtcagagcttgaggcacatgtactgttagaaggtggcggatgcttcctttttcctgggcccacttcctcctactacagcccccccttctacccttggaggtacccaggattctgtacctggaaaggggccacagccttcctgatctcagctgagactacctcctctaagcccaggactgtgcaggggctgaatgatgaggactaaagacaagtacagcaaggccccaccctcacggagtttagggtgactgtggctgcaagccggacacagctggacaagctttgcaggaaacaatggaacaattatgaattggatgtaatcagggaactcatggtggactggaatcaaggagggcttcatggaagagatgggatcagaactgggctttcagagtgaggacaggaagagggagaaaggggaagacaaacaaggccatgggcaggcacagagcacacattcaataaatacttgctgaatgaatgaatgagtgaatgcatggatgactatggcgcttacggggactggtgagccactttggagtcagcattgagaatttaaatggcttcagagactaggcaggcagcactgatgagtaaaccagacctagtatgagatgacagggagtggtggagactgtgataagctggacgtccacagcctattggcattcacagaaaaaaggatttcaaaacgctggaaaggaaaaaaacaacttaaactctgctggccaaaaccagctctagggtcacagttcacttctttggtttacctggcaaggagttagagcaatttcaagcaggtctcatgtggcccagggaaagatgagactagaaggacaaggccctggggtccagagcaccggccgccttcgacatatgggatggacatctccttgcaaagccccaggctccctgtctccatcaaccacagtgggcataggatgagctgtcaggcttcctccccaagacatcctttcatgaccccagcagttcagggcgctctgcctgatgcagaccacctactcggggaccagactggaacgtggctttggggatgttcaggagctggagaacatggggccatgggggcactgtggctctagtctattctgttccactgagaatcgggggctaaaggcaagttgctccacctgtctgtacaacagggaccccaccatccctgcataatgcctgccttcttactccgaggggatatggaacagacacatgggataatcagtgaggaagggcttgctccgaaatcttagaatgactccccatagacaggaacagacccctgcccaccgcagccagctgcaccacccgccccccgcaggctgggaccccgcacctctggccttgtagtactcgtgttccagctccccctcgtcgtcctccgaggcgtagttcagcagctccgcttcgtacagggccaggaagtcgatgtccttcttcctccgccttttcttctggggcatcattctgtcggctgccttctcccagcgctcgcaggctcactgtgccgcctcctcacacctgcgggaacctgagacctcctccctgagctctggcgcccacggccctcctatagctcaggcctgggtgggccagagtgccccgttttcttggcttccccgtgcccaaggtgctgttccctctgccttctctggctcctgagctgaacctcagtgccttatctctgaacctcctgtccctgtcccctcccaccaccctctggtgagccacctcctcctcctctgtacctgccccggggcttctctttgggcctcatcacttattcatggcgctgagggcaggctgacttccttcctctctcccctccccaccagccctctctcctccctatggagaatcaggtgacacggagcccttgaagtccatttcccacctggcctcacagccagggggtcacctgggatccctccaggccaccccagggacaggtgagggctcctcacccaggagatctcccaagccttacagcccacacgggaccctcctgaggaaggcggggccccggaatcagccaggctcccaggactcaaaggcccccgtttctctccattattcatgacctctgatcgtcttacggagcaggcggggttctcgctggatccttctcgttctctctctctgcttccatctcatcaagactgcgggcttccggaagtggcctctgggcacgaggaaagctagggcaccagaaaactctccccgctccccctgccaggtgagctttatatgcactaaagtttaaacatcatcgtagccgatgccctcccaggtgaactcactaactagatcagctcaccacctggactcacgggagggcatcagcaagctcctaccccagggcgcacagcccgggctgcacaccagaagcccccagagaggtgttgaacgctaatgcgtgggtcccatccccaaggattctgatttgcttggtttgggacgcagcttgggccccagtttttaaagctcctggtgactttcatgtgcagccatgttgagggtccctgaatcgcttctcaggtaacttaggtgtgctaacaggagtcctctagaagcaacacgtgtgattttgtcctctaagccaaaatagtgactctaaaggggaatttcaggtggagaggaagagaggatttggagcggacgcctgaggagcagtcggcactcacaggcctccccggcagcctggggcagctttggtcctgccctgctctttggagccatccaaatcttccactagggggaggcatctctaaccccgaacgttcctacccaggaaagatcaacctcccctcttcccctattcagctgaggggccgcccttgaagcagctcaaagtcctctgaggaccaggagtgaagtttaatggtgggtggcgcgcgcccccttctggcaatatgtggtttacacacctggattcttcaggaagagaccttccttaaggatctctaggaatctactaagaaaactcattttacacgagtacccattcagggaaaagataataaaacgtttcttagaattttttttgagacggagtctccctctgtcgcccaggctggagtgcagtggtgtgatctcggctcactgcaacctccgcctcccgggttcaagtgattctcctgcctcagcctcccgagtagctgggattacaggcatacgccaccatgcccagctaatttttgtatttttagtagagacagggtttcaccatgttagtcaggctggtctcgaactcctgacctcgagatctgcccacctcggtctcacaaagtgctgggattacaggcgtgagccaccgcgcccggctgtttcttagaactttaaaagctgaaatcaaaatatttttagagaatcccatggtactggaacacactggctaggaggtcagggaaataattctatattatttctgtattatttcaaggttctccagacagacagaaccacta

SEQ ID NO: 1245197 - DNA, 4001 bp, Homo sapiens
ttttttttcttctccttcctttctgactgagaagttgagcagagacagatgcccaaccccagcttccaccagcttcctgctgaaaatcaagagcaaggcagcccaccaagtggccccggcaggattctggccattccccactacacatgggttgccactgactgcttcatttggaccccagggtgagcaactccctcacgcttgtcttgaaacacacatgtaataagcgtttagtgttagtaatagtgtgttactaaaatgaagattcaagctgacagcaggggaggtggattccaaaaatcacagttaattaccaaagccgctaagccaagttattcaaatgtcttattaccaaggtatagccataaaacttactgctccaggctataataccttcaaactcttcaagttttaaagacacattatacataggattctgccaactggaggctatctaccaacttgtgagttgtttcatcatgaaggaggcaaatggtaggtcacgagactctgggtctcattgagaagtataaaaacttaccaagcagtgaagggtattggagagagaaaaacaggattttaaaatgaagattccaaaccactgcctaccaatctggcacggcaagtcgggcaaatacacactcaacgacagtcactggggtcggagtaaaaagaaatggatttaaattaaagatggaaagacttaaatcagacttaaagaaaagcctcttgatgtaaattgctaagcacctacgggagataaccaaatctacctgttaccactaatctatcaactaacaagacaaagcctccagctaggcgttactgtgctgatatatattaggaaataagtacccaaggcatagaaaaatcgctgacacagagaaccaagccataatgtaatattaataaaagtaaacatttgaccctttaccacctctaacacgtggcaccaccaggaatattcatccatgcctcaccattcagggaaggtaagtgagctcactcaggaagtgccaccgtcttccaggtcactggtaaggacaaactgcctgctgcgtctaccttcattcaacagacctcgaccgaatcgcatcccaaagccggctatgtgcttggaacttactgagcagctatggagtttggctttcaggaactctgggtccagtccttaaaaccaaaagtgcaatacagggcgatgagaacttctattgctacattctcctagcaataaagaagacaaagccccagctgactctattatttgcttcttaacagtgctttactatagtattaaagggttttcaaacacttcatttccagcttctcttaagcataatgcgtgcctattgactctcgactgtgccatcaaacgttaaaacagaacctgtcgtttcatttctagctttctatggctacctctatcaaaagttgggcatggagataccttaagtctggctggggcggttgctcacgcctgtaatcccagctctttgggaggccgaggggggcggatcacctgaggtcggcagttcgagaccagcctggccaacatggtgaaacccccggtctctaataaaaatacaaaaattagctgagtgtggtggctcatgcctgtaatcccagctactcgggaggctggggcacaagaatcgctttaacagaggaggcagagattgcagtgatcggagatcgcgcaactacactccagcctgggcgacagagtgagactctgtctcgaaataaaagagatacttcagtctgacataccacaatcaactacaatgtaattggagggaagagccgatgttggacggctatcacacgtggcttcacactgttctttttcttctctggctgggtacggcctgaggatgactgccctccaacaactgaggatgctgcaggaggaccagcccagcacctgtctccatcccctgcactgtgtggccggctctgccgcttctcccccgcttcagcatcacctgccacttcttctcaatctgaagccactaagaacgatcaacaccagaccgttaaaacataaaccagtatgggccactaaataattcgtaaatatttcaaaatgtatttcaaaaccgactttgtattgtcaaaacattataatctagccaggccaagttttaataaacagtaacacccatcatcactactgggtaaagaacttcattcaacaggacctaccttgacaccaagtctagagcctcgttttcaattaaaaaaaaaatgggtaagccccaaatgtgcattaaaaattagtttggccatttactaagtagtccttcaaagcatttccaagtattcagagttccagtacttttcggaaaggaagggtgatctttctggtactggtttgcataattatgcctaaaaaatgtcatcttgaattttcaatgaaaagagtcttaaaatgttcaggcgagtggagaaaatggtgatccgctggcgttagaagtggacagagaggctctcagtacaaactgtatctgaacgtgttcctcacaaattaagatctgcaccgggggctggggggctttgagaaaactaaccacatttgaatccggtccacacagcttgaaggcggaggtacggggcaaagcgcggcggggaagaaacaccagcaactcggcggcccccgcctcgccgcagatcacgtgcccggcgccccctcccgcagggccgggggcgggatggagacgcggcctcccgcgcgccttccgcactcccctccgcgccccaaacccaggggtaggggtggtctcgggtaaccatccccagggcggcggcgagggaactgcgcgggttcagagtcctcagcagccaccactgacgccccgacgcccccggctccccgcgcaccccgccggtccgtcctgcggcggcggcggtaggggccgcgtctacgtggcgcggtcgcggcgaggcggggactgggacgcgaggaccgggaagcggggaccgcggcgcgaggaggggcggctcaacccgcgccgccccggagggtcccggcctccggcaggacagccccgggcccgcgccaagggaagcccccaggcgcagacactcaccgccagccccggagggacgcctgcgaggagcccggcccgcgcccacttacccacaggggctccgctcccggccagcgggcggctgagggcaggcggcggctggactgcgacggctaggacccgccggggagggaagccgagggggcggggccggtcgggggcgcgcgcggggtcggagcgcccgcagccgccgctgccttggaagccgcctgggccgcagctgagtcgggcggccctcatgaatgggacgccgcggctgcggcggccgagccggcagctggcgggcgggcagcgcgcaggccccgccccagccacgtgacgcgcgctcccggccgcgcgccgcgcccccgccgccgagcgccaggcgtgcggcttctcaccgctcccagtccctgggctgcgcgcccgggcccctggccaagtgagggcggggcctcgattttctagtgcctcgggcgacaggagccttactttgttttaaaaaaaaaaagtttcttccggtccccatggcaaccctgcggcaggtcacgtgggactgagagcccaattgccaaaaaggaatgttaaagtgcaaaaaaagtctagggaatgaatgttttataatccccttttgatcactagtagcacatctcctttgcttacttacatctccaccgaaaaaaaaaaaatcctattacacaactcatttttaaaaatatgccggggttctgttgttttttgtttattctttttatcgctctgttaccccggctggtctccaactcctgggctcaagcatccccgcacctcggcctcccaaagtactggaattacaggcatgagccaccgtccccagcattaaaatatactttttaagaaatgggtggctcacgcctgtaatcctagcactttggaaggccgaggcaggcggat

SEQ ID NO: 1245198 - DNA, 4001 bp, Homo sapiens
gccctggtgtctgtatttcactaacagctgtgtgctcttaaaataaaaaaacaagcttcgtgtttttatagagacttttttccaaggagcttttaaatgtcactaaactcattttttttttaacgttaacatgggaaagtcaatattaccctcctccaaattgtaaaagggtgattacttttttgcatgacttgtctatgtctttcccctcttttctgccttttggtcattgttggccaaattatcccatttagtagtttatctctgagagggcagatgtagtcatggagaagtgaaattaaaatgggatcatttgatgattgcctagtgtctagcaaagaagttcaaggacatgacaatgagtgggacaggactgggaaggaaggttgaaatacacattatatcagttcatatttaatatctgaaagccatccttctacccatttactcaccaccagacataagcatgagtggcttggttattcctctgtagccgcatgaaagaaaaatttcctatgattgtcccccagaactcaaggcgaaaactctgcctcttttggtcactggggacagagcccactgtggtttgccttttggtcccaagtaatgtttcacagaggctgatggaggaacgtgtcttgccgttgccacctggccacaggttgctgattcaagggcagaaactatctgaaaccaggtttcagcacctcatactgtacttggcacacagtacttagcaaatatttgccttttgaattacattgaattcagacctgttaggtgtccactctcccaagggctgaatctcactgctcctcagaagaatcagaactgttagttctctttggggaaaaccaaccccctgtttcaatttatgtttaggatgagatgaacatgatattccagaggttattaagaacatacagagttaaaaacaatcacctccttaacgtggatgttcaacagcgacttagcaaatattaacaaaggtattgtcagacactaaggatgagagtagaaagctgagacgagagaagtaccccggttgacagagtccagatgagctgcctcccatccaggcctccgggacccaggtcaggtgtgttttttgtccttcaggtagccgaagagcatctccaggcccccctccaccagctccggcagaggcttggataaagggttgtgggaaatgtggagccctttgtccatgggattccaggcgatcctcaccagtctacacagcaggtggagttcgctcgggagggtctggatgtcattgttgttgaggttcagcagctccaggctggtgaccaggcaaagcgacctcgggaaggagtggatgttgttgccctctgcgatgaagatctgcaggctggccaggtgctggatgctctcagcgatgttttccaggcgattcgagcccacgtgcaagaaaatcagttccttcagggagaacacacacatggggatgtgcgcgaagaagttgttgctgaggtttagcttcctcagtctagagaggtcggcgaagcatgcagggagctgggacaggcagttgtgcgacaagctcaggacctccagctttcggcacaagctcagctcggccggcacctctgtcaggcagttcatgttgacaaacaggaccttgaggcactgtaggaggctcacttctctgggcaggctcttcaggcggttcccgcacaagttcaggaccacgatccgggtcagtttccccacctcgggagggagaacccggagctggttgtgagacagattgagtttctggacctcggacaagccccacagaaagtcggggatgtctgtcattcctctcgtgaccaggctgaagctgacgtggtgcatgccccgcttcagcagggaccgcgggtcccttcccgagagcagggcatcgtcccacggagaaaacttctgtctcctccccgtgaacagcatcctcttggggcccttatccttggagctggcccttgactgcctggcccccattgtaccttcccttctagtcactctcctctgccacctcccaggcagggaccgtgtcctctcagctgctaaaagccaggctgttgcaggcagggagtgtgcgtcagggtgagaaccaacttgtgactaggaggtcctagtgtggagaaagctgccaggagagtcttgatcaggccttgcaggtatctgagacaggtccctgggtggctgcaggagctgtgcctgttccccagggtttaggtgttttctttcttagcagctgggctgtaatgatatacttgtccaggaggctgctaaactgctcaaatccctctgaatgccacaaggcagctgtcactgtcactctgcctgagttttattgactgggtacatgcaaacaggtcacaggaaggctgcatataactttactctctcagcttttcttgggtatcacagttgagcagggtgattaacaagcccatctctaaaaagaagtaaaatggaaaaacagagcaggccacacaagtacggactgttggcaggattgcgggagctcagccagacaactttacagtgaaactgggctgggtgctagtgacagttatgtctccaaagctaaagatcatcagatgatatcataggtccctgttccaaaccttgatgaactgtgcgtttgtgaaaagataacaaaagcagcccggatacctggaatcttccaggtcaaaggtttttatcctgtgcttgtcagaggtgatttagtgagaagggagttgtggggggatctcaacccctcactcccatttcatccagagaagctctgggctcatgtgtcttacagagaccttctgtatttagtaggatgcactttaagtgtttgaacagtcacttgagtggccaccttagtatggtaagcgcgggccacctattgtcctggaaggatatgatgaggcccccctcgctacacaccgttctctttctctctctctctcttctcctccctgtcttttatttatttttatttatttatttatttatttttcttttatttttgatggagtttttgctcttgtcgtccaagctggagtgcagtggcacgatctcggctcactggaacctctgcctcccgggttcaagtgattctcctgcttcagcctcccaagcagctgggattacaggcacccaccaccatatccagctaatttttgtatttttagtagagacggggtttcaccatgtttgccaggatggtcttgacctcctgatcaaggcgggtggacctgcctcggcctccctgtctttttcttgaattaaaaaagttaacttacatcttaagtttgcagagttaattgttggtgttatgggctgaactgtgtcccctcaccctgccctcaaatttcgtatgctgaaattgtaacccccagtatctcagaaggcgctgggtttggcaatcaggccaagtgaagacacagggagaaggcagccacctgcgagccaaggagagaggcctcagaagaaaccaacaccttgatctcaggcttccagtctccagaattgtgagaaaaatacatttctgttggttaagccacccagtttcttagagcaggtctggcaaactaatatagttggggaggaggcggacacacatctgcataggtgaaaaatcctaaaaataggtagtgattaaggggacaagggatatcaaggagctgacctaggttctgagcaaagggcttgtggcccgtggcaagggctggtttggcctggaagggtgagatttttgctgctatatatcctggagacccctgctgctcctgggaccctgacctcacagggctgttgctaccaacccaagagttgtcactgggtcctagctgggtgctgcctggggagcctggaagtccgtccgcatccagggcgcaggatctgagcaggaggagcagcagagttaaaaacaagaggaggccacttctttctccgcacaccgttggaaagagatctgacccctttgactgagtcagccccag

SEQ ID NO: 1245199 - DNA, 4001 bp, Homo sapiens
ggtacataccatgtcctcaataaaagataaaaatccattatcattcatacccaacacagcatttaatatgttattgtaaaggtccccaaataatagtccattcctggataaacccttatgattaggaattgaatatttgttagttttttatcttctaaaatttctagcaaataataagcacttaataaataccattttgaatgaatgactttcctctcatcaagtatttactaacctctatacataacagaatattaagagacagtttttgttcttaaggcatttataaagatgtgtacaaataattatactgtaagacaaatctttgtcatttgagaagttcaaaaaactgctaaggggttcaaaggcaggccaaagttacaacaatggtataaagtaatggttctaagtggggtctgggaacccctagtgcagttcctgagaccctttcgcggggtccacaaggtcataaagatttttcataacaatattaagactttatttagctttttcattcattctttcaggagtggacactgcagtttccagcgttctgtgacctgtaatagtgcgacagactgaatgcagaagcacataaacgaatccagctctgtgattaagccaagacattaaagagatcttcaaaatgaaaaccaatgccacttctctaatagacttttttgttttggaaaatttgtttttccacgaaagtattatttctgttaccatataatgggttattctttttaaataaattaatattttttaaatgtcttagctttaatttcaaaggtggtaaatatcagtatgtattacatgtatgtattatctctaacccacataagagctctctggggtcctcaataattcttaagagggtaaaggagtctcgagaccaaaacttcaggaaccctaatacagccattccaaacctaacaaggaaaatagttttacttcgagtttcatgttcatggtgaagtcaagaagagaacgtggtaacctggtttgatggagggagatgatgagttcggcgtcagtctttcccaataccttgcaaaatgttcatgaattcctgcaccccaccctctgcattcatcacctcgcctgcgcttcttcccagccttccttaggtctcccagagcagtgtccacatccctttcttttgcattttaagtcctctggatgactgccccatcctaggggtcccctgacagctttccttctctcactatcctccggggtcaacctcgacttctccctttcaccaggggcgggggtgggaacagggagcgaggcagccgctgggccacttttgcctccaccctccagagccctgggccccgctctcaaaccccaggcgttccggggagctgctgagttccgctccgcctcaatgaccgaagtcctccccacctccgctcactcacgccggcggcccccgccgcgctcagccccaccgacagcgcccccacctccccaccgcagcccaccccgctcgacccgcgcgcccggcctgccgcggccctgagctcacctgaggcggaggcgcccgcgactccccgccagctccgccagtctcctccagccccggccctcgggcgcctgatccaggagctcgctgagcctccgcagcagcggctcccgcaggcggttgagggtcgcgccggccggaggggcgagcagcggccccgtgggggcggccgagggcggcagggcctgtagcgggtcccccaacagcgacatggccctcgccggcgaccccggactgccggggctcccgcccgccccgtcacgggcctcggccccggggcaccttccgctcgcctccgagccgcggaggcaggggcggaagaacaaatctggcagcgcggcacggccctcagaggaggaagctccgctccccgccccaattagacaggtttgccgaggggagcctggcctgctggccgcgccagccgcgcaaaggggcggggcacccggggggcggggcacggagcctcgaggggcgggaccttgggcctcgaggggcggggcggggctgcctactgcgtgcgtgcggctgcgcgcctccctcgccctcccccgcggtcccgggctggccgtggcgcgcgcttcaaacccagccctcccgagcaggaaaggacgggtgggtgcagctggaggaggaagcggtggaggaattacgccccggcagctcctctacggcggggaagcctgcggcgtctgggcttcctgagaccgtgggaggaggcctgcgtactcacgccagagagcggggcaagcggttctcagtcgccggctcccgcccgcagtccccggcgagcgctctcccctgactcagggactttcatgtgcccggcgacacaccagcatcctgcagtgggcaacctcagcggacgcttcctcgttttagggttagatgtgtatggcattgctagagggaagtagtgctggagatccggatacttgagttggaattggccaaaatctttgcctagacttttaaacaattactactttgcaaactgagctgtggcatatttagggctaatcagatcttggaaatgattgtttttagcaggaatcatctggtttacaccgcgtcagactgccgcccgcaatctccgtcatcaaagcaggcaaccctgtagaggatgcctttccctggaatgatccggaatggacgacacctgagctctctctgccaatcttagcaacatccaaggccattatccctttgaaaactatggcttcgtttgggacaaaaaggaagtaacttacgaaatgtgaccagtcaggtagttccctacacgaggcttcctggcccaatttctgttgccattagcttttcatcacccaaggccgcaggattttctgaccagtaatttggatacctatattcttatacatgttggcgaggtaggtgcgccatacagtctccaccacattctagcacaagcagtcattaaacttcactctagcataagttaagaattcagactgcagtgagatggctaagagcatgaaagatctgctcgattcaagtgttaggagcttgaataagtttcttaatttctctgcctcatctattaacacaggactgacaatacagtttatatagagttgttgccagaattaaaggagttgatgtatgtgaagcacttaactcggtaactggcacatcgtagatgactcagtaaatgctattacccttacacatacaagtgccgtttcatactcagtttgacttggcaagcctttcccaaccgcttcaggtgccttcctgttttgtcctcaattactgtacaaatattttctgaggatctgttacctgcatgtgccaattatggaaataaaatcttctagtctttactggaatcctgccttttaatttaaattcaacagaggtcttctaaatttagacttcttagaaaagtctgccatgtacaaagcgttgcttatgcaacctctcgtgtgcatacgagttaaatgggtgccagtgttatttactcttagccaatatagctcagctgggcactgttttgacctcgagttgtacgcccccaccctggcttcccaagtgactgcctccctcgttttaccctactcccaacctttttttccacctagcaattttataccctatccagtcactacccgccaccctccatcctctacccaaactgacattaccttttttgactggtctttttctctcctcaatcaaatgttaatatttctatgacataatttcactcctgtggttctcttatgggcataatggtatagtagaatgtgacctttaaagttagtcctgaattggaaacttgatgttgctgccacttactagtctagtggtggaacttaggtgatctacttaacctctctgagcttcagtttccacacctgtaaaaagtggaaaataatagtacctaatagtgttatatagcgtcagggagaagtatgtgcattgtatattagtactcttaaaactgctacat

SEQ ID NO: 1245200 - DNA, 4001 bp, Homo sapiens
tgctcaaaagcagaattctaggagttaggtcagttgtctagaacttctggatcagatgatccaaggttgctttgttatttagtttaaagcactgagtattcccacaatagctgtttaagcacggtatgacagtagcattaaaagggaggtgtctttttgtctgtctccagcatggattctctgtccctttgagcattagggctttgccttattgccctttgattccctgtgataactccatggtgctttatgcaaagaggctgacttttctaatgcaaggaaactgaattggaaagaggttccagagcaagcctttttactattcagccctgctcctgtctgacaaaccctcaagcatagaagtgtaccctcaagtgtagaagactagcccttcatacaccacacaagcggtttggaaaggttaaaacgcaggtcactaaaggagttgaagactcgaggttcagaagatattatattttctctcccttgtttctatccgtaccccaaaagtacactgggcaacccttcagcaaaaaagcctttagtatttagtaggtgctcagtaaatacatattacaataaggtcatagcatagctatcttgaacatagtaggtactcaataaatatctgttacattgagaacgtcatgacgcttcaccttcgcacggggtaggtgctcaatacatatccattcaattgaaaagtctgcagtatacctgcttttcacatagtaggtgctcaataagtatattttacattaaggttatttaagatagctgccttgcacacagtaacctcccagtaaatggctactgagcagttgtggacactcctcaacccaggcaggggtgacattaatcaacccccaggcacagatccatgaatggaaatgcacgtctcgaggtagtgctttcgagagtgctggagaggcgcgtgacagtacgcggccgctgcgctctgtcgggacgctgctgacccactgctggctccagggtatcgattagcgatcggaatccattccccacccaggggcgggaaacagccgccgcctccaatggtcatttcggggacgcacctggaactcccgccacagccccctcccggggcatccgcccaccccggcttcacctacgattccgtagagtagctggcagaacaaaagcaaaagccggcctgacttccgattgctttcctgatagagagcaacccgggaggaggctcagggagccggcccgggacccagctgggatgtcaaacccgagccgctgccctctccggcaggctggggctctgggtcgcccagcggcgaaagcggcggggtccccccactccccctctcccaggggctacctaccgccagtgtaggcgcctctgtcgggtggcgaggggagaggacgctgtattaacccttcaacgagaaagggagaggctggaggggaggataatcgggactgcgatccgaatctgaactcgcagtgtgaactgcccctcggcgaccccaagcgctccggactgtccccgggggtggggtcccctagcggcgcccggcccctgcgtcctcctcccctaaacacaacgcgaggagcccagcggcaacctcccatcccaaacgggtccaggacagcaccggcgcgcggtctgcaggcgaggagctcacccagggcagccgggcgggtcccgcgggagacccccgccgctcggaaactcgctagtttggcagtggcttggcctggggggcttattgttagggtaaggtggggaggcagtgcgggcggggaagtctcatctcttccccgcttctccggagcccgccgaactccgagaggcgcaggcggcgggaggagaaagccagcggaggggagccacttaccgaggcagagcccgagagcgtggcggcccgggcgcgagccgccctttgtctgcggccgcggcgccggcgcgctcggccaggccggtcccagccacggcgcacggcgagctcccgcggtcgccccgacagcccggctcgctgctccagctcgggctccggctcccgccccggccccggccccagcctgcgccgccgccgcctcggctccgcccagagccgggccccgcccccgcccactgggcccccacctgctgcggcggtggcgctggggagccgggccctgggcgcccgggggcggcagtctcccgcgcgccctgctctgccctcccgcagcctccaggccgctcagccgcgcggtcctggggccttcccggacccagtcccgcggagacgagctcacctggggagccgagccccgtcccgggtagcctggccttcccggggcacacgcggtagagctccagtcactcagaagcccttcctcacgcccgccgtgggtgggggatcctcgggctccgtccgggagggagggggcgccgagaaggcgggaagcggggatctgcctgagcccggtcgccgccccgccagccccgcgcggctgcagccgccgggggcccggtgggagggtgggtggggagaaggagccggcggggaccggtgggctctggaaccggggagacccgcgcgcgcgggaaggggcactgggccgagggtcgagggggcgcggagcccaagtgcaccggtccccagccggcctgggattccgagcgggccgcctgggctgtgaatctgtgctcattggcatgaccggaataaaactaacaaaagagaaccaacactttgggatccagaggaaagggacagaagaagccactggaccctaacactggtaataactggtgcttctgtggtgccttcagcgagcccagagctgtgggcaccgatgagggtcgtcactgaacgcggtgcgtcccgttggaatggttgaggcgctgcttttctaggcatagaaaagtctgataacctaaatattgcataatgaggtcactggtggctttagctgcccatgagccttctcctctcccaactcccaaagccttccgagtgagacctgcgttttggcactttcatagggtctgctgtgtactgcagttattcccgcttcgtcccccacctctacccccagaccctaatacaattccagacgcttaataattgttgcaagaattcgctgtcgaattttagcgtgggcaaaacataaaaatgaaggattgtgggatcatattggaaaatgcactaagggtttgcacagtgatggtggtatgaagggtaatgagtgttggctgccattagtacatagttgcgctgcgactcctatgtgtgcaggtagtaggtttaggatgatatgctaagttagagactgcagttatcaggaccttcattaacctcagagaatagttagggataaggaaggagtgtgtaacaagcgagtgtgtgtatatctgtggtaagacattccaatgtgtcttccccaaagagaacattttaacattttgcttccttgattttcattacaagtagtatcaattcagcaagtaggcataaatatgaaatgttttgtgttgatttattcatttttataacatctcttctatgaaggaagaataagaggccccaaggctgctcatttaatccaaaagaaacagaagggcaaatgtcccgccactttaagcccactaactgcaaagtgaggatctggcgagtccgaatgaagagactgacccccatcaacacctggaaagctcagagtccccctccagcgtgtttttgttttttttttttaatctgtttatcttaggtctggaagctgctcttgagagcaatgtgcttgtccacgtgagataatttatctcttccatttggcaactgggaaaatgtaattttctctgtgtgatgagcatgagtgagtggttcatacatagtgaatggccatcctccaaatcgcgggacaagagactgtgaaatatgcatgtttaatatcagtgcccattaccgtacgatggcaggggaatgaacaggaagcgagtatctgtctggggctctccactgtcaggtaaagtggtgttctgt

SEQ ID NO: 1245201 - DNA, 4001 bp, Homo sapiens
ctatttctcactcccaaacaacctgatttaaatagtttgggatgtgatcaggacatcaggagttctcaaagctccccagatgattccactatgcagcaaaatttgagaaccagtgctttgaagaagcatagctctacccacgcaaggaaaatttaccagttaagcttatctaccaatcactcggtgagctcccggacctcttatcttacccctaactgatgtctttaatcagtttggcagaaaagaacgaaagcaaagtaaggaagcatttcatttccagaggggacactggctaaccaagagccatacccctttttgcttgataaaaatttggccaaatttagcgttcaggagaagcaggggaaatgttgccattcttcagattaccttttgatctctgttctgtttcattccacagtgtcctattcagcaaaagtgtaaatcgcgggtcctcagattagaagtaggtgctgcgtctgaccacaatcgcaaccggtctgcacacttcaccccagctgggaccgaacctccgcctcgcagcgcggccccagggtcgatactatgctaatcaaggaagttcttccgtttcggtgcgcgcgggcgcgggtttgagcgcttaacccttcattctacattgacagcacgatagtatttttagtgacctcttcctgcctagcgggtctacactattttccttttgttcttctttttttggaaaaggagatgtgaacaagtgatagagaagacaatcagggaggggacagcagtgttggctggtgcggaggtgaaggaaaggctaatgttcgtaatattaattactcccagcgctactgacccagcgaggactagcaggaggggcttgggggttaagacaaaggcttctcctgatcaaatggctgcagcgccccttctccgaggttacggctctgcccttggcactgtattgacgaagtcactggaggagtgaccaaacccactagcccttttggggtctgaaaatcagctttatcgagcgccccaggttcagaggggaccgctttccgcgtccacccctctcctggctctttgtgggatttctggcttccgcatagcccttctaagggtagaccgaagaatttcccactaagccgagtgcgaagtcgctgagtagccctcgccctgcgctcccggggctccctgcagaagagatgcttgggcgcagaataacaacccgcttccttttgcacccacccggctcctgagtcccgggagcgcggatggtggccggcgtcggagtgggagagtggtggctgccgaaggggaagtgcccggggtccaggggatgctcccaagcgcgcgagcgccagcgcgctgcacttcctgatctgcccccaagcgcgcagcccctgccagagcccccagctctctcagtgccggcgccccagctagagcctggagggtcgtgcgccgcggtcgcgcagtcgcgagcccccctccttcaccaacgccgtgttcctaccctggacagccccagcctcacccctcagaaccagtccacttcgcttctgccagcgtggcagccccaactccctccctccactttcctggggtgcacagagctggggcaccgaaccagagatgtggcccgcgggagagcggcggggtgcacacccggagaccgcctagccgacccttgcacaacttcttgctagactctggacccccggttccggttgctccgagccccgcgggctgcagacctcagcggcaggaggaggcgcagccagcccctggcctgggagggactgcttcagtgcagggggtgtcggggtgcgccagggcggtaccgctttaaatgcacttgactcacctgctccggcgctgtcgcctccttcctctgctgacagctgggggctttgttttctccacccacccggccgccgtgctccgcctcctctgtcgcacgtgactcgcagtctgccaccgccgccgccgccgccgctccgggagtccacccgagagagtccggccagcgccgccccttcccgcgggtgcgggtgcgggtgcgggtgcaggtgggcgccccactgggcaggtccgagccgacccgcctgaagacgctgtctcaggccaaaggaagccaggctgaattcgtgacagggaagaaagtgccagcgggtgaaataaactaagtggtttgaccccgctcgagagggaggaggccggcgcggcttgcagagggggcttgaaaaggcgccgccacactgtgaattaattacctgcaaacgggggcttgcacaccaactggggtgcatctgctttttacacccagtgtttgtactcctacctggagcacgattgatgataaggggcaaactagttttgtcatgaatattactaattaaactaggcaattctaatacaattaacaatttaataatagcgtgtttttggggggtttcaaatctgcttgttgatgctgttgatatttgggttctatttggaaaatggagtgcaggctggagaagcgaactccagaagtctactgatgtgggcgcttgtccatttggaacagcagctatttttaatgaaatgagaaaatgttctggcttcaagacccagctcaagatctgctgcttttggaagtggtcccgaccggtgctgatcgcagtgatctctagtgtttgaaacagcaaggatttgtctgaatccttctgttagcccttggaaaacgcattatataccttccctcctgtgccctacacattgctactcaggggaaagattgtccatgtctcccccagcgttcgttaaagccaagtcttcgtagtggagtgatttagcacagtgcttctcaaagtttaagagggatcacctggggatattgttgaagccaaatttgagcgtgtcgagagttaggcctgagattctgcatttctagcaaactcccagttaatggcattgctgctagtttgaggaccacactttcagtagagaggtgttgatcgccgctttggcattagccagcctattttgagtcctgactacaccacttgcaagctatatgatcttaggcaagtttctcaacatttaagcctcacatactgtaaaatagggatgatactaatttccacctcatagggttgtcttgaagattaagtgagaaagtccatataaggcacttagtgtagtgcctggcacacatacctagggttcagaaaatgctagctaagtcactgtagaggtcatccttgcagggggaaagctggcaccaagtgcagcatggctgcagggggagcaatgtgtgaaatgggcacaagggtgaggtagcctgcccaagaacaaggactgtgccctgtagtgcctagcatgtgccagatgtataggataagtttgatgaataaataaatgactctaatgtggaacagatcgtatgtgttcaaaaagttctgcttctcctttaaatcatgataaattagttctgagacattgaattaaaaaatcattttgctttctattacagataatgtccagctgcttgtcacatgggtaatctattttaatatctgagacagtacatggattgttaaggtttagtacattttttatcctcagttaaaaaccttgaaatttaaatttaaatgaatttattaatgaagatatggtattcttagctctcaaaatgaatggctgttgtcatcatagttctcatatcttccttccttacttctccttctctctctgtcctccaaatatgagtgtttcctcagactaatttcttgccttttttcccactatgccattttctttagaaattttatgtgtgtcttatgttcatctttcaagtgtgagcggattacttctgaatccgtacccacattcttaacccatttgcaagccttatttctgcctttcccttagttgctaggaatttccattttcacgagcttttaaaattttatttatttttccacttgaactatatttttatttgtgtaaatgtatggggtacccgaaagatt

SEQ ID NO: 1245202 - DNA, 4001 bp, Homo sapiens
aagaccggcctggccaacatggtgaaaccccatctctataaaaatacaaaaattagctgggcatgatgatgtgtgcctgtaatcccagctactcaggaggctgaggcaggagaatcgcttgaacttggaggcggaggttgcagtgagccgaaatcgtgccagcctgggcaacagagtgagactctgtctcaaaaaaaaaaaaaaaaaaaaaaagaaaaaaagaaaaagaaaaagaaaagaaaagaaattgaggaaggggaagaaagcatttagacaacagtgcagagagtgatagtgatattaaaaatagtgaagaggtattaaaactgaaagaagaaaaagaaagtttgttttttgatgactctaagataacctgttaaagatacagagaaccagagataacaggttatcctggagtaatccttttgggatgacagttttaaaggcaagaaacctttggttaatagccaacatgaggttttatataaaatgttaagtgtaaccatttctatttaaatagatcatttaattcactcctggatgtataatcaagtagtatttgacttttttgtatgcaaaatttatgtgttacatattcatcctttctgcttcacataactgaaataacccaaaccagtttacactttcccaacagttttttttttacatgcttcccaccaagaaagttacaggatgtctagttagctttgtgtttccccttctaacagaagagagcattatatgaaacaggcagaatggtgtgctacaaagggagtggctcctgcaagcaagtagatcctgatcagatattaaatgtgctttcaaaggagtgcagtttgtgcgtgtcaacaaactactcgctgtaattacttcctattcactgggatcgctgtgcagcctgctgactcaccaggctgctggagtatgtttctgctgggttttcctactgactgctacacatgagtcatcacaggaatggaagtttctatccgtctcccttaacaacagtgcagaaaccaggcattgaagtaagcttcgatttttccaatcagaccctagccagggaagggaaaaatgttgtggtaggtgtcaccaccagctaggctgctagatgacagttccccgccccagggtgttagtcatcggcactccagtttcagcgtcttttctctcacccacccaagtagttaaagtggcatcttgtcttgcaatgcctgctgctgctggccgctgaactcttcctttgctgtagagtttccccaacttggctgcacaatgaagttaccaggagttgtttttgcttttaaatactgtgcctatttctcactcccaaacaacctgatttaaatagtttgggatgtgatcaggacatcaggagttctcaaagctccccagatgattccactatgcagcaaaatttgagaaccagtgctttgaagaagcatagctctacccacgcaaggaaaatttaccagttaagcttatctaccaatcactcggtgagctcccggacctcttatcttacccctaactgatgtctttaatcagtttggcagaaaagaacgaaagcaaagtaaggaagcatttcatttccagaggggacactggctaaccaagagccatacccctttttgcttgataaaaatttggccaaatttagcgttcaggagaagcaggggaaatgttgccattcttcagattaccttttgatctctgttctgtttcattccacagtgtcctattcagcaaaagtgtaaatcgcgggtcctcagattagaagtaggtgctgcgtctgaccacaatcgcaaccggtctgcacacttcaccccagctgggaccgaacctccgcctcgcagcgcggccccagggtcgatactatgctaatcaaggaagttcttccgtttcggtgcgcgcgggcgcgggtttgagcgcttaacccttcattctacattgacagcacgatagtatttttagtgacctcttcctgcctagcgggtctacactattttccttttgttcttctttttttggaaaaggagatgtgaacaagtgatagagaagacaatcagggaggggacagcagtgttggctggtgcggaggtgaaggaaaggctaatgttcgtaatattaattactcccagcgctactgacccagcgaggactagcaggaggggcttgggggttaagacaaaggcttctcctgatcaaatggctgcagcgccccttctccgaggttacggctctgcccttggcactgtattgacgaagtcactggaggagtgaccaaacccactagcccttttggggtctgaaaatcagctttatcgagcgccccaggttcagaggggaccgctttccgcgtccacccctctcctggctctttgtgggatttctggcttccgcatagcccttctaagggtagaccgaagaatttcccactaagccgagtgcgaagtcgctgagtagccctcgccctgcgctcccggggctccctgcagaagagatgcttgggcgcagaataacaacccgcttccttttgcacccacccggctcctgagtcccgggagcgcggatggtggccggcgtcggagtgggagagtggtggctgccgaaggggaagtgcccggggtccaggggatgctcccaagcgcgcgagcgccagcgcgctgcacttcctgatctgcccccaagcgcgcagcccctgccagagcccccagctctctcagtgccggcgccccagctagagcctggagggtcgtgcgccgcggtcgcgcagtcgcgagcccccctccttcaccaacgccgtgttcctaccctggacagccccagcctcacccctcagaaccagtccacttcgcttctgccagcgtggcagccccaactccctccctccactttcctggggtgcacagagctggggcaccgaaccagagatgtggcccgcgggagagcggcggggtgcacacccggagaccgcctagccgacccttgcacaacttcttgctagactctggacccccggttccggttgctccgagccccgcgggctgcagacctcagcggcaggaggaggcgcagccagcccctggcctgggagggactgcttcagtgcagggggtgtcggggtgcgccagggcggtaccgctttaaatgcacttgactcacctgctccggcgctgtcgcctccttcctctgctgacagctgggggctttgttttctccacccacccggccgccgtgctccgcctcctctgtcgcacgtgactcgcagtctgccaccgccgccgccgccgccgctccgggagtccacccgagagagtccggccagcgccgccccttcccgcgggtgcgggtgcgggtgcgggtgcaggtgggcgccccactgggcaggtccgagccgacccgcctgaagacgctgtctcaggccaaaggaagccaggctgaattcgtgacagggaagaaagtgccagcgggtgaaataaactaagtggtttgaccccgctcgagagggaggaggccggcgcggcttgcagagggggcttgaaaaggcgccgccacactgtgaattaattacctgcaaacgggggcttgcacaccaactggggtgcatctgctttttacacccagtgtttgtactcctacctggagcacgattgatgataaggggcaaactagttttgtcatgaatattactaattaaactaggcaattctaatacaattaacaatttaataatagcgtgtttttggggggtttcaaatctgcttgttgatgctgttgatatttgggttctatttggaaaatggagtgcaggctggagaagcgaactccagaagtctactgatgtgggcgcttgtccatttggaacagcagctatttttaatgaaatgagaaaatgttctggcttcaagacccagctcaagatctgctgcttttggaagtggtcccgaccggtgctgatcgcagtgatctctagtgtttgaaacagcaaggatttgtct

SEQ ID NO: 1245203 - DNA, 4001 bp, Homo sapiens
tgtcttaaaagcaactgctacctacacagcagggattaaatcatttagaaaatgaaggcttcaaatttattttctacaaaaaaagttcaaactagtgagatttaaaatcacttcaagttttttgtttttaaattctatttttaggctttgggatggtcacagaggaaaaaggtggaggagtaagaggagaagaggcccaaatttccaatcacagggtctctgaaaggatatctccagaagttgtggaggaattttgatttacattaagtgaataacaagcacttgaaatctgtaagaatgccatatcaacacattagttggaaccataaggcatgagattttggtgacctcatgggcacagccaaaattaactccaagtatttatgtaactgccagagatgacagggcaaaggttgcttataatttttttttttttgagtcaacaaatactgcatttctttggccaaagagaaaggaagtagggtactttctggttctattttgtgatatgcaacatttacacacacaatattctacccataataccatctgaatgtttagatgacggctctaaaaaggaaaaaaagagttatttcctgttgctcatcagctgagaggatgcgctttagaggtatgtgtgctctgcctcaaagcaaaagcattgttagcgtttatcaaggtaacatttaaaaataactaccccagtacaaaagaacttcagaggaaatatgaccgaagctatcagtctcccttcaagtctggccttgagctgcataagactctagctgcattctccattacattgttatccttatcaaacaatgcaaacaattttaatgagcttatctactggaacatattgccagatatgttaatgtaaaaatgatgccaaccgtacaggccaactcattaatcaaaaggctcacaatacaatgaccaagatcagtcccatcctcaaaacagacctcagcaaaagaccaggaatcaccttcctactgtaaataagaaggaaaggctcccccacccaagcggtggccataaactccttagaaaatgcataacagcgcccagtttttttcaagtcctttgcagtccagtctctttctaataaacctagggttctatggagaaaattttggtgaatgtctgacactatcacctctgctgtcaatccctgcaccaatcagcgagcagaattcttacaaagctccatcaatctggcggtttaacatcacagactgcagcttaatctagaggattccatctttcctgcacactctccaggttaagcgcaaacgtttttctccccaccctcccgttttctgccttttggcactgctacctaatggctcctttaaaatctaaaagggaaggaggaaaggaagtgctactgcctgtctccctttggacagcgggggaaaacagcatgcatttttatcagtgtggaaggaaagagatggagggagacccctcgaaggcagcaaacctattcacaaaatgctttccatctgcagtcgcggagcctcaatgcaaacccaacatgacacatggaaacagataccaaataatcacaaccgccttcacaaatgcatgcctgcagcaggggtcgcaggcagtgtctgctccattatataacgggctggatttccgcgcgccctcacggcggtccccggcgctgctctcgtgccagccccattacctgtaggaacgctccccgcgcactgtgtgcttccggaaaggaatgatggtcccgttattatcctggatgatgtcgttgttgttctcgccatttggggacagggtttgggtcggcccaggcattggcgcactcccgagaaggggaacaaaccgctgtgggctggctggtgaggaaggtggctgcgtcttcccgctcgctcgcctgctccgcacggaccgtgcctgccgcctgctcgctcactgccttctcccagctctcgctcgcgccccgccctcctgcggccccgccctctggcagctgacgtcagagcgccggcagcagcaccctggtcacgtggccagcctgttgccatggcaacccgctaactcatcacctcgcctcaattcgcacagggtcgcggcgtgaccacgccagcagctccaggcaggcaccggggcaggcctacatctggcatgtaaaaccccaggccaccctgcagcccccctcgcagactcgccttgtctgaaaaccagctcttcctctaaccatttcctttccgacccgtgctgccactgcagctgtgtacacaaaagaacgattcatgcaaaggggtgtgggagaccctttaactccttcaataccaagtttttatgccatgacaattaaacttggtcaggtttcagaaaaacctaaaaaggacctggtggccagcttgtagaaaaggtatcagactaaggttaaaatttctgcctttctccctttctccaaatagcagcaaccatctccccaaaaacaagccaaaaagctaaaaacctacaaggaagctgtatttccttctaatcaatgtagcctttaataatgtgaggattaaagatggcaaattaagagatcatctgtacaaaggaatccccaaagagggtttttcttttaaaaaaagataaccaccattttaccagttacccaaaaccctccaattcaaattctttatgctgcctcctgatacagatcattaattcattgacatttattctatttccatttgaattacaaaagtgatcacctcacttagtatttgaaagtgcttaacattcaagctgttctatatccttgcaataccgctttcaaatatattggctatgtgacagatactattattattcccattttaaagatgagtaaactagtaagattaagtaaactgcttaaggtcacacagctaggagtggtgaactggagcttccaagtgacatggttttatcaatgtgactggacagtaatgatctgtaatgtgagctcaataaatattataaatcaaggtaagaatcaagtacttccaagatgactgttgtgaaaagataactgtgaacagaattgctagcactgtgcagtctacggattagattataaactgaaaagaccctgcatatgttcagtactgtcctccagagaggagagattttttttttattattattttttagaggcagagtctcgctctgtcacccaggctggagtgcagtggcgcaatctcagctcactgcaacctccgcctcctgggttctagtaattctcctgcctcagcctcctgagtaggtgggataacaggcgcacgccgccacacccagctaatttttgtattttagtagagacagggtttcaccgagttgctcaggctggtcttgaactcctgagctcaggcagtccacccgccccaaagtgctaggattacaggcatgagccaccacgcccagccaggagagattttgaaggattctttgcttatcagcagtggtctctgaccttttatagggtgaaaagggaagaattggggtgtaaaagatacagcataaatatatgtgtcataaagtattaagctatgactcactccttcacatcactgtatggtttatcagctttatcattttgtgatacagatattaaaaacaagtaaacactttgtcattcctgacaattcttcagcatatgtccctggtaataagttatttctggtatcaagtttctggaattagaatcaaatgttttacaacccagatggtaaggataatctcaaacaaggggccctacttattttccttcctattttatactttcctcttgggctattattttaataattttatcttttgcttctccagttagtccacagtgcacaagttgattccttcgtccacatctcactttacataagattttttttcttatacaatcagatccaattctgacctaagacttacaaggtacacagatgaatatctaagtatcaaagatacacaccaagcttcacattgcactatgagctaaa

SEQ ID NO: 1245204 - DNA, 4001 bp, Homo sapiens
ctgtatgtgcataatttaaacttcatccataaatttaaccacaccatttgattttaccagaatcaggctctaccccactcctgactctgcccactacccacccagtacctctggtaataggtgtctgagcgtccacaggtggcccctgacttgcgaaagacttcgcggcgcttccagccagggcccagggccgggcagtccagccagtcctcagccatggaggccacaggaagcagcagtagcctgaaagggggtggaagggatgagggaaactgaggctctaggaagggacaacactgtgccccaggccacacaaatcactggtatccattagtgcttgcccaagccctaggacctgccacaggcaaccagcccatatatggaaaagaaacccctcatattctcaccccattctttcctattctgggcctaggatatcatcattcctcaacccaaggatccctgtttcttattctcagtgtcctaatcccctactcctctctatcctcagactgacaacccatcatttctcctcactgccaatccagaaacttttcatccttccccctcattcctccctgtcactgacctaagggcctctatccctctattttatcaccccaagacccccatagtccccatcctcagccccaaagggccccatttctcttgccctcactacttgacttcagtagtctctcattccccccttccttgacccaggagttcctaatttccctccttcagtgttttaaccactccattccttctctgcctgatgtcctcttatcctgctacctcagtgttacaacctcgacttcctctgcgagacacaactgctccaacccatagcctgaacagcccctcatcttttccattcctcacactggaagcctcccatgcctccccttcctcagcccaagacctccccccttatttttcttctccttcaatgttctcacccacaatttctccctagtctgagctcccaaaccttcctctacagccaaaaagttccccacttctcctccttactgttctcatcctccattcctcccttatcatccagagagaccctaatttctcccctcagcattccgaaccctcctccattctctctgttcttgtcccgggatcatgccatccctaactgtcaccattctgatcccctactgctcctcgtcctctatatggggcctcctattcctccctttcagcattccaaagcctctatttctcctgtcatcagcctgagggcccctcatttctccctctcagagttctgaacccccatttctctctcaacttcagatgccccgatgtctccctttagcgttctgatctccaccattcctctccgtcctcgtcccaggatcccgacactcctacctgtcagagttcagagctgcattccttcccgtcctcagcctaaatccccccatttctcctcgtcagtattccgacgccgccattcctcccccttatcggcctgagggcccttcattcctccccgtcagcgttctgagccacaattccttcccatcctccgcctgagcgctctccacgtccagccccaaggctgtctcaccagtttggcaccaggccggtatcttccgccactctaggcccgtggacccatggcgagggtccctcctgcacctcccgcctcgccctcctccccttcctcctcctccgcggccgcctcctctgaagcggtagctgtcgcctccgcggctgttcgttgctcccggaaccggaagtccgctgcctgcctctcgggctccgcctctggctaagcacctgcgcactattgcctcgatgtcgcgtgcccttaatagggaggctcccgcgcctacgggccggcgctccgcagcggtgcgcgcgcccccctgccgagagccagttgcatctgcgtgctgacgttcaacgacagctaaccccttcgagggactggcagttgcggctctcctcgctgcccatctagctggcgcatgcgctttccagcctcaacctgaagggaagcggtcggggagggcttgcgcctgcgccctcccttccctcccgcggtctccacagccgataccgaacgcggcaaggaagctgcttcgcgcctgcgcactccctggccctgccggcgctctcctctcccacctctcgctggggtctatcctgtgttcgtgggtccctccgaacatcaaccccagggggggtcgtgtcccgctccctcctccccgccgaacagctgtgggagcgcgcggggcggggaaaggggcggtgccacaccgcaggtaaactgaggcacgcgggagggcgcgcccctgcaggaggcggatccccaacgtggggcttgtggggaaaaggcggggcctggcgtccacagcggacgacagctctgggtgggagacaggagcatgcatgggcggtgtcaccacactgaaggcgcgctgcgtagaccctctgcccgtgggaggctgggaatgtgggtccctgggctctcgcggggtgcaggcgccccccatcttatccagaagtctggaacagttgcaaccgcagcaatgtggagacagcttccttggtttcttcaaaattttattaacaaaacccagggagaggaggcaaggatgagtggactccgcagccccaccaggcactgaacatgtcgacggggacagtccctctgataaaggcagatgggcggtcaaccggtggatgggcacagggagaaccggagaaacagatgagtggaggaacggacacacgggcaccgggcggctcccccatctggaatgcagggtgtaaggggtccgggccaggaggctcagcggtcggcactggagcgcaggtcggtagtgaggggatcgtgctggatcgtctggtgcagcatcagggccagcaatcccgcgcggtttgtcatggctgtgcgcacattgcgctcctgctcaaacagctcgtccagcttgtaccactgccaagggagcggcaggagtcctaagcaggaacacctgcagccccgcctgccccggccacgtccgacatggaaacctaccacatgcagcaccaaaaccgcacagaaacctaccacacgcacgcgctccaagtccacttccgcacgccgcagcttctcccagcagtaatggcgattgcactggcgcttgggcaggcggcagaagtcacccgtgagctcaaagacatcacgtacaagggggcacccgcatacctcgtcagctggcacctgcaaggaggccaggttggggggatgaatagcggtgataagggagaataggaatgggggctcaaggagggagaaggaaaagaatggagggttcagggaacggtgaggaggcatggaaaaggaggaatggagggtgaagcagcagggaagctgagaggaaaaagtgaaggaaaagtgaggtgaggaaggaagggatgaatgtgggacagcgaggcagggaggaggggcaaaatgggaggagctgagggaaaaccttactttggggtcccgtgagtgctcggggcacagcacctggagccgcttacagtatgttttgctctgaggattatacacatcacagaagagtcgtgtggccctggggatttggagtagagagggcagtagagggagggaagggaggtccatctgtcctggctggttgcccgtatcctgccccagctccacacacatcccacttctgacccccgccttaaccccccacctctcactgcgtggcaccctcacttacccttcaatgcgtgtggggtacatggacccaaaggacgtctggctctcatactggagggatgagcacaaatggagggaactgtggatgtgcgctgcatgccctcccaagacaccacccagacaacaaatctgtcccccactggcccactgatgttcccacatggtccgccccctcagtctgacaccccaaccttggcgtagcagcgctccatgtggcgcaaggcaacacgtgggttgatggggtgcccacaggaaacacaga

SEQ ID NO: 1245205 - DNA, 4001 bp, Homo sapiens
ggattaactgtatgtgcataatttaaacttcatccataaatttaaccacaccatttgattttaccagaatcaggctctaccccactcctgactctgcccactacccacccagtacctctggtaataggtgtctgagcgtccacaggtggcccctgacttgcgaaagacttcgcggcgcttccagccagggcccagggccgggcagtccagccagtcctcagccatggaggccacaggaagcagcagtagcctgaaagggggtggaagggatgagggaaactgaggctctaggaagggacaacactgtgccccaggccacacaaatcactggtatccattagtgcttgcccaagccctaggacctgccacaggcaaccagcccatatatggaaaagaaacccctcatattctcaccccattctttcctattctgggcctaggatatcatcattcctcaacccaaggatccctgtttcttattctcagtgtcctaatcccctactcctctctatcctcagactgacaacccatcatttctcctcactgccaatccagaaacttttcatccttccccctcattcctccctgtcactgacctaagggcctctatccctctattttatcaccccaagacccccatagtccccatcctcagccccaaagggccccatttctcttgccctcactacttgacttcagtagtctctcattccccccttccttgacccaggagttcctaatttccctccttcagtgttttaaccactccattccttctctgcctgatgtcctcttatcctgctacctcagtgttacaacctcgacttcctctgcgagacacaactgctccaacccatagcctgaacagcccctcatcttttccattcctcacactggaagcctcccatgcctccccttcctcagcccaagacctccccccttatttttcttctccttcaatgttctcacccacaatttctccctagtctgagctcccaaaccttcctctacagccaaaaagttccccacttctcctccttactgttctcatcctccattcctcccttatcatccagagagaccctaatttctcccctcagcattccgaaccctcctccattctctctgttcttgtcccgggatcatgccatccctaactgtcaccattctgatcccctactgctcctcgtcctctatatggggcctcctattcctccctttcagcattccaaagcctctatttctcctgtcatcagcctgagggcccctcatttctccctctcagagttctgaacccccatttctctctcaacttcagatgccccgatgtctccctttagcgttctgatctccaccattcctctccgtcctcgtcccaggatcccgacactcctacctgtcagagttcagagctgcattccttcccgtcctcagcctaaatccccccatttctcctcgtcagtattccgacgccgccattcctcccccttatcggcctgagggcccttcattcctccccgtcagcgttctgagccacaattccttcccatcctccgcctgagcgctctccacgtccagccccaaggctgtctcaccagtttggcaccaggccggtatcttccgccactctaggcccgtggacccatggcgagggtccctcctgcacctcccgcctcgccctcctccccttcctcctcctccgcggccgcctcctctgaagcggtagctgtcgcctccgcggctgttcgttgctcccggaaccggaagtccgctgcctgcctctcgggctccgcctctggctaagcacctgcgcactattgcctcgatgtcgcgtgcccttaatagggaggctcccgcgcctacgggccggcgctccgcagcggtgcgcgcgcccccctgccgagagccagttgcatctgcgtgctgacgttcaacgacagctaaccccttcgagggactggcagttgcggctctcctcgctgcccatctagctggcgcatgcgctttccagcctcaacctgaagggaagcggtcggggagggcttgcgcctgcgccctcccttccctcccgcggtctccacagccgataccgaacgcggcaaggaagctgcttcgcgcctgcgcactccctggccctgccggcgctctcctctcccacctctcgctggggtctatcctgtgttcgtgggtccctccgaacatcaaccccagggggggtcgtgtcccgctccctcctccccgccgaacagctgtgggagcgcgcggggcggggaaaggggcggtgccacaccgcaggtaaactgaggcacgcgggagggcgcgcccctgcaggaggcggatccccaacgtggggcttgtggggaaaaggcggggcctggcgtccacagcggacgacagctctgggtgggagacaggagcatgcatgggcggtgtcaccacactgaaggcgcgctgcgtagaccctctgcccgtgggaggctgggaatgtgggtccctgggctctcgcggggtgcaggcgccccccatcttatccagaagtctggaacagttgcaaccgcagcaatgtggagacagcttccttggtttcttcaaaattttattaacaaaacccagggagaggaggcaaggatgagtggactccgcagccccaccaggcactgaacatgtcgacggggacagtccctctgataaaggcagatgggcggtcaaccggtggatgggcacagggagaaccggagaaacagatgagtggaggaacggacacacgggcaccgggcggctcccccatctggaatgcagggtgtaaggggtccgggccaggaggctcagcggtcggcactggagcgcaggtcggtagtgaggggatcgtgctggatcgtctggtgcagcatcagggccagcaatcccgcgcggtttgtcatggctgtgcgcacattgcgctcctgctcaaacagctcgtccagcttgtaccactgccaagggagcggcaggagtcctaagcaggaacacctgcagccccgcctgccccggccacgtccgacatggaaacctaccacatgcagcaccaaaaccgcacagaaacctaccacacgcacgcgctccaagtccacttccgcacgccgcagcttctcccagcagtaatggcgattgcactggcgcttgggcaggcggcagaagtcacccgtgagctcaaagacatcacgtacaagggggcacccgcatacctcgtcagctggcacctgcaaggaggccaggttggggggatgaatagcggtgataagggagaataggaatgggggctcaaggagggagaaggaaaagaatggagggttcagggaacggtgaggaggcatggaaaaggaggaatggagggtgaagcagcagggaagctgagaggaaaaagtgaaggaaaagtgaggtgaggaaggaagggatgaatgtgggacagcgaggcagggaggaggggcaaaatgggaggagctgagggaaaaccttactttggggtcccgtgagtgctcggggcacagcacctggagccgcttacagtatgttttgctctgaggattatacacatcacagaagagtcgtgtggccctggggatttggagtagagagggcagtagagggagggaagggaggtccatctgtcctggctggttgcccgtatcctgccccagctccacacacatcccacttctgacccccgccttaaccccccacctctcactgcgtggcaccctcacttacccttcaatgcgtgtggggtacatggacccaaaggacgtctggctctcatactggagggatgagcacaaatggagggaactgtggatgtgcgctgcatgccctcccaagacaccacccagacaacaaatctgtcccccactggcccactgatgttcccacatggtccgccccctcagtctgacaccccaaccttggcgtagcagcgctccatgtggcgcaaggcaacacgtgggttgatggggtgcccacaggaa

SEQ ID NO: 1245206 - DNA, 4001 bp, Homo sapiens
gcctgaaaccgtggatagtaccaaaccctaatgtaatatgtactgtgttttttctatctgataactgagatggttactgtgtgactaacaggcaggttgtgtctagaacatggatatggatacggatatggacaaagagatgattcacctcttgagcaggactgagcgggatggtgtgagatttcatcacgctactcaaaacggcacacaattcaaaactaatgaattgtttatttctaaaattttccatttaatatttttggatggtggttgactgtaggtaactaaagctgtggaaaatgaaattgcagataagggggagactactgtattctggatcctgcaactgttgtaataaactgtctttgatctgtaacccaggagtcttacccctcctaccagcatctacaaaattctgacaaattcactattatcttgtcctaagaatgaaatctcaggttctttatagttcttgacaactgcacttttaagttttgaaagttttatacaagtacataaatatgtgaataaattataactaaatataaacaaaaagtaatttgtaatttgatatttacctggaaagatagcaacttagatttaaaaaatcagaaagaatatagaaacttaataatgtttcttaaacacatgtaaatgcttataaacatctatgttgactctcattagttatggtagttacgttctacaaagctatcatgaacattgaatacaaaaccattgctcctagaagaaatacagggttaggttcctgagagcatctgaacttttgttttgtgtgtgtttctgtttaaacacacattacttaatacatatttttttttacaaatgattatttgcatggtctttgaatgactcaaaccaggggacttggaggccgtatgtgttatgtaaggttttttgccaatattcttgtttaacaagccaatctcattgacattgaaaaccactcttccacacaacccctttcctgtacaacacttaacaggtatttttaaaattcttcggaagactcctgatcagcagaacctgcattgcatgcaggtttaacatgtttcatgccatgtcgccttttgaaatgtgcaagtcagccagcactagctgatataaccttaatattttcctaacccagggtaacatgactttggctttcctcaacaatgctgtcaactatgctttattgatcgtcatttcatgaacccaccaatgtagctgctttctcatctcttacatagcttcaagactataaatgctttctgtactttctgaagcagctttgtgcacatattggcaaatttccttctttttctggttgtaccataattctgatgcataacattgaacttacagccaacagcattgtaactcagataaccagcaaagtttatctgccttgtattttctccataaagcacgacatagtcttctcacagaacactaaacagcacctcagcactatgcttggggaccattttaaaaagcaaaatcaccaaaaagtacaaaaattagaaaaatgtgacactaaacagaccacgaaaaggacacctgtttacagtattaaagctgaaaagggctccttcagcctcagctagaaatacatgcattgagtgacagtttttcactgctctgtacgtattcttgaataatcacaaatgcactgtgagtagtgacttttaagttacaaataaattttattaagtaggtgaaattcaaacataaaatccgctaataaggattaactgtatgtgcataatttaaacttcatccataaatttaaccacaccatttgattttaccagaatcaggctctaccccactcctgactctgcccactacccacccagtacctctggtaataggtgtctgagcgtccacaggtggcccctgacttgcgaaagacttcgcggcgcttccagccagggcccagggccgggcagtccagccagtcctcagccatggaggccacaggaagcagcagtagcctgaaagggggtggaagggatgagggaaactgaggctctaggaagggacaacactgtgccccaggccacacaaatcactggtatccattagtgcttgcccaagccctaggacctgccacaggcaaccagcccatatatggaaaagaaacccctcatattctcaccccattctttcctattctgggcctaggatatcatcattcctcaacccaaggatccctgtttcttattctcagtgtcctaatcccctactcctctctatcctcagactgacaacccatcatttctcctcactgccaatccagaaacttttcatccttccccctcattcctccctgtcactgacctaagggcctctatccctctattttatcaccccaagacccccatagtccccatcctcagccccaaagggccccatttctcttgccctcactacttgacttcagtagtctctcattccccccttccttgacccaggagttcctaatttccctccttcagtgttttaaccactccattccttctctgcctgatgtcctcttatcctgctacctcagtgttacaacctcgacttcctctgcgagacacaactgctccaacccatagcctgaacagcccctcatcttttccattcctcacactggaagcctcccatgcctccccttcctcagcccaagacctccccccttatttttcttctccttcaatgttctcacccacaatttctccctagtctgagctcccaaaccttcctctacagccaaaaagttccccacttctcctccttactgttctcatcctccattcctcccttatcatccagagagaccctaatttctcccctcagcattccgaaccctcctccattctctctgttcttgtcccgggatcatgccatccctaactgtcaccattctgatcccctactgctcctcgtcctctatatggggcctcctattcctccctttcagcattccaaagcctctatttctcctgtcatcagcctgagggcccctcatttctccctctcagagttctgaacccccatttctctctcaacttcagatgccccgatgtctccctttagcgttctgatctccaccattcctctccgtcctcgtcccaggatcccgacactcctacctgtcagagttcagagctgcattccttcccgtcctcagcctaaatccccccatttctcctcgtcagtattccgacgccgccattcctcccccttatcggcctgagggcccttcattcctccccgtcagcgttctgagccacaattccttcccatcctccgcctgagcgctctccacgtccagccccaaggctgtctcaccagtttggcaccaggccggtatcttccgccactctaggcccgtggacccatggcgagggtccctcctgcacctcccgcctcgccctcctccccttcctcctcctccgcggccgcctcctctgaagcggtagctgtcgcctccgcggctgttcgttgctcccggaaccggaagtccgctgcctgcctctcgggctccgcctctggctaagcacctgcgcactattgcctcgatgtcgcgtgcccttaatagggaggctcccgcgcctacgggccggcgctccgcagcggtgcgcgcgcccccctgccgagagccagttgcatctgcgtgctgacgttcaacgacagctaaccccttcgagggactggcagttgcggctctcctcgctgcccatctagctggcgcatgcgctttccagcctcaacctgaagggaagcggtcggggagggcttgcgcctgcgccctcccttccctcccgcggtctccacagccgataccgaacgcggcaaggaagctgcttcgcgcctgcgcactccctggccctgccggcgctctcctctcccacctctcgctggggtctatcctgtgttcgtgggtccctccgaacatcaaccccagggggggtcgtgtcccgctccctcctccccgccgaacagct

SEQ ID NO: 1245207 - DNA, 4001 bp, Homo sapiens
gtatttacatgctgcaccagcagtgatcacattcttgtgtgtgcatatgtatgtatatatgtgtatgtacatttctttaaccttttcaatctagttaaaagtatttttagttcataagcatggtatgtgtacagacacattttcccagagctacttgaagaggacaggaaatcctttataacattattacaatagctaaatgacaattgtctccaatacccatatacattccctgaaaaatgcttcagtcagtccacaaacacgtacctccaaactactgaatacaagtttatattatcttctatcaatagcatggcttattacaaaatttagtaaatgtgtattaagtccacggatgtcaattgccataggcactttcttgagcttactgggtcacacaaactgaagacatcagcagcatgaccacgggattgcaagattacactaaggtgaaaaaccttgaatcatttaaaacaggatgtctcaacctcagcacaggtgacaatttgggccagatcattctttgttgtggcagctttcctttgtattatcgaatatgtagcagcatctctggcctctacccactagatgccagtatcacaccctccccaggtgtgagaaccgaaaatgtctccagacattgacaaatgttccctggggagcaaattttggtctaggagtctaaaaacttagtacagtgtgtcagtttcaaaagagtatattctgcaataccaagaagttccaaaaaaacttcaggcattccaaatagctgctttatacaaaactttcttggatgaagtaaatgaaaccttgttactgtagatagctcattcttccacatgtgcatgcttaacacttgtgatgatgaatctgggacaggctgggacaggagccaacagtgactgggttttatagtttcgatgaattacacctccttttaacccttcagtggactaaccatccctgccaggctaaccctttcttcgcaaaccatcttccccgacgccttccacataagatgccctcctgcgggccctcaccttttgacactgcctcccaccgcactggggtcaactctcacccaagggttccgccaccttccaccaccaaaccagcctgtccctgccacatgccccccgggccccagcgctcatcctctgcccaggcccgctcttgacccctgaccccggcctgaccccgccaccccctccccgcccccagggaggtacctgaagtagtagacatcgctcttgccagcacttagcccagattttcggatcacttcctccttcttccatccgggggggagggccgggcaatccatcctcttcccgctctccgtggcccggggtcccctgggccccggccccgcgctccccgacgggaaagggaccggctcccgccggggggcgccgccgccaccgctgccgccgccgccgcagccgccgccgtcgccgccaaggccgctgccgccactcgggggacggccgcggccccggccccggccccgtccccgtccccggccacggccccggccccggccacggccacagacgccgccgccccggcccgcctgcttccaccgcccccggccacggccgccgccccgagcgccttccctgcgcacgccgctcaccggggacggggcgagcgcgctgccctggcccccctgctctatggcggagtcgccgccagcgccgctgccgcccgccgcactctccccctcctcctgctccgggcagcagcggcctccccccgggtgcgcgcgcatccagccccctccccagccggcgctgcgcttcttccgtaaccgagcccttggaatcccggagacccgccccgcccgcagcgcggcgcgcgggggacgcgcgcaagcatcatagagcgggcgcgcacagagcggccctcctgcccggggcgtggccccggccaccgcctcttaggtcctccaagcgctatgggcggccatcttgtctccgccttctcggggccacgccccctcccgcgcttttccggcccccactgggcgcgcggagctgggaaggttggtcgggctagccaccagctgggggtgtcatagtgactgtggttagtttgtttcaaacggggtaacctccaccattatgtgattttacctatgtttgcttcccaattaatgaataacaagcaaaatagatcttatattacataccaactcggctattcatttaagggggtgatagccccttttcccgcccctctgcacaaagcttgcaggggagcttataatgaaggaatgaagcaaagtgtcccattcgctgaataccagttccctcctgagcctggcttcagagccattgacagattctcctggaaccttgtaaggatgtaggaaaggaaatgataacttggaatatgcccatgagtcagatggggcttacctctagattctccttagaatgaccagaatccctaaatccatctagaaatttccagatgtctttgtctaatacaaaaatcagtggccttttatttggtaaatattccattatgttgaaagtccagcctaacttactgtcacaagcctttaggaaactgtgtggtattcttttcggtctgccaacttgaattttagaaatgcatattttctataagttgtcgaacacttatagaagtgtgctattgatattcaagataatatattatgaaatatttggaagattgaaaaatgtaaagcacatgttatcagcctgatgataagctatcttgggtttctatactcatatgccctaaaaactgaggaccaagtttaacgtatagaaaaagttgattaatataaagcaacaaaaatctaaaattaatttggtttatctttgcagtatatgcaaacattaactcatacacacaaacttgtctgtctctaaacctgaccttagtcttcttttaatgtcctttagttgaaagacactaatttgtggtttcctacaagaaatttagaaatgtgaatgtaaaaaatcatcaagaaatgagttctgaggagatcagtactggagacattcatttagaagtcatctgtgggccgggcgcggtggctcacgcctgtaatcccaacactttgggaggcagaggcgggcagatcacctgaggtcaggagttcaagaccagcctggctaacacgatgaaactccgtctctactaaaaatgcagaaaattggctgggcgtggtggcgggcgcccgtagtcccagctgctccggaggctgaggcaggagaatggcgtgaacccgggaggcggagcttgcagtgaactggatcacgccactgcactccagcctggcagacagagcgagactctgtctcaaaaaaaaaaaaagaagtcatttgtggccgggcgcggtggcttacttctgtaatcccagcactttgggaggccgaggccggcggatcacgaggtctagagatagagaccattctggccaacatggtcaaaccccatctctattaaaatacaaaaattagctgggcgtgctggcgtgcgcctgtaatcccagctactcgggaggctgaggcaagagaatcgcttgaacacgggaggcggagattgcagtgagtcgagatcccgctactgcactccagcctggcaaccgagcgagactccgtctcaaaaaaaaaaagtcatttgtgaaagtgacagttgaaggaggccctggaagtaagtaagctctccaaggaagggcttgcgtggttaataataaaaggaaagaggatcaagaactgaatcttgaggaatgccaatacttaaggttccactgaaggaataaaggaaaaaaatgatattaaagtttgtatgacataagagagtactctgattttcacacataattgaaagtaaagggtaaacatgagcaaaaatctcagtagaaacggtaattgagacaggtagttgagacaacagatgggaacaggtatgcttttggaaaattctaccttttcatgctgtgctaataaggctgtagatcaaat

SEQ ID NO: 1245208 - DNA, 4001 bp, Homo sapiens
agaaaaacatctatgtgtgtcaatattgttttgagataaagtcacaatgattgatatcaatgctttcaccattttatttcaacttaaaccagtgtcactcacatgaagcttattttataatacatattatccagtgatttcatcttttctgcacagtttaagtacattttttttttctgtaccttgaagtaagcagaatagttcaagctttcaaaactggtgatgctgtatgcgtgagggatgcttacataatagcaacgctttattgggcaacccgaatccatacatgtctggtgtggtttgatagctgggcttgaaaaagtgcttccagttgaaattagcattagaaatcggttagaacaccaacatttcagggtgagggaggactgctacaaaggaaaagaacatgtctacaaatgcactgaaagaactagccagaatatgaattccattagtatctaagacacacaaaatgtcatttacaaataagtcacggcaagtgtcacaacctgaaatctcaactcagacagatggtagagatgttaacagttgcctgaaacttcgatgtgctttcacgcccacaggaaaggtaaaactgacatttgtgtttctcttcaacaatttcatgatcaataaagaattgcagttggagactaaagcaaattctagaaactccttaactccaagttgccctatggtttttatgattgcatgttatcagaatgaggcgctctgttccacactttattcaaaagccttttacgctcccacaaggccttctggaattccagaatcagccctgcacacaggcagaaaaacagcttcatcttacaggttgtgtgagaacacccaataaactagggacttttttgggaaaaacttctttctctccaaaattacacaaccaccaaacactctaaacatcacgtaaaatactgcatctgcaatctgaatggcactcagggaccagcgctttgatgaaccagcagccacaggttctccactgacaatcaactgcagaaaccactcctagactctggaccccatagcagagttttttttttttgtaatacatttttatccacatttgcttttgaataaagaaacttctaagactctgtatgcaaattaatggaatcacaagataataaagctttgattcatagacactcatttatccctccccccttccacttctcagaccacagagaacgtttgctcaaggcggatttaaattgaggagtttgttcaaaagtcttcctcgacctcaatcctatgattgtcgcagagcaacatgaagctagcagcactgactccaggaaaaaacgagcataacccagtgttgaaccccagcgtgtgggctgcagaggcaacatcagtcatcaagtccgcaagcacacaccaccagagaccctgagaatgtggctctctttctgcaacgcccatgtccaggcacccttagagatccagaattcagcatgtccttacattcctgagccacaccccggccaccatcccttgtgaggaaaagagggggtgagttaaacgaaaacgtcctaagcagccactcaggcccacactcttgggctcatatgcattctccagcacggaacgagaccttagacagcaagaggctacgtgccagttcttcctctaatggctgagttcacctactgatttctcctttgctttttccatttaaactaaaactcctctactcctcagagctcaccttgccagagccccgcttgggcgcacccctgtcaccgccaaagaagcgcccgatggagtcaaggatgcccgtgtctctgtgccttgggaggaagccatgcctggcatggtccatggtacttgctgtggccaggtacttggatccgtgcctctgggagggtctcttctgtgacgccatcacatccaggctctcggaggtggctgcactgtcttcttggatggtctggagctcgtcggactcagagggcctgtctttgaaggtgttgtcctccctccccggggcatctcgggaaaagaggcggatcaagtgggggcggctccctgggtcagctgggtgggcatcctgccaggcattcttcgggtccgctgtgcgcttggagtcagtcaccgctgtgtcctgagaggaggtcccattgttctggttcgcatctgcctctcctgcaaacaacaatgagatatgaatacgggcctgtgcaaagctgagcaccggacaaagcagctttctctgaggggtcttgacctagctgtctcctataaaacccacagaatatgtgcagtcctcataaagcccttggcctaggatggagctaacctggatggagcagccttattgcagctctgtgtttcagaaggctctgggaattcctcagttactcgagatttggcacccagcgtaaaatgcacccaggcttcccgatgaagtcatctgagcatgcagagcagccacatcagcgtttcttcccgggtgctgccatggctgctcccggagagcccagatgtgcaggcaccttgatgggacattgactgtttaaaaggccactggtgcataagttaaatatgcaaggagcatttatttgacaaaaggtgtttttagttttcttggtagaaacaaaacttgccacatctttttgcaattcatgcatgaaagaagtggggcatttagaattgtttcaatcccagattccacaagaggcctctcacaatagagaactgcttattcaggacattttgacttggcttctcctctggaagcagaaacaattagaaatctgaagtgggattgagatatttcatgttgtataccagcatctcatagctttctccaaaaaataccacatttctgtcacgaagggcaatgaatccattttgctttcaagttagagtgttaggtttaaataaatatcatttagttagtttcctctccaaactctattacttatctacagaaaacaggattcactcacatattcctgtaataccagtcatccatctatctctctatccattcatccatccatccacataacagtccatttacccatccatccatctatccatccatccatacacacacccacctacccatccatccatccatgcatccatccatcccccatccactcatccatccgttcacccatccacccacccctccatctatccactcatccatccatccactcatgcatccatccatccacatatcagtccatttactcatccatccatctatccatccatccatacacatacccacctacccatccatccatccatcccccatccactcatccatccacccacccaccatctatccactcatgcatgcatgcatccatcaattcatccattcgtcatccatccatccacatatcagtccatttacccatccatccatctatccatccatccatacacacacccacctacccatccatctatccatcccccatccactcatccatccattcatccatccacccacccctccatctatccactcatccatccatccatccatccatccatccacatatcagtccatttacccatttatccatctatccatccattccatccatcccccatccactcatacatccattcatccatccatccacccctccatctatccactcatccatccatccatccatccatccatccatccacatatcagtccatttacccatttatccatctatccatccatccatccatatatccacccatccatccatccactcatccatctatccatccatccatccatccatccatccatccatccatccatccatccactcatgtattcatccatttacctacctgttcatccatccatctatccattcatccatccatccatccatccatccatccatccatccactcatgtatccatctatttacctacctgttcatccatccatccatccatccatccatccatccatccatccatccatccattatttatgagtaccaaa

SEQ ID NO: 1245209 - DNA, 4001 bp, Homo sapiens
aagcgacgtgtcttacactttcttatctttgggcagaactgtgatacttctggaggattttcaaagaggatttgaacaaaatagctttgtttaacccggagttagtagaagtggttgtttcagaacagttaactccctgggagttactccagcatttacagcaatttttaactgtgttcttttccctcagatttctgtttttcccacaaaaaaaaaaaaaaaacaaaacctcaaaaaacaaaacacacacacgcgcgcacgcacgcgcacacacacacacacacacacacacacacacacaccccctctgccgcggtacccttcccctggccttcctccactgaagggcggctgggttccaggctctcagccgtgaccacagccccggccccaaccgctaaggaggtgctcatcactggaggtggccgccagggagctcagtgcgggacctgctcaatccatacggtcccctgacttgagggtgaccgtccttaaactgtcccccggagcttcgccagataaaatgtccaaaacacacactggagttccctgacgtttccttcctctgaaaaactctctttccaggcggggcgttctgtggtcagacgaggcagaggcctccccggaacgaagtccacgccccctccccaccccagcacccagcgagcccacgcgcccctcacccacgcgcagagaaaccgagcacttgttgattctcacgttgttgcaattggaaaacggaacaaggaaccagagctcgcctgtttccagccagagtcgcacgggggtccccaaagacgcttgaaccttttcccaagccccactccaccttccaaaacgggggggctcaggtggacgcgaaaggacacaaggcgctgcccccagcaccccggaaaatctagtgtggcggcaaatgaccgcaggtcacacaccccggcctcgggggccacggaaaacggacgcacccggcccaggacaggcagtggggcccaggaggggactgccgggaagacccgggcgggccggcgggcggctgcgggcggcgcacgtgggcccaggtgggcgcagcgacgggcccggccgaagagcccgagacaggccctgcgaaggcggaagcccggacccgggctctcctggccgcccctggagctcagagggagactgcgcttcgccccgggggcaggggcaggagcgcgatcgcgcgcggggcccccggggtgtgattagcaggcgccgcgagccgggaggaccccccagcccgccctggcagccagcaccctctccacacccgcccagagtggccgcttttgaccgccgtcccctcccaccctagactcctcccctcagccccacggcccgaggccgagcggtttcagcgaccctgggaccgccgggcctggctggagtccacccctggacacctgtcagggtcgggccccggcgctgtaaacccgcgtctacacccgcgcccagcccccgcgcaatggggatcgggggcggcgacttgggttcgggtcagggaggccgccggctgctacctgctcggccacctgctccgctgcctaggttctccctgcgcgtccccagccaagaaagggacccggagtccgggcgtcgggatagctcctgtccccgatcttgcgcccccggctcccgcggggctccggtccggggtcccgcccaggtctccgcggtccccactcggaggggcacagagacaaaggcggcagagcagcccgcccgtccccgagggtcacccaccggcgctgcgctcgttgctccgaggccgaggggcgccgcggggtccaaggccctgctccgcctgcccaggcccgggcaggctggtctcggcttcaagcgcccacgcgcggggtccccgggcagcctgcttcgccttccggggtcgggagacaggggccgccggggccggaggctgcttctctctggcgcgcggcggcggtgactgacggcggcggctccgagggacgggcgcgcacccagctccccggccccgcctccccgggcttcctgcgagccaggtaaacacaggccgatcccgccgggcccgccccacctggacgcggccgccggcgccgccccgggagctcggaggaccccgggcccgctctgcccacgcggaacttggggggcgcacggggcccacgcgcagggtcagacctcggaggggcggcctggagcctcgcccgctgccgaactgggctccgaactgcggcccgtcgacccttcccgttcggaggcttggcctccgaacccaccccgaccccgacctcgacctcgcgggaggggtgccaggccgcatctccccgcgtcctcaggggctggaaaccccagaaactgccgatagacttggcgcagccccggccctgcaggaggagagtcagcccggcctggaggcgaaaggagccggcaggtcctcccaaggcactccctccctcccctggagcccaggccaggcccatgtccggctggcaggtgctcctctgggagctgggagctgggagctgggagctaggggcgcaccttctcctgcaggaccggcgcaggaagcgtgcgcggaaaagacagcaaaacacgcgcaggtgcgaggaagcagcctggtcctgcagcccagagacatcgtggtcttcgtcgctgtcttgttaaaaagaaaaagcctgctgtttagccgtgactcacctgcacacagatttagtggtcagagatctttctctggattctcagcctcctgatggtggaagaggaggaggttgggggagtcccagaatgaggccccgcgttcctcctgacctacacccccagtcagggatctggatctggagcttccaggggacctggagcagcctgggacccacacagtttgttaggaagtgagggagaggggtgagcgctgtcccggcccgcgctgggaggcgggactcagacttcagcacggggtcggggtttcggcctaaaaccagcctcccccaaagccccggaggatttagcaactgtcttcaaatgctggcaactggaagagaaatacttccacaacgacgcaaaagcattcagtctggtcgtttcctcaggagagattttcaagtggagggggcaggagggttctgagactttgaggctgaaggtgaggagggaaaagggtgccaaagatagtgtgtttctccaatttttctgccccacaacctcactttaagtcaaggatgagcggagtgggcgtgggaggctggacagctgccctaggagcacgggtggtgacaatgaacccgggtgcacccaggtcccagctcaagtcactcaaagctcaggctggggaagctggaacactaaaatgggtcccattttagatacctgctttagcatcagaaacagcttttcctccccaaaatatctcttggctttatctcagtgactccacagggcggggccaccttcctgcctgcagatgtccctgtgtgctgggctctggagcgtccctcaggccacagtgacagctgcacacgcggccttctgtttggtgctccttctgctggtgttacagtggtttcctgaaacactacatatgccaacagtcagccctacaaatgtcaggctccacaagttccagttaaaagtctttttaaagtatttatgaaatttcaccgtgcatattttgttgggatagagtgtccacacagatgggcagccaggcagtttagaaaagtcatggattcttcaaagaaaacatgtagataatactatttaataaaacagtggattcacatttggatcaactggtcttatcttgggggctttcatgccctcccggttagaaaaaggaccccaggttgaggacagtggatggaagaaacagaggctggcatttcactgtcgagagacaaactttcacatgaagatgtccatgtagccctcagcaaagtgacagagattcgttgtgctgaataaaattgaaaggcatcttttgacaagtaacccatcaaagcctcatt

SEQ ID NO: 1245210 - DNA, 4001 bp, Homo sapiens
accatcttccaaattttgtaccctggcggctcatagtcagagaacagagaagttaagactttaggactccaccacactttaaggcccactgggtgggtctgcaccagcgcttgcctgtctgttcacacgttctctctccctgggcctggacacgtccttcctcacttctcacactcagcactgtgtccttgcccaagtacagactctcttccactgcccccgcatcccaagggagcccaggattgctgcccgtctatgcacctgtagctgtttgttcttatttctacaacggcattattcacatgaaaaccctgcagatggatctgagttccttaggataagacctgccctgaccatgtctgaggctgagccctgcagacaacctggcccacagcaattatatttgcctaatgaaggcaaggaatgtggcttacacagacaagaaagctctcattaaaatgtattagacactaaggattccataggaaacatacctgggatcattaacaaggtaaagaataggatttttttttttttttaagatgtcttaagttgctctgaggcagtgagagggcaatttgctgctgagcaaaaacctcctctgccagagattcaggatccactgagaagtcaggatggctttggagcttatctaccccattaccctggttcatgccctcctccacccctgccgcggcctaagcggtgtcccaaaggcagggtgagggctcccgtctccctgctcccacagctctttgtgggtgtgtgtcctgtctgggagctagtgtgaagtgttgtctcagtgtgcgctgtcctcagcgccggggctccaggaggctccactctgacttaggcttgcaacaaggcccagcacataagggttcggtacagcttgatctaggcatgaatgtgtgagcagagcctgtgaccaccgcttcactcccactccggggatggggtggggagggcatgtgaggagcactcctccttctgatctgctcaaggctgtactctctggacccctttgtacccctttcccattcctatcccttttggactttttgcatgcatgtatgtatgtatgtttacaagtgtgcacgtgtatgtgtgtatatgtgtgtgtatgagtgtgtgtgtgtaagtgaagaatggggacagttatctgaaggcagcttagacaaactgaaatatgaagaagagctgtttaatcgaatgcctgggcctcttttctaggtaacatgtgccccccgacagagccagccaaaggaaggtgtgagcccctcatgatggcagtgactgcatgctttctgggtgcaaacactttgcaggagtatgtgataatcagtatgcttttagttattgtttatcctgcaccccgtgttgctgcctaggaaggtggaggctgactgagctagtggttgagaaaggcacagaaagtgtgcgtgcatctcccagaactgtaacgtcacacgtgtggatggtggagttgcttagacaccaatgcctgaggttcaggaagctgccgcatgcccacgtctttgtggcgctaaaacccccgcactcttacacctagacaagctgatcaggtgaaggggctaactccagaagtgataatagaagcatgatttgtttcacccctaattctattaggaaaaaactggctgtagtccttgaatagagctcaatgacaatttgaagagtactagagaagccaataaattcattaatagggaagattgttttagctagacaaaaaggtaatagccttcattgtagtagtttaattagaaaaataataaactcccttaggaaggatgaaagcccataattaaaaagatgagctatttggaggaattctgaatagtacctcttctcagatttgttcctagctgctctattcatggtccaaaagcacttagcaagctgaggaattagtggaaaatgtacttaccttcagctctgaagcaggaactttctgggcaaaatgaatgagaaggaatgagctcggagagaaaagcaagcaagtggaccttgggccgggaagggccggaacacatgcatcaccggagatacagctagattgttatcattaccttgaataaatgtcatcccacatgaactgtgcatttctggtaatgtgaagttagagaaatggaaagacacaggcagatgaagacataatttccatgagctcagctagtcaaggttacttccaatgtttatgacaatgtttctagcagattatggaattgtcatcttgctctttttaaatgccactttagagttgcatttatttccaaaaagaactaaggaattaaataaatcaggtttttgagaaaatggttttggaagaatttgttttaaaacttctagcaaacttcttgatatatcttgcaaatatttggctcattagtttcattaagaagaagggaatagccccattatccctatttcacaagactaaacaatgagagtgagggaactgtgtgctcaagtgcacatatgacgcatgggtccagacaagaaaaaaaccctgtgttctgccaatgcttctccgtccaaaaacttcacagaaaccgccatagataagagccatcattcaaagcaaaattcttccattttagggtgcaatgctgtgtgttttctgcctgccggggcctgcagggaagggctactgttggtgtcagtcacagcaacaggaatgttgaagtgtggaattgggccaagtttccagatggtcctgggtttttggggctggggccaaaccagtggctgtttctgaaatgtgagcttccgccccaagctaaaaagtgttcacacgtgggtggtctggaaaagaccaaagagagagacctgagttgaatttgccaggcgggtaaacacaattttataaagtggcttttcctggcctgtcactgaggcaaagcgtgttgtccccaggaactcatggacccaggatcatcccagacttcgactgtttctgagtaggtgtgtgcctccgcaacatgccctgcagctgaaacccggcgttccacaggcctctttccctcttcagtcatgtagttgagataacagagaaaagcaaggcattgcctccagaaagctactgtattatctggaaaagtagagacaactcgtccttagcccttgtacttgcagaagcagaggccctttgtcagagatctgtggatctgattagctgattgggaaaaccggtggccagccctggggagtgggacatcaggcaggctgcagacaatgggaacactgtctggaggaggcgagcctcggccagtcccctgggtgggacctgggccactctgattgggagggacagggagagacttccagcagggggaaggttgcctaggggtttggctaagccctgcaaagagagtagctattgctattttagttcttccattttgggggctcatctctctccaatttttagagaaaagggggcaaaaatctcttggaaggagcagagtagaaatgacagagtttagaaccagaagacacgcggtcagagttctgagtgccaggcctctaggactccattgcctggtgtaaagcgggctgttgtgagaattcagactaggtttgtaacagtgctcagggaaatctaaaaccatatgccaatacctatggtttttgttataaccctgtccaaacactcttgaaatagtggtattttaaaagaaatatctttgctgtagggaaacccattcagctggtgatcattggaaagcaaacttgtaagtggagatgctggtagatgaactctgatgaccatgttacaactgcgccaccattccgtcaccagcccagtctctctctcatcccaagagatacgatggaaaaggggaattttagggagcattcaaagggcttctgtatgcaccctttcttctcttctcacacaatcgtatacaactcggtcactttcacaaatacaacttcctccccagtgcttgtccctctcatggaaaagctaaaga

SEQ ID NO: 1245211 - DNA, 4001 bp, Homo sapiens
cactcagcactgtgtccttgcccaagtacagactctcttccactgcccccgcatcccaagggagcccaggattgctgcccgtctatgcacctgtagctgtttgttcttatttctacaacggcattattcacatgaaaaccctgcagatggatctgagttccttaggataagacctgccctgaccatgtctgaggctgagccctgcagacaacctggcccacagcaattatatttgcctaatgaaggcaaggaatgtggcttacacagacaagaaagctctcattaaaatgtattagacactaaggattccataggaaacatacctgggatcattaacaaggtaaagaataggatttttttttttttttaagatgtcttaagttgctctgaggcagtgagagggcaatttgctgctgagcaaaaacctcctctgccagagattcaggatccactgagaagtcaggatggctttggagcttatctaccccattaccctggttcatgccctcctccacccctgccgcggcctaagcggtgtcccaaaggcagggtgagggctcccgtctccctgctcccacagctctttgtgggtgtgtgtcctgtctgggagctagtgtgaagtgttgtctcagtgtgcgctgtcctcagcgccggggctccaggaggctccactctgacttaggcttgcaacaaggcccagcacataagggttcggtacagcttgatctaggcatgaatgtgtgagcagagcctgtgaccaccgcttcactcccactccggggatggggtggggagggcatgtgaggagcactcctccttctgatctgctcaaggctgtactctctggacccctttgtacccctttcccattcctatcccttttggactttttgcatgcatgtatgtatgtatgtttacaagtgtgcacgtgtatgtgtgtatatgtgtgtgtatgagtgtgtgtgtgtaagtgaagaatggggacagttatctgaaggcagcttagacaaactgaaatatgaagaagagctgtttaatcgaatgcctgggcctcttttctaggtaacatgtgccccccgacagagccagccaaaggaaggtgtgagcccctcatgatggcagtgactgcatgctttctgggtgcaaacactttgcaggagtatgtgataatcagtatgcttttagttattgtttatcctgcaccccgtgttgctgcctaggaaggtggaggctgactgagctagtggttgagaaaggcacagaaagtgtgcgtgcatctcccagaactgtaacgtcacacgtgtggatggtggagttgcttagacaccaatgcctgaggttcaggaagctgccgcatgcccacgtctttgtggcgctaaaacccccgcactcttacacctagacaagctgatcaggtgaaggggctaactccagaagtgataatagaagcatgatttgtttcacccctaattctattaggaaaaaactggctgtagtccttgaatagagctcaatgacaatttgaagagtactagagaagccaataaattcattaatagggaagattgttttagctagacaaaaaggtaatagccttcattgtagtagtttaattagaaaaataataaactcccttaggaaggatgaaagcccataattaaaaagatgagctatttggaggaattctgaatagtacctcttctcagatttgttcctagctgctctattcatggtccaaaagcacttagcaagctgaggaattagtggaaaatgtacttaccttcagctctgaagcaggaactttctgggcaaaatgaatgagaaggaatgagctcggagagaaaagcaagcaagtggaccttgggccgggaagggccggaacacatgcatcaccggagatacagctagattgttatcattaccttgaataaatgtcatcccacatgaactgtgcatttctggtaatgtgaagttagagaaatggaaagacacaggcagatgaagacataatttccatgagctcagctagtcaaggttacttccaatgtttatgacaatgtttctagcagattatggaattgtcatcttgctctttttaaatgccactttagagttgcatttatttccaaaaagaactaaggaattaaataaatcaggtttttgagaaaatggttttggaagaatttgttttaaaacttctagcaaacttcttgatatatcttgcaaatatttggctcattagtttcattaagaagaagggaatagccccattatccctatttcacaagactaaacaatgagagtgagggaactgtgtgctcaagtgcacatatgacgcatgggtccagacaagaaaaaaaccctgtgttctgccaatgcttctccgtccaaaaacttcacagaaaccgccatagataagagccatcattcaaagcaaaattcttccattttagggtgcaatgctgtgtgttttctgcctgccggggcctgcagggaagggctactgttggtgtcagtcacagcaacaggaatgttgaagtgtggaattgggccaagtttccagatggtcctgggtttttggggctggggccaaaccagtggctgtttctgaaatgtgagcttccgccccaagctaaaaagtgttcacacgtgggtggtctggaaaagaccaaagagagagacctgagttgaatttgccaggcgggtaaacacaattttataaagtggcttttcctggcctgtcactgaggcaaagcgtgttgtccccaggaactcatggacccaggatcatcccagacttcgactgtttctgagtaggtgtgtgcctccgcaacatgccctgcagctgaaacccggcgttccacaggcctctttccctcttcagtcatgtagttgagataacagagaaaagcaaggcattgcctccagaaagctactgtattatctggaaaagtagagacaactcgtccttagcccttgtacttgcagaagcagaggccctttgtcagagatctgtggatctgattagctgattgggaaaaccggtggccagccctggggagtgggacatcaggcaggctgcagacaatgggaacactgtctggaggaggcgagcctcggccagtcccctgggtgggacctgggccactctgattgggagggacagggagagacttccagcagggggaaggttgcctaggggtttggctaagccctgcaaagagagtagctattgctattttagttcttccattttgggggctcatctctctccaatttttagagaaaagggggcaaaaatctcttggaaggagcagagtagaaatgacagagtttagaaccagaagacacgcggtcagagttctgagtgccaggcctctaggactccattgcctggtgtaaagcgggctgttgtgagaattcagactaggtttgtaacagtgctcagggaaatctaaaaccatatgccaatacctatggtttttgttataaccctgtccaaacactcttgaaatagtggtattttaaaagaaatatctttgctgtagggaaacccattcagctggtgatcattggaaagcaaacttgtaagtggagatgctggtagatgaactctgatgaccatgttacaactgcgccaccattccgtcaccagcccagtctctctctcatcccaagagatacgatggaaaaggggaattttagggagcattcaaagggcttctgtatgcaccctttcttctcttctcacacaatcgtatacaactcggtcactttcacaaatacaacttcctccccagtgcttgtccctctcatggaaaagctaaagaggcagagagagagaaagagtgagagggtgggggaggcttgggaggcagagcaaggggaaaggagatgcaatggggaaacagaaggggacaggaagaagagacagggccggggatctgtcttttgtgtttgcaggactgccccattctgacatagaaaatgctggggttgga

SEQ ID NO: 1245212 - DNA, 4001 bp, Homo sapiens
tcttttttcagcacctgtttttctctctagaggagcttcatttctacttctgcacagggaggatgaacaaacctttaattaaattacttgaaatttcagtgatgatatttttaaaaatgattatacatctattctttaaatattttcccttaactgctagaatgaactctctacatttcaatggtggataatataatataataaagcatttattagaatatgtttaatgaggctctgatttctatgttacgaaagcacgcaaagtgtccaatgcttatgaataacacgaaggagacattgttaagcttttaataaggacttttctttttgtaaatccacagtgcctacaacctataacatagattcatattttatggccaaaaaagtagcatgacattggaaataatacagagactgggcattttttctcattaaaaatcataggcttaaatttacacaatggatattctcaaccagtaccctacacggaagagaaagctgttgcagaagtacaatattcaggtagggtaagagtgaaaaagtctcttatgcatgttcctatattgcgtgctctgtccccatttaatatctgctagacaagtcacaaaggcctcccaggggatagcaacagatgatctctttgaaggttttcctcagttcttgactccggagtgcataaatcagaggatcgatgattgaattacacatgatcagtatgagatacaagttaaagtgagacatgaagcacacacaatatggattctgaggacaagagatgtagaatattaagtggaggaagaatggggcccagcagacaacaaagacgccaatcaggatggtcaaggtaatcgctcccttcatattggcaccttggcggatggcaccagtgccggggaggacagcaatcctcttaatgtgaagcctggccatcaggaacatgtggacatagagagaagccatgagagccagcatggtgaagaacatggtgatgaggcagatgatgacagcactactatctgagtaaatgatgaacaaaatgcctgaaaccgtgcaagctgcccagatacaacttatgatgatcccaacccgcttaactgtcataatgttatggtactggagagcatagaagatagtaaagtacctgtccactgcaattgaaagcaggctgcaaatggatgcaagcaaggagctacagatcaccgagtcaatgacattatcaatattcactgtgaaactctgtgcatccgtatctgtactgtttaatagggtgatgacaatggtttctgatccatttgaaacgctcaccagcatatcagccacagccaagctgcagatgaaaaagtacatgggtgaatgcagattcttgttcttggctattgccacaatcactaagatattctccaacaagctgatgacacccagagtcacaaacacctcaggagagacaaaaagttgctcgtagcaccctccatcagagtagccttttccaagggactcactggcattgctgtgcagtctgtaactgctgcggttccagaggtgcagagaagtgtgcatcccacggtgggtggagttcaccatgctggcaggagaattccagtgtccccctgaattgatttaacctcctgggtcagggagtcgtctcagttatttcctccaagtctttatctgtctgaaagttgtgaggctaaaattgccatgcctgctgtgagtaaatgtcacaagtccagagcttgacatggagtttttagtctcttttaggtacgactctaatcatcatcactttaaaatcttgggcttcaaaatattcattctcagttgaaagagtctgctctttgctttcttgttctcacttctgctttaactttaatcttatgcattcaagtctgttcaaaataattttccttgaagctgccatgccattgggagacgaatctgtgcgcacatgctcacatcggctgcctctcggaagcttctgtttccagcctgagcgttgctttgagtgttaggggctgtaggcgccagctgctgatttttatgatgtgtggagagaaaaaaaacatgttcacggtggctcctcctctgcttccttctgaccaatcccaatgcaatgggagtctgtgagacaggattatgtttcagagacacaaattgcagggtgacacagattcagatgcagaagctcctgaagtctgaagtcgagaagcaagccggataagagactgaatttccctttttaagttttcaagggaaacaacttgatccctagaggccattctgtgatatcaaaacaagctatcttcaggcagccaggttcattcttatgtaaaagacatcatgtgtgtgtgtaaaatgaaatggaaagtatactgtcttatgttcctgaaacagatactctgctttttggctaggatactgaatttatttaccttcttaattttttgtttttattaagaacccagccagtagtggttcagttaaaatacctgaaaaacagagaggatatttaatgatacagatagacatggtatggctggaagaactatgtaggtagctataaattatgaatgggttcaaaaggggttgattttaatgcactaatatcccatatttctctattgaggagtttgtgttatagctgaaaaaaggtgctttttatttacaatattttaaactcatacggcattaatgtaactatgcttacactgaactcaggaaaataataagctgcattctgttttttttttttaagcaacttttttttaaacctccagagtttaacgtatcgtaagttgaaccgacaaatacctagtaactttacttatcaagccaagactggtgatactagttagttattgaagtttctgaatattttgcttaaggtggtttgaaagatggcagcaaagttactttccaaattaactgaacaacagattatacaaaattttgtatattcttttcttctatgattatttttggttttagtgctctatagtttgtagctgcttatttcagggttaattctgaatctcagttacttaggttgggaatgtatcctctttccttttgtgacagagacaatactaagtattgttcctgagcattgagataaattaacgtcttccatccacctttggaattgggtaggaccttatgactaaattctagctaatggcatgttgacagtggggctcatcgcattagctctttcataattttacacaagttttctctcctgtctttgaaatctcatgttacaggtggcaggaccatatcatgaaaggagcctgtctcttgaatgattgcacagagcagaactcacacctccaactcccttcccctgtatttctgaatgcctaatcatctgtatattgtaaaatgctggaatgggctttcctgaacatcatgagctggaaataatcttaccttcctcttgccttattttttctctttttaaaaattgacatataattcacataccaaaaaaaatcacctctttagtaattaaatggatttttgggggaatatattcacagagttgtgccataatcatcactttctatttctaaaacattttcattatcccattagcagttgctccccattttaccctttccttatcctctaggaactgctaatctactttctgtctctatcaatgtgcctattttagacattttatatgattgaaataatgcaatatgtggccttttgtggctcactgttttcatgtagcataatattttcaaggtttgcttacactataatgtgaatcagaatttgatttttaaaaaattaaaacaggatcttgctctgtcacccaggctggagtgcagtggcatgatcatggctcactaggttcaagtgatcctcctacttcagcctcctgagtagctggaactaaatgtacctccacacccagctagcttttaaaaaataattttgtagagattgaatctcattatgttgtccaggctggtctcaaactcttgggctcaaac

SEQ ID NO: 1245213 - DNA, 4001 bp, Homo sapiens
aagcaagcctggctgtggacgtgtgctacttgcagcactgggcaccttgaactccttgagcccctgtaatgcccccagtcatccttttggaaaccccagattgagcccaaataagacagtaagaaagagtcacagagtcttccacagcacatgaggcagggtttctagcataaggttttatgtctgggtaagcgcaacaccatgattgacagaagtacaattattcagacaattatgaacaaaagccatgaatcaaaagttcaggcaaggggagcaaagaagacatttcagaacaaatgaacagattgcttctgatggaaagaatctggccactcttttcttccctgaaaagcatgcatagctcagagtgcagccagcagagtgtggacctgcttctggggagaagaagcaatcccacctggcgtcgatatcacggttttcttcgcgtcacaatacgtgtttcatcatgtctggcttgcactgagggtgctgtgcattccccgagcacatgcctgctaggtggagggtggatggggcccccagaaatgggtgggagcagtagaaaccataggacacaaaaggacagtaagaaattgtcatgactgtccccagagtggataagcaacccttgcatgttggacataatcaccaggaactgaacagagagagcctcttaggcccatgtctgagctggtaaagagaaaaatgggatgctagcactcccgcctaccccttggctgtcgctttgtcataggtgagcaaacaaaggagaacagagccacagagaggagcactttgtgcttaatcccttctgggaaagctgcaggcgatcctgaaaccacggcagcaaataatctccttaaaggtcttccgcatctcttggctgcggaaggcatatatgagagggtccatcacggaattacacatgatgagtatgaggtacatattgaagtgagacatgaagcgagagcagtagaggttctgagggcaagaaagcattaaagtgagatgaaggaagaacggggcccagcacacggtaaacacgcccagcagcatggtgacggtgaccgcgccctgcatgctggtcctctgccgcgcagagctggccccgggcagagccgcgatccgcttgacgtgagtccgcgccaggaggaacatgtgtatgtacagagacaccaggaggaacagcatagcgaagaacatggagatgaggcacaggatgacgtaggtggattctgagtacaggatgaagacaatgccgcagcccgtgcagaaagcccagatgccggcgatgatggcccctgagcgcctcgccgtcatgatgtggtggtagcgcagggcgtagaagatggtgacgtacctatccactgcaatggccagtaagctgcacatggatgccaccacggaaatgcagatcatggagtcaaacacattgtcaatgtggcgcacaaaggcgtctgctatcactaggtgcttgttgttgagtaggtagatggtgatggtctcccaggcactggacatgctcaccagcatgtccgccactgccaggctgcacacgaagaagtacatgggggagtgcaggtttttgttcttcactatggcccctatgaccaagatgttctccaagaggctgatgacacccagagtgagaaacacctccacagcaatgcccatgtcttcacatggtgaagacttgtttttgacattgggtcctgaaaggttgccctctgtggcattcaggttgagatccaagaaatgcaggtgaaatgaggaattcattgctggagaaatacacctcttgtcttggcagcaaatttactgtaaaacatgttttaaattcacaatccaaagaggttagcagcctaccaaagaaagacagcagctagcctagaaccaacacagcctaagaaaggggatgaatgacacagtgcatcagaggactgggctcggctcactcagtccttttttttttttttttttaagagacagggtctccctatgttgcccagtctggtctcaaactcctggccacaagcgatcttctctctcagcctcccaaagtgctggtactacaggggtgagccacgtgcccggcagctggcttgcacattctgacctgcgttcctgagacctggaagagtgcccctggacacgcagattagaatcttcaccagcctcttctgctctccttgctttcagctcccagcctttcacatgcatcttactagagagacactcacctccaagtgcccaggacagtttcactttttatggcttctctcctgggctcaagttcactatcataagtgtccccaactcataacctacaaaatcccagccagtctcccaatgttcacattcctaaggctactgcacgacattctcctcaagggagctccgatttaagactgcccagacccgtattcccttaagacagacagacaggtgcatccctaacacttgtcctgacacttcttagacccatcaggattcagcctccacagctgtaagtaaggctataaccagaatggtctgttaccctgagcaaagtcacatgttaaaagctactgtcttaagtttgtaagtgtaggctgcacatacgtgttaaaattgaggaaaacagtgctgcttttccctcaatacctatttttccctcgcttctgcattatgtggaattccatgaggtctgcttgatagtttattaggtccgcgtgagcacagtatttaaaaaaaaaaacagcaatttaaatgtaccacactcctttgttgcaaaatttctctcttatgattcattttcaaaaatccctttgccctccaaactcagatcacatctggagagaatttctgtcatcactgtcatcattaatatttgtaatcactttgggagggagggagggggtgagggacaacaaattacttaataggtacaatgtacactataggggtgatggctacactaaaagcccagtctccaccactatgcaatacatccatataacaaaacagcacctgtaccccctaaatctataaaaataaaaaaggaaaaaattggtaatctaagcatttattgaactacaatcatttgttacagctgagttccagctcagatatatcggtaaattatgcaattatactaaacatcatatcgagctgtgttaaaaactcacggggcaagctagctgccgccccgctcacttccacatgcagcggaagcgcgattttgcatttattctcaggatctcaaggagatagaaagttgtggctatttaccggtgctcctcctcgcgggccgcggcgctcagcccgggcccccggcgtccccgggatccgacggccgtgcggcgctcagagccagccccggacgggcctctcccccagctaggcggctgcggctctgcggggctttaagcctcctgcctgcccgcgccgggcccgcctccgcaccgccggctgtcgctccgggcggcctccgctgccacctagtggcccagcacggcacagcggccagagaaccgcgtcagccccgagcgaaaatccccccgaacacactcttgaatggttggatggttgcttggttggttggttggtcggtcgggtcggtgggtcggtcggtcggtcggtcggtcggttgaatggttggttgggtgagtggttgcttggttgggtagttggttggttgagtgggtgggtgggtggttgcttgtttggtgattggttggttgggtgagcaggtggttgcttgcttggttggttgggtggttacgggttagttagttgggtaggtgggtggttgcctgattggttgattggttgattggttaggtgagtggatggttacttggttgcttggctggttgggtggggggttcgttgattgggtaggtgggtggttccttggttggttgattggttggttgggtaggtgggtggttgcttggttggttgattggttggttgggtaggtgggtggttgcttggttgagtgagtagatggttacttg

SEQ ID NO: 1245214 - DNA, 4001 bp, Homo sapiens
gagcaaaactccgtcttaaagagaataaaatatgtctagtttgtctgaaattcaccaaaatcaattagagtttttaacttaatatacagattatacatacatagctgtaagtttttaattttacaaaagaagttcccaaatggtaaatgggttttttcctttatgaatattttgttttcataaatatattaaaagacaaaaacatataaacaccctctaagggtgtcacccataagcagttctcagaaatagctactaagcataaatatattattctcaagagaatatttctacagaagcatagcccaacatttcctattaatgcatgataaaagtcatattaggagctaggcgcggtcgctaacgcctgtaatcccagcactttggaaggtcaaggtgggtagatcacttgaggtcaggagttcgagaccagcctggccaatacggcgaagcccccgtctctattaaaattacaaaaattagctgccctcaggtgatccacccacgtcggcctcccagaagtgctggaattacatgcgtgagccaccgcgaacggcctatatgtatgtttttaaaaacaactgtttctctcatctaatttacagagtatttgtaaattgaaaatcaaaattatgggtacaacatcgcaattagcttaacaacatgagcaatgcttaaggagtatacacgtttaagggagtgggggtggaggatgcagctatgaagttagaccacttgagtttgaatctaggctttgtcacgttaaaactgtggtcttaggcaagttacttaacctacctaaaccttagtttcctggtttgtaaagtggaggcagtaacagtatcaacctcaaagggttattttgagataatccgtgtagaaactagcgctctgcctgtcactagcaattaatacatgctactattgttatcgttatcaactgcaacactaacagaaatagcaatgctattaacctctttgcttagaggtgatagccacaagcatcaggaaggtaaatccacagacagaagatgataaaacgttttgtaagaaagcacgtgttaatttgatcacgcttctcaccacaagcaacgtaaattttctagaattatctctggaaccaaaaaagaaagtcgaaacctaggaccacctaggtaacaccacatgcagagatagttatcgccagcgtgaaagaaacacctgccaatcccggtccacagatggcatttaataatagacggaatcggtccaatctcagaactctccagcccgcagcaagtctttttttaaagggaggagccacacacacagcctaactcctgccgttaactcggcccgactgaataaaggagataggcttgccaaagggtttccagccacagaagtccttttgtggaggggtgcagaaagagcgagaaagagatgctggcgtttggaggcccagggcctcgctcccgggcgagagcggggcgcccaggcaccagccggcggaggaacctggaaatcgcgcgccgggtagagccgcggccgctggaacctgggtcgccgcgatgtagccggtccctcgccctcagcccggactccgcagaccgcttcccttcccccagcccccaccgccaggccgggaacggcgggggccgcacgcgcggaggccggaggcgcggcagcgctgggctctcggggccgggccaggggaggccggcgcccgctcctctcccggacccccgcccgggccccaccgcgccgggccttaccagaggtctcgcgccgcgacaggtggtacacccggcggagaggccgcgccctgccgcccgccctggcgatgctcagctcccgcgccgcccggccctccccttctgcgagcctcccggagccgccgtcagctcaggctcacactggcgcgggcggccccacacgcagaggcggcccgaagagcggccgagagaggggagggcgcgaggagccggccagccgcggggcccggaaggcgtggcccacggtggagacggacgggctcgcgggccaattggaggcaggaaccggccggaggggcgggctccgtctggaggcttagctgccggcgctggggttcctgtcctccgcgccttcctcaacccagctcctggaggttacggttctgaggcggggcgggcggcctcgtggacgcgatgctgaggatgtgagaagtgcagtgcggaggaggaggtggagctccgccgctccatgaaggaagccggggctggccgaccgcgccccccagcactcctggcccgggggtcccagtctccgaacccgcggaggccagggaagctgggagttggggtctgtcctgcctgagccacagaggaagggggagaacgggagggcaggagacggcaaaggaaggaagaagaggacccaggaaatgcgaggcttccgcacttcagcgacgctttcactttccgagctgttttgtgtgcttaggacttgctcttctgcagaattctttgccactcctcatggctgctggcaaggttattggcctgcggtgaatttaccaatcacctccactgtcacagtcaccataaatagatgctcaatgttctgcctcagaaaagcaccggaacacttaattgtcttgtccttgaaagccgcagggaccgtgccttccaacatccctacccccgccctcccaacggttgtgacatgggaggatatttcttcacccttatttcagaaaatgttatcacccaaaactctttactataatgagcttgtgtactcttaaaacaaggcatggtaatgacaatttcaaaaataagatgtaaaatataaaaaaagaggcaaggcagaataaaattaaaagtgatggaaatgtaggattgagaagatggagtggaagtagggaagagtgaattgctccctcctaaactctgacaattaaataaaatctggggcaatcgcccctctctgaacattgaagggtggggcctgtgaggaggaaactccagttaggtgataatccataggtgtggttgctataataaccaccgcaggcaaggagaggttataaatatgaatgacctaaagtaactctgcttgccaggaacttacaagatgcagcaggttggatgaaggaaactaaacattaccagtgtctttctacataaatgcttcattagtagaggtgaaattcttttgtctttgaaagacagttgtgggggtgttggggggtagatggggaatggggagatgttggtcaaagggtaaaaagtttcaggagtaagttttagaaatatcgcacagcatggtgactatagttcataatgtatatttcgcaatggctgaaagagtagatttaaaatattctcaccaaaaagaaataagcatgtaaggtgatggatatattagcctaatttgatcattccacaatgtattgaaacattacattgtatcccattgcattaaagtatatacattttttttctttcgagatggagtcttgctctgtcgcccaggctggagtgcggtggcgtgatcttgactcaccgaaacctccgccttgcaggttcaagcgattcttttgacttagcctcccaagtagctgggattacaggcacccgccaccatgcctagctgatttttgtgtttttagtagagccggggtttctcaccatgtttcccaggctagtctcgaatttctggcctcaagtgatctgcttgcttcggcctcccaaagtgctgggattacagacatgagtcacccgcgcccgaccataattatatacaattgtttgtcaatttaaagaatttaaggacagtttgtcctacattcgaataatcccagattgaaagttgtagagagctatcatggagggaacttattttgcttacattgaagtcaatttattccttattaaatacccgctactgtcaaggaggtagaaactgctgttttctggtctgctctgacaacaatttctttccccttagccacttacagtgattggtcaaaggcttcc

SEQ ID NO: 1245215 - DNA, 4001 bp, Homo sapiens
ctgggcatatgaagcctggaacatggacaataaaatgtccctccataaatcaaaagaatccagtattagatcaaagttcaatgcaattatgcatcaattatgcatatgtaattatgtatgatgtttagcattaaatatgtcctaggttctctataacctagaacaaaactcaaaatagactcaccaaagttttctggagttgcctgggaaataaacacataaacaaaacatattattataatgcccaggaatggtcttcttggattcagtttatatctaaccatttgttgtttgtttgttttgtcattaatattatggattacttcctgacatgtatttaggatggctaaattgaagtttaagatgactttttgaccaaagggtcttctcatttcatatggaaaatgaaactgcctgttaaatcaatttgaaggtgaaggaaacaagaaaccaacttcaaaaattgggggggaaaaggcagaacataagactctagctctcaaataagtgctcactttacacacgattttctaaagcattcatggagcaatgtttgaaaaaccaaataatttattctcaatgttgaaataatactgtaatttataacaattctttaaaaagaaatgttattcaagactcattaatcaagttattttgcattcatgtttctcccagaataattctgccttcaaagacaatacaaatatttaagaaaaacaatgggtacattttgtgattaattttttttctgaaaatagattctccacaaatggtcaatgaaactcagactacatgtccaaaggaaaaaaaaaaaaaacaactaagtaaacctgagaaatgtcttagtgtgattgaattaaaaagctcataggactgtctgggttatgttaccagttctactaactaagggtaattcagttcaccttccaggtactcagactatccataagatatggtcagtacctgctttgcatgggtattgtgagggttacagtatataatgtgaaagaaggctcattgtaagctataataaattgtcacaaaagtgtaaagtacaattttattcaaatacagcttacatatctaaatactagaatcatttggagcgtttaacaaaatgtgggaatgaactggatggatggttaccatcatttttgacattaacaagtgctttgcatgtttcacactataaccacacacaggcatacactcatagaggaatgccagtgcacctacagaataaaattatcaaggatttattcctaattacactttaacatgtattcatctgtatctcttgtttgcaatgttctagttcctattcatagaatatcaccccaatataataattgttattttaaaataacaactgaaggttttccactagccatttgaaacttcatttaaaaccttgggttggtttgtgatacaaactacctgatagaaaagattagtccaaactgtagaaggatgagtctaaactgatgaagaagcataagagaaataccacgttataaaactttgtaagtactgacggtgcctgtgacactcattcatgtctcaagttactgtgcagcaatctgcatttcattcagcagtaaaaatggaatgattttcaaaatacacatttataatctcatcaaaagaaaacttgttacacaatgatgaaactgaaaggaaaacataactttatatcaatgtctctactctggtgtggctatttgtcactccctacacactgcccacccctaatctccaagaagaaacactcatttgagatcaacatttcaagatgtataaaaaacaaacaaaaaaaaaacacttgttctttaacaatcaatatcaactgccccaaaatttttaaattatcttctatatactgtttccttaccaagccagaaatcacgagaagagcatccaagaacagaaaccaagacagattccataaatccatgttgtagcttccagttgaaagtagctaactatgacattcagggttgaattgacttctttaaaggcaaacattataatttatagcctttgatctcaatgatccatattgcaggtcagcttgatgctgtaataatacctccaatcaagggatgaaagtccagtatttttaacacagctctgcggagttggtttgttggcttttttttttttttcctgtgtcaacaattaagtgcctggctgagacttcttaatgaatacattctctaatgtatgtgtactggtccttagactagtaaacaccacttaagcaaaaaatatatatatcaaattaatttttaatcttgatcttatgaaactcctcctctcatatagccccatgctgctttaatatatccagttatgtccactgctttttatcattcactcatttaataaaaattattgagtgcctataatttattgagttataaaatccattaatgtgctagaaatcaggcacaccggttattcacatatagagtagtaacatagcaatgtatctcatccctaaaaattcccatcaagcaaacactggtgggacatgggtcataaaagtaggaatggtcactgattttctaataaaataatgttcccaatccatctcttaattctttctcactttttccttcttttcttgggataatttctctttagaaacaacctgttctctcagttcccatggcttcatattcaacttacttaagatgcaggataatattttttgaatactaatttttggccatggtggctcacatgtgtaatcccagcagtttgggaggtcaaggtgggtggaccacctgaggtcgggagttcaagcccaacctggccaacacagtgaaaccccatctctactagaaatacaaaaattagccaggtgtggtggtgcatgtctgtaatcccagctacttgagaggctgaggcaggagaattacttgaacctgggaggcagaggttgcggtgagccgagatcacaccactgcactccaacctgggcaacagaatgacactccatctcaaaaaaaaaaaaaaaacctaatttttttctagtttccccttcccctctccagcttagccttcaccccattttgtgctaataggaagactatcaagagacatgtagcatagacaaggagtttgagaggttgcttcctgagtacaagccagcacttcccaccctatgagggtaggatgagaattaaatgggaaaactgaaaactgtagttatagtcagttcttcacttgatccctgagatcccctagatatattataggatccaaaatcaaatggtcctgtttcttggctagagctacaaggaagcaaagggactctacagaagaaggcacatcttgggaagaggagaataactcctggggccaagggaagcatagaagtatcagaaaaagctgtcatgcctgaagagccatgtggataggaataaggatgtctccattgcaggctgcacagaatcacaaataaggaccagacagagggactgatattttagaggatgcctgtgaggatagatgacatcagggatcataagggaccttcccaatgcattgggactgttaattaaggttaggcacaagcctaaaggtaaaatgtgaatcctgaattagccgcaattaaatttttgacatctatgtgaatgggaacctaaaatatcaattattataacagaccaatggaacagagtagagaacccagagaaaccagatgccaagaacttacactggggaaaggacagtctcttaataaatggcgctgagaaactggatatccatatacggaagaataaaaatagatctctgtctttcatcatatacaaaaatcaacccaaaatggattaaagatttaaatgtggctgggcacggtggctcacacctggaatcccagcactttgggaggccgaggcaagcggatcacaaggtcaggagttcgcaaccagcctggccaacatggtgaaaccctgtctgtactacaaatacaaaaataagctgggcatggt

SEQ ID NO: 1245216 - DNA, 4001 bp, Homo sapiens
ctcccacccccacccactgcaacagccctctagcctgggaggcttgttagagtagacgtgaagatcacagcctgtgggaccactgctgagtgtgtgggcactcagtttaagtattcagtgatgctccttccaaaccactgtcctgtccccacctcttccactcccacccttggccaaagcacagatcataagccctctgctccgctcccctctgagattcgccttccatgaggaattcagggctttccccatatcttctcttccccacctttatcaagagatgctgctccctccccgtcaagtctctttttgcactgtcaccacccaacactttccacgacacttctttgctttgaccagaagccataaggtaaggttggaagaacatttattcactctccaccagcctaggaaattaatagtgggtcctcagccctgccaccttctgctgttatcatcagccttttaactcaggttttgatatggtgaaaagagtcaccagggttattcagacaccccggctgtcagggtccttggtggttaaacctgggaaaaggccacatgaagacaactgtaagcacacatgatccctctgaattgttttcttttcctgcaattgtgcttgctcttaaaaattgaagttttaaacagggctcacatgtgatcatccttccatctattggagtctagcttgaaatgtgacaaccggaaccaaaagaaccttgaatttggtgcctactttggttttggtgctgctgcttctcaagatcctcagcagggattaagaagttggggtgcacagcaggaatatcaggaaattggcaggcttgacttcctggcaaattgctagcaggaccactaaatgctgaactgtactgtgaatgtataccgaaatacaagcaattatttctgtactaaaggtgtttttaattttgtatttgtgtaaaaccacctttggaagcagcaactatctagtcagaaaagcaaatgatgtttccattaatcttttctggggaaaacattagtgctaaggatttaacaatctgtaggtaaagtttaacctaacagtattccacaaggagactttttattatcagacggttgcctaattttcatataatttttatattaatataatccttggttcctccccatccccttcataggccacagctgaggtgaaaagggtcctggaatggctagtgagagctagaaattcagacgggaaaattgaaactcagagcagaaaggcaagctgcccaaaaataacaacgctagttaatggcacaattgctaccagacccaagtatccagacttcctggagctgtgagatctttcatcaccaccactctccaggtaccgggcagtgcctgtttctggattcaaactcacagcagcgaggaaatcctattttagcaaagtgatctactgttactgttgttagtgcacccctctcctgcgtctctgcttcacatccactccctcgccgcccgcccccaaacacttggattcttcctagcctctcacaggtcagccaccaccagaggaccgtgagcctccggcaagtgatcaaatactgagcccgaatttcggcagccgtaccaacgcaatcctgggagcccattccacccactccgcagcccctctcccacctcacctcttcccttgtcagaaaagcggacgccgccttcccagactctcctcatgaaaacagcacccatctaaatagtgatcatgaaaaatgccccttccagtccacagagaaaaagctttctccttttctaagagtccatgggcgccgccatgttgctgtacggaaaaacgtttccagggcgagttgagcgttcagggcactcctcggcgctcaagctgcccacaggtcttccgacctaactttaggggtcgtgccagtcttcgtagagacggccacactggcccacagaccccagttcctggggtgacgcagctgggcgcgaccagcacgcagccttccagcgacgaggcggtcgcatggaagttactgcgcgcgtcgtgcgtaatgacgtcagcgccggcggagaatttcaaattcgaacggctttggcgggccgaggaaggacctggtgttttgatgaccgctgtcctgtctagcagatacttgcacggtttacagaaattcggtccctgggtcgtgtcaggaaactggaaaaaaggtgactgaatgacatcggattaactttgtttctgcagagctgttctggaggaagaaagtgatggcgccaatgacttaaatttagaggtcctgaggcgatgttttggtgtttgtttgctgttgggagaagcctcgaggccaaaactgtgcgaggcgctggtttcacgggatctattaaatttctagtggcaacgatttcccaaggaggaaaggggagggcctgggggacactgatgaggagtggaggctcgggagaggaaacggggaagaattgaagggggcggaaagagatggacaagagaggactcgttgggtgggttgcgtctgaatactagtgtagcttcttatggccgtgtaggactgcgtgtagaagtcttcatcttaaatcatgagagctacattctaagtggagattaaacgtggacacacaggtgtgagtggaaaagttgaatagatgaacaagcgcatattgaagaggaaataggcggccaaaatcaagaagagtctaatcagtgtaaaagactaaggagtacccagagaagtaaaaggattgtcaccttcctgaaagccagggcaggacctgagaaggctgggtgcagagatgagacaggatcaaaagttttgtcaatcatgtgtatcctaggagacaaattttttagcagatgtgaagggagtgacctgttaatgtggtttgtaaatggaggcagcctatagaccattttatggaccggatgatttatccttgttgaaggggagattgatgccaaaagggcagtaattgaggaaacaatgggttaaggacagagcaggagagattgacattaggaaaacagaataattccattctctgaaaccaaagaaaaggaaacattttgaggtgaataagagaatttgaggtaatttttttgtcttcctattgaaataggcacagccaacagcagtaatgtggtctgggtaacagacagggctttagctaccacggatacccttgtgaaggcaaaaaccgtaacttactcgtctttgcatctcctgcattgcctagcacactcccctatatatatagtgggcagttaataaatgtttatgttgaatatttttaaatggaattaaatagatgttccttgcaaatgagaacttcagtgtacatgaacaaaaaagagataccccaggggaaagatgatgatcttgaagaaacaatgaaacctgactgtctttctgtttaaggataaatagttgcttaatgtaccatctctgtctggaaagttttttttaaatactgaattcgtgaatgtaggtcataagcatgaagcgcagttcagtttccagcggtggtgctggccgcctctccatgcaggagttaagatcccaggatgtaaataaacaaggcctctatacccctcaaacgtgagtatttcccttgtggttctaatttgcatgctttatcatcttaggcaaagaaatcataagaaatagttaatataaagatgtaatatgagtgatgtcttggtgaatcttgtctgttcccaggggtacctaattttggatcaatgaaatctaaaagtgggcatgatactctgctaggtgttgtttgtgtcatttgtttcacaaatttccaaagccaaatgctttaccaggcaccccctaaaaggactgttaattcttgttcagtactctcttatttttctcttttattctagagctacttgtttaagcaggctctgtgctgtaacttagagttcactgagatatttccaattagcaaagcttcaatcaaatcagagcaaaattatttgctctcataaggtataa

SEQ ID NO: 1245217 - DNA, 4001 bp, Homo sapiens
ctaaaaatgtcggatacagaggtaccccaggcatccccttcccccaccttcacaaatctactcctggaatctgagacacaggtcctttgtctgaacaatgtgggaggagtctgtctgcagtactggtgtgctggcaagtgaagaggagaattaactgaaaactgtataaaccgatgaagtttcttaattaccttagtgtccattttttcttcatcctgcacactgaacagttttaaaagacagccagtgtgtcagtgtgtctttccgagagttgaaacgtaccgagagaaatacagttaagataggcggcagtgagttgggctgcttttccaaagctaagtttctcaacagcggaggggcaggggatggcggtgataccgaccatttgaacaccccttccctccccagtgagctctgtctacaggcctccatttctgttcttttctccatctgaacaagttcttgtaagggaggctgaacgcttttagaagacactcggcggcgcaaacttgcaatctcgaagctttccgtacccaacagcgaacccacaactcctcgagcccgaccttttaccacctcactgaggtttctggtgccacgccagcctggtgttccacgaatacagcccaagtaacgtgaacaccaccggactgggtcgcccgagaaacttcacactttttaccaggcaagacgggcggaaaagcgtgggttttcgcaaggtgacccatcttcacatctggtcgaccctcggctcctcccagaccccttcgcggtggacttgggggcctcgccgggttcgccttttccgtcccacgctcctttctctcgtctccccacccacgcccggggccatgcccagctggacctccccacccctgcactcaccctggcggccgacgatctcggcgacgtgctcggagctgggcaccgggacgcactcggtggtgttgacgctctttctccggagcagggccgcctgctccccgttcagggcggccgccgccgccccacaaccgccggggccgtaggcgtgggacagcatcgccgccatcatgccctgggcatcgtcccctccgtacagcacccccgccgccgccgccgcggccgccgcctcccgggcatcgaacctggcggctggcagcagcacagaccccagggacccgcccgggatctgctgggtctgagaggcggtggccgcgggcggcgacagcagcagcagcgacgaccggtcctcctcctctgcttcctccagctcctcctcctccagcaggtctccgtccagctccgcttcctccccctcctcctcgtcctcttccagctccagctcggccgcctccggggccccgggccggccgggcggagcccgctcctctggagacagctccgccgcccgccgggcctggccctgcgccgccgctgccggggcccgaagcgccggggcgccgggctccgccgggctggggtcgtcgaggcctagcgcggccaagcgctccctcagcaggagcccgtccccctcgagctccgggccgcccgagggcggcggcagaggcggcggtggcggcggcggcggcgggggcggctgcggcaggggggccggggccgccgccagggccagggccgcggagctgccgctgggcatcgcggcggcgcgctgtcaatggcggcggcggcggccgggtcaggcgcggcaggcggcgagccccatggcggacagggccagggccctgctcagctcgcaaacacctttcctctggggaggcggcggggctggggacccgggccgaggagcgccagggccgcccggagaccggagagggcggggtggaggggcaggggaaggaggcagaggtaggtaactaggtgggtgggtggggacggcggcggggcgggctggtggaggtggcagcggctcccctctcagtgtttcttttgtttcatggccttaaccagcccccggcgcgcgcggcggcggcggctacgccccacgccgctctccgaatgaagccggcgcgctctgattgggtgcttttaatctctgggagcccgccttctcctcccgcagccttccaactcctttccccagccccaccccccaccctccttcgggccccgcccctcccctccccagagctctctgattgggtgaccgggaccagccagttcccgaagcctactccttccgtcctctccccgcccacctccctctcattcctcccggcacgcgcggagagggactgtgattgttcactttacacgtcactctttgtgacgtccccggcgggggcgggaaaaaggaggcggacgaaggcgctgcagcagaggctgaaactaagggccaagcggggttttggcgcaggcgcgtgcggtcgaagcgcacacctggatttgtttccccccaacccttcatccctgtagcccatgtggctgagttcttttagggaaggcactgtgtgagcggcctggagcagagctgcaggcataggttcgagagcattgtttccttgggttgaggaagagatcgcccccttcagaggaagggccttaagaagagtcacggaaggaggggccacgcagtatcctcctatcccctcgcgggggcggtttcctgagccgcgtggctcccgggccttccctctcggactcgggaatgctcctcccacgccccgctggcccggcttctctgccggcaggatggttacatcagcagcctggaggtgctgaagtttagctcttcggggttttttgttttttttttttaaacggagtccagctctgtcgcccaggctggagtgcagtggtgcgatcttggctcactgcaacctccgcctcccgggctcaagagcttccccttgcagtggctcacgcctgtaatgccagcactttgagaggctcaggcgggcggatcacgaggtcaggtcaggagttcgagaccagcctgatcaacatggtgaaaccccgtctctactaaaaatacagaaattagccgggcatggtggcgcacgcctgtaatcccaactactcgggaggcggaggcaggagaatcgcttgaacccgggaggtggaggttgcagtgagccaagatcatgccactgcactccagcctgggcgacagagcgaaactgcgtctcaaaaaaaaaaaaaaaaaaaaaagagtttctcctgtctcagcctcccgagtagctgggattacaggcacgtgccaccacgcccagctaacttttgtatttttagtagagacggggtttcaccatgttggccaggctggtctcgaactcctgacctcaagtgatacgcccgcctcgccctcccaaagtgctggcattacaggcgtgagccacctcgcccagctctttggtgctttttaagaaaatgaatccccgtttcctcctccctagacactcttcccacagtattgctcaggtgatctcacgcagtggctatcttttctagaggttattatttctgtttttgttgagacaagagtctcactctgtcgcctaggctggagtgcagtgacatgatcacagctcactgctgccttgacctcctaggctcaagtgatcatcccgcctcagcctccccagtgcatcaccacgcccggcgcgcatcaccacacgtggctaattttgtttatcttttgtagagactgggttcttaccctgttgcccaggctggtctcaaactcctgggctcaagcgatccttccacctgggcctctcaaagtgctgggatcacaggcgtgagccaccgcgcctggcctctagggggtatttttaaatggcttgttaaaaattatgcttcttaactttcctctgtcttaggctgtgactagcccgtctatccctttagtactaagtcctgccaggttaatcttagccagcagcttggtcctatacctacagatacaatgtaacaatgtaattttaaaatttctaaatgacccctttaaagcaagaagaaacatagttttaataaatacacttagttcaatatgtccaaaa

SEQ ID NO: 1245218 - DNA, 4001 bp, Homo sapiens
caatcaccaatataatttagtgaaagaaacgaaagtgcagaggagtgaatatagtttattatcatttgcacttaaaaggggattagatttatagtatagtcacacacatgcttgccatgcaatagagtattctgcaagactacacaaaaaactggtaacaatggctgcccctttttgtgctgttgaatcttttcattttcttctagtcatgtacatacaccctttttaatattcaaaaagctatctgaagcctggccttgtggctgactcctgtaatcccagcattttgggaggctgagacaggagggttgcttgaggccaggagttccagaccagccggagaaataaaacgagacaactgtctctaaaacaaaaattttttttaataaatgtttttaaaaagccagctaaggaacacaattttacgaattatctgttcaaaaactgagttggcttgtgttaatttctttattgctactgataataactgtgagcccattccaagatttgtaaggctttgccaaactcaatgtcttagaagtagctcatttaggaattctgaaaagtacccaattttaaatgtgaactattttctacagaatcaaggataaatatcaaggataaataataccaaagatgaatctatatgaaaatgaatttgttatttattttgtgaaagcaagcctttggtttaatcatttagaaactctagcgtcaataacagacccctaaaattcactaatcaagattcactaatcaaggaccctgactcactgctgggtgaatgagtaagattctgacatcaccttactgagacggacgttagtgtaacaaaaaataacatcaggtgtcccccacgccgatctgccacttggaaaaagtatttaacacaaagaaatggttcaagagctcaggatgtttttctctctattgatataaagatataaaatagaacaatttggatgaaaaatcattccagagtcccaagtaacatttggctactgaactccaagtaattctgtgtcacaggaggttaaaaaaaaaaaaaaaaaaggcatctccacaaatccgaggtaccaaggccccttggcaattataaacggtcagctgagcaccatatggcaaagcaagcctcccttcagacagttatcacttggtggctgattaatttcaatggcttattagataggcctctccagaccccttcccaagaggaggagtcgggttgggggacctgtgtctgttctcttcccggtgctttgtgtcttccaggcttgaaagcatcccggtgatggtgctgccatcatttcccttgggggtagagggtcttttctgaaagtgtttgttcacccgttcggaacctagaattcctttggcgctttgcctttccgctcgctccagccgggcgctgcccaccaggtgtcccactgcagacctctccccgcgacaccgacgcccaccgcagctcgccccttccccccgcgcgcgcaagccctggccaggtggccgcggcttaccggtgggcgcgctgtccaggatgcggaggtcgtaagccccggagcagcggtagttggcagctgtgccgttgtcccacactaccaccacctcctcggggctctcgaagctccggacggtgcccacatggccctcgccgccgtcctgcttcccccacttccagtccgggccgcgcactacccgagcgccaaccccttccaccatcacccggttattccgggagttactcatcggggcccgggcggtgggctccgccgctgccgccgccgccgccgccgctgccgccggggggcccgtgagggagttgggcccgggccggactctaggcgtcggcgggggcggcagcgagccccgggggacgtgagaataactcacgggggcggcggcgcggtccccgcggagcccaaagccgctgcccagctgtcgccgccgcgccccccgctcggagtggagggcggcccgcggctgctcggaggcggcggcggagagcgggcagaggggagggggccgtgggcggggactctcccgcttcctccgggctccccggccaggctacagcgacggccgcaaggaaaccacgctctcccccggccggcagcgcgaggagcgcagggggccgggggaggctagcccgaggggggcggcggggagcaagcttaactgccggcctttctgccaccccggcccctcgctcgggggcgggcacccaagcgccggcgccgcctcctcccccgtgggcagcggtggtacctcccggcgtccggcgagcgcccgggccctcaggcccccttctctctgcccccgcaccagccgccgcgctccgccccgccacagagtcccagccgggcgagagcgactccacatccgggtaccgccgtacccaaggccggagcggcaccttctcagagtgtctaggagggggatcctcggcaataatagagtgggaaggcttccagagagccgcgcgatcgcgggaagaaaggaggagaaaactgatccctaagcgtctctccagggtccaaggagagtgcgcatgcgcgcggtctagaaaaagggcggacggttgcccaaccccagccccgggcgatggaggggcgggcccaggggcggatccctggagttgccgcccggtggtgccgcgcgcccaatgagctatgaggaaagcggttaggccgtcctggaggcggggctggagaaagtgagggtggggaagctacccgggctgctggagctgtgcggctgtgatgtggccagtttttcactaactgctagttttcctaggcgaactaaatgtgaattagggattccatattcttttagtcttcttttttaacgaaggtagaaatacattcacaaattcagggcgatctgtatttgtgtgtaaattgaaaacatttcaaaccagacagagcaggttagtagtgtgtttttaagctgaacagcatggtatggaatgttgtgagcaacggtaaagacttttagaaggtgtgtcttgactttatgcagaattagggtgataggcagactccaaactttgctcattaataattgcctccactcacgaaaaaattcagtccctaattacaaaatacaaccttcaaaggaagattcgaagactgtaagagaagtttctggttgccgttattcaaatgacattatgctgcatagggtttaaaaccagtgtttccacaggccagcactgttggcaccgttagcatgcattgttagcataaactgttgcttttcctgatagtcaaaggagggaaatgctaacagaatggataatcaagggaaaagacaagaaaacggacgtaaaatgtacccaaggaattactatgtactgaaataaaattttttttgtttggttttttttgttgttgtttttttttttgctttgtttttgagacagggtctcactgtcagccaggccggagtgcagtggcgccatctccgttccccgcaacctccgcctcctgggttcaaggggtccgcccacctcagccttctgagtagctgggacctcaggaacgcacaaccacgcccagctaattttttgtatttttggcagagatgagcgggggggcagtggggagcttcttgggggatatatctcactattttccctggccggactggtctcgaactcctgagctcaagcaatcctcccacctcagcctcccaaagtgtttatcccagggataaagccaacttgatagtggtggataagctttttgatgtgctactggcttctgtttgctagtattttattgaagattttcgcatcgatgttcatcagggatattggcctgaaattttctttttttgttgtgtctgtgccaggttttggtatcaggatgatgctggcctcgtaaaatgagttttacgaaggagggaggattccctctttttctgttgtttggaatagttttaggaagtacagtaacagctcctctttgtacctctggtagaattcggctgtgaatctg

SEQ ID NO: 1245219 - DNA, 4001 bp, Homo sapiens
aacttcatgaggggagaggaggaacgaggaagaggtgatgttattttggtttgttttttcccgccctctctctgtcttgtttctaggagaaaaacaagtggacatgttccaagactcccagcagtgggaggggcgtcagattagtgcacaaatgtctgctttaaccgtaatgtagaggaaatacaaggaacttgcattaaataaaagatgcccacaacactaccagacatacagtaagtggtaacgagttctgagggccagcctggctgacacatcccaattttgcatttgaggggaaaagtactgttctctgagggacaagagtgaaaccaggaggggaccagaacatagctctactttcccagggtagcattgaggggagaggttggccaatagtgggcgtgagagatcacagctggaggagatttaggggattaaggaggtgcggtgctgatataattactcaggtagccttgaagagttgcttcaaagaatggagagcctccctccccagcacctgtaggcattcatagtacccctctatttctgagtggtaggaaatttccataattaatagttgagagagagagagagagagagaatacgaaagaagggtgaggagctgtctccagcaggtgaccctgcgagagggaaggatgaggagtgaatagagaggttggcagaaggcacccccgtctccctcctgactctccctacttaggaagccagaggagacacacaggaggaggccacagttctcacagcccccaaagggaaaacacagttaccctccacaacaccaggaagtgacccgaagcgctgaaatcagctacccgagtagtgaaacctaagtcatggttgctgttctgcccccagaaggggagcagtcaccagttgttcatcgcgacagagcagatacactcaaaccccggtgccctgtgccaagacgtgcccacttcacctgcacaccctccttgaccatccggcacgcggccctggggcttgatgaagccctgcacccaaagtccctggcagagggatgagtcacgaacttgggccctggcagcagagggctgggtcggccaaggccagatggagcttgatttgcaatttcatcagcctgttccgctctgaggaaaggcacgatgtgatcttggtgttgtctaattcacaggctcgccctgttcttaaaggtgaaattgcactgtttgctaattcttctagtcccccagagaactggagctcagagggattgttctgacgctgtaagagtaaggaaaatgaggtttcgaaaatcaaagctgaatacaggctatcccagaggagtctgcagagcgcagcctcgggaggccccggccaagaggccttggcctcccggtcccaacctggcgcgccgtcagaggtgctgtcccagcccgggcgctggcggtccacgcaccgctcctacctcgggaggacatccgaagggtcacggccgctggacatgctgtcttttgcaaccccggccccagcaggccctttacagtgaggggtctcccgcaagagagggcaagaaccatcctaagccccgctcgcggagggcgggaaaaggggaagacggctaggttggtcctgcccaccggaaagtcggaagagtaagagtagcaagaagccttggggctgcaggtgggacctcagggagccgtgtctactaggaggacgcgtggacacgtccctcctggagtttcgattcaaaatgcgcccgaatgaggtagcgccgctctcactaggagcaaaagatccgtccacgtcggttccagaaacctcgtgtcccccaagcctgcccgcccgcctcacctgccaggcggctgaactcgcgcgcccgcagctcgcgcaggctgcccgggccgtagccgtaggctagccgcggtgcgctcgggtcccgggaacccgcgaaggtccacagctcccgccctgactccgccgccgcgccggccatggccccggctagtccatccaggccggccgggcccgggaagtgcgcgaagccggcccccggcgactccgcccccgccacgcctcccaggcctccagcctcccagtctctcggaatccgcagcctaggtgtggcgccccgaccggactttcacttctggccagccctttccccacctgggcgcgggagcgggtgccagtctttaaacaacctctcgatgggtcccacgaagatgtttccagacccttggaatgccaagttcaagtttagctatgtctcgcggagaggccggtggaagaagcaacgaggtgatctttcctgcttggcatcggcatcctggaaccccgcgaccctcctcctcgcaggggtctcgggaccctcaccctctcaagcgggaaccggcgtctggcgggggcgggggtgggggcgttctcgggttgctgctacccagcggggcgtgtgcttgccgtttgttagaatgcggctgaccaaagggtagaaaaggggaaagattagggatccacgaggctaataaattctcagtggctgcacactttcggaaccgggaagctcgggggcttcccccggagcgggccctgcagctgggatccaagtgagctgagcttccccgccctcccaaccgcgtcctgggccctacttcctgcccttgcctccccaaccctgcatcccgccccgcacttcccgcacgtgggtgtggccgggccctctctattaaagcaagagtgccctaggacaaagccgcccctgtcccggacagagtggaataagagcgcctccttcaatccccactcgcgcctgcacccagagcacctgggacacagcggctctgtcttggagaacaggtgcctcaatagggagggcctggccaaacctatgcgcgggaagtgcggagcgggatgcaggggtggggcggcaggtgcaggtagtagagcccaggcatgcggttggggggtggggggaaatctcacgtgcgatcccaggtgcggaacccgctgctgggaatggggtggaagcaaaacaggtactgcacgcacaggcgaggtgcctcgtgggggaatcgaatgtcagggatggtggacagtgcggatgggcggcaggtgctggggctcaggggagataactcagaggcaggctcggtggagaacccaaggccggcgaccaggtgcaggcggcccacaggccctggaggcatacagcggggggacaaggtgggaaggaggcctatgccccaagagctcaacctgtgctgcatccaggccagctgccacccagggtatgggccgcagatgccctaggatccttgctgatgcatgatgcataccggtgcccagcgtgagagccatgggaaggcagcacgcagccctggctctcccgcccaggcccctgataccaggccagagaaagacccgccactaagagctcatttccccctggccggagacccaggggtctgtggactgcagcgctagggtccatgcccaggtacccatattcctcagtggcctctgcccactgaccacccccgctctctccctcactgctgaatgtccaggaccttactcgacaaacacccatagttgttcgaggaggagttaatgtactgatggatggatgcaggcatttgctcattgacatcactgcccaccccaccatctgcttgccttctggccatgcttcaagcaggcactttggatactggactgtcttctgtgaatgtggctttgggcagcactaataacaagagctagttacagggcctcactgtgtgccaggcactgcactgtgtacactcttacctgtcctggtcgttcaatgattaaatatgcagatctaggaggtggctcttacagatggggaagctgaggcagagagaggcagaataacttgcacacgggcacacagctagaagacaagctagcacctgggaagtcagtctccagagcccaggcagggaagtgtgttttgctaactctctggtgtgagccaccgtggttcccagggcctc

SEQ ID NO: 1245220 - DNA, 4001 bp, Homo sapiens
gagccgagatcgcgccattgcactccagcctgggcaacaagagcgaaactccgtctcaaaaaaaaaaaaaaaaaatttatctttgaacttttcaatttgtatttatttatttatttatttttagagatagggtctcactccaccgcccattgtaaatcaaaaatgaaatcctaagacccctcaaccatctgcatggaccccaccaagggcattccagagttaaccttgttttaggttgttttaagcaaaacttgtttaggccatgatgggaagtgggggtggaacttgacacatttcatcctcctcccttttagaattcaggaaaagcagaccagcatttaacatgctggacacttaacttacctggaggcttcatctgcatgataaaacttcagtctccacagcctcttattgtaacccaaacattcctttccattgataataaatctttcaaccaaatgccaatcagaaaattttcaatctacctataacccggaaacccccgacccacccacctcctcagctgtcatacctttatggaccgaaccaatgtacatcttaatcttacatgtatttgactgatgactcatggctcccctaaaatgcataaaaccacactgggccccgaccaccttgcgtacgcgttctcagggtctccaaatggctgtgtcaccagccatggtcactcatatttggctcagaattaatcccttcaaatattttatagagttttgactttttgtcaaccgcaggctgcgtcacagctcgctgcagccccaaactcctgcgctgaagcgatcctttcccccacaacttctcgagtagcagggacttcaggtgcgtgccactacacctggctttttttttttttttttttggtacttttgttgttatggtgggggcgggggacttgctatgttgcccaggctggtctcgcatctctgggatcaagccatcctcccacttcagcgtcccagagtgctggaattacaggcctaagcaacggcacccagcctatcttttaatttttaacttcaaagttatcgttaaaaatctaatccccccaaaatatgaaaaaaatacttaatatgcactgacctgtagtttttctctaattcactatcttaaatatattaattgcaatctcatcaactgcgacttgcatttgaaattttccaccttaaacggtattttttgataagatggattttttaaaaaatctacaccagcaaactagagtgagagacccctgcaaagtaatacatgggccttaagtcaccgagattttccagcaaataatttgcagaatgctgtttttcctaggttaacttgcaatcctaacacggaaggaggttccgtttttagaagtttaaatgttgtcacacgggcgcaagaatacatacaacagccatgctttccagctctgcgcacaacgccaggcagatggggagcaccgggcggtgcgggagccctttcaccagggcagggtggcttcggtggccgagggacccgggaactgcagccggagccggcgcgcacccagccaacttcctgtttccgcggtagcgcgcgggcctgtcactgaagccccgccccggcgacctcaggcgggcggggaagaccgagtcttcccggagccgcttcgtccgcccggcgccggagtcccacggccggtttgcggaagcgggtcgtctgaaggggcccggcgggtggctcccgggtctccgcggcctgtgatccccagagcggacaaccgcagctggggctccgtgcgcaactcggagtaaaggccggaacctacgctcggcggccgcgtcccggcccctagcgccctccgcgaagtgcctggcaggctcggcagtctgagtgtcgcgttacagagtcccctgggcagtcaccgctgaagggcgggggacgcgggaaaggcattttggggacacaggagagctgcgagggcgaagcacgggcgagctgtcgttagggcccaggaaaggcccgttgcggggcgcacaggcgggcaggggaactcgcgccccgcgccgcgcgcccggcctcctgacgccagggccggcttctgagcacagccaccgcggcggccgggggcggccactgctccccgcgagcccgcttccgcgccccagaagcccccagagcccgcgtccgagctccaggccttggaggagccaggcgggcagctgacagccccggagccgctcccgggttccgcgcgcggtggcagccaggccgtgcctccccgttcccctcccgcgccgcgctgcccctccgggacccaccaggcctggctgcgcctctttcctctcctcccccggagccttggaaagtgccctccagagatgtgcttaggaagtgtgtgatgaataaaggagacaatcaggataactataatatttattatgcacttgcttttttctcactgatgttactaattttaatggtgtagcgcggcgcgttccagttttctaagtgctctcacatccgttcaaaaaatcctcaaaataagcctgtatattaaaagcaggagccattatttcatatttcaagaagtaaacatgctcagagtaataatccacatagagccttccaaccagtcaattctggtacattttcacaaatctatgagtgtggttaatacacggagatgtggtttgaggaattatataggacacagccagcaaaatgcctggtatacaataagtatgcggtaaatggttattattattaagaatattgtaatatcttcagatatgatcaggtgaacaactttgacataatcgaaactgggacagcctgattccataaacacactaatatggcaccgtggattgtttgcagcctcacctctaaagtattctctctgactaacaaagaaagggaaactagaaccagttaagcttataacactaatcacaggctaaaggaaatacaggggccaaatgaacccattagattacaccaccaggaagtaatctgccaaatccagaatgtgggaaattctacaaaccaaatgacccaatttcttttttcaaaaataaatgttcagaggctgaagtgggaggattgcttaaggccagagttcaaggctgtagtgagctatgatcacagctgtgaatagccactgcactccaggctgggcaacacagctagaccccccatgtctttaaaaaaaagagggtggggggaccttgagagacacattagccaaatgcaatttgtggaccttgtttgggtcatgattaagacaaacaaacttttacataaataaatggcatttttaaaaacattggcggccaggcgcggtggttcttgcctgtaatgccagcactttgggaggccgaggcgggcagatcaggaggtcaggagatcaagaccatcctggctaacacggtgaaaccccgtctctactaaaaaaaaaaaaaaaaaaaaaaaaattagccgggtgtagtggcaggtgcctgtagtcccagctactcgggaggttgaggcaggagaatggtgtgaacccgggaggcagagcttgcagtgagcccagatcacgccactgcactccagcctgggcgacagagtgagactccatctcaaaaaaaaaaaaaaaaattgggaaacttaaacatggactgaatgttaggtgacattaaataacttcaggtaattttattacgataataccatagtggctatgatttttaaaggcctcagagaaacatattaacatatttacaggcaaattatattatttctgggatttgctttaataaaatttaataacaaattcctggagttttttagagaacaaagtgagagataggagaaacaatattggcaaagtgtttaatgtttaagcaaggagatgggtacatgggcattgtgctaggcctaattatgccccccaaacatgcccacattctaatcttcaaacctgtgaacaagttacctgacatggcaaaaggggctttgcaagtatgcgatgaagaaccttgaga

SEQ ID NO: 1245221 - DNA, 4001 bp, Homo sapiens
cctaggtctcctcacgcccagatgcagttctccaaactctataaacagtaagctgtctcatccaaccctccatctggctgttatgccttccattttctctattttgttacttgatagttattgttggtaccagaatgcaagaaaaaattcaagctctttctgtagcctcttggccaggggtaatctctgaaaatggtttgcctatcccttgacccagaaaactccacaaaatcatgcaaaccaagggactcaaatctttatgttcgctttaagaacacccatgtaactgtgcaggccatcaaggtatgcatacccaaaaaaccaccaagtacctgaaagatgtcacttttcagaggcactgtgtgcctttccgtcattacaaaggtggagctgacatgtgtgcccaggccaaacaatggggctggacacaggattggtggcccaaaaatgtgttgaatttttgctgcatgtgcttaaaaatgcagagaacaatgctgaacttcagggtttagaggtagattcttggatcattgagcacattcagttgagcaaagccaagatatacaccatatttacagagctcatggtcagattaacccatatgagagatccccctgctacatggagatgatcctcgctgaaaaggaacaaattgtttctaaaccagaagagatatttacacacaagaaaaaggtatcccacaagaaactgaagaaacaacatggcctaggaatacattcagtataagataaatgcaaataatagtttagccaggcatggtggctcacacctgtaatccaaacactttgggaggctgaggcaggaagatcacttgagcctaggagtttgagaccagcctaggcaacatagggagacccccatctctatagttaaacaaaaaatttaattacccaggcaaggtggcatgtacctgtggtcctagctacttaggaggctaaggcaggaggattgcttgagctcaggaggtcaaggctaaagtaagccatgatcatgccactgcactccagcctgggtgatagagcaagacactgtcttttctttttttttttctttctttttttttttttgagacagagtctcattctgttgcatagactggagtgcaatattgcgatctcggctcactgcaacctctgcctcccgggttcaagcaattttcctgcctcagcctccttagtagctgggactacaggtgcgtgccaccatgcctgactaattttttgtatttttagtagaaacagggtttcaccatgttggtcaggctggtctcgatctcctgaccttgtgatccgcccacctcggcctcccaaagtgttgggattacaggcatgagccaccacattcagccaagacactgtcttttaaaaaaaagttcaaaaaaaaaaaaaggccggcacagtggctcacgcctataatccccacactttgggaggccgagacgggaggatcacctgaggtcaggagttcaagaccagcctggccaatgtggtgaaaccctgtctccactaaaaatacaaaaattagccaggtgtggtggtgcatgcctgtgatcccagctacttcggaggctgaggcaggagaaccacctgggaggcagaggtcgcagtgagccgagatcgcaccactgcactccactccagcctgggccacaagagcaagattccatcttaaaaaaaaaaaaaattaaaaaaaaaaagtaagttcaagtttaaatgcctttcctacctgagatattaattactcccacaccatcaccaacacccctacttccaaaaggtaattatgaacttctgtaaacatttttcagttgaactggttaagtctatagcagtctatcaactgtgttgaactacagtgtctaacagaatcagttgagtcctgaaactgttctgtgctgtcttacctgagctaggcaatgaggagcccagcgtggctagcttcttgctctgtgctcatcctcatgaagggtgaatatgaatcaatctagaaacatctctgtcctttaaacaagcttgcagtgaacaataagccacattttgtccttaaggatgaaacataggccagattagagttttatcacaagagagaaatacgtaataaggcctctgctatctgcccctgataattgctagtgatacattctaaatgatgcagttttgcaaacttctaagattctcacattacatttcctatttgtgcgagggcccagtgagaaagctacacatgttttattgtggaagagaacaaaatcagtaaacggcaccacgagacatcaaaccaatcctgcagacaacactgcctatgatttctgctcttaacacctcaaagtgttcttaggctatttgtcattttctcctctcaaccttggaaaggtcattcttgtgcttctttgacatatagggaaatttgggggagtggagaagagtgagtggggaacttccccaaagtcccaaagctagttgatgggattgggatctaaatgtttggcttcctcttgtgctttgtccagccagtcattctatggattctgcctttcacctctaaaggcagagttcttattcccatggccttccttcctcccactttttaaaaatcttttctcaacttgttttcttctctgccccctcccccacccccacctgccttgtttctattttaagtttgttttgagcattgcttaacatattccttcctctcatagtcttaacattccacggcttgtccctcaattttatacttagagtagaatccagtcgaatcccacaaagcgacaaacctgtaggcgttttatgacaatgagtgtaatgtcaggcacaatgtgaccaataaaacaataaacccatgcccaaaagtgctttaccaggcctgctgccgtgataaagatccagtccattattggaactgttgactcttccttgagagattggagaagactctaagagtagaaccttttttttatataccccacaatagatacattacaacagtctgtctttgatcccataataccagcttcccaccacaactccatcacagcattactgcacctttcccattattgttcatttaatttccccagtaaataacaaaagaacagccaggcgcagtggctcacctgtaatcccaacaatttgggcggccaaggtgggcagatcacttgaggtcaggaattcgagaccagcctggccaacatggccaaacctcatctctactaaaaatacaaaaattagcaaggcgtggtggcaggcacctgtagtcccagctactggtgaggctgaggtgggagaatcacttgaacccagtaggtggaggttgcagtgagccaagatcatgccactgcactccagcctggagaacagagtgacactctgtctcagaaaaaaaaaaaaaaaaaaaagaacaaaagcaaacatttttatcaacatatatatgttcaggaaccaactatgcaggtttcaggtgccctgcaactagagcagattattttgtctcctgccggcatccaatccttcaagggattgtgcattagatcatccctagaaaggaaaggaaaacaggtaacatgcaaattacctgattttctcattgagaatttttggggaggtagcttttggctattcctattctcattctttcttacaacctcaggtaaataaaagttgaccatgacttaaaacaacacagtatgttttagatcttagaaatcaagccctattgtctgtcaaaaatcaatctctcttggtacaaacattttgcagggaaagttgacaatagtttatcaaaagtccatgtgcatatgccttctttttttttttttttttttaggtagctcctgagcagctgggattacaggcatgcgccaccatgcctggctaatttttatatttttactagagacaggcttttgccaaactcctgagtttgagtttcatctcagactcctgacctcagatgatccacacgccttggcctcccaatgt

SEQ ID NO: 1245222 - DNA, 4001 bp, Homo sapiens
ccaatccaacaaaaacaaaaggatcattctcatctgttgcaacacaggatctcagagaggatcgttttaaacacactgtgaatgaacgtagtatacagattccaagatttcttaggatgttctaactccttctccaagccctctcacccgtaagacaggcattctttcctaggagaattacattttctggtgggtttctatggtcaccacatatgcctagccttgtatgaccaagaccaggaggtcacctggccatttggaagccaaagacacagctctgcttatagttttactcatctctgcacacgttcttcaacgaattcttcttcctctggaacatacccctgagtgagctatgtgcagaccccttggttttcacgaaccccaagaccccggctggggcttgtgttcattgccaggttgtgctctacctgatcttactgaagatacatggatttggggtaacttagaagactgttttatgctttacactgactcccatctgcttttgcaaacttgaatgattctgactcaaaatattagatttttggtcaataatccttttatttattgaagccaaaaggtatattatgaaggccaaaattataaaacactttgattttatctcatctgtaaaatgagcagaagaaactgttagattgcttaaaaatccttccaacactgaacttataaatgacaatagtaggctgcgtgtggtggctcatgcctataaatcccagcattttgggaggctgaggcaggcagattgcttgaggtcaggagatcaagaccagcctgagcaacatggtgaaaccccgcctctactaaaaatacaaaaattagccagacatggtggtgcacacctgtagtcccagctactcaggaggctgaggcagaagaatcacttgaacccaggagacagaggttgcagtgagccgagatcgggccaccgcaccccagcttgggcaacacaacaagaccctgtctcaaaaaaatgaaaaaaaaaattaatattaaaaaaatcgtcttcattttagaaaagaagaaactgggcttaaagtaatgttgaacaattaactcaaagtcaaatactggcagagcagattttaggactctgaaagatatcctttcagtcactgtgctataagcctaggttcagctcccaggcaatgtcctgtgagctgaacgagggaagacagaccgcatagacatttcagtttaaagtgtcaatatcttccctgagtccctgccattctattatattgctgacaatagaatgatctataacccaactattgatcgattaacatagtttgtgaaaagcaaacaaaatcagcttcctggtcaacattgcccacttcagttttacaaagagaacattaccaaatcctaccccctagaggtcgagctcccatactggtgaccagagtgacattccagaaaggttttgggaacccaagtgcagccaggacgcctcccgctgcatctggctgccccggccaacagtgtcccttacctgcggctcctgcaggcggctgccacgtgatgaaccggagcccgttcctgactcgggagggctgctttcccgggtagtagccaaatgtgatgactcggctaaattttcccagccctgaattcctaacatacaagaagggaaattaggaggtgacgcagggtctgtccaggataacgggtcggcacagagtgttggaaagtgagaatcaaataagaggggaaagtcaaagtttatagagtatttgggcaggggagggaattgttctggaatgaaaccgacaagaatattgtagggtggcacaagcatgacttgctacctttgcttccccacgccatgctgaggtgtttttccttctccttgctgtgatttcccctccttcttccctcatgccagcctggtcgacactttctgcagaaattctgcagatggcaattctggggacctttcctctgcaccaaacaaaacctccctgccaaggcccgttccccatgcggccgcgagatggcggcatgactcaatggacgggttccaggcgacccctgcacaaagccgccgccgtggctgcctccttccttacataatcctgttagagcgcatttaatctaaggatgggacactgtgttccatgccaagcagcctcatcgtggctgattgttgcaccaacaacaagagctttaaccgttgacgtcccttcctgctcaagaaacaccgtatgtcccgaaaggagcgatttaagctctcaaaatgatttattggtaaaaagcaaagcaaaattaaaaccggggaattacagcacctgcagaatttaggagcctctctctctcatcagccctccttccctgactctccaaacacgtgcataaatctatttaacaataattagttatcgtctcgctctgcattgggtcataaagggagaaaatatgtcctgaaaggaaaaaagaacagttatattttcaaagacagaggcacttattgttatgctaatagataacattcaattaaaacttctgtgtgccaaatgttgtgataaatattacatagactatctcattcaattgttacatcaaaccaaaggttaatactcctactatagtctccattttaaggctggagaaactgaggcacagggagattaccttgacaaaggtcatgcagttaatttgtggcagttaaaattcagctacaggcaggctaatgtaagagcttggactcagccatgatgctatgcactggactggtctagaaaacccaggagataaacagaaaaatataaaccagagaactatgtcagagtggaagatgaaagaaaaaggcagaaagaaaatcgatgctgctgagaaaataagaagaatgaggctaaaacaccaccctcttcagattaagttacaagggaaccactgtgacatttgaggacacaatttcaatagagtgacagagaaaggaagctagactgcaaaactaaggggctatgaggaaagaggaaattgagatgtcttgctgcaaaaggaaagcaataaatagactagaagagacagcaaggtcaggcaaaagcattttggttttcttgtgtgctttttgaaatggaataaagcctggccttgtttgaaagtggttgcaagggagccctaatatgtggctggtgccaagtagtggtaataggaagaggtggagggggcatcaagggcacgagggaaagggttagctctggaggaggaagaaagatggctgcctctgcctgcaactgggaggcagccacagagatgaagatacatcaacacaaaactgagaggaatgggcgagttcaattcttccaaattagctttaatcttttcagtaaaaccagagttaggttatctgccaagagcgagaatgaggtttatacggccataatctatatactgaactaatccatgtagtgcttagaatgaccaaaaaggtaataagattatccgaagaacagaggagactggagaaaggaagcccaaagtatgattgtaaagattctctgcaaaatctcctttgtgaatcagaactgaaatttacatcccctcctccccatgaacagaaacacaacaaactattaataaccccttgtgtctaaagtttctttgtattcatgttttaagatatttgacagagaaatagtatcttctctactgttaaataggagaactaatatgcagataaattttcctgtttgacttaaaactacaaagaacatcagggccagaactggaattgatatccaggagcctttctgatacttgcactgtgctgacctcagctctactaaacacttctcataaacggcctggatgcagctaactgcccctagagaatcccagacacagcacaaacttgggaagcatcaaaatcaacgcatgatgcccacaagagtctaagattctccttatgtggccctgggtcacagtacagttctttggaaattagagggcaagtttgataatttgattgcaacata

SEQ ID NO: 1245223 - DNA, 4001 bp, Homo sapiens
tataactttggtagaattacaaaggttcttttcctgttatcacactgaaaggctagatgagatttcacaagtactccggcaataaagagaacagtatgcataattcatctccagataaatgatttgataatcaggtcatgagggcctcgctgcccacggagagaaaatggcttaaagtctggggtttcttcccattattcccacttctcccagtggttctcaaagacacctcagacaatttgtgattacttctcctggcattagatcctcactacacaattctcacttgggtaatgggaatgtcaggatttctacatcctagaaacctaaataacaataaaaaaatgttaagtgatatgatcaacttttaagagtggcctttgactacactgataatcaatagatttttaaaaaaaatatttcagatctttcagagtttctgcagaatttctatccaattgtcagacccattggcaggtattaattcttcgttatcacaaataatcatcatttttttaaagttcatattatgacaaatgtaaaccttggggtgtcaaagtcatataactacacacactctataagccataaagcaaaccaagactgtttatgctgcaatctgtagagacagacacaagcagggaaaaaacaccagggcaacgtgcatgtggccagccggtccacagcagccttgcgaggtgcacgcaccaccccctcactcaccttcaagtcctgctccaggcttcgaataagctcaccatccacctgacccgtctcagccactttcaggcttttctgctcggctttccgaagacggtactgcaggattcggcagtttttattagcgcggtccagttctcgccgaagttcctgcagctggtaaacatcttcctctaaataactgtctctcatctcttccatctcagcacggagttcatctaactcatcctatgcaaatcagacagagaagatttatgagccaagtacatcaaaaaaggatggcatgtctctccttcatacccgctcctcaatactaaatattgaatacctacacgcttacccatcacctcatggccacgcctgggtgacaggcaccagaacctctggaaatttgcatatgagataatataattgagtatctgttcaaatcttatgtaaccagaagctaaaaaactggattattcattgtggcctctcagaacttatcccactcccaacatctccctacatgatcaaataaaatcaactctgcagataattgaacctttcaattcaaaccaaacattgacctaagcctttatctctaaggcataatctaggtactaagatgaatcatacggaccctgccttcaaagaacataaacttcagtaggataacaagtgctaattgccctggaactaaaacatacctgcaaatgtcccaaaaattctgttccacaagacgcatctcagcattgactaagcgacgctatccacaaatgagacattttccattattttaaatacacattgggtctgttttttcccattcacctattctgactttcccacacctccactctttgctgtccacaggaatgcaccctgaatacaggggaacccaaggagtcatttcattcctggctccccctcccctcccattctacagccaagccctcagccagagctgcgccccttccggatggatcaccctggtccaggcctccatccctgggggaggggagccacacacagatgtaagtggagacacacaggtgcccactgctcagctggccctctaatcctcctacagtctgtcccccacccagcagagtaatccttttaatgtgcaaatcagaccacctcactccctactcaaaccctccaggggcttccttctttccaggcctcctggccacactccctccctgcccacgactagcacagggtctgagactgctcgcacctttgcttcttcaggcctcaagacctcgcctgctattcccacttctgaaaacactccccgctccagatctctgcagagctcattccatcacataatctgacgtcatgcaaagcctcccctggccaccctcatcagcccgagtctctagtctcttgctggctctattttcttcccacctctgagtgccatctaatagtattggtattttttcctacttactgtctgtcacctacactaacaaggtaagcttcagaggggagcaagcttgtctgtctttctcctctctgcatcccgagcagcatggagcacacggtaggtcctcaataaatattgctgaatgaatacacaggtgcgccagtgaacacttacaaacaccaagtcagaaaggcgactaacatcagacacaactgcacgctcgctttgttccagtcttgcagcccagtgatgaaagcttcttcccaaacccacagatgtagctgcaggtatgagatattcactctactgaagggttacacaagatttaaaggaggaacaatttggaaggaggaagattaaggaaacattctagggattttcttgactagtttcataattgatagtttcagatgcctccagaatagcatgcactcagttattcccatttactttattcaattaatattaaggttcaagaaaaaaaaatctctcctatactcagacaccctaattgtccattctcgtcctgctattccctttgttcctggatttttaccactcatgctaatcctgtatttattcttaaaaacaggaattgactaacaataaagaacaaggtgcccaacatccgagcctcagacaaaaaaaaaaaaaaaaaaaaatgaacaaaaagaaatctcctgaagatgtgtttatcctaggtaagattaagtacaagaaacacaacaaataaaaatgtgaatccttatggaaaaataagggttggcacaaaatggggtgatgatgatgcttcggtcaaccttacctgcacacaatggtctactggaaagggcacagatatggcaactcatcccccaatccagcatgtaggttctctccactctgcctacactatcccatcaagagaacgagctactcacttgaccaggactcatctggagcctgtttcaataggctaccaaggagaacagatgttaaagaagaaaccttcaccaacttcccagtagtcaaatgcataaaatgttcttcttcttggctcctaagtgctcctacagaatttctataccaatgatgaaaatattaaaagtataagatgtcctaatgtgtcttaagaaagatcaatcttaacactgaaaatgttgtgaactcgtaaccaagtttcatttcttttttcctccatggaaatctctcctggtaaatcctggtccttgtgggaagatctgctggaactggaagttactggactgagcataggagctgatcagctgaacacacataaacagaatgggtggtttgggctcttcaggggaccagagaacacagctctttcaggacagtgcttgacaaccttctgcaaaccttccacaaacaggaggttgttactgatgcctgatcactgaggctttgaagacgccctatgggagctgtgcccctgcactacccactcctagaggaggtcaactggagactgaaagctttaaaatgagccttgtggttgtcactctttcgatagagtgggaagttagttctgaatcttcaaaaatcaacgtcaagtttgattcacaccccatccatgaaactaatggatcagactttgagaaagaacctaaccgcaatgcttgtttctgagtaaagaggttaattgtttcactgagtcattaatacaaatcagttcaatacaagcaataatcactaaatgttcaacactaagtcaatatctgtatatgtatatgtacatgtatatccacacatacaaatatacagtgactctggccattctgttcatggaaagaatggtttgtgattgcttttctttccagaaagcctgccaaagtcattaatgcctgggattatcggcaac

SEQ ID NO: 1245224 - DNA, 4001 bp, Homo sapiens
tctacaaaatatgaggatttcagatgcatgagaaagtggatgaagggcagttaggagactgagtttacagatctaaaggagcataaccttttttttaagtcaggcgaggtgagcgctggtggcaatgaatctggtttttattttgtgttttagctcagaatcattgtgggctgtaacgagagatacacaacatgattaaggaaaatgttagactagattaataggtgggagaaatagaagagattctcaaagtggctttccccacacaccaaaggacacaagaagttttcagaatctctagaaactatgttcatttataaaatgggattaatccataccaatatatacattagagttctgtggttagaatcctagagtccagcatttatttacaaagtggcaataaatgtaaaataacctagaaacttcttctacaaaacgaacactcaaattgataatattctgagaaatatcacacattctgcaagaaaaaaccaccatcttacaaaacactgcgtactgtgatagcacctagtatttggtgggctttctaaaccctgaccaaatataccgcctcatttaatcaatgcacttaaaaaaaaaaagcctaagtataacttattttctggtgctaaccacaatttttaaaaagtgtatttcaagttggtgcttccgttccaagtaaaccaagtttcatttcttatgcaaacttccggttgaaggtaggattcgttctcttggactgccacacccaaaagttctcaccactggacaaagacaattagctgtgagggctgacttgccagtaaagcctcgcttttgaaaatagagtgcttttctgattaccgtttattagagcccttccagaacatgaaacaaataccaataattttaagaaatattcgctttattcgcctttaaatatgaaactttttgcacttaagttaaaatctctgctaaatccataggtctctcaagaactgacagatacattcatatacctactaaactactttaaaaagaagacacttccatggcgaattgaattagcccaaactttccccccaaatgggacaaggtattacattttggagtttttcttcgagtcacaaactaaactccagatctctctgtccaaaatttcatcgcttaaagaaaaaaagttctaattacaggagcggatactgagctgaagaacttcccaatttgagttggttattcctactaaacgcagccacacagctgcaacaacagctgcagcagggggacaacgggctacgtttttgcgcaaaccctcttgaatcgggcaagttgacgttagaaactaaaatagtcccggagtcagctctgcaggggtcgggtttcgcgggcccggcagtcgcccaagctcaaggcgccagtgagcgaagccacatttccagagttccaagtttgggcacaggagcgaagttcgggtctgggccactccaagccatggcctcggatcccagaaccggggacctggctggcacacctgcccaggtgcgctaccggcgccaggagccccgccgccctccagctgcccccgcggagacgggtccccgggatgggtctcacgcgcccgaacgcgagcgccactcacccggcacagctacgagaatccgagcacctctccgagcccctcgctgccgctatcacaccaccctgctacccagagagccgctaaaaaccaccgcttccggcctctgcttagcaagccggaaggaagcccggtcacctttcttggcccgcagagtgggtctgacttcacggaggggcgacagagagggaagtcgccagtgtggtcagcgggcgtggtattgaccaagtgcatgagaaggaagtgtaaagtgggcgacctagaatatagagcaatatataatggtcctctgggtcctgttactgagtttccttcttttttgtacctgttgttgcagtgttaagtcttcctcccccctatcctttccgcagatggttgcgtccgtcctgtggctttgcctggccgcacattccagggcacggcgaagggcggggcccgtcggcccaagtccttgtagggaaatcgaggagagggctgcgggcccacgtgactgaccctcgccccgccccgaagccgggctccagcttgtgggcggtagtgcgcctgcgcttgacgccccgcgcggggtctgggtctccgcctgagggccccggagcagtgcgcgtatcccgggagcggatcttgatgctagctctgtgtgcagtgtaattttattaagagtcccgccccctccatacgggaggaaacgtgtgtccctggggccctcagccaagcctccactatctttttggcccagacggatttcccaggtcacaagtggctggagacttcctcttgaaaaacatttgccgtcgtttttccctggcagagcccctttgaccctggctaacaaggacagcctgacttggatcccactatgcaggaaggaaggcgactcttccccgcacctcttgctacgattaggacttgcgacttggtgaaaacaggaatcaaaacttgggcctatttctcctgaggtctgcttgcctagaacaattcgtaacgatgaatcttattaaaaagagaaagtcctccccgactttatctttttccgcccagaatccgataaggaagacttgttctggccccctcagctctctgacctcacctaccagaggagagagtgggatcctctaacactcgagccgtcatcccagcactaggggacagtgaccagtgtggctcccgtggccagaacccttctgaagtttgggttgccctgtggtcttcgccttcaaagcaggccgccacttgaatccttctggaacggacagtgttgctgtaaacgccgcggaatagtatcttctaagtattcgtagcttctttcttgagggatctcgggaacgttccgtgtattaaccactaacgtattccaaagttaacttcgtggtaaagtcgctggggaaaaaaataactgctccagttccacaggtgattgaaacaaaagtgatctgtttcccaaacttccttgatggtaaagaatgacttggggtactaattaaaaataaaaataattgcgtcatttccaacctactaaatcggagtctttaagggcaggtcctgggaagccatccatgtaatgggggtcctaagtgggctcttatcggcgagggcggggactcagcgagagggctggcagcgacgggacaaaccccagacggctgcgcggatgcgtttgttcctggagcttgcgagcacttgcaatgcatggacacctccacagggtggtggcctgccaccacgagagcaccagctccgccagcgtcctctccagaggacactttagagcagaaagaaacggacagttcagtcttcccctcagcttgaaggcagcattcttttgcttctctttgagtcaggtaattgttttgtcttccttccactcagtcagcaggtattaaacagcaaccgcattgccaagcactgtggtgggggctgtggcttatgctttccggagcagaacatagttgttgctaccttggggatgggggcgggaggaatagaaaaaatgcggagttagcggagtatcagggaacaagggtggaacagatataataattgcagtacagttagttagggcctattgaaggagcacaaacgaagcgtaaacttgtctgggaactagtggaaggtgtcccccaggggatgttaaagagctaattctagaattaattcagtggggaaagaaaaggagagggagatgccaggcagagggagcagcatgcctgattgtctggaggtgatcagagggcctggctgattgaagatgaacaggaattgtgtagtctgtgttcattcattcatttattcattccacaactatggatttaaaaacggttagtcaaccaatgtggaaaaatagcatctcgataaaatgttcttcaaatgtccacctagtattttg

SEQ ID NO: 1245225 - DNA, 4001 bp, Homo sapiens
ctcagcctcgagcagctgggactacaggcatgagtcaccatacacagctactttgcaaggagtgggtggcagggtagagacagggtctcgctatgttgcccaggttggtcttgaacccctggcttcaaatgatccccccacattggcttctcaaagcattaggattacaggtatgagccaccatgcctggccatattcattctttttattgccttttgcctttccaccttggactgcagaacttagcagtgtgccttgcacatggcaggtgctcaaataatcctagttaagcaaatacatatatatatgtataaatatatgtatagtatacacagttgtatatagtgtatatacatatatagttctttcctgtcacaaacagaattacacatatatgttcattacaaggtaggtcccggatctgaattccaacatgaggcttttctctacggtctacctatggttccagtctcttccccaagagatccctaaggaaacttagtagctacccactgctccatacctggaagaagcagtagcaaccagggacaactgggtgctaaagatgtgccaggcactgatttaagcattttgtatgtgttaacacatttaatcctcacgacaactcatcatataggtattgttatcatcctcttctctcagatacgaaaatcagggtaaagagaataaacaacttgccacacagctagaaaatggcagagctcagtcaggatctgtactcaggaaatctagctccagagcttgaaccactagccagtaacatcctgcatacaggcagctgaaattctctaccatgaaaatgtggatacctgggcataacaagcaatgacaccccaaagctaatgtgtagaatgaggaaggaagatcacaaagatgctggcaaaaagggtatgataaactcatccccagatatacctggagcctttgaatcttgggagaaagggaaaactagccccatgtcggggctctaaatcctgttctttcctaaccctagcaactcttgtctggacatctgtccttcagaaattgcagttcatcttgttcaagcttagtttcatcaaagcataaacgaacatcgagtcagccatcataaaagctgtttcactcaaaagagcctaaagcactcaaaagtgctcttagttataaagtccaggagggtccaccaccttcgacaaattacctcacctctctgggtttcactttcctcagttataaaacgcaaagccttcacaaggtaatctatcaggtcctactgaattctaaatgctttgattcttctcttaccaaaagaccattccaaatctaccttaaactaaagcggccaaacgaatcctctaaacatccctttcttattactccgttagtgaagactccaaaattactctctatggcttcttagataatcttttctttctcctaagttttcaagacatccataagaaggtcctacttacctatctacccttatttccgactattagtcattacagttctgttccatacccgccggtgtccccacggcctgcttttcacaggacacaattcccagcttttgagttttgctcgttaccacctcccacacatctagccggaaacgctaagttctccctcttaaggttgaatccaaggccttcagtgaggtcacgactcttttccaagtaacctttccctatttctgttaatggtcctttcttcaatcaacacgaataaactaaacctttacaagatgcaagacacactgagcgaattacaactctatgtaaatcatcacatttgagcccgtatcaaccacacactcggttaccggcatgctaatggcttccttggaggcttcaccttaggcaagaccgtgcaacaggaggctcctccaccctccaaagcatctaggatagtgttgggcacagggcaggtgctccacacgaacacgcccgggtcggccccaatccaccgccaggacccgccgcggcgccgggagggcaggcgttggccgccgggcagccgggccgtccaaggcccaggtgtctgaggtcacccaggtggcgcagggccggcccacgcacggccgggacccggccacttctccagcagggcgtctccccataccggctccatcgcctgcagcctcccggcccctggacgtccgggccagggcctcgccaccaaccctcctcccgccgccaaccctcctccctccacctccggccccgcgcccccttctcagccagtctgacaggtcctgccgccgcctggccgccctggggcggggtccggccgcaggcgcgcgacgggagggggcgcgggggtacggagacggcggcccgaggggtctcgcgagcagagtcgagcgcgactcacccgacgccaaacaccagaaccggggccgccctgcgcgagaccacaaacgacagcgaagagcgttaggctgtggccggacagtggcggcgccgacacttcctgcctgaaggggcggagcggaaggcgcaccggaaggcgcaccggaaggcgcaccggaaggcgcggcgggaccaagtggaacgggggtgcgctgagtgttcgcgcccgggccggcggggtctgcgtgtccgccgagcggcggggctgctgaggccggacgcacacggccggggtcttaattgcccctccggcctgctccgatccgctgcgatatcgcggcctgcgctgcggcggtcgtccgcagcccggccctcgtcccccgctcctttggtagctccgccacccttccgcattcctgggcccgctgggcgcggctgggcaggccgctggaatttgacccgagtgggccgcgatcggccgaggatttggggtcccctttgacccaggcggggcgcgatccgcctaggatttggggtcccctggcgccgaaccctgagttgccagatgtagcaagtaaaagtacagttcttctaaatttgaatttcagacaagacaggttttagggttcgtctcatgtaatgttgagaaggtgagggcggcgcctgggcggattcttctccgttccagaatccctttctcttttcaaaccgcattacagcccgagttaaattctttaacctactcctctctgcttaccctcataaggtttacggccgtatcaggctacggccgcagcctacggctgtttgattccccttttggccacaagaaagttttattcgaactacttgctttcctttatcaagaaaatggcaacgcacacacatacatgcacacacaaataaaaacacaaagctacgtttttcaggttttgttctagatcgtgtttgtggctgtgttcttcaggatattttccctcaccttgaggtaatctagcattacttcatctagcattactaaaatagcattacttcaggatggtggaggatcggcaatctaatagcaaatctttattgaactcttcttactgccttaacatgtgccggatgctgagagatgaattcaaagcctcttagggagtttatattctagaaatctttgatcagaaattcctagaagagagggaccttgtgttcagcactctgtagcagttcttaaacagtagcacgcataataacagggcttttaaaaacatttttgagcctcaaaaccgggtatcaggattcagtgagtaaggggtggaggataattcgaatttctggtaagcacacatgatgctgatggggtggtcgccatcccagcagcacagctctaaacgcggttcataactgtgtgtattttctcaatagtgttagaaaagcaattgctgaaaagtcacacctggttctacaatatttactcttaggttttggttcgatagtctaaattaaaaaaaaaaaagtttctagaattgtgctgtccaatacaatcgtcactaaccacatgcagctaaacttaaatttagttcctcagttgtatttgatacgttttatttttagagatggggtcaccctatgttgcctaacctggaatgcactggctattca

SEQ ID NO: 1245226 - DNA, 4001 bp, Homo sapiens
ctttcattcaatacaatgtttttgaaattcacctctcttattgggtttatggcacaatcatagttcactgtagccttgaactcctggactcaagtgatcctcctgactcagcctcgagcagctgggactacaggcatgagtcaccatacacagctactttgcaaggagtgggtggcagggtagagacagggtctcgctatgttgcccaggttggtcttgaacccctggcttcaaatgatccccccacattggcttctcaaagcattaggattacaggtatgagccaccatgcctggccatattcattctttttattgccttttgcctttccaccttggactgcagaacttagcagtgtgccttgcacatggcaggtgctcaaataatcctagttaagcaaatacatatatatatgtataaatatatgtatagtatacacagttgtatatagtgtatatacatatatagttctttcctgtcacaaacagaattacacatatatgttcattacaaggtaggtcccggatctgaattccaacatgaggcttttctctacggtctacctatggttccagtctcttccccaagagatccctaaggaaacttagtagctacccactgctccatacctggaagaagcagtagcaaccagggacaactgggtgctaaagatgtgccaggcactgatttaagcattttgtatgtgttaacacatttaatcctcacgacaactcatcatataggtattgttatcatcctcttctctcagatacgaaaatcagggtaaagagaataaacaacttgccacacagctagaaaatggcagagctcagtcaggatctgtactcaggaaatctagctccagagcttgaaccactagccagtaacatcctgcatacaggcagctgaaattctctaccatgaaaatgtggatacctgggcataacaagcaatgacaccccaaagctaatgtgtagaatgaggaaggaagatcacaaagatgctggcaaaaagggtatgataaactcatccccagatatacctggagcctttgaatcttgggagaaagggaaaactagccccatgtcggggctctaaatcctgttctttcctaaccctagcaactcttgtctggacatctgtccttcagaaattgcagttcatcttgttcaagcttagtttcatcaaagcataaacgaacatcgagtcagccatcataaaagctgtttcactcaaaagagcctaaagcactcaaaagtgctcttagttataaagtccaggagggtccaccaccttcgacaaattacctcacctctctgggtttcactttcctcagttataaaacgcaaagccttcacaaggtaatctatcaggtcctactgaattctaaatgctttgattcttctcttaccaaaagaccattccaaatctaccttaaactaaagcggccaaacgaatcctctaaacatccctttcttattactccgttagtgaagactccaaaattactctctatggcttcttagataatcttttctttctcctaagttttcaagacatccataagaaggtcctacttacctatctacccttatttccgactattagtcattacagttctgttccatacccgccggtgtccccacggcctgcttttcacaggacacaattcccagcttttgagttttgctcgttaccacctcccacacatctagccggaaacgctaagttctccctcttaaggttgaatccaaggccttcagtgaggtcacgactcttttccaagtaacctttccctatttctgttaatggtcctttcttcaatcaacacgaataaactaaacctttacaagatgcaagacacactgagcgaattacaactctatgtaaatcatcacatttgagcccgtatcaaccacacactcggttaccggcatgctaatggcttccttggaggcttcaccttaggcaagaccgtgcaacaggaggctcctccaccctccaaagcatctaggatagtgttgggcacagggcaggtgctccacacgaacacgcccgggtcggccccaatccaccgccaggacccgccgcggcgccgggagggcaggcgttggccgccgggcagccgggccgtccaaggcccaggtgtctgaggtcacccaggtggcgcagggccggcccacgcacggccgggacccggccacttctccagcagggcgtctccccataccggctccatcgcctgcagcctcccggcccctggacgtccgggccagggcctcgccaccaaccctcctcccgccgccaaccctcctccctccacctccggccccgcgcccccttctcagccagtctgacaggtcctgccgccgcctggccgccctggggcggggtccggccgcaggcgcgcgacgggagggggcgcgggggtacggagacggcggcccgaggggtctcgcgagcagagtcgagcgcgactcacccgacgccaaacaccagaaccggggccgccctgcgcgagaccacaaacgacagcgaagagcgttaggctgtggccggacagtggcggcgccgacacttcctgcctgaaggggcggagcggaaggcgcaccggaaggcgcaccggaaggcgcaccggaaggcgcggcgggaccaagtggaacgggggtgcgctgagtgttcgcgcccgggccggcggggtctgcgtgtccgccgagcggcggggctgctgaggccggacgcacacggccggggtcttaattgcccctccggcctgctccgatccgctgcgatatcgcggcctgcgctgcggcggtcgtccgcagcccggccctcgtcccccgctcctttggtagctccgccacccttccgcattcctgggcccgctgggcgcggctgggcaggccgctggaatttgacccgagtgggccgcgatcggccgaggatttggggtcccctttgacccaggcggggcgcgatccgcctaggatttggggtcccctggcgccgaaccctgagttgccagatgtagcaagtaaaagtacagttcttctaaatttgaatttcagacaagacaggttttagggttcgtctcatgtaatgttgagaaggtgagggcggcgcctgggcggattcttctccgttccagaatccctttctcttttcaaaccgcattacagcccgagttaaattctttaacctactcctctctgcttaccctcataaggtttacggccgtatcaggctacggccgcagcctacggctgtttgattccccttttggccacaagaaagttttattcgaactacttgctttcctttatcaagaaaatggcaacgcacacacatacatgcacacacaaataaaaacacaaagctacgtttttcaggttttgttctagatcgtgtttgtggctgtgttcttcaggatattttccctcaccttgaggtaatctagcattacttcatctagcattactaaaatagcattacttcaggatggtggaggatcggcaatctaatagcaaatctttattgaactcttcttactgccttaacatgtgccggatgctgagagatgaattcaaagcctcttagggagtttatattctagaaatctttgatcagaaattcctagaagagagggaccttgtgttcagcactctgtagcagttcttaaacagtagcacgcataataacagggcttttaaaaacatttttgagcctcaaaaccgggtatcaggattcagtgagtaaggggtggaggataattcgaatttctggtaagcacacatgatgctgatggggtggtcgccatcccagcagcacagctctaaacgcggttcataactgtgtgtattttctcaatagtgttagaaaagcaattgctgaaaagtcacacctggttctacaatatttactcttaggttttggttcgatagtctaaattaaaaaaaaaaaagtttctagaattgtgctgtccaatacaatcgtcactaacc

SEQ ID NO: 1245227 - DNA, 4001 bp, Homo sapiens
agtagctacccactgctccatacctggaagaagcagtagcaaccagggacaactgggtgctaaagatgtgccaggcactgatttaagcattttgtatgtgttaacacatttaatcctcacgacaactcatcatataggtattgttatcatcctcttctctcagatacgaaaatcagggtaaagagaataaacaacttgccacacagctagaaaatggcagagctcagtcaggatctgtactcaggaaatctagctccagagcttgaaccactagccagtaacatcctgcatacaggcagctgaaattctctaccatgaaaatgtggatacctgggcataacaagcaatgacaccccaaagctaatgtgtagaatgaggaaggaagatcacaaagatgctggcaaaaagggtatgataaactcatccccagatatacctggagcctttgaatcttgggagaaagggaaaactagccccatgtcggggctctaaatcctgttctttcctaaccctagcaactcttgtctggacatctgtccttcagaaattgcagttcatcttgttcaagcttagtttcatcaaagcataaacgaacatcgagtcagccatcataaaagctgtttcactcaaaagagcctaaagcactcaaaagtgctcttagttataaagtccaggagggtccaccaccttcgacaaattacctcacctctctgggtttcactttcctcagttataaaacgcaaagccttcacaaggtaatctatcaggtcctactgaattctaaatgctttgattcttctcttaccaaaagaccattccaaatctaccttaaactaaagcggccaaacgaatcctctaaacatccctttcttattactccgttagtgaagactccaaaattactctctatggcttcttagataatcttttctttctcctaagttttcaagacatccataagaaggtcctacttacctatctacccttatttccgactattagtcattacagttctgttccatacccgccggtgtccccacggcctgcttttcacaggacacaattcccagcttttgagttttgctcgttaccacctcccacacatctagccggaaacgctaagttctccctcttaaggttgaatccaaggccttcagtgaggtcacgactcttttccaagtaacctttccctatttctgttaatggtcctttcttcaatcaacacgaataaactaaacctttacaagatgcaagacacactgagcgaattacaactctatgtaaatcatcacatttgagcccgtatcaaccacacactcggttaccggcatgctaatggcttccttggaggcttcaccttaggcaagaccgtgcaacaggaggctcctccaccctccaaagcatctaggatagtgttgggcacagggcaggtgctccacacgaacacgcccgggtcggccccaatccaccgccaggacccgccgcggcgccgggagggcaggcgttggccgccgggcagccgggccgtccaaggcccaggtgtctgaggtcacccaggtggcgcagggccggcccacgcacggccgggacccggccacttctccagcagggcgtctccccataccggctccatcgcctgcagcctcccggcccctggacgtccgggccagggcctcgccaccaaccctcctcccgccgccaaccctcctccctccacctccggccccgcgcccccttctcagccagtctgacaggtcctgccgccgcctggccgccctggggcggggtccggccgcaggcgcgcgacgggagggggcgcgggggtacggagacggcggcccgaggggtctcgcgagcagagtcgagcgcgactcacccgacgccaaacaccagaaccggggccgccctgcgcgagaccacaaacgacagcgaagagcgttaggctgtggccggacagtggcggcgccgacacttcctgcctgaaggggcggagcggaaggcgcaccggaaggcgcaccggaaggcgcaccggaaggcgcggcgggaccaagtggaacgggggtgcgctgagtgttcgcgcccgggccggcggggtctgcgtgtccgccgagcggcggggctgctgaggccggacgcacacggccggggtcttaattgcccctccggcctgctccgatccgctgcgatatcgcggcctgcgctgcggcggtcgtccgcagcccggccctcgtcccccgctcctttggtagctccgccacccttccgcattcctgggcccgctgggcgcggctgggcaggccgctggaatttgacccgagtgggccgcgatcggccgaggatttggggtcccctttgacccaggcggggcgcgatccgcctaggatttggggtcccctggcgccgaaccctgagttgccagatgtagcaagtaaaagtacagttcttctaaatttgaatttcagacaagacaggttttagggttcgtctcatgtaatgttgagaaggtgagggcggcgcctgggcggattcttctccgttccagaatccctttctcttttcaaaccgcattacagcccgagttaaattctttaacctactcctctctgcttaccctcataaggtttacggccgtatcaggctacggccgcagcctacggctgtttgattccccttttggccacaagaaagttttattcgaactacttgctttcctttatcaagaaaatggcaacgcacacacatacatgcacacacaaataaaaacacaaagctacgtttttcaggttttgttctagatcgtgtttgtggctgtgttcttcaggatattttccctcaccttgaggtaatctagcattacttcatctagcattactaaaatagcattacttcaggatggtggaggatcggcaatctaatagcaaatctttattgaactcttcttactgccttaacatgtgccggatgctgagagatgaattcaaagcctcttagggagtttatattctagaaatctttgatcagaaattcctagaagagagggaccttgtgttcagcactctgtagcagttcttaaacagtagcacgcataataacagggcttttaaaaacatttttgagcctcaaaaccgggtatcaggattcagtgagtaaggggtggaggataattcgaatttctggtaagcacacatgatgctgatggggtggtcgccatcccagcagcacagctctaaacgcggttcataactgtgtgtattttctcaatagtgttagaaaagcaattgctgaaaagtcacacctggttctacaatatttactcttaggttttggttcgatagtctaaattaaaaaaaaaaaagtttctagaattgtgctgtccaatacaatcgtcactaaccacatgcagctaaacttaaatttagttcctcagttgtatttgatacgttttatttttagagatggggtcaccctatgttgcctaacctggaatgcactggctattcacaggcgtgatcataatgcactacaacctggaactcctggcctcaagcgatcctctcacttgagcctcccaagtagttgggactacaggtgagagacaccgcaccagtgcgtctggcagtattagacacttttttttttcttgagacggagtcttgctccgtcgcccaggctggagtgcagtggtttgatctcggctcactgcaacctctgcctcccgggttcatgtgattcttctgccttagcctcccgagtagcagggactacaggcctgtgccacgacgcccagctaatttttgtatttttagtagagacggggtttcaccatgttggccaggatggtctcaatctcttgtcctcatgatccgcccacctgggcctccaaaagtgctgggattacaggcgtgagccaccgcgcctggctagtattagacacattttaagtgctcaatagccacatgtggttagtgtccttattgtatggcacagagagcatttcctta

SEQ ID NO: 1245228 - DNA, 4001 bp, Homo sapiens
ctccagttcagatttttcccctgcctcactggcttccagcctccagtcccagctcctgaaaacctaaccggcttcagtgaaagaactgaaagctgagcttttagggatcctcccaatacctccacagctaagaggggtggggtgccgttccagggccaggactgtcacagagttcacgccctggctcccacctcctcccctcctcccccagaggccgtcgcccatccctgatcgctgcacaggtggcccctggtgggctcggaagctgtatttgaggctgctgcggccccacccccagccaggtgacagcctccgcggccaccttcctgagcatgaactcatcccggccctgctcccctccaggaggaatgggagagttgaataattcctcaaacttagaagggtggccagcccacggagccgaagggctcccacatgggctagacagccgcgtgtgatcgccaggtaaggacgcggaagtgactgttcctacccagcccagacctgttggcccgggcgggtgtcccgggaatcgcatacccacgcaacgcgcgtggacaccacacgcacacacaactctgcatggaggcgtgtgcataggcactgttaaacgtgttttggccacccaagaagacgaacaggaaaaccaggcattggactatccaaaacttgttttcttaaaggtgcatagggcacatgtgaagaaaaggcctttgcccctctcactactgactccaggttgaaactcgaggggtcccgggcggctgcagcgctgccgcgagctcccctggaagcggtggcttgtccctaactttaaccacagcaactgctgcggaacgcgggcgtctccgcccgggctgcacctgttcccgattcggagcacccagcctcacacatcccttctgaccttgaaggcatcctgaaactcacaccctgctcccggttcgactttactccaaccccctccccgcagtcactgaagccctctttgtaccaaagaggccgcgtcaaaacatccatccccagcaaattcacaatgctcttccctggggtctccggagataacggcgcacccctctacccattgcttaccctcactccatccagccgccgcgccctcacgccaggttgtctcctccctctccaccaagtccagaacccccacctctcccaagtccagggttccctgttgtgggtatgcgggaggaaaggacgcctcggaggcgcgccctcgagagccggcgccgcagagcccctggggtggggtccacggcggggacaggggacagcagcgggagcaccgcgggggcccgtcccgcgcacggcgctcagagctggcagggtcgccctgccgttcggggaactcggttggagccgagcccaggcaacgaaagtgaggggcgcggcggggagggggcgacagccctggcttggtgctgagccgtggcgctgcggaacctctaggagccgggtggccggtcagtgcgggcgttcccggaaccgccaaactttctccgccaaccgaagttagggactccgaggacagtgacgaggaggacaccgcggaggggggtctcccgtcacctcccgcctccagtagccgagggagaaggcgaccctgagtactaggtggccccgagcgcgccaccccggccccggggcgcctccctcgcggccgcgctcacctggctgtagagctcgcccaccgacatggcccgggccgggcggggctcgggccccggctcctggctgccccgcggctctcagtccgcggctggcccgcctggcgccatgttcccgggctggcctggagtttctcgatcttctcgctcttctccgacctgccccgccggcttcccgcaggcgccgcggccggctcgctcccggcggcgcgacctttactcccgccgcggcggcgcagctacggccggacaggagttgcgagcgccgggggaggaggccgcgccgcaccactcccctcccaggtgtggggaggaggcgagggccggcgaggagggaggacccgctcgcgtcagagcggacggcccgtgcgccgccgcgcctctgagccctgccggtgcccggcccgacgcgccctcccgcgcccccgctgccacctgggcctccgggccgggggcggggcgctcagagaggagctccgggaccggcgcgggccgccccctgctggacgccgcgcgcgcgcaggcacaggtgcgccccggcgcccgcacctgccctgccgcgctccgcttccacccgcaccgggccccgcggagtccggcatgaacgcggtgcagacaagaaaagggaagaggaactaaccagagaggggggaaaaaagagaagcgtctatggctggaaggccccagacattgccctcgattttacctggctgtattcagcgctttcatgattaaaattcagttactcgtagatcgttattaaggcgacctggatatacatacaccagggatcttctccttcaaactgaactctctgcgcggaaatccttgtcagtaaagtgggagtcgtaactccttctgtacaaatattgtccactttcgcccacagcctccaaggagactccaggccactcatctcagagggcttctgcttttccgggaagtctcacgttctcccaacccccgtctcgtctacatgcagactccgggtccttttgccactcactacctcgtttatttgtgttccctctctgaccatggcacttggctgcctgcagcaacttcagctcctctcctacttccagtgaaaagtagaaatttcaaccaagaaaaaaaaaaaaaaactgccagaagtctgtggagggagacgaggggctgtcagaggagacactcccttctgaagctgacatctgtccctgacccaggggtggcccctgaaaagtggttctcaaccggaagatatatctgtaccagccggggcagttgttcaagagccccagaaggtgattctcagaggcatcccacctggaactcaagatcccgttgtaattcacctgtgcaggccttcccatgggcacctccacaatgagagtcacatggggagctttaagcgttccaaggaagaggccccaacccaaggaattctgatataatgaaggatgggacctgggtatcccaatttttaaagctcctctgaaagtctaaaggatggtacttccagggtgacaaatgcattgaccaaagcttgggcggctctcattggacctaaaaatggaactcttcacatcagtggcaagagcagaaagggatttttttctcttcctcaaaagtttttctgcatatttcccttccccggattcctgtagctcttaaagtgtgtccccaccccccacgcccaccatcagcatcacctggtaactgttagaaatacaagttattgggctccactgcagacctactgaaccataaactctggtgtggggccagtactcattgttctttctgcctccaggtgattctcccctttttgaataagaaagtcatcagtcctgcctagatcctggcctcttcctccaccaccattagtggtcccatctctctaccagcaactcttcctctctccactggcccctggctttttgtgttttcctctcctgctaaacttcttaaagcagtagcttcacttatttagctatctccacttacgcccagtacctccttaattctctgattctcaacactttatgcacatcagaatcacttttgaaacaagtggatgtctggttcccactcccagaaattctgatttaacttgtctggggggtgttgccctgggtgaaaggattctgaagagctcccagatggttctaatggcagccaagtttaagagctgctgttctggccgggtgtggtggctcatgcctataatcccagcacttcgggaggccaatgtgggccgatcacttgaagtcaggagttcaagaccagcctggctaacatggtgaaaccccgtctctactaaaagtacaaaaattagct

SEQ ID NO: 1245229 - DNA, 4001 bp, Homo sapiens
gtttagcatagggtggggagatgtcacatggccttagcattcttgaatagtttatccactgaagcaggcctatcagccacgttgacaaccctggatgaagtaatagttttataaaagctccacccccaagtgttttaatgctgtagaattagttttaaagtgatctgttttctccaaatgtcatttttaaaaaaattcaaaatgaagaatgaatccttctaaactcagcatattctttgtcaagtttaaaactactttttatttaaactattttaaaagtcagcatgtattccccagagaagaaaactgagcaaacttcactccagaaatatttatcttagggttcatggaagatatcagtctacagggcatttcctaagggaaaaaaatagctactagcaagcaactttgcttcaacccttaaatagatggctattttctgttacaaaatatggaggataattaccatgtataattaataactactagatgaattttgataaaacaaaggggttagaaaatgttaatacagaattacgttaggcagttataaagatattagagaagtttctgttatgatactacattgtaacatggcacatgttatttgaatgatttttcaaataaataataaagaaacttgttatgttataaactaaattcattccccagatgacttgaaatgctgttattttcacaaaataaaatctttaaatatcttgccccaatactattttttactctctttatttctatttctcccaaatacatttatttttaataatacttactattcctctcacatagatagtaagttacaagtaaacagggtttgacttgaagcccacattgctgattgtcacagccctgacctctggaacaaaggtacaaccacctcctcttcatcaagtaagcccttgaagttaactaaagccaggattagctccaacacatgacggctggagtacgttgggaggaaagatggttttagtgtcttttgtttctttaagacctaaattttctttctgaaaataatttgagaatttaggaagaaatacaaattccatagctgtaatttatgatacttttgtgcaggcattagagggcagaagctgatgaaaacgattcccagaaaaatcactatgtggggctctatgttgcctctgaaatattacttaaccatttgaggccatatcattgtgcgcgctcacatttatccacattgcatcgtcacagcaagatccctgaattataaactagtgacttcagagttaattttccttctttcggtctaatttgtaaccagggagcattgtatggcacatgcaggattgaaaatgcagggcctcctgtctctcatccatttcagatttcaaccaaaccgtacttggaaatagcattaaacacacgcttacagttcaatccgaggcagatatgacctccttacagttccaggaacagcagcttaatttcagaagaatacagtgatgtgagagaagagctgtgccagcccgactggcacccggctgttctggtttccctccctggagcttcactttcctatttctctgttattctgacatctctttgagaaaactgctgagttcagaagacagaaagaaagcacttacactgcactgctgctaagctcataagctatcaagtgcattcttctgcctcagtgtcacacttaccagtttccaaaggagtaatggtggtggaaatgttccgatgaggccgaggagctggatgagagaatgaagactccacctaggttgaatccaagacaatgttaagaggcagggctaaagacaggaccctgggggccagttcaaaaataatgcatgtggtcaggcagtcgaatgtcaggccacacaaccagccttttatggccaagaaggcagataaatatagcagcagatggggagggtagttccaaaccaggaggaggagaggggcatgggcaggtagcagccttagtaatataattgcataatgccggtcaatgggtctggcccgattaaaccaaatatagggtttttatttggcaacaagagttattttcaatgtcactttatcagtagataatttaaaagtgtaatggaaagagtggtttgtgttaacagctaaaaataggtgtagtaatatgattctcaaaatggacttcgtggaattttaatgccaagatatgattctgagtgtgctgttaacaacacacgtacggtacatttaaaagatacaatgtgaaaaaagaacttgaagctaactaaaggcaaaacaaggaagaaatgggttacacgtggtggcgatttttgcctgacatcacggtcactatttctctcacttcaggaaaatttacaaggttaagtcttagcttcaagcctgaatatgtgatttcctgttcattaactaaagccttttgagacgcaactcagtgttttatctttcctaactcagagtagggtcagtccatctaataagagattctctttctttgttctttaaatggtgtgaccaattaagaggaggtgtaacccggttgtgagagcctgtgttgtggattcagaccagatctagatcccactatattgatagcacttagtagccatgtaatctccagcaatttatttctccttcctaagcttcaggttttttgtctataaaatggggataatcatatccaaattataggattgctgtggtgattaaatgtgatactgcagacagagcacttgacctagtgacagtcacataatatagactcagtaaatatcagctgttattactgataccaataatataaaagctcattgttagattacatgtatgcagcaggttggtattttgatctactggccttatgttctgacagtgatattacatcaactgaataaaggtcacctgtgtctatcaaaattgtttttctttctgagacagggtctcactctgttgcccaggctggagtgcagtggtgcagtcttggctcactgcaacctctgcctcccaggctcaagcaatcctcccacctcagcctcccgagtagctacaggcgcatgccatcacactcggctaatttttttttttaactcttggtagaaatggagtttcaccatgttgcccaggctggtctcaaactcctggactcgagtaatccacctgcctcagtctcacaaagtgctggaattacaggcgtgagccactgcacccagtctctatcaagatattgaacagactcaatattatagtatacttcatcatgactttcttgatgataactacagttaacactgttgaggacctatccagtgccagacactgggataggcagtttatatacatgatcccactgacttatcataccttgcaaggtacagcttcattaccccgttgaggaaagcaaagcttccagaagggaaggcatttgccaaagatcacacagcgggtagatgacagaaacgcaacttcattcagagacatttgattccaaagcccgtgtacttgtagtcatgtattgctggctcctccagtggcactttgatagtaagaaactagacattttgaaatggcaatacgggtcttcacttgtaatagacggttagcttctgagctactcaaagtatgtaaaagaatctgttccacctagttctgatccaggtacctgtgaaattcaacctggaatttcttcatatacatacctctgctattagtaagcatgtggacattttagctatctggaagccataggcgagttttccaagtgttatgttccccaagcatccatttgttctctaaatatccaatacagaatgcagtgattcttctcaagtcttatccaccagccattaggatgattcctggtgagctgtttctctagagaacattggtcaattgccccaaatcttctcaaagcagaaaagaggaaaaataaacttatatgctttttaaaaagtgttttacattagatgattttctgggaaatttgaaattaacagctggctaac

SEQ ID NO: 1245230 - DNA, 4001 bp, Homo sapiens
aaatctaaccgagtccactggttggatgcctacaatagccatgtgagaagctgtcccttcacagtctggccccaactctttttcactccagctcgtcccctggcactgtgactacactacattcactgttcccagagcacattttcaggcccgcgtataatacatactacaggttgcgcacagaatctctttcacaagattttccctccgtctaaaacattccgtatttttcaagctctgctcacaaatcatctcctcctcaaattttctcaggcagaataaacttctccctctgggttacctatgcacagttaatacagcttttttgtggtccctattccacacactattcttattacaaattttgcgtttgctcccactagaaagcagaatgttgtgggaacctcctgcaccaggagagccccagcaccttacacgctgactgcctcgagtcatgtgatagagcttgagtttttccactgtttgaaaactggctctgcgatctttcacctgtgcagttgggggcaagtcgttatgaggcttccctgagtctcatttcctcttacgaaaaattagaatctctatttggaaagttattgtgaagatctcagcttatgaaattatgtatgtgaagcacccaccacagagcacaatgctgactttttcttttcttttttttttttttttttgagacggagtctcgctctgtggcccaggctggagtgcagtggcgcgatctcggctcactgcaagctctgccttccgggttcaggccattctcctgcctcaggctcccgagtagctgggactacaggcgcccgccaccacgcccggctaattttttgtatttttagtagagacggttttcaccgtgttagccaggatggtctggatcttctgaccttgtgatccgcccgcctcggcctcccaaagtgctgggattgcagacgtgagccaccgcgcccggcccacaatgctgactttctattaactgtaactgccagataaaaatgcactggagtaatgaaacggggggaagaggctgccaaaaggatgaattaaggattatcagttcagtcccacaaacatttgcagggtgcctactacgtactgtaccagaggtggcaggacatacacatcaaaggacgaacgaagcacagtccctgcccacagggacagtaaaatgccagatgacaaaggttcaccgaggagtttttggggtaaacctatggtcccctccacacagggggctcttctagggcggtggttctcaacagagcgatgttgttccccagatgacattttgggttgccacaaatggggaagagatgcgaccggcacccagcaggtagaggccaaggatgctgctaacgagcctccgatgcacagacagcccccaccacaatcttcaggagcagagcgcccaagtagagaagccctcgccccgcagcactgcgccgagtccccgcccacaccggctctggggagcggacttccggcggggtggacccacggcgcttcccgaggcgccgcagagctgaccccgaccccgggagtgtgacccagaggacaccgagccccggcagccctgcgggcaccagcgcgccgaggcccctcagccctgagccctccctcccgccccccccgggtgctaaggccgcgccagtgagagacggacccggcgtctacacacaggcccccggaaggttctcactcactatttctctgctttggcgaggtgttccagcccctcgtttatcttctgagccgccatctccacagtcaggtctctgacgtggagagagggtgaccctgcctcttcctccggcgccaagaatccgcccaaataggcgtgggaacgccgaggaggaagctggtgcagcgcgacagtcgagcggctacggagggccggagggcccaagccgctgcgacgaagcggggctgggagcctgccggtgcgccccgcaaagagacattgcgcaggcgcagcgcgtcaaggctggccccacctagggcatctagcgcaggcgcggtgagatactgatggggcgtattctttcattcaatatttgcaaagcacctaatatgtgtcaggcactattttagatgcgggaagatcagcagacaaaaactcccgccctcttgaagtcttgctttttcattaatgtgaaactgctgtggatcctgtttgtagggttaattggctttataatttattacatctgaagtttctctgtatgacagatagaatagtattcttctatccattctgccttttgggtattaattgtatgtcagtcaagaaacgaaacagacttgtaaaccctgattactgtcaaataatccgcgcccaacccaaataatcgctctaatatttcaagccgtgataagtgctctaaatgggaagttgagggatctaaagtcgcgtacagtggtctggtaaaaatagtaaccagtaatacagttggcttcattcataattcatggtgatttcaatatccacatggatgattcctgcaatgactatacagcctctcagcttccaacctcctgtgatctttcccacactagcgcagccacacattcctgggatcacacccttgaccttactcataactgtgtaccctccgtagtgtcagtttcaaacagctcactttacttcccctttccattccagctcatacctcctagtgctagtaattacttaaccttcaccagattcctcacctttccctatccctctgctcttacacgtccttcttttcccagcataaattcatgtcccatcattttagtgcgtatactctcaacggccttggctccctctccctcctttctccaagccaggaaaaaccccagctctccacctactctggaactgctcttgagcaagtgaatttgactggaaaaaaacaaacgaggatgctaacattactcattttaatgatcataaacattaagccgacctttggtgctgctgagcaactctcctatgtttccatggtcaaatcactcacccactcacttggagggctgttcacaccttccttctcaaaactcctacacaatctctgcttgcctgccaactctcacttattgttgaatatgaaataactattcgaagagttcttccctttggcctcaccacacaatcgatcgatcttcctgcatctatttgccaatcaatattttgcattttttctagtgccaacaggtgaactggccttggatttttttctctatcctcactttcttatttagtacccacacacaagacccctcttcatttggttgtctagcctgggcttcctttataggaaggcagcagaatttcaagagagtgaaagtggaaacttcaggcttcgtaaggcctggactcccactgcacattacttctgccacattttattgatgaaaacatgtcataaggcaagttcagattcaagaggtaggaaaatagaggagtgtaaaatactttggccatgacttccaattcaccacaactctgggatgactgattaaatataaaaggactgttaccagtggaaagccttatgttttcaagtgagtttagatttattaaccacccaataccatcaccctctaaaaccattgaaagtgcccagaaagttttctaagcctataacctcctccacattctcccttatttattcattcattattgaattattgtttactgaatgcccactctgcacaagacattaagcctacacacctaggacccaattgttgagcaagagatataatgcctgccctcattgcattcatgatctatgagaggatacaatatttaacttaattttactttggcatcaacaaagaaagaatgggaaaaaaaccccacgatagtgatatagcagttattaagaaatactttttaggcagatagtaagggtaaatgttctcagtggaaattttcctgttttaagaaacaacccctgaaccatctcttttctaacagaaaaggcagcttgaagagc

SEQ ID NO: 1245231 - DNA, 4001 bp, Homo sapiens
ccaaagtgttgagattataggcgtgagccaccacaccaggcctgagtccaagctcttgacaaacccctttgagaatgagctaaactcattcaaggattctagatcctgagaaataacagcactgttaattcattaacagaatgttaataaattggcattctagcttgaagctccagactcatgagtcagctctgacaaatgaatccattcttggtggtcttggagtcaaatctcaggatcacactctggattgtggtaaattcaccaaaagccctctcaggagccccctggtcatgagctcactgtaactgaggaaaggtaacttttatctttacaagaattgaaaacccagcaatctgactcaatggagagaaaaattccaagaagcaatgccatgtggtaagaaagaagagaccttttttcaaaatgttaaaaagtaagtttagactttgatcatctaacaatcttaaagtcacatatctgtatgcattccttactttcccttttctgaaaattctctttggaacctagtgtttgaaattaagttcttggcaagtcacaagaaaattgacataactcattaataaatgcagtctcattttcctaatgagaagagactctacctttagacctgttttaaatggtttctccttggttccatctcccgtggcatcgcttccctctcggtcagagacgtacagctctgctgtttgacaaaatgagggtaagttatggtctggccattaactattagtcaccttactactttattcattccttatctttgtaaacagaacaagcatcgattaataaaaattgaggtccataagtaattaatatcctagttatttccccactccatttcaataacatccatctcataaaaacattagttaataatccaggttttcaaaatgaactctgatcattttaatttgtgatatttattctatctaattgggcacccaaaaataaaatatgggctttgaagttgatcagacatacgctggaatgttggattttgtaccttaaaaggcagggtgactctggagaatttacttaacctttctgagcttatttctttacctataaaataggaaaaacaatccccatcttgaaaggctgtgctgaggatgaaataaaataacacatacaaatcagatatcccagtgccagtttttgtagagatggcaaataaacaccagctccctctggactttaaaggaaacagaagctctgaggttagaaaatttcagaaggcctcacaactagtaggtctgaacagttaacatccatccaggtctctctctttttttttttttttttcctactgcacagtatggtctccccggaaacctcaataaaaaaatgagggtgggagaaaaacaactagaatcctaaagccccttcctgacgatcactttgaagaactgcaggagtaggggctaccctgtgtctgaacccgtcccagcgcctgagtctcagcgcaatcgggaggtttcgcagcggggcaggggaagggcccggagccaccgccatcgcagcccgggggaacgacggactcggggaagcccggcctggcccttcaagtcccgggcccagcaaaggccagcaccctccctccctccctccctgcaatcggtccccaaacattcgcggggcgcccactctggtaggcactaaggaaagcgccgaaacccgactggagcagagttcctgccccaggcagggaacaccgcgccatacactgagtctcacccacctagcaccatgcctgcagtggccctggtcacctccaaggacacagactgcaacaccgacgccgtcttatgactccaacgtgcaccggcggtttccgcgattccggcgttgcatcagagagcgtagatctgagggcgcctgcgagaatcggccgagcgccgcggttccattggttacgagaggtgggcgagcggcgccggggccgccatctttggtgagggcagaggcaacttccggatccagagacgccccgccccacgcgtttgtgcagctcggaaggcgctgcctgtcccggagctccgcggccctggagaccctggcacagtgtcacttttgcacccttccttccccgcctccccaactttcctttctgaatcttccaattccgccccagctggaggcgtgcgggtcctcttgcaaaccagaccaaggatgtcgccccgatccccagatggtggaggctggttgagttcatgtcaccagcaaacaccgcgccagctgcgagacggggtgcgcggcggtggaggggacgcagcgggttgcgtaaacttccttttttttttttttttttttgagacggagtctcgctctgtcacccaggctggagtgcagtggcgcgatctcggctcaccgcaccctccacctcccgggttcaagcgattcttctgcctcagcctcccgagtagctgggattacaggcctgtgccaccatgcccagctaatttttgtatttttagtaaagacggggtttcaccatcttagtcaagctggtctcgaactcctgaccttgtgatccgcccacctcggcctcccaaagtgctgggattacaggcgtgagccatcgcgcccggccagatgcgttaactttctaaactccgtgagccagcgtccctcggtgttcaggagaggagctatggtatatgttcatttaaaattgtaaggattaccgttaggaaggccataataatgtggtggaaagaacgagggcttcggaatacaaacctgggttctgccttttactaaccgtgtgtcttcagataaattacctaaactgaatgagcttcattcagcgagttgggaccgattgcagggagggagggagggtcctggcccttgctgggcccgggacttgaagggccaggccgggcttccccgagtccgttgttccccgggctgcgatggcggtggctccggcccctgcccctgccccgctgcgaaacatcccgattgcgccgagagtcaggcgctgagaggggtttatctgtgtcttcagataaattacctaatctgaatgagcttcagtttttctatttgtgaaagatgatataaattcactgcccgggcatgtaagaggtgctaataaagggtctgtcatcattttcaacttttttttacttttttggtgggctttttttttttttggagactgggtcttctctgttgctcaggctggagtgcagtggtgctatcatagctcacggcagcctcgaactcctgggctcaagtgagcctcccacttaagcctcccaagtagctgggactataggtgcacgccaccacgcctggcttattttatttttatttttgtggagatgggggaggggtctccctgtgtcgcccaggctggtctccaacttctgggatcaagtgatcctcctgcctcagcctcccaaagtgctggtcttacaggcgtgagctaccacgcccagcccattctcaatttagtggaataccagagtttgtccctgaagcaaaagaaaaccttttttttatgagaggtcctcaaaaaaataactctatatataggttcagggcccatcaagaatatgaaccaagtccgggcacagtggctcatgattgttatcaatcccagcaccttgggaggttgaggcgggtggatcacttgaggtcaggagttggagaccagtctggccaacatggtgaaaccccgtgtctactcaaaatacaaaaattagccgggcgtggtggcacgcgccagtaatcccggttactcaggaggctgaggcaagaaaatcacttgaacccaggaggcggaggttgcagtgagctgagatcgtgccactgcactccagtctgggtaacagagtgagactccatctcaaaaaaaaaaaaaaaaaaaagtaccaaatactattcctaaggaatatttcacccaattttatgaactttcccttttcctcttggctgaatgttttctgttggctcatggattagtatca

SEQ ID NO: 1245232 - DNA, 4001 bp, Homo sapiens
ttttgtaggctgctactatattataccttatgagagcaaataattttgctctgatttgattgaagctttgctaattggaaatatctcagtgaactctaagttacagcacagagcctgcttaaacaagtagctctagaataaaagagaaaaataagagagtactgaacaagaattaacagtccttttagggggtgcctggtaaagcatttggctttggaaatttgtgaaacaaatgacacaaacaacacctagcagagtatcatgcccacttttagatttcattgatccaaaattaggtacccctgggaacagacaagattcaccaagacatcactcatattacatctttatattaactatttcttatgatttctttgcctaagatgataaagcatgcaaattagaaccacaagggaaatactcacgtttgaggggtatagaggccttgtttatttacatcctgggatcttaactcctgcatggagaggcggccagcaccaccgctggaaactgaactgcgcttcatgcttatgacctacattcacgaattcagtatttaaaaaaaactttccagacagagatggtacattaagcaactatttatccttaaacagaaagacagtcaggtttcattgtttcttcaagatcatcatctttcccctggggtatctcttttttgttcatgtacactgaagttctcatttgcaaggaacatctatttaattccatttaaaaatattcaacataaacatttattaactgcccactatatatataggggagtgtgctaggcaatgcaggagatgcaaagacgagtaagttacggtttttgccttcacaagggtatccgtggtagctaaagccctgtctgttacccagaccacattactgctgttggctgtgcctatttcaataggaagacaaaaaaattacctcaaattctcttattcacctcaaaatgtttccttttctttggtttcagagaatggaattattctgttttcctaatgtcaatctctcctgctctgtccttaacccattgtttcctcaattactgcccttttggcatcaatctccccttcaacaaggataaatcatccggtccataaaatggtctataggctgcctccatttacaaaccacattaacaggtcactcccttcacatctgctaaaaaatttgtctcctaggatacacatgattgacaaaacttttgatcctgtctcatctctgcacccagccttctcaggtcctgccctggctttcaggaaggtgacaatccttttacttctctgggtactccttagtcttttacactgattagactcttcttgattttggccgcctatttcctcttcaatatgcgcttgttcatctattcaacttttccactcacacctgtgtgtccacgtttaatctccacttagaatgtagctctcatgatttaagatgaagacttctacacgcagtcctacacggccataagaagctacactagtattcagacgcaacccacccaacgagtcctctcttgtccatctctttccgcccccttcaattcttccccgtttcctctcccgagcctccactcctcatcagtgtcccccaggccctcccctttcctccttgggaaatcgttgccactagaaatttaatagatcccgtgaaaccagcgcctcgcacagttttggcctcgaggcttctcccaacagcaaacaaacaccaaaacatcgcctcaggacctctaaatttaagtcattggcgccatcactttcttcctccagaacagctctgcagaaacaaagttaatccgatgtcattcagtcaccttttttccagtttcctgacacgacccagggaccgaatttctgtaaaccgtgcaagtatctgctagacaggacagcggtcatcaaaacaccaggtccttcctcggcccgccaaagccgttcgaatttgaaattctccgccggcgctgacgtcattacgcacgacgcgcgcagtaacttccatgcgaccgcctcgtcgctggaaggctgcgtgctggtcgcgcccagctgcgtcaccccaggaactggggtctgtgggccagtgtggccgtctctacgaagactggcacgacccctaaagttaggtcggaagacctgtgggcagcttgagcgccgaggagtgccctgaacgctcaactcgccctggaaacgtttttccgtacagcaacatggcggcgcccatggactcttagaaaaggagaaagctttttctctgtggactggaaggggcatttttcatgatcactatttagatgggtgctgttttcatgaggagagtctgggaaggcggcgtccgcttttctgacaagggaagaggtgaggtgggagaggggctgcggagtgggtggaatgggctcccaggattgcgttggtacggctgccgaaattcgggctcagtatttgatcacttgccggaggctcacggtcctctggtggtggctgacctgtgagaggctaggaagaatccaagtgtttgggggcgggcggcgagggagtggatgtgaagcagagacgcaggagaggggtgcactaacaacagtaacagtagatcactttgctaaaataggatttcctcgctgctgtgagtttgaatccagaaacaggcactgcccggtacctggagagtggtggtgatgaaagatctcacagctccaggaagtctggatacttgggtctggtagcaattgtgccattaactagcgttgttatttttgggcagcttgcctttctgctctgagtttcaattttcccgtctgaatttctagctctcactagccattccaggacccttttcacctcagctgtggcctatgaaggggatggggaggaaccaaggattatattaatataaaaattatatgaaaattaggcaaccgtctgataataaaaagtctccttgtggaatactgttaggttaaactttacctacagattgttaaatccttagcactaatgttttccccagaaaagattaatggaaacatcatttgcttttctgactagatagttgctgcttccaaaggtggttttacacaaatacaaaattaaaaacacctttagtacagaaataattgcttgtatttcggtatacattcacagtacagttcagcatttagtggtcctgctagcaatttgccaggaagtcaagcctgccaatttcctgatattcctgctgtgcaccccaacttcttaatccctgctgaggatcttgagaagcagcagcaccaaaaccaaagtaggcaccaaattcaaggttcttttggttccggttgtcacatttcaagctagactccaatagatggaaggatgatcacatgtgagccctgtttaaaacttcaatttttaagagcaagcacaattgcaggaaaagaaaacaattcagagggatcatgtgtgcttacagttgtcttcatgtggccttttcccaggtttaaccaccaaggaccctgacagccggggtgtctgaataaccctggtgactcttttcaccatatcaaaacctgagttaaaaggctgatgataacagcagaaggtggcagggctgaggacccactattaatttcctaggctggtggagagtgaataaatgttcttccaaccttaccttatggcttctggtcaaagcaaagaagtgtcgtggaaagtgttgggtggtgacagtgcaaaaagagacttgacggggagggagcagcatctcttgataaaggtggggaagagaagatatggggaaagccctgaattcctcatggaaggcgaatctcagaggggagcggagcagagggcttatgatctgtgctttggccaagggtgggagtggaagaggtggggacaggacagtggtttggaaggagcatcactgaatacttaaactgagtgcccacacactcagcagtggtcccacaggctgtgatcttcacgtctactctaacaagcctcccaggctagagggctgtt

SEQ ID NO: 1245233 - DNA, 4001 bp, Homo sapiens
ggattacaatggtcctccactacctcaagttgttctttttcattaaaactgcttttcaatttatacttctagcccctttgcctcaaaaacaaaagaaacaaaatctacaagcactctaatttcttttctttctaccatgtctgatcctcatcatctttcacctagcattctgcaagagcctcttatctacttagtctccctgtttctgggtccaaatcaaacccattccaccctcagtcctatccagtgacctatccaaaacagaaaccacatcttattcctctactttaaaacctttcactgactcctgacggcctctaaaatcaaattctttagtatggcacgccaggagctccaatatctggcccctgtctctcccttatttcatttgggaacacaccttacctccaacagcagagggtggcttctcatacataccgatctttttcttgccaacaagactttaagttgtcctttccacctagaataccctcggaccccatgcccaatctgttagtattaccttcaggaaaaatcttatgcaccttgaaaccacattggatgaccctattcatctctctaacactgtacttttacattgtctcaaccttaaagttcctcttacatgagactatcaattccaaaagaacgggaactgtctaaatcttttccttatctgtaatatgaggaaaaagtaataccagcctcaaaaatgagatgtggaatgtagatatttaactcggtgcttggcatacagaaaacagttatcaaatgactatcattattatccacactgttaactagagctcagcagtgcatgacgtacagtaagacttcaaatgtttattgaaagactgaactctgcaaaaaggaatattcccattttacaactgaagaaactgaggaagattaacagcacaaagtcatagagccacaaaaggcagttaagctaacatccaaactcgagtctaactctaaagccctgaattcattctcaatgaatatacactagctccctcttgctgagaactgacttaacctatttcactcttagaaaacaaacaaaactaaggcttctttccagtattacttgtgtaacaggccctgttgttataatcgacatttctggaaatctgcatttttagattaacgtgaaggagtgtttcaacttctctgcaattcaatttccttgcctaccatgagatgtacttggatctcaaaaagatcatttaatctctaaaatcctgtggttctttaattgggtgctgttatttgcggcgccgttctttcagagttagtttgataccgtttatttagccagcatttccgatatgcaaagcacaactgcagtaaatcaaacattggccacccttttccagccctaatgaagttctccctaagccttcacgaagcaagccagagctctccagtatgctgcaacctaaaagcatcgaggtcactaggcttgaaacgagaggtgcctccttcggagcgacggtcttcgaaactgatctggccagagcaggcctagattctgcgctacagcaaaacagcaaaaacaaacaaacatatatatatatatcaccaagcagcccctcttttctgtcctcctcgaccaaactaggagtacacttcccagtatggcaaccctccctcggggcttctcacggtggggctgcagcggcctccctaagagggctaaggccgcagtgtccttgccgccgcctgcaggcccgtgcagagcccagggctctcctgcgcccaaaactaagggagacacggagagcaagagaagggcggcggcagcgccgggctcagcttgagcctccttacccagtgggcggtgaggccagccgcccgggcccggagcgccgcggagaagaacatggcgggccacactgttcaccttccccagccgcgccaggcgagaatcccgagcgcgcccagggcgcacagcgtgcgcgctcccgaccccaggcctaggcgacccggacggcacgccgctcccttcgccgaggggcgggggctgacgggagggagcgagggcgcgcgggggctgctggggccctgtgggcggagacttcccgggggaggggcggggaccagtccgtgctcggaaagggaggtgtcctacgggccgctgcaggggtcccggccttgaaaagaagcgtcccggagctgcaccttgggctcctgggtaacgaagcgcccgcctggatttataggggtgagcttccctcatggagagccttgtgaggattagccacctcctcttatattgctgttagttaaaaataaagtcgggttgcaacccactataaatcttattctacatgttacgaattcaagacacagagggctgctatccagtgtgctagccatagacaccaaatgtcttggttcccaatcttttgcattagagatatgtgcgacatatttaggggttaaatggtatgatgtctggaatttgcttgagaatagtggggagcgggaggtgaaaaataaagcaagttggccgttaagtaaggccatagaagctgcatggtcgttcttatttactattctcggtacttttgtacatattagatattttccataataaagctgaaaaaaaaacccacttccttcttcatgtttgtttggttatctctggaaattccaacaagtatttattcagtaacagctctaatgtgcacagcactatttcctggtgtggacttcctcttgattttttacgtcactgccttcttttctggagtgtcacgtcctgtacccacccccttccttttgcccattttctttgctataataaacttgtgaataatttctagaacattcacagcagcacagggattttaaaaatttatccctcattagtttaaaaactcagaaatattccattgcaacccctatgaatcatatttcgcaaatcacagaattcaagacacagaggactgctgcccagtgagctagaaatagataccaaatgccttggttcccactcctttgccttatattttatgttagtttgcctctcctaaattagcttcagtatttccctttaaaaggaaaagacagtctggcccttaatgtaaatgtattttgttataaagttacctaaatacttatacacctggccgggcgcgtggctcacgcctgtaatcccagcactttgggaggctgaggtgggcagatcacgaggtcaggagatcgagaccatcctggctaatacggtgaaaccccgtctctactgaaaatacaagacattagccgggcatggtggcaggcgcctgtagtcccagctactcgggaggctgaggcaggggaatggcgtgaacccgggaggcggagcttgcagtgagccgagatcgcgccactgcactccagcctgggcgacggagcgagactccgtctcaaaaataaaaaataaaaaataaaaatacttatacacctaacactattgtgcacatacttactgttcttatacaactaaagccaaaacatgtcacaaatacttgatggatgagatagacattatatggattctttttgaatctgtaatgcatgcttttactggattttattagggcattctctgactcccaatccagattagtcctcaagataccgtcccaaaatatgcctgcccgcactttcactactacatttacgaccagattataacctccatggatggagaaacctgcccttcctatattgtttggttcagcaacttgcactatacttggcaagtagaaggcattcaataaatatttgttgtctgaatgaaaatcttgcccatagtgcaaatattctgcctacctaaaagggttagaattatgctcatttctatttgtcttaggtcagaattatgcttgtttctatgtgtatcggtgagagtgcttttcgctacaagtaacaggagttctaacaagtagattaaaggatactgggttcattttctcacatgaaaaacaattccagaggtagagtagctccaa

SEQ ID NO: 1245234 - DNA, 4001 bp, Homo sapiens
cactttcctcaaacacagaaaagcagaaatctgactactcgttgacttaaaagtactgaatgattggggatattgaaactgatggcatggagttttcccaggtttctagtcactgtaattcatcaattctaaaatatcctttttctcatatttcaacttctctgaaataaggatgcttcataagatggacagtatgtcataacttgacagcaattttttcttcgtggtacatgaaataatggcatatcttaaaagtgacagcacactaaagtgaaagaaatatggcatccacgccaaaggttagccttaaaggtttgttatgaagtggataattatatgtaaacaagtagaaagacccctaagacaacagaaagtagtggtgactgcaaccatagcacaactagctgccacatctcaaaggacataatgccagccactgactgtaactaggttagaatgtggccccaattaagccagatttttaccattttcatgaaatttccaagctttaaaacactctagagaccacattaagcagggttcctggtcaaatcgggcccagcagccatcagtttgcaaccagtggtgtttatttctcttacattatcttaaataatctagatagtaagacctttcaaggcatttgtcagaaggggaggatattcagcatgttaaaaactaggcctttctattcaaaatagctggctccataacttaacttgttttgtgtccttatgcaggtcacgtaacctctttgagctttcattcctcatctgtaaatcacagcctacctcacacagttctcatgagaactaaatgacatagtatgtgcacaaggcttagcactttgctctcatggcgcatcttaaaagtgacagcatcttaaactgaaaagcatacaggatccatgccaaaagttaaccttaatggttgattaagaagtagataattatatgtaaatgagtagaaagacccccaagccagcagggagccgtggtgactggcacctataagcagatctgccacatctcaaaggacataatgcaagccactgattgtgactaggctagaatgtggccccaattaagccggatttttaccattggtatagaagaggcattcaaaagtagccaactatccgtgtttgtacaggataaggagagaaggtgccatttatcctatgtcagcctggccttcatttctatgccatttgcttcattttaactactaacgaaattacttaatgtcatatctaatgtgataagaagctgccattcaatcccagtattttgttcagtagaaaaatcttttcaataaatgatacctttctaaaatggaataaaagatttcagaaagttagcggtaacattcataagtaaactatgccaaaatgcactacagattgccaaaaataaagaaataaaacaagaaatccacaaggactcaagccagatgcagaaactagtccaaagtgttctgattccaaaccaaatctgatcttgggccatgaatcagaagttttgttaaactgctaatccctctaacaccaaaagtccttcatctgatggttttgaatctggctacctaaagtgacatgacttaaatcagggtaaatatgaattataactcaccagagaaacctccgcccgaaacacacagaaaaaattaaacagcacatacattcacacaagcaaagcccacatctcaaccccttaccttctacaaagtggacagacctctgctgatgacgcaaggaacagcacctaagccctgtgctttggcatccccgttttctgggttcatgcaatgcttcatcatcagcagtgcagagagctcaacagtctttatgagatgggacataactaagtgcactccaaacataccatgcttttcaacaatctcaaatcaaaatacgaatctacttttaagaaatgtggtaggtatgtgtgtctactttgctaaaagatttatgaggtcactcttctaaatagcggtcaaaatatcttcatatgtgatattctgcagcacaccaagtctgcaaactaagtgtacccatatttaatacgccttggaagaacaaccctgccgtttgcttcagcgggcattctactttcagagcctgctaaaatcttccattggtttttcttacacatactaattcagggagacaaaacaagctgtgcaaattcaacaatttgtcgttaatattctacgaaggcattccctgattctctgaagggcaacgtgacagcatgaaactgcccatgaaaaacaaataccaatgaaatgtgaagtcatcagaactgccctggcttattttttcactggtaggagaaagttgaaaaaggaagacggctgagactcatcttgtgaaatacaatgtgtgtggaactaaatactaccagcgacatggcaataaatagataataaaaggtgtcttcatcacctcttgctatttcctatacagccccaaattcccttctagcaacatgcaggagtgaatccagtcacatgccaacacacactcggactctgtttacattccaagcttcactttcacactagacatcagttatgatgattagtagtgactcctgtggacaaaagtggcaagatgtgctctaggtagattctgacactcactgccaatgtaaataaagcacaaacaacagtgacattaacgtgtttcatttatccagctgcacttcccaaaacactcttaaaatcgttttttcgggggagtttttacaaataatcatgttattaaaacattttttaaaagaacctaggatgaaatgcagctgtcctcacccccaccccccacaatacgtcaacccaagcagcccctttgtttaggaatgtctgcgtctctgcaactcagggcctgccctctactgccactaattaaatggagaagtagaggatgcaagggaaagctcctcaaagagagaagccaggagggagaggagaagccccccgggtcaatgaaacaatgctactgtcacctatccccaggtagttacacaaaacgggaaattattttacaaaagcacagcgaggcaaaataaacacacaaatcacacattatttgcactgtgatcattctttgatcaaataaatacatcaagctttgcctagcaccgctaagaaaaaaattcataccctaaacacccttcccaccccaaaatacctttcattccacacttacgtagcacacaggcacacacacacaccatgccagggtaggagagccgcagaaagcggagccataacgcgagcctgtctcagataatagcctttcttccaaccccacccccaacacgagagaaagagggaacctctgaaaagaaaggagggaggggaagaaagagaaatcgagaacgcctgaatttccaggcatcaacttttcatgaaatgcacaaccaggataggaaatacctccctgctgagtaatgcttcttgggttgtaaaattcacctctcgaaaggggagccagacctgagcgcgcaccccgccagatggcaaaccactcctacctgctccatccagcctgcctgtcacgccgcgcccgcgacaagcgtcccacccccctttttggcagagcaacataccaataagagccgagcgtggctggtcgagagaggactaggcagtgatttagcaggattgtttcaaaaggggggagtgggagacacggaagagagaatgaaggtaaaaacaaagccctttccagtgaaaccgaccgcctgggaggcgtggcttattcagtcgctttattaataaaagagatcaattaagctttcctctccccacccaccctggaggtgccgggctttgaatcctcgggaggaaaaaatggcagggctgcaagcttcctccccaagtttccaggagcacctgccaccagccttgaacacctcccccaccgaggctccgaaatccacaatcctggccgtagactttgcaaaacgaggggagggacacacgcagcgtgtccccca

SEQ ID NO: 1245235 - DNA, 4001 bp, Homo sapiens
acagaacaaagaaaggtagagggagtgggcagacaaggccgaccagccccttggagagccattctcaaatagtttcttcccatgcatggtccgtctgtggcagaagcagcatgtttctttcccttgacaccactccaggatgctgtaccagacagacccgtctataggcatattgtgaagaatcattttaagtgagcacctgaggaatgcatgtttggcaaaggaagggctccaaaaagtcaaggctgttaatcaccaaaacctaacactcaggaaagttatgaaattccctgtagagggcttttaaaagtaggttagatcccaatctctgcctggttgaggtgtagcctaaactcccaacagtgccaaagttcaaagtccttttggaggtggaggagtcaaggacgtccaccaatttacctgggccagtgaggcaagatcacaggagaagggggtcatggtacgacccgcccccactggaccaaggcccccagtatggaaaacccttggctgggtacccgccaaccacagccaccatggctaagacagccaacaagtgtgggccatgctgggactgaccactacagctcacaaaggggtcagtcacctgatggaatgcatagcacctcctaagaaaaagtcattcctagtcctccctgctacttctctgcaaataaatattcaaagctagatctatctaacatctaaaaaacattctgtcagtccaaatcagagtgcttttaactgtctccttttaagcacaggaaacaaaagtttcaaaccagaagtttaaaatttatcaaaaaacggccgggtgcagtggctcacgcctgtaatcccagcactttgggaggccaaggcaggcggatcacctgaggtcgggagctcgagaccagcctgaccaacatggagaaaccctgtaactactaaaattagtcaggtgtggtggcgcatgcctgtagtcccagctactcaggaggctgaggcaggagaattgcttgaacccaggaggcggaggttgcagtgggccgagattatgccattgcactccagcctaggcaacaagagtgaaactccgtctcaaaacaataacaacaacatttaataaaaacaggattgatggctcggccagcaagagagataggaggtaaatgatgcattgatttagaactgaaagacatcgtcccttcccaggatacagaatgccattttatttggttaattacattgaaatcttcatcaaattctcttaacaggcaaacaaaaaatattctaaaacctaagagaaaatccataattcttccaaaaataacctaagagttctactcagtattcaatatcagagaaagccttactcaggcaattacacagaaataaattaccatccacagcagagtgtcatttctcactatatagtgtaagagaaatattcacagatacccattttttccctcaataagaaaaattcacaactgtcacggtgttcctacattttcaatccattcattttcttaatttgtttcccaaagctgtatctccacttaggaaaaccaatcaggcctggttagacttgttcctaaataaaccctgaggtttgaacaaaatccttcaagaaagaagtaatcaggtcaattatgttaaagatgaattaacagctccagcatcttgaggtcatataacacaatcatgactatgggtggatgtggagagcttcagaatgccacaggaaggtaaaacctcctcccccaccaagcaaagtcttaccgagtgttacctgctcaaatgcgagacgtctcatttaggagaatacaatattaaaggtttagtgcattaaaggaaagctggaaaactcaagggcagagcaagttctgaagagtatgcggaagtcgtggctgcagccaagggtaactttccactgccgggtgacaaggtcacaggagagaagttttaacttgactcccaggaaagcagtctacacggttgttcctctctggaaatggcttcctctgtgactggctcacatcaaatcacaggtgtcttatgaacctgccacctggacaccaaggtccagcctctcccaggactgccaagttacctcttcaggaaatgcaatgaaatctgacccagataacgccacataagataacatcaggtgtccagggccctccaccttcagtaaatgttcagaagtacactctgttttaaaggaacccttgtatatttcatgttttccccacgcaaaagcttcctctctgccactttcagtttacgtaatcagacagctggctgtgagcatctccaaaacccaggatttgcattgtttcaaccaagacaaaaatattaggctcctcataggtctggaggcaccagtagtgtatcattcagccaagtgacactgagattcttaccaactgcttagagcaaataaggaaatcataaagtatcaaatatacagattcacttttcttctaagaaaagattcttgaacccaccacatattggtctattcttccataaagcttaatatgacattggtgttatgggtagaagtgtgtctccctccaaaacttccatgttgaggctctagcccctggaatgtgactgtatttggagacagaaacttgaaagaggttattaaggtaaaatgaggtcacacgggtgggccctaatccaatatgaccggcatccttctaagaagaggaaatttggacacacagagagacactggggcttcggatgtatgcagggcaaaggccatgtgagggcacagcaaggggccacctgcaagccaagaacagaggcctcgggagaaacaatccactggtctcctgatcttggcttctggccttcagaactgtgcgggatcatggccaggcgaagtggctcacgtctgtaatcccagcactttgggaggctgaggcaggcagataacttgaggtcaggagttcgagaccggcctgaccaacatggtgaaaccccatctctactaaaaaatataaaaagtagccagacacagtgcatgtgcctgtagtcccagctactcgggaggctgaggcaggagaactgctcaaacctgggaaacagaggttgcagtgagccaagatcacaccactgcattcctgcctgggagacagagcaagactccatctcaaaaagaaaaaaaaaaaaaagaacagtgtggaatcaatttctgttgttgaagtcaccaattgggtattttgttatggcagctctagcaggactagtagaattggaaagaaaatatttcagtgaccaaaaaaaaaagggggggagagaggggtggactccttgagtcctgtgtccttcccctgggcacatggcctgaccagcaaccccattccgagcccagccccttctgcattgcattgcagagccagagcacagaaaccaagccctgtggacagagcagtcactggggctttgggggacagtaaggtgccctggaagaatggatgagatttgctggcagagaagaaaaggcatagtaaagagaggtcacaggcatgaaaagggcattcaaagccccaaaagaaaacagaatgagacaactgaacaaaagacaacaggaatcaacctcaaaatatagaatcggcaaatacacacatacgatatgaggccgtctccctcctcaccatatgcaaactgaactcgcgtgtacttcgatgcctcttatattagcagagattaaaattttaacattagctgatgtttatgcaaaactgagcacatttagagcagtggtattaacagccgtcctgacaatgtacagaaagggacagtgaagctttggaaagagaacaagtatcttctccaagctcaggcagctctaagcagcagaggctagacaaaatacaggacactgtgttccaataacatagcttctcaattcggggagggggtgattctgccccccaaatgtggcaacgtggagagttttttttaatattacaccagggaaagtgccccccagcatctagaag

SEQ ID NO: 1245236 - DNA, 4001 bp, Homo sapiens
cctcccatcccaacagaaccgtcaagaccacaaaagctcctgtcccatcacttgccttaataagtacatagagccccccaccatcaccacatccaccaaacaaaccactttggaataaaacttctacactcaagtagcagaattcatataatttcatacctgccttcattttatatcttttcattatattccacagtgccaagaaaatgtcccaaatgtgtcgttttaaatcaacatttagttgcaatacaggactccagaaaaccttcatttaacttaaaaaggcaaattttcataaaaacaataggaatgaaaaaggttaaggcataacatctgtaactaatacagatgtttacttcctcttaactaaataaaaagcatttcttcctctcttcttgacttccatcttactagattcccacaagaattaaagttcaccttgtattccttacagacattaaaaaaggtttaaaaaaaaaaaaaaaaggtcagcacccaccactgtggcattctttctcttcctggtcattgctaatgaaactcactcaccagcctggggccagcacaaacatactttaaaatcccacttcccttatagagttatttgcttccttttgtttctttcactggcaatatctcattcaaacatgtgtaaagtacttttcaatgtgaaataagtattaaagaataaacattaaagaatagctatgaaataagtactaaagaataactcagatttgactgtaggctttgatatttcatattgttgatacatttttattgtctttagaattccggccatcttaacacttaatgacatcagaaatactttactgaaagtaacccggctcattaatacgaaggtgtggcctgcactcaaatttatttcaagctttgccaacatatggatacactataaccagttaactaacagtttatgaatcaccatgaaatgagacagtaaagaaacaaaaatcacatgttaatcattcagcatattcacatgtatgagtaggaagggtgggaaaatgatagaaaacctgagggaaaaactcagttgaatatgttctgggctttgacttttgttttctcaaacaaaaaatataataaaatttagtctaaatcatgtaagccaaattactcataccgaggaagagaaagatttctgttgctaccaaccaaaaattcagatataagccatgaattattctccaagcaaactattttatgacctaagatggtattttacttgaaacaaaggagagctggtatctccctcttctccaggaggtttctaagtcagaaatactgagactcgaaacagaacaggaaggaaaacacaattctttcctcctcaacctgtgatttctaaaacagaaaacctcattcatagaacttcagcggtctctgttttccattattttcaaaaataaaagtattattgctttggtttttggaagaaaagctgtacatttttctaaacagtcaagaaagttaagaagcaaagaacaggggaccagaattctgatcccaattcttttcaaggctcattctttgcctatcattctttttatgcataaggagggtaaaattgaccaattatagctaactgtgaacaccaaaaagcatttaaaattgaaaatcttggtacatgctagaactatgccgctgacataaaaacagtattaaaccaacatcaaactcacaccaagaacagatgttatgcattcatatagcaaacatacagtggtgtctttgttcttacctatacttttcctcaaagctgctgaaaaacaaggctggaaagtgttcagctggactagcgctgctggaaatctaccttggtgaccctccggctccctggcctcgtcttcctccttcccagttttaaagcagtgcccgtacacacctctgctgataccgggggaataccagcaagttttaacacaactgagaaggaatgcgcccagctcgctacttatactgatgattcacttcaatgacaggtagaaagaaatgcttgttggtggaaaagggggttgcgtcaagctccacctcctaccataaggttaagtagctccacccagctcagcaattagcttacatcatcacccggggccttatctccaggttccctgcagttgttcctgcagcatcttcaagtgaagttctcagtgggcttccacacaggatgggcaataacagaggtcatgaggttttgtggatgactctatgtctggcggggctgttttgcttatttaaagccagatcagagattttggcatttccaacagtagaggtcagcccttcaccctgccacaaactaactcagcttctacattctgaggttctggccctcgaggccccacactcggcagatgggaacacaacttcctggccctccaaaagcttattgtcttgaagaggggaaaaaaacaggaacaaaaataactatgatacaaactacagcccccaaaagaatcaatagtcagatgagagacagccccgccctgtaaatctgcagtctgtactgtgcatcccagttttcagatcccagttgtgtgcccttaggtgtaaatcagggccttgaaggtgccagcagagctctaccctgggacccagcagcaccatgtcctcgtttgaggggtagtctggcaacctgaccacccttactctacagaaattccaagagcaagtcaaacatgtgctctctgcctgcgatgggcactatgctacttctctttcctcttgctggaagaagtcacaccctactctccaacccatgcagccctccaccccagcagatgcggctctaataggaagtgtccccagttgtagcaaacagctaactttctatatgcactcaaatgtggtggcatgctcactcgcgaagtgttcctggcatctcagctgagaaaccctgtaaactagacttgcagttccccccagcgttcaaacgctgggatttccagaggtggggggaagatgaacggatcaccccttgaggctgggaggactgctgaaggcttagaggagcaagtgggcaccagggttcagctagaaacattcaccctcctggagacagggggacagtgccaaccattctcagtctttttttttttgagatagggtctcactctgtcacccaggctggagtgcagtggcacgatctcactacagtctctgcctctggggtttaagcaattcttgtgcctcagcctcctgaatagctgggaccacaggtgtgagccaccacgctccactaatttttgtatttttggggttttgccatgttgccaaggctggtctggaactcctggcctcaagtgatccacccatctcggcctcccaaagtgctgggattacaggcatgagccatcgtgcccagcccgttttcagtcaaattcttaaaacaagaggaacatctcaagttttcagtcttcagcagttgaggatacacaagttgctgaatagactaaatttaagaacaagatttccatcatctttgattatgtctaaaactatcaaattaagctacaatgtttccaatttacacactagctggaaggttaaaaaaataagaaccacaatacactataagaaaatgtacctaaacaagttgaacaagtttttatttatttatttttaacgatttgcctattcccttaaagataaaaagcatctacacgtcctaccaaatgttacctgattgtgatgggcttaattgtatttgcccaaaattcctaagttgaagtctttaatacttcagatggtgactgtatttagagagagggtatttaaagaggtaattaagttaaaatgaggttagtaggtgggtcccaatccaatatgactgtgcccttatacgaacaggagattaggacacggacacaggtacacaaatgacctgggaagacccagaggagcatctgcaagtcaagaagagaggccgcagaagaagccaatcctgcttcatcgcaggctccggacatccagagccc

SEQ ID NO: 1245237 - DNA, 4001 bp, Homo sapiens
ttgtttaggaatgtctgcgtctctgcaactcagggcctgccctctactgccactaattaaatggagaagtagaggatgcaagggaaagctcctcaaagagagaagccaggagggagaggagaagccccccgggtcaatgaaacaatgctactgtcacctatccccaggtagttacacaaaacgggaaattattttacaaaagcacagcgaggcaaaataaacacacaaatcacacattatttgcactgtgatcattctttgatcaaataaatacatcaagctttgcctagcaccgctaagaaaaaaattcataccctaaacacccttcccaccccaaaatacctttcattccacacttacgtagcacacaggcacacacacacaccatgccagggtaggagagccgcagaaagcggagccataacgcgagcctgtctcagataatagcctttcttccaaccccacccccaacacgagagaaagagggaacctctgaaaagaaaggagggaggggaagaaagagaaatcgagaacgcctgaatttccaggcatcaacttttcatgaaatgcacaaccaggataggaaatacctccctgctgagtaatgcttcttgggttgtaaaattcacctctcgaaaggggagccagacctgagcgcgcaccccgccagatggcaaaccactcctacctgctccatccagcctgcctgtcacgccgcgcccgcgacaagcgtcccacccccctttttggcagagcaacataccaataagagccgagcgtggctggtcgagagaggactaggcagtgatttagcaggattgtttcaaaaggggggagtgggagacacggaagagagaatgaaggtaaaaacaaagccctttccagtgaaaccgaccgcctgggaggcgtggcttattcagtcgctttattaataaaagagatcaattaagctttcctctccccacccaccctggaggtgccgggctttgaatcctcgggaggaaaaaatggcagggctgcaagcttcctccccaagtttccaggagcacctgccaccagccttgaacacctcccccaccgaggctccgaaatccacaatcctggccgtagactttgcaaaacgaggggagggacacacgcagcgtgtcccccattcccgccgggataagcacgcacaggcttctgagcgcctgctgatccacacaatcatgagagagaaagttccagggggaaacgatccggcttctccgcagtcccgggtctccagccgcgcgacccagacgtgacatgcatcatggactcccgggctgcaggggcgagaggcggaaagttgcccaacagccccgggagacgctgcttggagaggaagagggaagagaggcacgcatgccccctccctctcctcccgaaagcgaggagctgcggagtgaacccccagctccaagggcgtcgcgccgctttatttacaaacaatgagctcggcttgcggagggtggggggtgcggaaggacccaagctcccctggatcccgctccggggcgctcccgctttggggctcccctgcagacgctgggcacgagcaccccggggacggcccctttcccctccccctgccggcgcgggataggaactccccggggagtcccgagcaggaagggggtgccactcacctcgtcttcggaaagtccatagaccggctccccgagcccggtcgccatggagccggcgccccgcgcggggtctgaggcgctcccagcggctgtgctgcggcgcggacggccggttctcccctctgcctccaggtccccccggtcccgcaccctaccctgcgcacgccctgccgggtaagcggccgggcgccggcaggtgagggtgcccgagagcgcgccctggacgctgccggcaccgcttcctcccggaaggctgcgggaccagcgggcgggcggctcccgagagcgcgccgagcaccgggcggcagccccggcgcctctcactgcgcgcggcggcggcgcagacccggccgggctttccctccccgcgacccgcgcctccctcccgccccgccgctctccgcccccctccgagcctcctctgcgctcccggggacccggctcgcccgcctcctcgctagcgccgtccgggcccccgctctctccgccccctcctccgcctcctcccaccggcgccgcgagggtaccctccccgttcgccggggcgggcacacgcgccccccaagccaatcacaggccgggctggcgagcgggccgcgggctgcgggggtggcggagttcagccccacgcccaccccggcccggggcctccagcgcggcgcggcgggggtcacccggccgcggggcggatccgcaggggcgtgtactggcgcgcttggccggcgccgccgaccctccctcctctcccggtttccctccgctttagggagggggcgggctggacgtttgggggcgatagaggattttgcgaacaataacaaaaacgccctgagcgtttcttcctcccggtggtctttttaccgagagccctgagctcgctgttaactgtgaaaaggggaaaagatggatgtttctagacccctttaaattctttgcggccccgacgagcaggacttggctacattgtcagctcccgggagcgagccgcccggcccggctgccagccgaggagaggctgccccagtgtggccgcaagtcgccattgcctgtgtcaaccttgcagggaacaaaaccaacatagcgcccgccccggttacacacccacccacgcgaaaacagacagcatggttctttgaataaaaagcagttcatttgtgagccgcaacgtgaaatatcaaactcaagcttaaggttatcctttgcatatgcaaatgatcgagacgtcttattagccaccgtaggattcttcccaccacccagctaccgtttctctagcaagcagttcatttaatccttccgatttataggactgcaagagactactttaaataagtgaaagaaattcgtcagtcgactttttcggaagcctttccttaaatttagatgttaagtgcagttgggagttcaaaaagaaaacagacgcagaacattccatttgcctttgaaaaggaaacgtcaaagtgcctacttgggtattaccaggatgcatttaggattttcattcaaggaagttcagagagaactcgcgtgacccgaaggaatcatattcctcgttgccagctacataactaaatatctgctgttcgccctgctagttcgttttcaaaagagcccacccatgctaccttaagctctcctttgccttcctgcagcatgactggcttaaaacctgtgccgtagaatgggtttcctttgacgacttagccccatggagtcaacatcctactcagaagccttctctagaagtcttgagccgtcaagtccacagtacttacaggccacaaaacccccaatgagaactatttatggaggactatttaaaagtcagatttctgtccattctttcaatactgaggtttttcaaccctttcaaacctcgagtctttagaccgggcacggtggctcaaacctgtaatcccagcactttgggaggctgaggcgggcggatcataagatcggtagttcaagaccagctggccaatgtggtgaaactccatctctactaaaaatacaaaaattacccaggcgtggtggcgggcgcctgtaatcccagctactcggggaggctgaggcatgaggatcccttgaacctgggaggcggaggttgcagtgagccgagactgcgccactgcactccagcctggaccacagagcgagactccgtctcaaaaaaaacaaaaacaaaaaaaaacaaccctaaagtcttttgataaacaaaaggtacacgtgcacactctgtctttctctctctctctctcacacacacacacacacacacacacgcattctcagatgcccttgccctagcctgtgaccctcatggatgggagt

SEQ ID NO: 1245238 - DNA, 4001 bp, Homo sapiens
ctgctcccacccacagccacactccattcagtcaggtttatgtgctgttcttccttgtcccttatgaggtagaaccatcaccttgcgtgcaaagcagcttacaggtaaggaattataaacaggttaaggtttatggcgtttgtcttgccaattttccatctctcaacagaaacatctccttttaaggtgacggcccaggctctatcatggcaagtcccacccaaaaaggaaggcacttccctctctattcactaaaccactttgctgttcctcccacatccagggacccaatgccacacaattctcaagcacaacgagaagtcgccatcaagcaaacagggtcagaagttcaatttcacacattaccgaccgccacggttttgaagatttctggcaaatgttctttctgacatgcttcaagttgctgcacatgctcggtgccctcctcctcaccatctcctcttccccctcataaaaatcatcaggagctcccgtctcagcctttgtctaaggcagcctgagactttctcattgtttatacagaattatccaaaaagagcaggcactgccctggttttctattccagcattaacctaattcaattttcctcaagttatatgtttaccggagagtattacctgtggctgatgttaaaaaaaaaaaaaaaaaaaaaaaaaaagagagagagagaacagaaaagtagagccccaatatccctgctagtaagattaggtcaaagaaaaagacagattaatttctacatcttttttaatggcacataacatgggtagtctttaacttagagtaaaggaaaacataagtgccagttttattttctcttaaagggaataacagtttgtatgtttgagggctgaagaatgcagtaaaagacaatgagtaatgattatgcacctcatttacaattttttaaagttcctaactgcacgtttatccatataagagcaaaatcatttaatctgggtgaatacatgtaaaaactcaagttaggggtcatgtgactcatccccaggtatttcctgtaaaggttataaaacaaatgagaaagtgtgtgtatcccaggaggtgaatgtaaaacaatagagaagtatgttgtcccatcacgagctggctgattgcattagctatgctctaaattgaacttatttcacagtgaagcctacaaagaatcaaattttaaataaaagatctgtcctcgcttcacctgaggttttgaactcagaaatttgaaaatttctgaactctgcatgacagattcctttacagtgtctatttttgacatttcaggaacacagtgatgacaaatgcagtaatttattcataaaaggggggagaggcaccagagcaatatctgtgtaatttttgactgcaccaccctgaagaaaagaggttagaaacaagatgatacaggttaaatacataaataattaaaatgttttcactgtgccgccttttgattttgaagcatgcaaaaaatgtctaatggacattttaaaaagaaagcaagcaagttcaaataatccccctaatcctgcacatttgggttaaagctaatggattcacggtaagagaaccttctcctgatgctgtgggcactaatcgagtaataaagggaacggaaccttcggtggcacttaccagattccaggcaggaagagctcgtctgaagtggggagcggagagagaggcaggtctagatgcagatggtctgtttcccctaacaacagcaacggcggcgaggagaaatcctggtctccgccagctcccggccaggtaaccaacagcctggagtgggaggtgccgtgctggggaggcaccgcgtggacagggctctgcagccgctcccgcccaggtagggccctgcgcagccacccacccgggcaccctcgcgcggcttaagcctgtctgggttggaagctgctgccgcggatgcctgcctctctcgaatcgggagcaaattcaaatgtggggaacacggaagtgcctcatcagaggcagcagagccaatgactataggaggaacttcgtgtattcaagagacacaaaaaagcaattcaaaccacagccccacaatgctgcccttgcaacaaaacaacaccagggaagttatgataacagccaacttgccatgagacgtgtgtatacctggcttggcccaggtgaccctggagcctcagggatccctctcaggtgtatggaatgccccttttggaatatcagtggcatcttttcctaaatgtccatagcaatgttaaaaagaaatacattcaaggcaataaggaaactcctctagatacttctgtttaaattactgtcccactgtcctcacatacagggcatgagcctgtattttcatcagccaaaactagctttggatcccatctccactagcttcgtgacatccagcaagcttcttgtcctatgccacctttggcattcttgtttgtagaaacagccttgaaacctctttcacgtgctgcttttggaccaccggtcctgcaatcaatgtgctttttttacattttcttgtctttcacagttccccgtggctctaaaagtattatccgaaatcaaccagtcacccctttcaccttctctcagtttaaaaatggatccagtgcatacccaatagcaaaatattttcctctttactctcattttttttttaactaatgtctccaacagattagggaggccaattttaaaatcatttttgcatacaacggtcaaacaaacagatcccatgaccccacagcccaaaccctgccagggacaacaagttgcagcccaaggcagagggggtttcttctgtttaaagttctgtgtaaattcccacttcaaggccaagaacaggccccttttaagagccaagagtgttgaggaaaataaaggctttattgagccaaaaggtctttttcttgaatgctcccttttaaaaggcaattatttcttacaatgggaatttacagcttacttatattagcactcttcgataagataagaacgaccagggcatgggtgaccggcccaacacttatcaagtgaatgtccatgggagggggagatgcagagtcccacctgggccaagaggccgcatcaccatctgctggtggctcctgcttttacagtcatgagccctacaccatctcccatctcctctgtagcaggcagcccattagaattcctgctttattacattaacattctcacagcttagtttggctgctcaaggacaacccttgttctttcccaccagatcttctttccaaccttcattctttcccacagactcgtaatcaggccactaacgacagcggggagcgtaaaagttctcttccctacccacctcgcgtgatgcggtgacacagaatgaaattcacaacacacatggagaaaaggaaaacaaccaatccttccccagaacggaacagctaagagccaacgctactgaaaaccatggggcaggcatctccaccgagtgcagggaagaggccaggagaagacccaggaaataaatttaaaaagggacagcctttgagctggtccctgaccggtgagcaagacttagctgttcaggaaagctgtgtggctggagcagagaatatactggaaatcagagaggtcaaaaacaatgagcaggagatatcggaagaaatgttcctaaccacttcactcttccaaagccttcacccatctctggtgaatatatctaggtccagcagggtctcagaagcagatgccaacctgaggggaatatttaccagatgacgtgaaggccgtggaaaaagaagaaattggaaaattcattatttaagtggtgtgtgtaagttggatactctctaaaacgataccagtaatttctaaaaaagatcagggggaagagaataaatctgggttttacaggcagctgtgatgagggctgggtgaccagctgtgccacagctggcaaatgtgtctacacgtagtagtggcatctgtttgc

SEQ ID NO: 1245239 - DNA, 4001 bp, Homo sapiens
tagggaatggctctgccagcatctctgaatgaagagaggggccagaaggtaaaaaggaggaaaaggagaggcaaacaatgagaacagctccatgactgttcctgacatactgcagtgtggctgtattttagaaaataaatacttagacaaatcctacagactgtggaggaggagaataagcaagaaacagattaatgtggattgtgggcattaagcaccattattggaatgttgcctacaaaaatgttctgaacctccaagtaaccccgtccctcagcactttctaagctgtgaaattaatctcttctaaccttaacttgatttaataccaaatcaatatatagaaattgattattaatttgagaaacgtgatttccgaaagcattatattgggtcaggtttccagtgtcaaagagactgtgatctgtaacttaacagtaaatctgcaatgccattataatctaaacttgttttacttccgtattcttgatctaatcaacatttttacaagacaaaacactagcaaaatagtaagtaagctagtcttcataatttgatttttcttctattttttcttattcattttgtcatccaacgacataaaaggtctatgttttcacattttcacttaaaatgaattcgggggagagaacaattcacaaatatttcctgaattaaagctcaccacaggcttatacatttatacttaaacatcactctaagaaacgtatctaggtcttgatattaatatttaaaatattgtcaattgtgtgttactttatgctctagccagttcatttgcattttaaattaaggcactggctgctgttgttactgtgtgtttccacaggaaaaaaaaaatcaatttaatttgtcatgattctgctcacacccagaacacacaggtatgcacatccttcagcatcaggatgtgtatttgtttactccgctcttcctgttttgatgaaatcacattatagaccacgtactgtgtttaactcagcagcaaacccctctcaactgcgtggcccgcgatcaacactctcatctttgcttagtaatgatacatttccaccacacattttcttatactgccttttactcgatgactcgtgatactattttcctctcattccttcccacctctacactgcccgcgttaccacacacccataaagcgacatcagcggtctccagggcggaaaggggtggaagctgaccctcgcccttccctccagcgctggcttcaggtgtgccttctgctacctcctgtactgcgaacaggggcccgccgagctccgggagcccctagaagaggaagactcctctggccccactaggtatcatccgcgctctcccgctttccacctgcgccctcgcttgggccaatctctgccgcacgtgtccatccctgaactgcacgctatcctccacccccggggggttcctgcgcactgaaagaccgttctccggcaggttttgggatccggcgacggctgaccgcgcgccgcccccacgcccggttccacgatgctgcaatacagaaagtttacgtcggccccgacccgcgcgggactgcagggtccgccggagcgcggcgcagaggcttttcctgcgcgttcggccccgggaaaggggcgggagggctggctccgggagcgcacgggcgcggcggggagggtactcactgtgaagcacgctgcgcccatggatcatgtctgtgcgttacaccagaggctccgggctccactaattccatttagagacgggaagacttccagtggcggggggaggacagggtcgagaggtgttaaagacgcaaagcaagaaggaaataaaggggggccgagagggagaccgagaggaagggggagctccgagcccacgctgcagccagatccggatgagtccgtcctccgccccgggcgggctctcgctctcgctggccctcagcgccgcgcagccagcagcatccccaccgtgacgctcgcatcacacccgggcgccggccgccaccatccgcgccgccgccgtcaggaccctcctcccgggcatcgtcgccgccgcggggtcgggaggacgcggcgcgcgggaggcggcggtcgcagggcgagccccgggacgccccgagccggggccggggccggggagagggcgcagcgaggtgggggccagtccagaccgacggcagcgacggagcgggcggcggcggcggcgccggcggcggcggggtggctcagtccccagtctcagacgcgccgcgcagcaggtcggagcagcctccccgggaggatgtccagcggcagcgctcctcgctccagcccttggggatcttccgctgaggcattgaaggcaggaagaaggggtccgtcatcggctcgccgggctgcgcgccacctctgctatcttgcggaaagaggagcgggtgggtgggcgtctgggaggcgggctggagggcggtgcaggggagcggggcggccggggggggggccggggggcggggaagggagggaggagaaaggagccggaagagggcagagttaccaaatgggctccttagtcatggcttggggctccacgaccctcctggaagcccggagcctgggtgggatagcgaggctgcgcgcggccggcgccccggggctggtgcgcggcagaatggggccgcggcggcggcagcaaggacatcccagccgcgcggatctgggggaggggcggggagggggtgaggacccggctgggatccgcggctcggcccgccagggcgcagagagaggatgcagccgcaaatcccgagccggatcctcgtgccggacggaaggcgtggaagcgggaggggccttcgtgtgaaaatcccttgtggggtttggtgtttcactttttaaaggttagaccttgcgggctctctgcctcccaccccttcttttccatccgcgtaaaggaactgggcgccccctctccctccctccctggggcgcaggtttcgccgcggactccgcgctcagcttgggagacacggcaggggcgcgccccagggaaaggcggccgtaaaagtttcgcggttgagcactgggcctgatgtccagtccccccaccaaattactcctgcaaagacgcgggcttcttgcaattgagccccccacctcgaggtatttaaaaccaccccaaggcacacacggacccccgttcccccgcgccacttcctcctacaggctcgcgcggcgcgttaaagtctgggagacacgagttgcggggaaacagcaccggaagagcccgggcttgtaaaatgcgaatcaatgaatacgaaataagggcaaccgcgaggcagcgccgggaagggctggagcgcgcgggggtgcagggagtccctccctgggcgccgcaacggcacctcctccctttcccggctccgtcccgccctccctcggcctctgcggacgcgacccacgcagaccacagccgagcccgccggaccccgggactacggaagccatcccgtccggccacccacacccgcgccgcggctggggcttgggttggggactgtggcggcgaagaagccggggtaggaagagctaatggcaatggcggggtcgccggggggcggggggtcagcagcagacgctgagctgtgaagactagggtggccccgaaaggccgaggaaaggagaaagggccatgagaagagtctggcgagcgctcgaggccggggggctgcctcccggctctggcccggcctccgcttcccggcacctgctgctggggcgcccacgtgcgcgcggggctgcgcggggcgttgggtgctcgtcgcagtcctgcccacgcctagcgcagcggctgtgagtgggtggaggtctcctgccagtaagttgggatgagggacgatgaggtgacccccaagtctggaagggattcagagtctcacacgcgcccccaagcctcctaccaccacaccaaagtgctggttcctcgatttccagggtggggtaaagtgaccgagc

SEQ ID NO: 1245240 - DNA, 4001 bp, Homo sapiens
gaacagaaagcctgcttctttgaaaaatctatcaaataaatgtgtccccatttataagtagtagaaagtgcatctatctttatcattaagacagtcttgcctgtgtgtgtgtgtggggggaaggtgggtgcttccaggttttaggctatttaggtactaacagttggaatactgaaaacttccatcaccagatgaaatgcttctacattttaaacgttgtacttaagagagaggtgttggccgggagccatggttcacgcctgtaatcccagcactctgggaggccaaagtcggtggatcacttgaggtcatgagtttgagaccagctggccaacatcgtgaagtgccgtctctaccaaaaatacaaaaattagccaggcatggtggcgtatgcctgtgatcccagctactcgggaggctgaggcaggagaatcgctggaactcaggggactctcgctttgtctcaaaaaaaaaaagtgtttacaaggttagtgtaaatgggaaacgttcaaagagaagtctctttccaacaccatttatctttcatgttggaaaaaagtcatgaaataaagggtcataatttacaatcctgaccttgacttcaaaatgagatgtcacttgttaacacaaataaggtaactatctttcagattggtgtttagaaaatgtgattatagattcatctttgacattaatacgatttttgtaatttataatactaaagaaatgtaacatgcaagttattctactaattgttgagctaaaaaaatgctagtttctcacacttacacagttaatattgtgccaactatgcgtccattctactgcatgagaactctaaatcaattaagccaacagcaaaataaactcctaagttgttcatctgtttttattgcacagaatttgcttgttcataacccactactagttaatctcaataattagcctgattccagattttacagttattgattcactcaagagatatttttgcgcatgatctccagatcaattttgtaatgcctatacgcatattcttcatccaaagcacagagatggcaaggttttggcttagtgctttcttaactctggcactgtctccccttaccttctatgatgtagatgcattcccggtcagggggatacttgctgggatagttgggagaggtaaagatacctccctctgcatgttttgtccaagttccacactgcactgacttctgtgtttctgaggtggtttgcttttctgttaaaaaaaaaaaaaagttttaaaaagagccatcatccaattttctattgtactaaaaatagaggacattcttataatatccattagtaaattaatttttaaatgttgtcttagccaaaccaatcaattatacatattataacaggttcagatattctggaatattaacagtaggaggaaaataggaaaatacaaaataattcgaggtcttccactagcatttttctaagtaaacacacctgttcctttcttggttgccccagacaaatggaggatgattaaacttgctacaactgaaacagaaaagaaaaattagagataaaatacactgaaatgatcaaatcccataaaaacataacataatttcaagataaaataatatcaaagcagattaattttttcattgttaactgttagaagtcgattcagaacttgcaaaaaccaatttgaaatgtacaaatcaggaaaccttgggactcccttaaggaactaatgcaagttaagaatggatgagacccaaactcctaaggcaaatacatcattcactctaaaggcaacatgtcaatttactcatgtcacacacagtacagtgggactacaggagtcacactgtatctaaactacccttagggaatggctctgccagcatctctgaatgaagagaggggccagaaggtaaaaaggaggaaaaggagaggcaaacaatgagaacagctccatgactgttcctgacatactgcagtgtggctgtattttagaaaataaatacttagacaaatcctacagactgtggaggaggagaataagcaagaaacagattaatgtggattgtgggcattaagcaccattattggaatgttgcctacaaaaatgttctgaacctccaagtaaccccgtccctcagcactttctaagctgtgaaattaatctcttctaaccttaacttgatttaataccaaatcaatatatagaaattgattattaatttgagaaacgtgatttccgaaagcattatattgggtcaggtttccagtgtcaaagagactgtgatctgtaacttaacagtaaatctgcaatgccattataatctaaacttgttttacttccgtattcttgatctaatcaacatttttacaagacaaaacactagcaaaatagtaagtaagctagtcttcataatttgatttttcttctattttttcttattcattttgtcatccaacgacataaaaggtctatgttttcacattttcacttaaaatgaattcgggggagagaacaattcacaaatatttcctgaattaaagctcaccacaggcttatacatttatacttaaacatcactctaagaaacgtatctaggtcttgatattaatatttaaaatattgtcaattgtgtgttactttatgctctagccagttcatttgcattttaaattaaggcactggctgctgttgttactgtgtgtttccacaggaaaaaaaaaatcaatttaatttgtcatgattctgctcacacccagaacacacaggtatgcacatccttcagcatcaggatgtgtatttgtttactccgctcttcctgttttgatgaaatcacattatagaccacgtactgtgtttaactcagcagcaaacccctctcaactgcgtggcccgcgatcaacactctcatctttgcttagtaatgatacatttccaccacacattttcttatactgccttttactcgatgactcgtgatactattttcctctcattccttcccacctctacactgcccgcgttaccacacacccataaagcgacatcagcggtctccagggcggaaaggggtggaagctgaccctcgcccttccctccagcgctggcttcaggtgtgccttctgctacctcctgtactgcgaacaggggcccgccgagctccgggagcccctagaagaggaagactcctctggccccactaggtatcatccgcgctctcccgctttccacctgcgccctcgcttgggccaatctctgccgcacgtgtccatccctgaactgcacgctatcctccacccccggggggttcctgcgcactgaaagaccgttctccggcaggttttgggatccggcgacggctgaccgcgcgccgcccccacgcccggttccacgatgctgcaatacagaaagtttacgtcggccccgacccgcgcgggactgcagggtccgccggagcgcggcgcagaggcttttcctgcgcgttcggccccgggaaaggggcgggagggctggctccgggagcgcacgggcgcggcggggagggtactcactgtgaagcacgctgcgcccatggatcatgtctgtgcgttacaccagaggctccgggctccactaattccatttagagacgggaagacttccagtggcggggggaggacagggtcgagaggtgttaaagacgcaaagcaagaaggaaataaaggggggccgagagggagaccgagaggaagggggagctccgagcccacgctgcagccagatccggatgagtccgtcctccgccccgggcgggctctcgctctcgctggccctcagcgccgcgcagccagcagcatccccaccgtgacgctcgcatcacacccgggcgccggccgccaccatccgcgccgccgccgtcaggaccctcctcccgggcatcgtcgccgccgcggggtcgggaggacgcggcgcgcgggaggcggcggtcgcagggcgagccccgggacgc

SEQ ID NO: 1245241 - DNA, 4001 bp, Homo sapiens
aggtcggccaccggctcttcaggtacagagatctgaacttggaaagacctgcctttctaaagggagtgataatgaacactgcggcgtaagtgtcccaggatttaaaaccgaaactccaacaaaaaaaaattttttaaactctgctactagcaagagcacattgtgtaaaacactgacacgggacatggtttaaacatgtcaacattttctaacattgggatgaagtggtgtctacctcccgtcccgtgaagcgtcagggcaccgaccacacggacccccctccgtggagctcacggccctgtgctcagctctgctaagaccagcgagttttccagagctgggggagcccggttctcaagcaagccccgcagttatcagggtcgcgcaggaagcggcagcgctcggaaggacgtctgcccttatgaagtacatatgttggcaggtgtgctggcgctctttaaataaattatataaaatatttcagagctggtaaggaatttggaaaagcgtcttccaatttccattagcattgcaatccctaatccctaactcgtatgctcacacctctgcaagggtattttcaaagccacttgcaggagcccacccggcatcgccaggggtgtgtgccggggacgggctaaggtgggggactggaatgtgagatgcgccgcaggggggtctcagcgccccccacaccgggtttcagggacccacactgtgccatctttttttcactataaagaagcagctcgaaacttggcggttccttttcaaacttgcctgaaacatcttctctggctggaactcctgcctataggatttcaaaatggcttaaattcggggctgtgctgcggccgcgctttggatcttttggtcctgcaggtccaggagccggcgtgacgggctcggccctggggaattcaggggcgcggcgcgagggagacgccgccacgagctcggggtgggggtggggggcgcagaacccccaaaccgcgatcttggcgccagagggtggctctgcctcgctcaggaagacacggggcatccttcactcccaaggaagcctcccttcctccctcccacgtgccctctgtggtcctgacggcccagcctcgcccgtccccaaatcgccggcctgcgagccgcttcctcggcgggacccgcggcggcctcgcctcgcgccctcagcgctggggcagaggagacacctattggcagaaggcgcgctcggaaccgggctgctgggagctgggggacgccgttcccggtccgcgccgcgcccctccctgggcgcacagacccggccgacctcgttctctggcccggacccctccgtgcgggcgacgggggcggggtcggggggcgcggcccgggccgtggggggcgcaggggtccgggggcggaggccgcgcggggcttaccttcctccgctgacttcatggtgccgccggcgcgcggcgcgggccccaaagtttctcctctcccgaagaccgcagccgcagggccaagtggaaacttggaagggactggaaagctggtgcttggcatccgcgcggcggcggcggggagtggagcggcgggcggaggcacaggagaagcggccgccccgcgctgccggggtcgggtctccgggaagacagccctcgccccgggctcagcgccgcgcgccccggaggaaagtcatcgaggggcgtgtgcgcgcgtggcggggcccggccgcggccctaggacctgcgcggtggctccgagccctgcccgcgccccggtgcccgcgccctgctgctgggatctggcgcggcgactccgccggcgagttcggagcctctgagtctcgctctgacgcagggccgcgctctgcctcctgcctttttaaagctggaaaacacctcccccgcctccccgccggcccggcggctcccgcgccccctccctgccgtgacatcacgcccctgctgcccgggcccgcgcggggccccggggacgagtcgccgagcgcccgcccctccccgcgccgcggcagccgctcgcctgggggcaggggcgcaagaggcggggcgcgcacggggagggggggcgcacggggaggggggggcgcacggggagggggggcgcccggggaggggggcgcccggggagggggggcgcacggggaggggggcgcacggggagggggggcgcacggggaggggggcgcacggggaggggcgcacggggaggggatgggggcgtaggggcgggaacggggaatccgggggccgggcaggggggcgctggggctggcgggggaaacgggggcgaacgggccagacgggacgcctgagtccacgcgggtgtccggagggagcccggccctgctggaaaaggggcggggggcgggggccgggggccggggaggggtgtcgagaaagcccggcatgctgaagtcattatgtaaaatcgcaggcttcccccgctgtggaaatttggaaaagcgcttcactggcaggccctagaaaggaaattcccatcccgctaaattactaacagattgcgtggccgtcccgggacgtcgagttattgtcatttttattctgtaaatatctgctcgacctagacggcctgtggcaggggccggcgtggggaggcccggggacgcgctcacctgccctagccgcccggagggggcgttttatgggcgcgactgcgcgacttctgacggggggaggccccccggccactcacactttcctctcttacgtctccctgcgtctcttcgggcgcagctcagctgccaacacggcaccgcattttcttgttggctttggatggggggggttggaggttaaagtgtctggtgtgtagaaaccataaatcgattgcacgacacccttatgtgatttaaactaaacccaaaggctaaactcgtgtctgctgcggggcccaggaggtccgcagacccccagggatcactgtgccccgtgggtgccccccacaagcgcctcctccctgccgggggaggcggtcgggcgctgcagagcccgcgaaggtgcgcggccagagcccgtccgtcccgcgtcccgaggcctggctccattcggccgccccgactcagcacaaatggaaccccggcttttccaccgcaggcctcggcctggagagacgtgcccggattagcggggtggtggccgcctcgctcctgcggcgtcgaggccatttccaggggtctctacctgcgggggcccctacggcgccgagccaggcgtggcacgcgccccagagcaccgggcgccgggaggggaggaggggccgcgggaggacgcccaggccggtgggcgggggtcggggggtcagggggactccagcgaggccgcgcccccacgcccctccccctcccctcccctccaaatcttcccgccgcgagtgtccccaggcctggggccaggatttggcggggagagtttccgtcccccccgccccgccctccttctccccacctccaggacggggcgggcggagactcgccgggaggagggaatcccgaggccgggtctggcggggcgcgcccagccggtcacgtgggagactgagcccctcgaccccagccgcggtcctcgagcccgggaccgacctggcgaggctgcccttggctcctgaggagccggggccggggcgggggcggccggctcttcctcctcctcccgcccctccccttcctccgctgccgcctcctcctccttcaataaataattttttcaccccatgcagaaaagctcccttttcctgtctgctctcaaagccgtccttatccccccgcccgggtgacggaatcccgggtctgtttccctctgtttaatgccgttgccgggaccacggtggccgcgcgccaggcgcagggagttccggaggcggcggcccagagcgcggccagctcgcccggcctctgcgccccggcccggcctctgcggccaccgcgggcccccggctctgctccccgagcgccctgcgcccctttcctcttcctc

SEQ ID NO: 1245242 - DNA, 4001 bp, Homo sapiens
aaactgtggcgtccttgtgagactaggcctcgaggggcagagactggcctcctgtgcgtcttcccggataagcctggagttacctgtgcagtcacaggaggatgccgccgccggcggtgtccttcccgaggctgctgtcgcgcacagtcacgtgtgcacggaggcacggaagtggcccttgtcactgggggtgcgctgaccacgtgccaagccagacacagtgcccagtgtggcacagcccaccctggaggcctgggaggccggggagacccagctccatggggataactaccccctgtgcttcttcaaggaggcaaagcagtgaaatcttcagccagggccgagggcccagggccgtacactgtcctgcaggccccctgggcctctgactggggtgtagggcctgggttctggcagcactgggcctgtcgcaggcccacagtcagtgattcacgctgtgaacgaccgggggtgtactgggaggtcccacccgacccccgatgactgcacgggtgtgggagcctccaccccaacagatcccagaggggccaccctggtggccacactctcatgggaccgactttcaccccataaagagaggtcgggagtggggcgacactctcgcatggcacacccaggtagaaaactcttctgctgaaatgtcctggctcaagccggggaggactggaaccagctctggaaggcggcgccagggccacaggcagcccgggtgggaagggcctccggcgggtctctctcccaccctcatctgccttggctcccactgaccccaaagacctagaacccaggcccaggcagggaagacatttggggagtggtgagtcgagaaccgcaggcagcacaggtttggttggagcgcttattttcaaaaaatgatcaagacgttggagtttttaaaagagagtagtgaacgatacggaaaatatgaccctcattacagactcggcggaggtccctgcttgccaagctcctccggcttcacctccgcgcggggagggcagacacgaggccttgagaatgggcacagacaggggcggacggtgaccagcctggggtgacctggacagaagagatcccgggcagcgggagaggggcccaggcccaggggtgcccaccccactcactcgctgctcttcgggagtggggagttatttgtggtttgtttacctgaaacccttatttctgacacagagaagagaaaatgaaagaaaaggctggggtcatggtagctccgggtaaacttgaaagctggaggcttgggggggtctgcggggcgtggggagacggcggcggggagggagggtgactgtggggaggaagggccagaaggcggcggcaggggcgggaggtcagggggagggtggctggggggagggaggaggatggctgaggcggaggtcggggggcgggtggggggggggtcggggggtcggggaggtcgggagggcgggacgcggggcggggagagggtgtctgggggagctggggcttctccgcctctggcagcgccaccagccctctgtccgggaccacttcgtccacgcccgtgtccgggctgcgctcttcccccaggaccccgccgcgagcgctcggaggaaccgcatccgagcccaggacgccccgcactgcagcgtcccccgccgtagcccctcggtcccgggcgcgccggggactcctggggtccccggggagcgacgaggacgcggagggggcctgggcgcccccaaaccccgacctggccccgcgccccccgcgccctccgggactgacccacctggggcggccgcggcggcgccctcgtcgcgctggttaaactcgaagaggaactcgaagtcgaactcctggtcctccagccccgtcatggcgggtcgggccggggccggggcgggagccggggtcgcggccgccaggggttcggttctcccggcgctgcccgcgcgtcctccgcgtaacgtgacccccgcccctccccccgtccccgccccgcccccgccccccggggcgtttccgggtttacataaacaaccggctcgcggccgccggcttccgagttttaaataaactccccggacacgagtttttaaataaactcgtgtcccccccgcccccgccccctcgcgcgcgcgcgaccgcaggggtcccccggcctcttgtgccctgggggtcccggcccggcgcaggctcctccggacccgggggtaggggcgtcgggaccccacgagcggcaccaggtacctaaggctgcgcccagggcgacggaattttttttttaagttttttttttaaagaagttttcaatccgggcctcctcgggaaagcggctgcaacggtgacccccgagcgccacgtgcgcgccctgcggagccccgggagtggggaggtcccagcccgaggccgccaacgctaggaaccccgatttcagcccgacggtgccgggaagcgcagggattcccgctgggttcgtggcgcgcccctcggcctgcaaccccctgcaggaggcccggcacccaccggcctctcctgcgagtccccagcctccaaacacccgccctgcgcgcccccgccccgcgggaaacccgccggtccttctaggggcacctccaaagatgacctccttgagcggggcgggaaggcgagttcgggtcccaccctaggcggcccgagcctgtgcgcggcggggatccggaaagccgggctgcttagctgaggccgccctgggcctgcctctcccgccgcgtgttctaacttcccccgggctctccgcaccatatacacccgacatgtggaatagtaggaggatggtgggagtctgagggcggaggggagccggcccgggcggaggggtgcgcgtgtcaaggctggcaaccccaaagctcctcggagcgctccctctggcctgccccgcgggcactgccttttccagaggcgagaaaccctccagtcccagggtcgtccccgggcttctcccgcgaccctttcactggctggttttctccagtgataagccatcgttccgtgtggcctgatttagtttctaataatacttctgactttgggatggatgttggagcgttgttttgttgtagttttgctgcttttgccgaccttgggcaagtggaagttctgttttctgttgagaagccacaacgtttcattctctttccattgtacaggtttttgtttgtttgagacggagtctcgctctgtcacccaggctggagtgcagtggtgcaatctctgctcactgcaacctccgccttccgagttcaagcgattctcctgcctcagcctccagagtagctgggactacaggcacccgccaccactctcagctaatttttgtagttttagtagagacggggtttcaccatgttgaccaggatggtctcgatctcttgacctcgtgatccgcttgcctcggcctcccaaagtgctgggattacaggcgtgagccgcggcgcccggcctgtacattgtttttaaaactccagccacctttttacccccaccataaaattatacacaaatgacagcccttatcatctgtttagactaaaactttttgctaaactgtcccgcctgctggtggccccaggccgcgggccctgcagggatggaggctcactgctgctgtcctaggactgcactggtctccatcccagagaaggggtcggtggggcggctcccctgctgctcctaggagcccccccttcccccgccccagtgctgggcttccttcctgcaaatggttcagagctattggtccagattcaaagctgcccgttccacagacactgggtgtctccatggaaatgtttagcttggacgcatcctcccagaggctggggatgtctgcggagacagaagccccgctgggtgtgatgaagcggggtgccagcgccctgccattttctaatctgagctgggaaacaacgctgtgaagttaagtggcagagaacagggtgagctttgtttggccc

SEQ ID NO: 1245243 - DNA, 4001 bp, Homo sapiens
agacacctttataggtccaactcttagaaatctcccaacaatagtacattgttaaaaaaaaaaaaaaaaccaccacagaacttttatatgtgtttccatttcacttttacttttggttcccaatttctatataaattctaaaataaatatacatccttcaaacaactatttctaattaatctcaggaaaccataaactgatttccaaacctaaaagacccttccaaataatgctttaaaaaaaacttttcatgcacatattttcaattcaatataatatacctccattagagatagaatagctttcaaagcgtctcctttctagcatcctccaggaatactgcaccgggaaacagttgccagtacaggaggggggaaaggaagaaatgctcaagaaaccccaaagcgaggcaaaaatacaaaggatgccagatagcctcccccatccctactccaggcgagtacccaccgtggcatgatgcagaaaggtctcctgcatcagatctgccatcctacttgtagcccacagttcccatcttcttgtgaagaaaatcgacgctgctgcggctccccagccccactggcttctgcagcgtgaggctgagatgcattgggctctcaatgccagtgcctcgcggcgcctgggctagagctttgtggccatgagactagagccaccccagaaaaaggaacaaatacacacaccattcgatagcgcctaaacccatctttctttgttgttcatcttctagctgcggctttatttgtggaagagggaagtgaggaagggaatgggggggcggggaggaggaatctccaggaccttatctacaatctcaacagtcgcggcaacgatctctgggagtgatcgaggcattcgggctgccccgtgcctcccgggcagcgatctaacgataaaacctgacagtgtcctggggaaaaccccacatccaccgctagcgctacattcgggctttatgccaataaggagacactgtagactatcgatcagactcgtctgctctcagagcgtgcggccgggcttccagcctggcctttaggcgcggtggcggcggtgggacacgcgccaggcgcccagagaaggacatgggacaatggcccagcccgaggacgccagacgccgccgcccgacccggggaaggaagctcctgcagccggtccgggaacccgaggcggggagggaggccagctctggaggtgcgctgccgctttaaaataaaggaccacaaagactgtacagtggggaaaacgcgcctggctaatgcgagtggggacgacttggggagggggttgaggaaggtagggggcacacgagccaacggcggctcacggctccccctctctcccgcctctctccttcctccctccccgccgggctgctccggcagacaaataacagaggaaggcgagtcactcaccgtggtcttgacaggcacgtagagcacttgcttggcgccgccgcctcccccgcggacctcgtccggctggcccagctggaagcccttcgatttgacccagaatttaaatttggcgttgtccgtggagctcgactcggagccattgaggagctggacgatccgttcgtattttttacgggtcaccgtcttggtcttgcctgagtccccgtaagtcctgaggcaccagtcctggaactggcggtacatgtcgcgctcgctctccatgttccccgcgctcggccgctggccggatgctcccagcgcacttcgcacctgttcaccctaggctcatgaaaaatgcagccccggccacgttgcagggatgcgaggtcccggccgcagcgggagcctgctttgggtgggggaagggatgggaagaggggaggagggtccggttgggcaccagcaatcaatgccccgtgctaccaagtctggtccattcgtaattgcaacggctgtctcggacgtttttcctgttcccttagcggtcggtctctttaatattttgtgaccaggaccatcccaacaccattctggcccagaggagctgggttttcaataattaaaatcccattccttggtttattaaaaatcccaatattgaattggggtggtccctagacgcctcgcccccgggctgcgtccggggctgggcaggtggagcgcagcgccgcctccccgcgcgcgccccagaagcttccccagccactggccccgtggtccaggagtgagggctgcgcctctcccgaaagcagccgcccgcccagcgcctttgagccccgaagggcacacgggtcccggatctctccttcctcctgggtcctgctttgaccttccccacgacgggtgttaagggactagaaagagaaagttcttacctgtcatgtttttaaacctatcaaattctgttttacagaattttttatcaagatattttttaaaacggtttaaaatgtcatttcttcagatgcattttgaataaattccagccctgtatgtagattctacgagttaagtcccagaaattagcaaagcattgatggagatttggccatagttctacaggatagattgtagtgccccaaacagatatccgttccagggggatgtgggtaaccgaaggcaggccgctggcggcgggtatcccgaataatgatgggacccccagacaggactcctctggtttctgctgaacaagacatagaagtaagtttaggatacagatgcttgaaaacctttgcacgaaattaaaatatatacagaaagatcattttccccttgcttggtcacagtttgcagttcacacgggaggtttcagttgtctattttccccctgccacgtcatggacaccccctccactgctctgagtagccaaatatgagttcctctggactatttttccaagcagatgaagtcagcagttgctccattcaggacttccatccatttgtttccagagctggaaataggggagttcccatcctcctcgcgcggcggctgcggccgctcctctttattctactctcacccgaggcccgcgcccgtcccggggagcggctctgccaggaaaacggcccgaccagtgcccggcgcctgggctgcgtccgagcccaccttcttccctcgtcgtcgtctcccagactaaatcccggaaagggaaagcgggatgtttgcgcccaccgcgctgtagctggtcctgacacttgcaaaatggtcagtggctcctgctcggccaggctgagtgtgtgcgtgtgtgtgagcaagggagcgagggtgtgcggtgtgcagggggtgcgctgtgtgtgcgcgcgtctccgggaaggtctcgcggcggctggagccgggactgacagcccgggcggagcgcaggcagctccacacgctaaacctctcgcctctcccctcacccccacccctcccactcccctctccttcccccaccctccccggccccttccaagctctctgattggccaatgggacaaaagtttctgtggagacggctgggcgctgacgtcacgggcagaattgtcccatttagggatcccgggggcagtgcgcatgctgcaggctgcaggttagaggcagaaggaggtagcagcgggcccggcggcagccaggtggcagaaaggagcacgcagcatccaggtggggggacgactccagcagggtttccatggagattcctctgggtctagcctaaaaacagcagatcagctgacaccattagctcaggacctaattactgcttattggagcaacaaatgagggaaagggccagctgcaaaggaagagtttttatccccccaccccattcccccatctcctttctccccctctctccatccctcttgagtcccgggtgaattctcattaacttgcaagattcctgcaacaacagctccccttctccagaggccaccccgactgcttttattcttttatttccttcttttgtattaaaaagaaatgctaaaataaatcagttgttgagtccttgaatttttgttcaatacgtattag

SEQ ID NO: 1245244 - DNA, 4001 bp, Homo sapiens
tatatgccttggaattaagagaaaatatatttttgtcttcttggtgactgtactcctaccatcggaaagaaaaatcaatgtatcattaaggaaggaataatttgaaatgtagggaaacacatgataaaaggggatcctttattttttaactcattgaaatgatgattggctgtctctcagagaaggaggagcctataattctatgtcgggagcagtataaaaattttataaagagcaatagacgagttcataaattaaaaacctcttcaatatttcaaaacaggcttgaatgaaaagcagagctcttaaatactacatgagaaccattatctaacaatcacctgatgaattatattctctcccataaatatatggaatctttactgaataaacacgtgttactttaatattatccctgaagttgtcactctatactagatgtcttagcagtaattctttagctattctgcataaatttttgactgaaaatagtggtatatgaatgcgtgaatgctagtttgaataactgacatttatgatgatcttagtatctctaaaattgttcagaatttatgttatttaaaatagtcaatcctttaaaaggacacatatgttaacacatatagtgggtgtagtcaaatccatatgagtataaactcattgtaccaatatccacgtgaagctatctgacagttagagggacctaagtttaacataaaaggaatgaaaaataaacttcccaactaacagtgtttctttaaaacatacatgatattatgaaataataccttaagtaaagatatcttaaatgattttatccattcagttagctcagttttgtccaaaggaaaatgcatgtttatgttttgaattctaacaataaattatttttctacatcatttcttgatattattcccaatacaaattaatcaaagcacttcattctgtatatcagatttctggctcatccagatgtaaataaacctcagttctaaatcatgccaatctagtcctcattatttaggaaagccagacaataatctcaccattgtctttagtagtgccacatgctaaaggagaagacacctttataggtccaactcttagaaatctcccaacaatagtacattgttaaaaaaaaaaaaaaaaccaccacagaacttttatatgtgtttccatttcacttttacttttggttcccaatttctatataaattctaaaataaatatacatccttcaaacaactatttctaattaatctcaggaaaccataaactgatttccaaacctaaaagacccttccaaataatgctttaaaaaaaacttttcatgcacatattttcaattcaatataatatacctccattagagatagaatagctttcaaagcgtctcctttctagcatcctccaggaatactgcaccgggaaacagttgccagtacaggaggggggaaaggaagaaatgctcaagaaaccccaaagcgaggcaaaaatacaaaggatgccagatagcctcccccatccctactccaggcgagtacccaccgtggcatgatgcagaaaggtctcctgcatcagatctgccatcctacttgtagcccacagttcccatcttcttgtgaagaaaatcgacgctgctgcggctccccagccccactggcttctgcagcgtgaggctgagatgcattgggctctcaatgccagtgcctcgcggcgcctgggctagagctttgtggccatgagactagagccaccccagaaaaaggaacaaatacacacaccattcgatagcgcctaaacccatctttctttgttgttcatcttctagctgcggctttatttgtggaagagggaagtgaggaagggaatgggggggcggggaggaggaatctccaggaccttatctacaatctcaacagtcgcggcaacgatctctgggagtgatcgaggcattcgggctgccccgtgcctcccgggcagcgatctaacgataaaacctgacagtgtcctggggaaaaccccacatccaccgctagcgctacattcgggctttatgccaataaggagacactgtagactatcgatcagactcgtctgctctcagagcgtgcggccgggcttccagcctggcctttaggcgcggtggcggcggtgggacacgcgccaggcgcccagagaaggacatgggacaatggcccagcccgaggacgccagacgccgccgcccgacccggggaaggaagctcctgcagccggtccgggaacccgaggcggggagggaggccagctctggaggtgcgctgccgctttaaaataaaggaccacaaagactgtacagtggggaaaacgcgcctggctaatgcgagtggggacgacttggggagggggttgaggaaggtagggggcacacgagccaacggcggctcacggctccccctctctcccgcctctctccttcctccctccccgccgggctgctccggcagacaaataacagaggaaggcgagtcactcaccgtggtcttgacaggcacgtagagcacttgcttggcgccgccgcctcccccgcggacctcgtccggctggcccagctggaagcccttcgatttgacccagaatttaaatttggcgttgtccgtggagctcgactcggagccattgaggagctggacgatccgttcgtattttttacgggtcaccgtcttggtcttgcctgagtccccgtaagtcctgaggcaccagtcctggaactggcggtacatgtcgcgctcgctctccatgttccccgcgctcggccgctggccggatgctcccagcgcacttcgcacctgttcaccctaggctcatgaaaaatgcagccccggccacgttgcagggatgcgaggtcccggccgcagcgggagcctgctttgggtgggggaagggatgggaagaggggaggagggtccggttgggcaccagcaatcaatgccccgtgctaccaagtctggtccattcgtaattgcaacggctgtctcggacgtttttcctgttcccttagcggtcggtctctttaatattttgtgaccaggaccatcccaacaccattctggcccagaggagctgggttttcaataattaaaatcccattccttggtttattaaaaatcccaatattgaattggggtggtccctagacgcctcgcccccgggctgcgtccggggctgggcaggtggagcgcagcgccgcctccccgcgcgcgccccagaagcttccccagccactggccccgtggtccaggagtgagggctgcgcctctcccgaaagcagccgcccgcccagcgcctttgagccccgaagggcacacgggtcccggatctctccttcctcctgggtcctgctttgaccttccccacgacgggtgttaagggactagaaagagaaagttcttacctgtcatgtttttaaacctatcaaattctgttttacagaattttttatcaagatattttttaaaacggtttaaaatgtcatttcttcagatgcattttgaataaattccagccctgtatgtagattctacgagttaagtcccagaaattagcaaagcattgatggagatttggccatagttctacaggatagattgtagtgccccaaacagatatccgttccagggggatgtgggtaaccgaaggcaggccgctggcggcgggtatcccgaataatgatgggacccccagacaggactcctctggtttctgctgaacaagacatagaagtaagtttaggatacagatgcttgaaaacctttgcacgaaattaaaatatatacagaaagatcattttccccttgcttggtcacagtttgcagttcacacgggaggtttcagttgtctattttccccctgccacgtcatggacaccccctccactgctctgagtagccaaatatgagttcctctggactatttttccaagcagatgaagtcagcagttgctccattcaggacttcca

SEQ ID NO: 1245245 - DNA, 4001 bp, Homo sapiens
tatatatatatatatatatatatatgtatatgtactttactctgctatctcaataaatggtgcctatttttttcttagctattctttttctttcctagtcctattttgttaattctgctcactgccttctgcagtgaccctctaagtttcactctttctgaaataaagtcattggtttgtctccttgctatccaaaatctatgaagggagataagctactttaatttgttctctggggaggacaaaaggaacacaattacctctttccttttgtaatttttaagggtcctatcccgaactactaatagaaatcaccaaaaaggttgttggaataatttatgatcattcattgagagggactccctgacttcctgctttgtctccattttcttaagagtaccaggttctgcatagttacaacccaaatgctattaagcaaagtataacccttctagttttgtgtgtacttcctaacatatgaagataataattttatccaacattttaatatacctgttcaactctaggaccaatggtctcttctagcattaagtttcagggaaaagaagtgcatgtgtgatctgtgctctgtttttgcagcaacacccaagtctgtctattctgagaaattaaaacagcacacttcaattggcaattaaatgtttttatgataatagctatatttagcgtagactgtaatgttatttgtagtgtgtagtacattactagcaggattttacacaggggaaacaatcccagtttctaaatatatgttataaatatataaacatgatggaaacaattaaaaaacatcatgtatcacggatgtagcctgatacaattttcatcatgaatattttaaatactaaataaatacattcaggggaatacccattgatagtcataaacacaagggttatatattaatataatatgtaaaatctacatagttttgaaaaattcttttcaattttgtatgtggattaaagtgtcttttgaggtaattaagtttttgaaagactagatatcttcacaatagacactaatatcaaatatttaaaattcatacaaggtttctagcttctaagctaaaaatcatatgcttcataagaattggggaaggaactgtgtaagcacaaaccaaagaggaaaagaaaatgaacaaacccacatagacgtagacatccccccagaacaaaatccatctgaggcgatcaacaaaaaatcctgaaaggtatacacattgcacatgccttatgctgaaaagttgaagtaccagcaccaaacagaatagctatattaattgctcttcactcaaaaatgccttttcatcatattataatgacctaaaaaaccacaccacttgcatacttctaaatggatttttaaaatatgtatgcataattagaaaaggacatttacaaacctaaaatgaaatttcatcacttttggtgttgaagaaacacaacttgcttacacatgcagatttgtccatgaatattttttctctctcttgatggaattttaggtttaaatgcacaacaatctagggtaaataaattaaatgccaaaagcatataatatattctttttgcttatctaattttaccatgctcctgagattttagatggatatttaaaaagtacctaaaatttttcctcaagtttctaatctggtcagacctttaaataacaactgaactaggaaaacattggcatttatcagagtctactcctgtcattctactgcttcatgggacagtcttcaacaagacttagacaaacctcattcatcaatattctactctggaggagctgacacttactgtgaattctgctcttcaacttaaataccaatgtctgtggcaggccaattctatcattgcagatccagcatccctcaggcgaggtccaacctttctctcgaagtgcacccagggattagtctgacttcccctaaattctctcctctgcacagtaagagctaatctttcctgtatgaagcaggagatggtgttgctatgacaacggagcacattctagcagtgggactactgagatgagccttcaaagactcagggaaacatgcactcagtcttcctccagggctatgggctccttccttgaggatttaatctcccaacaagtttactgtcagactgggttgttgattatctgtacattttgctacagggagatcactggttaagaacatggctggaagatcacagagttatttaataaaagtgccattttcagttttaataattttccagtttaaatactctgtgtagcttgttaaaacactaccccctttaaattaaaagcattttgcttacttttagattttttaaaatgattacaatgagttgagaatggcactatcaaggagaagctttaccttttttttgtttgtatatcatcaccattgtatcaacttgaaggttagatacaggcgcgcgcacacacacacacacacacacacacacacacacacacacacacacatccattttctctctccagcatcaacgtctggagccttgaggtttcagggtgggggaggggtatgctaacaaaagcaaatcctgcagccacattttgcatacatatattatccagagaataatcacaataactgctaatcatttagaaaaataattataaccggaatttaagtgcctgtgccacagcagaagagatctagtatcaagccacattgtaggagggcagatttcatacgttattttcaaacatggcagttaaattttctggaaaataatgaacacgtatattaatatatattttaaacagttgatagtatactgtaatagttctgactattttgaacattgaacattcatttttcttcagaaacattactgcgattcaaatgagtacatccttttcaattggaaggaaagatacagggcaggaaaagttttcccctcccagcagcagaggttcagtttactcaatcactctgattcaggttctcacccagggagtcatctgacctgtcctctttactccttaatttccccgtaatcttttctatttctcaaccttttatgttaggagcatctattcctgcataccacccttcccccactgtctgtaattattctcctttgtggctgaagcaatggaatctatatcatctacatctattctttcaagtgctgagagcgaacaggactttatggatgtcgctgtcactcagaggtgtgagaatctatatgttagtcagattcaatgccacattggccttctagaaaatcatagggctatctttagttacttcttgcttgtcaccctaatgcgtttgaaaagctttatgatgttaactagaatctcattattgcacataatgcatgtatttacatttagtagttcatttaaaagagacagcatattttaaaactcattttgatttgtatttgttatttccatcatagtaaaaaatgctgttaaatttttgctaatgtgtgccttggaatatatctccaggatacatatgtacccacttcacaatatatgcagataattttcccttcatgatcctcttttcagagcttgctctgaagatgcattctcataattcaaaaagttatagcacctgttttcattatgttcattattatctaattagtaaagggctttcattttttggaaaaaaaaaattcactctcatattcagggaaactggataaatgccaacacatgtaaacaacatatggtttactttcaaaatcaatcaaccagaattatttctaaatcatttcttagttaaaaatgtgttgaaataatttactgctataatagataatgttactatctgctgttcctttaggactgactacctggacatcgatcatattatatattgtctagcttccccaagaagacaatattgtttgtagaaaaaattatttaagtagttatggtgagtgtgccacaacttagatttggatgttaaaagtgagttataaacaactaag

SEQ ID NO: 1245246 - DNA, 4001 bp, Homo sapiens
cccaaaagaggagggcggatcgctagaggtcaggatttcgagaccagcctgaccaacacggtgaaaccccatctccacggaaaatacaaaaattagctgggcgtggtggtgggcacctgtaatcctagctacctgggaggctgaggcaccagaattgcttgaatccaggaggcagaggttgcagtgagccgagattgcgccactacactccagactgggcaacagagactctgtctccaaaaaaaagggaagcctatttaaggtcctgatctaaaactctaggaggggccaggagtggtgctcacaataatcccagtgctttgggaggccaaggtggaaggactgcttgaggccaggagttccaggctgcagtgagctatgatggcgacactgcccccacgcctgggcaacagagcaagaacctgtctctaaaataaataaattttaaaaataaattttaaaaaactctagggaaacagaatagccacattttctctacggcacataattgctattatttatttctctctcttttttgttttgacacagggtcttgctctgttgcccaggctggagtacaccggcgtgatcacagctcacagcagcctcaacctcaacaatgaaaagaaaaacaaaatgtttttaagacggtgtttcaccatgttgccccggctggtcttgaactgctgagctcaagagatcctcccgcggagcccttctcctggctcttagtccattattggatcaacatcacctatccccttctgagaactaaatagaagtcgaaggagagttttttctagtccacggaaccccctctcccctgattcaccacttcctattgacgccacacctatgtgaggggcgttaatgtgcacaaggacacaattccccggaggcactctcatcctgatttggtttaacgagtcacagcgtgacactgccccactccagttttaaaagaggaaactacagacacacaaatactgaggtgctctttcccaaagctattaaaccaagcaaaagcccccagaaggagtcagcaggacaccgagttccaggccccatcctgtcgctggctaatagtgacaaggggaaattcaataccgccctgtgagtctcagtgtcctgaggtgtaaaaaggagttgatgaaaagtaacctgccctctttagaagaccaagctgacttatgtcaagtactcaaggcagtttcaccgggtgcttgaggaagtttgtgtctctttacctctgcttccacctccatcctcaggtgatgagaagaggaaataaagtggttagagctcctaaattttggagttcgtgcgcatgtagcagaattttttaaaaagcaagtagtgtccctatcccactctacccactttcctcccttcttctggtgccacatcctacacagagaaattaggtgaccacagatggaacaagctcagaacaggtcacccaagcccccactgccaccctcttccagaccacaggaaagagagcgtggccggagacagaaacaggacaagtgaggaacctccgagctctccatcgccagaccaacttccccaggacccgggcctgagccgtcgctgggcccgtcgccttccccggctctcggccccgccacgtccccacagggcgtcccggtggccggcgaccgctcacctgcgctggacacagtagcagcaggaggaggccaagggccaggccgcgagcggtcatgctgtggccgcgcaaggctgctgacgccggcggcgttcggctggttgggctccccggaggcggctctacttccccgggctgtttcagcaccccgcgcaggaggagcggaggagcaggagcaggcgctgaccgcggcagcaggctgcgcgcgccggtcaggaaggaagaaggcgtcgtcggctccgccctttctgggaggtgccgctgccgggactccctggcccgggctggggcgccgccgcgaccccgcttcaaggtccccgtgttgcccttctcctcagcccctgcaatccccgggggccaggcgcgggacttatggagtctggctcggcccgggagagtatctgtggagttgtgccaacggtttctggccgtgatgctttcccttttcgtctctgggttggagggggcgggcgaggtttcagcgaagggtagtgctgttctgggggacttccgggtaaggtcccgcccggccgcggagtctctgtttatttcggctccgacaattacgctgagcgacttctcctcccaacccagtcacctgaaaggaatctggaccccggcactttctagcagagcccggggcggtgacgcgcggtggcctgaccgtgtgacgatccgcgagtgcggcggggcggggcggggcggagcgcggggtgggcggtggcggtgcggccaggcccgggaaaaaaagtgcgggagcctcgccacctgctggcccagctgcgcagcgcagcccgtgggcgcgaggaaaccccgaggtggggaccagggtctgttttaagttctacgtgaaggcagataaagaagacgcgttgtcatttttgagccatgcgtttgatatatgtatttatctttaactctagttgtatgtgtttctggtaacgttttccctcaaatttcaagtattcagaccactcaaaagcatctgtcatttccattttgaagttaagaaaatggaggtgaagatctctttcccaacagtgaaagcaaatttacgatgaaaagactaaaccttcatctggagcaatgaccgaacccctccccaaggagtcccatgatgcagatgaccttcccatccctatcctataaagtgctgtttcactttctgtcttgccttctcacctcctcagccctgagatgtccacctggctggcctggcagtgaaactatggggatttcttcaggaccttcagcctaggtcctccacgacgacctcgtggtcctcagtcagctctgtgctctcgcttcccactccccaggctccagctcctggtgcccccactgaggatcaagtcctgtgtatgccttcatgcagggatcctcaaacggccatccccagaccagcagcaggagcatctccttggaacttgttagaaatgtaaattctcagccagggcaatgtagcaagactccctctatacaaaaaaaaaattttttttaagttagctgggcatagtggcacacacctgtagtctcagctactaaggaggctgaggcaggaggattgcttgagcccaggaggctacagttgtctatgatcatgctgctgcactccagcctgggtgatagagcaagaccctgtctcaaagacagagagaggtagaagaaaatgttacagtaagatttccaagtttataaattactttgaaggttctaagtttccataaccctccttggggaagaagaattctggttcctgtgacttacttcaggggtgcaagaccgctggagacaggagggcaggagaaagtcatgggtagactttgtttctgaggctgctactgagacctaatctcctttagttcaaagtacttagcatgccaaagcctcctactttggggtatcgttttctgagctccagtagttgagatccggagacttttttgttgaaagaatattcaataccatcttcataaggactattcagtgttgacctcagagcaataagtagaaaatggggggaaatgaaattattagatgtgcatctttataaatgtgcagaaataccttccagaaaacttctatgtagtggaaagcatacatatgtgaatataatatacaaacgttttaaacaagtggggatgtacagtacacagttctcatctggcttctttgcttttagcagtatgctttcctacctcactccttttaatagctgtaaaggattttattatgcgtatgtaacacttctgaagccatactcagagcagtgtctaaatcaatgaaatataaatcaccagccaacaagtatttcaaaataactcaattcctc

SEQ ID NO: 1245247 - DNA, 4001 bp, Homo sapiens
atgtgaccttctcaaccttacaccctgccctcgctgtaggtagtgacattggagctggcccgagcccctcaagcccggtcagaaagtccctgcgccaacgccaaggccagagatgggctccaggagcgctgttgtatcctggccgccggttccccgcgggggcaaggctgtgccttcagccaatgaccaaataagtttgcctatatggtgggtgggagagtagagagctcttttccctctgcagagcaaagcctctcaactgcctctgcacagggagactagtcagcccggaaaattgaaatgtgttgtctaaaagagacttgaagtgcatggggttttgaataagggcaggtcctggtttctgtgggtcttggaaagacagggctcctagaggaaaacgcacacccccatcccgcctcccagtacctgggaagatcggaaatagggcaaaggttggcacattgaggggagggcgaatgaaatgggggggggtcggtcaatgaaagctcagggacaaggagagagtaagaaagaaaaagaaaagggagaagggaaagtaggggaagagcggaagagaaagagaaaatggaagaagaaataaaaacgagaagaaagaggacgtgtataggaaagagaaggaaagaatcaagagaagtgactcggcgcgcagacttgggccacaagcaccggacccggagccctcttcccagcagcctggcccctggctagccccggccttacctgccaggcgtaaggcggacatgcgctggaactcgggctcctgaagccacttccacatcctgcggaaggtctccctgccagatttgagtttactccacggttttggattccggagcaggtcggagagagtcccctgagaccggcacagcaccctctgcgcaaagatcgcctgggggatactgtagcgcttcagctccgctgtgatgcgctgggccacctctttggtgttgatttcttccagctggcccgacgtggccacctgcgagcccgatgaggacgagggtggccgctcgcgactgggtgccagcaccggcccgtgagactgagtgtggcccgggtggtgcaggccgttcaggtgcgacatcatggccgcaggtggggtgcccaggccgcgggacaggtgttgctcaccgcgggtcagcatggcagtgtggtgcgcgtcgaagttggggctgagcattttgtcgtggcccggcggaccgtagttgggcagactctgctgcgcgttgtggaggccgcctagcccgttgcccagcggcgtggcggccagcggggacaggctctggctcatgccgggcatctccttgtagggactgtagaggttgttcatggccgggagcccgcgctcgtcgcgcatgagggtgaagctgccgctgacgttgccggacaggcgctggtggtggtggtggtggtggtggtgcggatggtggtgcgggtgagggtggtggaacttgtcagacacggtggagatgggtggcagcggctggagcggtgtcagcgtggtgtaggtgttgctcatgcccatgccaggcggagacgagtcgcaggacatgctcatggcgtggtgcagcgggatggagagctcgggccggtagtcgccgccgtccaggatcgaggccatgctggtgaccatggccgagcgcgacgccgccgctgccgccgctgccgccgtgcccagctcctggtgcgcggttggaggcggcggagggccccgcagcgagccagcggcgccgcggcccgcgtggtgggggctggggctggccagcagctcctgctcatggcccgggcccccgccgccgcccccgccgcccccgccgccgcccccgccactgccgccgccggccggcccgtgcaaagtgcccagactttccattgtcagctccgggttcatggcgcagccttctaggtctttggtgaggcatcgataggcggtgtaggcagccttcattcagtccatcagggcccgggggcggcgggggcggcgggggcggccggcgggcgggcaaggcgcgcgtggcggggctcggctgcgggagtgggggcgggcgcgggagtgagtggagaggagtgcgcgtgcgggtgtgcgccccgggctgcgggcgggctcgcccggggtgggggcggggtgggggcggacggggcgtgcgtgcgggagaggggaggggacggggagggagggagggatcaccgggccccgccgctcgggccggctcgcagcctcgccatgtccgagcccgctccggcgccgacgtcttctgtttgggtgagcgggagctgtccagaagggctctgccgctcgccggggcagccaacctaccctcccggacctggggcggggccacgcccgacgggcgccaagcgcaaccactccgaggccgcagctgccccgggaggcgggccttccacgggaagctaccagtggctgtggagggggcggggccgcacttttcaggtttggctgacggctcggtgccttttttacctcctttgctactggaatcaaacgtcaaggagagggagggaggagaaggtgggggggtcgctggggagagggaggctggagtgcgagcgagcgagagagattcggtgaaagatgccgtgctgtgtcccccctgagcagctgcgatctgggggaaggggcattgcttcaatcgccttcgcctcaccccaaagctttcctggaggcgagtaagccgggagcaaaagactccgctatgtgccagtatagacaaacactcgtcactaacaagccacttaccgagagtccctagctgggagccaatagtttagccttttaaaatgcaggcgctaatgtattctaatgcatggtaaattcccgaggccgggacatgcataatctacgcggtcagagcaactgtagtgccctcgtcgccagcgagctgcggccggccggcggcccacgggcggcgcgggcagcagtaatgcatgcaaagttaacacaataacatcatttaattacccggtgagcccataaatctcagttatgaggcttccgaagagccctgctagattgcaaaacaaaactagaattccgggagctgccgtttcaaggtgaccaagtgctttctgcatcagcgacttggaaagaagtggggagagtgtagaaccggtgaggtggaggtgaggagggtcgctggtgtcccaagtgagcaaacttctcctgggggcagagagtaagcaaaccagctgagacggcaaccacggacctttctcctaacacgagacacacacacgcgcacacacacacacacacacacacacacacactcccgcttctctcaaatcccgggagagaaacggcggtgggcagacgacaaggaatcctggctgacacctgcatattcaaaccttgtttctgaaaagaccagcgccccggccagcctgagaacgctcacaagccaaggctttaaaaaccgcacctacgtcttcctagaatttccgttgtttggcaaccccaggtctggaggtgggagtggaactgggggacagagagttggagatttctgcagtccgagtcggggtggaggggtagttgaagacagagaggccaacacccggcataaagccttaaacgtaacaagattcttccaaagcaggttgcgctctgtttgcctccgaagattcaagctagctgaggttgcgcagatgttgcctttgtttaaagagacagtaattaaggacagggtggacataagtttgagaagcgtgacctattttcttttgatcagctgtcaaaagaagagcagggggtctccttaagacagcccccttcaaccacttccagctgttagagaaaacttgataagaaaacaagggcagagctcggaatactgtatgtcccttcttggtgccagagaaaggtttgattcatttggaaaacagttcttagtctcagtgaccttttctgccgccctcctctctcttcttgcttcagagcaacacccccacccccaccctgt

SEQ ID NO: 1245248 - DNA, 4001 bp, Homo sapiens
ttgttaattcagatgattttagagtatatcagtcctagaatgactaattccccttagaatgtctataggtatcaagaatagacctttccataaattggcccctgaatttcactggaacttaaaaactcaagaatgaagggcatcctggagccagtctactgacaagctatgattcaacacacttcaaagctcattttggattttacctattttgaaccagtctccagatgttgagacagaatcaagattcacagcattggccaggcatggtggctcatgcctgtaatccgagcactttgggaggcggaagcgggaggatcacttgaggtcaggagcttgagaccagcctggcctacatggtgaaaccccgtctctactaaaattacaaaaattagctgggcatggtgttgtgtgcctgtaatcccagctactcaggaggctgaggcgagaagatcgcttgaacccgggaggcggaagttgcagggagccatgatcgcatcactgcactccagcccgtgcaacagagcaagactctgtctcaaaaaaaaaaaaaagaaaaaaaaaaaaaagatttacagaattagcattcaaactctgttggagaggaacatgcaaaacgtaaaagtgcttaacactatagtgctaaaactctcattaactctaggtgcaataaaatctaaaaggcaaaagcttcatggttttaaagttaacatgtgaacaaaacattaaggaataaactgaaagatatagtcgaggttgatgacctgaaaatttgaaaattatgctaaagaagaaatcttgccgggatgttgtggctcacgtctgtaatcccagcactttgcggggacgaggcgggtggatcacaaggtcaggagatcaagatcatcctggctaacacggtgaaaccctgtctctactaaaaatacaaaaaaaaaaaaaaaaaaaattagccaggtgcggtggcaggcgcctgtagtcccagctactcggcaggctgaggcaggggaatggcgtgaaccctggaggtggaacttgcagtgagccgagatcgcgccactgaactccagcctgggcgacagagcaagactccgtctcaaaaaaaaaaaaaaaagaaaagaaaaaaaaaaagaagaaatatttttaatggtatgtaagttagtatgcttttattttacctgtaacttccatttaaaaacttttaaaattatcataatcctaggaaagatattagtatgctttgtcaatccttccaggttttatcatttacctcttattgacgataggtaaatagggaaggatttcttttcaattagggaataccaactgaaagttaaaatatttagcatcgttttatttttttacttgtttaatgtaattttggccatatgtatttaaatcttccatattttcccagttttaatgttacttaaatgctgtagtagatgttacctttgcaaagttcactgatctgaaaattttgtttatggttctcacatacacattaggctttaaaccagaggtagtatggtaaaggagttgtcatcaattctggggaatgtcttcaacaaacatgggagagttcaaattctttaatgttccatcataaattaagattagggattgaaagagtcaaaataccttttatattttaatgtaaaggtccctaagttgataaaactccataggtattggggaatttaacttcattaaagttgaactagaaacattcaaatcttgccgccaactcatttaatttataaagacaaaaattaaatttagtaggcaaattcatatatcctgacgtaattattcagactgaaactcatcatcattccatagttctaattcttccgaactcaattcccattcttttagacacaagatggaaataaaaggtacagccagaaaattgatgacccctcaaaacacctatttcatttcaattacctatgctgatattcctctagggataaggcactggtgtcacttcagaagacttctccattcattaatgatgctttaccttatctcttagcaaccaagctacagattacaagtggttttaaaggaaacctaccaaccaggaaaggtatcactatggttgcattatttaaactctgaaatgtgcagtgaagtcataaagggcatcaagtcaagctatgcatgctccccatcctcgcagcaactttcaaacaaaatgacggtctgttaacagcaacgtaaaaagtttcagctaaaaaagtacagtgcctttaaggcacatgtccatctcatcagagcatatctacaaatgcatttgatagtattaccatgagagacataagctaccaacacaatgcaactcagtgaagaacagtactatttctattgttgtcagaaatcataatttcaaaaccttacatcttaaagaaaaaagttcttgattaaacctcatgacatagatagctataaaggtcaggttacattttcctatttacctctaatgatttcttcaggtctgcagcagaaaccgtatcttcctcctcctcatcagtcagctggtcctgggaacagtagtgagtgctgtaagcagaatgttcttctattgcttccagccagtcctgaaatcatgcaagaatttaaatgagagtgaaaagcatttttattccaaagagataatattacaatgatctgataagcataaaatttacctagtgaaataaatattatggcctcaaaagggaaagcaaagcaaccagtaatgaaacagcaatgtgggtctcttgtccatgatatgtctggataaaagcttttcctagtactttaaaaaatatcatctataagtttacatattcatgaatgttaatattcaaacacattacagaaattaaataatgggagaaaactttgtcacttaaaattataggttctcgttttcaatattgagaacctgtaattttataacctaacagaataagttactatatagtaatggatccagacacacaattttactaacttacactcaaattagaagcacaagaaactaaggtcatattaaaacagccaatacttgccctgatgcattaacttttactatattttttaaataacagtgatttcacaaaaagaatgtttggcctaaaaataccctatcttactttttcctcattttcttacactatactcagggtcaaatcttaccattttatgaaatgttgggagagtcatgagttagattgtttagggttctttgcatggccaaagtttaccactttggaaaatagattattttaacctcttacatagtttaccaaaaaatcaagatatgtctatgaacactgctttgatttaaaagaataagaataggcctgccgcggtggctcatgcctgtaatcccagcactctgggagggcaaggtgggcggatcatgttcgagaccagcctggccaacatggtgaaaccccatctctactaaaaatacaaaaattagccaggcatggtggtacatgcctgtaatcccagctactcgggaggctgaggcaggagaattgcttgaaccagaaaggcagaggttgcagtgagccaagatcacaccagtgcactccagcttgggtgacagagcaagggaggctctatctctaaataaataaataaataaaagaaaaagaaaagggccgggcgcggtggctcatgcctgtaatcccaacactttgggaggctgaggtgggcggatcacaaggtcaggatttcgagaccagcctgacgaacgtggtgaaaccctgtctctactaaaaacacaaaaattagccaggcatggtggcatgcacctgtaatcccagctactcaggaggtggaggcaggagaatcacttgacccagggaggcagaggttgcaatgagcctagatcccaccactgcactcaagcctgggcggaaaaaaaaaaaaaaagaatagggatagtccattaagtgactgcaccataagtattggtcaagtaaatcccaattttctagcttgct

SEQ ID NO: 1245249 - DNA, 4001 bp, Homo sapiens
aaattgtacatggagcttagattatgatgttgcataattattttctcagttatgcacaatatttaaacatgctcaaactatttataaaccaccctgagtatcagtaagacctttgctttaatatggaaaacctaacaggctcttttacttcccccccattatgcagggctcacaactgggggcaaagaaattatacgggtcactttcactgtcaatacaatctcctaaatttaacctttaaagggtttttaaagaggggagactagagtccagcaactatattcaggctgatacaagttcctttaaaactccagtctggcaaaagtagcactgggacagaggctgaaatagctccctggtagttatgctcagattaaatatccactaaacagaaattgagttaccttgccaaagacatcagcttagggactaaaaaatttgatttggagaggagattaacttcggtgtgtcctcaaaatggaaagcaagtttgtatttagacaccccccaccccaccccgttttcctgcctacacactattccaccaacacacatttcaagcatttttctctctcgaaaaagattcctgctaagcaatgccttaattcagtctttgaacctaattaaaattaagaaacttttaatagccttaataactcagaaaagctgtactaagctcttctctggcatcttcctctccttaccaccctctctccaaacccagaaaaatccagcacaacagaaagcacaaaacaactagccacatgctctgaatgctaggaaacgtgattccccgctggtttaggctacaaagaaagcctgtgagtaatcaaaaatccttaatcaaaacattaaagttaaaagccacctccccattccccaacacaaatagaatttccctttctctccttaatccgctcatgcacttctcgtattcttggaatttcagcggcctctgaagagcggatggtaagttcatctcaatgtcagccggagcacagccatgcgaaaaatcactaacttggaaggttatttaggacaataatgtctttcactgtcttactcctcccactccagcccttcttgacctaataccaatattcaactgagaaacacatcagtccacgggctttttccccaggggctcttcctgcaggaaccccacggcagggagacccgcactgggaagagagcagggtctcccggctggtgcgcccctccccacgcgcccgcggctgcaccccactctgcacacacacgtccaactattcttggatctactcacatccctggatcaagtctggccgccctccccgctccgtcccccggcgtcctccgtggccccaggctgccccgcaaagccaccgagctgcaaatacacccacctacctgggccagatccgaggaccccggctggcgcgctccaccctgcgctcctcgcaagctccagcgcgaatgcgctcggcctgctcctcctcctcccctccagtcgagccgaggcgagccgatccgggaggcgcgacccagggcggcccgcaaggtctccctaagtcacctttgcgcagcctgcccctggctccggccgggcagcagcgccagccttccccagcgaggtcgggcagaggcgttgcccgccagcggcccaggactcccgcgccgcgcccgcccgggccgcagaggtctgcgctgcccctccgccgccgctggctcggccgcagacccgccctccggggctcgcggggagagcgcgggcgggcggcggcaaggcctgcggcgggcggctccctgcgcgcggcgggcagcgtccgggccgctcctccccttccccagcgccgctggcgggcggaggcgcaggtagggaccgccggggaagcctgcacggccctccgaggagaggtcggggactgctccttgggctctacgtgagtgccgcgccgaggcgcctgcgaggtcctagagctgctgtgcgctcggccctctcctggagacaccggccctggcaactttttttttttcttttttctttttttttttttttaaccaacccgccccttgggaaactctggaaagcaaaggaatcttctctccagtcctgcctgtcacttactccggctcacgctgaagcgttcgcgtttacggttccaaaaccaagactgaaaggcagtcttcacatatttattgtttataccctagttgggacactgagcaacaaggaaaacaacggtattaatcctactaccgtgaaacctacttaggtaaaattattccagccaggcttgaagggcaaaggttcagaggacaggaaaacccaccacccaaataccacacttaagtgggatgttcaggttaatgaaatttatggttaactgtaacactctgatggagggaaagaaatctttttgtttcaacatgtttcaaacctttcaccttactaaagtgtttaactctgtcctcatactttagtgagttcagagtaaaaatgaacaaaattaaatatttctttcacaagatcctaggtactttaagtcccattgaagttggtggtagctgtaattgcactacagacctagaatgtgttaaagaccattccaggccatgctgggaaaattgggaatgaatgtcagtgaggtttcatggcatctttgttttcattgttattttattgtattaattaattaatttatttatttggagacagagtcttgctctgtcgcccaggctggagtgtagtggcacaatctcagctcactgcaacctccacctcctgggttcaagtgattctcgtgccccagcttcctgagtagctgggattacaggcctgcaccaccaaacccagctaattttttgtatttttagtagagacgggggttttgctatgttggtcatgctggtctccaactcctggcatcaagtgatccacctgccctggcctcccaaagtgctgggattacaggcgtgagccaccacgcccagcctcatggcatctttgaaaagtcagttcatttcttttacttttttcactcagaataataactgttactgtacttggaaaaatcatgtatggaaagaggagtccctgctacagaatctctccctaggccctgaaaattagagaatgaattcagtttataaaagtagtgctaggtagcaaaacaatgaacaacaaattaccttcttgttttaaaaggcaatctacatggctcctaaatgtgccaggtactgtactgaagcacctcacataaaatagcacatatatgcgctcaatttcagatgtggaaacagaattcctaaacatatattcatttgttcaaggtcgaggtagcagagtttagatccagattggtctgatcccaaagcctgaattttttcctttgtacattcattattcattcattcaaatatttattcaccatctaccacatgccaagtaccatgctacaaaaataactaagatacagttgcttccttaggaagctccagtttgtgaatatataatgatacaatatgataaatgctatgacagccaggaactcatggagcagcagggacacctcacctagttttgaagggtggagcctgtatgaggaaatggttacagtcatccaacagagcagccttgagaatttatctcacagaacagcaatggggaactgtatgctggagtcagggaagacagaataaagggagataggcaaccaagatattaaaaaaccaaattgaaccgggcacggtggctcacacctataatcccagcacattgagaggccgaggcaggcagatcacttgaggtcaggagttctagaccagcctggccaacatggtaaaaccccgtttctactaaaaatacaaaaattagcagggtatggtggtgtgtgcctgtaatcccagctactcaggaggctgaggcaggagaattgctggaacccaggaggcagaggttgcagtgagccaagactgtgtcgctgtactctagcctgggcaacagagcgagactccttcac

SEQ ID NO: 1245250 - DNA, 4001 bp, Homo sapiens
cctcggcctcccaaagtgctgggattacaggcgtgagccatggcacccggccaggaatacttttatagaaataatatctgtggctcacacctgtaaatcccagcactttgggaggccgaggcaggcggatcataaggtcaggagttcgagaccagcctgaacaacatggtgaaacctcgtctctactaaaaatacaaaaattagccgggcatggtggcatgtgcttgtaatcccagctacttgggaggctgagaccggagaattgcttcaacccgggaggcagaggttgcagtgagcctgagatcgcgccactgcactccagcctaggcaacagagcgagactctgtctcaatttaaaaaaaaaaaaaaagagacagagaaatcatacctgactgctctgaatcaaagtcggctacaataatacatgcaaaaatgagcagcctccagagagaagaattagccacccaccataagtttctgctgattcacaacgagatatttagcaagtatcattttcataaacaaccttcacaaaatactaagataacaaatgtttcagattaatctactcaaactttggcagttaactcctattttgactatccgttgctcaatgctggagaagagttacactgcctgggagaaatgaaaaagaatagttaaattttaagaaaggaatgttactgacagttttctcctcttttccccctataaactgtagacaaagcccacctagtggtttagaattagggaattaaaaggtggattttgttactatgctgtaattaagaaatcttcacaattccagcttggggtggggagggaggggggtggttcagaatttatacctatcaaactgctgcaaaaaattcattgtatcggggttagactgcaaatacttctacccctcaaaacgaatctgcaaattatttcccagatgctgagtaaagaggtgaggaggttccaaactccaaatccagaatgcacctattacagggcaaagactgaagttttcagggaaaacacatcaccgattttaaagctgatttaattatattattaactattcacagacacctaatagccacatttgcaacattcaagcaaccttatttaagctaagaatatcacactgcccacagttccatttcacaataccgtctgcctaaaaacgacaacttgaactgaaaactaatactaaatcagaataacccttttcaatgcctcctgccaatcattagggcagcgggataagtgaattgttaaagtctattgtgcagctgcgctctcattcagtttcagaatctcccttggatattcgttcatgcttgtagaaccgaccacgcggtacattgggaaacggtcacatgaacaatgcgtgacttccattgtgcatcaatcctcctcttgttaggaggaaattaaaaagtcacatggacacacgaaagtaccgagaaggcacgcagctgaagatctggtaggggatgcatgcggcaccagcatggtcgtggcacccgagtgggaagtgcaacaaacgccaacatcttgttacttttaacgcctaacttcctgcagcgctggagcagccagcggccgccgggaagccgagctcggctgcagccctgcgtcgccgcgccacgacccgaccatcctctgagacgcccgggacgggagcgcccacccccaaccaggcgcggacagacctcccgagcgcagcccggcgggaacccgtcagcgcgggaaccggcctcgaactccaggcgtggacagccgcgagaaactgacctacgcggtcacccgggctcccagagctcccgaggcggtggccacgaccccaggcttcccgtccgcccgccccacgtcgaggaagtggtcgtcaccaactctggctggcactccccgaggacgctcgagcccgcgtaacgtctgtctccgggacccggcgccgggaccacggcggagcgcgaggtggcgccgcccctccccgcagcccgcccctggaacgcgcatcctcctggcgagctggcatccctcccgacacgtgaccgcagcggggacacgcccgttccccgcccactccccgcccctgcctggcctgcccacgcccccggcccgctcctgtcccgcctgggccaccggcgctggttccaggttttgccagctactagggacgcgtaaagccttcgcgctcctcccaccacaccccgagggaagaagtggcaggccttacccggagactacaaggaaccgcccgtgtgagccagtggaagactcgcgtccccaggcaaaatataagtcctgggttaatagtctgaagtctgtcattaagcaataggttatccagctgcccagatttttttcttttttgctttggctgcaactcgacccgtgggaacttaattggcaatgtaaattagacaatttacaaaaaaacacctccttttactttcacctgtgaaaggaagcgcttaaaatgccatacaggtgtaaccattatagaatagatatgcgtgagacaaggatttacaaaatttcctcacctcctctcctccagattccatgcacaaggcgtctagctagaggagttagcaaatagtctataacgtgaaggttcaaactctagtataattccaccgtttttgtttttttctttttttgaggcaaggtctcactctgtctcccaagctggagtgtagtggcgcgatctcggctcactgcagcatcgtcttctgggttcaagcgatcctccggcctcagctggactacaggcgggtaatcaagggactgggactacaggcgcgccctgccgcgcccggacaagttttgtatttttagtagagacagactctccctatgttgcccaggctggtctccaactcctgggcctcccaaagtgttgggattacaggcgtgagtcacccctgcaggccacagctttgctttttaaaagcatttctgcataactaaaaagacaggaaattacgagcatacgaaaactgatttctgctttcctgaattttctaaatgtatttaatgaacatgttcttttgcaatgaaaaagtaataaataggtatcatttttaaaaggactgtagtttttccatcaagtctagaagcatgtattgagaacctataataggcccttttggtcattgtgatatgtgtgaaacagcatatggcagatcttttgaaatgatgtttttggataccacaagcaatcctgctggtgtatctcaggctggcatcatcttttattaacaaagcaggcactttactagcacaatacttcaactgcaaaatgtgtggtaactaaagcagctgtatttgtctggaaaagaagaaacctcagggcttactatctaaggatattgaaccatctttttttttttttttgagatggagttttactcttgtgcagtggtgcaatctcagctcactgcaacctctgcctccgaggttcaagcgattctcctgcctcagcctcctaagtagctgggactataggtgcgtgccaccatacccggctaacttttgtatttttagtagagatagggtttcactatgtttgtcagtctgatctcaaactcctgatctcaggtgatccacccacttcagcctcccaaggtgctgggattataggtgtgagccaccacacccagccttgaaccatcttcatagccaaaataaaactaccgaaataatgacaataataattggctactgaaataattttccatgattccatgaaagccttcattctctctgtgatgatttaattacctaaattcacaacttgcactttgcaactcccttctacagtttgcaaatgaaaaacagattgcagtcaataggaggatgaagtagtaatcactacagttatcaataagagaagttccaatcttgatagcattactatttatactgtatctttaaaggactttatttggtatttccataaaatatgcagaaaagatatctcatgggcatttatattattgacg

SEQ ID NO: 1245251 - DNA, 4001 bp, Homo sapiens
tctgtgtccaggatacgacagtgtgctagtcacacgagatgccaccatcagggaggctgagcaaaggctcagaggctgagaacacagacctctatattctctcacagctacttgtgaatgtacaataatctcaaaataaaaagttaaataagattacataccacacgtgcttattgtctactgtactagatagtgcagctccagagagctgtgttcccactgagctaaagaaacctcccgcccatgcttgtgggctcttcccctcacctaacccacagctggcacacttgatttgggggagctgggggcacttctgtgctccagagaagatgggtgtggggccgaggtcatggggcaagggtaaggacaggatcttatgataaatgagggattcattaaaagaccgtgtacccctaagcagagaaggatcctgcaactcactgtagcaggctggagaggcggccatgctgttgctgggacacctccccgcctcaatcctctgcagacaccctggaaatcctactccaaaggtcagagcagcacagcgagagggggctgttggacttgcctccccagagacaggggagggaacacccgccctgcgcccaagataggcacacagttaggggtgcgggctcccactccgccgttaggagcctttcccacaactctgagaaccggggtgcgaagaaagaaagggcgaaagggccgctcaactcccagagagtagccagcgaaagactcgaggggccccctcccgcaggaccccgaacaactgcagcacctcctcagcccgcggggtccaccaaggagaccctcacaaacaatagcatctgcggcgaaggaaccacccccgcaaagggcagaagcgccagatcctaccagccaattacccagacgcgcatcgcgacccgcaagttcgggcacgctccgcccgggcgcaggcagcgggaggggccgggcacgcccgtgggggtggtctgggtacgggtctgatccgggggcgcgctcgggaggggtctgggtctgagccgggggcgcgcccgggggagtgggctgggtctggggcgggggcgcgtccggaggtgggggagtctggggtgggggcgcgcccgtgggggtggggtggggtgtctggcccggggacgcgcccggggaggcgtggtctgggtctgggccgggggagagccgggtgcgtgctctgggtctgcgcgggggagcgcgcctggtgcctagatgtttggtaccgagcgggtgggggacgccgggctcggagccggcggcaagtctcctcctggcaggtaacaagcctcctttgcagccttgaaggcgccttggccagggccatcccacggcccgggcccccagagcccccccacggccccgaatccgagcagcccctggccctcaactcgccccggaaaggccgccctcccctccaatgtgtggcgcgccccgatcgcctctcactcgtggaacaaaagagcagctcccgcggagcgggtccagagtctgcccggactgtccgatggccctcggccctctgagcgccgcggctgccgggctttgtgtccgcgcggggggcgggaaggacggccggggtccccagtgcgcgtcccgcggagcggcgcgcggcgcccgaactggaaagttgtcgccggcgcctgtcgcctccacgccgccccagtccccctccgcggggcgccccattcattagccaggagactgggcgcagggccgccggggcgggcggggggcttaccttgctcttgacttccactgcgctgcaatcgtagaatcgcaaggtctgagacttgtgaaaacttcggttcatggtttcggccccggtcagcctcgccgtcgccctcgctcctcaggggccgcagaaagactcccgggggcggcgcccccaggccccggccccggccccggcccgcgctcgcttggccggcgggctgctcccggtgctgcgggcccgagctgggctggccgcgcgcctcagggactccaggggccgcgcgcgggaggagcgcgggggacgccggcgcgcgccgccccacctcccggcgcccgcgcccgcgccccgccccgcccccgagccccggaggacccgcccatatccccgcccacagccccgccccgcgctccggaggacccgccacaccacgcccccacgctgcagctccgcgtcggatcgccagtgggtgcgcgccctcctgtccacaatcccagagcctggggaaaggagcatcgcggccagcccaaggcgtctcgttttgattgcctccaccgagcaacctaggataggggttgatttttgccattgttttgggtaatattcaagtgaagaatgctaacgagaaccactggagacctgatcccaaaaggcatcacctgtcagtactaattgtcaagttgctgatggcctgggagaagggttttatcaaataggcttagagcagcctggccaatacggtgaaacactatctctactaaaaatacaaaattagccgggtgtggtggggggggtgcctgtaatcccagctaatggggaggctgagacaggagaatcgcttgaacccgggaggcggaggctgcagtgagccgagatcgcatcactgtactccagcccgggaggcagagcgagactccgtctcaaaaaataaaaaataaaaataaaggcttagagggctttattagatagcctatctctagggagaggatcagaagcacctgcctgatgcgaaaggagactttttctaaggcagctagaaaaagagaacctgttaagacaaagaatcaattactagcagcatcaatgaatatttaccaatcaagaggcctctgaaacgggcttgctgaaaccaaagatacaatccttgcccttgaggaatttgtgatgaagttcagaagacaagacagtttttaaaaaatcattttgaagtatactatgaattgtaatctacaagccatataattataaatctcaccatacattcattgcaaaagaaacctgcagaatataaagaagtgaaaaaacctgtaaaaattacctgtagtcatgctactcagcaatcaactgtattaacctttggtgtattttattttcacttatttttctgcatatatatttgtatattttacaaagttgtgaccatgctgtttatctcgttttacaacttgcacttttcaccttgtgctatataatgaactttttcttcttctaaaaacaggatcttgctatgtcgcccatgttgtagtgcaatgccataatcacagctcactgcagcctcaaactccttggctcaagcaatccttccacctcagcctcttgaggaccacagatttgtgccaccacacagactaattttatttttatttttgttttttgtaaagatgggggtctctttatgttgtccaggcttgtctcaaactcctggcctcaagcaatgcttccacctctgcctcccagatgtgagccactatactcggccagaacggttttattaaatgttcttagagaagatgttttctaaaaggtgcttatatgaatataggcataatttataatcatttcattattgttggatatttaagatgtttccactgttaagcttttatatcacactgttttaaaaatttgcttatattcaatgttttaaatggacttctaaaattagaactactaggccacaaactacacacctctaaagcctttaacacaaattactttcatagaaatctgattttcctttatttttgctaagtatttaccctgttatatgctgggacttagtgccagggagtaccattacaaagccactgagttataatcactgccctttagagaaatgctaggctggccagaggaccggatatgtaaacagagttccaaaacaaggcacgtgcgcagtaagtaagcaagcaaacaaaaaatgccaagagacacacacttggcaagcagactgtggacagaggtgctgccattctttcaagggaaa

SEQ ID NO: 1245252 - DNA, 4001 bp, Homo sapiens
atttaaagattgctcaatctagtactacacagactgtatgaaaaagctgtaaagtttaagacaaagactcatcaggacccgcacttactcttgggttgggcaaactgacaagcaatttgaatcactcctcggtcctcggcagcttttgcaaccacccgtcaaggcaggtgacttccttacctgcatagaagcggatgaggcagccaatctccgagtccatgccttcctcctgcaccctccacagctccccaaatcccagttggaagaggtagtcattttggatctgcaatggcttctcctccgcctccaagcgccgggtggtctctccgtggagctgcacgtacagggtgggcggcgggggcggcggaggcgccttctccgcggtcaccccgctcctcccgggggtagactggaggcctcccggggccacggctgccgctgccttctcctcgcacgacccctcgcggacggccccgcccgggctgtcaatggccctcggggctttctgctgcggctgaggcgaggaagccgtctggggaagcgggaggggctgcgcggggtggccgggacggcggggctggcccgggacccccgtcggggccgaggctgcgtcggcctcgagctcttccgacgacgacgaggagccgccgccgctgctgtaggggtccaaccggtcagacacgctctcggcgctgggactcagactgaagctctcggtgtcggagaccacaggccgtggggcgcggggcgaagagacagggcccccaacgaacggctcgccggggctggagtccgagggcgctgggctggcgcggcgcgaccacccgcccgggccgccgacgggcaggggtaggtcggcggggggcgcgcgcggaggccccccgaaggcacccggcgcgctcctcgcgggcggtacctccgagtcccgcggctccgggggcgccagccgggggccggcctcggggggcggttcagcgggctcccgggcggcggcggctccgggcccctggcccagcaccttcaccacgccgccgcctttgtggcccagctgcagcaggcgggcggccacctcgccggccgtggtgtccagtgtgcagagcaccgggcgcaggtaggtcgaggccatgtggcggtcgaagacgtgcacgcagccgcgctggagctggtgcctcacccagtcccggtccgacggctgcagctgcagcgtctgccggtgcttcagaagcagcgtcttcctgtccaggctccgggtgcacagcgacgccgaggccgagcaggaggcggggaggccggcagcgccgggggagtgcgaggcagcagcggccgaggacgacgacgacgaggaggcggccgcggcggccgcggacagattcctcttcagccgccctctcctcagcaggagggagttggcgccgccgccggccccgggtacgggggcagccccgccggcaatgggctggggcgccccgcgccgcctcctgcgcccggcaccccccgctctgcccggcagcggccccggcggcgcctcgcctggggcctcttcccgcgccccgctgccgctgccgttcccgccgctcggggccgccggggtcagcgcgggctccggactccggccgcccccggccgccgccgccagagccgccgcggccgccgctgctgctgctgctgccgcagcggcggccgccggagccgaagctcggtcctccctgccgagctcggggagtcgctgtaccgtggccgcggcggcgggctccattgcagtggggcttcgcgtttcccccccagctccggaggcagcgggcggagagggaggcgatgaggcggaggtgggagacggcggcggcgcgcggagaagggagaagccaatggcgttgtgcgcggccgttccaggggattatgtggcgattcggagcattccgtcggtgtctcagtgttccatcccgcgcgcccgcctcgccgccaccgcccccccgacacacgccctccccgcccgggtcgcgggctccccagcgccggccccgcccgctacccccgcctcaacccggcgaaccagccgcggatctgggctcattgaatattaatcatgcgccgggagcgggaaggcgggaggctggcagggcgggagggccgcgtgtgcctcataaatattcatcgccggcatgacggcattccagggaggagtggggagagccaggggatggccggaggcggagcttcagggtaaacaaacgtgacgcgtgcgtacgagggcggggtggggggcagtttcccgggaggttcctgagccggcctcggagagggcagtgaagaccgacgcgcgcggtaaaccttgggagttgtggttctcgtaaggggatcggcaatcccgagggaaacatggtggactacaagtcccagcggtcctttggttctgcttctcctggccgccagcagctggccgtggccagtgagtattgtgccctctgccgttgaactctgtgccagagttcttaatgaacacgaatgctcatgttcattaacttgtattttacccgcactccagcttgccagatgacttttattttccctactaattaaaggtgagggctttcagggactgtaaacgtacgaaggtcgcaggtcctggtcctcacctgcgcccattgtatgagatagagatacacacccgtcacaccacagcatcactggcagtctgagtgggccaacctcactttttccccactttttcaagacccaggaagacaggcagcgtctgggaattctaactgaggctgtcgttgaatgtgcttgttcgaaggcacaaccctaagtctgtcctctccctctcctgtacctgaaaaggaaaatagcaaaggactgaggtttcattgtttcccattgctcttgaagtctgaagtagtttaatgacacagaaagcactggtaagtagaagaaacattagaatggagtatgagatgggctttttccacgtgttctgtcttaacgtcttctctggtttttttctttcatcattcagggaaaaaaaaaatagtttctactgccacaatgtttagtcgtggtctgaaaagttgtatttttcgtcagttgaatcaatgttgtaatcattgggcagtttactatttaaaagaatgttgtacacctttttaattgaattaccattcccccaattgctttgtaattcgggatttttcttttctttttttctttcttttttctttttttcttttttttttttttttttttggccacagagtgggtctgtcgtccaggctggagtgcggtagcgcgatctgggctcactgcaacctccgcctctcgggcccaggtgattttcccacctcatcctccgagtagctgggactacagggcttgccaccaagcccggctcattttttgtattgttttagtgggggtgggaagtcccttcatgctgccccggcaggtctcaagcgatctgcccgcctcagcctcccaaagtgccgagattacagtcgtgagccaccgcgccaggccctaaatccggattttcacatgtgaaacttttaaacagttttaaaccacatactatctatgacctgttttaacctcaataaagtgactaaacttgcagatgaagagtgaagggggttggagagagagaccaactggaacttaccgcttaggttatcacagtttcattgaacaagaatgaagaagctgtggagataaaaataaatatttctcaatgattttttacattcctgatgattttctgtattttcatttaaagtttcaccccttagcctcatgaatctattaataatatgtattttatttaaattcaatcaacagcaacatatgaaaaattagggagattgcaagttctcccaagagtgataacattttcaagtcaattaatttaacagataattacaaacatttattatgtaccagtcaccgtgttatagcagttgaataaatcacacactgtccctgccttcatagagtttacaggttagaaa

SEQ ID NO: 1245253 - DNA, 4001 bp, Homo sapiens
caagaagtaaagacagctgatttacaggaaaagaggatgaagctgatccacaaaccaaaacagagaggaaggcagaaaggaagagaaaaaaaagcttctttggtttctatcactttccagttgctggttgcactccaatctgagcactgactgcttttactctgctctataagagcgagtaaattcttcgctttacattaagctttggccaacaacattcacaagagtctaataaaaatcctggaaagttttcattaacaaaaaaaaaaaaaagaacttagaaaacttgtatacatctgttactacacaaaaattaaaaatggcaggtaaaaataaatataacttcagagttcagtcttctcaacccatcctaaatctaacgcatgaatttacagaggtgaggttcagggttcgttgtttgaaaagctccacaggtgttaaaagctctacagctggggctctgagccactaaaacccttaaacttatcaagtatgaacaccctttacctacacttatggttctctgcataaactagtatggggcataacatgtattaatatgtgtttactgggaacttaataattatttttgaaacagcaggagggaatatggcaggcactgtgcaaactccaacaatctccgtttagagcagaggatacgttcttttgctcacgtccactaagcaggtaaccagccaacatccttcccccatcccatctcttgcggaaaacaataaatatacaaaactgaaccttttaccggattcctcttccttatttgaaaaagaaatcctaatatcataagtgttacacaaacgagttgcagtaaatgtaatttcaagtttacactcatctctaccttgatacatttaaaaaaaaaaaaaatcagggtttctgtccgtaaacatctcatttatgtcgccagtaattcagcgatacacacaaatccatctcattcgtcacacttagttaggactttaaaggttatcagtctggggggaaaaagtctcttctgttctacccccatcacagccctattccagacctctgctatacaagggtatcaacaataaagttatgatcttgttttaagactgagaagaaaaaaatatttttcctcaagagtaaaaggggtgcacaaacctcacaacatagactttgcagatttcttactaaaacactaagaaaatatcgaggtttaaggccgattattgaaggcagggatccccaaacattaggttcctcgaagatgttaggaggcaagggtgggagaaggggccttttctcgtgacagacctgactaaacggtagcatcagccataagaagaggagagattcctaaacgcaacttcagctttcagaaaacagtcctccaccaagtgagtagcatgcagacttgtgaatagccacagacacgtacaccccggtgaaggtgcaagatcaaacgttgcttcccacatcggccctcactgcgaaccgggatgtcgggtccccatgtgcccctcctggagggcgccccgaccccccgcgccaggtgtgcggaccactggcagcactcaggagccggctcgccgcggcccaggcccgccgcccccgcgccgcccgcgtgccctccgccggcccgctcccctcccccgcgccctcggcgcccgttcgtccgcgggccggggctcagggctccgccaaccggccccagaggcacgagcaggcggcggccggcgacgttgcggtttccccacctcctctcccatcccctcccccgcggcctccgctctccactcccgcttaccctcaactcttcgaaatccgccattttataccacccgcgggcgccgccgccgctgccgccgcacccactcccgctgccgccaacgacgctgccgccaccacggccgccgccgcctccagcaccatcctgcactgggcgccgcttaagacgccgcggccgccgccgctacagccgggcccgtcacgtgaacggcgcgggagctccgcctccgacgcgccgaagccccgcccctagcggtgccccctgcccacccgcgcgaccgccttccgcccgcgccttcagtccgcgcggcgacagcgcccgcccgcgcctgccccggcgtgctgccccgcggcttggccccgctcggccccaggtcgtgccttccctccccggcggaggcccctgcggactgcctagagctgggtcgcaactgaggcgttatccgcgggcctggcctcgggaagtggcggggaggaagaagaggcggccgggacgcgtgacaggagcattcgggaagattcttacggtgcccttcacgcggtgcctatggacggagaaagccgccgcaaataaaaccatcccccagagtagttgtggcggaataatctaaatatgggtgttgggtaagctattgttcccatctaatggtgaggttgtgtgacacctctttgaattgctaatgtcctgcaagtaccaaccttgccgagtttttctgaccttgaagggcacctgaaggtcacggactgcagagttgggagagttaggcggtggggttgggggcggggagaagtgaaataagagcgctcagaagggccatgctaaaaagtcggggaaatctgatagctaggaaggagtcaaacgccaaggcagagtaagtagatagaaggaagcttgatggcccccccgtaatgtgctgatataggatgaaggaagatgctgagtcaagatggccagaaaaatcgctggacggtgtccagggttcaatttccttgaagaattgggtggaacccacacacgagaggtctttaaaacaatgtaacttttaaggccctgtttaatcagcctcctacctaccgcctcttcccactacccctcgtttcatccgcactgcacttccaggtcttccttccactcccctgcccccgcaccccgcaagttttgtttttttgagacggagttttgctcttgttgcccaggctggagtgcaatggcacgatctcggctcaccgcaatgtctgcctcccgggttcaagcgattctcctacctccgcctcccgagtagctgcgattgtatttttggtagaaacgaggtttctccaagttggtcaggctggtctccaactccggacctcaggtgatccgcccgcctcggcctcccaaagtactgagattacaggcgtgagccactgcacccggcctcccctcaagttttaaggcttctaaatgttgatccttgaaccaagaataatttcccactctcttctttgttcctaactcctgttcatccttcaggtttcactttaagtgtcacttcctcaggaagaccatccctcacccacatcccacattttaattcaaattcccctgttatgacctctcctaggaccctgaactttttcttcctgagatgtctccatggtaattatgtaggtatttgtgtaattgtttatttgatatatatgtgtgtgcgtgtatatatatatatgtgtgtgtgtgtgtgtgtgtgtgttgtgtatatatacacaacacacacacatattgttttggccaggtgcagtggctcatgcctgtaatcccagcactttaggaagccgaggcaggtggatcacttgaggtcgggagttgcagaccagccaggccaacatggtgaaaccctgtctctactaaaaatacaaaaattaggccaggagctgtggcccacgctctaaattccagcactttgggaggcagaggcgggcggatcacctgaggttgggagttggaggccagcctgaccaacatggagaaaccccgtctccaccaaaaatgcaaaattagccaggcgtggtggcgcattcctgtaatcccagctactccggagactaaggcaggagaatcgcttgaaccctggaggcggaggttccagggagcggagatagcgccattgcactccagcctgggcaacaaaagcgaaactccatctcaaaaaaaaaaaaattagccgggtgtggtggcacatgcctgtaatccc

SEQ ID NO: 1245254 - DNA, 4001 bp, Homo sapiens
agggaaccacatgcctaactcttccaacagtcacagtgagctgctgtcccttggagagcgggatgggggatggggaagagggtgtccatcctccaggaacagtggcgaggaggacggtggatagagggactgggagggagcagagcggcctttaaccttagtgccactccccaggacccctccccggtctgcactgaggaccataaatcacgcttcatgctaaaagccctttgttaactcggtcactagcttccaattcacaaatagtaaatgtgccaggcacagtgccaagcgcttaggatacagagatgatccctgagcagtgacaccctctgtgtgtaaggcacctgaagaatccctttcccaaatcgcttttcaagctggcggggagagaggtgcatatccgctctgtggaagcttagctcttcatctatgcgagtgagactagacccctgcaaaatggaaactcaaactgcaaagtagagaacgaggccagcatccacccgtgggtccctcctgctgccccgggaccccgcctggccacaccttccctccactcggagcgcctttctgggttttccgctgaggtttgttgaaaagacgcctcccagactcttcactcacgaagtgtgttacaaaaactctcccggcaactgtcctgaccctcaccaatcacgctacagcccccattcgattgcttgcacaaagaaaacatttaacacaggtgtgatcaacctcggtcaagatgcagagtcatcaacctcggtcaagatgcaaaaaggtggccttttctgcgaaggccacgccctctgtaaatacagttactacttggtgaaaagcgctctacttcctagctcttgttggtgagagggagagcaaagaaccagggcccggcattcttacgagaggaattcaatgtcacaggcactgcctgtttgaggagaagatcagaaacggtccgactcccagaacgcagcacccagttgctttgcacgccaggccagtcctggggaaacggtgcaacgcttgtctgggcgtcgaggaggctcccttgcggtcctccctgggcccttgccagtcccaaggagttccaaccctgctttctaaccctttaaaatctggagagggcggccgctgggaggcgggactaggtgttgggggtctatagccttagcatccagtacttttgtagtaggggcttttgtggaggttttaaaaaataagtaagaaacgtcaaggcactgtctccctgtacctcgtccctctttttcttttttgaatgaccggagtccttcacttcttccttcacggttgctgggatttggggtctgggagagatggcctctgggccgtctggaggcacagcatgctgtgcttgcagggtcactggggcgaggggctcaggtaggagcctgactgtacctacgatggggacgcatccgccttccagccacagcaatggccatccttagtacacaagtcagtactccacgaaagaaaatccacgtgtaactaaattcaacataaacagtttccagcacatgcccgtcccgagcatcctgttaagagataccccgatcgcgcgccccagagtgggaagtgagagagccaggctgtgcaccagggacagcgcgcgtctgacgccgctggcctcccgaatcgaaccccagagcaccagagcccttcactttgttaagaagtcccccacccaggcgcccccctcgtcctcctcaagtgccctcggaaagcggaccagactcacctactgccaggcagatgggcagcagcagcctgaagatgagcccgcacaccacttctgaggccatcgcgtcggtccggcgagtcggagcagaggggcgaggctcgagggtccctaggggtggtgggacgcaaggcccatgcccgtctatggcctctcgccgccggcagctcgcagccacccgagcatcgcctcggcgcgggccgcgacgctctccgccccgagggcacgctcccggggctcttggccgcccctcgcccaccgggctctgggtagcccctcaccaggctcttggcggccacctagcccggcgcccggccccctgcggccggcccatttagtgtgaatcctggatccggcagcggcggcggcttcttcaggggtagctgatgccggggccttggagagggacgctttgggagggtcctgggaggcggcgcggcgagcaaagggggcaagaagggcgtgctgtgctcccgcctggctcccggggcgtcgtttgggggcggccggggagttttctacttggaagcccctctgaagccaccgcgtctcctttgcccggcctcgtctccgctgcccacgcaggctgccgcgctctggcctcggccccggctctcggagctgcccggcgggctccgggtctcgccctccagcccccaggcggcccgcggcggatccccgagaggcagcgcagctcagcccctgcgccccccagcttcgggccggagagaccggggtgggagctgccaggcgcgcagaaccatccccgccaccacggggctcgccttgtgggtccggtgcgcgggcggcgctgcgagtccctccctcactcgaaggaacggcgcgagcgtggggagaaatggagaccagagcgcatatcgggtgagtgggtctcccactccctcctccaccgcctcaatttaaaactcaagagaaaaaccagcgccgtcccgtcgcccagcgcgaccaccgcctgccgccttgcagcctcgccctcgcggcgcagccggggctccccggcggcgcgcgcttctccaccttcaatgaaactttcgaagccctcactcggggacgggcgtgtcccccggccaatgggatggcggctccggggcctgcgcgcgcggagcccgcccctgagcggctggggaagtgagagccttgcaccggcgcggagggcaagcccccacccgcggctcccgcgcctgggagagacccggcctggcctgccagtgggctgcgcgccttggctcgccctccgcgggcactcctgccccactggctcccgcagccccgcggctctgcgtggttctgtcattccggtggtgcaccctggcatccagtccacccggccgggccctgagcttgcccaaacccagggaaccgtttaaggtccgagggaaacgcacaggcccggcaggagagaagccaggggcttggagagtcctgtgcgaccccgacttctgctgggtccacaggtgcacactggcattaagaagaatagagctgaattcatctacaccgttgaccctgcccatatttcacatagcaagaacttgccattctgaatagactctgggaaatcccgggtcttccccaacagataatgcacccactttgtgcatttgggggaactctccgttttcacctcagttttgctccttgcttgtcgtggctctggggaaagagagcgttggcactgagaatattctccctttctcctagtgcactgctttttgcctgttctaggcaagatctagagaaatctggctctagctgggagactgcagtgtgcctgggtcttttatttaactgttatccgagagtggaggagatttgctagagcacagtaggggtctttccggacatggaggaagaggctgttagcatctgtagagaggactgttcaggactggcattccatcaggaggacacactgggaaggacctggcttcccttccgcacctacattcctggcttgcattagttggaggggatagagcagtgagctgatgaaaaacaggcaaacccccgtctttttagccatttgaaacgcttttgtggacatcccttttttgagacagggtaagcttgtggtttgagctcaggtgccttcacgaattctctgagaattacagaaaaactatgaaccattgctttttgaatgaagactcaagacagttggcatatggtgaagacaccctgaaacttaaaccacccatgtgctctgccatcctcaaga

SEQ ID NO: 1245255 - DNA, 4001 bp, Homo sapiens
tcttcaggaatcctaaatgcaggagatttctcaatttcccaatcatggagatggaaatattgtatataaacaatccatttctaatcatgcccttcccatgccattcactaatcctccattcctggattccagaaattggttccattttaatctctctggaaaatccaactaaaatacggatcagcaatcccttttgctaagaaatctctaacaggatacagtatttgccatttcaattctatttggggggatttttttccccatgttttacttttaatatatggcacagaaaactatttatcattaaaacattgggaactaatgtcctataaaaaaatagtttaaattcttggtactttttttttaaacttctagcaaaaataaaattttaaaaacccaaatccccattcaaatgaaaattttagtttattgagcctgggtatattgaaattaaagcctactcttaactgttggcatacttttacatgtaaaccaataacctgacctaaggttatgtaagaatcgtctattttaatttttccatggagctaacgggagatactttactgtggaatgtttactacacactgaatgtaatatgtcacttacctgtacactaagaaaggaaatctaaagcctggaaaagtggtcatttgtgtgtgaaaaaaataggagccataagaaatagcagtctaattgtattgactggaaattcctttaccttttcagatcataatcaaggaatgacataaaagataaacgttgatcttctaaacttaggatatgtactttatatgctaacatttcatcaaaaaaatcaaaactctctgaagcattcaacttttaaaatagttctaagttccaaaaccttgattctagcctgcatgaacgagtcagaaatgttgcaggagacagtggataaagaatcgtttgggacataagagaaatgatgttaattcctttgactccttattagcggaattgatttttttttttttttttttttttttttgagacggagtctcgttctgtcgcccaggctggagtgcagtggcgcgacctcggctcactgcaatcttcgcctccggggttcaagcgattctcctgcctcagcctcctgagtagctgggattgcaggcttgcgccaccacgcccaactaatttttgtgtttttagtagagaaggggtttcaccatgttggtcaggctggtctcgaactcccgacctcgtgatccgcccggctcggcctcccaaagtgctgggattacaggcgtgagccaccgcgcccggcgtggagctgattttataacaaccactcttggcttaagtttacttatctgtctactggtgagacagcattagatattctgaagggtccctgttgtgtaaatcgtgtattaaatcctaagcgtttattgagtacctaacaatttgttttccaactcgacgatgttcccagatccaggcaaatgccaacctcagcgttcccttttccgtttagtctctccagcccccgtccccacccacaggcaggaccacctccggggctgagaagtcgtgctgtcgctaggcctcccgagtgtgcaagcatgtggcagagaagggaaaagaaaggaagtcacattccgactacaggcctgggcacttgctatccatggggacaaaatgtcaccactggcagcaaatagcgagaaaaagtgcagcgcagtagggaaacagcgcgtccgcgggcgcgacaccacagtttgggcgccgacaccctccgcgcactggtccctgaactttacctggagcttatcccggtcaggcctgatctcgaaaacgagggctcctcagcgcgaaggcaggacccagctccattaaagctctcgggcagtggtcccctctacccactgaagcgatagccgggagggtattcctaagccaccactacaaccacccctcaattccggaacgcccccaatacctgcccggccgctgctgctatcgcgataattctcgggccagtctcccgtcagtccgctccacgccttccttctctgaccaatcatggaggagtcgtgggtggagttttgcttttgagcggagagcggggccttcaatctttgctatctggcgctgggaatgggcggagctgaagtgggctggggcggggctggggcggggctagatcggggagaggggcaggggcacgctccagttctcgcgagactggagaccaggaagacgcctgcagagccgggctgctggtgcagcagaggctgaggcatcaggtgcagctgcatccggatctcctgccttggagcgtactccttgtctctaagtcgggaggcaggacgtggtcaggccggggctgtggaggtgcgctgtgtcccctgaggcctagaggattcgggctgcggcccgtcggaaccagtcagggaggcgcccacactcctgacaggataagatggcggcgatggcgcctggaggtagtggcagtggtggcggcgtgaatccatttctcagtgattcggatgaggacgatgacgaggtagctgcaacagaggaacggcgggcagtacttcggctgggcgccggaagtggcctagatcctggctctgcgggctcgctgtcgccacaggatcccgtggccttaggaagcagtgcgcggccagggctccctggggaggcgtcggcggctgcagtggccctggggggcaccggggagaccccggcccgattatcaattgatgcgatcgctgctcagctgttgcgcgatcaatacttgctgaccgccctggagctgcataccgagctgttagagagtggccgggagctgcctcggctgcgcgactacttctccaatccaggcaacttcgagaggcaaagtggaaccccgccggggatgggggcgccaggggtccctggagcagccggcgttgggggcgctggaggtcgggaaccgagtacagcgtcgggcgggggacagctcagtaagtggacgcagcctgtcacactccggcagggtatttgggattgtacggagttactgtaggggagagggggtatttctgcgtgggtcccgatagggacattttaaggaacgagagtattggggtgggggcgctcttttgcggtggaagcaagaggatcaggcaatgactgttctctctgcctgcttccaacccttggctggtgttgcacttggctcctggctcccctactggtgtcagtatctataaaatatcaagagtttctagttcactggctattacgggactccagaaggttcccttttatactagtttattgctttaagcattttcctttttctccagttacctgaatcacactaccaggaaatagtgttacctgaattgcctgcagtagttctttgagtctgagccaggagagaaagaataggacacactgctgctgtctccgaaaagtcagatgtacttaagaccctttgtctttgggacgactttttcaccgccaaaattgggttttctgctgcacaaaatttgttctgttgagataaagttgatgtaattcagtttcaatgccttaatttaagtaatgtccaaaattacaggaaatccaaggagcaaggcagacaggttctaccagcagtctgtctcaccatcccaccaccttgcaggcttttctctttgcattagataggaattgacctttttaccttggaatgatttttagcagcatagagtaatcgtttaccccatatattcgtaagcatctcttatggcttgaaaacttactgtcaaagatgtagtgtactgtatgtaggattcccagtgtctcccttttgggaggtatcttaaatattcccttactaatgtatggagatgttttagtatgaggccatatattaattctatattaacaagtattcatatagaatttttaaactgcagcctaattgatttttttttaatcactatgcttttgaatagtgccagagacttaaattgccaaacgtagacgtggtggaagcttag

SEQ ID NO: 1245256 - DNA, 4001 bp, Homo sapiens
cttggtttcattttcttcatttcaagttgaccacatattcatctattctttcaggaaacatttaccatagtggacaaagaagcccagaagaaagaaaagataagcaatacagtattacaataaaatattaagtcattgcttctggggaaaaaaatttacttttaactgcatgtttttattctactctttccatttttttcttttactatgcatatgcattgtctgatcatttctttaaaacagtggtataagtcataaatagatatgcacaggatactatcacagagggaggaacattttttagacatcaagattacatcagatactgtgccaggcattttatattttctttcttacataattttcaccatattctcattttataaatgaggaaacagagacttataaactaaactccttatccacagtcacaacgtaagtaacagagctgagaataaacactagggcagggaggccaaagccaatattcttcccattacagtaagataaatcagagtctcaagagtacttaggctggcatggggaagggacttagtaccccagatagatgtctgaaatgatcctgaacaatgcatgagagttgaagcaaaagaagcagaacgtcatcccaaagggaaaggagacagagtgagaccctgtctccaaaaaaaaaaaaaaaaaaaaaagggaccggtttttttggctttttctttatttttaatgttcaaacatttcaaaaaatgcattcatatatccaagaaatactgagcatcaagctgaaggaaagccctttatcaatattgatcctgtataaactactagtggtgtatgctatggaaaataccttaaatgagtgtataaagtatcatacaaaggtacaaggtggttgttgacatattacttttaccaccaccaccacaaactaaaaagtaaagtatttgtcagcgaataagggacttctgaaaataaaatgaaatgatcattcaaaggtacatcagacaactgagaaaatttatctatcacttactgcaggcctttgaccgacacatatttgttgaatattaattgaacatacacaagaaatgtttattaattatggatgatgctatggtcaataatttgtgatagctttgacaacactcctacatgaccaccttaaaagggacataatttccaactctgtcttgtgcatccctcgtcattataccagttctattatcctcatctcaagatatcacgcccttgacctttacttcagccgtggtgccccaacgttttcctgcaaagactcttttctcctatcttcttggtacctttgaaactggaaccctcatcttcgacttactcccaacttccctgactaaacactgccatactacccaaagattcactctaggcctctatcacctcccgtgctaatacaccatgtgctcatcttattctcaactatcgcatctgcctgtgtctacctctccataatttctgaagccttcattccaccctacaagccccgttccaaaataaagatcgtcctcttacttacgacgagacttgatttcttaatttacaatgaaatagtaataaactctcaaaaggctgaacagcaaaaactttaaagactgtaaaatacagcggaacttaagggctattcctactgctgtgcttctcacggagaccacgtattaaatccttttccaaaagagcccctctccacgatccactctctcgcgcctccctggctacagccctcacagccgcccccaatctgggccttgagacgagtcacgtactttctgcctctcactcccaacaggcccctgcccccacgtccctacgccccagcaatcccactccctgtcccgagtgttctcttacatcttaagctggacgttgatatccaggtcacaactatagatgtagtgaaacttctctgcttcccccatcgcaccgtctgcaaaggtaccacctacagcgggaacttaggtacaggaaaaacaacataaatgaaccagctgagccccacaacacggaacttccggttccgcccccgccagcaagccgccaatccacgcccggagcgagttccgacgcggcggaactccccgccgaaacaacccttccgcgcatgtgcacaaggcgcccaccatcttgcttaagggcaaatgtatacgggaaacggctaatctggttacattccagttttcctgtcttgacagcacttttttttttttttaaagaaaaagagacgctatcatttgagcttgagctgtacctaaaacaatacgaaagaaaattcaattcaaaaagaattataacagctttcactggctgccggctaaacaggttacaagcacaaaaattggaattttgccaggtttaaattccagtggccttcccaaaaagtgtagcactaatttgctatctcaagcaaggattttctctttctgctctaaagagtagggaaaggactaaatagagaataaataaatctgggtttcatgtttggtgttgtcagtattcatgctactttggacataatacttgcgtgcatgtttaaactgggaatattcaaattcaatgtagtttcaagccctaacccaagttagaatctagaggcctcctgtaataactacagaacacagatctctaaaccctctgagctcctataatgtttgtttttataattattataatctaaaattgtaatactcccttccaattagattgaaaactcttggaaggtaagaccagtgtgccatttacttccgtgtcttgccccgctagctgtctaatgcattgctgagtttaatacttcctacttactggttattaatgatgatattgaatgaaagtctccattttctatgcctttatttcttttttttttttttttttgagatggagttttgctattgtcgcccaggctggcaccatctcggctcactgcaacctccatctcctgggttcaagcgattctcctgcatcagcctcccaagtagctgggattacaggcacccgccacccagtcaggctaatttttgtatttttaatagagatggggtttcaccatgttggccagtcgggtctcaaactcctaacctccagtgatctgcctgccctggcctcccaaactgctatgtcatttctttttttttttttttttttttttttgagacagagtcgctctgttgcccaggctggagtgcccgtctctctgttgcccaggctggagtgcagtggcgcgatctcggctcactgcaagcttcacctcccaggttcatgccattctcctgcctcagccccccaagtagctgggacttcaggtgcccgccgtcacgcgcggctaattttttgtattttttagtagagtcagggtttcaccgtgttagccaggatggtctcgatttcctgacctcgtgatccgccctcctcggcctcccaaagtgctgggattacaggcgtgagccacctcgcccagcctatgtctttatttctaagtgctgcattttaagacggacatcactaaagtatgtgcaaaatggcgtaattagaatgttgagggattagaaaaaaaatatttccaagaaagggtgaaaggtgtggagctgtttaacctggaaaaggaaaaaaaatggctaatgcagaatgttttacacaaaataagttctcaaaaatatttatggaggcaagaaaaggatttgggtagaataaagaaaaacatgatagttatcctcctataacttaaagtttaaacaaaaagagcacctttgatttgttcctaagaataactgccaccaatggttggaacttacaggaaatgtaatttcaacaaacaatacaaattgaactttctaattatcacagccattcaacagtaacactgttgtcacaagtactctgtttaaggcataactccagcaatgagtgtgaggtttgatgtgaaacctcaatcttgaataaaatattgacaatgtgtaaaggagtaaattatctgatcccag

SEQ ID NO: 1245257 - DNA, 4001 bp, Homo sapiens
caatccattgcctttatggaaatgagaggagcagaaaataagcaatgtttaattcacatgtttactactttttggaattgagttattctaactgaatattaagaaaaatgatgcttataatttccaagtacactttttttcagtaagtgcagttaacactatactgactataatatcgtatctatactgactataatttcaattttcttgaatatttcaaagagcagcttgaggtctttcgggtacacttcatgattacaaacattaaaaaatcatgattacaaattaaaatctggtctattttataaatcgaccctgaaaataccgtatttaggctcaaaataaatcaaagctgtcaatatatagtaaagcaaaatcttaaacctatatttcaaccaatttctctctacaagaagtgagtgaaatctttcctaactcctacaccaagagacctaataaatcccttaaggtgttattctttatgggctacaagatcaaatatgttgggaagtatttacatagacatgttgtctacagagattgagatatattaatatacagttctaaaagaaaaaccaaataccattcagcgtccgacactggaagccctgaattctaagtggaaaagttatccctttcaccaaaaatgtagaaaacaaggcagaaaatacttcccggtcatttccttaattttttaaaaattgcattacacacctataaatgtattagtatcaatcaaatcaagtttaagagggactttgtgctgcttcctgttcttgggaattaagtcggaccagaaagtgctatgcataagtaagatccttcagaaagaaacaaggtcagaatcctaagacatcacaaaaggtagacaaagctttttccatcccacacaagcgccagagacagcagcctgttaccaacttaggcatggtcacatttgcaatgcaccacttccttcgcacgccccaggagctctataaaatgaaagtaacttaaaaggtggggggggcgtataatcgtctgatgcaacagcagtatggcccacacagacttcgggctctgggcagtgactgggttctctgtttagatttagaaaaagcatggggccggggcgctggcctgaaaacttacgatggagctgtatgtatcggggtggggagtgcgaatgaatgaatgaaaaaaaggagcggactaactcctattctcctatccccacctcccacaatatcgattatttaaatgttacaagattttctaggctcctgaacacaggggcccttgtggggccgtctctggaagcgctgggagtccaggcggtccccggggctctctcctgccccttctgccgcgacaatgactttctcctagagacagccgcctacacttgcacttgttcctcgtggccccggggaagggcaagtggcgaggaggaaagagaggaggaaaggagctttttgcccctggtgaaacgcagctgcatcccaatcgcaaatccggcttggtccctcgccgtacccgccgtacccgccggtcctggggaaaaaccccgaagaactttctggaggcgcccctaaggctcgcgccagggcacagacctggcccgaccttgacccccgtgcagtctgtgcttgagccccggcgagctgagcccgccccagccgagacctcgaccccggccccgaccccgcccggcctgggtcttcgctggccccagcgggtcggtacctgctggagcccgcgcggggctcggttgagcgttcttgcgcgccttcttcccaggcatctccgccggtgccgccgcccactcagctacagagcccgggaacctcagcctccaactggagcacctcggacagctgcaggacgcgagctgaacacgaacagtcctgcaggcagggatgctgggatcgggtgtccggacgcgcggagatgccaactacacacggtgagtgcccgggaaactctgagatccccgcgccagagaccacgcttttgtccagtgagaacttccctggtgacgtagggaaactagacgcccggcccgcccctgtccccgcccctgtccccgccccgcagacggcgttatgggagcggacgcgggacgcgggcggggaagtaccccgctgagcgcgacctgcccggacacgctcccgacccgcggcggcgccgacccgcggcggggggcgcagagcgctcggccccgaaattacttccttacaaaacgaggtgggaggagaagggggtcggctttgaccatctgcaaacgctggacgtcgtcagcggcagtggtggcgggagctgggagtggcgggagctgggagtggcgggaggggaagggtttaaccaggaggaacgttgtgggtggggagagaccagaggccttggcaattagagacttgggtaaacaagcccagaaaagagattggaaaaggaaacttttcgaacttgaagagtatgggcagtaacagggaagggaaatgagaagaaccttaatcaccgcagaggagatgccagaggccctgtgagaaagctccgggtcccaggaagtcactgcaaacagaagccctggtgccagccagaaagaacatcgtgtttgagttgggaagggatttgtgtgtgtccttccagataggtcgatatcgcccattgtggatgtttagcaaaaacgagtggatcgttatcatatggaaaacgttcaaatcttttgtgggagggctgagctacctgggaacgtgaaattatttgcataatgtttggcgaggccatgagtaattctactattatgaagaggagtaattaggagtggttaacggttactgagagccgcttcatgctaaggactttgacatgcattttctcattccgtcctcagaacaaccgttgctactttacgggtgcagaaactgaggtttgtagaaaattgcccaagttcacttaggcagagagcactgccctgattccgaaccaggcaggcccacagagagcaagagctcttacccactgtagccttcccagcaatcagtttcttagaaaatgtgtgttttcgccgaacgcggtggctcacgcctgtaatcccagctctttgggaggccgaggcgggtggttcgtttgaggccaggagttcgagaccagccttgccaatatggtgaaaccccgtctctactgaaatacaaaagattagccggccttggtggtgcacgcctgtcgtcccagttgcttgggcggctgaggcacgagaatcgcttgaacctgggaggcggaggttgcagtgagccgagatcgcgccactgcattccagcctgggtgacggaataagactctgtctcaaaaaagaaaaagaaaaaaaaagcgtgttttcatattagctgtgctgtttaatgaaaagattgcaaattcgttgcatgggctccctagaagtgcttagtttggtttacagtattggccttcaaaatgtattgtaaaaatttgaattgattaccaacattttaaacattgagggattgcatgaaaaacccagattccagcatctcttggaaaaccagaatctctgacaacgtgggatccattttccaaaagtgcaaactaggtttgaagtgtggtcgaagccacaccctttagaggaacctagggtgctcctgttcaccacactccccgctgtttgcttttcccatttacattatctggcctcagtaggcatttgaggttgtttatttatcttaaatcattcagtcaacacaaaccagcaagtatttatttatggcttggtcctgctgaaggtatggacaacaatataagcatggaacaaaactgctcttgagtttaaacaacatagtttcgaggctgatgttggctgtttttgaatggggtatatacaaacgagtaaaagtggacagaatttaggaatcatcacaagacgcaggaagcacactggagatgctgccttgaaatctattatccccaagtggtaattcaaaaccactccaggctcattttgacttacc

SEQ ID NO: 1245258 - DNA, 4001 bp, Homo sapiens
gtttgtcttttagctctggatttgagatcatttctacttgtgcataaaagcaatccagatccacatgtactatgactctggatgaagcatttggtgtgggcaacacttgatcatgaactcctgcacaatatgcaaagaaataaaaagaaattcaggctgcttattatctctgagcaactgacagttccttaaaacatggtacctgtgaaggaagaatgcagagtgacgtgttttctcctggattatgtgtgaaagcatcgaaaaattacaaagacatgaaactccacttagggtagggtcttcagtcctcttaattactgtttgtgcactgcgtttttctcaggatagtaataagtttgaagggaaaaaatgtgataaataatggatgatgaaagagctaatactatcacctggaagtttatagtagctcttagtgtaaaccagaaggggcagaaaagttgaaatgacgttgattttcacacagcttgaaaattattctaagcagcatgcccttacatttaaaacaaacaaaccaacaaaaactgaaatacaaaatggcaaaagacaaccagtgggtacaagtgtgggctatttttagctcccatggcagcaggattatctggtttaatgctaaatcgccagtgcctaaaacagtgtctaggacataacagaccaccaataaatattcactaaattgaaagactgaatagttctttgattttaaaaagttgttaggtcattatttgtcggggagggaatgacagaggcgactccttctctcaacactggctaaaaacaagacaggcaaaatacaatacaatattctggttgggatcctggaacagaaaatgaacgttagcagaaaaactggtagaatattaataaagcgtgtagttcaattaatagtattataccaatgttaatttcctagttttgacaaatgtactgagtttatgttaacactagggggatctagctctgcaactttcaggtaaacctaaagttccaaaatttaaaaggccaggcacgatggctaactactgtaatcccaatacttttcgaagctgaggtggaaggatcgcttgtggctggagtttgagaccagcctggacaacacagctacacctgatctaaaaaaatctgaaaatcagccaggtgtggtggcacgtgcctgctgtcccagctactcgggacggagaggctggggcggaggatcacttgagcccaggggttcgaggctgcagggagaccttgtctctaaattaatgaatgaaacaaaaccagcaggaaatgagaaccggtgcctttacatccaggccctgaggtgggcggtacaaggtaaagaccagagctggaagtgggtcaccggagacgtgaccacagcggacctgactccgcctaggttctgagccatcccttcctgccaggactgagatccgggtcccaccttctgccaaatgagcgacaaggtcctcaacttctccaaagttaaaaggcccagaagcctctgcagttttcgtcgggctggctgagggattcccgccccacctcgcccctcacagaggaaaggacggcgcagataaaccctcgacacgtatttgtagtgtggacgcgccccaccctactcctgctgggtgaagccattcctctagaggtacccgccgcgtaacacaaggcagagggaggcagccctctcttagaggagccgagtggggcggggacggtcgcgccccagtggccgccgccccgagcgtccgcctgccccacccttctcatttacacccaaggaggccgctggctcctctggctgcggcgcaccctgcgagctggctgccgcccccacgtccgccagttccatggcccaggcctcggcgtcttcctcgtcgtcgtcgccgccgccttcctcctccggctccacccccagcttctccatcccgccgctgccaaccgcagcgctacttccggccgcttccgcctggtctccagggaaaccgggggactacagtctccagtcgctctgtgcctctcgcctgcgcagtcgtggccgaccagcctgttgcccagagtgacacgcatgccaaggaatcgtggaggcccacgtgcgggagttttttcccgccgggtggaggccggaagcggagagattgaaagcacaaatggctattttttttttttttgagacggagtttcgttcttgttgctcaggctggagtgggcaacagtgacgcaataccggctcactgcaacctctgcctcccggattcaagcgattctcctgcctcagcctcccaagtagctgggattaacaggcatgcgccatcacgcccagctaatttttttgtatttagtagagacgaggtttcaccatgttggtcaggctggtttcgaactcctgtcctcaggtgatccaccctcctaggcctcccaaagtgttgagatcacaggcatgagccactgcgcctggcctttttttttttttcttgaaggctttggagttaggcccacatcacaaattttagcgttttgtctttgttccattcggctgttagcaaacttgcaaatccctagacctgagtgattaatgtgatggggtgggaaggagtgtaactgatagtaaagacacaggtggccttgtaaactcatatgattagcaactatgttaaggtttgctgtgttttgtttgttgttgttttatttaaagacactgtgacgaattcaaccacagaatttttaacatcaaaactgaataggatttgatacatgagtgttgtagtcagacaaaatctccaatccagaccctccatcatgctgtgtgactttgggcaggttacataactgctgtgagcctcagttgctctactcttaaaaaaaaaaaaaagtattgagattgaatgaatggataaaagctaccatatactgtaatatcctaatgtatataaaacatgtggcacataggaagtgctcagtaaatgtctattctccttgccttctattaggataccatgtgtgcatgtgtgtgttggtgtgtgtatgtgtatgttttacaatagaggaaatttggaaattcctccatgcctgtatgtatgtatatacactatatctgtataaatacccaaattaacacatatgtttggttttttatatgattctacttcttatcaaataaaatattagaaccttgagaaaccctttaaagcagccattcccaacctttttggcaccaggggctggtttcatggaagacaatttttccacagacagaagggagggggatggttttgggatgatccaagtgcgttacatttgttgtgcactttatttctattattattacattttaatagataatgaggtagaatcagtgggagccctgagcgtgttttcctgcaactagactgtcccatctggggtgatgggagatagtgatagatcatcaggcattagattctcataagaagcatgcaacctagatccctcgcatgcgagttcacagtagcgttcaggctcctgtgagaatctaatgccgctgctgatctgacaagaagcagtgctcaggcagtcatgccagtagtggagagtggctgtgaatacagatgaagctgcactcccgggcccgctactcacctcctgctatgcggcatggttcttaacaggccagggactggttctggtccatggcctggggactggggacccctgctttaaaggatatgttgatgcatccatgaagaaaagggaataacaagcagagctgggtctcagtggtttggaaacaaaatcttcctctttgcatatttaattcttagatgtctggaccagttctttcaaagtctgctatctaggttataaattacctgttcagagagctaggctgctatctttgtgaaagctgtttgataagtctagatagttgtttggtggtttttcattttatttagttatttatttatttattttgagacagagtctcagtctgtctcccaggttggagtgcagtggtg

SEQ ID NO: 1245259 - DNA, 4001 bp, Homo sapiens
tgcactccagcctgggccatggagtgagagtctgtctcagaaaaataaataaatatttgcacatataaataggcatttgtgttttcttctggtacttttctccttttgtatctttaaaatttttaatctatactccaggaacttatttttgtgacataaaaatctaggtagttttctccaaacagcatgcatttaatttatgaataattcaccttgttttaccaatatgaaacatcaccattatcaagtgctaaattcttacatatatttgggtatttctggatttcctattctgttctgttcatttatgtcttttcagctgttagtaaacaatttgtggaaataacacatgcacattttgatatctggaaaagcaagtctttttccattctgttacaaaaaatcaatttatcacaatgataaaatacatcatgtgcaatttaaagacactaagactttgctatttttatttggcttatgtaaaagtgataaacacagaaaaagctcacatcttaagaaaaacgaaccttcctattcaaagatatgaaccatacttcccatttcagtttccttttaaggttactcagtaaagaacgtatttacatagggcacatcgatataaaatccatattggattttatttgaaaaatatttagcccagaagttgatatattatggggcttagttctcaatatacacctttctatagtgtatagaacattgttttaaaatgtgtacattaaaaataatctgctgcattgacttaattttgcgagttaaatcactttaaaaccgtctattagtgttctataagggaaattataattggattgaaaatcagctaacattttttgtgttgctgtttataaagggacctgggccctgacctctctgaggtttccacacccagggtggtgtggggcctgcggaggaagagaaagcctggctcctccctccctgcgccaggagggtatgtccccatcatccccccatgtcccgcctcctcccatcccaggcccagttacctcttttgcttgtccctcttgttcatgtccgtgtccctgagcatgacgatgagatcctttctggggaccttaccccaccaggcagctctgtggagcttgtccagatcttctcgacggacgtggtacctcggctccatgaaggcgctgtcgtcgtagtctccccaagcgcccacgttgctcttgccgctccccctgcagcaggggaagcagtgacagcaccacttgcccatcttgctcctgagcgtcttcataaaggagttgtcatggtctccagaagtgcccacgttgctcgtgccgctccccctgcagcaggggaagcagtggtggcaacacttgcccatcttgctcctgagcatcttcataaaggagtcgtcgtggtctccagaagtgcccatgttgctcttgccgctccccttgcagcaggggaagcggtggtgaaaccacttgcccatcttgctcctgagatcgaatggcttcttcacagcagaggcagcgggcattgaacaaacctcagtcaccatctgcttttaacagcccggggaggccggtagtagcgaacagatcgcgtctaccaaccagtttcaccaactagcaggaaaccctgggtttccaatctgtttgaagagaaaggtcaatcccagccaaaacttgccaaccccagcaagggagcccagtccaccccacccagggaaaacccacacccacccggggaaagcccacgcccaccagggggacccaacgcccaccccaggaaaggccaagccccccctcccaaggaaacacccagcccagtcaagggaatgccaaacccagcagagaaaaagtcaagcccagcaaaggaatgcgagggaggaaacgccaatccaagcaagaaacaccaggcaaagcgactaacgccaagccaagctaggaacgcaaggccaagcgaggaacgcaaagcgaagcgtacccgttacaggtaagccaagccgttatgcgcgtgcggggcgcgcgtgcggggcgcgcgtgaggcgtgcgcgcctcagacgttacgcggcgtgcgcgtgaggcgtgcgcgcgtcattgcacgtggtgcaggaagtggccgatgtgtgcaatccgggtgcgcaagtcttggcgccacaaatgtcagtgacagccttgcgttactggcaaagttcatgggagttggcccagctttcgggccactgaggagaagcctgtggtgggaaaaagcctcttgaagcaggactggggctagagcgcctggaactcgaagatgctgacagcctcctctgaagaaagcccccaagacactagtggtggtgctgttgcgggtggccgccgctgcagcttagagctctggttggcggagctggatgcaaatggcctcaaaatctccgagcacaagacgcccacggagcccagggcctgcctgaggcgccttccacacctgctcctccttggtccgcacccagaacacagggtcatcagcaacggggcactcggggccacagaatcggggctgggctgctagctcctgctgtggtgccccctgcctggtgtccaaaccagggccaacagctgtggggcttctggcccggggtgcttcgcttcactggcatgcagtagggttgaggtgcaggccgctgtctccaggcctgcaagagggagctgggaggagcacctaccactgatggggagatgcaggaaggcacccccacgtgcagatcctgggaacaggacactgccagcaccagggagccagatcggagcctccctggcagcctgtgagctggacccaggcagtggcacctcgaccctcctgctgggaccctcctgctgtgcaggcttatgtagccaggctccaggctgcttcacccatactgcaggtgctttggtgtgggaggaaaaatgcattctggccgggcactgtggctcacgcctgtaatcccagcactttgggaggctgaggcgggcggatcataaggtcaggagataaagaccatcctggctaacacggtgaaacctcatctctactaaaaatacaaaatactagcgggcatggtggtgggcgcctgtagtcccagctactcgggaggcaggagaatggcgtgaacccgggaggccgagcttgcagtgagccgagatcgcatcactgcaacctgggcgacaaagcaaggctctgtcaaaaaaagagagagagagagagagacggagagaaagagagaaaaatggattctaagcctgggacaccgacctgctcttgccaacaaaagcagaggggaagccaattacaagtgcaaaaaaaaagtttttatttcagtgggatgaatgtctaggtgtgcagtcactggagtaaacgtcactgggacatgatgtgtaattctttgtgtacatcgctgagttctgctgctaatgttgttaagaattggtgtatccatgttcaagagaattaccgggctatagtttacttttttgtactattttgatatcagagtaatgttagcttcataaaatgaattgggaaagattctctattttcagaaaagattgtgtgtattggtgtcaattctttaagcagtacataaaattctttagtaaaaccattttgtcctggagatttctccttcaggagtctttaaaattagaaattaaatgtccttacattttagggctattaaattacctattttagattgggtgagttttgtggtggtttctgcttttcatgaaattggcccattttccccaagttgtcaaatgtatgtgaatggagttgttcatgacgttcctttattatcattttcatgtcttcaaggtctgtaaggatagcccatttcattcatgaaattggtaatttatgacatcccttttttctttatcattattagttaaggtttgtcaattttatagatattttcaaagaaccagctttatttctttgcttttctttgttgttttcttttggctgtttcatttatttctgctcttatc

SEQ ID NO: 1245260 - DNA, 4001 bp, Homo sapiens
aaatgaatcttctatttacgaagtcgaacataaatataaaaagccctcctcgaggtaacataatcagggccatttctccaatcctaacctggcaagagatctgaaatcaacagatgccttaaataatatctcaaacttactattaggcagataagtggcttaaggtaaacattaaataaaatgttaaagctgcccttcactacatgagtactgctccctttaagagagctgttttgagccacctcactaaaaacacagacttagcaaaagtttggatgtggttcatttactttaaagataaattactcgtttcagataatccatctaaatagtaaatcccccttactttactcaaaacaaccaggaatctaaaaattaagtttactctgagtaagggaaccacattagacaatgctaaggattaactacagagtatttaaaagagtaatttcaaactgcagccatctctgaaattacttatacaggtactagacagtcaatctcagcatccggtaggctttccactaaacagaccacaatcctactatggttatcatctcaactcagaacaatttcttggtcccttatgtatcccatgatcttcgcttatatattttgcacactctgcatttttaaaatgcatctcaaaacctattgattttttgatgggtcgctattttggaagattagcaagaatagaaactattttaagttaactgcaatttgtcacttctttcaatacaaacctgcttaactcttttgtcttttctatcgtgacccaaattattttctgaggcttagaaaagtacatataagacgaaaaattcctttctaaatatcaattccgtcgccatcaggaaatgtcagaaactttgtctttttaaaaataaaagcgtcaactctttaaaaacttcagtacctcaaaggaaagctgcactgttaacactgaaggagggctgggtgatttctgaacatccgcattaaagaaatatgctctccaaacctagtaattcctgcggaggccacaccttctaaccttctcgtaatccactaatcaaatcgggagcatctgaaaactgctaccagccaaagtaaaatgacaggtatgtcatcctcaaacaatccaaaaccgggtcggggagcccagacggctagccggggcccaggctgacccccgggcgctcctggaagagcgactctaaggaaacacacctcccgcgcgagcctcttccttcctagagtgacgggggaaggggacaccaggggcagaaacacacccaaaccccacttcaaatcctgccccaccgcttctccttccaaaacagccgcgccactgctgagcccgcaggcgattcgggggcgccgggagaagagagcgaagggcggaaagcgaacttgggcgttactccgggcgtctccctcccccagcggaacctgggcgcgccgtttcctcacggacgcgagattttcccccccgatcgccaccccagcccgcctggggccgccctcgcccaccgtcccctcagccagccagggcccggcccaggcctcgccgccgcccgccctccccggccgctccccgcggactgccaggccaccgcgaggccgggccactcacatccgtctgcgtcctcctgcaggtcctcctgaagcagcgagaggtctgcgccgaggggagagaagaaaggcccggtcagcgccccggggcccggcgcgacgccccccccccgcccgcctcccccccgccccgggggcgccttcccgcgccgggaccccacgccggccccggcccggcagccactcagggctgcggcggagggcgggtgggctcgaggagccgccgccgcccggagaacagggggccacgtacccgccatcttgtggtcgccccctcctccgcggccgcccggggagccggggctacatggagcggcgcgagccggggagccggtggacgcgcgcgggaggggcggcggggaggaggagggccgggctggcgggggcgcgcgcgcggggcgggccgagggcccgggcctgccgcgggcggcgcggctcccggccgcccgggcccccggccgcgccccgccccgccccgcctgcccctccgcgcggctcccgggcgaccggcgctcccgcctcccgcctttcccgctgcttgccgggtcccggcccggcgacgcgcgctcacaccctcctcccgagccgccctcacgccgagcgctgcggacgggggcgcgcaacctgccgccggccgggaccctgcggcgagtgccggaacccggccgggcggggcctcccgcggcccggccgctttattgggtcaccggcctcgcccaccgccctgccagccgcagccatctcggcgggcgcgccgctcgcagccagcgccccatccccaggcctgcacgtacgtcgtcggcgatccggggccgggggcggctccgaggtcgtcggggccggggtcccacctcctcttggaggaagcgccgcctccccacccgcccggggccctcgccaagtggctgctaacaaagcccagggcccggctgcgggatggttgactgacaaagtcatgcctgcctagccagcttcctcgtgcagcacggtgaaggctggggcgccgggtttttactcccacgtcctgccaactcgagctgacaaggcgggcaatccaccagcgggagcgttggcaggcccggggtcagatcctgattcagccagttaattggtaggagtggggcccatttgtagaatgaaggtgataactgcctcgtggggttattggcattaaatgaagaatgtagggaacctagcatggttcttgatgtctaggaggtgctcggtgaagggtgcctatgattcgctttgtcttctaaatacttttggcagcacttgaggtgttaaagtctgtatcccagactttattagtcttgttgttttacgtgacttaagcgattagctcaaacgcccaagtacaaaatggggctaaacccaggttttccgacacgattctacctccatggctctatctccagctccacccaaggcctccaaaatggtgttctcctaaagtgaccaacaaaacaccaagctgtgtcatggtgccactttggcgatgtggtctcttaggagagggaattctaagtagttaattagcttgttcctttctacgttgtagtcttgaccaaggacaatgtgttggcatttaatgccactgaagatttaagagactaaggaatcagatcctctgagattcctaaatctgtgtaataaaatgggttctacacatagctattccaaaaaattcagtcagatattactaacaagatagacagattataatctgtatgaaatttctaggagtaataaaaatcagaatagaccccgtaaccccgagtatgtgtctaattttctcaactataaaataattaaaactaaaggcctttctcttcctcccttggtgaatgcccttatgtgaattcagctgacacactcagaatgacaaaggagttagaaattcacatcaacagcaattggtcccaactgactcaaaccatgagacttctgccctgctaagataccttgtcagtatctaccactttagcaattctgggtaaatgggggaagaaagagccaaatcagctctttttttttttttcattaaaaagcaaattttttttagagccagtcttgccttacgtagcccaggctggagtgcagtggcacaatcatgactcactgtaacctcgaactcctggcctcaagagatcctcccatctcagcctcccaagtaactggaactaaaggcacaggccactccacctggccaatttatttttaaaattttttagggacgtggttctactgtgttgcccaggtgggtcttgaactcctggcctcaagcaatcctctggccttggtctcccaaagcaccaggattacaggtgtgagccaccaaacccggcccaaatcagctctttattctaactggtggtctcacc

SEQ ID NO: 1245261 - DNA, 4001 bp, Homo sapiens
ctctgtctcaaaaaaaaacaaaacaaaactaacaggcaaagaagcaggtacgtgattactcagtgaccagagtcagaagcagagttcttgacaccagctgcctggactccttctctccacccctccaccaggccctcttcataggaagagcagcagacaccttccaatctgcccggacagagaggctgggatcacccagaagaaagaaaaatttcagacgtttttggccttagaatgcagctgtgagacctcatttcctctgaaaactcaccctcccaattatgtctgccttcaacaactgttaaaattaatttcaatttccttagcctaatacaaatacaaagaggaagttggggagaggaacaagacagtctccagagagagtgacttcctatttaaataaggcaggccaggcgccgtggctcagcttgtaatcccagccctttcagaggcccagtggggagggatgcttgaggccaggagttcgagaccagcctgggcaacaaagtgagacaaccccccactcccctgtctctacaaaaaatacaaaaaaaacaattagccgggtgtggtggtgcgcctgtggtcccagctactcgggaggctgagatgggaggatcacctgagcccaggaacgtggagactgcggtgagctgtcatgtcatcatgcacttcagcctggaccacagagcaagaccctctctcaaaacaacaaagaaaaactatacaacatgaaaaaggagggcaggaacggctcctctccacaggcaggcctaggccagtgcccagctgagaggtccctgctaagtacccatgtggaacatcatgcaaggaggcggatctggagattttctctgagattctgtgctccaaccccaccgtttttctggaaaaataatctcaccctaagaagtgacttgcctgcagccacgtaccccatccacggcagagtgggacgctggcccagcagggaggtgtggaccctgctgctcccccggcctcaaccagaaaccccaaaggagaaaccctcttctccgggtgcagcccaggaaagcaagcccccaacttaccagaagagtatccgcaaaatgttggccaccagcagcaccaggcacacgtaggtggagaagccgtcggcgttctgcgtcctgcgaatgtcccgatactgcgggacgtagggcaccacccctccgaagaccatggccgcggccgcgccccaggacaccagctggtgcagtggcaccaggagccagtccaggccctcggcctccatcgcagcgcccgcctggccgaggctgtcacgggctccgcgccccgcgggccaccggccgcctgctcatcgccgctccgcgcgctcctgcggcctcggggcctgcggggagcggggagctgctcgagttccgcccagggaggctggggcggcgcgcacggacccgacccgacccgcgccagccgcaggacccgaggcagagcgggggcgaccggggcccggggcgcgcgaggagcggcccctgcctgggacgggggggtgtctgggggtcccgagacgctcccggagggggctggggaggggtcccagcgccggggtcgaggacgggcgaagcccctggggtcaccgcccgggtgcgcttagccggcgggggtccacgcgcgccccgggatggggtgggggagggggcgcagggcccaggatcggggcgcactgttcgggggagggtcacagggcctagcatgggggcgcacggctcgggggaagggggcgcaggcccaggatgggggcgcacggctcgcgggaggaggtgccgggccggggaccccacaggaccaagccaggggactgaaggccgcgaccaactgccccggccctgcgtcctcggccgccctaggccgccccccgaggaccccgcgccgcccccgcgctccttacctgcgcccccagccccgcgcccagcgccccgcgtccccgcgccgctgacccgcgcgcgtctcggcgtcagtccgctcaggcgccgggaaaccccgccccgtgacgtcacaatgccgggccccgcccacgccggagctgcgcggaggcgccgcggtgtcctagagcgcgctgggcagggcgggcgcaggcggggccgggagccggggctgtcggggcggtgggggcgcgtggctcctcccgcccggtcgggaaataccagccgggcggggccggtccctcaggcctggcgcccacgttaacccgtctccagctgtcccggcgcgcggccatccaagcggagggcgtcgtcctggagggccgggggcgcggggtccggacgcccctctcacgcgtgtcctgaatgcgggccacccggggacgagtctcgtccagctctgtcctgacccaggagacccggggacccggctcggagtttgcagcgcccagaggcggccggggtctcgggaaacggagcgccccccgcgggtctccgctccgatgcaagtgccccacgagcagatgcgccggggccgtcgccggggggccggctggacgcgcggccgtcaccgtggccattgtcattatcgtggttgcggccacggtcgctgtcgctgcagaaacgcggggcggcctctccccatccccgtgtagttctccgggctgaaccgttgggcgcctatttgcagaaaaggcagctcctgagcctcaagacagactcgggggccaggcgtgcgtgaagcccgggccctgctgccggcctcgcgtgccaagccaactccgagccccacacccgcccgcggggagctgccctcgcccgggaccctcttggcccgcgcgggtgaggactgagggcgaggggcgcgtggatgaggggcgcgcgggtgaagagtgaggggagcgcgggtgaagtgtgaggggagcgcgggtgaggggtgaggggcgcgcgggtgaggggtgaggggagcgcgggtgaggggtgaggggtgaggggagcgtgggtgaggggtgaggggtgagtgatgcgcgagtgaagggtgaggggcgcctgggtgaggggtgaggggtgaggggcgcgccggtgaagggtgaggggagcgtgggtgaggggtgaagggtgcgcgagtgatgggcgggtgtgtgtagggtgagggacgcgtgggtgaggggcgcgggggtgtgaggcgaggggtgcacgggtaaggggcgagccgcgaggttgaggggtccacgctgagggttgcttccccgccagccgcggcctcttctccacgatcccggccccctgccccctgccccctgcccgactggttttatgggggatcataaggacagtcaccacctaactaggagcaaatccccaacaatcgaggaaacagggcgctcctgccttgcgcccccaggctggcgttggaacttctttagagccagcgctgcggagccccagcaccaggaacgtagaggtgagtaaaaggcacagcaggaagcctgggagagaaaaagcagctgcccctgctcagccgcgccctagcctgagcccagcagcctttgggatcatctgtcctctctgccctggaggttggagtaagctccggacctccttgaccctcacgggagcactggggtcccagacgctatcctcggttatcttaaatccagaggctgtggaggcatggggcaaattgtgcccgcagcctggggcctagagctgcatctgtgcacggggcctccaggagcccggctcagtggacgaaatctggcatgctcggacgtcaccccacaggcctcacgcctcagaggcaccccgaaaggtgagttgatgactgcagagtgagtttgtaccttttcgaacaccacctgccgggggtccgagcccccacccccagtctacatcagccaatcacagctcattgcaggtgctgcgcttgtcacatagcttcctgcaaacaagagaagccgaccaagccatgcacagctggaaaatggcccttataaagccatcaagtcctaatccaggcaacctgtaaatattacctcg

SEQ ID NO: 1245262 - DNA, 4001 bp, Homo sapiens
aatgtatctttaaaaatgcccactataggtatttttatatccttacccttttaccgcttattacaaaggaaccatcaatcagttctacagcactcttaaaacatgttaaatgagccaatgtggtttcttattacaccctagtcttctcctattactccctttattttaggctctaaaacttggccattagtttctaaccatatgctacatgctatgctggggattatataactttttgtttttatcaaaatggtacccttttggtttaagctacatcaggctttccttaaatttataattctaaaaaaattacttgcaaaacagaagcaaaactagtgggcccaattaaatagaaaaatacttttaaaacgattcttcttctagtgttttttttttaccacttacatctgttagatttataatgaaagtgaattatttccttctttaacaaagaaagtcagaaaatatagacactgctagacttagaaacgtactgtgtattctcatagctactgtctcaatttccaaagtacacaacaaacatgctcatgaaattgagagaataaaaatatccgatcctttgaattcataggctaggccttagaagatttggggtaatagatcttgtgtcactagggcacttttgtcctctttaatttttataaatcactaaaattattgaacgtagttaaaacttggcagcagtattactcctaccctgagtattttttaagtttttcagtaatgtggatacataaatctaaggtagggtgtaatctctcaaggaacttccagcattattttttaagtggccaaaaaagtggaagttcttggacttttgagcctctacaaggctgggaaatattgggacaattttgggattttttttttttttcccgagacggagtttcgcttttgttgcccaggctggagtgcaatggcacgatctcggctcaccgcaacctctgcctcccaggttcaagcgattctcccgcctcagcctcccgagtagctgggattacaggcatgcgccaccacgcctggctaattttgtatttttagtagagacggagtttctccatgttggtcaggctggtctcaaactcccgacctcaggtgatccgccctcctgggccttccaaagtgctgggattacaggtgtgagccactgcgcccagcaattttgggatatttttaacgcgtgtgtttgaactgtgtttttaatcatttcttcatcaacaaaagtttaattttatattgatttagtccgtatttggggagcaggtgtggccaacttttattttttattgtaactgttattaaaaaacagttcccaacatgaagcaactgttaacttttccaggggtctctgaactaccaaggaactggaccacgagcgttcaataggtaggctgttacagattagaagctttccctattgtcaatcacatcattaacgtccctacacacacacacacacacacagagacacacacacacacacacacacacccacacacacaccctagttttgcgtctgtagctaccatgaaacagaggcagttgaacagcagagataggggaaatctactaacttttactctgcccacttccggcccaaatctagaagtctgtctccctaaataaaaagaacaaagtaattttcacaagtgtgggaatctcctctcttgagctcctaggatggaaaggtgggctggggcagcagggtaacgatggcctgacaggtcagagcggggaatagtccggtaatagttgcttcctcaccgcggtggatcctttcttcaccgcttcctgggcatattcaacttgaaaaaggtgtccgtctggggagaagacagtgatcgccctgtcatatcgagacgccatcgcacaggactacaagggcttgccaccgagcttcccgctgctgcagctgaggcaagcggggagccgccgccaacacagcgtgctaccgcccggaagcgcttccacacgcgcctcaagctgcctcccggaagtccccgcgcccgcgcttcggctgcttcacggaagtccttgctcctttggctgcctgcggatgtcctcgcgcttgccagcctttgtcacccaagcagtgcctgtgagttgacggcattcttcccttacccttcatgtctgacgcatagcgcatatctccatttccccactaccgtgttgccccagggatggtgtcacggcactcgagttataaaaataatatcaaagattagggcttaaaaatgaggtcttcaaatatcagatatttttgttatcgcatacatgttggagaaactgtggtaagttaaatatcagtcccttccctttggtttcaaattctaaatttcctactttttctttctctctctcaggttaactcttgttatttgaaccgaaggaaagaaagcaaacttcaaaatattgttgcttctgatattttctgccttgtgagcaaaatagagcagatgagcaaatggtccgttaaataaagcaaatagtccatcaaactaagctaatgatgagaattaagataatgttcttttttttgttttgttttgttttttgttttttgagacggagtctcgctctgtcgcccaggctggagtgcagtggtgcaatctcggctcactgcaagctccacctcccgggttcacgccattctcctgcctcagcctccggagcagctgggactacaggcgcccgccaccacgcccggctaattttttatatttttagtagagactgggtttcaccgtgttagccaggatggtcttgatctcctgacctcgtgatccgcctgcctcggcctcccaaagtgctgggattacaggcgtgagccaccgcgcccggcccagataatattcttttaattggagaaattttgtaaaagcccaaagtatgagacttaaaagatgtctggaaatttagctatagcagaaactctttacaacttgctacattactaactatgaaacaactctgtcgctttctccttatcaataaaatgggaatattaaaaaatctgcagcagagtattctgagcttaatatgtgtttatgggcataattacataaaatggtgcctggtgggcagtaatagccaggtaagtttagctattattgctttccatgtgttgtttaatatatgcagttttccactggggaggatcttaaagttggtgaaatcaactttaaccaaaaaaaagaaaaaaagaataatttcctcaaaagaggaaaaatttgattccctgaattccaaatacttaaatcagaattttaattgacttaaacaatttatttaattattaatacttttttttttaacgtagggacttggtttccctatgttgcccaggctggtctcaaactcctggtctcaagcaatcctcctgccttggcatccgaaagtactgcgattacaggtgtgagccaccacacctggcctttagttgactcttgaagcagtttgtacttattgcccctccattgcttttcttcagtattacagtcttgacaagtttggtttgactgcaaaaaaccagtaattcctaatgaaaacaattcactctaactggttactttacattattatgataaaccaacatttgtccaaagtggtttcttgagaagtgttttggtgtactcgttaaattatgtttcctttttattttgaaatagttatagattgacaggaagtttcaaatacggtaagaagaggtctcctatatccttcaccccatttcctccaatggtaatattttatgtacgtataatatggtaacaaaaccaggaaactgacattggtgtaatgcacagagttttttcagattttgccagttttatatacacacctgtgtgtatgtggcggggaggcctatgcaatttatcatgtatagattggtataatgactatcataatcaagatacagagctgtttcacaaccacaaagatctgtggcgttgacttgcaagacatacccatctctc

SEQ ID NO: 1245263 - DNA, 4001 bp, Homo sapiens
aggctatcccccaagtatccttttaatgtagctcctcctttgcattcttccaacaactccttttgttttctgtccttcgggtgttccctcagcatgttctcccacttttcactgttgtcacctaccaattgcctagttacctcctgcaattcccttctcaacgattttgctacttgggttaaactcttctgtaccatccttcttttcctcacaatattgtattattcccatcagcacgtaaacatgctctaatatctttcattctaaaaggctctcccttgaccccacatagccctctaactgcaacctcatttcttgtttctctatgtagcaaaaattctccaagtcgtccacgaaaacataagcagaaactttatctcttattaaaaaaaagttttttgagacagggtctcactctgtcgcccaggctggagtgcagtggcacgatttcagctcactgcagcctctgcttcctgggctcaagtgatcctcccacctcagcttcccgagtagctgagatacaggtgcaggaaaccacacctggctaatttttatttatttttttgtagagatgaggtatcactatgtcgcccaggctggtcttgaactcctgagctcaagcgatcctcctgtactcggccttctaaagtgctgggattacaggcatgagccatcatgcctgtctctgaattaatgactgaatatatattatacaacccaaatctttaacttgttttctatcattcattcaacccactccaatatggctttcctcttcaccacttcactggtaactgtttgtccaggtgaccatcattaacatgtcgctaaatccaaacatacactttcttcaccttacacatctctgggctacttttgacatggccactccctcctttttgaaacactcttctctggggctgtgtgttttatatgtaatgaataaggatgacacttccagctctctccagccttataccactccaaacagtgcattttccaatggtgccttctgggttcacagggcctacagcctattctctctcaatgtgtcattccaaattcttggcagtcttcaagtccccctgcttactgactctgttttagacatccatctttctgaaacgcctactttcccctactcccagcccacgggccctccatcttttgcatactactttctctataaagcctttcttaacaagccatctgtccctcccctcccaattatctcaggacctttctataccctttcaagcttctagcctagcatttattgctcttagattacatgtttccaactacagtgtaaattctttgagggcacgcacctagtcttattctaatactcgcacataacagactttattaaaacaatgaatgaatataaagagcgataaaactgcgctaactaccggcaagagttaatgtttattgccctatcagtagttctccggttaacaacgataatatgctagcttaagactaattctaaaactagtcgtagaaagactttctaggataaaactgaaggatgccctgcaaaacataagtacagtgtatctagaacgtacgaacacatcacgttttacaggaaacagagactacaaattgtagacttgactacgtttggttttacagccgacaaaggttctgtttggacggctgcctccggctacaacctccctgttttttccggccgaaaacatgaaatagaaactagtgccctatttctcccaaggcaccgccaaacaccccgcgtcggggtggcgacaccgcaggggcctcgggaggcggcagccccgagcgcaaatggagactcaccattaggagggtgaagccggcaaggtcgggggccgactccccgcagggaacgaacatggtcgcagtggggtggccagcagggactaaccgcggccctggcaagaacgagggcagcaagaaggcggaagcccgagaccccggagcctcgcggggcgcgggagggtcctttgagtccctgggcgccgggcccttgaggcccgtccagctaactgccggttcagagggcggaaagaggccgccgggtggccgcgaagaggggccagcagcgctttcggagaccctggcaagcaaggcgatggggtgcgctgaggtctcggggtgcggggcccgcggggaggtggagcggcgggcggaaacgatcaggcagcgtgcgggccagccccaagccctgtttgtccgccactgtttgaaaacagttggcgccgccgccgccggggcctcatttccaggtcagcccccggcctgacgcggcgttgcgtcccccgggagctgcgctaggcgaacggctgcggcgctttgtgctccagtcgctcctaacgctccctggcccggccggggccgcgcagttagggcatctgaggcggggagaagcggcggggagacgccggctgccagcatgtcgctgcctccggagaaagcctccgagctgaagcagctcatccaccagcagctgagcaaggtgagagtcgcgggtgctgggagagaccgccgggccgacccataacctttccctcctgcccggcggccccgggccgacagcggcatctgcttgccgggactgtagcgaggattgtggggtgcgcaacgcagagtaggcagagctttgagtttgaggcaggagagcgtcctcgtctccgagaaagaaaacgagccgagcaggtgctagcaagagtctggggcgatagaacgagcggtcttggcgttttaggacggccgtgagaatgaagcgcttagcgagcgacttctggaagtcggatcgagtgtaagttgtatttggaggtttatattctgctgtaagatatcaggttttttttctttcttgagacggagtctctctgttgcccaggctggagtgcagtggcacgatctcggctcactgcaacctccgcctcccaggtttaagcgattctccgcctcagcctcccgagtagctgggattacaggcgcgcgccaccacgctcggctaatttttgtatttttagtagagacggtttcaccatgttggtgtggctggtcccgaactcctgacttcgtgatccggccgcctcggcctcctaaagtgctgggattacaggcgtgagcctccgcgcccggcagatatcagggtttctttaccgctgaaacatgtgggtatcagcgaagttgaaccaggagcttcaatcagcaattctcaaataagtcatggaagagaagttactaaagggtttgtaatgacggaatttgttaatatttcggagctccagaagaacctccagtttctgcagcgctcgctcgactgagtgcaagatgctgaagtgataaaagcgaccatttatggtgcccttgtgtgccaggctttgtgctgtctagtatctttaatcctcacaacactatcgtgagagggcactacactaggtttttccattcttatcggtgacgaaacagatttataaagggtaaataagttggcttgaggttacacatctactaagttgaaagctggtaagattcccttatcattaggcagatcaaagtatgaaagtaataagatcatactttgatctgcctactcccagtccgtgttcttctgattatactatactccctctcagaagattccttttggttgagtgttgtttgtggagaaatggtaacaaaggtgccagataaccagtggagactatttctagaatttgtactcaaaagattcattctttaaaagcttacctttgttcccattcaattgtggtaacaattgtgcatttactgttagctggagaaccttaaaacttcagaagcagtatttgactgctttgtgatgttataaattgtaatatgagttttctacatagatggatgtccatggtagaataagagaaatccttgctgagactatacgggaagaattggcacctgatcaacagcatttatcaacagaagatttgatcaaagcccttagacgtcgaggaatcattgac

SEQ ID NO: 1245264 - DNA, 4001 bp, Homo sapiens
taactgtcttgtgatacagtgcagtaatgtctccctctcaaaatgtgtatatgttaaaaaaaatcatcactcaaggaaaatcctagtgttgcaaatttgtttttaagaatgtatcttttggccgggcacagtggctcacacctgtaatcccagcgcttttggaggctgaggcgggtggaccactgaagtcaggagtttgagaccagcctggccaacatggtaaaaccctgtctttactaaaaatacaaaaattagccaggcatggtagcgtgtgcctgtaatcccagctactcgggaggccgaggcacgagaatcatctcaacccaggaggcggaagttgcagtgagctgaaatcgcggcactgaccctagcctgggagacagggtgagactctgtctcaattaaaaaaaaaaaaaaaatgcatctttttccattgattagagggatgactaaaaaaagaagaatgcatcttttaaaagataaagtttggatttcctttactcacttcctccttccctgtattgttgtcttcaagatttatttactgctctatgccagggttagcaggttaatggctcatagattcctcagtttattaacccatttatcttgtttactggtgggtaaggcaaagataaaaatgtgtttggctgtagttgtccaagtgcaatgggcagcagtatcccataaggccaggaggtggtagtgttgtccataaaagtagaccttcattttttttcctggattgttcaaaatattttaaaccagtctgtatttgcaaaatccacacaggataaacttttgaaatagcaaaatttgggaatgtttgtctgtttttaatcaagaggacagagatatatttatatgtatatagtgtcacacataaggaattacatgtttgcctctctgggctttggcacacatagatactgcattgctacaaatgagattatgaacctataattaagtgatgctactttaaggggttgttttgtctctctcgtactgaaattataataagttgcctggggagctttcttctcctctttcaatttattatttatttttttgagacagactctcgctctgtcccccaggctggagtgcagtggtgtgatcttggctcattgcaacttccacctcccaggttcaagcgattctcctgcctcagcctcccgggtagctgggattacaagcgtgcgtcaccacactcggctaattttctttgtatttttagtagagacagggtttccccatgttggccaggctggtctcgaactcctgacctcagtgatctgcccgcctcagcctcccaaagtgctgggattacaggcctaagccactgcgcacggccctctttcaatttcttaattttccttttcgtcctgttgcttttctccctcctccccattcccagctgtatgtaagatggtatctcattttaatagactgttgttatttaaatagactgttgtagtttctaccgcaagatgcaattgttgagagcgtgatttctaacattttacataaaactgccgtaaaaggtttactggaacttaatatacattgcctatttggttgatgctttcaacactctgtagggctttcacacaggactagcctcagtggaattttatcgattaaattaatctaccaatgggtgattaagaattatctgttttattgcatatttaataggttgggggggcggaattctttctttctacggctaattgccctcagttcaattttaccactgtgatattcattccacatgctctgatgagtgtggtacttgagacattaccttagtgagggaagggaccaatgttacaaatgaatccggaaggacgctaaaactaacacctgcaaattatgtacatgtttatattccaggcgctggtttagcttttgggagaagtcagtgaggaaaacccgtaaagatccccgtctttacggtgcttaccctgaagatgggagtggagagggaggtattcaaccagcaagaaatcggaaaacgcgcagagcggccgcggggtcacgggaaactgccggaggctttcagggcccagggcccggcggggaggcttcagcgggcctgcattttcttaggcatccgctccaggcgggttcaagttttcaaccagaccttcggcgatccagcgcctagggaacgtcaatgcgggtgacttctcccgctgtgcagggcggtgacccgggttggcgcgcccagttccccgccagagtcggccggggacttccctgataaatgcgacaccctcttgcccctgcgccccccgaccgcgcgcccggccccgcgtgtcccccacgccccacaaccctgcacgccctacccggccgcgcatcccctccggaccgtgcgtcgccgccctcaccattgcgcccccagctgtgtgtcccttgcgaccgggccccccgaccgggcgtcaccgcctgcgactctgagagccctgcgggctagagaccgtgcggccatctcgcctcgaggcgaggccctcctgcctggtcctcacctccagagcgtgcatcccccggcccgtgcggccccctaaggggcgggcgctgggcggcgctggacggcgcgaggcggggcggggcggggcggggcgccggacgccatcgcgtcgctaccggccggcggctgtctgaccgggactgcagccgtgtcctcgccgccctcctcttgcccacgcctcccgggcactcgcctggtcccggcggcggcgcgcgcggccgcgttgggcggcggcggttccggggatggtgaggcggcggcgcgcgacgacgatgctccggagctgaggagacgccggcacacggcgcgactgccgagcgcagcgcccacccgcgggatggctcaggcggctggcccggcgggcggcggggagccgcggactgaggcagtgggcggcgaggggccgcgggagcccggggcagccggcggcgcggccgggggctcccgggacgcgctgagcctggaggagatcctgcggctgtacaaccagcccatcaacgaggagcaggcgtgggccgtgtgctaccagtgctgcggttccctgcgcgccgccgcccgccgccgccagccccgccaccgtgtgcgctcggccgcgcagatccgcgtctggagggacggcgccgtcaccctggcgcccgcggccgacgacgcgggagagccgcccccagttgcgggtgaggccgccgggcccctttccctcgtagttcttggaacacccgcggctgggccgccttaccctcagcgtccccggcccttccgcccccgccgtccccccccattttgccacgggagacccccgggaggatccggcggggacccgcaggggaggacggcgtcaggccgtggctggccggggcccctcggaggtcagagcctcgtggcgggcgacggcgcaaatccgctgtgcggaggacgtttgggtgggcctgggcctgcgggccgcggggcgctcgtcattgtgctgcccgcgggacagctgcccgcggcgcgtttgggagcggtgggctgggccctgctccgggccagcggcctgtgcgcctcacgccgtggctgctgacacacggccgggttcacggggtggggagggcatcgcaggcttcacgcgggggctccgcacggatcctcagtgccgctgtcggaaacaccgcactcctcacgggaaactagcagtattccacattagacagcctttcctcggttcggaaatgtaaagatgattctgaaccgtgagaattctgctctttggggagaaatggaaaaatagactaaatagtgatttttggctcctggacgttagaaaatactgattgcattcctgtatgtgaaaatttgttgtgatgaaaaacaggcttgtaaagtgaaaagttgacaggatgtcgggatacaaagagaaaatgggccttagttacgtcattgtctaatgtaaaattttcaggattatgacctaaacagtaatttatagcca

SEQ ID NO: 1245265 - DNA, 4001 bp, Homo sapiens
tgtttgtactggctgtgaagatattaaaatactgcaaactctgtggcctggaaccctgtcttcaccctgtcaccctctccgctaagacctccccgtatccagcatccctggcatggggctgaggggtggaggctggtggggaggggcttagcgcccgcctggccttagccttgccagtgctaaaactgtggctaaatactgaggattgtgttgtttggttgggtttgtttgtttgttcgtttttgagacaaacacaaatcactctgtcgtccaggctggagtgcagtgatgtgatcatagctcactgcaacctcaaactcctggcctcaagcaatcctcttgcctcagcctcccaagtaactatatctacaggcatgcaccaccatgcccagctaatttttaagatttttttgtagagacagacagagtctcactatgttgcccagggtggtctcgaactcctggcctcaagcaatcctcctacctcggcctcccaacgtgctgggatcacaggcatgagccactgtgcctgaactaaatactgttagtatcacgtctgcctccttctccttatgtctccacgaaccagttcctctgctgacttccttatttctggggcccacatctcattctccagtttgtattatacagagcctttttcccacagtgcctgccatgggatcccccagtcctccattctacctgaaaaactcgcaagcctcccgtgagagccatctgtggtgcccttggttcctctgtgaggctgccaccaccctgcaccctagggtgagtagtgccccagaaggacctcacaaactccagtgaagggactcacaggcacagtctcaactgtgtccctgaggtccccagccaggtttctctaccctgcagcccacgtggggtagagggaccatctaggcagctgtgaagctacctgggtgggtggtggggggaggcaagcaggagccccagtaaggagtcagggccccttggcagctgcggtcaactttgaggtttgcagcctcctgctcctgtcttaaagggatgaggacagctcctctgaatgagggggcatggaccttgaggggcacctggggagtgagaggacagagggaagaggactagacagaggagggggacaggcagacctgctccctccaggctgggctggccctaccgggctgggtggggtaccccctccagcttatagggtctcccacaccatcagccccgctatggggcctggacggaagggctggggcaatggcctggggagggggctcgggaaacaaggctgtagaacagggaaagctccagcaaagggaagccctctatgctgtacgtttcctggaaaggacgatcccggggggcagctgctgctgtcaacccggtaaagctcacaagcccccacaccagatccccccagatcctctcacggctcagctccagggaccggcagagactctccccggacgggtctcgcctccctaagggtctctgcttcgcctgtgagaggaggggttgatgtcctgactctaaggtgtctcggctctctgcgtcctcaggagcacgcgctgctgggggcgcgggcggcagagggtgggccctggagtccgagcccccgggactcgcgggcacgcggtgggtagcgggggacagagagggaacagcagcccggcgtccgctccaagtctgcccctcgagcagtggggctggggccccgatcccttcacgcgcgagctccgccaagcccccgggcgcgcggtcaccgagtggcgccggagctggggagccccccacgcccgccgcgttggcctcccgcccgggccgggtcctgagccccgcgatccgctgtcggccccacgacttacccaaaagtttcccttgaacagtgagcgcgtcatcgcagcgcgagtgggggcgcggaggagagccgggccgcaggtagcacagagcggggaggcctgactgccactgcccgcggctccgcagactcaacttctgcgttccacactcgcgcagggaagccgcccccgggtcctaaaccactcccgattgcgacggccgccgtcggcgctctgcgctccctgcgcgagacctgggcgggaccctcggcgctcacccggccaggggctgcagcccgcacccggacccaggcccatttaaagccccacagcgtcgggccacgatcaatatatcagcccgaagctagctgcctccttctggaagtctttgggtattggaaataactggtcctggcttgggttcctgcccacaaggccccctggacagcacgaaatccaggctctgcggggtgatagacgggatctgatcagatggtcgcgaggacccggtttaagctacagaaggcctggggccgacaactcccgcagacgccttggcttcacggcgggccccaccggcacctgctgcagatcaggccctgggggacggttcattttttattttactttttgttgttgcaggtgtttttaatgaatggggtcacgttttagtctaaaatgtcatggagaggtcatctctgctgtttccccttgactctagtcacttggtggtgtcctaacagggcttccaggagctcagccgctctctgactccctttccattctcaaaaggcaagacccttccctgcccattccaccccagcaagaggggcccaagattccttcttctccctccactcttccaccctcacaaataaaaccccagggcaggtcagacccctctctgcattgtagtagattggtacaaaagtaattgcggtttttgccatgacttttaatagtaatgcagggcttatgacaaagtactgcctggtgcgacaggcccgaagcccaacctgaggcccagaggggttgaatggcttgcccaagatcacagtttatttaagggatgaagagctcaaggttagagctctgcccttctaaatagatgcaaagacagacatccttcctggggcagatccatcctgggcagaggaataggtgctcaaagtggggaggataaaggtcaaggttgccaagactggcaccagcccagcctggagaagcaagcactcacccctggagcaggttctagctacacccagacacagtgaaagggcaattgctagaattatgtgaagcacctggaacaagttctgctccataaaactgcagccagccccactcagatgaactcccaccaataaagtcatccacaactgcaaagatggagaggtggcctccagccaccaagcatctccaagggatgcatccatttacgtacttgctcatatcctttgaaagcagtgagattagaaggaaggcagagaagcctggcagaaccatcaaggggcagcagaggacgtggtaggcactaggaagctaggcttaactgcagggggtaagaaatggcacaaactggggacatagaagcgggagagctgaagacaccactaaggtttttcctggaagttttaaatattctggaaaaatagtttagatacaattctaattgtcacattttaatttttaatacatgtataattttaagttattagaacgtttcacaagctctcacagtacattgtgcttgattttcgcgactcagactctaagctccctgaattttaaccctcttccgccatctggtgacaaagtttttaattgcaaatggtcatccacgctgctggaaaatattcttcattcctcaaacagctcatctctggggcaggtattgtgagtaaaaaaacaaacaaagtgtgtgctatatccaagggacatatttaggatattttactaacttctgtggtttgaatgttgccccctccaagaattcttgttgaaacttaatctgaaatgagacagtattgagagaggtaggatctttaagaggtgattgggtcacgagggccactagtcccattcatggattaatgggttagtagattaatgggttatcaggagatgaaactggtggctttatgctttataagaaga

SEQ ID NO: 1245266 - DNA, 4001 bp, Homo sapiens
gatttccttatctttttgaaaatgcatgtgaaatctccagtggatgcgagttaagttcatttttctggaaagaggaatcacaattctcattgaattttcaaggatattaatgataccaaagaaaattaaatttcttaaaccaaaatgttaagctgaattaagttatattcacttttctcttttcaaatctatttcgatatataacctatcccttagagagacagcagcctctgctaaaacaaatgtaactggagaagatgcagctggcaggctctctcacatgaagattcctaccagaatttgcgtttcagattgtctataattggaagagtccttaccagcattctttaaaacttagatccctattctaacatactctgtatcatgggaatcagaatatttatacttcccactaatgtgttcaagaagaaaacgttactttctgaacacatttttcactgccatctaattaaatggaaaggggaaaaacccaggatcatccatttacaggaaagcccgtcttttactttacacagagagaaccaaacatcagaagcagcattaacttaaccgtcaccaaattcaatcttgggaataatacgacaaggattaaacgaaggggaaagcagttacatcattttaaaagagataaagttttgtttgaattaaaaggtagtctagttgacataaaaaaagcgaatcacaggtgtttatactacatattgcatctatgtgagctgaacaggcacgattagggcgataggcatcggaacaccgtgcccccggggaggggatgagggcactttctcagggcaaggaaaggctattttgatttgagggggcttgcaagaggggattcatttgtgacacccgtctgggagcacacatgaaagctgcgtttcactgtagggaaagtatacctcagtaaggaaaactataaagagaatgacacgctatcactggacgaacacaagcaaagcctctttcgttccgggaaggttctatgggggccgaacccacgctgggcgctgctgggccacgggggaaaatgaagacggagggtcccgagagcgctgccctcgccagaggccacgagccacccccaaccaccgcggctccgccaggagagcgagcttcgcctcgcagagggctgcggcggccggcccggcgcccagagcggcctgctcccacaggtcctgcgcgggcgccagctggacccggacgccgcggcccggctcgcccgcccccgccctcaccgctcccggggacgccagctgcccacccggccacaaaacacccggccagagaaagagctgtccgcgagcaagaaccaagcacagcggcgtgggagctacggcgaagctgcggcccgggggcgcgcgcccgagcgcccccacggctttcccaaggacccccagacccgggccgcgcaacgctggtggcgcatccacgcgctccccaagaagccgctgtggcaccgccctccagaactaactgcgcttgcgctaaccatgagctgctcagctcaagtatgctttttttttttttttttttaaaccaaaaggagcaagagagcggtcagcgcaggcgcgcccctgacgcggaccgcgccgccacttccgccccgagcgagaggctagaggcgagaggcgggggaggcgggagggaccctgcggacagggcacgagtccgggtctcggaggaggtcggcgactgccgcgtgggtccgcgactcaccaagtacagcggctgccagcgacgctgagtatccaactcttcgaactcccgctcgatggtggtgggcatggctgcgggagcgagctggcgcgagcagagcctgcgccggcggagaggctcaggccccgcacgatccggggagagcgctggcgctgcggcgcatgcgcgctgcgcgccgcgccccgcccccacgccaagccctgtcggccgtggggaaagtacctggagcgtcggacgtcagcgcgcagactcggcgcccgagcgcggcgcgaagtcggcggcggggcggggcggggcgctcggggggcggggctcggggtgcccaggtgggagggggcggggccaggggaccacccggcggccgtggtccctgcgcgcggcacgaggtgagccgccccttgggcttgcgtcttccgacaagagagaggcggtggtccgtgggtagcgcggggttactggaatgggactccctgaggaagtcccctgagaagtcgccggcacgctccgccttccttcttgcttcccatttctcgttttcttctcagccttcatagttttttaaagtgctgtatttgaatattattttaaacatcatctaggtcagattagcggcctgtgaccaacttggaaacaaattcctcattcttttctgccctggtgtcagctcctgtaagcctgcagattttatgccaaataaaccgctggagcaaaaggaaaggcagccagcctctcccggaatttgggagagggataccttgttaagaaaacgttctacaacttacgaattagatttaactgtaaaaaatagcacgtcctcttttaccaaacaaacgtactagttagggaaatcatcttgcttcagatttaagatagttcttttttagtgcttgtaatatcctgctatataatcttcataagaaacgtgaagggttaggaaaggtttagccgtgctgtccagtattgggatttaaattttaaatattaacttaattcctcagtggcaccagccacatttcaggtgtgccataaccatgtatggctagtggctgctatgtggcaaagtacatatgtagaacgtttctatcatcgaagacagttcttttggacagagccggccgagaggattacaatacttggggcagaaaagtgtccttaatcacataaaataatgaaaaccctagccagaaaaaaaaaaaaaaaagttggctacggaagctagaagaaatcgtattaacaaaaaagcagtcagcaagctttctacttacatagtatgatttagagatacaggaaagcttcccccgaaagaccccacaatgtctaatggtccttggttctgaaattctgtcattgaatctgattattttgattaaaggcatggtatctcccagaatatcctgtgaatgttcgcattagtctgctcatcagattgctttccaaccaaaaaatactgtgttctacaaaggaggagcatctttatctcaaagcagcagttcttatcgccaagtattcagcatctctttggaattcatttgtcagcctctctggttccgggagctgtatttgcctatcttagtttgctgagtgcagcgaagaatctagaacagtggttctcacaccagcatcatttgcatccagtgtgagcttctttgaaatgcaaatttgaaggcctcaccccaaactactgaatcagaatctctggtgttggggccccaggagactacttaagcaagctctcctggggatgcctgtgcccccccagagtttgagaatgattgctccagaagaatacctatacagggctgcactgaagcccgggggtaaaaagaaaacagaggttaacttgcttcgagatatcctgctgacaagatatgacttggtctctccgacatatgtgactcccaacccaactagttcctagcttgctgtttctaaaggaccccaaatgtagacttttgccccttttgaagtcaagatcagaagttctcaggattttaaaatgtcaggcttccctattgcccccaaattgttcaaagtcctttgatagtaggcatacttttatgtgcatactgtttatatatttgaggaaatatataatgaacaaagtctattaatttaaaaaattacaaattcatttaaaagaattatgaaattaagtagcaaagtgtatttttaaataatagtacatatatgtatgagatactcattttacagataatgcttggtggattacatatttggattcatagcaatgtcttcaacttact

SEQ ID NO: 1245267 - DNA, 4001 bp, Homo sapiens
aaacctacacgttccactccttctctgaggccaactgtgatcaagggtcctgcagatcagcaacacacaagacacaactaatgtgcctgtgagtccagagctccagcagccaatggtcctggaccccaagaaaataaaaaggtttccacgcaccggaggaccaaaggtttttactgcttaaaatatgctctttactgtttatgaaagtcctcttcattaaattcttaaaaagcccaacttactcattcaactcacttgttcccaaacgcagagacctattttgcaaaaaccaagtttaagaccaaagagcaggcttttttattaaagaaaaagaaagcccaccgcccccactgcatgtggaccttaatgaaactaatctaataaacactagaaagaaggtgtgcaaatgggccagcatttgccgtctatccacctgtgtcacccaggtaataaaggtcatcctggttgtaaacccctgtgacagcgtgccgggttcgcccccacgccggacccccgactccgatccacagatcctctccgtgaggggttcctctgggcttagaacgcccccgcgcgcgcgtgcaggcacacacgcgcacacactcacacgcttgctcgcacaccgccagtgcctctccttcccacctgggacccccgggcagccgggctggatgaacaagttgcagctggccgcggcgctccgctagggggacgagggtggggagggggagcccagcggggcgcagggccgtggccagggcctggggacctgcccgcttccctccgcggccgccaagccctaccgctgggaccggcgaggaactccccccagcctctccgcagacgctgcacgaccgcggggacctcccggggtcgccagccgcgccgggcagggggcgacagggagggcagggcaccgggagatcgccgccgccggagcggccgccagttcccggcgatcgctgcgggcgcagccgaacaccagcggcctgggcccggccgctgctcggggtcggcggggaccgcgcagcgcctacgccaggcggcccggcggctgcaactgggaacttcaagcaaagttttctgctgttccttttgcagccggccagggactcaagagtgcaagccgcccaaccttgagcactagcccaggccgcggaaggacggcggccgagctggcagtcccggctggggagctcgccctcggggtccgtccgctccgcccgcccgaggactgggtgcctgccagccccacggcccctcgcccagcgcccggctcacaggcagaagcggtgtccggcccgccgcgccccccgcccggccccgacgccagccttagggctctaccaccagggagctgtcggcgtcccgggcgtcccgcgccggcccgcgcgcctcgggggcggcagaggcggtcccgcttacctgagaacgtctcgcccgccgcagttagcaaaagtccggccaaagtcgccaggcaagtcccaagtcccctcatggtgctgagtgcgggccgggccgctccccggcggcggtgggtgggcgcgcgagggcggagggggccgggagctttggttccgaggcagcgaggagagacgggtaaacagcagagcgctaagccaagcccccaaagtgccaacagttgcagaagtccgaactccagcggctccaggggcgcgggcacagggtcctgggtcctcctcccctgtccctggccccactcggcgtctggcgccgctggcagagggagcggagggcgagcccgcggagccaaaatcttccctcggttccggttgctgagctcgccgcctctccccttcccctgcccgggacccgggacccgagctgccggccgtggccgtggcggtggccgtggccgtggccgcgcgcgttccgcccgccgcctctccacaggcagccccaagcccagccccgggcggcggcgcgccgatgaccgagcccgcgccggctgcgcgcggggctcttgctccccgactgactggcggtgccccgcaggccggctgaagggagcgctcacgtcacggccgcccggcgccgccgcggcccgctagagggcgtgagcgcccgtgccccgccggcccgcgcccgagcgcctccgggagctcggctgggggcggccccgcggccacagccactaccgccgccgaagcgggcgtcagccgcgcggggaggagcggccaccgggctccccccgcccacctcctcgccccggccgcgtcttctattttggtagctggctctggggagggtgactgtggaagaggctgcgccgccgccagaagtttgtcccgggtcacgagccgcgagtagtttgtgagcgcggccgggcgggaccagcggcctgcgaccccgcgggcgcggccaggcggcttcgagcctggcgccggacggcgatgtcaccgcacagggccagctgcacccggagtcgccgggcctgcgctgctcggcggctgcgggaaaagcgagccaggagatcgctgaggctccggagggctgcgagcttctctacgccgcgggcggagcgaagttggcgggcgccgggagatggcgcgggagccgggagcgccgagccccgcgatcgccagcccgctcccggccgggcccgccgggtacacgccgctggccccgagcactggcgcccgggaagcagggcgcgcttctgctgttctgcgtcctcatcatgcctcggtgtcccgtgtgggcccgaagcgagccgcaggcagtacacggaaggcggtggtcacaccaaaaccagggtttggacataacccgtggtttctgtatctggtgcaaagtgctgagaaacaggggagaaagagaagtggggggtgaatcaagtaatgtcttgaaatattttagttttacgattttgggtctgagtgaattaaaaaaaccttacaatgcttcagcaaaaaataatttttttattttaattgtaaatttttttgtaagtgatccttctatcttccagggaataagcacattgagccagcaccaaccagacagctgtaagctcctggcctagctaactgaacgcaatagaaggcttgggaagaggttaaattaggaaccaaagtaactgagtgacagggttctagcaatgattctggctagaaggcaaaccggtgatacagaggcacccaggagctctcctgcactttttccgcaagaggggtcctctgcttagtgctcactgctttctagtgcttataaacacgtaaaaaaataaatggattccacactcatcttgaccctgttctccactgtacaccagaaccaagaaagatacagctgtcatcctcccaaggcaaatttggggactagaagacttgcctttagtgtggcaaccaacactcctcttacttcaggaagtccacttactagatacttaccagacctgctctttagaagtctctatattaatcatttgcttgttaatatgagcttacattgtcctgccacttctcccaactatgtgcttatggaaccttatctttaattgtgaaatgaacattgaaatctcagaaaggaagcaatgtcttcaagatcagcaagtgaggatggtcaaatctgcaacctgggctttccattttgatgtacttgtgttctatactgcagttcaaatttgctttaaaaaaaattagtaataggctttccaatggagtttttctgctagtgggaggacagaggtggaagctagggagacaaaagttgatctaatcactttgcttcagagtaacttctttaaattaggtgaagttaatattagggtaggatttcatttgcaaagtattttattctttcagcaaatatctactgagtcaataccatatgtcaggcactgtgctaagtactggaggttgtcttaggctgggctccctcagaaacagacctggaggttaggatttaactataagtggttttgaattggggaagtgatcccagaaagcactataaggaaggtgagacagcaagacaga

SEQ ID NO: 1245268 - DNA, 4001 bp, Homo sapiens
accctccatccactcaagccctcagttacccacctatgggtacctgatttctcttcatcacacagtgcaactctattatctctcatttttatatactgaagtacggagccataaaatattgacaattctaaacggaatttaaccctactttatttatgtcaggtactaaaataacagcctaaccctcatttgatggtttaacaactccctgtactctgcatgatccaagactggatatttgaaacaggtatagttatgctactcattttaatataatgtctccaacgacaacattttaaaaacatatggtacagacatcacaaatatttccaaaatgatctattccaaaaaagcattaagggaagtaagttcttgaaaacaaaccaagaaagacagtacaaaaattggaggtttcactttccaataagacactttaaatgtagtactgttttgttacatgacaatttcaaatcaagtcatctcaaaatcgtactgacagccttggaactaccactggttataacactattaataaatagaattacatgaaattatgcttttaattctatcaaatctcctgactactcagtttcttggaccgcccctggggaaatctctcacttcctatcacggaagtgactgccctttattttaaagaacggggttctcctagtttggacatcttttaaggggttttccatagaaacaactgctacccacatccaactgagaaatctcaatgtcaagtcctctaagcatgacttaattaaaaaaatttcccctgcagtttccatttcagatccacggctgttttcctccttgaccctggagcgttcctgtacttacttcactcctgtccctcaccgaaaacagcggtactggaggaatcaaccccatgcccgccagtcaccgggttgtttgaggtcatggataaatacagctgaagctcctctgccccgtacgtacggctagcacgagaaacttactgtagttttagttttaacattctccataggtgactttaaacttcatttcttgaaaatgggttcaaaataagaaaactgccctggttgcgcagggatcacacccgcagcagacggcgcgcgctggccttggcgggccgggcgagagcggccttaggcgttcactcccctgcctgcctgcgctccactcgaacccagctttttcttgggcgagtatgctaagggccgaagtttccgtggagagccgcccccacaggccccgggggctgccaggacctctgaggcagggccgggggccaagggcaggtctgcccggaggcggcacgaaaacctctgccaggctttgggattgggatgcagggcgctccaaggagacccccgcccctagtttcaccgagaggcccatccccgaaagactcccaggctcgatgagactcgaagcccacggggcgaagggcacctgcccgggcgccaggaggcccggcccagggtcgccgtggcgcccttacccacggtggacttgcaggcctcgcagaaggtgtcgtcggtgaagcgctccatcaggctggtcttgcccacgccgcgggagccgataatgatgacctgcaacttgaagtcggccggcctggggggctgcttcctccggcggccctggccgcccgacagcgccggggagcccgcgcccagaccgccgccgcccccggcccgcctctgcagcgcggcgcccggatccatacacgcatgcggctcccgctcggcccgccgcccgccgccgcccgccccccggctgcgcgccccgggccccggcgccccctcggcctccgccgcgcgcggggggtcggccccgggctcggcttccgcccgctggagcggccccggcggcccgtgggctccgcgctgcaactgcgccgccggccggctctctgcgcccgggtcccctcctcctcctcctccgccgctgccgccgccgccgccgggagaggaggaagggaagcagctactccgcagtagcggcagcagcatcccggacgaggaggggcaggaagcgcaggcgcgggcggggcggctggccgcgaggggccggaggcgggcgggtgggcgccccctgccggcgggaggaccgcgcgcccgggcctcggttgggtactgcgcgcggagctttcccgcaacccgcgccgctctttccctgcctctgctcgcctgcccgcccccgcttccctccctcttccgccggctctttcatcttttcttcctcttatctcttcccttttcccccttttcactcctccctactcggctttcactctgacccgcatttatagttaacacaagaaacttagtgtggttttagtcttaaaattctccgtaggcaattttgaacttcagcattccggtgcatcatgaaaatgggttcaaaataagaaaaagaaccctggttgacagtgaaaacactcccatgcgcacagtccccaaacaccatgcacatgttttcgcccccgcgcgctcggtgtagctggaacgctggaaaggccccgacctgaggccgcgccgccgggccgcctgcgctgcgttcgcgtctacaccagcgctctctcacaaacaccagcgggtgcaagcccccgcaccctctaccgggccgtggcactgctcggtctctctccgtcacgtctgtctcccattttgcacggaaacgcgcgaaatcagttatttttaactctgatcgctgtctcactcagagttcagaagtttttatgctgtttaatttttaaattaagtaaatggcatactcctttgggggaataagcgagttaaaactcaaacagtgcgagaagattgaaactttaggaattatggactcgggtcgtatgttttgccatttctgtttggaaggatttaaggatacagaaaatcactgctgattccttgccagagatttgtttagcaaattcctcagcttgaacttgagcatctcagaacacagggttctgaatatgataggggctggcaacatttgccgaatgatcacgttacccacaaaatttcagctgtgctgtatttagaactaggtttagtaatgcacagtacacgcatatgttacacagcaaacctgatttgtaaaaatctagcgttgcccacagtgtagattggaagtttacatctatgagagcattcttaactgtgcagtcactgtagggatctttataatatgaattctgagaatatgtaaaatatgatccctctatattatttgaaacacagatccatcacttaccatcacggaatttactttctttctttccttctttctttctttttctttcattttgttttgttttgattttgagacagccttgctctgttgcgcaggctggagtgcagtggtgcgatcacagctcacggcagcctggaactcctgggcccaagtgattttccttgcttagcctcctgagccgctgagaccacaggcacgtgccaccacgcctggctaatttaaaaattttttgtacagttggggttttggtttgttaaccaggctagtcaacagtgtgagaccctgaactggcctcaagtgatcctcccacctcagccttccaaagtgctgtgattacaggcatgagccactgtgctccgccgcagaacatttcttagctgtgggtttctcttctgttctatgagaatgagagtagtggcccctcctttcctctagcattgttaggaaaaaagcaactaacaatctctgcagtctgctgcaaccataaggcactatataaatgtaagggattaaagaaactgatttatgcatggcttttcaggaatactgtgattttacaaagcaagacgcatctgcaaaggtaatctcaagatttttaatttggtccattctgattaatagcaccgcctgtcttaataggcagatgcatgtggcatggcttgtggggctgaagaccttcttgcccaaaataaaatatcttccccataaggtagatctgtagtttctgccactagaataattaatga

SEQ ID NO: 1245269 - DNA, 4001 bp, Homo sapiens
attggtcaacctgccttgatgaatcaactgaagaaactggattgtgagatgagttttatatgagtaattgttctatatttcatgccgtactgatctgagagcccaaaaacctaaccaaaaatttgcaggagtgagggtgggaaaagagcaggtttctattctgaactacctggacatttggataacttccatttttccagaaaaacagtgaaataaatgaacagcaattctgaaaccaacatacagttgtagtgtaaactggcataccaactgatcttctaccaagaagatcaattatattagggttaccttccctattgggtcaaacatgcctgttccagaaatgacctatgagaaaggggaactgtggtttgcttacattcaacagattccctttatcccttcttggcaactatgagaacaggctcatccagttttatctgctatgttttgttttcctttcgaaagcaatgacagtaacactgtatgagaggccatagtcaattctgaaacagaaaagctccattaatattaaactatctgtcaagattacccctttttggtcattggtaggaatcacctcttgccttcaaggatggctgaccccatctgggtagaggattatgctaggaaactatgaaaaataactatttgaggggcaatggcacatgacaggtatgtctctctcttcatcactgcaatatggactttacagcagcttgaaaattcattaaacttaaatatctgagtttatattaatgcttaagtctatcctttccctcaacttttcaaaatttataaccataaaaccctgtatattctatatatgaatgaatatgtgtgaatataactaaatattgagaactgtagacatttttcttataaacagaacaaaatcaaaattcagagctgtattatattaaacaataattttgttgttaataaccttgaaatttatgttattactttgggcttaatttaatgatgtgcagtttaaaacaactggaattacatacccttagctttacatcttgacataaaaaactcacaaaacatgatacaggtgtgaaggctctaaccaaacacagctttttcctaggaatgcagtctctgcttacagttcacctacttcagtagttttcagaggcttaattaatgttgcattgggtgggaaagtcttgaaagctaatttattgtgatcagttgggtgaacacacatgcacacatataccctagttggtgcaacacttagatcagaattcgaaagtaacagagcaaaaaattggaaaacagaaagtactcttaaggtctctgtggctatttcatctaaggaagtgcatataaatgtcttattgctctcctggcttgcctcactaagtcgctcctcctggaatgaaactctgagcacatcatcatccatgctttttcttattcattattttgattgttttttgagatgcaaatgaaaggaaattggcattgctgtgcctaggctttttgtttttctttttgctttttttggtggtaaccagctgtttgataagcaaacactcaaggagagccaggtcgagttggcccatgccatccgtgcagcacacagcactactgtcttctttgcaaggatttctgctggaaaccgcgatcgaaggtgcacacgcactcacacatgcacacacacacacacagaggcctcacttcccacggcgcaggccggcgctgcagcacccgggtgggtgggaacgcgttccagcagcagcagcccgccttcccaactcaccagcctgcgaagtttccttgccgggagagcaggtgtcagatttcagagaggtttccttccccttcccaagccctggaactcccgggctccaccgtcagcaaggagacaggatctgctccacagggcgatgagcacggggacagctacttatctcctccaacctgtggctccggatgggtccaaggccgggcggtccgcagcccctgcccgtcaggactgcgagtggcagggctggtggcaccaccctcggagtccgccgcggcggcggggctgggtaaggtttgtgtgagaagaaggcgtgtctgcaagtcccaacgcggatgtgcggagctcacctcaggcaagtcttgctggtgactcaactgctgcagtgagaaacacactcctctcggggatgaagtctccacactgtggggcttctagccttaccagcgagctcatttttattcatttttgttctgtgttttctttgatgtctctcattcaaagagcccagggcgctgtgagaactggggccctgacattgcgttctctcctccgagggggtgtctcattaactatgaggagtgaaggcgagggattgcgagtggggagcagaggatggcctcgggaaataaaagagggcgttggaaagaaattaatattttaaaagttaggatgtgttcgtatgaatgcattaatcagtatgcaacatccaaattcacttcccaaagccctaattcacttcctaaagtcacttcagagatcaataggttaccactaagtaagataatgagcacacggaggcattgaaccagtatttgttaagcacctactatgtgctatgccgtgttctaaacacattagattcgtccacaaagcaaagatcctggctgcccatcttgggattccattttagacacattcagacatccctaatttacagactggtagtaaaggtaagaatacaaggttaggtacattataataacaaccgatttactcctctgtgaacaaaatttaaaagttccaaacctgtgtcttgcattcatgttagtaaacaacgagatgccaatgactgcttgaattttaattacttaacttgtttcttattcgatgccctagagacaatctgggaggcactgctgttatcagctcccagagaatttcttgtagaagggagcaaaggaatagcccaaaccaaaacacaaaacaaacaatagcaaactagtggaaaaatggaatattagagaaaacattttggtctcatagaaatctgtctattctattatgaaactattaaagaagttctattttatgtccttcaatgttcttgaaagttgaaaagaagagtaataataatgtcttcatagtgttattgtgaagaattgacttcatatcagtaatgtgtgtagaacgtgcctggcacagtaagttctatgaatgtgttggctatacttataattttggtaacaatctattccattctccccaagtaagatccagttcctaaaaattattttggatctactgcataaaagtctttgaggctcagcctgtagattttcaaagtatgtatgcttggaatctatatttatgataaatctactttgcatttaacagcaatatctaagtatataagaagtgtgtgtccatgggcccagacagaaataaaagaaagaacataagagccttgaatcttttccactgttaacacattgacttaaaatcaccctctgtgctatacaatgataacccatattctttatctagttcatgtgttcactactgacattagtcctaatagctattatttcctgtatgcaatagagtttcatctcatttggctttcacaacattactgtgaaataggcaaggcgtctattatatttattgtctccattttcagaatgaggtaactgaggttgagaaagtcgcagtaaatctgtccaaagtgatgaagttcaaaaggtggaagacaggtctattgatcctgaatgccgagctcacagtggtcactgtgttgtactacctcactgcaacttctagaaaaggttcctgccataagaaaatctgacacacacatttattgatgactctccttgccacctttccctagataagtgtgtcacctgctttatagggccaactcttgcagggatagctctcctggagtgacttgccacatatggtcctgtctccgaggttccaaggctcagattcagtagtgttacatagtgacact

SEQ ID NO: 1245270 - DNA, 4001 bp, Homo sapiens
tgctttgctaaaacgacacagctctttggtgggaaagaacgagagcctaggtttcctgcctcttgacacagggttcttgccacctgatcagtgtcctggtaggaggacatagagacctgtccctaaacaccgaaactgaaaataaggggtcctgtgacacggcagggcttggaccacctcagtaaaagtcaagagaaaagagttgcagaaaaaaaggcaaaaatatgtcctatttcacctttcccaaggccagtcctgacaaacacggcacatcaaggctgcctcttcattccttggaacacgacattccttctaagtctctgaaggcctttcctgaggctgaaatggcccctcaagagggaagcatgggattcctggaatttatgtctggaaatattagagggcctggggaacaggaaaacccactcctgccacacaaaaaggtcaacagagaaagaccagactagatcctggctgtggctgagcaagtcgggggaggtggggatctgtgcggatctgtgccaggggctagcagggagggcagggccttcccagatcctctggaattctaagccaaccggacaatcgagttagcgtaagggatggttttggaagaggccggtgatgggagccgatgatgggagcctgccggaggttccacaagagcctagaggaagcctagagacgctggcacaattcagtcctcaccgaaatcatttcctctttctacagttcttgtacccccatcttgacagatcagttcgcacaagaatgcgaccctttcgctgcccttttttaggaaatggttttcatgagaccagctttgccaatgacacgggcgggtacaccagatgctaatggctgctgaaaacgcccttagaaccggctcttcttttagaagaaggaattctggaatgcggagtgggcccccgaaaggaagcgaccctacgtttatctgaattcccaggggcggttcgccagcggctccctgcgtcctcgccgggtcccctgtctgcagtccccgggccgcacggattgactgcttttttgtttctggctgctttaaggcttcttcgggcggagaaaaccccactttaggggagtgatggtggggaggactttcccaggcagcttctttcacccgcagcagggaagtttgcagggcgcgctccgcacaggtcactgcctcaccttccaccccggccgcgccctcggctttcacccccttggctgggttcgcttttggttttatttttctgttttacgtgagtaaatcaattgcccccaggaggcaaaagagcactcagcgacttggctgagcaacttaaactttctgccggaaggaaactatcaaaagcggaggagaaagccctcggggccccagactcgccgccactgccccgtccccgctgggggtccccgcgaggtcgccgcggatccggggactcgcgggccgggaggaaagagcggagtaagcccggggcaggctcggacccggaccccggcagggtgagagcgggggcggaccagaggggcgcacggacggcggggaggcggagaacaggcggggtgcggagagcgaggggcgcggagagcgaggggcgcacggactaggggagccagggggacccggggaaccagggggcgcgcggacgagggggacgggggctacgagaggggtgcggagagcgaggggatcacggggactgagcgcgcagggaataggggagcgaaggggcgcgagagcgcgggccggggtccgccggcgggtggcggccaggactcaccccgagaaggcacactttgagctcccgtatcgccatcatgtgctcgcagccaggcagtgccggggctcagcagcatcctccggggccgccgcgcccgcgccccgccggcgtctctcgcctctgcccctcgctcgcgccgcccgcgggcggaaccgccgccgctgctatttctgggccgccggccccgccgcggtgggtcacgtggccgccggccggctcctcccgggcgcgtcgggtccagcctcgccggcccccagctcccaggaacgcccccggacggcgtcagccacccgggacctgcggcgtcgccggcggattgcctccgccctcggaccagccccgcgcgggtcggcctcccccagcgccctccggcatccgcccctcccggccccgcctggccgcagggcccgggtgggtaggaaggactggaccggccctgtggagacctggccccactaccagcgggtccctgaagatgccattctcatctggaaagcgaatgctctcggccgaggccgtttgcgtggcagcgcgtggaggtctgcgggggtcccatcctcaagcgacattctgggtcccacgcagaaaaagtcaggccactgaaggggccgctgtgaggacaggggtgaggagaagggggctaacttttcggcctgcctttctcgacgttcctaatacccgagcttccgtttaacatatgtgtggctcttcagctcagccaagttcatttttctgtatgcagctgaaaatgattctagaagcaaaactcgctgtccgtgtctgaaacgggaaacttgctttctggagcaaaagtctttttctcagtagagcaaatcctgcaactcgtgtgggcagaaacccagtcctcagaggtacaggtagaaacgtggagatcccagcagacccctgcatcgttcctaactgggaaatgagcagagtctgtggccgcacacagtcggggaggcttgggtaactgtgttctcttctccatgtatggcctagagcacctcatccactcggatgacttcattcgttgctgctacagaaatgtcagccttttcaatgtaatctatctgaacaattcactggcatttcagatgggaaatgtttttttaaaaactgattttttgaaacttcatctcctatcccaaactctcaggcctctctcttaaccttccaattttaatcaatggcatttccattctcctagcagaccacccaccgtgatcatctggctttgttcttacggaagccaggttgaagctacccagtacccaagtagccccatccaatgggaaattccaaatcaaggcctccaaagagataagtcctggaatacaggagtcaaaatgggccccgaaacagacaattcacaattaaattccccagaagagcaggaagtttgccctcgaggtgcaggcttgtagagattactcaaatggactaaactgtacaaaaggcagccatggacaagttacaggtccattgtatcagtatccgtccttgactctgtatccaaagcagagtcttctatgtgggcagggtaaaaagaggcttccccagaatcaaacagtcctgatcacaatatctccctgccctcagatttgctaatcagaaaaccacccctacacagttgcaaagacacctcccccaaggccttcgccagccctgagggcacctccacagtgaaacatgtccttttggctttccagcttgattcccaaaagccagtcaaaccagggtggaagcctccactgtgttctacatcccgtgcagtgagtggagctttgtgaagttgccttagattgctaagggcagaactgtgcccagacagaaataggcaaaccgaatttctcttgtgttcccttactctttttcatgactgctctcattctgctctcttctccactagcccgggtgtctgggacgcttgcgtcgtttctaggctctcccaaaagagtctcgtatccagcccttccctccctgagaatcgccccagtctatttgtccttctcccctcccctagttctgttaaaaatgacctcatttgtgtctcattctgatcaggtcttgggctcttctttacaaagtggcaatcctagtctgtcaactgactcgtgttcatgggtttataccctcttcccagccaggtcacccctgagcttaaacatggcctcatgaaaaccaggtccccatgatcaccctaaggtaacc

SEQ ID NO: 1245271 - DNA, 4001 bp, Homo sapiens
atttttccttgtaccctcttatacaaactaacataagtttctatcagggatctttcaaaacagaaacaatattcttttgggttacatgctgggcccgatctcttcttgccaagcaaacaactatgcaaatataactgtacaaattaaagttattatgcactttctgataccactttcctattctaaattaggggagaaatagtctggataagatccataattagaaacaatatcctgaagagaaagcaaactaagttgtattacattgtttcgagataccttgtttaaagagtcacttctcaaaagctactactgttggcagggcgcggtggcacacgcctgtaatcccagcgctttgggaggcctaggcgggcagatcacctgaggtcgggagttcaagaccagcctgaccaacatggagaaaatgtctctactaaaaatataaaattagccgggcgtgatggcgcatgcctgtaatcccctcaggaggctgaggcagcagaatcgtttgaacccaggaggcagaggctgtggtgagctgagatcatgccattgcactccaacctgggcaacaagagcgaaactctgtctcaaaaaataaaaaactaaaaaaaaaaaaaaaaagctactgttaactaacctaccccacttggatctaccagatactttgaatgagaggtggaaaccactctactgacctccttcctacccctactaccgccactccagcttacagtaattattttcacaaagacagaaaggagttatcaaatgaccacaataactctaaaaacagaaagtgaggtgatctttcttattcacagtcccacttattcatttagaaatgctgagcaccaaaacaaaaccttatcacaagttcagtatttcgttaataactgccaagtataatggaatactccccaaagtactgcagcattagaacatgaccactccactaaattaaaaattcagcgaaagcttttctaacaaggctggatggagcactaactcaacggccaaacggctgcacttcctgtatatgcacgttcaaaacacctcgaattaacatgctagggaccttgaagaattgtactaggccttgctcaagaggaaggctttgtaatactgaatcccaaaacttgaaacagcagaattacttcagggaagacggaggtgttaaatattctgtaaaacctgtttcactctcacaacgatcagttttaaaaaaaagagggagaacactgacctcattaagagcattctgacaacacacatagttgaacatgagttgtgaaaagaattttcaacttcagatctgtctgtccattcccactgaaacctgaaggaaggatcgcagcacccaaaggcgcccactgctcagtgccagcggtgggcgacaccaggagcctgtcctggtcccctgggtaagccctggagcctggccactatgccgggcacgatccaccaaccgtgagggctgggtcccctagcctctgtccaggcgccccccaagagcttccccgaggcctggggactcctaactctccacccccggcccccgagagcaccacaaacgaggacgccacgaagggaggcccgtcggccagtgggagggacgcacggccaaggggggcgaaaactggggcgaagctttccggggaggaacccacgccaggggcagccacgccccccacccccaacttcaaacccgagcgctgcgagcaccgagccccacacgctgcctgacagacgcgggcgcgaggccggcgcgggagagggttcctcgggcactccaggggtatcgccgcgaccctagcacgcgaccgctccctgcgactgacctgtgcctgccgccgcgcgaccgtccgccccgccgcagcctccgcctcctcgcgctcacgctgccgccgcagccaccggagccgcctcctgcgctgcgccccaggccggcctcgggcgccccattcccaccccgcccagcctctgcctgtttacaatgattgggacggaacgggacgaggcggtccagcgcgcacgcgcattccctcctcccgccgcagccggcttcccggatcctcctctccgctcagacggctgaagccgtcaagggcaggcgacctgggctctcgcgcggggcgcgctgggaggcgtagttcccaaggccccggcgtccagccagcccgaaggcctctcgccaaggaagcaaactacaacacccaggaggcaccgcgcccccttcgtccccaggctcgctgaggagactgaagaagagcgcgagagaacgcgccgagggccagtgctctgcaggcgcctgcgcagtcggtggccttgcgggtttcggggacggacggcttaccccggtgtggtgctggcgaaggtggctcgcgggcatctcctgcaacggccttgaggatggaaagggctttcctctccacgctctggccagcctgcgcctcagctcccgaagttgagagctttccttgcgccagcgtgctttagtcgttccaaccagttaaaccagactgggggccgcccggctggccgctgggtggggcggctgccccgccttcgactgggtgtgggattggaggaaagagcgccgtgggcctgtagggataggcgggaataaacctctgtcgggaacatccacggaattcctgaagcgggtgtgggcttctgcagggcttcagcgcgcccccggctcagcagttaccgagcagcccccgaggaaagctgcccagtccgtgtttggctggcagtagagataactgaatttcttcgagaagcctttcacccaggcttgttgagttgctctgctaatgcgtagcgaaggctggaaacggcttcagcagtcttcgtgttttctgaaatgtggcagtttattaggggagaggagggacttggaatagacgaccctacctgtcactcgcattcctacgtgcagcactctgtggcacttcgttgcccgtttagattggccgctgctatccatcttgctctctgctcccacatcagctttcctcaaagcgggcggtaaatttgtccctagtactctgcgctccctactcagtaaagttcaacccctggggccttagattcattcaggggcctcccacgagtggatacgggatggtctgaggtagccattggtctttgactttcggaaaagccttctcatggctcctctcgcagtagaacagtcttctctgaccactgggttgggcaggtgagcatggcagtgacaattctctgcctgtgacagcactgattcggccaaggggcaggcactgatccacgctgggccttatggaggccttgcctgaagctgctatgtggatgcaggaggggagcagagggagttttctactgaggcaattgctgatggacgtgtttcttgcaacatcgagtggcctagccaaaggtgagggtgtgaaagagaagaaaggagaaatggaaagggagaaagagctggcagaatgtagaccgtggtttcatttggagggcatggtttgtggagctctttaagtgctgtgagcatgtgagcctaagtgggtgagcccactcattcattgatttattatttggagccaatatgtgtggatattgaatgtatttgttggctgccacttgagcatttattccttccatttaagccaggcaacataaccattccctctagcagcagagatggtcacaagcccagtcagaaacaatgaacccacaaagactggggctgaggcttccagtaaactgtagcttccttgctcctctagcatggtgtaagtatatgatgcctggaaatgtggcaaccgttttcctcctataaggggaaaccctagagggatgggagtttagagggacagcaacaagtagagcctggggttgaagtcagtactgtcaaatgaatgcgggaaagatggagaagaaccttgtgtttggtggcatgatttgagctgcagtatcaaacctcacctgtttgattctatggactatcctataga

SEQ ID NO: 1245272 - DNA, 4001 bp, Homo sapiens
aggagacattgaactgtccttgctggttaatcccaagtcacattagggaattatattttttaagccatgacttttactcattactttcaactcttaaactaagcagaaaagaaaaagcagcagcttgtcctcttttacttttaagacatggataaaagctccgaacacttgagtgttctcatttcctggaaatctaatttattagacacacacaaaaatcccatcttagttccactgcctttcagatgcagtgaaatttgttcccaatgtctctctttcagccctctgtaaactctcccaatttggaaatcctcccagatttttcacagatgactagcaaatatttaaggctttcaaatattttaatgatcagggattaaagataattcagctttaattaaagcgaaaacccctttacaataaaaagaaaaggcctttgcagcgagaagtttggttggatgtgcaccagaaaaggaaaagtcagtttcttaaataaatccacccgaagtttcaactgcgaggtgccaggcccttcgcaaggaaacagggttttcgtttccaactcggtattcgcagctagtgacgagggtggcatttggggccccaatcctgtcaccctcgatcactacctgcattccatttccactcagcaacccccaaccccttcctggctatgtctaatgagctgtcggcctcttcatcttgcaagtcattcccatcttctattttgagtttagaagagggaaacccccaaaggggagctcgtactacaaactggaacagactgcttgaagggcgatgcacagggaacatcgaagatctgtgcctctcccttgagactctgggcatgccaagtcgaggaaggacagtaataaatgcatggacacccgtgaattccgagaagcattggctgcaatttgggcctcgggccctcccagatcccagttcctcaacctgggcgctttacctggacccggacctctggtaggttgaccttgccggccagctcctcgcggctgtacacgtccgggtagtgggacttctcgaacgcgcgctccagctcatgcagctggtacgtggtgaaagtcgtgcggttccgccgatgctttttcttgggctgttcctcctctgacagtttcgcttcgccggtggctggcccgacgggcagccctgggctcggccgtgcctccccgggctccttggggcagtagggtcgaggggctggggcgacgaggcccgggagggtcagatgcactccccaaaacacccttgggccgaccccgcctcgctgtgggcactggccagcccgcctgcgggctccgagatggcccggggaggtccgtggtgagggcggcgatgggtcctaagctttctctgaatgcaaattggaagctcccgccatagacggtccccaaccccgcgcccagttgccttaataaaagttaaggaaggggcgctctcgtctggccaactcctaagctcgggcgcccgaacggcctcgcacagccaggggtgcgcactcaccttcgtactcgggggcgggcgccggggctggcggcggggagggctcggagccttcctcgggcgccttggggcaggcgggccgcgcgcccagcctcctatcccgctccttcgcgccccgggcgccccgctccgccgggaaggtgccgaggatcccgtcgtccttggtaaaccccaggatggcctcgatgctgtgaagtcgcgaggtgctcccgcccgggctgcggagcaggtggccggcaagcgagaagctcccgtcggccatggctggcgcgcagcccggcaggtgcatggggagcgccgggaggcgggagggcgctttggagacggagaggagaggctcgaagccgggtcttcccgagtgcggcggtgcaacccgacgggtcccgaccctaggtcaagctccgcgggcgaagcccgcccgggctgcgcacgctgggggtggccgagcgctcagcccgctgccgccttagtcccagaagtcggaagttcgggctcggggtagctggggctctcggcgctaaaggcggggagccaactggccctcggctcctcccctctcgccctggacccagccccttctctcggcccctccctccacagaggggcgtgtcctcacccggcccagccacagggtcctctagtggccacccctgggccggcactaggaatattccccttccacctcttgatccgttttaagctttacaaacacactccggggatccgcggcgggatgcctgatgggctcgggaacctggtcgcggcgcacccctagtcctgcctcagtggggccgacgcccttgggctcatctctccccttgcgtttgtctccctctacttcgggcttaccctctcacttcagactaccccctgggggtcacctccctccttggacgcacccctccccagcttcagactcgcccctctagccccctctggctcacctccgcggggccgccaccctggcctgtgccccctggaagcgccgagacccagccgaaggcttcccagccccgcactcgtcgcagtttgaatttcccctcgctggctcccttttcgggacccactcctttcttggctgggttgtacgaagtcccggacctcgcgtttagtttgtccgtctatatctgttgtaactcctcccagtcccctcggacttgagcgccggcagcctccctccttccccgcagcgcccaccccagggccatttatgtccgcaagtccggtgacctctagcgcccgatcgcccagcaggagactgggagccccgagtcggatgtgctgccgggctcaggtcccgcaggagacccacctggagttcctcgctcccgccccttgtcctgcggggagggcgggctcctttactgatgagcagcggtgtcgcactcccgcctccctccaacactccgggccaaggagatggcccagagctggctggggaaggaccttctcccggggaagaggcctctcgcctccccgagggttcaggagtaattggcttgcagttctttctcctttggaccccctcgaggcttccgtggcccacagtgactgatcggccacttggaaagatgattggatagggtgagtgtgtttcacctccagcagcgcggatggacaatggcgctgtgaacgtctcacccctcaaatctgaggcgagacccgaggcgagcgcttggccttccctgaactggtggcctgaaccgtgaattaaaatgctttcctataaaagctcaaggacctagaggacaatatccctaaaatctccttttcagtaggcgctctgatctccacagcaggggtgtcttctttatcccgcttgcgttcagacaagcgtttgctgcgtccctttagagggcaaggcaaccgtcgagggccacgtcgtgggcatcaaacaaattgggaaaggccagggccgttggcctggtggagtttaacgtccagtctggaagacaagacaaaggaagagggaaaacacacatcctcagatccccaacctttaaattggtgttagaaggatgtttgcggaggacaagtcaatttcttaaggatcattcaatggttaattccccatgatgggcatatctacttttaataaaactatataatggcaaactaaaataagggcaagcatgtgactgcaggagatagaaattgaactaattcaagtcagaaattatcttttaagaaaaaagctaaaattaatgaaagttaatagcactttacagtgttcacatattactttatttacttattatttatttgtctgtttattttagagacagggtccctctctgttgcccaggctggagtgcagtggcatgatggtggctcactgcagcctggaactcctgggctcaagcaattctctcgacatgtcactttgtaggtttcagaatcttctcacattcttcatgtcatctgatcttcacaaccttgtgaggtgagcaggacagacatattggtccccattttac

SEQ ID NO: 1245273 - DNA, 4001 bp, Homo sapiens
gatatactctgcgatttgcttgaaaaaaaaaaaatccagcaaaaacaaacaaaaatggatgttgggtgaagagatgaaacaagggctgaacttcaacaatttctgaagctgggtgggtgcgtatacaatggggttcataattccagtatttctcttgtgtacatttatttctgtaaaaaagtttttaaaagtagaattaggtgcactgcattagttttgttaccaaagaggtttttattctatctttaactctaacagataaacaaatgggcctatatataattgtgaataaaagtcaccatttgtttcccacataccagaaactatagaatattaatattaatatttgtatttatatattatttaatatataattatatattatagaatatttatattctacctaaccttcagaaaaactctgtaagacagctactataatttcattttagagttgggggaagaggcgtaaggcagtaaatgtccaaggtcacacagctgggacatggctatgtcagggatggaaatcaagtcatgagaccaataactgtaaaatacctctctgtagcccgcatgttctcaatcataggtgggaactgaacaatgagaacacctggacacaggaaggggaacgtcacacaccggggcctgccgtggggtggggggagggataggattaggagatatacctaaagtaaatgacgagttaatgggtgcagcacaccaacatggcacatgtatgcatatgtaacaaacctgcacgtcgtgcatatgtaccctagaacttaaagtataaaaaataataataaaataaagaaaaaatacctctctgcagcaaaaagaaaaaaaaagaagacataaacgatttctattaagtcaacagtttaaaatgaaggtttaattacttcaatgaccgaaaaagtattaacatattcgtttaaagagtgtaaaataagcatcctttacgtatctatcttcaagtaagtgatgtacagtgccttaaaaacaaaacataaaaacaaaacattcaacttgcaaattctggctcgcaaaaccctttccacctacccgcatgcccggcactttttgttagcatctctctctgcaatgaaccgttattcgaggcacgacgacaatgtacatttttcaatctctcagaacgtcacgtcttacctcccaagttgcattctgggctcaaaggcctgtaatttgtgtgtattccttagtataaaccactacactgcaggtgctcaccaaaatactcgctgccacaccacaggtattctcacacgggtaaggcgagaggcacatttcatcacacaggggacttgaacaaactgcacgggacatttcaggggtcctcttatgggcggagcagagcagcggggcaaaggctttccagccaggtcccttctccatccatttctccccaggtgcccgcgccggttccgcgtgcgggtctggccaaaaaacctccgaagcgcgcgcgcgagccgcagtcggcgcatgcgcggggcgggcttggcggcgaaaggcgcttcctcagcccgcgcgggagacccagaagtagtactgaggtagcgctcgtcctcccgccggtccaccaccaccgagtgtagcccgggcccggcctatttcatcagacacaaccccagagccgggagccacccctaccccgggagcccttcgccaagcacgcagctccagaccagaagcagtcgctccgacccagagctccgggtggggtaaagagattgcttttactcaccgcctccgagattgcctcgggattcgcgaaagcccccgaagggaagcgagcactttctgaggctgtgaaaggacggctgctcgcttttctctttcgcccttttccctcaccagagtgccaaatcctcggtgggaaagccgacccctccggacagcccgcgctttaaggccgggggctgccggccgggctcggaggcggccggacccgccccgcccgggagcccgcgcgacgtcacgcgggagttccacttgcgtcacgccccttcctccagctgcccatcgcggcggcgcacttcgtgccctagctgaggagcgggctcttcggtgcggcccatcccggagggcgatggttggggaggggagcgctacctcggagctgccgggagctacccgaagagtctggcgaccgccacagcatttctgaattgcgctggggaaagctcaagccgttctgttgggggagcatcaagcccttgcggttctgtgaaagttatctgtacactgtgtctagcttaagcattttgcagggaagcatgtgtagagtgacctgtaccgaatgaagagttaaaattaactgatggggggtatggacgcggatccgtctaacatagttttcggccttgtcgctgttatctgcagtttagtgatgtgacctgacagggttgtgcggtaacgccatagatcaaaacgatctgtattttgctgaggttaaacgggaagtttctggcaaatttgaaacgagaaggaatctccttcagcattatttattgggacaacatgctgttagataattttttttaaaaagtccatttttcttgtggctgttcgtttgagattcaaaccgatagtaggtattcctatttctcctgatttgtaaaagaatcgtttttagaccactagaaattctacaaatgaacaaaatagactagaatcaaatatcttttaaaccagtccagtacttttgtgtaattattctaagacctgggaagggataatattaacaggctttaaaagtttagtacttagaaatcataaatacaaagtggaaaggtaatttttccacctgtcccacatcttaagggatgaataaatataacttaaaaagttagtatacagaagaggggtgctaaaccttctattagcctgttacagcaactatcattcacttccccattttataagacttaactccacatttttaaaagaaaatggatgaaattttgactatgtaatttttaacgcaagataggaaacataattgacagagtgaagcttttatgtttatgacagaaataacctgtaataagtttgtcatttaacagagtattgaaagagcagtgtgctgtggtctctactgtggtccaaagaaaaactgagcagaatgacccaacctgttcctatggcctctgcctgtgtctcactctctaatccatttatgcaagtcagaaaccaaagagtcatccttgacactttattcatccctaacttccatatccaagccatcacgcagtccaattttacttactaaacatgtaaatccatccccttctctccatcactacctccataatccaagatactgttatttcttacctagtctactgctaggctcctttccacatccacgctaccaaccacccctcctaaatctttgttttcactggtgttcagaaaaaaatttgaacttctattctccatatatatatttaattttaaattacatacatgtactgttgaaaaatggtacatgatctaatgaagttacaggctctgaagtcagacatctgggtttaaatcctgctctaatacttccttactgagtgactttggactgactgcttaagctcgctgtcccattttacctacctgtaaattgaggataataatagtaccaacctcacagggtattaagattaaatgaatatatgtaaactgcttagtattcagatatatactatgtgcccaaaagctagccataattagtatttcttagctaatatgattataatccattttaaaagcatttttaaaggataaaaaatagaataaaaatacatcttccctcctccaccttaaattgtgtctactttgagaccacttctctatactgcagctactgtgatcttgaaaagtaaatctgttaatgtcactatgctgcttaaaccctttcagtggcttccagttactctgtgaaggaagcccctttgaattgcctctgctacccctttggcttt

SEQ ID NO: 1245274 - DNA, 4001 bp, Homo sapiens
agtcataagacaattagggtaatgttacttcatgcctctcttagaataaaggtgaatcattaagtttattacatagtccttgaagaaaccaacaggttaagaagtttgaatggattagtaaatattttaatatgtgttcttaaaatgaaaccattaattagctacaacttaaaaagtaatagtgatcagcaagtctactaaacctcacatctggctccttagccaaagcaaactgattgtttcctgctaaccatttcctgaggtctctgacaaaggggctgaaagagtaattctgaagggagcaggagtatatgtgaagccacttggtgaaccgtcaagagctacaaaaataaactatcaagctttgcaaaaattgtgattagacttttaaaaaataatccagaaactaaatatgagctggattttagatattaggaaattattaattttcttgggtatgataatgatgcggttttgtttgttttttttttagaaaggccttatctgttaaagggatatttaccgagatatttacaggtaaagggatatactctgcgatttgcttgaaaaaaaaaaaatccagcaaaaacaaacaaaaatggatgttgggtgaagagatgaaacaagggctgaacttcaacaatttctgaagctgggtgggtgcgtatacaatggggttcataattccagtatttctcttgtgtacatttatttctgtaaaaaagtttttaaaagtagaattaggtgcactgcattagttttgttaccaaagaggtttttattctatctttaactctaacagataaacaaatgggcctatatataattgtgaataaaagtcaccatttgtttcccacataccagaaactatagaatattaatattaatatttgtatttatatattatttaatatataattatatattatagaatatttatattctacctaaccttcagaaaaactctgtaagacagctactataatttcattttagagttgggggaagaggcgtaaggcagtaaatgtccaaggtcacacagctgggacatggctatgtcagggatggaaatcaagtcatgagaccaataactgtaaaatacctctctgtagcccgcatgttctcaatcataggtgggaactgaacaatgagaacacctggacacaggaaggggaacgtcacacaccggggcctgccgtggggtggggggagggataggattaggagatatacctaaagtaaatgacgagttaatgggtgcagcacaccaacatggcacatgtatgcatatgtaacaaacctgcacgtcgtgcatatgtaccctagaacttaaagtataaaaaataataataaaataaagaaaaaatacctctctgcagcaaaaagaaaaaaaaagaagacataaacgatttctattaagtcaacagtttaaaatgaaggtttaattacttcaatgaccgaaaaagtattaacatattcgtttaaagagtgtaaaataagcatcctttacgtatctatcttcaagtaagtgatgtacagtgccttaaaaacaaaacataaaaacaaaacattcaacttgcaaattctggctcgcaaaaccctttccacctacccgcatgcccggcactttttgttagcatctctctctgcaatgaaccgttattcgaggcacgacgacaatgtacatttttcaatctctcagaacgtcacgtcttacctcccaagttgcattctgggctcaaaggcctgtaatttgtgtgtattccttagtataaaccactacactgcaggtgctcaccaaaatactcgctgccacaccacaggtattctcacacgggtaaggcgagaggcacatttcatcacacaggggacttgaacaaactgcacgggacatttcaggggtcctcttatgggcggagcagagcagcggggcaaaggctttccagccaggtcccttctccatccatttctccccaggtgcccgcgccggttccgcgtgcgggtctggccaaaaaacctccgaagcgcgcgcgcgagccgcagtcggcgcatgcgcggggcgggcttggcggcgaaaggcgcttcctcagcccgcgcgggagacccagaagtagtactgaggtagcgctcgtcctcccgccggtccaccaccaccgagtgtagcccgggcccggcctatttcatcagacacaaccccagagccgggagccacccctaccccgggagcccttcgccaagcacgcagctccagaccagaagcagtcgctccgacccagagctccgggtggggtaaagagattgcttttactcaccgcctccgagattgcctcgggattcgcgaaagcccccgaagggaagcgagcactttctgaggctgtgaaaggacggctgctcgcttttctctttcgcccttttccctcaccagagtgccaaatcctcggtgggaaagccgacccctccggacagcccgcgctttaaggccgggggctgccggccgggctcggaggcggccggacccgccccgcccgggagcccgcgcgacgtcacgcgggagttccacttgcgtcacgccccttcctccagctgcccatcgcggcggcgcacttcgtgccctagctgaggagcgggctcttcggtgcggcccatcccggagggcgatggttggggaggggagcgctacctcggagctgccgggagctacccgaagagtctggcgaccgccacagcatttctgaattgcgctggggaaagctcaagccgttctgttgggggagcatcaagcccttgcggttctgtgaaagttatctgtacactgtgtctagcttaagcattttgcagggaagcatgtgtagagtgacctgtaccgaatgaagagttaaaattaactgatggggggtatggacgcggatccgtctaacatagttttcggccttgtcgctgttatctgcagtttagtgatgtgacctgacagggttgtgcggtaacgccatagatcaaaacgatctgtattttgctgaggttaaacgggaagtttctggcaaatttgaaacgagaaggaatctccttcagcattatttattgggacaacatgctgttagataattttttttaaaaagtccatttttcttgtggctgttcgtttgagattcaaaccgatagtaggtattcctatttctcctgatttgtaaaagaatcgtttttagaccactagaaattctacaaatgaacaaaatagactagaatcaaatatcttttaaaccagtccagtacttttgtgtaattattctaagacctgggaagggataatattaacaggctttaaaagtttagtacttagaaatcataaatacaaagtggaaaggtaatttttccacctgtcccacatcttaagggatgaataaatataacttaaaaagttagtatacagaagaggggtgctaaaccttctattagcctgttacagcaactatcattcacttccccattttataagacttaactccacatttttaaaagaaaatggatgaaattttgactatgtaatttttaacgcaagataggaaacataattgacagagtgaagcttttatgtttatgacagaaataacctgtaataagtttgtcatttaacagagtattgaaagagcagtgtgctgtggtctctactgtggtccaaagaaaaactgagcagaatgacccaacctgttcctatggcctctgcctgtgtctcactctctaatccatttatgcaagtcagaaaccaaagagtcatccttgacactttattcatccctaacttccatatccaagccatcacgcagtccaattttacttactaaacatgtaaatccatccccttctctccatcactacctccataatccaagatactgttatttcttacctagtctactgctaggctcctttccacatccacgctaccaaccacccctcctaaatctttgttttcactggtgttcagaaaaaaatttgaacttcta

SEQ ID NO: 1245275 - DNA, 4001 bp, Homo sapiens
agttcaagtaaaggattcagatactgttataggcatagactgagactgaacaattaagcaaatggatggtgggagccacgctcaccattggagtgcgacttacagatcagcaaggagaggaggctagaatgatccacacagtacgtctggagttggagacagatggctatacacggaaatgtttataggtgcatatttacacaagggttagtagaaacacatatatcctttcgtcagatgagatggcccaaaagacagacaccccagaagcaatgaacacacccagcacccatggtttctaatctctctctccaataaaaggaacgagggcttcttggagaaatggctgattttagggctgtggtacgaaacacacaagatgagcctggagtatcttgtagtgccagaaagtaggaaagtgtttaacacacacagaacccagcaaaaccccacaatgacagggtatgcaaacaggacataggagcttagtgagctcctaagggcctgagctggaaacattcgaacaaaactaagtaacacgggattataacccatgagttcttggtgatatgaatgaattaatacatggggtgaagagacatatcccttgtgcagaatgcaaaccacttatgagcaaaattccccactcattaggcatgggctgcacacagcgactttctcccagagtacagtaaggaaagggggcaaaaagagtaactttacggtagagaaacctggcaagcacctcatgcaggggatcacggccagcgtggaccctggatacggtgcgatgagaatggcctttacctctgtagtcttcctccccaaaagccataatccacgtctaagcattaaaaaaacaggcacattccaacagagaggcatcctgcaaagcacctgaccagtacccctcaaaactggcacagccatcaaaaccagggacagtctgggacactaccccagcctaaggaaacaagacaattcaatgtaacgtggaccttgggtgggcacctgggacaggaagggacagcaggcagaaccaaggaaaagtgaataaagtatgagcttcagttagcaacactcttatcaatatcggctcattaactggaacacgttggaagctaaagtccgacgctaacacagggggagctgggtgccaggacacaggaacgcggtactatttttgcaatttttctgcagggtctaaaactgtctttaaaagtagtgtattaaagtagaaaacatacaaccacctaccatacttagaagaactaaaagcagtgtgaaaagtcaatgtattttattgtacttatctttcataatttaaaaacactaattatcatgacaagctttagtcttcaaattcacacagaaagtcaacattagcaaggaaattcttatattttttcatttttcctcattttctgaaactaatcttctgaaaaatacgtctggtgacaagaatcaaaataaacacacattgtcactttgttttcttaacccgacacacgtccacgaacacaaaagctgcaaatgctgacagtgagagctagaactgctgcagaccccaggaggcaggaactggcgagctaggccgcatgggcgcaagaacgcggatgagcggacaccgcaacccggggacaccgccccctagggaataccgcgcccagggacaccgcccccgccgcattacttggttttcgaggcaaatttcttgagccagttcttgcaggagacagcagagcagtgaagtccccgctcgcagcctggaaatagcgcagcatcgcggctacggaacagggcccggagacccgcgcgggagcgccacagcccgcccgccgcagcccacatggcgcggcgccgggacccggagcgagcagggagacaacgggcgcaggcgcggagcgacaactgacgcgagggtggcggcgtgtgggcggggcgacggcgcagagcgggaggaagactcacgcctggcaggcggcgtgtgggcggggcgatgatgcagggcggggcgatgatgcagggcggggcgaggacagacgcgaagctgacggcgtgtgggcggggccacggcgcggggcgggacgaagacggggtgcaaggcgggcggggcaacgacggcggaggggcgaaggcccgaggggggcggtaggtgggcggggcgaggacagacgcgaagctgacggcgtgtggacggggcgacggcgagggacggggcaaagactggacgcaagaaggggcggggcgacaacggcggaggggcgaaggcgcgaggcgaacggcgagtgggcggggtgaagaccgacgcgaagcgggcggtggttgggcggggcgaagactgacgcgaggcgggcggtgaatgggcggggcgaagactggcgcgaggtgggcggtgggtgggcagggcgaagactgaagcgagaagggcagcgcgaggtgggcgactaccagagcgaagcgagcggcgtgtaagcggggtgaagacaacgccaggtgggcagtgtgcgggcggggggggcggcaacgggggcggggcgaaggacgacgcgaggcggggccggcgggagctgggcgtggggaggccgcgtgggctgcgcggagggtgtgccactcggggaagcgtgggaaccgcctggttgcctggcgctgcgtagctaggaacacgttttgtttaaatactgggaactgacgtaggcgggtgcgccgcacaaagcaacgaaggcatcgaagcctggagacctgggcagggccgctgtcggcgggaggctgcgaggggtccgtctgtttccgccactgggccctccagggctttgctgctgcgccgccttctccccgggcacctagagaaagtccccagattgggcgtcctccccagaagtggtctcgccccgcccgcctccccagagtcagcgtggcccagcggggaagctgctccccccgggcgtggaaagagaagtgagcgcgaccgcagtgttggggatgcgtgggctgtgactcccccgaggcggctgctgtggtgtgagacacgtctgtgtgtgtgtgtgtgtgtgggcgcgtgtggatgtgtacatgtgtatgtgtgcatatgtacgtgtgtgtgcatgtgtgtggacatgtatatgtgtgcatgtgcgtgcgcgtatatatgtgtgtgtgtatgcgtatgtatgtgtgtatatattgtcaatcgaagaaaacgacgagacaagtctctaatcattttaggagatttatttgccaaagttaaggacgcacccaggagacaggtctacgcctttctccaaaaatgattttgagggccccagatttaaaggggaaagggcggagtattgagaagcagagttttcacaaacaaacgggcagaggaaaaacgtggggaatctgcattttacataagataacgcagacaaaatgtggtaggggaacaatcagatgggctagggtgactgcacctgtaaagataagctatcaatttgcattgccatggttaagttttatttttttgaaatggaatctctctctgccgcccaggctggagggcactggcgtgatcccggctcactgcaacctccaccttccaggttcaaacaattctcccgcctcagcctctcgtgtagctgggattacagctgtgtgccaccacacccagctactttttgtatttttaatagagacggtgtttccccatgttggccaagctggtctcaaactcctgacctcaagtgatccgcccaactcggccttccaaagtgctgggattacaggcgtgagccaccgcgcctggccaccatggtgaaatttcaacagctcaccaggaatctccttgtgggcaaaatatgggggaggcgtgtagcctttcatcttgtagccatcttatttaggaaccaaaagggggagacaggtttgcgtgacccagttcccagcttgactcttccctttggctaagtgaatttggcgtcccaaaatttaatttcctttcacatttccccccttttttt

SEQ ID NO: 1245276 - DNA, 4001 bp, Homo sapiens
aacactgtcctcccaatagagcgtctataaatcccagaagcatttttgttgcacaatgaaaatggaattttatagttctgatgatgtacacttaaataaaaatatgactgttaaatagtttattactgaattagtttgtaagtgaaatttgttctgagattaggatgtattctgaatagagtctgtctcatttgacatttttaccagcctctgccaatgcttaactgaaggactttaacatacagggtatatattcataatactagtctgtctactgatttcatccttttatgtctgctaatcttgaccttgtaaacaaggtctcaaggaaaaatacacaaaataacatgcagacttaaccacatttgccaacgcagtatctcagattcttccaacagctgtacgagaacttttacaaaattaacttttggttacttaatagctaattattgaccccttttcctgttaaggcctagcctgaagatctaataagaccttttaaatgggaacaaatattctgtgttagcatgtaaagaacaactatgaagctaaaaaagctagactcctttacgaccttaatttgtggaacaaaaaatcccaatggaagcactctgctctcaagcagaccctccataaagtggcagaaaagtgttttcatccatataatcaaagtatcatgaaaaggacctgcctggaaaccagaaagcaaatgtgaaataaaggtctttagtttgccactctatgaaaaagtttaaacgtcaaagcttaggcagataatgaaattcataagcactttacagtccgtggtgcgcacttgaatttcagcgtcgagggaggagggtgcgcctgggttttatcttttactgcttcaaaaacaagacatttccaaactgggataaccacacttatcaaattaagtaaacagcttcctaaaccaactttctgtctggctagctgtgtattcggctgactcacttggccagtgaaaaacaagatcgtgcttgtttcccctccagtatcatcagggtgtgtaagccagtcctgctcaaatacatgctacggtgatacagaaagtacgctgaagaaatagagagccctaaccactcaaggtggcctttgggagatccagccgccctccgcccctctttccgctccctccatccccatcccggcacccccgcggccagtgcccccttgccgaggtccgcggggtcccgccccagaacttcccgaatcgcccacgaagccgccctctccgagctttccgagagatccagcccgtgtgaccaaggctagtactccagtctcgtctgccacttaccttgctgggtccccaggccgctgccgtcccgggctcaggcgatgccactcctaccagatccattcgggaatgaaggcagagacaagaacagagcagagaggtggcaggacgggcagcaggctccgccgaggagacaggcgggacacgggcgactggctgctgatgccggagtggaggtgacagatggcggcgacggcggcggccgcgtccggaactggatctctcctcttccgccctcttcgctaggacagtcgcttgcaattggccgcacgcccctagctcctccttaaggcacctttccccgcccccgggcgggctacttccggctgctgaccgccgggctcggagaagcaagcatcagctggctgtcgcttggggtcacgttgcctgtgtcgggcagggcagggcaagaactgggtgtggcttcctttggcccaggctctgccctgtccccgcactgccatctccttctttcctccttggcaccccaaaaattgccgctggatctaaactagattagactagtggattgtaaataaataaacaaactaggctctctctgttcattcattatttcctggagcagttctaaactgggatgacttgggagacagaaaacggcaggtttatagagggaaagggcctggaaaggacggtcggagtttgtggtggttgttgttgaagggcggggcgtggaatgcggaaaatgtgtaaaatgtgttacgtaacagtgaacaaaaataagactgcataataaaacttttgtttctgtattttgtagagattctaataaaatgaccagataaaagataactaaacattgcatttcacttagtatatcaatgcactgttcaaatctttcattaactttttagtcctcaaaattaccgtgagagctaaattctgtcattatctctattttactgatattgaaactgaggcacagagaggtaaagtaatttagttgaggtcacacagataacaagtggcaaagctaataaggggtgaacccagacaatcggtttgggaactggactggctgtacattatattttgactataaactatacactgtctatatgttgtatattcaaacattctagaaataggtactgaataactgttttccctaaatctcagttccgagtcagtatctctaactgtccatacttgagagccctgggttactgatcttaatgatttccattagcacacaatctttgcctcctttccattccaggtgaaaacatgttctgaatcctccaaatacccctactgcaataaggcaaactatagccatatgatagggtgcagatgtgtgcttggcaaatgttgcctatatatgtgaatgtgtgtggaaattgtgttccttcctagtgttcaaaggattataattggacgataaatagtttaagaaaaatgggtgtaactattaatagaaatggacttctcaattctggctaggaaaaaataggagagggctgggcgtggtgggtcatgcctgtaatcccagcactttgggaggccaaggtgggtggatcacctgaggtcaggagtttgagaccagcctggccaacacggtgaaaccccatctctactaaaaatacaaaaagcagccgggtgtggtgacacgcacttgtaatcccagctactcaggaggctgaggcaggagaatcacttgacctcgggaggccgaggttgcaattagccaagatcatgccactgcactccaacctgggcaacagagtgagactccgtctcaaaaaaaaaaaagagaaaaaagattaaaaggaaaagaccagaccagaaagaaaggctaaggctgagatgcagtgtatgacaaaaatgtgccagtgagagactatttgggggatatatcagaaaaggacaggaagtcgaaaataaaactaagaatctgaatattctttttgttttgttttgaatgtaaaggagagaggtcagatctttttttttttaacttttttcttttcttttcttttcttttcttttcttttcttttcttttcttttgaaatagagtctcgctctgtcgccaggctggagtgcagtggcatgatcaaggctcactgcaacctccacctcgtgggttcaagcgattcttctgcctcagccttccgagtaggtgggactataggcgcgtgccactgcacccggctaatttttgtatttttagtagagacggtgtttcaccatgttggccaggctggtttcgaactcctgacctcgtgatccgcccgcattggcctcccaaggtgctgggatcacaggcgtgagccatcgcgcccggccggaagaggtcagatctacccagatgtcaggaaggattccttagagtagatgacacttgatctcagcctcacaagatgaccaggcattggtgagatgggctgtaaggtggagcagggccttctgtacaaggggagcagtcttcagggtacctcggaaaaggccaggtggttcggcatggtcagatgtagggttcaacagggacaaagtgagagaatgggttggagaatgcaggaaaggttcaggtccaagagttttttttgtttttgtttttgttttttgagacggagtctcactctgtcgcccaggctggagtgcagtggcatgatctcggctcactgcaacatccccctcccggattcaagcagcaattc

SEQ ID NO: 1245277 - DNA, 4001 bp, Homo sapiens
tcatttaggtggaataaattgaagtaggctaaaaatcagtcactctatccccacatcccccaagctcctaaaagcaaatacctaaccagcaaacaaaagcaatacagaggcacattattgcgacaatttcagcatctccctgacctcacaagctgctggtggcatttaatgtggattggtcttttgcctgttttttttaaatctgtttttctctcttcttcagtattttattctcacattgtttatttctttcttcctcactgtatctgactggattcttgtaaagtataacttcattttatatagatcatgttgtctctatccttcctccatcccttcctccttccttaaatcctaacctattttgattccttccttctcaaatcattatatttagaggagaaagctttttaaaaattcctcatttatacacaattacaaagcttttctttcatatttttgcctccctagaagagatgaataatttttttcactttgatatgcattttgctactgaccacatccagatgtacctatttcttttattttttatgagaattctcttttgtagggtgaggagaagaggtaggggtgctgaattttatgtttcttactatctttaactttgttgtccactaaagtcacaatctccttcctcttcctttactgttcagttttcctatcccttgtggacccatccaccaaagttgttagttttttggtttcttctgccgaaaatattgtcttcgtcttttaatttttttgtcaacactaaaactactgatttgttttgatgctttttgtccatgctaactataatattttttctaccttttagaattcccaaagatatattcccagtggagatatttaatatttatataaaaagctatatttatttattttctagtgatagccatagctccgagctatctaacatttgatcagccaaaaaactactatgtatctatttttttaatttttttatatttggccttttaggctcctcaagaatcccaacaactgacacttccgttctttatgtaccaaaagaaatttgctattcttcatctctattatcacctcatcttcatttatttgtgtagctttctcctttaattgaccacaaagtttagtttgatcaccctgcacaggactcacaatgaatatcattccataaatcactgccactttcaaaaaccaactttcttttggtattcaaagcccacacacaccatgtcagactacagatgaggaaaaagaacctcctaatgaaagaaacaaacacaacaatcaacacccatcatcccgagtatatgtctgtgtttgtaactgtgtttaattgaatattcatagcacttctttctttatgtgaagatttttgagactaggagcacatttttctcataccatgacaatttcatacttatttttattattaaaaaagacctatacactaagagcaaatatcacccagcatgaaatcaaagaaaacaatcatcctcttaaggttctgaggatcatcactggctgtctgcattatcctgactcatcagcatcggtttaacagtcctgacactttggagcatcctgccagacccatactctgtgtttaactgccacagttcacctctaacagcatcagcaatatcatttttctttcactctatagagttgtctctatagaggtccctccttccccagcatttggtgtgaaaacttaccgcttttaccaactccccctgctcccagcattaccaccttgtactctctggacccgcctgatgcgctgcccggggagcagctggcttcattttctacctccatcttacccgagggaccggaggaaaaaaagaaggagaaagtcacccgtgtcaggtgcttgctcgaatattaagcaactctaaaactgtgtcaaagcaaaggttttagtacgaggtaagaaccatcagcgtcgggctggctgctggtcctccgctcgagcgggtctcatagcaaccacttcaattgcttccaataaaaatctggcttttgcatcccccacccttccttccgatccttcactctttcacgtctcctacaatctctctctctctctctctctcattttcatttcctccctcatttgattctttctccatttcccttccccactgtctgtttctctcctttctctttcctgcctaccccctgcacagtcacagttgtcagtggcacacacacattcgaccccttttcaggctgcgctgctagaatggagtgaatctgagacctcacaggagttgctatgtctcacaggatgacttctgtaggtacagcttcaaagatgctattttcttttaatcaaagtcaattaataaggatttcttctgcttatagtcttgcattttatcactcttctattgcagttttcattccgggaaaatggaaaagcaaaacaaaaacaaaacagaacagtaactcagggctcataaggatggatcttcagtgttattgaaataacagccggctaacaggaattgttcagctcactagacagttgcaggtttaacataggggggtaattgaattagatcattgtcatatttggacaaggctcatgcttgtttacgttaagttattagaaacaacttaaatcacaaggactatcaagcatgaaagagataattgataaatatttttactgacaattatactagcataaaagattgtagaagaatatttttaaatgtccaaactattattacctgtttgaattcttataaagctttgcggtctttgtttttctctaaagaacttctaaactacagagggtcaagaatgttttcaataattcctaattgtcataataagatcctgtcttttaatcaacatgatgatgtttaacatgtttattgtctattttctaaagcttgaatcattatcagatgcagacaagtgtttggtgtgcatagactagacttgtctttctatctagattttaagctccactaggaaaagaactatatttagtccatttcttgtgattctataatatgtgcactgagtaggcactcaatatatacttgctggtttctgtagaggcttcaaattgttatagccaagagcacagtctctgaagccagaatgcctgtgttcaaatctgggcttagccacttaccagctatatgaccttaggcaaattccttcacctctctgtgcctcaatttctttatcactgaatagttaattaaaaccctactttgttaactcattaagtgagctaatatttatatagtgcttaaaactgtgtctgacaagtgataagtaccacacaggtatatgatatgaagagtatgttattattttgaatctgtgctgctgtcagtctactgtttacaaacactcgcccaagaagagaagattatcttttcatgtgtttattggccatctgtatatcttctttgccaaagtatctgttcaagtcttttgcttatttttataccaaggtgtttatttccttattgcactttgagaattctttatatatttcggatgtaagtcttttatcatataaatattctgcaaatattttcctctagtgtgtggtttttcttaacagtagctttcaaagatcagcagttttaaattttgatggggtccaatttgtaatctctttcttttacagatcatccatcaggttgtaaatgaaactttgcccaattattccattcccacttttctatcttttttactctttgattgtgaattcagtcaatgtcataggtccacttatcatctttctataggtaactgccaagtttgtaattctggacccagttttttctttgagctgcagaaatgattctaactgcttctgggttgtctccatccaaaccctgattatatctcaacctcagtaggtctagaagtatatcatcctcatcctcacaaaacaaagtcaacagtgttctctacctttgcagggagcattaccaccctccaggtcctacttttagatt

SEQ ID NO: 1245278 - DNA, 4001 bp, Homo sapiens
cactgtggtatcacacatggcttcatcatactatagtcacccttcaaaggacattaagtaggcttccgctcctgatctgtgcagacacaacacacacacacgtatccacgaaaaaaaatcaaagcaaagagagaaggctgggtgcagtggctcacacctttaatcccagcactttgggaggccgaggtgggtggatcaattgaggtcaggagttcaagaccagcctggccaacatggtgaaaccccatctctactcaaaattcaaaaactagccgggtgtgggggtgggcgcctgtaatcccagcaactcgggaggctgaggcaggagactcacttgagcctgggaggcggaggttgcagtgggcggaggttgcagtgagccgagatagcaccaccgcactccagcctgggcgacagagccagactacgtctctctctctctctctcaaacacacacacacacacacacacacacacacagtaaacagagagcacaaattcacagctccaactccaccagttattcaaacacacattaaggatgtgccaattttatatagggactttgtttttaaattcttcttagaaacgaccacggctttgcaccaactgtgagttttagctaagtactatgcggttttgagaaagttattttactctgtaatttccgccggtttggagagaccgtgcgtaaagcaggtagcctgccacctcctgttacgttgtggctgggttttgaaggagtacattcaggggcttggcggctaacgtccaagccccaccctagcaggttgttaaactctaacaactgtggaaagtcactcggaagctccagtttgacttgccctttgaggggctgggtgtctgtgttgggaaagggtagcaggggtgggggtggaaagacactttgcacagatccttgtttgcttaagacgagcctctgtgggcattctgggaacacgtgcacagctccagcaaaacaaaacggacccgggtttctggggcagagggaagcgcagcccgttctaccgtgttcagcggggtaactgcgctttgcgggagcccctgccttgtagctggagctcgtttcctttccgtgcctgggcgagcgctggttctccagccaagagcaccctccccagttggcgagccctggctctgggcgggacccgtgcctggatccccttctctggagttccgcacctgggcttcgggagctgaaagcgcaagggggctacaggacccgcttgtttattttttctcctcccgaaatcctgtgtcaccttccgacccgcgttttccccgtggtcctgcatccgacgggtccaggtttctccctgcagcaatttcctaagaggctgtcttccgtccccctccttccccacaccatgccctcagcttccccacatcgccctccttaggggtgggcgcaaaccgagctcccctggaacttacacgtggccacagcgggtccggacaggctggtgtaacacctcaaggcacacggcgcagtcgaaggacgtgacgggcaactccgggtccctcctgcgctccagggcccgcgcggtggcagaggcgggcgccgatttgccgctgtcggtgctcagcacggagcccatcgctgtgcctctcgcccagacagctgcgaagcactcagtgcctgccgcagggttgttttgttgccgtgcggtggaggaaggaagtcccggcccagctgcgatcgccgcctcccagctctcccagctcgcgcagcccagaagccacctccgccgctgcgcccaaccctggtctagggcagggcgagcgcgcggccgcggggctgagatcttcggcaagccgcctaggttaaggcgcggaggcggaggcggcagccgccccgtgctctgtcttgtggtattgggaggattgaaacctgaaacctcaactgcagagaagaggacttgaggcagcagtaaaccttccaagctatcacacacagctgctttccccactgtcagaagttaagtgcgggcgtggccatgcttaatgataatcagagaacagccgcttttaaggtgaagtggaagaccatcctccactgttgtcatcacaataagctgcaaaaatgacctatgacctatgattgggcgtctcctaagacggtgctatcgctactctgtcatccaatcaatagtccattaatggagagatagcctgggtagtggaaagagtcctggagattaggattccaatcttacctctcctacagagattctagtgctaaaccctgccatctccagtttcctctgcggctcaggatttcctctgttgtttgtacgctccccaccccgccctttaaacatgatcagccaggcgcggtggcccacgcctgtaattccaacactttgggaggccgaggcgggcttgaaactcctgcttgagggcaggagttcgagaccagcctggccaacatggtgaaaccccgtcgctgctaataatacaaaaattagccgggcgttaatttacactttttacgaagacttatttagtgcccactgcacgccagactcggttctagtgatgaagacacaatcgtcaacaagcaaacaaaatcccagttctcacagaacttactttaaaaaacaaaaacaaaactttgagataattatagattcacatacagttgtaagaatagtacatagtatataatacacatatacaataatatataatataacacatgggatataataacgcatataatacatgtacgtatttagcaggccataaacttcacccaggctttacttttaattaggagatataggccgggtaccgtggctcacgcctgtaatttcagcactttgggaggctgaggtgggaggatcacttgagcacgggagccaagatcacactactgcactccgtcctgtgcgacagagtgagaccatgtctcaaaaaacaaaccaagccggggcagtggctcacgcctgtaatcccagcactttgggaggcaagaaggacagatcacctgaggtcaggagtttgagaccagcctggccaacatggtgaaaccctgtctctactaaaaatacaaaacttagctgggtgtgagctacttgggaggctgaggcacaagaatcgcttgaaccggaaaggtggaggctgcagtgagccgagatcatgccactgcactccagcctgggcaacagagggagaccctgtctcaaaaaaccaaaacaggctgggtgcagtggctcacgcctgaaatcccagcaatttgggaggccgaggcaggtggatcacaaggtcaggagttcaagaccagcctggccaacatagtgaaaccccgtctctactagaaatacatttctttagtaaaaatttttgtactaaaaatacaaaaattagccaggtgtggtggcacatgcgtgtagtcccagctacttgggaggctgaggcaggagaaccacttgcacccaagaggtggaggttgcagtgagccgagaccatgccactacactccatcgtgggtaacagagcgagactctgtctcaaaaacaaacaacaaacaaaaggaagatacatgtaatcaatccataaacaaatgaacaaaatcatttcagataatcagagccatgaagaagataaaacagtaaatggcaatgaggagaagaataagctcagagaagaatttttggatgaagtgacatttgagcagagccatgaataatgaaaagaagtgagccattcaaagatttaggaaaaagcgtggactgggaacagtgaatgaggcagaaccaaagaaaggaaagacctatggagctggagcatgggtggtggggggcaggcggtggggggggggaaataagatgaaaaggtagttattcccatcttcaaaaggaaaacaaaaacctccctttcatcccacttatgcctcaactcctgccccatatccgcttcaaggccaaatctcttgatctgatcctctacattttgtcatcatttcttaattattcact

SEQ ID NO: 1245279 - DNA, 4001 bp, Homo sapiens
tgtcagatgggtaatgtgctgaccctgtaacaaggtttgaggatggcatatctcacacatgcctgtgaacactcaatcatcacactatgaaccgcaaaaggatccctcaaaacatttccctaagaatctgcatttgttgcacaaaataacaagatgtcattcatctcccttaaagagcaaaagcgtaactggcataatttctatcatgaaaatccacacactcttggctcacacaaccagcacaaaatagaaataaagtagacagtgcagttaagattggggaaaaaatgagaagagttggtatcaagaaaacagccacagtaagggcatttgcaattaagaaccaaaaattcaatccatcctttacaaaattatagaacctcacctcaaaaaaaaaagaaaaaaaagtcgaaggagaatgaaatacatttagaaggttggtcaattcttttcagttgtttgcaaacacacgtaactttcaagcctgagtgtgttttttaaaaataaagatttccgggcggggcgcggtggctcacgcctttaatcccagcactttgggaggccgaggcgggaggatcacgaggtcaggagatcgagaccatccttgctaacacggtgaaaccccgtctctactaaaaaaaaatacaataaataaataaataaagatttccaggccccacctgcccgaacattcttttgttaagtttgaaatggagcctgggaattggtatgtttacttaaaaagttccccggggactctgatcatcagtcaggtctgtcagaagggctatacaccttctcaacaagggctctttccaacccttactcacaccctagctgtccataaaattttatcaaagttcttgtaaatatgcctgccaatcaaacgcatgcgttatctcacccaacccctttgtgttctcccccaccctgggtagcatctcaatttcggctcattcctcataacagaagtcttcctttctcctctccacccttgtattaatcaagtaataagtaagcagaaaggtaaaacaaaggggaacgctcatttcaatgcccgaaaatcctgtcagttttaagagaccagagaagaaaactcattctagatccctctaacacatagtggactggaaacgaaacaaaacgctctcgagggtgttctgtgaagcagggttgaggggaagttacagaagagctcttggaccgaggggacggaccaaggttctgaaagaggaaacttgaaagcagggcaggtcgcggggcgagcgggcccgcgcgagcaccgccggccgcttttgacactcgacaccccagccttcacccgggttgctaagaaacaaaaaggctccaagatccctgcaattcctcccgggcctggcggagacgacaggggcctccggggcctgaagacgccgcagggaacggcctggccactgccccgggggcgcgaaagccagggagagcgggagagcgggagagcgggagagcgggagagcgggagcttgggctgagggggctggacgcggggagcgggccccgaggctgaggaaaaggccgccccgggactctgaggggcggggaacgggacctcgcggggcagcgacgctcgggcaggccgcggcgggctcggttcccgccaggcggcagcccggggtcccgggccggaggccgggcctaagcgacaacccggctccgcgagggggagggggcgtctactcacacgtgctgacaggccgtggtccgcacgggcgttttgagcacctcctgacagacggggcagtagaaatcatcttcggtgtaggacgtggccgcagagaggtcctcggccatggcgggggatggggaaacaaggcgatggcgacagcggcagcggccgaggtgacggtggcggcccggggcccgactccctacatgaacccggaggggggagggggatcgcatcaggatacagcgcgcgccaggaagggggcggggccctgggtagggcggggccgaacgcagagacgctactgccgcacgcgccgggcaagaggcgacccctcccacggctcctcccacagggggctggatgggggacggtgcttggcgggaggctgggctcgcagcatgccgtgggcccgccccgctcgcccctcaccccgccccaggacgcggcctcacgctctaggccacgccctcaccgggctccaggcgcgggctcgcgccccgccctcagcccccgtcttcgcccaaggcctcccttttcactgcttttccgcctctactcaccccgaccccgagccccgagtgcccagcccgtgtccgcggcttcctccccgccccgcttcccggcaccccggcccctccacgcttccgccggggagactctcacctaggagccccgaagcggcgttgtggacggagctgcttttccttcacgtgttcgtagagacccggcccagcgctttcctcgagcttcctgtccggccgccgctatcttcgcagccgaggccccggggcaaatggagggcggcgtgcgctgtgcttatcggcccctaacggggccggagccgaggctcatggtgcagggagattcgcccgccgccgccagcagctctgtcttggcattgcgctgcctacagcctacccggccgtcaccgaacgcgggagcgccggggatctgggcggaggagccaggagaggcggggaggcacggggtgtgaagtgcggcctgtatagcaaccggcgcacggcgccttccgcgggttgtgacgtaagcagctgggcgcccgcggtgacacctgcgcctccccgccccgcctcgctaggcccgggaccccagttacctctcctgtcaaatacattgggcctttcaggaagttttcgtcaatgttcaagatttagtctttactatttgccctaccagaatgttttgatcttgtcaagatgtgttataaacaaatatttgttacgggattttaatcctttgggggcaggattaaagtttccttgagaggatgtccactttctcctttaacagcatgaccgatgcttaaatacggtcgcagatgcagtcttctactacacctttgggttgatttttgattttttctttttttttttagctttgaagagaaatgccgtagaagcatggacgtggcttttcaccaaggttattcactaatttaagtgttttttttaattttattttattttattttattttttgagacaggtactcactctgtctcccaggccggagtgcaattatctgtacaattgataatctataagatggtccaacctgcgtaacagagtgagattccgtctcaaaaaaaaaaaaaaaaaagaaagaaaaaaggccgggcgcggtggctcacacctgtaatcccagccctttggtaagcgaaggcggttggatcacttgaggtcaggagttcaagaccagcctggccaacgtgatgaaatcccatctctactaaaaatacaaaaattaaccggacatggtggtgggagcctgtaatcccaggtactcgggaggctgaggcacgagaatcgcttgtacccgggaggcagaggttgcagtgagccgcgatcgcgccgctgcactccagccctggcgacagagtgagactctcaaaaaaaaagaagaacaaaaaaaggataaatcgataagatgggatccacaatgacgtgaaagaagctaaggaaaatctggaacattatacagcatctacaattagcttcagagaaaagaaaggttttattaccatcctttgttaaaaccctcccccatggtctaaatgaataaacagaagccatttaagggactatttaaatcaattctgccatttattgtctatgttgacattggcattgttaggtgttatgcagatgtcatgaactttgctctcaacctgtttacattattacatatctatcagaatgagagagaaaaaatggtatttgccaaagtattaaattttgcattaaacgatggctataatgaggataggaaatgg

SEQ ID NO: 1245280 - DNA, 4001 bp, Homo sapiens
ggggactctgatcatcagtcaggtctgtcagaagggctatacaccttctcaacaagggctctttccaacccttactcacaccctagctgtccataaaattttatcaaagttcttgtaaatatgcctgccaatcaaacgcatgcgttatctcacccaacccctttgtgttctcccccaccctgggtagcatctcaatttcggctcattcctcataacagaagtcttcctttctcctctccacccttgtattaatcaagtaataagtaagcagaaaggtaaaacaaaggggaacgctcatttcaatgcccgaaaatcctgtcagttttaagagaccagagaagaaaactcattctagatccctctaacacatagtggactggaaacgaaacaaaacgctctcgagggtgttctgtgaagcagggttgaggggaagttacagaagagctcttggaccgaggggacggaccaaggttctgaaagaggaaacttgaaagcagggcaggtcgcggggcgagcgggcccgcgcgagcaccgccggccgcttttgacactcgacaccccagccttcacccgggttgctaagaaacaaaaaggctccaagatccctgcaattcctcccgggcctggcggagacgacaggggcctccggggcctgaagacgccgcagggaacggcctggccactgccccgggggcgcgaaagccagggagagcgggagagcgggagagcgggagagcgggagagcgggagcttgggctgagggggctggacgcggggagcgggccccgaggctgaggaaaaggccgccccgggactctgaggggcggggaacgggacctcgcggggcagcgacgctcgggcaggccgcggcgggctcggttcccgccaggcggcagcccggggtcccgggccggaggccgggcctaagcgacaacccggctccgcgagggggagggggcgtctactcacacgtgctgacaggccgtggtccgcacgggcgttttgagcacctcctgacagacggggcagtagaaatcatcttcggtgtaggacgtggccgcagagaggtcctcggccatggcgggggatggggaaacaaggcgatggcgacagcggcagcggccgaggtgacggtggcggcccggggcccgactccctacatgaacccggaggggggagggggatcgcatcaggatacagcgcgcgccaggaagggggcggggccctgggtagggcggggccgaacgcagagacgctactgccgcacgcgccgggcaagaggcgacccctcccacggctcctcccacagggggctggatgggggacggtgcttggcgggaggctgggctcgcagcatgccgtgggcccgccccgctcgcccctcaccccgccccaggacgcggcctcacgctctaggccacgccctcaccgggctccaggcgcgggctcgcgccccgccctcagcccccgtcttcgcccaaggcctcccttttcactgcttttccgcctctactcaccccgaccccgagccccgagtgcccagcccgtgtccgcggcttcctccccgccccgcttcccggcaccccggcccctccacgcttccgccggggagactctcacctaggagccccgaagcggcgttgtggacggagctgcttttccttcacgtgttcgtagagacccggcccagcgctttcctcgagcttcctgtccggccgccgctatcttcgcagccgaggccccggggcaaatggagggcggcgtgcgctgtgcttatcggcccctaacggggccggagccgaggctcatggtgcagggagattcgcccgccgccgccagcagctctgtcttggcattgcgctgcctacagcctacccggccgtcaccgaacgcgggagcgccggggatctgggcggaggagccaggagaggcggggaggcacggggtgtgaagtgcggcctgtatagcaaccggcgcacggcgccttccgcgggttgtgacgtaagcagctgggcgcccgcggtgacacctgcgcctccccgccccgcctcgctaggcccgggaccccagttacctctcctgtcaaatacattgggcctttcaggaagttttcgtcaatgttcaagatttagtctttactatttgccctaccagaatgttttgatcttgtcaagatgtgttataaacaaatatttgttacgggattttaatcctttgggggcaggattaaagtttccttgagaggatgtccactttctcctttaacagcatgaccgatgcttaaatacggtcgcagatgcagtcttctactacacctttgggttgatttttgattttttctttttttttttagctttgaagagaaatgccgtagaagcatggacgtggcttttcaccaaggttattcactaatttaagtgttttttttaattttattttattttattttattttttgagacaggtactcactctgtctcccaggccggagtgcaattatctgtacaattgataatctataagatggtccaacctgcgtaacagagtgagattccgtctcaaaaaaaaaaaaaaaaaagaaagaaaaaaggccgggcgcggtggctcacacctgtaatcccagccctttggtaagcgaaggcggttggatcacttgaggtcaggagttcaagaccagcctggccaacgtgatgaaatcccatctctactaaaaatacaaaaattaaccggacatggtggtgggagcctgtaatcccaggtactcgggaggctgaggcacgagaatcgcttgtacccgggaggcagaggttgcagtgagccgcgatcgcgccgctgcactccagccctggcgacagagtgagactctcaaaaaaaaagaagaacaaaaaaaggataaatcgataagatgggatccacaatgacgtgaaagaagctaaggaaaatctggaacattatacagcatctacaattagcttcagagaaaagaaaggttttattaccatcctttgttaaaaccctcccccatggtctaaatgaataaacagaagccatttaagggactatttaaatcaattctgccatttattgtctatgttgacattggcattgttaggtgttatgcagatgtcatgaactttgctctcaacctgtttacattattacatatctatcagaatgagagagaaaaaatggtatttgccaaagtattaaattttgcattaaacgatggctataatgaggataggaaatggaatgattagaaatatatagagttaacagaaaactttatggaggaaatgggttttaatgtacatctcaaaagcattgattcctagaataataataatttgtccaatgaatagctaattccctctaccaaactatattttgtatttttgttgcttttcctccttagcagcaagcgcagtggaagcaagacaagaaagctaatactagcttcagatttcctggaaggaggaagagcacgtgacgagaggggcagctaatagcagtagttcaggtgcttttcacattcacttataaaatggttctttgagttcaaatttttaacagcccagagaagaaaactcactttttttcttttttcttttgagacagaatctcactctgtcacccaggctggggtgcagtggaatgatctcagctcacttcaacctgcgccttccaggttgaagcaactctcctgcctcagcctcccaagtagctgagattacaggcatgcaccaccatgccaaactaatttttgcatttttagtagagacagggttttgccatgttggccaggctagtctcgaactcctggcctccagcgatccgcccaccttggcctcccaaagtgctggaattacaggcctgagccactgtgcctggcctacattttacttttttgataattccactcatttcattcattctgaccatttaggaagtaaggtgtattttctgtataatagtgtttcccattattcattgggaatatct

SEQ ID NO: 1245281 - DNA, 4001 bp, Homo sapiens
cccttgagtccattatctatcacagagtccattatctatcaggtgccaataaacatctgctaaatgaataaatgagcattgtagaaaggaagcaggcattggaggcagagatcagcctaatagcctctagggatcctccagcctaaagctaaacacatctgagggtggggagcctccttcttatataaaaaaaattaagcatcaatggacactttattatgatttattactgtacacaatttaaaaccacaatgaaacctaacactgcactgtggctatctttgttcttggacgtgcatttacatgggcaggctactgttttgccatgtggaattttgtgtgcgaagtgtttattctttctattaaaaaaaaaaccacacccttgtttctattgcattattacattccctattatcccatcacatgttttttcttcttgcagcaacacagtacacaccctgtactattgctgacataaaaattacttgtcaaaaatacctctatcttagcaccacattactcatctgatctttgcaaagcactggcctttgtttcacctgggactagataactcaactgcttttactagtgactcctgaatgcttgtagtagaaggataaatgctagtgtcacctatgtttttaaagtcaccttccaaaacaaaactacattggaggtgaataataaatctttcaagtttttaacttcatttttcaagggatttggaggaaaatggtgaagagagaatctgtcacagataccaaggtgttactgcaatgtaaaagagagtagaccaggagcctttggccctcagcaatctgtcttcctacaagaaaaatcgaaagcccatttccataaccattcttattccctgctactagtgtaggatgcgcaggactctgccctctagcagaaaatgctaatgccggagtgtcctgctaagtctgaaggttacgttttttcattgcactcttatcaagataaccccagatctggctaggctgacatcaaaacagaactatccttggaaagaaaagaacaggccagagtttttggaaaagccccaataacctaaagataaaatccagaatgagagtctactggttcatggctatctaaatggaaacttcactcaagctgttttctctgttctctttctgctgcccccaacagccctcccttccacctcccagtactcactgctagcatgtctctcttaatattgcaaacactattacaatgaaggaacagaagaaagacagtatttcatacgaaggtcactgcatttgaccggtgctcaattagagcactgggcaaaagtacaatcagccttccaatgataccttttcaacaaaggataccccacctctagactgaagcctaaatctattactacagataagaaagcaggcatctatggaaacctaacattcagatacaactgcctgtgtatgaattatatcaaaattcccatgaaaggaaaccaggtgggatttctacaatcccaaattcaccctgcacctacctccaatggcttcttcaaagggaaggtataaagtcatttgcaatttatttctttgaaccaggagttttagcagcccccacaccttctcacagataggaacgatgttgatgcagaaaccacccaaacagccctgtgccagcactgtcggcccaaatgacccagagacacccaggcgctacccagatcgtggggggttacctgtatctgtcaccgagtctctttcaccccttctgcgtgatgacatcaagtggaaatggtacacgtttaggaggcaagaggctgacaggcaggaaacacaattgagactgagctttcttcagcctgcagtgaaatacatgcaggaagggttagatacgcgccgcggagaaggaaatccaagcgccctcctgggcagacggggctggagcgggtgcactagggaggtggagcaaggcagatgaggtgtggagggctggcggccgagaagggggcgtcacggctcctaattgtctctacaggataaataaccacctcccccctcctccgcagtctcccccgcccacgagttcccctctggtggcagagcgcctactagcaacagtaagccctaggaaagaaagaaatcggagcaggtggggaataacatcttggggcaaagacacactggcaaaatctaccaggtaacccggtcatatgggaatgcggggcgcctagtcagccgcgcagacaggcacacagcgcggcaatcccgagcatctttctttcgtttgcccctgtccgccacctcatcaagtcaccgccacctcatcaagtcaccgtcacctcatcaagtcaccgtcactctgctttggcgatttctctactctctccagacccaggcagcgctccccaagccatgccccgaccccaggcgggattggggaccgccgcttcccgagcagcgccccacgagtccagctggctttgtcctgccgctgtccttccaggagcaagcgccccaggcgcgtgtgtctgcacaaaagacccccaacatctggcccttcacagcgctctctaatcccgggaggggccctggggcaacttctagggctggagaaggcgcgagacaaggggaccgggagaagatgagccggggtgtgtgcgggccgggggcgcaactggggcgggcgcgcgcgcacgtgcacacccaggggcgcgcgcggcgcgggcacgaggaaagctccctcggaccggagctccagggggcatccgaggactcggccgagcagccgacagcgccgctccccgccgcggccgcccgcccaactccgccagctctcaggagacacgcaactcccgggaccacctcccccgtgccccgccagaccccgcgctcccctccccgggaccctgcggccccgccaccccctccgcggtccagaagatctccccagttacagcaggcggcagctgccctttcccgcttccacggcttcggcgcggccgccgtaggggcgcagacatccctgcgcacccctctgtccgcccccgatccggagccggcagagcagagaaacaaaccgaaactcactgacctttctccgcggcgggctcgggtgctcgctacagaggcggcggcggcggcgacagcatcgccgggtggtcccggcgcgcccgctcctttcagccagactcgcgccccgggccggcggccgccgctcctccggccgagagccacggggcggacgctgacagcgcggcggcggcgcctgcagccccagcacccggcccggcccttcgggcggcacccccacctgcccggccgccctccgcgttcgcggtcggacaccgccgccaggcgctcggcaccgagcgagagctttttgtgtcactgagactccggcaccaaagggggtggggggagaggctgggctccgctccccgcggcaccgccctccccggcggctccaccccctcctccccgcccacagcccggcgggcccgggacttctctccgtcagtcccgaatcgcccacctcccccggggtgaggggctgcctaccctctctcgcgcgctccctcggctttgcccccagtgcctaccctcggccaggacctcgacgccgtctctctaccgtgcaaaagcgggacctgagctggcggcaggtgtgaaaggaggcctgggcagccgggaggaggggcagggccgggaagggggccggggccgcggtgggtgggttggggggtgcccagtctgtgcctaggacccggacagcgagagggaggagctgagatcatcaggtttccagaagctgccctgcatcctcgtcaccggatactttttggctgcccctaaaagttcacgtagtccagccagggtggggccccgctttccaaagaggcccgaatggacaccccactacttgaatccctcgaatgggggacaagaagcaggggagtaaagagatgcaagtcctaggggttatatggaagcgcgaaccccacggaacctcggggc

SEQ ID NO: 1245282 - DNA, 4001 bp, Homo sapiens
ggctcaacatccttcttaatcatttttgaatttctgcctagtgtaatgttccacacccgttttaagaggaaatgccaagtaataagagataattgtgtattgagagagggggtggcatttcaaggagatcgcatccagcccccctctttcttcctcacacacccactccccctcacccccatggctaggctggcctgagataggggatactgccgcttaaatagcaatgccttcctcagatggagacaggaaatggttaagagggtgtcacaatacagctaaatgcggaggcagaagggtcacagcgcacacagcagcgagttgaccattcactgagctacacaatgaagaaaaaaaaagatttgataaatgcagaatgtcatcattctatcatcacacaaaaaactgcggttcaaacaggcctaagggggccaagcttgccttttaggttctggggagaggcgcggggctggggacagctgggctggataaaatagggctgggctttccttttcttgcccaatcgggcccctggggcgcactaaagcgctggccctgcgaccccaccccccaccccgacttggtagaggagccctggtcggccaagggaagacatcattctgtgtatgagggagtggggagagggggaggagggcctgagccagcagggatttaagcagacgtggagtgggagaggatagaagaaacatttccaagacgagaaatgtgagtccagaggcagaatacaaaaaagaaaaaaaatgaatctaaatgcatctcggatttgcttgggaggtgggaattttttattaaaagaaaatgaaagaaatgtggagtggaggtggggagaagaggggaaaatcaagctattgttgtagcagaatgtgagggagaggggatgtggggaaaggggaccgtgcaaacacaccccatttatcacagttaaaaacaaagcccgcgccggcccgctgctttgtcaaccgctgcccggggcaaaggcctggcgtgggggcagcttcccacctcatcctcacacacagcacaacacccaagggccggacgccccgctccagccggacccaaggagggcacagcagcgcaggtctgactctccgaggcgcgcgcgcacactcgcacacatgcacacacacatacagacacacacacacacacacacacgcgcccaagcatcttgaacccgtgtatgcaactgtcatacaaagacagttgcggggggcggggtgagcagggcaatagcacaagggcgatgcacaaaaagggttaaagacgaaaaaaggatgggatggaaaatcgtgcaagtgcccacgagagggtgggggctggggcatgggatagggcagagacccaggtcccagctagccagccatcggtactaatgaacaaaaaatgaatacaaaacacacataacacaaaacacacatatacctcaaaaaaagcaaaccacagaaaaccaagcatgctctcgcgcgcgcgctctctctctctctcacacacacacacacacacacacacacacacacacacacacacacggtcatgtatctttctcctttcgatcatacagggctaggtattaggggaaggggctgtgatttgggggaaccacgtccgccgcaaaaaataaaaaatggggctggggaggaagggacccaaattcgccaaaccctaacttcactacaaaagctcccacgagggcggccgcccccaccctcgggggtccccctaaaatggggtggggggaagccaccgctcgccctgcgtcctcgcgggtgtgccctgagcccccggccgcccgcggcgcccgcccccgccccggtgcctgcggcgatccacgctccgaagcagaccccgaaaggaaaaagcgatacctctgtttcgcacagagccaaacactggaagcacgagatagccgacgtggaccaggaccatcctggctcctcgcgcggcggcggcggcggcggctgcgcgcgggccctttgtggcgcggctccggggcgcgggcgcgggcggcggcggggctgcgggagccgccggggcgggaggcggagcgcggggcgcgggcggcggtggggcggcggctggcggggagacagatggcccatggaaaggctcccttcccggcccctctcgacattcaaaggcgctggggccgcagctgccgccacacaaaggcgcgcgcagccaatgggagcggagcgcagcgcggcgcggcctcgccggaaccgcgggggacagcggggaccgcgggcgcgcgggtggcggagggagggaggggtgacggctggaagggggccggcggccaatcgctgcggcccgctgcggggcgcgagggaggggtcagccccacgggaagcgtggagcccagcgcgggtccctggccgcccgcgggccggagagggcgcgcgtgaagcgcccctgcacagacatgggcggcgtgaacacggaacgtgcacacatggagagggacgtgcactcagacatgtggaggtgcgttccttagtgcagagagacgggcacgagcgcccttagtgcacacgaccctgaggtccctgcacaccgcgcacgggtcactcggggacgtgcgctcggaggctggcgcacgtgtagagcctgactgcgggcacaagggaagctggaatgcgaacaagcagccgcaaacaggacccaggcactgtcacacagacatgcacacaccaaacgccttgttaacgcaggacgcgtgccaagaacgcattctcagagacacacagagggaacacacgatgcagacacaggtaagacacgcacactccccaggctctctgcctggcgcaccgcgtcgttgctcttggagagcacaaagctcacaataattatttgctgaattgaaattcactcattcactgaggtctttgccaacagtctacacagagacacactgcccagaaaacccagggccactcatctaccttttgccctgatctgagacaggtacacccagccatgtgcacagacacgcccacttccacagccagcaggcggatatgtaacatcaggctctgaggctcctgcaaattcacacgtggaggcgcagccaccgtgtcacatgtgccctgtgacagtccagctggggacaagcaagacccaatcaaagagccttcaccgcaagctttgttgccaggaggacgactgaggcggtgttcttgcatgctcagctgaccttctgtgaaaactcccaaggcaaccctacgcctacaatcaggctcacagttcacacactaaggccagagaatgcttcaggggcccacccacgggcagaaagacagaggacattccctacattgggacttgtcttcaaagcccagtggtttctttctttaatgagtctgataaataggagatggtaaaaatcacagtatgtggagctggaaagaatctaatccaaccccaacctgccctcaccttggaaaaggagggtcattcatttaatccatgctgtgttgagcaagggcatagggaggtgatcccgatctgcccaagatcccaattcttggaggccagagagggcctcagagatgccaacgggcaatcaccatagagcttgttccatgcagaaatgggcagcacgggaagctgggcaaacggggagccttggaggggcacccagcccagtgggtggcaaggggaggagttgaggctgactccgggaaagtgacttctaaggcttttgagacttgaagaataaagaatgggagaagtgaggtaagacaatggacaagacagcaaagggaaaaccacagcctggctttacccagacagctaccatattcccagtggcaagggcagaacccagggttcaccattctctctcccataagcccgtggatctctcaggcctgagctctctttcccaccctaaactctggctgcccccagagaactcagggatgaagacggccagaggcaagtctcccaatagcagtccaagtctcaccctaggc

SEQ ID NO: 1245283 - DNA, 4001 bp, Homo sapiens
cacaatgagataccatctcatctcggttaaaacggcttttatcaaaaagatttttaaaaaatggatgctgaggccgtcacggtggctcacacctgtaatcccagcactttgggaggtggaggtgggcagatcacttgaggtcaggagttctagaccagcctggccaacatagtgaaaccccgtctctaccaaaaacacaaaaatcagccgggcatggtgatgtgcgcctgtaatcccagctactcgggaggctgaggcatgagaatcgcttgaacccgggaggtggaggttgcagtgagctgagatcaagccactgcactccggcctgggcgacagagcaaggctccgtcacacacacacacacacacacacacaaaaaaaaaaaaaaaaaaaaaaaaaaaaaaagatgctgatgaggatgcaggatgcagaaaagggggaacacttgtacactgttagggagaacgtaaattagcacagccactaatttacatactgggaaaagtatgatggaggttcttcaaaaaacaaaaaatagaactagtgctattgagatgagtttcttctatattctggttgttaatcccctgtccgatgaacagttttgcaaatctgggtacagatccaaaagaagggaaatcagtatatctaagaaatatctgcagtctcaagtttattcacaatagtcaagatatggaatcaacctaagcgttcatcaacagatgaataaagataatgtagcatatatacacaatggaatattagtcattaaaaagaatgaaatcctgtcatttgcaacaacatggatgaaaccggatgtcattatgttaactgaaataagccaggcacatgaagacaatatcatgttgttactcatgtgggagctaaaaatgtggacctgatggaggtaaagagtggattggtggttaccacagactgggaagggtagcaggaagaggagcgggatgaagaagagaaattggttaatgggtacaaaaaaccccagaagaaataaaatctagtgcctgatagtacagtggggtggacacagttaacaataacttattgtgtagttcaaaatagctaaaagaaaaattggaatgttcccaacataaagataaatgtttgagatgacaaatatcccaattgccctgatttagtcgttacacattgtatgcatgtatcaaagtatcacctgcacctgcaaatatgtgcaacttctatgtatcaatttaacaaattgggggaaaaaaaacccaaaccaaactcaaagtggaataatgaaaacactccatagggaagagagctgtccctcagaatcttcaagaaaccttcgaaaggtggtcgactgacatggagatggacacgcgataaataaccacacgaacatttcgacccggctttccagtcacacctccgaagcaagctatgtctctgcgtcatttcagctcctcagggtacgagcgagcaggccgccagggccgccgggataaagcccaagcgggataagctctaagtcccgacccgcccgcttgaccctctaccacggggcccgagaggacgcacagaggcgagaagggacttctccagccaagttcaccccctccgtcattagcgcggcctgttactcaacctctggttcaggtttccgaagcgccgctgaagacaaacctgcggaccccacgcccctccccagcacggccctggggcgcgagctggagcagctcttcgagctgcttctcccacccgggctcgcccagtctggaggaggaacagcgcccgcccaccccaaggagttcccattttccttgggactgaggacacaaggcaatagacccacgcgttgggtagtgaagcacagggctaatgcgaagtgagcccatgtcaggggtgggagtgccagttccacccctccacggcggccgagggacaaacacaaagaaaggaagggccggagttccagccgtcacactcaccagcacagccaaacgcgattctgtttgcggaaacggcggcccgcgccacgcgtgtctgcttacgtcacttccggaggtgcgagagtcacgtggagacggtcaggcgagagtgccgcgacgcacgtcctccgcgccggaactacgagtcccgacgtgccgcgcgcggcatgcagaagcttcactgagcgggcactggaggtcgcgagcacgttgctagtgggcgcggctggcggggccgggggcggcagggggctagcgtccggctgagcccggcgggttcctgcacgcggacccacgctttgtcgggctgctctgctgagtgacaccgccgtggcatccgaggagctgtggtccagcctgcgcggcgggaagcggcggcggcggctccagcgtcctaagaggtagcatgggcccaggcctctgtggggcagcgggaggggtctagagggcaccttcaaccctgggcgtgtgtccgggagctgactcgcggcgcgaacccggcaactgctccgcgtgcgccgctcttcgggctgtggcagtgtacgactgccagacgggtcgtccacactcgccgaccccacagaccccggcggccgagagaggtccccccgcccttccgggtcgagccagtgtcctggcaaatcttgctttgggactgtttttcagcctcctttgctgtaacccttcaccgtgttctccccccttcttccgaagccagttgaagaggggcccggaagcgcccgcgttcggaatggtttttaaaattagcaatttcttattagggactggcagactggtccttaccgccgtgtttgggaagccacaagaggccattcttacctgttagattctgagaaaagggaccgcctatacctcttcttgacaaatacctaaggatgcattagtctgcgttggctgaacttggcatggtgtggtttgggggagacaacacactttttttggccatcaccccagatttctactggggagtgaaagcgcctactgtactgaaactcgaaagctccatagttgaggactttcaacctgagatcagggtcaaaactacctgtggatagattattgaagcgtgtgcatattaacgtcgtgcgtcaagtccccaccttccaaggttgtaaaactgatcagatttacaatccgtcttgaattactctttaccaaaattgatccatttaaaacagctttgaaaatgtgctttaccagccttccttcttgtcagtaggcacaggtatattaatgaatagacctggctttggggaaggcagcatttgcagcgttgtgctttccaatctaatcacttctaaattgtgggcattagcccatttgaggttacaaactttgaaccaagaatgaggcctatttttcacaaataaggatgacccatcaatttctgatgactgcttgtatttgttattatatgaaatgaggtaagttgagaattaatctcattacatgaatattgacaactgcaaaagtgtaggtcttacagatcgaatgcattataggcatatacaagcattagaaccaggcaattacattccctgttcctgatgcttaagtttcttgagataattgctgttgtaattttacagaaaatgagtgtaattttgacttttaaaaacatgttttaatgtttttaaacaccgggtgcagtggctcacttctgtaatcccagccgttgggaggccgaggcggttggatcacgaggtcaggagtttgagaccagcctggccaacatggtgaaaccccgtctctactaaaaatacaaaaattagccaggcgtggtggcgcgtgcctgtaatcccagctactcaggaggctgaggcaggagaatcgcttaaacccggaaggcggaggttgcagtgagccgagattgcgccgttgcactctagcctgggcgacagagcgagactgtctcaaaaaaaactaaacaaaacaaaaaaagttattagattaaaagcctcttaactatgtgtttatgaaaactccacgatgatgggatatata

SEQ ID NO: 1245284 - DNA, 4001 bp, Homo sapiens
aaaattgagcatatctaacattatttcaccgaagacattgtgaaatcctgtccatatacatgctccctgaaaccttattttagagattatgtggttttgtttggaccaagaaatattatataacccttagttgttcagaaactctgaacaactttgatacatttacagaggaaatgtatcaaacctaagaattccaattatttacagataactgtattatcaaccacttaactatttttaaaatgggattgtggtttttcatgtcataaaaccctctttagaatgttttacaagtgacaatgttaagtgccacaccaccaaaaagacagttacaataactgtatggtacgtacttttgtaaccaataatacaataaaataagttaacactgtaattacctatgaccaattatcttggttttttacaatagtttagcaaaaagttccttcaaactcaaatcacctatgaaattttggctcaaaaatcacttcctcaatagcaattctccgttatcattttcaaggctaaaaactaaacccctaggagctaaatcgcaaaaaggaaaaaaaatgcaaagtagtctttccaatttaactgtcaaacggatcagaaagattaacattaattactacgatcgccattcaacaaactgtatacattgcagtaactctgacgtgataactttttataggatgcctgcaatagcagtttgtaagtatctttcgggtactcatgaactgagtcagaattaaaagttcagagtagttagtacagagccagtcaaatggcaaataggaccacaccatgagatgttaatggtactccaagattcttcaggaaacagaaatctagcattttccaagacgattatgcacacctgagacttttgcagcgaaccagactaatgcaagaggaaggaaagacatgcaaaaccccagacaagcaaaagagaacagcgctactcaccagcaaacaatccgaattcacttccgatttgggatcccgcagcaggttgtccattttttcaaatcgagtctcaaaactgtccccagtcgacatgttgctgctgctgtgacaatgccctcttaccagcaccagcagcggaaagcaatttcaaccaacttcctccgcggtgggttcgcagccgcggggcggaggagccggaacctcagggtcaccaggtgcgcccggttcccccgtcttcccctcactgaggggacctccgctctccagaccccgggccgggggcaacagcgacccacagccgctcggacgcccaaagtcgcatcccacccggcagcccctcacgacagccgacagcgccgtcgccaccagcctcgtcgctccggcgaggtgcttcagtctagcgggccccggccgccgtcgccatggaggggtccccgtcccgagatgggcaggagcgggtagagaaagagaagcagggtggagactccctccgggcaacaagggagggagaagaggaaaggcgaaagcaaagggcgggtgaggagctgtgccagctgcggccgccgctcgggccacgggccgggcccgctccgctcagaggcgctgtagacggtctagccccgcgtccccggctctactcggcccggcccgacgcaccgatcagtctcggccacgagctggtccacgcaggacagcctcactctcccattttgtcccgtcgctgctggggctgctgctacggtgtccggtggggcagggcgaggtcgatgcccgatggagacttagcagaggaaaggctggagagcgggcgaagaggaagacgatagttgggtcccggcggctgctgatgggggagcttctgggaggggctgcggtcccagccggggaaagggcgagtcgcggcggcgaatgcctggggggtggggcgaggggggctgagagggactaatatgtccgccttcctgttcaaacaaacggagaccgccggggcagactgcgcatgcggggcgcggacgctcggaaggggaaccagccgggaccccgcgcgcgcgcgcgcactctgtcgcctccgcagggtggggtggggcggggcggtgaggtgggcggggccttgcgggcaggcggtggagaaggcggaccgctgggaggagccgagtgcgggtaagcagctgccggcaaggttctcgccttggccggctctgaggagccatgcagggctctggagcggccttggaggtccggacggaggcggagctctggctgcttctgatcgctgtcccggcagatgccccagctctgtttcctctgggttgcagccagtccagagacttctgacgaggagagagtgcttgttctccttgttgctgttagggtggggcaataggttcttttttaggcaagaagccttttcgtcggcaggtaccagcattgagcaccagtggcgtttggttttcagtggtactccatggacagccctccgcgagccccggcgttgaacccatttacgattcactgggaaagttccgaagcgctgcagcgctcagccctcccacgccaggcgtgtgtgtcaggggagccataaaatactgactccggaagatacagtcaatagaagtcaagctcaatttaatttttttaaaggaaaataatctcgtagaaaaaaatcaatatttttaagtcgttcgtgttagttctcataacacccctactgtagttctctcctggacgtgtaatgctgccgtttcaatgtcaaaacattcagtgaaacttaattgtgatttttatcagaactaatgtaggacatgagaataatgggcatttctcctagttccgttacttcgttgactgtggtgtgaggaaaggtgaaagacttgtcactcacccccgctgataaagttatgttcttcactggtttcagcaggaaatctaccttaatttattcctcatcaaactttatttttgctcagaagccaaattaaggatcactagaaatagaaaatgtggatcttttaccccatgatggaaaatgctacagatgaaccaaaaagcatcggagtaaaaagcatcgtacagcatctgaacagtccaccagccttacgatgtgagtcagaggttaggaaaatcttacactgtttgaaaaaatgtctatttctattttcaatttattaaatacaagaaatatttagatataaaatccactatatatatcaagataggacgttcttggtttatacaaaaatcataacaaagacaactagacaaaccaggtatttcattaaatgcctttgcagcgacttttcttggctccagcattttaagtcatgtgaattagacttatttttaagcatagggcttaaaataaatcaggcagttgccctaaaataaatttcctaaaccctgcttgtcttttttttattattattaccatttttaggtattaggaattttgttgtttctcagagaaccgtgaacattatgttgctttccatttagacacatacgaaaaaatacaagtagttaagacaatacatgagtgacactgataaatataagtggaagtgataaccaacctggcagaactactagaaatatatgtggggtccatatatttctagaaatatctactagaaatataggtggggtccatatatagcttacttacctacaaggctcttctgattattgtgacacatcactagttatcttctgccataagatagatggactctaaatctagttatcttctgccataagatagatggactctaaattaacttttttttttttctccgaggcggagtttcactcttgtctaccagtctggagtgcagtggcacgatctcggctcactgcaacctctgcctcccgggttcaagcgattctcccgcctcagcctccggagtagctgggattacaggcacacgccaccacgcccagctaatttttggtgttttgtttgttttattttgttttgagatggagtttcactcttgttgctcaggctggtgtgcaatgtcgcgatcgcggctcaccgc

SEQ ID NO: 1245285 - DNA, 4001 bp, Homo sapiens
gagatgatgagtcattttccttgatttaaattaacattacagccaagatgaatttatctgatatcacggtttcttaggatatggtttatttcaccatcaatccaaggtgtcctgtcattacagcaaccagaaataggttcatcagcacagatcttagccattcttatcctatcccatcacttttccattaaaatctgtcttttcaaatggcaactaagaattctcacctgcgcacacctgccaactccaccattgtaacgtcggaatggtacacactgtttctgtaaagtgacatctttcagatacttcgtggcttttcgtatatgcatacccttgatggcctgagcagtttcacgagtgttctaagtatgaagaataaagtgttggttaactagatcaaagctttaatttttaaagtaaacgttaaattttcaattttcagcttttcaaaatgtcgagttatttctattctttgggggcaaggcaattaaaaaaacttgtgactaaaagccaggtaaacttcgttgaagctagagaaaactccaaaactccatttattcactataaaacgtttaaattccatcatcatgtaattacaattaaaatgccccatcttgatctgcacactaggttttcaaatggttttctggtactacttctcaatttcacaaacgctacatccttacaccctgatcatcaatgcctaaatataaggtggctgctcagaatttattaattttcacggtaaatccaaaggtgtcctaagaaagtcatcactgcagctaccttttttgagtggaacatgaggaactgttggatcacaactatgaatcgcataccttaaagtgaacacgaagattggaacctcttgatttgcatgctagaaaataaaacgttttggttaatttttggtatcttatgccaagccccaagtaggaaatgggtatctacctcctgtccacttacatttcgtggggttctccgggtcaagtgaatagcgaaccattttcacagatcacctagaggaaagtacagtgtaattctgtcaatacgtacttacagtaactcattcagtataaatatcagatgattcgaacagctgctcagagagtagttgttttcattattaatccaaaggtgtcctaagaaatgccatcatcgcagccatactttcccccaccaagggcttgctttcccttttatcttccagtaactacagcactgcttccacagaagtagccacacgggcctcaccaatccagtcaaccctttggaagaaaatacagcctgtttcaatccaatgctggatcttccaggcgtaaaatgactcgacgcatccgcagggcacaactcaaccgtaaccctctacacctcctccctcccgctctacagaaacccctttgctgtcagggctgcaggtagtgagtgccgtctctctcaacaccttcgggctatgacccactttaagagccctcctgtacgcaacactcttgtagtaacgtgttacgcctccacccgacttttctttcccccaaaactttttcctcgttgcggccaccactcaccactagacaccggacctccggagtccgcacggaccccaggcggcccgcaccccacggcgggccggcgcccccaccagtggaggagcccggtagtccccattcccgcccatcacgtccctctgcggacctcagaggccgactgaccccggctcccaaagtcaggccctccgccacgtcctcccgcataagaagccaccgcctccagcgaggatttagtagccctaggagttctcctcccgggggcctggaggccggcgcccccgaagccaggatggcggcgatggcaggaggattgggccctcggagcaacgcaggagaaacactcacctcaggctgcttagggaaagaggaagagcggtggattttgggagaactcatgagaacttgacttctcgcgagattcgtagccgaagaaacgagatctgaggaggcaggaaggcggaaagcgaagggagtgtagaatatgttttaagaacgtgtgaaaacgaattgcctacttagggactgtctcaaagttctcttttttgtatacagaaataaaaattcagggttttaaatgtcagtcaattaaaaacagggttgtagttctaggacaggctacgtattattagatatgaaagaaacattttatttattcgtcaacattagttaggtttgattatgtggccctgtactcctgaaagtggtttgtaaatggccaattaaaaagatgaaaggatgagacgtaattatggtaatcaggaaattctcaggatgggaatgtcatccaatcaattgtattataacctgtgtgaaaaatgcgctaactgaagggtctggttcaatatcctcgttttccccgctgcttctagatcttcatctggaggagaaaaccttttggcattttcttcccttttttccttccccaggtcatctctctggttattccctcatagtcagtgatgcacttagcttttgttagggcttctatttcatggcaccacccttctaggcagctcaaactctaggagagtagactccaggctaggctcacttgcttccttgacctcagtgtaggagacctcagccctaagtctctcccctcgactccacttccattgctgatgctggattccatggtgtttcctcggtaattccctcccctcacatgagctttcaactgcatgctaactcccagattaataccccagcgccacatctgtctcctgagctagaccctgatagcaaactactccctggacatcctttctgggaggtccctgaagacctgaggttatttgaaacctaacatgcccttaaacagaactctttgtcttctcctccgggttcctcttttatgttgcatggtgacaagagtaacagacaatgggccgggcgcggtggctcacgcctgtaatcccagcactttgggaggccgaggcgggcggatcacgaggtcaggagatcgagaccatcccggctaaaacggtgaaaccccgtctctactaaaaatacaaaaaattagccgggcgtagtggcgggcgcctgtagtcccagctactcgggaggctgaggcaggagaatggcgtgaacccgggaggcggagcttgcagtgagccgagatcccgccactgcactccagcctgggcgacagagcgagactccgtctcaaaaaaaaaaaaaaaaaaaaaaaaaagagtaacagacaatgattctataagcttactagattctaggcagtattttcagtgtttttacatgcatttcctcaagtaatccttaggacaactatttgtaaatgatgaagttgatctggctgctacaatgtgaagaagaaaaaaaaggaactccccggcaaatccaaggtccggcagctgggagtggcagccctgggatccaaggcagccttctgtaaccaagctctgcatccctaggcgaccctgcctttctcccttccttgtttggcgacttccccatacacctaggatcttaaaccagaaagatgagagactcccctcttcttgtctttgcacatacaattatttaacaaaatctggattattcttttaagtggtcttcttgccctaattatttctgcactttaatatatcctccatattcctgacagtcatttttcttttctcttctttttctttctttctttctttctttctttcttttttttttttttttttttgagacaaggtctcactctgtggccccaggctggagtgcagtggtgtgatctcagctcactgcaacctccgcctccaggttcaagcgattctcctgcctcagcctcccaagcagctgggattacaggcacccaccatgatgcccagctaatttttgtatttttaatagagataggattttgtcatgttggccaggctggtcttgaactcctgacctcatgtgatccgcccacctcagcctcccaaagtgctgggattacag

SEQ ID NO: 1245286 - DNA, 4001 bp, Homo sapiens
cattactctctgcgtttttaagcatgtgcagcaaaaattcagcactctttttgggccaccgaccttgtgtccagccccattgcttggcctgaaagaaaatggagatgatgagtcattttccttgatttaaattaacattacagccaagatgaatttatctgatatcacggtttcttaggatatggtttatttcaccatcaatccaaggtgtcctgtcattacagcaaccagaaataggttcatcagcacagatcttagccattcttatcctatcccatcacttttccattaaaatctgtcttttcaaatggcaactaagaattctcacctgcgcacacctgccaactccaccattgtaacgtcggaatggtacacactgtttctgtaaagtgacatctttcagatacttcgtggcttttcgtatatgcatacccttgatggcctgagcagtttcacgagtgttctaagtatgaagaataaagtgttggttaactagatcaaagctttaatttttaaagtaaacgttaaattttcaattttcagcttttcaaaatgtcgagttatttctattctttgggggcaaggcaattaaaaaaacttgtgactaaaagccaggtaaacttcgttgaagctagagaaaactccaaaactccatttattcactataaaacgtttaaattccatcatcatgtaattacaattaaaatgccccatcttgatctgcacactaggttttcaaatggttttctggtactacttctcaatttcacaaacgctacatccttacaccctgatcatcaatgcctaaatataaggtggctgctcagaatttattaattttcacggtaaatccaaaggtgtcctaagaaagtcatcactgcagctaccttttttgagtggaacatgaggaactgttggatcacaactatgaatcgcataccttaaagtgaacacgaagattggaacctcttgatttgcatgctagaaaataaaacgttttggttaatttttggtatcttatgccaagccccaagtaggaaatgggtatctacctcctgtccacttacatttcgtggggttctccgggtcaagtgaatagcgaaccattttcacagatcacctagaggaaagtacagtgtaattctgtcaatacgtacttacagtaactcattcagtataaatatcagatgattcgaacagctgctcagagagtagttgttttcattattaatccaaaggtgtcctaagaaatgccatcatcgcagccatactttcccccaccaagggcttgctttcccttttatcttccagtaactacagcactgcttccacagaagtagccacacgggcctcaccaatccagtcaaccctttggaagaaaatacagcctgtttcaatccaatgctggatcttccaggcgtaaaatgactcgacgcatccgcagggcacaactcaaccgtaaccctctacacctcctccctcccgctctacagaaacccctttgctgtcagggctgcaggtagtgagtgccgtctctctcaacaccttcgggctatgacccactttaagagccctcctgtacgcaacactcttgtagtaacgtgttacgcctccacccgacttttctttcccccaaaactttttcctcgttgcggccaccactcaccactagacaccggacctccggagtccgcacggaccccaggcggcccgcaccccacggcgggccggcgcccccaccagtggaggagcccggtagtccccattcccgcccatcacgtccctctgcggacctcagaggccgactgaccccggctcccaaagtcaggccctccgccacgtcctcccgcataagaagccaccgcctccagcgaggatttagtagccctaggagttctcctcccgggggcctggaggccggcgcccccgaagccaggatggcggcgatggcaggaggattgggccctcggagcaacgcaggagaaacactcacctcaggctgcttagggaaagaggaagagcggtggattttgggagaactcatgagaacttgacttctcgcgagattcgtagccgaagaaacgagatctgaggaggcaggaaggcggaaagcgaagggagtgtagaatatgttttaagaacgtgtgaaaacgaattgcctacttagggactgtctcaaagttctcttttttgtatacagaaataaaaattcagggttttaaatgtcagtcaattaaaaacagggttgtagttctaggacaggctacgtattattagatatgaaagaaacattttatttattcgtcaacattagttaggtttgattatgtggccctgtactcctgaaagtggtttgtaaatggccaattaaaaagatgaaaggatgagacgtaattatggtaatcaggaaattctcaggatgggaatgtcatccaatcaattgtattataacctgtgtgaaaaatgcgctaactgaagggtctggttcaatatcctcgttttccccgctgcttctagatcttcatctggaggagaaaaccttttggcattttcttcccttttttccttccccaggtcatctctctggttattccctcatagtcagtgatgcacttagcttttgttagggcttctatttcatggcaccacccttctaggcagctcaaactctaggagagtagactccaggctaggctcacttgcttccttgacctcagtgtaggagacctcagccctaagtctctcccctcgactccacttccattgctgatgctggattccatggtgtttcctcggtaattccctcccctcacatgagctttcaactgcatgctaactcccagattaataccccagcgccacatctgtctcctgagctagaccctgatagcaaactactccctggacatcctttctgggaggtccctgaagacctgaggttatttgaaacctaacatgcccttaaacagaactctttgtcttctcctccgggttcctcttttatgttgcatggtgacaagagtaacagacaatgggccgggcgcggtggctcacgcctgtaatcccagcactttgggaggccgaggcgggcggatcacgaggtcaggagatcgagaccatcccggctaaaacggtgaaaccccgtctctactaaaaatacaaaaaattagccgggcgtagtggcgggcgcctgtagtcccagctactcgggaggctgaggcaggagaatggcgtgaacccgggaggcggagcttgcagtgagccgagatcccgccactgcactccagcctgggcgacagagcgagactccgtctcaaaaaaaaaaaaaaaaaaaaaaaaaagagtaacagacaatgattctataagcttactagattctaggcagtattttcagtgtttttacatgcatttcctcaagtaatccttaggacaactatttgtaaatgatgaagttgatctggctgctacaatgtgaagaagaaaaaaaaggaactccccggcaaatccaaggtccggcagctgggagtggcagccctgggatccaaggcagccttctgtaaccaagctctgcatccctaggcgaccctgcctttctcccttccttgtttggcgacttccccatacacctaggatcttaaaccagaaagatgagagactcccctcttcttgtctttgcacatacaattatttaacaaaatctggattattcttttaagtggtcttcttgccctaattatttctgcactttaatatatcctccatattcctgacagtcatttttcttttctcttctttttctttctttctttctttctttctttcttttttttttttttttttttgagacaaggtctcactctgtggccccaggctggagtgcagtggtgtgatctcagctcactgcaacctccgcctccaggttcaagcgattctcctgcctcagcctcccaagcagctgggattacaggcacccaccatgatgcccagctaatttttgtatt

SEQ ID NO: 1245287 - DNA, 4001 bp, Homo sapiens
catccttaattagtaaaacaccacaaactatcattgctaaatatgaattcccaggcttgctccagagtcctgcctcaatgaaatcatttttaaaaggcaatccttttattctgcaaatagcatttttttaaccagttgtctgccttcacctttacatgtctaaattgccaccaaactcagtgtgctatacattttgtctatgagtggccttcccaaagatccttagacgggtggagagctgaggggtaaggaagaacccaattcgaagtcttgatgataaaatttctcagcatggcttagaaggtttggagccatacagacctaaactaattccagttctggcccagaccttcaaatgcaaaaggctaatgggtaatatacaaaatggagaaatttgtgttttgtcaacacaagtttgtcattgtttaaactttttgaaattttaaacaatttctttctgaaatgcaacatgactctccattatgaaggtaggccacaaaccacattaatcactgctaaggcaatcattttgataattaatcatactaccaaaggtgtatgtcacaaaaaggggtaaaagcccctggtaaagtacctccagtgtaaaaagacagcagaaaactagaaatactaagtgttaggcttaaagagaccacagagcacgcttctggatcttcacagaattttgccataaagggactcaaaaaaaataaaaggaaatagtttcattctgtggaaactgcaggtagaaatttaaaaaatcctaagagttaattactgaaaacaagaaaatcaaggacataaatctgaacagccaacattaattaaacaaccacccaagttgcacaggatgttagtggtttgggtaccttaagttcagcattactctctgcgtttttaagcatgtgcagcaaaaattcagcactctttttgggccaccgaccttgtgtccagccccattgcttggcctgaaagaaaatggagatgatgagtcattttccttgatttaaattaacattacagccaagatgaatttatctgatatcacggtttcttaggatatggtttatttcaccatcaatccaaggtgtcctgtcattacagcaaccagaaataggttcatcagcacagatcttagccattcttatcctatcccatcacttttccattaaaatctgtcttttcaaatggcaactaagaattctcacctgcgcacacctgccaactccaccattgtaacgtcggaatggtacacactgtttctgtaaagtgacatctttcagatacttcgtggcttttcgtatatgcatacccttgatggcctgagcagtttcacgagtgttctaagtatgaagaataaagtgttggttaactagatcaaagctttaatttttaaagtaaacgttaaattttcaattttcagcttttcaaaatgtcgagttatttctattctttgggggcaaggcaattaaaaaaacttgtgactaaaagccaggtaaacttcgttgaagctagagaaaactccaaaactccatttattcactataaaacgtttaaattccatcatcatgtaattacaattaaaatgccccatcttgatctgcacactaggttttcaaatggttttctggtactacttctcaatttcacaaacgctacatccttacaccctgatcatcaatgcctaaatataaggtggctgctcagaatttattaattttcacggtaaatccaaaggtgtcctaagaaagtcatcactgcagctaccttttttgagtggaacatgaggaactgttggatcacaactatgaatcgcataccttaaagtgaacacgaagattggaacctcttgatttgcatgctagaaaataaaacgttttggttaatttttggtatcttatgccaagccccaagtaggaaatgggtatctacctcctgtccacttacatttcgtggggttctccgggtcaagtgaatagcgaaccattttcacagatcacctagaggaaagtacagtgtaattctgtcaatacgtacttacagtaactcattcagtataaatatcagatgattcgaacagctgctcagagagtagttgttttcattattaatccaaaggtgtcctaagaaatgccatcatcgcagccatactttcccccaccaagggcttgctttcccttttatcttccagtaactacagcactgcttccacagaagtagccacacgggcctcaccaatccagtcaaccctttggaagaaaatacagcctgtttcaatccaatgctggatcttccaggcgtaaaatgactcgacgcatccgcagggcacaactcaaccgtaaccctctacacctcctccctcccgctctacagaaacccctttgctgtcagggctgcaggtagtgagtgccgtctctctcaacaccttcgggctatgacccactttaagagccctcctgtacgcaacactcttgtagtaacgtgttacgcctccacccgacttttctttcccccaaaactttttcctcgttgcggccaccactcaccactagacaccggacctccggagtccgcacggaccccaggcggcccgcaccccacggcgggccggcgcccccaccagtggaggagcccggtagtccccattcccgcccatcacgtccctctgcggacctcagaggccgactgaccccggctcccaaagtcaggccctccgccacgtcctcccgcataagaagccaccgcctccagcgaggatttagtagccctaggagttctcctcccgggggcctggaggccggcgcccccgaagccaggatggcggcgatggcaggaggattgggccctcggagcaacgcaggagaaacactcacctcaggctgcttagggaaagaggaagagcggtggattttgggagaactcatgagaacttgacttctcgcgagattcgtagccgaagaaacgagatctgaggaggcaggaaggcggaaagcgaagggagtgtagaatatgttttaagaacgtgtgaaaacgaattgcctacttagggactgtctcaaagttctcttttttgtatacagaaataaaaattcagggttttaaatgtcagtcaattaaaaacagggttgtagttctaggacaggctacgtattattagatatgaaagaaacattttatttattcgtcaacattagttaggtttgattatgtggccctgtactcctgaaagtggtttgtaaatggccaattaaaaagatgaaaggatgagacgtaattatggtaatcaggaaattctcaggatgggaatgtcatccaatcaattgtattataacctgtgtgaaaaatgcgctaactgaagggtctggttcaatatcctcgttttccccgctgcttctagatcttcatctggaggagaaaaccttttggcattttcttcccttttttccttccccaggtcatctctctggttattccctcatagtcagtgatgcacttagcttttgttagggcttctatttcatggcaccacccttctaggcagctcaaactctaggagagtagactccaggctaggctcacttgcttccttgacctcagtgtaggagacctcagccctaagtctctcccctcgactccacttccattgctgatgctggattccatggtgtttcctcggtaattccctcccctcacatgagctttcaactgcatgctaactcccagattaataccccagcgccacatctgtctcctgagctagaccctgatagcaaactactccctggacatcctttctgggaggtccctgaagacctgaggttatttgaaacctaacatgcccttaaacagaactctttgtcttctcctccgggttcctcttttatgttgcatggtgacaagagtaacagacaatgggccgggcgcggtggctcacgcctgtaatcccagcactttgggaggccgaggcgggcggatcacgaggtcaggagatcgagaccatc

SEQ ID NO: 1245288 - DNA, 4001 bp, Homo sapiens; identical to SEQ ID NO: 1245285

SEQ ID NO: 1245289 - DNA, 4001 bp, Homo sapiens
ttaatatcacaatttatttgtccattctcaaactaatggaatggtttttttgttttcttattttttgtaaagaaaaggtttcactatgttgcacaggcagggtctcacttgttttcaattttgttattatgaagctgcaataaacaattcttgagaacaatacttatttctagaatatattcctagaaagaaaactgctaggtcaaaggatatatttaatatatacctccaacttcatcaactaagttgatctacaaaatagttacatatttttacattcccaccaagtggtataagagttcctgtttctctgcaacaattatccatattgtcatattattttgccaaattgatgaacataaagtggtacctcactggcttactttttcctgatttgtaagattaagtatcatttattgacctttcaggtttcctcacgtgaaatgcctataaacagtactgccattttttttttttactgatttgtaatagttattaagagagtctgggtatcaaccctatactgattacatgtgtttctaaatgctctctgcaaaaacaaaaaacaagataaacctgttaccgattctgaaatctagtaaaatgtaaaagcaaagctaattcctgacttttcaaagttcacagctactttccagacctttatatcagtgtttctgaaacctttccgtccactcacagaagatgaattcctcattcagggccaatacacacatacttacacataaactgaaaaacaaggctgtaaatcaatttcttctcaaggatgggtgacgttttcataaccacaaacaatatacaaggacagattgtctccattatatacagccaacattttggctcacattttggctgttacgtacatacatcatatagctttcacaaggttcagtaagcaagcgtctattttgattaataacggttaaaacctttaacacttgataaaaaaccatcatatccatcaggatgtttgcaacaataatgaagagtgtccactctacccaatgaattaagaattaaagtacaagctcagactaagcaaatgaaattttttattttcagtcgcactaggataattttttacaaagttgctctgcatacatgaactgattctgaatattttagtgacagacatctcaaaaaagtttacttcatttacaggaacactatcaaatgttttgcaaaacaaagacactgcattagggcatataatcatagaataggaaaggactttaggtgacttactctaaatctctccttttcaggtaaggcatctgcaacgcagaagttataagaaacttgcccaattgagaccctctaaaatctacaaattcagagtcttttccactgcattacccatcttcttatattagacttctaaaactattcctctattaatttcacaagaataagttgctgcgttacagaaatgacggaagtaactcccaaacccacaccaatctttttctttccactcccctaccttctccctcccttatcctccattatcattcacagaatgaaaaaaatacctgaccacctgaatttctggccctaattgggtgtggagtcccaaccccctgctactgtttccgtgttaagctaaccggagttttcttttttaattattcattcctttattcaataaatatctaagcccagactttgcagaagcgtggtgcacgcagctcctccaagcccgcagaccaccgcgcgctggcatcccgacgccgggaagccgggggcgctggagaaacggggttcccgggggcgcctggaggccggccgggtggtgggaagcggccgacataagcggttgactcacctttccgcagctcccgctcccacacggtgacgatgggacgcgagtgtttacggtggtgaatgagccacagggacaaggtctgcacgctctgctgcgagttgctcaactccgacagcttcttctccagcgccgcctcagagaaggctgacatccctccgacaccacgttcacgccgtcccacgcggtggggccgaggggaggagagtttcgccgccctagctgcggcctcgccccctcaccccacccttccccacgctctcaccacggccgccgcttcatccaagaccggccgcaaaccagcaagatggcgtccggccggcagtgacgtcacagggacccacgccccgcccctcccgctgcaagccctgggaaaacgcgcggccgagaagtggaaccgccaggcggaaggggcggagtcgaaacaagtgcaggggaggcggacaggggcgtgatgcctgggttactctcagaggcatggtgggagtttgccaggcctgaaccctccttaatggaaactctgtcaaagaagcagtgattacagatctctacataggcatgtaaactggtataaattggggcaggcactttaaagactatttgcatgaccaattacggttaaaaatacaccttcctaaatagagtataggatggtgaccagaggctgggaagggtagtgggggagggctaaatagaaggactaatagaaggactaaatataaataggacctagtatttgatagcatgacaggggactagagtcagtaataatttaattgtacattttaaaataactaaaaggataattggattgtttgtaacacaaaggataaatgcttaaagggatggatacccaactttgcataatgcgattattaggcattgccatgcctgtaccaaaatatcttatgtactccataaatatatacacctactatgtacccacaaaaatgaaaaatgaataaaaatttaaaaattataagaatactctttcctagcaatttcactaattgctgtcagtgctggaaaaaacaccagcatgtttgcaccaggaagcttattctaggtgttcagtccaacacagtaacagtgaaaaattggaacattcactgttgcagtctacacagatacgtctatattccataatacatgcagcagtttaaaatatggattaatccaagatatggtggatttggaagggtttgagtgggtttttatgaggttctttttgagagagggcctcactctcacccagactggagttcagtgccatgatcacagcttactgcaacctcgaattcctgggctcaagcattcctcccaccttggcctcccaaaatgctgggattacaggtgtgagccaccatgcccagctggatttttttttaattacagaagcaaaagtatagtataccacttcttgtttaaaggtatgtagttcatatgggttcacaagtacgtaaactcatggcaaaggtttggaggaatacacaccacatgaatactggtctcagggagaggatcagaattggagcccttaaattgtgtccatattgttttcatttttacaaaaagaatacgtgaatatattacttatatagttaaaaattaattacagaaatctcattgttaatctaatgcatacaccatcatattctaaaattttttttgagaccgggtcttactctgttgcccaggctggagtatgtggttcagtcatgttcactgcagtctcgacctctgggctcaagcaatcctcctctgtgtcggcctcccaaagtgctgggaatacagttgtaagccaccatgcctggccctaaatattaatacaagaaacttccagaaagatacataagaaaccataggaattcctaaactatcttttgacaagcatcgttcaagaactttgcggccagatgtgtggctcatgtctataatcccagcactctgggaggccgaggtgggaggattgcttgagcccaggagttagacaccaacctgggtaacatagtgagtccctgtctttactaaaaatttaaaaattagctgggcatggtggtatgcgcctatggtcccaggaagctgaggtaggaggatcacctgaacctgagaggcagaggttgccgtgagtcatgattgtgccactgcactccagcctgag

SEQ ID NO: 1245290 - DNA, 4001 bp, Homo sapiens
tactccaatatgacgaacaaggtcaaaaatacaaatataaagcactaagaacaatgagcactcatgtgctcaataaaaatacattgttattgccaaaaaaataatctgtcaaactggcctcataaaagcaaagtcactggcatcgtttaggcctgacccaaaaagcaattaatgcaaatgtaccatcctttgactaacagtagaggaggggaaaaaggtcaaaatcatgtaagttaacacaagaaaaataagtttgggggaggtgggagaaatcctttttaaaaaaatctaatctccctttccttaaaatttaccattagaattaatatatttgtatttaacagattccaaagagttaccagtttgattggtttggtatgaggcagaagatagtgcaggaacttccgaaggaagaagaaaaagtccatccagaatgccatcaatttcagcctgcagatttggctccacattagaccgaagcttagataagaactctactgcaccaacgtcaaccaaatgttggactgctgggggatactaaaataagaagaggatgatcttgagaataactgtatcaaaatctctataacttacagcaatcaaaacataaaattatttttggtatatcagatgttccttttctgaaaaacaaatccttcatggctctgccccgaagtaaggcacttccatgaggagcacatacacctatagagacatacatccaacacttgataacatttatgaaagatgagccaacacactgaacgctagaaatgcacattatcaatccctactcttatttttttaatgggttacttttttccactgacactcaccttatggtcccagccccaaccggtcaacaggatgtcaaagtagtttaagattcctctaccattgtacagtgatttagttttgaaaggttaaacttacactttgatatctgaccccgataactaactactcttgaggtaggcataagaataccaatctaaaagcatatgggcaagcaacttaacattggtatttatgaatcacggttatgtaacattatttttaaagtgctccctttcatactgacatatctagtttttaagatgtaaatgtcagaaaacaaaaacagaatacaaatattaacctccaaagataactcaaaaacacagaacataccaaaactcaaaagaagttctgtgttacttctgagcacagcagagaccatgtgggattcagtatcacaaataaaagatgaaccatatacccagattaattaaaattaaacatctctggttgattaaaaaaacttttaaccccaattatttaactttcaataaacgctacaattaaatgactaagaaacaagtcactcgtctgattattttctttatttcaaaatgaccctaccttaaccaatctgcttaacaggttcagaacctcttccttcatcggaacggacgggaaattgaaccattccagcaaatgaagaaaaagttgcctctcctgaatgagatcagcgtagcagattaagttgtgctcaatcttgcagagaatactcttgagagcgcgctccctgatctcggccagctgatgacctgtcaacgaacggcacaaaactattttatttcccgactgcaaagagactacgttatttatgctgtgggcaggagcggcgtgaagacggaataaaccagtttttttcagaagcaggccactggtgccttcgggacgcgaaccgcgaagtttacacaaagtccgagatgggtccccgggggctatcctgacaaagcgggggtgaaagagggagcggtcgcggagcggccggccgcggaaacgtgacacgaccattctcagcaagtggccagagcgcggggggtgccttgggcgaggggcaagctgacagttaccgagtttcctgatgagccctgccaggaccatctcgtcccgtcaatctgcagccgccggagaattaaactgccgcgccactgcgtccagccacaattaatgtacccccggaaacacgtcctgtgggacggtgagttccgcaacgcctgcgctcaccaggagtaggagtcattacgtgagcccttcgcggccccagcgtcgccaggagagcttccagcctctctagaatcactactgcgcacttcctggacagcagtctccgtcgcaagaagcggagggaaaaaaaaaagcaacaagcagggatagaaccagcgttggccgccgcgcacgtcgggagttgtagttctggctaggccgtgcgtcctgcaccgatctccgggcccgccgcggcgcccgctggcctggggttccggcttacagcgcgggaattcgggaacccagcgcgggctgcagaggccccagcaggagccccgcctcccggctcgtcgacggattcgttcttggccctgccaatctgattctcagctcccagaacttcacgatttagaatgtagacttttgctttgtgacagttctccccatccccgactactaaatgacgaaccctctttaactgtgaaatgtacctgcaaagtcaagcagtgtctttggatacccaagttcagatatgaacaagcaagctacaaaagcggggtgggcgggtatgagtgagcagaagagagaaaccgggctgcaaaaaaggaaaataaaggcgggacgtgggggtatgatttgctgaatggtaccaaagttgattttttgcaccgtgcacagtgatcgagctgagcaaattattttttttttaattataagcagcggtaagaacaacaacaaaattacatttggaaaatgatttgcattttctcggtctgatcatttcacgttccctgggaaagggatgtcaaggcaggtaaagtgggccctcggtatccctaggtaattggttccaggacccccgcagatacccaaatccacccatgcttaagtctcttttataaaatggtgtagtatttgcatataacctacacacatcctcctatatgctttaaatcatctctagattgcttacaatacctaatacactgtaaatgctatgtaaatagttgttacactgtacttttattcatattattttttaattgttgtattgttattttcaactgtggggttttttcccgaatattttccatcccgtgtgttgaattctctgtgtgcaaccagtggacagcaaaggcctactgtattcccattcctattttgccaaagaggaaacttagaatcacaaaagtacccccacacaaagtcacattaactagtaagtgacagattgaggagctgacctgatgtttctttgttctatttagagtgccttgctgcctcctcatgtgtgtcaataggagagtgatgatatttgagttggatcttaaagagtaagtaggagtttgccacacaaagaagttgggtaaggaaattcctgcaggagaaacctgtatttgcaaaggcaagaatccagacggagtgtgtcaaattcgggaaaagaacaaaattcaaggtggccatattatctctgggaagaagagaggaagggcaagattgctgctagcatgctggatattctccattccaccttctagtggttcctcccagctcttccagctctgcatcaactgacctgaacaggcaaaaagactgcactatccaggctgcctggccctctggcttccagttggttgccgccgataggaggcatcagcaggaaattggaaagtaggaggaaagagatacggatattaaaccaagattccactagcccatgcctaagcctgcctggccaagattgtaacagtggctgaattccttgacccaaagaccacatgtcctgatggatagcataccacagtgggcactgcagaaccagttacaccaactcagaagtgtctgtagttatccaggaaggaaggtgttaattacggatttgaagtgtcaaggtcaaaaaacacatgacaatacagaaaaataatagaaataacttgtcaatgatgtttctgagatgaacaatctta

SEQ ID NO: 1245291 - DNA, 4001 bp, Homo sapiens
aaattcgagcagcaacaagagggattcaaagtagaacttgtgaataatttatcccatcttaggctttcaaatataggcgatatagccctccacacgtttacactattaagttcagcatgctcacatttctgaagtgaaattaaaaatgaatagcagtgcctcagcttgttaattgttaaataccagggggtttactctattaattaaaatatgctttaataaaaggagacatcgcacattttgataccgaccctacaaagctgagaagtatttacattgttgcattttggggcggctgtgaaagccgattttaagccattcaggagccacaataataaagctttaaaattcctcactgggacgcaatgtagttcttttgaaggaaagactgtctttctcattcggcagaaataaatccattcatttgatcatgtagtcattgagggcgatacaaaacaaaccaagtgtgagaaattctatgtgatgaagtaaacaaaacaaaaaaaaatccatttccatgacaaaaagattctttgtccttaatctacccaccatatgcaagcgtttctttttagcatatcgcctgttctcatcttggctgacttggctacacagataagactcccttacctccaccgcaacaaaaagaccccagcgagctcactaattttatttaattcattaattctccagccgcgtcataagcatgctctctcgttctcatccgacatgggtgtctacccgctttgtcaaactttactccactgtgtgggaaactcttccgccccgtttccttttcgcagacagtctcattctcagagtaaaaagatcaccatctgcctccaacaacttataacaggtcaatcataaaagttggcctgcctgtttttttaaggagcaaattattttactgcgagctgtgctgcgggctcggggtcgtggggtcgcccctcctcggccctctttcctggcgccctgggggccccgcggggcgcgccgaagcccgggcgccgccggccgaggttttgactcgacgaagggggtgggggcgccccaaactttgcggggctaaggcgccactctgggaagtccagccctttgccagtctcttaactttcgcggcgcctgccctttgctcttggatgtttcgaagaggacgctcctaccagcgaaatgactgcaaagccgaggtctccagcgcccggcctcggcggatccaaaaagacgggagagaaaaggcccgcgcagacgctgcaacgaacgccccggaaacacgccgcgagcaggggccaggcccaggccgccgccgctgcgctcacccccagcttaattccccgggcggccattaggcagagccaagcccccgaccttctcctcgcctcgcgagggatcacaggctgcgtcaacgcgctgggacaccgcgggtcacccgaggcggtgcgggggcccgggaggggccgcgggcccccgaacaaagctggccgggcggcggggtccccaacccgcgtccagcggtaggtgggctgcggtcgccttccccgccgccgccggcctcagcgtcctggcgcagagaccctggggggcggcgcggcggcggaggcaccgtggactccctcccgccccggcctccgagccgtcctcgagccggccgcggcctcggcgcccttcgcgggcagctccccgactccgaggagaggagccaagtttacttcgcccacaactctctcggcggccgcgcgcgctccggcgaagtacccggggccccgcggccggcctggcgcggggcggacgcttgcccgcaggaagcagggaactttctcccgctcccggacgcgcgcatccgctcccgccgcacgcgcttccccagcccggacgggcagccccagaccccccggccaccccgcagccccggccctcaccgtgctcgggagccccgtcaggcggcagcagctcctcgtccgacttgaggtgctggggcttggcctgcttgcgccgagacatgctgctagcggcgctcgggccccgcgcggggcagcggcatcagcggggcggccggcggggacggcgcggggcggcctggcgggcgcgcggcgcggggcgcggggcggcggcggctgcgcgggccgcgcatggggctgagcaattaggctggtgaataatgcatggccattagcggagggccgcgccgattggccgggctccagcggactccggcggcctatgcaaatgaggccgcgctcgcaattagcggccgcgccgacgaggagggggccgcggcgcctcgggaccggggcgcgcgctgcccggcgccgcctcacatcgcgggctccggcgccgcgctcctcggccgccccgggtgcggctgtggcggggcccgggtgcggcgcgggccgcggtggccgtccctccgcagggcgcaggcagcaaactttggcggcgtccgcgcggcgccgtctccgccggcgcgccgggctcgcccctttatagagtgtctgcgccgccgcccgcgccccccccgccgccgccgccgggcggcccctcccggagcgagcggccgcgggcagggctccgacccggcgcctttgtctcgcccgggccgctcgggcgccgcgcctcctgttccgggcgcgcggggtcggccggccgccttcgctgctccgccgcggctctcagcgccgctcagcgcggcgggcccgcccgggctcaggtgccccccgctctccggaccttctcgcccggccccgcgtcccctccgcgggcttcccccggcggccggccgggctcggaggctcgcggccggagcggagcggagtgcgcacgccggggtggcaggacttcggcaagaccaactttccggttcggaagcggcgcgggccgcgcggctcctcccctcctctccctcccctgcgttccccctcccttccactcccccctctccccgccccccaacccgcgggccccaccgactccggagcgcccgccccgcccgctgctgccaccgggccgcctcgcccccgcgccagcccgcctgggcctctgcgccgccggcggcttcttaaatacaggaaagggaggggaccgcagggccccggtgttccccaccctagtcccccttcaccacgggccaccgggcgccagcggagtgggcagcgagcgcgaccgaaagttccaactccaccaaactcccgcgcgcggcccaccctttcccgggatttcggggatgacacgggggccaggtgagggggctgcgcacttctggatcggccccacacactcggcccctggcgcggcgcgctccccgcacacgcgcccgccccctccccgcggtcacacgcacgcgccctcgccctcgccccgcgcgcacaggcgcgtactcccacccgcggccgtgcacccgccgcgctccttcccgcgcgtgtcctctctccccgagcggccgccaggatgtgcccccggccccgtcgtcgccgcgcccgcgcccctcgccccagtacgtcttttttcgtttcctaaatttcttatttttgtccttgcaagtggtcctgtctggtgtgaaccgtcagcacagatggcctcctggagcttccccgagtcgttcgctgggggaagcgggcggtgagcggccagcccgggcgctccgcaggccgcgagctcccggcagggctggtggcgggggtccgcctgggggaggaatccccgcctgctccatcggacccggcctggcgcggctcgcggcgctcggcgggctcccttccattctagaatcttcccgcttgcttcccagcccgcgttcttccgcctgcctttaattgtgtaagtttgacgaagtcagagctttgggttccaggaaaagcgcaggagggtcatagaggaagggagggcgcaggttggagtcaggtccaaacagtccctatcgccacttttgaaaaaaaaaaaaaacaacaaaaacccttaaggttggttttattttgccttttggtagcgggcgtattcatttagat

SEQ ID NO: 1245292 - DNA, 4001 bp, Homo sapiens
tcagatcaaatattctggctgacagcagcagcactgccagtagctgtatttcttcctctcttcctcactgcagaaacaaagagcccttgtgttgcatgtgggtcctgctttaatagtaagcaggggcagcagagaaagaaggtcctgctttcaagactggtggagcatgcaggcctgacaaagtgtcataagatgctattttggagggaagaagagaaaaaaaaaaaaagacaaagcttttttaaaaagtaccaagaagcagtagatttgagcttgctgaattttaattagaagactagcaaaacaggcaatacagccagctactggcaggccttatcgctgagagcaaaaacacactgatctttcaaagggcaaactggtttagggatcaatacactcatcagagggccttttctgacagtctgcaattatagccatcagtaatcagtaccaattttagagacactttaaaaacccagccattaagtctagatttttaaacaaagctctgcttcctggaggatattcttgtgaacagcatcaatgctcaggacattagcagttacttttttaagctggtgataatctctactacaactcatcttccagaaacaggagtcatcagctttgcacacctagacactaccacatcctaaacacggttgatgaaatagaaattatcaaactttcccacactactgcactagtctgaaattctacttggggaagggggaggagagtgagaggggaaaaacacgtatgcctaaaggagtaagctgtgacctcccatgggcaccaccccacatctcaacatgatggagcaaatgaaactggatgccatcaaaataatgaggattaataccattttcaaagacaatcaaaactccctggttggaaggtcccatttttcttagcacaatttattagtagcaatagtggcattagtatccaccgtgatattcaggtcctacaggtcccccaaattctctacctagaagcctacatagtcgtatttttcctgactgagagggcttcctttccaatccctactcactcttaaccttatagtgaagagataaggccccaaagacagtgatgatggccaataagtggctaaaaagagagcaagaggaacgttttcctctgaggtcctctcacaaaggagagggaattcaaccaccccagctgcccaaagaccctacactgcctcctatattcagagtgcagccatctcagaagttagagaaggcttctggaatctcgctgggaacactggttgagtccacaatgattgcgcacagcttgtgagctctctaggcacaaggagcattatttagtcccgacccacggtcaggggaaaaacaactgcccaggctgggaagaaactgctttgggaggcatcgctggacagctcccgttgtaggaaagttcttccctctcgcctgcctttctgcctcttccacctgccggcagtcaggcctctgaagccccacagagaaatcggttccctcttcaccgggtggcccttcaaatacgctcagagagctgtcgttcaccgagtcatctctcccacaagcgtggctgtggcattctcaaccacatttgacattccatggcacggggtttctattctcccctttcctgcaccctcccctaattgtgctcttgtcagggcaaggaagtgcacacccatgcccacacgtaggcgtagaacccagggcctgagagcccagcgcgggagcttcgggtggccgcccggccgcattcactgggagccggagccctgactgggaagccccgactccccgctagcacaggcggtcccggccacggcgcgctcaccaccctcctccgtcacctggcgcttgttcatcttcttcaggtccccgaagatatccaagccggacgcggggagatgagcccccacggcgcccgcacgcaccatagcagggtctccggggacctagcggcccgccggctctgggtggcacagacggctgcggagcacctgccggcccccgcccaccggcccagcgtccttgcggccacgtgaccggcgactcgcttgggcgtctgggaatcgtagtctcgccagtcttgggcactggccagccaggaatgaacctgaaggaagaaaactaccactcccagaatgctgcggggtgggcacctcggccagtgaagacccggggctcctagggagggcagctacagggctccggagccttgtccgacccttcggagggaacatcgagcagcgagtgaccccgcatacctcggggggcaactcggggaagggactactcaagaggagctgaatttcccgactctggtcaggcgccaagaggacacctaactcccgctcgcaaatcacctagccgtgtatcttggctattggatgactgcagcgaggaaaggtggtgcctctacgctggggcgggctgagccgaattggggcggggcctaaagatggactgcggtgggcggggcttggaagaggcgggacttttgaggccgctgaattctgcattttgagtggtaccacttgtatgcaaggaagtatctttgaatgccttgaccataattgggttgcaatagatattaattaaatgaatacataaccacctaatttcatacacgagaaagcaaaggcccagaaaggttcattgacatggccaaggttaagtggaaatgagtggaatataactcaaagttttaaatttagaagtcctagatcatcacagttctgatcctagattacctttggttcattcactcactcgtgtatgcattatgcattctttattgtatttatttatccacaaatctttatggagcacctaccatgcacctggccttgttctaggcacttgagaaacatcagttaacaaaacaagcaaagattcttgccctcatgaagcttatattctaccgaaggcagacataatggataatttatacggtacctaaaggatggaggtgctatgacaacaggaaaagcagataagttgaatggggaggtctgggggaaaggatcaggttgcaatttaaaatataccagaagctgacttaccatgaagctaatgaaaggtaagttctgggacccttcaattgcaaaggtgtttttccaaggtgtgggagaaacttaaccatagaatgtgtaaaactttcaaaagcaagatattgcaattgctattggttaagagttctgtttctttgcattccaacttcacctccattacatttcccctcctgttggagggacaaggagaattttggggatccagctaaggaggaaacgagttggagatacatttggtttgagtttagtgaatttatttatgtggttcatggtctttcctgccatcctcgtgtaaaaaatggcttctgggaatactgccatccactgggccaactcacctggcaccgtggcaggaagtcccactggaagtggcatctgatatgaaagtgttctgcagcacttgaccttggaaataagtggatggagaggaaaaacaaggtttgaaatgtacagatccagaagctagtctgtgtaaaattcttccaaatatcagatgtataaaattataagtgcaagacacagtgcttagtacataggaagatatggtgatagttaaccctgccactaataattgctggaactaaggtggcagcactaaaggttcagaatctggatacattttgaagaaagagtcttcaggattttttgaaagaataaatatagggcgtgaaagaagaaaagagattgaggctgactccagggtttttaacctatggaactagaagggtagagttcccctcaacttcaatgaggaaagctgtgggtggaacaggtttgtgggaatagagtaagggtccaaaatgtgaccaataaacctagaacccagtgtgatatcttcacatcagaacctttggcccagcctccaggctcctgcttaggttgagcattgggtgagaagcaacacaggaagacattgggt

SEQ ID NO: 1245293 - DNA, 4001 bp, Homo sapiens
gcgaatattctatgattctatttatctgaggtacctagaatatgcaaattaatagaaagcagtagaatagaggttaccagaggatggggtggcggaacagggtgctcttgggtacagagtttcagtttaggatgatgaaaaggttctggagatgggcaggggcgacgctgcacaaaaatgtgaatgctgtgctctatgccactgaattctacactttaaaacggttaacgtgggccgggcgcggtggctcacgcccgtaatcctagcactttgggaggccgaggtgggcggatcacgaggtcaggagatagagaccatcctggctaacatggtgaaaccctgtctctactaaaaaatacaaaaaattagccgggcgtggtggcgggcgcctgtagtcccagctacttgggaggctgaggcaggagaatggcgtgaacccgggaggcggagcttgcagtgagccaagattgcgccaccccactccagcctgggtgacagagcaagactccgtctcaaaaaaaaaaaaaaaaaaaaaaaaaaaacggttaacgtagtttattacaacaaaaataaacttgttttaaaaaagaaactacatcttttaaaaattgcaacactatttataaaaagtttatctttgagagatcactggtatcaaactcgaatgtgaaaaaggataaactatccttcagatttccagttactctggagttgtcgagaaccaaataatccgcactccagctttcattcatcctgcaacacatctgggaggttcctaaatctcatgtagcatccccacattagaaattctgcttgtaggccgggcgcggtggctcacgcctgtaatcccagcactttgggaggccgaggcgccgaggcgggtggatcacgaggtcaggagttcgagaccagcctggcccacatggtgaaactctgtctctactaaaaaatacaaaaaaaaaaaaagattagccgggggtggtggcgtgcacctgtaatccctgctacttgggaggctggggcaggataatcgcctgaaagcgggaggcggacgttgcagtgagccgagatcgtgccattgcactccagcctgggtgacagagtgagactcggtctcaaaaaaaaaaaaaaaaaaagaaaagaaattctgcttgtcggaagtgtctacagacgtttacgggaacttcaagaaacaaaccctccgattcctgggcagcaagcagggaaatcattggatgtaaatggtttgtatttttcttcctcggcgtaacaaagtgagcttctgctctgaacccacggagaaaaccatgtgccctggtgagagaacaccggcggggcacagaactcgacgcagcgccagccaggcaaagtctcccaccaggtcccactgcaggtcgtcgggtgaacagcgcgggcaagacccacgacgccgaggctgacggtgggatgcccctgggttcccgcccgcagccccggcagcgcggcctgggagagggcccggcgtaccctgcgggcgggagcgcgcacgtggcaccagctgcgcaggcgcacgggagggcggcccgcgaggccgccgtgaccccacaatacgcgggcggggagggcttccgctcagtccagccagggctcgcccgccaccccacagcttccagcggcgtcactgaaccaagacacagccccgttccccgcgccgcccacccactccccttccttccttccggggtcggccccgcccgcaagcgccgcgcgcaccttaacgctctgatcgctggagcaggttgccatccgccgcccgtggaagtcgaaagagacatcgtggatgagatccttgtggtccgccgcgatgctgcgagccacaaacatggtttccgtcgggcccgcgcctccgaagaggacagtggcggcggcagcggcggcggcgcgtggcccgtagcctagccagacctcgcagcccgggagcgcacggcttgtgctgcccacgcccccgcaccgcccctgcctatcaagccccgcccacacaccctccggtccttcaagccccgccccacccaccggcccgtcaggccccacacagtcccctggcccctcaagccctgcccacgccccggcccgtcatgactcgccccaccttccggtccctcaagccccgccccgcccccaggcccgtcaagccccgcctaccctcccaccagagccgtcatgcctcgccccaccctcccgccccctcaagccccgccctgttcccggctcgtcaatcctcgtcccgcccccggcccgtcatgccctacgatcctggtgcgggttcctccaggctctgaccgttcggcggcggagggtgctctgcaaaaggcgagttacctgtgctgagaagtagtaagagcttattggtatactgtgcaaatgaagaaagatgaaaaagtgaagactgcctctcacggtcctcggccctgaatcatttaagtcgacgtttggatgtgtttccccccagacacatgcgaggcgcgcggagcaggtggagaagacgaaccgtgggtttggtcaggagccgcgctccgtcgggacggctgaagagcagggagggccggggagacgcctgaggggatgacaagcagtccaggctcggcagcctaagagcgaaggctggacggggaggaaaggatcagaagtagtagtttaaatgtgtcaagattttacaggtagaacaggcctgggggtgctaggagccaccacgggggtagggaaatagtatgaattagaagagtccgcctgtagaaacgtgtcatcccgggggaaggaagcggccggggaagtgggctgcttgctacccgggagccagagtcctccggggaaaaggaagtgaagagggccagagcccctgggaagaggcctggctcagatcaaggattctgccaaaaccggaaagtggaggagccaacgactcggggggttttgcttatcaggaaaaggcattctagagggcgtagtggtaaagttaggatgggagacagtggaagcttgcgtcaggggagcgaaagtacagaaaaaaaaaaaatgaggctgcagaagggacttgccctttggattttggccaggaatgacaaaaatgtgaggtatggtaaaattagcaggctggaaagttttttaaatgattagtcccagctgtcccctgatggattgcacagaaacctgcaaagagaagtggcgcaatgacctgacctttttcaaccataaataagattttattgctactttaagaggtgggccccacctcttatgataactgataacaactataacttttttgaaggtcaaagacactcatttccaaagaaagtgctcactataaaagtccaatcaaaatatattgattattataaaaatatcaaaacagtttaaaaattgttttaattaaatttaaatacagacagtaaacagatcattggttgccagagattatcagagtgggagtgaagtgttgaattaggtgaaacagtggattttttaaaatagactttagtttttagaacactttcaggttcacagcaaaattgagcagaaaatagagttcccgtatgtacccctactgtcacacatgcacagcatcctccactgtcaacatcccataccaaagtggtacctttgttatgatcagtgaacctacattgacacatcattatcacccaaaattcagagtttgcattagggttcactcttggtgttttattctgtgggttttggcaaatatataatgacatggatccaccattatagtatcacgcggaatagtttgactgccctgaaaatccttagtgctcctgttcatccctttcttccgacaacacctggcaaccgctgatctttccactgactgcatggttttgacttttccagaatggcatataatgggaatcttggagtggctagccttttcagattggcttctttccttatagtaatatgcatttaagctttctccatgtcttgtcttgagagttcatttc

SEQ ID NO: 1245294 - DNA, 4001 bp, Homo sapiens
tttttttcactttcagggtcacatttgactccctggtctctgttaaattgaagcacctgtaatttcaataaaaatacaaatgaatagactgcagagaagtaattatataaatcatacatcatctgtaaatacaagtcagtcattcctataattgcagaacatataattagttaaacaaaggggctctgacttgacttaatgtgtgtaataaaataagtcaagaactgctcttaaataaattttctaaagtcgaatttaagttgctagtctctttattttcctatgttttgtaactagaatgatgttaggaaaaccttgaggtaaaattctcttattttccgtatttcctttttactcatggttgttttaagaagaatgctaggtgtccaactgagaccatcatttagacagtttaggtaaaagccataattatgtggaaaattaaggaattttagttgttttttttctagttaaatgctcagttcctattgtctaccaccacttgacatatttaggcgcaatgtttgtgtttaccccagcatttcactggaaagttaacaggaaagatgtagatactcttctttccttggaattgtacaacaatagaacagaaggcaatacttttatctgccaagtcctggacccggctgacaataagaaatacggtatactgcttcaacggttgcattgacccatgttaacagaacaagggccacctgccatacataaaggggtgcacagttaattcatgaggcccatttgcaactaaaagtgttaacatccgaaacaaggacaagcaacacccagcaatatatttatatgaaatagattcacattggaatccacttaagattgtctatcacattaatgattaagacttttgagctaatgaacctgtcattaacaagttgtgaacaaggattttgttgttgctgttgttgtttttaaaccacctgatatcttgtgaactacaagagtaaggatgttatcccaagtccagactaatatagcatgtgttctgcccacttccctcagaattaccaaccgtgttcatatccatactttctgaggaagtcaccttcttgggtgaaaattctgtcatttggccttttggttttgcaagatttagggccgagtttactccttctgtttttttttttttttatttaaaatcacatttatatatacatattgttgcatatatatatgtattcatatatatttttacacacacatatggctattttgctatctatgactacatatatatatttacatacgcacaatgttttgaggatgcttattgcaaaaatagttctgtatataatagtattatattgttattgtaatgatcttaatgggctccttagattcattcagataaccagggactaaacaaagagagaatcaaacaaagcatgagaaacagaattcttttatttttcttttttgtgtcttcaagaaaatccttatgtgattataaagatgctgaataattctattatttaaagtttgaccaattactttttgaaataatatcatcaaaataaaattggttttggtgttgaacaaaaattgataaccttatcctttctccattttattttgctaaaggacacaggttctcaaatggttttcctagcaacagtttgcaaattgattctctttaccaagatttgttttatggtatagaatgttttaatgtatgtcttgttttagagaatgttattgtgaaatgtaaattattgagttgtcaagagaaaactgaagttaaaaggcaatgaaagcacttagcttacaagaaacagaagatagttgaccttttccactcacctgggccatttgggctgcagtggtacctttggcgcccaaatacactatggtcaaggaagttgagatgctccaggaagaaaagaagatatttttaccctgagcagattcagctagctttttgctcaactccagggcaaactggttgattgatgttgctagagagtccattgaggaaacctaagaaaaataaagcaaaaattagagagcatattaatatttatttccacttcacctttgaaaaaatatgtattcatagttgcatacatatccatatacattgtcatatgagctgaatagactttagcaaaattctagtccaataatagtattttatatattaaaacactgaagtttagagaatttacgggaattgcctcaaattttagtgctaatgtgcattagagaataaatggatgctggtcagttaaaagctgagtcccataacatagtttttgccactctcttgacatttttcacaccaccagttttgtttccatgtgtttgtatctagtttttccaactccagcataagcttattgagagcaaaatattctttttatgctgcttcgtgcacccaacagcacctagctaaggattttgcacaaaatgggtgcttgtaaatatttattactcatttacgatattcacggtttgggctgtaactaccatttttaatttatgcaaacatggaatcatgcacaactaattggaaaatgcttgtagagaaattgagaagttaagactgtttgtctttattctcactcatttgagaccctctgaaactagtcttctggaacaagagtactcagttttcctcatcttttttgatattatactcaacatctaaatgtcatctctaatggaagcaaccaaacagctggccagcctaccacacctgcatgtacctggcctgaaaatgacaggtgccccaatccacagcaaatgtgcaccaccaccactccatcacaaacactcacagcttggaccactgaggcaactgcagacattattgatgaagactacaactgaggaaactgcatggatattatgctaccaagtccaccctaaaccaaagccaatataccatacccaagcaataccataatattttaatttaaaagccttttaaaactaggtttctatagttaattccatctattttgattttatggcaaaataatttctcgaataagttaaacgatttaaccaagtgctaagggaatctgttactgctagaccagccttacaagaaatccttaaggaagttttaaaaatggaaacaaaagaatgatacctgttacttaagtacgtagcacacacactttataaagcaaccacacaatagaaaccacaaagcaaccagctaataacttcgcaataggatcaacacctcacatatcaatattaaccttgaatgtaaatgggctaaacaccatatttaaaaagcacagagtggcaagttggattaaaaaacaagacccattaatgtgctgtctttaagagacccatttcacatgtaataacacccataggcttaaactaagtggttggaggaagggctatcacacaaattgaaaacaaaatagagcagtgggtgctattcttatatcagatacaacaggctttaagccaacaaaagtaaaaagtgacaaagaagggtattatataatggcaaaaggttcaattcaacaagaagacttaactgacttaactatactaaacgtatatgcacccaacattggagcactcagattcataagacaagtactcttcaacctacaaaaagacttagacagacacacaacaatagtgggggactttaacaccccattgacagcattagacagatcattgagggagaaaactaacaaagaaaaacttgaccaattgaacttattaataaacatctacagaatactccagccatcaaccacaaaatatacattcttctcatctgcacgcggaatatactccaagattgattacatgctcagccataaagcaagtctcaacaaatttttaaaaactgaaattgtaccaactatactctcagaccacagtgcaataaaaatagaaatcaatgccaagaagatttctcaaaaccacagaattacttggaaattaaacaacgtgctactgaatgactttttggtaaacaatgaaattac

SEQ ID NO: 1245295 - DNA, 4001 bp, Homo sapiens
accatattaatttgcccattcatttgccgatggcagatgcccaaatggtttccttcctcatgccaccacaaacagtgccatgatgaatatcagcacacctactcccttacacagctgtgtgagaatttctttgtaaaggaaatggccaacttacagggttcatgtatgtgccagtactatatgtgtattattcagaatcttgagtcttgcagggtgagtgatgatgttcgcctcacttcacagttggatcttacagctcttcaagcattgaactcatagtaccaagaaagaatacttcaggttcaggtttttctcaaaaatcattggcaatacataattatagttaattcaaatgaactttgtattaatgatagtttgaattagaataattcaaattctaatcaataatattaaaactctgtcttgccaatagacatgctaaatatcaaatgaactttgtttcttggcaagacagagttttaactatagtattaatgtagtgccaaagtgcacgggctttcctcattcattttccaaaattctacctttctgtttgcagagatctttcacaatggagtttctatgttaaccatatatttaactagttttattgacaattccctctacatctgggtgattgtcttttcatgtgcagaggtgtgtatggatggatttatagattttggttcatttaatatgttggtattcctcactacattgaacattctgtaagggcagagaaaattcttctgtgaaattgtcagtgtcttccacattcacccaggaatcaatacttgttagggaaaccaatattctggatattttacagctagtctaattaatgttgcttagcccatttcagggaagcagaacttatggaaggcagaagtcccaagtcacccagaattttatcaaagatgcatatggacccccaaaacagcccactcacgtggtaagggaatgttggctgtgtcttggaaaaaaaaaatcttcaagcaaatgagttgtgtcatctggaagttgttatgacagaaacgaagaaaagaaggatatctgtcactgtagccctttgaggttgagaagagggatttccagaagagacaactctatttgggatacgtgtggaagggaacacatcttatcttatctgaagggatactgacactgaaggactgcaacagacggagggtctggttctgtccttttgggggaaatacatctccaagggtggctaagacaccagtatcttacagtatgtaccataccctgtgtacattcttcccctttcacaagactcttctctcatgaccacttatctagcacctacctctctttccctaaatcagagctattcttttactcttactctctgccctacaactttgtgaatttcacatatgctcattcctaaaaatagtaggaatttcagaatgttcacataaacataaaccattatattttacctgcatgtacagaatacacatattacttaggagactaattttaaagctataagaggaaactgagaggcagaaaaagaaagaaattgtctccaacacatagcaattaataaggctagcatagtaagttaagatcttctaaggagctaagaagtgtgtcaatacacagaggccacagcatgcatgactagcttgtgttttgaatgaagattagtaagtagaaaatatcaacggagttccattttactaaacaaagatctgaaatcaagtcagcctgcctcaaagatttttaaatgcacactatcaatggcatccaagtatgctaatgtatttatcaaggggtcagcaaaagtcatactcaattaaataataagttgccccttcatttggttcattatgcaacctgtccaaatgccacagtttactcttatttattgtcccctttgacaacaagcacagctgagataataacgtacagaaacatttctcttacctttgttgctttccagtagtgaagttcacagagtggcaagttagactggagctgcgtccctcaaaaggaaatataaagccttcatattttgcccctcccttttcatttgtgcccttagtgattcagctcttcacctgctggttggaaagtacagccctgaaaatgaagtccatcaagagcttctttaaatccccagagcccagcatggtggctcattcctgtaatcccagcactttggaaggctgaggtgggagggttacttgaggctaggagtttgaggccagcctgggcaacatagtgagaccctgatctctattttaaaaattaaaaaataaaaataaaatttgtaatgagatccccagagactcccaagatgaccagtgcttttcagagaagtgctcagttctttttctatttatttattttgagatggagtctcacaggctggagtgcagtggtgtgatctcagctcactgcaacctctgcctcctgggtttaagcagttctcctgcctcagcctcctgagtagctgggattataggtgtgcaccaccacacccagctaatttttgtatttttagtggagacagggtttcatcatgttggtcaggctggtctcaaactcctgacctcgtgatccacctgcctcagcctcctaaagtgctgggattacaggcgtgaacgaccatgcccggccctgcacccagttcttaacctccttctgttttactaagggaaaacattaacaagcctggcctctattcaagaaaaatacgctgtctgtcaaagagattgccatcaacccaacaagttagcagtgccctatgcaaaattccagggatctccagtgtcagtgcacatggtgcaaagctactcagtaggaaagatcccagctgtggcagatgcttcctggcctgaggaacactcatcccaagatcttctgggctctcttgcatgcagcatatgtttttatgtggagtttcagcaaactactagcaggtaaatcctgtcccacaaaaaaacacaagagttatcgagttagtaataactcaagcaagagttattctgtggtttcagtttaaaagcttggtgggagcaagaagccagccctacctaaagtgaattcagaggctgagtaatgattcaggagccaggaagaaaaattacagattagaggtaggaatgagagttagagacagatcatgtttggggtgtgcagtaggcagaatcagtattacgagaaaagcccagcttctcaaagaccagtcttgaccatgcaatccacagtccagcctccccaggttgttacccctgccaaccaatgatggcagactgtaccgcactcaagacaagaaattcctttatggccagtgattttctcttcattttcagtgcacaatatttcttctcttagttgaaactaaaccgttctacaagacaagagaaccagaaaacatggttctaaaattatagtcctaatacccattttgcccacaaggttatcataaaaataactgtacacaaccaatcacacagaactaaaagggatcccaaatctgtccagtctttttctgctcagagcacatgttttctgacatgaatcaattccagctgggggctttcagagcttaaaaacctcatatctaccattagggctgatcttctacctttcgactttgttttcatctctctttagattccataaaaagggggttgaatttcttagctttttttttttctgtctaagcattggggtcatcaaagaaggtatttttatgcctttgatctagattgtactcctgttattttccctgtcgcagaggaagtacttatttctgatttttccttccagttggaaggacatccattagcataacactctttgcctctctttaccctcaaatttactcctgctccccaatgtcttagcctggattccctgaaagcagagccctagataaaggctcacatgcatgtagtttatttaggaagtggtgtcagggaataaaagcagaagagaaagaggggtggaacagagatggaaagaaa

SEQ ID NO: 1245296 - DNA, 4001 bp, Homo sapiens
aggtgtgtatggatggatttatagattttggttcatttaatatgttggtattcctcactacattgaacattctgtaagggcagagaaaattcttctgtgaaattgtcagtgtcttccacattcacccaggaatcaatacttgttagggaaaccaatattctggatattttacagctagtctaattaatgttgcttagcccatttcagggaagcagaacttatggaaggcagaagtcccaagtcacccagaattttatcaaagatgcatatggacccccaaaacagcccactcacgtggtaagggaatgttggctgtgtcttggaaaaaaaaaatcttcaagcaaatgagttgtgtcatctggaagttgttatgacagaaacgaagaaaagaaggatatctgtcactgtagccctttgaggttgagaagagggatttccagaagagacaactctatttgggatacgtgtggaagggaacacatcttatcttatctgaagggatactgacactgaaggactgcaacagacggagggtctggttctgtccttttgggggaaatacatctccaagggtggctaagacaccagtatcttacagtatgtaccataccctgtgtacattcttcccctttcacaagactcttctctcatgaccacttatctagcacctacctctctttccctaaatcagagctattcttttactcttactctctgccctacaactttgtgaatttcacatatgctcattcctaaaaatagtaggaatttcagaatgttcacataaacataaaccattatattttacctgcatgtacagaatacacatattacttaggagactaattttaaagctataagaggaaactgagaggcagaaaaagaaagaaattgtctccaacacatagcaattaataaggctagcatagtaagttaagatcttctaaggagctaagaagtgtgtcaatacacagaggccacagcatgcatgactagcttgtgttttgaatgaagattagtaagtagaaaatatcaacggagttccattttactaaacaaagatctgaaatcaagtcagcctgcctcaaagatttttaaatgcacactatcaatggcatccaagtatgctaatgtatttatcaaggggtcagcaaaagtcatactcaattaaataataagttgccccttcatttggttcattatgcaacctgtccaaatgccacagtttactcttatttattgtcccctttgacaacaagcacagctgagataataacgtacagaaacatttctcttacctttgttgctttccagtagtgaagttcacagagtggcaagttagactggagctgcgtccctcaaaaggaaatataaagccttcatattttgcccctcccttttcatttgtgcccttagtgattcagctcttcacctgctggttggaaagtacagccctgaaaatgaagtccatcaagagcttctttaaatccccagagcccagcatggtggctcattcctgtaatcccagcactttggaaggctgaggtgggagggttacttgaggctaggagtttgaggccagcctgggcaacatagtgagaccctgatctctattttaaaaattaaaaaataaaaataaaatttgtaatgagatccccagagactcccaagatgaccagtgcttttcagagaagtgctcagttctttttctatttatttattttgagatggagtctcacaggctggagtgcagtggtgtgatctcagctcactgcaacctctgcctcctgggtttaagcagttctcctgcctcagcctcctgagtagctgggattataggtgtgcaccaccacacccagctaatttttgtatttttagtggagacagggtttcatcatgttggtcaggctggtctcaaactcctgacctcgtgatccacctgcctcagcctcctaaagtgctgggattacaggcgtgaacgaccatgcccggccctgcacccagttcttaacctccttctgttttactaagggaaaacattaacaagcctggcctctattcaagaaaaatacgctgtctgtcaaagagattgccatcaacccaacaagttagcagtgccctatgcaaaattccagggatctccagtgtcagtgcacatggtgcaaagctactcagtaggaaagatcccagctgtggcagatgcttcctggcctgaggaacactcatcccaagatcttctgggctctcttgcatgcagcatatgtttttatgtggagtttcagcaaactactagcaggtaaatcctgtcccacaaaaaaacacaagagttatcgagttagtaataactcaagcaagagttattctgtggtttcagtttaaaagcttggtgggagcaagaagccagccctacctaaagtgaattcagaggctgagtaatgattcaggagccaggaagaaaaattacagattagaggtaggaatgagagttagagacagatcatgtttggggtgtgcagtaggcagaatcagtattacgagaaaagcccagcttctcaaagaccagtcttgaccatgcaatccacagtccagcctccccaggttgttacccctgccaaccaatgatggcagactgtaccgcactcaagacaagaaattcctttatggccagtgattttctcttcattttcagtgcacaatatttcttctcttagttgaaactaaaccgttctacaagacaagagaaccagaaaacatggttctaaaattatagtcctaatacccattttgcccacaaggttatcataaaaataactgtacacaaccaatcacacagaactaaaagggatcccaaatctgtccagtctttttctgctcagagcacatgttttctgacatgaatcaattccagctgggggctttcagagcttaaaaacctcatatctaccattagggctgatcttctacctttcgactttgttttcatctctctttagattccataaaaagggggttgaatttcttagctttttttttttctgtctaagcattggggtcatcaaagaaggtatttttatgcctttgatctagattgtactcctgttattttccctgtcgcagaggaagtacttatttctgatttttccttccagttggaaggacatccattagcataacactctttgcctctctttaccctcaaatttactcctgctccccaatgtcttagcctggattccctgaaagcagagccctagataaaggctcacatgcatgtagtttatttaggaagtggtgtcagggaataaaagcagaagagaaagaggggtggaacagagatggaaagaaagttaatacaattcttacaaaattggccactggtatctgaatccatggactttcggaggaatcttacaaaatgtgcatcagagctgtccaccgagaggaagaagaggggaagcatgtatctacaggcttgtatccccataggtcaaggaaggtcccatgggtgttaactcggatcacacttgagtgtcaattatgcacattcacaccaaagcatcatcacaaagccctggaactggaagcaaggtgtgagaggaagtgctgccagtttgcaatgcacaaagttatttaaagcctatgcagaactggtggcctcagcagcagctagattaagaggtagggcagcagaatatgaagtgactaacaaaaggcgtctaacacatctaacctatgttggtgggtttggagaggaaatgccctcaagttttgttttgttttgttttgttttgttttgttttgttttgttttcacaggttgccaagcgtccaaaggaagtatggattctcatctattccttctgccctaagttttcccagggctaagcccaattttgaaactccagtaatccctgtgactagattgtacaccaaagaattagaaaacctattattggctcatgcctaatccccagcctccaacctatcattatgtaatgtata

SEQ ID NO: 1245297 - DNA, 4001 bp, Homo sapiens
taccctgggagagcatttatgaataaatataaccaaactaaaagaacatagaggtatccacaagctaaatgtaactatggagcatttcatagatacccaatctgaattgactgtaagtgcaaaatacacaccagatcttgaatatagtataaaaaaataaataaataaaatagctcattaaaattcttatattgatgatatgtggatatgatattttgcatatactaggttaaaaaattattattaaaattagtcccacctgtttctttttacttttgcaatacagttactaaaaaattttaaattactatgtggttctcattatgtttgtgtcagacagtgctgatctagagtttcacatgaatcaagggagtgaggacagcaaaagacaagttatccagagcctggtagaaaggtaggagacaggcgtcatatcctgcactactcagacccatttggtcagcaggtgccctcaactgcctaagaaagaacatctgaattctgccctgcaagatgcaaaccacactctaaagctaagttttgctaatggaataagaaaataatacaccaaatcttagtagatgaataaagcagaatgaccccagaaacacattctgtcttaatccataaattctactgctccatattcaggggaaacagcctgagttgtgcataacccccgcactatgtgctacatccaaggaagtataaggccaaccatgggaacttgtagtttatttggggatttgttcttattaccttcatttatttattctagaaatgtttattaggtgcctacaaaagtatcccttatggtctggaggtcaggatgcagcactagattaggaggtcaaagtaggccccgtataggagataaacactgatcaaagtcttgaagaagaaagtgagctgaggtcagttaccaggggaaagagccatcaggcaaagggaccgagagcaaaggccccaagataggatgggcatgacttacccaaggaagccaggaggccaatgtgacaggtacagtgaggagggatgaaagtgagagatggagtcacagggcttatctgggattcagatctccagatccttgtgggccattgtaaggacttgaactgctatcatgagtgaaataagaaatccaggtttttgaacagatgagaaatagaatctggctcaggttttaaaagggtctcttggactgctgtgcaaaggatagattgccagtgagagcaggaaagcccatcaggaagttgctgcagtatccaggtgagaaaagatggttgtggttcagacctcaaggagactgggagaagtgcctggattatggatatctttcaaaagaaaagccaacagaattttctaacaaatgtggtataaagtgagagagaaagagtccaggaggacaccaagctctctagccactggaaccatatatggtacttaatgaatatttatttaatgaaatgagtgagacagaagacatatacacatactaaaaatcgctagcaatattggtattagcaatcatagagtaaaagagtgacagacatgcatacagagataaagatagagatgaatgagaaaagctgccagacatgaagttgaggagcaccctaaagaaggtacaagtttaagtgagactttaagaatggtaggatcgaagaggaagtaagatggagaaaatacaaataaagactcagagacagggatgggttctgaccaagcccagggtgcaataagccccttggcttgcctaagtgggattagggtctgactttgagtgtggacccagagtttaggaccctgtgtagcaccctagtggacacgtacctcatcaatctgatgtgcactgtcacttctagcacccaagcgtaccataccaagggcagctgagaggctcaggggagagaaaaatatgtttttatgacgatcatctttgcctatctcttgaaaaagatcaaagcaaaatttggtgtttgctgtaacaagagagtccattgtaaaacttataacgatctaaaaccaaaaaaaaaggagaaagagaaaatggtgattggaagaaaataagtgaacaaacaattttattttacatacctgaaatacaatcatgcacaattattcagtatgctattaagaactggaaaactaaggtcattatcatccctgtatataaatattggtgttgatattgatagacagagatctattttcatttagtagtgtgaattcgtttcctggggctgccataagaaattaccacagactgagtggtttaaatagcaggagtttattctcccatggttctgggggacaaacgtccaaaatcaagatatcagcagatttggttcatttcaagactctcaaggaaaatctgtttcatgcctctctctcagcttgtggtggttgccagcaaactttgacattccttgacttgtagacaaatcactcaagtctctgcctccatcttcacatccttctctttattgtccatgtatgtatccaaatttccctcttcttttaaagacagcagtcactgaattagagcccatcctaagccagtacaacctcatcttaatttgaccacatctgcaaagaccctatttccaaacaaggtcatattcacaggtagaaggattaggacttaaactatatttttaggggacataatcctacccactttgtggtggaactccctgtattcacgtaaaatgaagccaaaggctaacattcttattatcaagttagcagccaagcaaacatcatcccatctcattcttctccacagattgtggctggttctgcttacaccttttgcctgtactctcccctcattgctctgtgactgaggatatgcccagcaaattcccatgggtcatgtgccttgttaacattctcacccccttttgactcatcccacatgcaaactacagaatttgaggcactttagtcagtcattcatattgttcaagagacaataaatcttgaatgatgctgggggtcttgatgtcaccaggtgtactagtccattttcacactgctacaaagaataccagagactgtgtcatttataaaggaaagagttttaattgactcacagttccgcatggctggggaagcctcaggaaacttacaatcatggcggaaggagaaggagaaacaagtaccttcttcattaggcggcaggagagagagagagaaaaggaggaactgccaaacacttataaaaccatcagatctcatgagaattcactcactatcacaagaacagcatgggggaaacttcctccatgatccaatcacctcccaccaggtctctccctcaacacgtggagattatggggatcacaatgtgtgatgagatttgagtagggacacagagccaaaccatatcaccaggttcaatgtcctctttgacagtgtagaactacagataatatagaaccagagtgagatagtgacttcctaagaacaggtatcttgccttccccacccaatctattccagagtatcaagagaatatgtagatctcaccactgacctatgcctttcaaatgaaatgccttttcttttgtctctttgcctatagatattgtgtatttccaagatagaaatgtaaatcctcttatttgtgcttttatcatcagatacagcacaccataagcatgaagaaatattgctgcattgaatggaatggtgtaatttgttttaacactttcccagttaatatagattttcttagcctataaaacctaattcaaaaagataacattatgtaactttttaaaaaatgtgtctaacatgtgccaaatatcttacatgtgttagctttaatcctacaactctgcaaggtagatatgatcattccttctttttcagaaaagaaaactgcataatcaaatagcacatatatttggccccaaactaagtaatctttctactgtatctatcgtttctaagttgcccctcaactgatgataggtgatcaaacacatgcctgc

SEQ ID NO: 1245298 - DNA, 4001 bp, Homo sapiens
gcctgtaatcccagcactttgggaggccaaggcgtgtggatcacctgaggtcaggagttcaagactagcctggccaacatggtgaatccccttctttactaaaaatacctctaatttttttctaaggaactcgtattggcttatgtgttcctgtgttcatcttggatgtgtcatttttacccttgtggggattatgtcactttttccataagtacttggacaaggttacgcaaccagtctctactcaaaaaaatttcaagcatctgggagcaggtggcgagatggtatttggaaaaggaagagggctttcctgatagacctgaaattgctccttgtcttgaaagtctctgtttcctggtccacaggtcaagaagagcgtatttttaagataatgcaagagggctgacaacccccccgccaaatgaatttgtgcataggaaacaaggaagccccctgactgcgcccaacctcctccaactgggaagcggtggctcctcgggtccccaggaggaccatgccaattgcagtcaagatgcccacaggggaaaagaagatgttgccatcatttgttttcttcagctctttgaaaagatcaaacccaagtcgagtgctgacggcgccaagtgaatccatgatgattttagcgagacctagaatagcaagaacaacaatcaaaactgaacatttgaattactctgtgtcaggggaatcctttctgcttctattcctcttcttgcatcgatccggaatacagggatttccacccttttggtgaaaggtcgctgctgcctgcttctcacgtcctctcttggccttctcttgctgggagacatccatcaatctactggagtcttccgtcatccggtggtgctcagttcttatttccccgcggagcagggttaatgttttaatggctttattctcttgctctctgtctgaccctgcctgtctctgcctctccacagcctcctcttcatggaagcttccccaggtagacccagcccttgtccaggcgacaccagtttgtccagatgtggggcccatgataaggcaggggggtaggcacaagaatctccacgggcctcaagttcaaacagtgctctcagatccaaccttagcaataattaagccgagacttgaatccttatctgatactatttctcaattgattcaaaattcagcccagagagtgacaggattgattaaatctcttaaacccctttccctaactgcatacaaacttgactctgggctgaatttttctgaagcagaaaccacatatctctggtcatgaattattaggtggagatgaaagggttttcttttttatacttttctgtattgttttaggcttgtacatgagcttgcattacttttgtcatttcacaaaaatagtttttaaagagcaattaatatttgccaaaaataaataggtagaactgtttttatgtttgcttcattaccaactactttaaaactagtaagtaaaggctttaggaggaatcctaaaacaagaataagattaatgaaaaataaagttttttaaagcccacatactttggggccttttgccctcaagggctcatccccgctaaggcatcccacatctgatatcaaagctttcatttcaacctcaggtttccttgcagagatcctttacaggttaactcagaaataaaatggattaatttactgtcaaagaagatacattgtcatggccatgttggaactgaattaaataaaactacctccagaaagtctatgcaaaataaaagtaattctttcaaacaacaaacatcattgttctcaaaatacagaggtcttaaattggagccaaaataagaacttacctcgggtttttggagagacggtggtggctgggcaacgaactaggaagcataagtcaattaagtagctgggatccttaatttatagttctccacatctgcttcagcagtggttttccaccttgcgtgcaccttaaaatctccttggaactttaaaaaaaatctatgcccaagccccaccccagaccaactgagtcagcatctctcgagtggaaaccaggcatcagaatttttatcaccgcaggtgattacaatgtacagccaacgctgggaaccaaaggtgtatagcctgatgaacacatacattaaatgcatactttacttaccacagatggacagagctgtgtcctgacaagtcattctctgtaacagagttatttttgcatttgcattatttaggagtgccaaatgccaggaagaaaatgaaagaaaactatcttgctacaaaggaacaagaaaaaagaacaagaaaagtttgggtaggcagccacacacaagcgagcatgcgcacacacacacacgcacacacacatacacacacacacctattattctcaagtattccatccattaattgtaaaatatctcattttaattcattcaataaacatttatcaagtctattatgtaccaggtactgtgtctaatgccaataattcataagcactcaatatcctcactgatttcaggaaaacaacactaccaaaaaaactcaataggaaattacacccccagattccagtttttcctgccaaccctggagcatttctactggccctaccagttcattaaaagaaactgtgcttggattagtcttagctttaatcttcagtaaagggcgtggagatttgccatcgttgctgggcagcagctcctagaagggtgtcttagctcttccttctgcctagaggaacacctccctagatacgcaggctcgaagggcatatgggtcatgtgtgttccaatctccatactcacaatttacttttttcaaaatattttgattgctgctctttaagcaaactcaaagccacatttagttgatttgctttttaataggcactgagaatcttgcaaattgagtaaggtttagaaagaattaacacttagtgaaccctggatgccagtgaaatggaaatgttagttttttaaaatggcataaaatctctgagtcggccataatgctttatgttttaatatccctatccatttatatcttcttatttctttctctgtggcccctagacttcctgttctattgcccagccatttccacaggccttctgctttttgctaaagcttttgctctaccacctgctttcaccgggaaacctggcatgtcctgaggactactacatcccatagtcttttctgggaacggccactcatatcttgggaaagcaaagtcaccattcctattctccctcgcactccctcttcttccaagtctttcttccttcagtcaccttcaatgctcccctttggaaacttagaccatcacgctgtgctgctctgtccccaaccacaggtccctccgtgactctgcatatggtcttcctgtccaccccagctgctaccgccaccctgtaccacttcaccattcctgttgccagcgcctctcacttctcggaccttcaccttccctcttttatagtggcccactcacaccaggaactgctcttgtttaacactcaagcacctccatctggtgacagattctcatccttattctctctaaacctaattttcaacgccttcccaacctcttatcacaggactcctccctgttctgttttatccatctcttctttctaggatcaaaactgccccagaggtggaatatatgttgatgattaagaaccatttaaaaaatgatttctatgctaacaagtgaggagaagaaagttatcccctgaagcagagtattgataggttcccaaccctgttccatagctcatagttttgttccaacttctgtgtgtctgttactgatactgacttgtaatatttttcttctccaagcatgtaatctcgtagtggatgctgccgatgttcccaccagatttccttaacctaccagcatgcctgttacccagttgttgttttcccttataattcacagatgcccttttctcggctaaaagagagctgcct

SEQ ID NO: 1245299 - DNA, 4001 bp, Homo sapiens
tcaaaaatttgttcctcttcctcttaaaattgtcttcataattaaatagatttattgtacagatttttaaaattaattatctcaatatcttttggaaacaaactgagtattaataacacaaataaaatatttctcgatccccatgtgagaaatgtaaataagagatcagagccacaaacataaatttagacttctcccatacctaaatacgtgattctttgtaacaattcataccggattctttgtaacaatccacatagtaactttgatagtaaaaatatttaactctaaagacaaactaacagaaagttctgttaatactaagttagaatttaaggtaacttgataaagaaaaaaattaataagaacagaagcaaattttcctggatgcatttacttctttcaaaaaagatagtttcaattatatttttaaataaggtgtaattaattacatttaatgtaaaaataatatttgatgtctgtatggcagtcaccaaattccttcagctcccttttcaatttgcataattacctgtccagtaaggcttagtaatttctgtaatatgaatgaaaatatgaaaatagagattgcacagctggtccatttcagaagcctagactggatcacagacttctgattccaagtctaatgctttcctacaaacttttcaaataaggtctgagagtttcataattttagaaatctatgaaggcacccatatgcagtgtttcctgactctcagataaggccatactttatgtttgaatgaaaatctttcaaaacaaggcaaaattgaagtcatggggtattgtgaaataccacagcctcctggaacaggtatacctgttgtgaattttttaacattatagtaatttatatgatctcattaacttccaaatagtatgctcttaattaaggtttaatagtattactgggatgaattaatgggagtaatatgcagggttgggcttcctggtggtgtgtgtgttggttcctgcaacacaagttgacaaatgcaccactgaaacttggcacagggaaggaagaatttgggaggagtcaccaggcacacggccattgtctctcaccctgttggccctggatgttagattggagtttgctgtagcatttaaaacaaattttgtttacaattagacagtggaaatattttgaaattgaccacaaaaattaatgagaactaagagaaaacaacagtttcaagggaatatctcatcaaatactgctacatctcccccaacagaattaaaagcaatttctcctagttgatggctttcataatgaataagtatctttttatgggatattaagttatttactgaaccatacttcagtcaaccctgcaactactttggctgattattctctttcactaaattgacccattattgaactaaactcaataaacatattgttgtactagattgacccagcccaaattgctacttaatttttgcagttcctgctttttcatttaaggtgcaaatgaagtcttcttttcctattatttatatacaatgtagagattacattcaattgcttaaatgaaaatattttaatgtatctagttgtttccatcaaatttagtgtcaaaacagtagctagtagagaacatatataatctaatctgttcaataaaattggcatcacaatctgaatgtacattttgttttggttaatgctacaaaggtatttgttggcttctgagattcaaaattaaaccttataaatttaattcaaatcttgaaataaaatattttcaattcaacaactaaacaagaaaacaccacttaaattttactcgccctctacaaacaccccacatccaaattttcaatctattaataccagcatgagggaagagaaaacatgaaaccctatttcccatagacatggcatggaaatcattgaaatacctggttgttctctggttattctctgagttgctgtctgacgggcaatgctcctctgagagttgttacagttcagacatggtaatgactggttttatacagctttgcccctcccacatggcatttttttttctccctctgtcttttgatctgtgtcctttgagtgattcaacattttactcaggaagacatcattagaatagaaatacttgtttgtaaaggcatggtttaagaaattttgggggaggatgaggtcactctgaaacttaagaatttgtcaatatctacacatgcctgtgaaagttagctaaaatctgtcagccccagtttcaagatttcccccactatacttgtgctcaaggatagtatcaaattctacaatacttcttctagctttggacaaccatggcctgtgggcttcttccaatatataaatataatgagatttactctctcttttgagcctagggagacccaagcgatgcttagggcatgggagggaagaaaaaatccattttctgtcttagaaattctctattttaatctgtcttacattgtctcaagctgtaattttcgaaataactcggattctaccctaatatcctgacacaagaagaatttttcatcttctcttgattataaaatagatcttatggccgggtgtggtggctcatgcatgtaatcccagcactttgggaggccgaggcgggaggatcacttgaggtcaggagtttgagaccagcctggccagcatggtgaaaccctgtcactactaaaaatacaaaaattagctgcacgtggtggcacacatctccagttccagctacttgagaggctgaggcagaagaatcacttgaacctgggaggtggaggttgcattgagctgagactgtgccactgcactccagcctgggtgacagagtgagactccatctcaaaaacaaaaaataaaataaaaagaaaacagatcttatcctttattaggagccattgcccttttacacgtgttaagtgcccctttgtccttagtgctcttctcccgtgagtgctgaggagtctggtggtgagctaagtcccttctttcttttcagcctctgtccaagaagacccctctggtaatgtctatgtgaccaaccatctgtttaactgttttttgtttttgtttttgtttttttgagatcgagtttcactcttgttgcccaggctggggtgcaatggcgtgatctctgctcactgcaactcccgcctcttgggttcaagtgatcctcctgcctcagcctcctgaatagctgggattacaggtgcccaccactacgactggctaatttttggtatttttagtagagacggggtttcaccatgttggccaggctggtctcaaactcctgacctcaggcaatccgcccacctcggcctcccaaagtgctgggattacaggtgtgagccaccgggcctggcctgtttaactgttttttaaccacacattgacagctcaacaagttgggacagatatcaatgtacctagaacttccaccaccctttccttcactcacttttcaggtgctactctttctcaccgtattattttcattccagttattctcaagaggaatgtcatgcttctttctccccactgactcacctgtgaggtttgattcacaccccataacttccatggagtccattctgactcttacaaccctcagtgaacttctacgtagaactgcaactttcagagttcaggatgtggtataggaatcttatatattctgacagtatcatctgagttaggatctatccacaaatatatacttggtttcccttgagcagcaagaacagtggtgagcatcaagcaaattcttaccaaatatttttaatgggtggagtaacatgctaaaactctctagagaggccctatactgtggtgaacaaggatatgaatactgagagactcagaaaagtctcagactcagaatcttctttttgccatttactagttgtataatcttgcacgtatttctcaactactctaacttctaattttctaataattctatacagctggtact

SEQ ID NO: 1245300 - DNA, 4001 bp, Homo sapiens
tatcttgtaggacacattgactgatctgtgactgtttcctcatgatggtcattctctgcacgtaagaagagtgtgtgccaggtacatggctaaggactttacatgggtaactttaagtctttagttcaattcaggtgaaaacaagaaagctcagagaatggaaagtaaacctcttcatagagacataaattagaagtgccacgttttgaacctaagcctgtttaaatctagaaacttctactttccagcaaagcattttgcactattaaggctctaaaccaatatattccatagcaatcattttccaaaatatagttggacttgtgcttattcctctttatctcattaatgactcaatgaaaattaaatattttgcaacattattgtgattagtataattatagctattttataataataataacatttattatgacattttatgggcaaggcaatgttgtaaacatttgcatgtatttgcatgtattgagtcagatttcttattacccttagttttctgggatgaggtcactgggactctgagcagttgtgtcctgctcatgttcaccatttgtgaagagcaaagctggagtctgaacctagcctatcctgatccagacctatgctctgaggtacagtgctgactgtctttcagtaacgaagaaaggaggaataataattatgtgccatgaaatgccaacccactctgtatgtctcaatctttgtgtccaagattttccctaaaaatggccttttcttagtttctgtgaagttccaggttcaaactatgacctgttcggggatctaaagctgaaccatagtgctctgtgactcacatgatatgttgcagcttttcctgtggtgttctctgtgacttgatcaaagtgaagaacctggaagagacatgaagcgggacaagaaaactttactcaaaagatctgtttaagtcagtggtctcacagttacgggaattcctgctcagccccctgtgctacccatcagaccaccacatctattaccatctgcgtgctagccgacggaaccagagaaaaactgcaacaggacaacataatgatgctgatagctaccttcttaatctgttgtgcagtgttgtctttggctcctaagaggaccatccctaatgctgatgtgatgctgataggggaatagaagatgttgttctcttttgattttctgaactgttggaacaggtcgaacatgaacttggtgttggcttcactgagtgaattcatggtgaactcgatgtgatctggaactcctggaaaagcatcagattcctgtcagaatgactttaataaatggaatggtattttgtagtacaattttcttaaagaaattatatatctgtgttgtgagattttgacatttaaagttttcctcatcttatttttaacgtttcaatctttctacaatgtgcatatattaaatatattaatgtcttaattagaagcctcacaaaattagtgtttttaaagactactgtaaataagtaatagaccctctttccttcattgctggctacactagggctaggtaggaaggctttacaatgaatgctaacaggagacctctgtggatcacatccaaccagctgttaagatgcgtccctgacatctccttcaagactctctggctgcaaggcactctccctctgtgttcctaaaagtgccttggtttacttggaactaagcaatttagataaaggacaaatcagatgaaataggtattttaattttgctctggcagaataagtaaaatataatcagacagaatgcaggagatgcatgatatagaacacagtatcattattattctcaaaaataattcatgttattaagctggagaggcttgaagctcttacctgtgttcctagaggaagcagaggtgggcagagaggctatgtgtgtctgtggaatgaagggtgagatcctgaatttatgcctctcctcttgctgcctctccctctgtggttagtatttgaagttactcaacttcagatttcacaagcgggctaacactcacctttatgaatacgaaaatttatgacaaaggacaggattacagttctaccattgtacctcctttttaatctatagggaaaaaataagaatgcaagtcagcagtcaccggctcatgtgaaatacatgtaggtgcctttctaatgccaatgagaataagtttagaattccaatttcctctcatttgtttcaactccatccctttgtattctactccagctgtaaaacaaaaacaaaaacaaacaaacaaaaaccccaccattcttttcttggattttgcattgtcttttaggcatacttcgaataccaaagaactaaaaagcttacatttcctgtttttcagttctgaaagtttttgtcatcctatgaatttccttagtaatttttctgtataacaaggaatatagtgctaattctaagtccaaagagatagtgaagaagtgtacttcagtatcttatagcatactatggagaataggattctattgccttctcctgaatgctcagctttggcagtgatcctaccagtcacttcctgtgccccttacaaccatcccagatggttttctgttgcataggctcagtgagaaagttatctgccttgctgagtgatatggtttggctgtgttcccacccaaatctcaacttgaattgtatctaccagaatttccacatgttgttggagggacccaggtagaggtaattgaatcatgggggccggtctttcttgtgctattctcatgatagttaataagtctcaggagatccaatgggtttattaggggtttcttcttttgcttcttcctcattttctcttgcagccaccatgtaagaataacttttgcctcctaccgtgattctgaggcctccccaatcacgtggaactctaagtccaattaaacctcttttacttcctaatctcaggtatgtctttatcagcagcatgaaaacagactaacacattgagttaacaggctgacactgagaagagcaattgaaacagacgggccattttgaatgtcagctttctaatttttcatttaaaaattaagcagaaaaagaagttgcttgacctgtcaggatcacaacgtttcttggtggtccttccatttagcacctggcttcagactcattccagtgtttcctctggaatatcttgtaatctgaagaatgtctgtggccagggagagggttgttgtccaaggccatttaatccaatatctccctgacaaccagagtggggggctgtttgttttgtggacccccttttttaacatataatttatatgccacaaattcaactgtacaattcaatgattttattatattcacaaagttgtgctatcaccatcatgatctcgttccacaacaatttcactacctccaaaagaaaacttgtatctcgttcttcccttactcgagaccctggaaaccagtaatctacctcctgtttctatggatttgcctattctaaacatttcacgtaaatcgaatcatacagtaagtccttttgtgactggcttctttcatctagtattatcttcaaggtttgtccacgtcattgcatggatcagtacatcattcctttttgtggtcgaataatattccattctatgaatagaccacattttctttattcataagttgatggacatttgtgttgtttccatccatttactattatgaataatgatgttttgacttttcatgtacatttttttgcatggcatatttcttcatttcttttgagtataaacctatgaatgaaatcgctgggtcatatggtaaatccaggttaacattttgaggaaatgccagactcttctccatagaattctgcacaagtgtgcattccaaccgactgtgaatagagttctgatttctccacattctccccaacacttggtattgtcatgggccctttttaacaccagccatgagtttgttttctcagcacatcat

SEQ ID NO: 1245301 - DNA, 4001 bp, Homo sapiens
gctattatcttgtaggacacattgactgatctgtggctctttcctcatgatggtcattctctgcacgtaagaagagtgtatgccaggtccatggctaaggactttacatgggtaactctaagtctttagttcaattcagatgaacacaagaaagctcagagaatggggaaaaaaaccctgtttatagagacataaattagaagtgccaagttttgaacctaagcctgtttaaatctagaactttctaccttccagcaaagcattttgcactattaaggctctaaaccaatatattccatagcaatcattttccaaaatatacttggacttgtgcttattcctctgaatctcattaatgactcaatgaaaattaaattattttcacattattatgattagtataattatagctactttataataataataacatttattatgacttttatgggcaaggcactgttgtaaacatttgcatgtatttgcatgtattgagtcagattttttcttacccttagttttctgggatgaggtcactgggactccgagcagttgtgtcctgctcttattcatcatttgtgaagagcaaagctggagtctgaacccagcctatcctgatccagacctatgctctgaggtacagtgctgactgtcttttagtaacgcagaaatgaggaataataattatgtgccatgaaatgccaacccactctgtatgtctcaatctttgtgtccaagattttccctaaaactggccttttcttagtttttgtgaagttccaggtttaaactatgacctgttcagggatctaaagctgaaccatagtgctctgtgactcacatgatatgttgcagctttttctgtggtgttctctgtgacttgatcaaagtgaagaacctggaagagacatgaagcgggacaagaaaactttactcaaaagatctgtttaagtcagtggtctcacagttatgggaattcctgcacagccccctgtgctacccatcagaccaccacatctattaccatctgcgtgctagccgacggaaccagagaaaaactgcaacaggacaacgtaatgatgctgatagctaccttgctaatttgttgtgcagtgttgtctttggctcctaagaggaccatccctaatgctgatgtgatgctgataggggaatagaagatgttgttctcttttgattttctgaactgttggaacagatcgaacatgaacttggtgttggcttcactgagtgaattcatggtgaactcgatgtgatctggaactcctggaaaagcatcagattcctgtcagaatgactttaataaatggaatggtattttgtagtacaattttcttaaagaaatgatatatctgggttgtgagattttgacatttaaagtttttctcttatttttaacgcttcaatctttctacaatgtgcatatattaaatatattaatgtcctaattagaaggcttacaaaactacgtttttaaagactattgtaaataagtaatcgaccctctttatctttctttcattgctggttacactagagctaggtaggatggctttacaatgaatgctaacaggagacctctgtggatcacatccaaccagctgttaagatgcgtccctgacatctccttcaagactctctggctgcaaggcactctccctctgtgttcctaaaagtgccttggtttacttggaactaagcaatttagataaaggacaaatcagatgaaataggtattttaattttgctctggcagaataagtaaaatataatcagacagaatgcaggagatgcatgatatagaacacagtatcattattattctcaaaaataattcatgttattaagctggagaggcttgaagctcttacctgtgttcctagaggaagcagaggtgggcagagaggctgtgtgtgtctgtggaatgaagggtgagatcctaaatttatgcctctcctcttgctgcctttccctctgtggttagtatttgaagttactcaacttcagatttcacaagcgggctaacactcacctttatgaatatgaaaatttatgacaaaggacaggattacagttctaccattgtacctcctttttaatctatagggaaaaaataagaatgcaagtcagcagtcaccggctcatgtgaaatacatgtaggtgcctttctaatgccaatgagaataagtttagaattccaatttcctctcatttgtttcaactccatccctttgtattctactccagctgtaaaacaaaaacaaaaacaaacaaacaaaaaccccaccattcttttcttggattttgcattgtcttttaggcatacttcgaataccaaagaactaaaaagcttacatttcctgtttttcagttctgaaagtttttgtcatcctatgaatttccttagtaatttttctgtataacaaggaatgtagtgctaattctaagtccaaagagatagtgaagaagtgtacttcagtatcttatagcatactatggagaataggattctattgccttctcctgagtgctcagctttggcagtgatcctaccagtcacttcctgtgccccttacaaccatcccagatggttttctgttgcataggctcagtgagaaagttatctgccttgctgagtgatatggtttggctgtgttcccacccaaatctcaacttgaattgtatctaccagaatttccacatgttattggagggacccaggtagaggtaattgaatcatgggggccggtctttcttgtgctattctcatgatagttaataagcctcaggagatccgatgggtttatcaggggtttcttcttttgcttcttcctcatcttctcttgcagccaccatgtaagaataacttttgcctcctactgtgattctgaggcctccccaatcacgtggaactctaagcccaattaaacctctttttcttgccagtctcaggtatgtttttatcagcagcatgaaaacagactaacacattgagttaacaggctgacactgagaagagcaattgaaacagacgggccattttaaatggcagctttctaattttacatttaaaaatgaagccgaaaaataaattgcttgacctgtcaggatcacaacatttctcaatggtccttctgtttagcacctggcttcagactcattccagtgtttcccctggaatatcttgtaatctgaagaatgtctgtggccagggagaggggttgttgtccaaggccatttaatccaatatctccctgacaaccagagtggggggctgtttgttttgtggaccccctttttattaacatataatttatataccataaattcaactgtacaattcaatgattttattatattcacaaagttgtgctatcatcatcatgatctcattccacaacaatttcactacctccaaaagaaatcttgtacttcattcttcccttcctggagaccctggaaaccaggaatctacctcctgtttctatggatttgcctattccaaacatttcaggtaaatggaatcatacagtaagtccttttgtgactggcttctttaatctagtgttattttcatggtttgtccacatcattgcatggatcagtacatcattcctttttgtggtcgaataatattccattctatgaatagaccagattttctttaatcataagttgatggacatttgtgttgtttccatccttttactattatgaataatgatgttgtgacctttcatgtacatttttttgcatggcatatttcttcatttcttttgagtataaacctatgaatgaaatcgctgggtcatatggtaaatccaggttaacattttgaggaaatgccagactcttctccatagaattctgcacaagtgtgcattccaaccgaccgtgaatagagttctgatttctccacattctccccaacacttggtattgtcatgggccctttttaacaccagccgtgagtttgttttctc

SEQ ID NO: 1245302 - DNA, 4001 bp, Homo sapiens
ggcacgtgcctgtcatcccagctacttgggaggctgagacagaaaaatcacttgaacctgggagggtgaggttgcggtgagccaagatcgtgccactgcactccatcctgggtgacaaagcaagactccatctcaagaaaaaaaaaaaaaaaactacgtttttactgtgtcagagtatcgtagatatcatttagcctggcctgcctcattttaaagatggaaagacatggtgaaaaacatctctcaagtatttggtataaccagtccttagggaatgccatgagaaaccttgcctattataatatcagtaatggaatgccaaaaaacacaacctctgttgtccacattctaagtctttgaggagcaaaggatgtgcaggattaagaaaataggatattttgaagtttctgcaatgtgaaagactatgaggactaaacgaagtgattaagtgaatcaatgtatatgaaaagtgctttgtgggcaagaaagtacaatacagctattagtaattgctttaatttcccatggcaggggggcgtctgctttgctctgaagcatcatagctgctcctgtctctttagaagcctgatcttgaccactgacccagcccactgttgccaagcagtaaacttacagccagactcagccacaccagaatggcccaaatcgctgagactgcatagccccaaagtcaatccacaacccagagggattgaagtggcacaattcaaggcgttaggaagcaaagatataaacctgctgactcatttcctttggagactcctttcctcagacaggcttcatctccacccatgaaggaactcatcgaacacttacactaactgacagggactgaggtttggaacccattatcgaaaacctcccgggagatgtaggggatgaaaaagatggtaacagaacccacggtgttgtggaaacatcccgagctgcaagtgtgaaggcctgatttgatctcagcggtgctacttacaagctgtgtgcctttggacaccagatcacctctgtgagttctgctcctcatctacagaatgagggggctgggctgaaatatgtctaagagcccccagctctgaggatctggttacaagtctctggaatagcctggcatgttggtttttagtatgatatgcttaaatgaagccataagaaaaagtgtacagcatatgagtaagaaactacaagcagctattacaatttataagtccaagaatatgcatctgaaatgtgtaacttgtttaaagttatgctgaaacccagaaaactgaagggagaataatttccgcttagaagaatgcagttgcaagtagatgaacagcgatctgatgcttaaaaatgccaaaaagaagggcagtccatatgcctaaatctcagccttacaacgtcagccagggagaagagccagccagacccaccaatacttctcaactttccccagtttgcgggtaccacaccctttctgaaactagcattgcaaaattcattctgagttccaaagtaggcctgaaaatgtcctcagaagtattttctcctccgtgaatcacggttgcacccctctaccaccaaaacctccgagccacgtgacttcttcatattcttaccttgtatggttaagtgattttactccctctgcagtgttcctggtgctcaaagggttgggagctggaaatactgccaacatgggggatgagaggcgacagtactcaacccaacagcccgtctttgaaaacagccccaaaatggacctaagtccattttgttcaccatctcaaatcagctcaaataacgatatttatgaatttccctgaaaaaaggaagtcaccagccctgctaccccaccttgcttacctggagtcacagttatcctggaaaatgcgtggaaaaggaacaggcaagcgaggagcacaaagacctggatgtggaggcgaccgtgtctgggcagaagcagcggtggctcacctgggcagcaccgccacgcccactgccagcccagctccacgccccgccccgccccgcctcggcggcactcctctcctactcaagcctcttggcagcttgtccacaattgaaagaaatgattcaggctgaagttactgttgtctgcacagcttccaaaaggcctccaacatgttcgggcaggaaggggctgtgagttacatgcatacgtacagacatgcgtacggcaatcctctcggcccacgcaggaccggaaggtgaaatattcgatgaaataaaagtaatgtgtgatgatagtaacactacaaatttctcagacacgttggtggcacaaaaagtactctgatctccattctttttgtgtaaactgcagcagctcattctgctagatgccaagagaggtagctgcccattaaacagaaagacaatcaaaaaagaaggaatggatatatgtataaacacagtgcctacctaaaaattaggtactattagcaaaatatttactaccaaattggtaggagatattgtttaatgggtggcgcaggaagtttctttttaaaatcctgtgattaggattactcaggcctggcgcggtggctcacgcctgtaatcccagcatttggggaggttgacgtgagcggattgcttgagcccaggagtttgagaccaacctgggcaacatggtgagaccccatctctacaaaaaatgtaaaacaatagcctagtgtggtgatgcatgcctgtggtcccagttacttggaaagctgagacgagaggatcacttgagcctgggaggtcaaagctgcagtgagccgtgagctaaccactgtacttcagcctgggtgacagagcaaaagaaacaaaaagaaaaaggagtacgcagctctgctctgaaatctcttcgtggagcctgttcttgtcctcctgtcttcccacagcttcttcatttggcgggacctactcccttccagccgaatcagtctcaggaaaggacctgaaacggagctggttgcttctctgctgtgcttatctagaattccctattgtacatttactacattgtttcataataatctcttacattctcctatatgtgactacaacaatgttaaaggtaagtgccaaacttcattcatttttataacaccaaagcttggtacagacctgatgtacagtatgcagtcaataagtgcttgttgagtaatgaataagagcaactcgctatattaactgactaaactaagattgataacagcttcccctcccccatgtcctgggtattttaatgttaaccagaatcaaagtcataaactaagtgaactccaaaaacagaattttaggcatcagtggagcaagtggagggaaggtcataggtgaggaggtgtggaaggatgcttcttaaaaattctattatccagctgtaggagggaaaatgagaatttgggagcagagtcataaatttgcaaactaagtctaaccactcattgcttgagaaatcctgagcaaattgcttaatccctttatcttcagattcctcatctgtaaaatgagatctatatatagttctcatttgtcaataagatcgataaaatgagatatagacagagatggatgaagagacaattcttacatactttctgacacatagcatgtgcttcctaatgatggcaattagtaccactttgcccattggttaggtaggctcggggaatagtggacaaaagactggagcatgttattgacattgaattcaccacatttattgaatacctgcttcgtgcttgctactgtggtctacagatttcaagcgacttgcatttaaatggtagagcctctctattctcctttttgaagttttaattccctctaaaacactcctgttcagtgcttgctcaaccggggcagaaacatttccaatgacaggaattcaacaatacccaaggaagttctagcaaagtgaaatgcctttgggtgattctaactgggtgaaaattagaggcaccattcgactggggctataagacatg

SEQ ID NO: 1245303 - DNA, 4001 bp, Homo sapiens
ggcgcctgtagtcccagctactcgggaggctgaggcaggagaatggcgtgaacccgggaagcggagcttgcagtgagccgagattgcgccactgcagtccgcagtccggcctgggcgacagagcgagactccgtctcaaaaaaaaaaaaaaaaaaaaaaaaaaaaaagacctcagtttaaacaatgctgggcactagaaaattgttaggacattttccctgcctgtcccttcaaagtccgtgatctagaaataaatttgaaaatcagactacagtgtgaaaacagtgatggtggaagtatttctaaagtgcttgaagaagtgcttgagaaagcttcggagtggaaatgatgctgaaactccatctggcagagggaaggagagagactagcaaggtctgctgggtggagggtggggctccaagggagggactgatacctgcgtgtcctgcccaccctcctaacctgagtctctctcgggaccaccctaatgactagtgttacctctgaccagcgtctttgctcctctagggaccacccttagacgacagggctcgtacctactaaatgcctcttatgattatctgtttaccggtgttctcctcagcattacctatggcaacgagaccaagttcagacaggaaaacataatctgattagttctccaagaatgaagaagacaatctgttttcattttgtaacaaacccgaacccagccttcattcattcaacataaatgaaactacatattcccttggcgtgaaatttatttcttcctaattctatcctctatcaatctctaaaccacatttcagacaaatggtagacttcataactctttaaaaaatcttccagaatagatttatttaaactctgtcaagaaatcaatgcgattttatttattaacataagtaaactactatgcttatatattagcattaaaaaccctgccaaagactttggatgaaaatcttccagatacaactatgattaaatacaagatgttctgctgttaccatttctgttccatcagccacaggttttagaatcttttcccttcccatgagcagcccacactctagtttgtttatattgagggcaaaaatattagcagagatgtcaaggttgtaagtcattgtagaagacagttataagatggagttattctaaagctcagctatacatagtttgggatttgttggagaacctctgattctgaatcattctatcaagtactcaaaagtgcctcatattactaaaaaatttttttgaaacctcaaacctctcaaaattgttgctaaagttgccaaatatcattgattataatcaacaaggaatgtccaacacatagaagaccttttagggaattatcatcatggttgtattgtgatcgacctgggagttggcatgtaacttgtcacctgggttctggatcatttgcttaacaaaaaagtaaaactagcttgtaaatatcaattcattcactcacatatatttaatcagtaggtctgtgacaccagagatagaaagcccagacacaggtagtagatatagttggtgtatgagctatcttgtataagcttaggggtctattcagccgtcagtaggcacttttttttcataaggtaaggaataaagctgaattttctctattaaatatgttggccaatgttatagatgcggccgtcaattgtcattctaatccccaagattagtctacaacaaccatgtggagaacagagattggctgtggttaccctggaaaggggtatgtgtctgccagaatcccagatgccagaggtaaagctgttactttgacagcaggtaaatgctcagggcatgcagcacctcaggcactaggggctgtccatccatcttagggaatctaagcatactcagaagcctagaataacccagcataagcactcacctcctctcactgcagtctgcggccttcacagctgggcttcagttcctcctgcctcctacctcctaagacttctcactcctcccagcacacctataccaaggttcagggaaaattcccaagacttccctttggctcaactcccaagggagaggttgatgacagcagcagcactggtgacagcactgaatgaaaagtccctccttcatcccagactgcacaaagaggaaaatcatggagggaacatcaggaagggactccacaggggctttcctgtccagctcagaaaggcacttgtcatctcccgactctgcaggaagcacagaggagtgccccatggtgtcgtgttgctcatccttccattgaccaacaaaccagagaagtaaacattctaaagattgtcctttcacattccctttccaactgtgtgtgcctggacatatggcaggttgtagccttagagtcaggaatcagggccagcaggttagaaccagggaaggacccaggagggagccagagccaggagaacagactttggacaatccaatcctccaccgaggaccaaggttagatgcctgggttttatctatttccatggcagtcattgactagggttcaaatggtctccccaaaagaggaggtgactcaagtcacagatctcatgataagtttgcaacatacagatggtttttaccaatatcaagtggcaatatacagctctggagaagcactgacagcccacatacacagcagagaccagatattctgagacagactcaagatataccttccagaaagtatgcccttggatgcaaaatacatgaggtggggtgtcacagctaaggcttagagccacgcaaacctgggttccaattccagctccccatcttggacccatgtgacctttgagaggctcttcaacctgtctgtatcttgcttcacttgtttgaaaaatggggaaatttttcataacgtcatggttaagagtattataggtaacatgtaaagtacttagtacacagtaaccacttgataagtgtagctattattataataataagttgagacaggaaaatccaggatgtatgagtactccacctatccatatattgcctattactcaaggccacccaaacttccaccatttccatcatcttccatattattatgagcctatattgagttctttatttcttaataatattcttttatcatatgattttactaaatatttccactgctgtataattttagattgtcactcataagtcactacttacgtcacttataagtcatttagtacaaaatcctttcctaaacacaaaaaccaagccatgctgttttaaaatctacattgtgttgaacatactacaagaaacctggtaagcacttgataagtaggtgcttaattaattgcattttaggtactattttgggttggtcatgatgataaatatccgttgtaaacaccttaacagttcctgcattacctttcagaaaaagacctttcattttttgcactcctccatcatctgtatggaaaatacaaattttatctatcttattaaaatattgccattttaactttgatattgaatatggtcatggcttcgtgagtatggagacataaatatgaatcactatactctcatatattcactagtaaaaccatttcaaattgtggggggaagatgagttttggaaacacaaatgtaattctcacccacctcatcctattcctgatataatgttattagaaatgacataaaatttgtaataagggaaacttccatcactgttgataagggaataatgtcagtaccagaaatttcatggaaagataaccagagttcacttgcaaatcaccgttacagtaagcaatgaccttgagggagcaggcgatggaagccctgccctccacacctgaacatgaaaacagaaggatgggcgtgtgggatggtgcaggcagcaagaccgaccgagaatagcttcatatggaatctcttttgcttataaagtgatgggatttgaaggcagagtgacaagggatcctagaaattcagatagatataaaggc

SEQ ID NO: 1245304 - DNA, 4001 bp, Homo sapiens
ttccatggtaaattattgatgaaattataatcttattgaacaaaagagaagctacacaagaatgtattcattcaggatacagagtacataaatgtttagcttaggtaagttttatggcagagaaaccatactagaaaaaaaaaatcacgacagagaaacatgagccaagacattcctagataattatgaattctcaagtcataactcttaaaatgataggtgatactaactagcatatactttaacattcttgtacagacatgttcatgtatgcttaaaataaataccaaaaagtatgttccatttcacataattatttttattatctttctctatgcaggtgcactgtttaagttccaggaataaaagtaagatttgtttctcctcttctgatataaagtctgattcttattggcaaataaacaattatatttaagactgaactgattgttttatacctccaagttttcatcaggtgacacataaataaaaattagcatgagaccaaaactgtgatttttcctttccctataaatactttcaaagcaacttaaatagataaaacattaacaaaaataaactaagttcaggcaagccaccaacagccaccaacagctaccaattgacttgagtcccagttaaataactaaggaaattgaaaaggaaaacaaccacattaaagctacctaaagaagatgtcagtgtgacaccacccagtatttcattgtctggacatggcaatgcaggaaagttcttttcaaatcataaaagaacttggttttaaagtctgatttttcattttgctaaaaatatactatattcttatgtttcttgcataaatattttagcttaacaaacaagcatgcaattaatttataattttaaagttaacacaaattagcacgtactcatggatgtttttacatcccaaacttcagacttgagggtctaaaagtccatggcagcctgaagcctatttgattccttatggtctatttcaatctgagaacttttttatccctttcatcctttagctaatatattattagcatcaaaacaacaataaaaatagatattttctcactaaaccttctttttaaagtttaataaaaagcaaaaagtagtttttaaataaagcataagaaaattcaggcacaaaacacattcaataaaacataaagttatgatactattttatggacctaaacttattacacctaactgataaattatgtgccttaaatgcttgataaaagtattatctagtcttaggatacttttgcctgtatatagaaaattaattatagttcatgacacattattttttaaaaaagcttttatatttactgaattaggatatacatataggaaagaaatgaataatcccttgaatgtgattaatttttattcttatcaataagtcaaatacgatgctatacagatactcttggaagaaatattttaaaatctttgtatttcttttaaaaacatagtttcaaattttgatcaacctctaatcaaattagtatattatgcacttaaaagagttcaattctaatctcaaaatctagtatattccaacctataatgccttaaataagaacacaggaaatatagaatctagatttgcacataatccctacttatctcttcaaagatggaacacaaatttttcagctggcatccgattcccatgccattctcccatgacaccacttaaatcagtcatagacaagctgtaaggtggagaagcagacaagaggaccattatccgatctggatgttgtgtgatgagtttaatgtctcagacacaaagtaaccaagatttatttctctctctctctctgtgtctgtgtgtgtgtgtgtgtgtgtgtgtgtgtgtgtgtgtgtgtgtgtgtcttttttcaaaggatctggccagactttaaattatggacttcagaagtatttaccttactgtcttcatagaggaagttggccgctggttgggtgagtctgaaagagttctttgcattactctgaaatataaagcctctgactcagacactccctacttttttttttatgatggccatgatagttttaaataatgtcattaaaataaatatattcagatgctttatagagcaatttaaaagaagtctgtagaatattagctatagctctaattcaaagtagtcaaatagatatttttaatgaatcaaattttagcatgaaatgttatttcatttgatatttagtatcacatagtatttttatgtagtaaatttagatatccttacattaaggcacaactggcacttcttacatgtggaaatgtagttactgatttttgttattgtttatttgattcctccctgctctgattttggtatttgatgaatatgaccgagccccacctggaataattcatattctgacatctataaattcaactgtcatagaggagtagcactgcagtcccagagaggtgaagaaagcaaagtgctatagaatagagtgggccttttctcatccataaaataaaaattcacaccaattacattttcattagtacacacacacatatatatatgtgtgtgttgctatgtatgtgtataatcactaacatggtatttatgctgtatttggggaacattgtatttaagggaggcaggtgagctgtccctctcaagagaagtagggttgtacctcacatagtgtttctgactttatcttacacattatttcccacaagtgtttgcccatactgcctttattttcgttgtatgattaatgctaaaattgagtatgctgactgtttgaagctctctaaggtgaatatgctatcagagagagagatgcgttagaatatattgaacacatggagagggatatctacccccatcagaaaagaaatacattagtgataggaacttagaaaccaaataaatatccaaaaaatgagcaaatttgataattattaactccagagaaagcttacattgtgaaaagtatatcatagtacactttatagatcaactgtggataaaattatcatagtcttaatgatttaaaccccccagtccttgttagacgtccattgggacccacttcttccctttgtctaccagagcttctcacagaccttggtttatctagtatacccaaaaactatgcttcataccaggacatggtctttcaattcgcactatcttaaggcacacaagaaggtttctgaccacaaaactctaccctcatcttctcaagactgtctgaaatcaccacagcagtagccatcagctcccacgccactgatagaagtaaggtttagaaggcaaataaatcaggcacgaaagaatacacacagtaagatgcccttcatgaaaagatcaaaccagacaaaactgttttttaatggatgcttacatgggtggatagactaagccacggatataactgctttagttacccctagtgggtggggaggttttgttggtgaaagaatggggagggaggttttagaggttctggtgatgttctattattaaattgtatgcatctattgaattcatctttatgtagctacattatatttcattattttaaaactcaacagcaacaacaaaaaaaacatgaagccaaatgacctaatgcctctgggatagggtcatggcgcattgtgtataactgataattgatctattcctgatagcaggttttgatggacaatgggctgggacaccaagccaaggatacacaggcatcagtgaggtaaagaataggatgcaaaataagtccaagactgactgacatggcccaaggaagagaccacgggtcacagtgttctctccagcagaatccaaacccaagcacatttgtgtatggtgataaaagctgccccaccagaaaagcatccctccaaggaggcgacctggagagatttcaggcctctgagcatgatcattggccatttacatcttccttgagattcgttagtgaacttacctcttgcctacaac

SEQ ID NO: 1245305 - DNA, 4001 bp, Homo sapiens
gaataattcatattctgacatctataaattcaactgtcatagaggagtagcactgcagtcccagagaggtgaagaaagcaaagtgctatagaatagagtgggccttttctcatccataaaataaaaattcacaccaattacattttcattagtacacacacacatatatatatgtgtgtgttgctatgtatgtgtataatcactaacatggtatttatgctgtatttggggaacattgtatttaagggaggcaggtgagctgtccctctcaagagaagtagggttgtacctcacatagtgtttctgactttatcttacacattatttcccacaagtgtttgcccatactgcctttattttcgttgtatgattaatgctaaaattgagtatgctgactgtttgaagctctctaaggtgaatatgctatcagagagagagatgcgttagaatatattgaacacatggagagggatatctacccccatcagaaaagaaatacattagtgataggaacttagaaaccaaataaatatccaaaaaatgagcaaatttgataattattaactccagagaaagcttacattgtgaaaagtatatcatagtacactttatagatcaactgtggataaaattatcatagtcttaatgatttaaaccccccagtccttgttagacgtccattgggacccacttcttccctttgtctaccagagcttctcacagaccttggtttatctagtatacccaaaaactatgcttcataccaggacatggtctttcaattcgcactatcttaaggcacacaagaaggtttctgaccacaaaactctaccctcatcttctcaagactgtctgaaatcaccacagcagtagccatcagctcccacgccactgatagaagtaaggtttagaaggcaaataaatcaggcacgaaagaatacacacagtaagatgcccttcatgaaaagatcaaaccagacaaaactgttttttaatggatgcttacatgggtggatagactaagccacggatataactgctttagttacccctagtgggtggggaggttttgttggtgaaagaatggggagggaggttttagaggttctggtgatgttctattattaaattgtatgcatctattgaattcatctttatgtagctacattatatttcattattttaaaactcaacagcaacaacaaaaaaaacatgaagccaaatgacctaatgcctctgggatagggtcatggcgcattgtgtataactgataattgatctattcctgatagcaggttttgatggacaatgggctgggacaccaagccaaggatacacaggcatcagtgaggtaaagaataggatgcaaaataagtccaagactgactgacatggcccaaggaagagaccacgggtcacagtgttctctccagcagaatccaaacccaagcacatttgtgtatggtgataaaagctgccccaccagaaaagcatccctccaaggaggcgacctggagagatttcaggcctctgagcatgatcattggccatttacatcttccttgagattcgttagtgaacttacctcttgcctacaacagaagataagagcaataatgtaaatcaataattggataagcaaatcaacagtgtactcacgctagcatctgatacccagaagcagtgatgggaatctggtctcctttctctaggtgatctgttctcactcacaaagaaaatgtttccacacttctcaagactgttgagccctaggtattttcccccatgcacttaggaaggtgatgaaggagagcttcgaagggagcctgttttaccactacctaatgaaccaaagtcagcatttctagacaaaaatttgttctaaaattctgagaattcagttttaaaggctgtccaaaggtgcagcctgcactctgcacaggcagctgcttattgatgagtagacctggcttctgggatggcttccctatgactcagagcacagcactgtctctcaagaatcttataagcatttaggttttgaaccaggtttcaaaatagtatctgactaaggtggttgttatgtagttcattcagtttgtatgtgaatcagatttcaggaggcaatattcccatctctgtttcttataatgacaatggttttaacataaccataaaaacaaatttcagaatcaacagtatctgtcagcctgggtcaaaacatactcttctgtgagaaacacacaaatagactaactagacatcaaatcaactaaggcaagatagcagtgacaacagtgacttggtgagtttagggtgccattttattgcaacttgccactcatcttatagcctaatttctttcaaccctatcctgtgtaaatttccctagcataatgacctaaaatagaatctcacacaatgttttttatcattctccaatctcagattttcatctggacctctaaccttttgagctggcttctctttgtactgctttccatccttccctctttttctcaattttctctggcttggaattttccagagaaacatttgccctgttagttattgcaactggcttctctaaatgcttacctgaactgagcagcttcagataggagctgaaacttggtgtgttcattcattcttgtcatcctgccagcctctcctccacccttctgatctggcaatggaaagccacgtctgcaccacccagatccttcctcctataatacaggctagagtttgttaaagtgggtttgcactttgaaaagtgaccaggtgtagggaaaggtaggttgggcccagttggttgcctacacctttgccatcagaacatgccacacaggggcaaaaacacatttcagtttctggccgtagcatcatgaggttgagctgtatgttgcacctaccttcacctgctatgcatggaaatgactgcaagcctggtccttctgcctgagtgttttcaaaagtacagccaacatttatccaagtaactgggttctctattgtaaaaagctattggaattagaaggtaccatcatcttacagttgctcgcctctcaattttgtgcaattttgcctctttcccaggaagaagggggtcctgttaacttatccaaaatcgaataaagtagttattgctcacctccatgattgtttatgagtagaataatcatagagaaaagtaaagttgcagaaaatccctgaaatttaattttgatttagcagttgtggtgaactttctgaaggagaaggttgttgttaatataaaaaaaaaatgagcctacaaatggattccctgttctccatattctaattgcagtgttcataggctgaatattttgaatcccatatcctttctatttcttacctactgaggatataaagtactttcaagtggtgaaatggtcaataggtaaaaggcaagggacccacgtgacacacatactggataatcttcttggaattaccaagagtcatccataattaaggctctactcaccattgttttcttcttcacattaactcagacatccctcccactactgtgtttgcaacagttgatttacaattaaccaatcccaaagtgacataagtatgagaagaaagcagtcatgtggactggcgtgttacattaattattctcccttgccatacaatgataatccaaatttccattggccttgccagttcatgcatatagatgaggaaacatgaactgtaataacctacattttactgtctcttgtcctcacttacccagggctgaagagggatttaaggaaactactagggattaattcaggattacacgaggtgtcagtagagaaggctgtgaactctggttacatagagctctgtagttaggctgaagatataagaattctttggtgaccgaatactaatggcgagggcatggtaaggggtgctagatttagtgtagtgcccagaaaatggaaatgacctgggaatacttaatgttccaaattagg

SEQ ID NO: 1245306 - DNA, 4001 bp, Homo sapiens
acttattaaaaccacatatcaaaaaaaaaaagaaaaaagaaaagccgggcaggcattccgtaggtggtgaaatgggggatgcaaataataggctgaggaattagcaggtgccaagaatgtggcaggaagacaaagggcatggtttgtgtggtgcccctggggtgggtttctatggtttcctgtgagccacgtggtagtgagataggacggacccttatgccacatttaggagtttgaacttgagattatggtctggaaagccatgcatggtttttaaacaaacgtctcatatgagtgcattggggctttagaaagataacccggctcagtatttggtatgaaaagaggctggggagctggcgcgtaggccaccaccatgggccagggactgctgaaagcagagggattgtctgcaatagagaagtgggggctggaattgccaggcagtgactgctcacatagggacagagcacaggagggcccagtcccgaggcgcctagctgttataaattcatactcagggtgggtcgtgaaccactggaattttaaatgaggagtcaggctggaatggggaatatgacttgttccatttgagatgcgtggaacacaccataccaggtgaacctgtaacaaagacagccaaggatgtttgtaaacagttagggacggggatgagtagactgtctagagccagagacctggagccatcagcatcccgattccgagaggttccatgagaatggatgaaactacacagaacatctagtggaggcacaagggaagaaatccacctatttctgtggaatttccaatatctggaggtagtaaaaggaagagacagaggagggcgaggggagagcgcgcgcgcgaaacggagactgagacccagccatcagggtgtgctgggagaactggggagacgagtctgcccctgcgagtggacccagggaagagggcgcggtctacgcagagcccgaggcagggaagcgggaggggcccggagagcagccctgggtgaggccctttggaatggagaggtctcaggagtgaagcagcagccagaggactgagagtgtctggaaagtgaggaattggttaaagtaacgccggtggctgcaacagagaggggcgtaggtgaagaagcacccccaaccccatcccatttgagaggaagcagacaatgaagaagagaatatgaaagatacagaaagatgaaggcaggggtggaaagaacggaggggggggacaggaagggaaggagaaggtgcaaccaataggctgtaagcacaggggcaagcttgggcgccaggggagcagggactcggcgcctccccgatctgccccaggcgccacggaaattccaggccccgccacccgcactcccggagcctcctccgcagcggcggctcctcccactcgccctcccggggctcccgcccaagcttccggcgcttccaaactcactgctcgcgtcaccccccgctcccatccggcagcaaatcacagcgcagcaaatcgcaagcctagaaacagacgctccctctccaggggcagcttcctattcagggcgggtctgggcgcacctgttctcgggacccggccctcggccttcgccgggtctcgcggtggggcttgggaccccggctggtgccagggcgacccccacagccccgcgactctctttcccggccgcctcccgccgtcattctcctagttcctgcccgcctttgcctcgctctgattcctgctctggccttcctcccttcccctctctcacgcactccagggaagaggtggcctccgcgggaacctgggcacctccgtgcctgccccgcccggtacctggcagaggcccccacctcctgctgctgctgctgctgccgccgccgccgccgccgctgctgctttgactattcctcctttgtagatgcttcacgtccgccttgattgagggcaaggcttccggcagatgactcagaaccgttcgattgctctggcttgtgcaatccctgattctttgggcctgtgtggatgtctgtgggcaccggagagagggccagtgcctggtccttggagggtggtttttataaaaagtgtacacattggctattgtccttttttcaccgttgattcacgtttgactccactgtagttagacgtccacccaaacattctctgaaattgctcctgataaggatactaatcattttctaattgccttggccaaaaaatacatcccaggtcttatttcattttgtttgttggcgacatttagccctttcttctttgaccttcccaggatttccagagcacccttcccttctttcctgactcctttgcttggtatcctgattcctttcctaccattctaagccctcttcttttcattataatatgatcttcttgtatgacctccactatatccataggttcatgtttcaacttttaacttatttcttcaaaatctctaacctgtctcgagccgtagatgttacctgtgtactactggacatctctcagaaacctgggtgtgtccctccgcagttcttttaactaaatgatcaacagtcctgttacttctatcacttttgtgttcctcctgtccatactctgtcacctctatcatgtctcatgtctctcctaaacaattaattttcctacctacagttctgatccatgccaacctattgcctactctgaagttcaggtaaacattccaattctaattattttatacctcagtttaaaatcctttataacatcctcttatccaaaaagataaattagaaactattgagcaaggagtgtaagcctcttcacgtcttgatttctcccttcttttctttagagccatagcaaattatttacattccttcatatcctctgttcatatacatggggttcctggcatgcaagcttgtctttcaaaattcagttcaaataatgtctcctgcaggaagctctcacagagctctccagtttgggaattctgcttttaaagatgcacattcccactctgcaccccaaaccaattaagtaaagatctcttggaggagggaacccagcagcagtattttgtaaaactcgctcagtgatttccctgtggaatcctaaaagtaactgttcccaagaactctcctcaataagtcttggtgcaggattcacccccatcttttctccatgactttgaaacccctctctctagtggctacagactcacatttgaactgtgcccaaacttaccggctctgccagttgaaaatgccaaggtcacttccccattgtgcatcaatttctccttgttggtcagaactagatccagactttgggccccactttgtccatccactccttttcctctttgaccagcaaaacagattaaaagatgaaaaatgcttgttttcctccgtgaaacttccagcaaatgcctggtggtttgaagtcctttacaaaggatataatttggcccctgggagtttggttgtaaacacagatatcccatgtaggaaacacagtgcgtgcaggtgcaaagaggcacaagatagcaccatgaaaaccatgacgtatccaggcctgcagtggtacagatagtgtggatgaggcactgcaagacaacgtctgatgtgtccacagggccatgtcgtgaaggccatgtggacgctgttggtggtgtttcttcgttcccttgtggactatggggaaacacaaaaggattttaagctggggagaaacataatcatatttgtatttacgaaggtccctctggctgcaacatggagtatattgtaggagggtaccattgcctgcagtgaggcgttaaggacgcagcatggatgagagatgaggaaagctgaaatgaaacagaggcaggagaaatggagaggaggacatggccttgaggaatttccaggacataaatttggcatcacttcttggaccatgagaggaagagggagcaggaagaatcaaagatgaatccaagaatgaacaaatctaatttt

SEQ ID NO: 1245307 - DNA, 4001 bp, Homo sapiens
gagatggtgccaaatcggcagatagttttggtgacagtacagagacttcaagaaattagtttttagtataaatctacagaaaaagaagaaaaacaggatgaagagtgaaggaatgaaaagaaaaagaaggaaaaagatgtaagagaaaaacaatcaacgccagtggactccaactaaactttaaggggaaaggtgtggatagttggcaggaggtggggggagtgtaggggctggaagggaaaggtatctgctgtagaattccagaataaactgcccttttggaggagagtttctgcagggataaagagacacacaaattgcccttttagcgttagatgtcaaccgtgagattatcaggacagtttatttgaaacggaaacgaatcggaaatccttcccacaacagtccttttagacagatacacaccctgagaatccaacacagacacacataaagaataaatgcagcattagggggcaataagaactccccttccacactctcaatacctctagcctcatctatttccaattgcacaactttcaatctccaatgaaaatatttccagttggatccgatttcagacttgtagtaagcggtctggatgggggggcggggggaataggtgctgtactgtgcaggggaggggggctggaagacagtatttcggcagttaacttatttttttagaaccagcatgctctaccgatcagaaattgctattacccaacaatgcttccatcacaaacagacactgaaaacagcatccccgttatcaccatcttgccaaagatctgcccggtccagtttacctgactttgtccctgcggaacttctcagacagtatttcggtcaaagagataatggtttggaagacaaaaacaataaatcgataccgaagggttccctttccggagtgatttcccactggaaaccaccgaacggggaagcctgccgttcattcccaagcccacggctcctctagaaacgcacacaatgcgtgctttcaaaaaggcattcgtctgcttttaagggaattcctatcttttcagagtcccaaaaccagagagcacaagaaagagactcaaatccattgattaagatttttaagaaaaagactaacacacaggcacaacacaagcacacaccaaccttcgccggctggaccacttcttgcctgttcttctttctattaacgacacgttagattctgatacattccccccccaaaaaaatccaactaggttacaatgtagctctctagctccacttaacctgcaagttacaaagagagaaaaaaaaaatcctgccttcccacccctttccttaccccctccccctcccgagtccactccaccaacgccaaacccgccagccccgccagccggctgcaggaccgagggagggtgcaaaaggcggggggcggagggggggtagatcagattaggcgaaactcaataagctcccagccctccagcccaaagcttccaccatcgccgccaccaacgagccactccaattgagccagcatcgccgcccacccgccggcccgccggaatcgcgcccatctcctgcaacctcgcccggaccggcatcccgccccctcggcccggtctcccccttcccgccgggtgcaaagtcaaagacccagcaaggcgacgtgaacttttgcatgcagggcacacacgtcgcccccggttccgggagtgcgggggcccgcggcgcggagggaggctgggcgcccgggctcccgggccaaggtcgccgcgcgtgctcacccatgtcccggcggctccggctccgctggccccggcgctcgctcagatcccggctcccgtcgctcgcccgagcccccaaaggtgctgctgcggcaactccatggcgatgagcatctgtcaaacggcgagccgcgagctggccgccctagctcggggggcgccggggcccccgggcgcgcggaggcggcggcgagcggcgggcgccccggccggccccgcgcttcccgcccgactctgccgcctccgccgcgccaccgatttatggagagagatatcaagggggaaaatggcgtctccggagcccgaggagtcctggagtaatcacattcacacacacacgcccgcacgcacacacactcgcacacactggcacacaggcgcgcggcgagccctgctaattttagcaggagccaaaaaaaattttatatatatatatatatatatatatatatatatatccccgtctctccgatcaatgctttttctttttttgcttttttttttttttttttttttttttttgcttttcttcaaaggatgggttggagcgttaaaaaatgttggtgggtttgggctcgcaggaggcggcgcgcggagggcgagggcgcttttgctgagctgtgcagttcggtccgctgagcccggcggccctgcccgcccgctcgtccgcccgcggtcgctagtgttgccgccgccgccgccgccgccgccgctgctgctccatggccgcgcccgccccgcgcccccgccgcgtcccgtcgccgcccgcccgcgtccccggtgagcgctggagtggggtcgggcccgtgtgcctgcctcccgcgccctctccgaatcccggactcctagtgaaaggaagggggagggcgcgggcgcggaagggaggtggatcggagcggcagcgcggcccagccgaacgggtaccgaccgtcaccccgcgatcttcctcgcagggggcgccggcgcccaagctgctcgcccggagggcccagagccgcttcccagaccagagccgggggaggcgcagccagtagcgagccctgagcgacctctctccccactcgcccccctgccccagtgaatttctgtcagttgaagggagcggggctcttgcccggggaaaaggaaaacagttcgtggcctgggatctgggaccccttgccgcccccagcgcccctcccgctccccggcgcccttgcggcccagtggctcctgcgcgccggagtccgccgcgaagactgagcggccgcggggatcgccgcgggctccgcgcgtattcctgggctcaacactgccactatctgacacaacaggagcagtgtcgggggggtactgcgcgcccagacgtgagctgtgataggctctcgaaactgggcgcattttttttttaacctggtaattatatttcactttcagggtttttttaaattattattattattttattgttgttgttaagcgacttgtatgcattcagatctcatgtgcattttctcgttattcaagagaattggacacttgatgaagggaaggacacggagagatgacaaacgcagactggcatgcagttgttttcagggtgggaagaacaaagtggaatgtcttcagttcttacaaaatatggtggcatttgtaatctctgagtttttgtatttggcctacaaagggggtcttttcagggaaacacgaatggaacccttcagagacatgtctacattgtaaaacaatataggatagatacggattcgggaaggtctgcaaatggttccgctcaaagaacttggggtaaagttgaccgaggactcggattctgagaggactcctatcacgttcttcatgagagttttaggctatttggactgaggaatgatttggaggtacgtcgggggcattccctcactgaggccatcagtggctgcctccctgcattggctgctggtttgagttccttcacagaacttcttcgtcaagtttttcataggaacgctgcagtgaagtggagtgaaagagactggggattgaagggtgaaccccttccagccccaatcccatcccgattcctgtctggatgcagattcagtctgactcagaacggatagttcacccttttactgatccaagtgctctgtcctctttttttcagaggaatgttctgactggctacaaacttttcttctgtcactgcaggacctcccgtggagcaattttcgataggtcttctac

SEQ ID NO: 1245308 - DNA, 4001 bp, Homo sapiens
tcagctcaggttactatagtggctagcaactcccacagcccaggtctaacaccaactcaacttcccaagaccaatagtttgttttggttttggttttgtccccttaacgggggaggagaaatcgtgtgccaagcaacactctgggtacctggtctccatatctttgggggctacattccctgccgtttgcaaatactctgtttaaccacacttgatttcttcctcctcttccgactttcccccaaacactctgtcttaatacccttttctgggaacaggcaatgagactaagcacaggggaaaacacagcacctcaccttcactctgacacctgggaatccctcgtcagagcaaaagagctcacgcctccctcagggagtttaaggatggtagaagccagagaaatcagaaaaaaagggagggagtgacctgggatggtaaactagctacatcttaaagtgctacaaactttctcctccctcacacgcccctgtctggttggctccgccttcccatcccagctggggtgtgcaaaggaaactctccccggaatgcccaggtctggtccagtgttgaagatgtggcctgcacacaacaccgcccttcctctccaaatacctcttctctaccccatcccctttctcccacgacacacacatgctttgcacgtgaagatgagtttggatggggcacaggagatatacctatttactaaaggagggtaagagatggtgccaaatcggcagatagttttggtgacagtacagagacttcaagaaattagtttttagtataaatctacagaaaaagaagaaaaacaggatgaagagtgaaggaatgaaaagaaaaagaaggaaaaagatgtaagagaaaaacaatcaacgccagtggactccaactaaactttaaggggaaaggtgtggatagttggcaggaggtggggggagtgtaggggctggaagggaaaggtatctgctgtagaattccagaataaactgcccttttggaggagagtttctgcagggataaagagacacacaaattgcccttttagcgttagatgtcaaccgtgagattatcaggacagtttatttgaaacggaaacgaatcggaaatccttcccacaacagtccttttagacagatacacaccctgagaatccaacacagacacacataaagaataaatgcagcattagggggcaataagaactccccttccacactctcaatacctctagcctcatctatttccaattgcacaactttcaatctccaatgaaaatatttccagttggatccgatttcagacttgtagtaagcggtctggatgggggggcggggggaataggtgctgtactgtgcaggggaggggggctggaagacagtatttcggcagttaacttatttttttagaaccagcatgctctaccgatcagaaattgctattacccaacaatgcttccatcacaaacagacactgaaaacagcatccccgttatcaccatcttgccaaagatctgcccggtccagtttacctgactttgtccctgcggaacttctcagacagtatttcggtcaaagagataatggtttggaagacaaaaacaataaatcgataccgaagggttccctttccggagtgatttcccactggaaaccaccgaacggggaagcctgccgttcattcccaagcccacggctcctctagaaacgcacacaatgcgtgctttcaaaaaggcattcgtctgcttttaagggaattcctatcttttcagagtcccaaaaccagagagcacaagaaagagactcaaatccattgattaagatttttaagaaaaagactaacacacaggcacaacacaagcacacaccaaccttcgccggctggaccacttcttgcctgttcttctttctattaacgacacgttagattctgatacattccccccccaaaaaaatccaactaggttacaatgtagctctctagctccacttaacctgcaagttacaaagagagaaaaaaaaaatcctgccttcccacccctttccttaccccctccccctcccgagtccactccaccaacgccaaacccgccagccccgccagccggctgcaggaccgagggagggtgcaaaaggcggggggcggagggggggtagatcagattaggcgaaactcaataagctcccagccctccagcccaaagcttccaccatcgccgccaccaacgagccactccaattgagccagcatcgccgcccacccgccggcccgccggaatcgcgcccatctcctgcaacctcgcccggaccggcatcccgccccctcggcccggtctcccccttcccgccgggtgcaaagtcaaagacccagcaaggcgacgtgaacttttgcatgcagggcacacacgtcgcccccggttccgggagtgcgggggcccgcggcgcggagggaggctgggcgcccgggctcccgggccaaggtcgccgcgcgtgctcacccatgtcccggcggctccggctccgctggccccggcgctcgctcagatcccggctcccgtcgctcgcccgagcccccaaaggtgctgctgcggcaactccatggcgatgagcatctgtcaaacggcgagccgcgagctggccgccctagctcggggggcgccggggcccccgggcgcgcggaggcggcggcgagcggcgggcgccccggccggccccgcgcttcccgcccgactctgccgcctccgccgcgccaccgatttatggagagagatatcaagggggaaaatggcgtctccggagcccgaggagtcctggagtaatcacattcacacacacacgcccgcacgcacacacactcgcacacactggcacacaggcgcgcggcgagccctgctaattttagcaggagccaaaaaaaattttatatatatatatatatatatatatatatatatatccccgtctctccgatcaatgctttttctttttttgcttttttttttttttttttttttttttttgcttttcttcaaaggatgggttggagcgttaaaaaatgttggtgggtttgggctcgcaggaggcggcgcgcggagggcgagggcgcttttgctgagctgtgcagttcggtccgctgagcccggcggccctgcccgcccgctcgtccgcccgcggtcgctagtgttgccgccgccgccgccgccgccgccgctgctgctccatggccgcgcccgccccgcgcccccgccgcgtcccgtcgccgcccgcccgcgtccccggtgagcgctggagtggggtcgggcccgtgtgcctgcctcccgcgccctctccgaatcccggactcctagtgaaaggaagggggagggcgcgggcgcggaagggaggtggatcggagcggcagcgcggcccagccgaacgggtaccgaccgtcaccccgcgatcttcctcgcagggggcgccggcgcccaagctgctcgcccggagggcccagagccgcttcccagaccagagccgggggaggcgcagccagtagcgagccctgagcgacctctctccccactcgcccccctgccccagtgaatttctgtcagttgaagggagcggggctcttgcccggggaaaaggaaaacagttcgtggcctgggatctgggaccccttgccgcccccagcgcccctcccgctccccggcgcccttgcggcccagtggctcctgcgcgccggagtccgccgcgaagactgagcggccgcggggatcgccgcgggctccgcgcgtattcctgggctcaacactgccactatctgacacaacaggagcagtgtcgggggggtactgcgcgcccagacgtgagctgtgataggctctcgaaactgggcgcattttttttttaacctggtaattatatttcactttcagggtttttttaaattattattattattttattgttgttgttaagcgacttgtatgcattcagatctcatgtgcattttctcgt

SEQ ID NO: 1245309 - DNA, 4001 bp, Homo sapiens
atgcagccagtaaacagcaaacagcagaggtgggcttcagacctgccctgctgccaacatccacaccctcaacccctctcccattgaccacttgggtctggccactgtctcagtgggacccaaccctaaatcatcccagaaagatggctaagttaggtcaacttgggaaaagatagctccttccctgtcagtgcctaccaagggtccatggctgtgtggggtggggtagtgggggggcccagccaaaagccccacacacctgggttcaaatcccagctccacccctgccacttgttgagcccctctgggccccatgttcttcatctgtgaaaagagaatgtttcatagggaagagttcctttctctgccgggcatggtggctcacacctgtaatctcagcactttgggaggccaaggcgggctgatcacttgaggtcaggagttcgagaccaggctggacaacgtggcaaaattctgtctctactaaaaatttaaaaaattagctgggcgtggtggcacacacttgtaatcccagctacttgggaggctgaggcacaagaatcacttgaacttgggaggcagagtttacagtgagctgagattgcgccactgcactccagcctgggtgacagagtgggactctgtctccaaagagaaacaaacaaacaaacagagttcctttctcatagggttttcagccttatgtgagttactaaagtgcccagcatgtggtgacagctgtgcagaggtttgctgttactgcccaaaccagccccgagctggactccagtctgagtacacgccagatgggagggcaaaggggtctaaggtgtgggagtttatcatccagttatggagccaggaccccatacagggaatgttgactaacagctcaggacaccatgatgtcagtgtgtggcctgtgatggccgagcatacagtggcatggatgctgagtcctaggatggggatggggtaaggactgggatctggagagaggtgctctgaggattgcctttgccattaatcccaggtgccctcaaatgcatcgagtgtcagaatcacccaagaaggtggtgaaaatgcagattcctaggacttgctgcctgatactctgattctgcaggtctggggtggagccaaagaacctgcattttagcaaatgccctctcctaaccccagggattctgatgcagatggtccctgtgccttttgaaacactgttcccaggataccaagtcaccgagctaagtgactgatgacattgttgcttaaacctgccacagtgttcccactcacccactgggattcctgctgggagggcctctatccctcactatatcccccacatgaaatcaccccctcccatgcatcagcactgtccccaaacgcccatgcactccccgcccttcttcctcaggctgtgcccatcaaaacacacggcacttgggtgacagcagcacaagaagcttgttcagagcctgtgatgtcctctctgtacctggcctattgtcctctggatgctcgcagcaatgggtggggcaagtagcctttatataggcagccaccctgaagccagagacatggagtgcctgtctcaagtcacctgaaatccaagacacagcactgatttgaacttctggcttctggcaccacaggccccaagcgcagctcttcctcctccacaggcctggaggctctgcacacctgcttcctgccttccaggggagactgtacctaagatgctttcagcatctattctgtcccgagcatgggccagagagagtagcagacactcacctgtcgggagaacccacgccaagcaggccagcagccagatggacttttccatgctgtgagcatctgaacaccccaggccagacccgctctcggccacctccccagtgagggccctcccaggcgtggtgggggaaggaaggcgggcgggggtgggcagggcactcagatctgcaggtccctgtgggctctgcgggagccggaggaactggggacaggaagcctggcagcctgaggtctgatcattcaagccccgtggagtttagtcatgtggaaaaccaagaggggaatcactgggatgattttccaggacaggaaacaggaaagagggtgagaaagaaacagggccatttcctgtggctgccatcccctcacagaaaactgttgtctttatgctgtttatatgtggctcacccttccttcctccctccctcacttccttcctctccctccctccttcctttccttccttcctctcttcctccctttctccctcccttcttccatcccatcctcccttctcctctcccttttttccttcccttattcctccctccctctctccctccctctatccctctcttcctccctctctccctccctctcttcctccctccctccctcccttccttccctccctccctccctcctttcctacctcccttctcaaagcttaggttgggtctctgggcctggtcaagaatgcagagggcagatacacagatgtttgctctttgagcagttgacccaactgtggagcagtttctcccttagacagtgacctgacacctgctgctagccacctccctgtccttctgcccccttcccttggcacttgggggtcttcctagtctctctaaccctcatgtccaatcagctgcgagtccccagagccagacccgtttcttcagcagcttgcagacttctccacctcaacaggcccacagagcctgttaccatactctctctgcctcctcttgtcccccagcttctaggttctatgattcggtggatggcagcattatccttctaggaaagctgagctagaaatgtgcaagtcccccttgacaccacctcctcttcaccacacacagccagtcctgtgttctgttcctcctcctccctttggccgtgccttggctcaggctgtatcccttctcatgggactccttcaacttcttggtcactctctgcaagcacagcgacttttgaaaacaatgaaattgataatttctcttccctgcttaaaaccctttcatgacatttcattgttctcttcttaaagttccaactgtcacgcctgtaatcccagcatgttgggaggctgaggcgggcagatcacaaggtcaggagatcgagaccatcttggctaacacggtgaaacaccgtctctactaaaaatacaaaatattagctgggtgtggtggtgggtgcctgtagtctcagctacttgggaggctgaggcaggagaatggtgtgaagccaggaggcggagcttgcagtgagccaagattgtgccactgccctccagcctgggcgacagagcgagactccgtctcaaaaaaaaataaaaaagttccaactggagatcgacacaggaggcccttcaggttcaggacccagcccagaggctggtctactgtctgtgcctcccctccttcacctgcccccacccaaccacagttcccaagccatctttgcacctgtggtcttcccaacccattttcatcctctgggtcagctccttcttaaccctcagtcctcagtatcatctctgcctgcaattacattatgtacttatttattttcttgtttatcattcctctcctcccccagatataaggttcaggtgctcagcactagttgccatgtgattcttaccacctagagcgccacttggcatcccataggtgctggagaggtatttgaaagaatgcaggggcatttgctccctgtgtgcagacctccttcctcgcacgtgctgtgctgtgttgtcatcgtttgtttgctggtctgttccatcgcctttccttcctaccctccttttcctgggctataattatggaggagagaaccatgtttctggtctgtatcacaggactttgtgcagactagcagttagataaatcaattagatgaataaaaaaataataaaagaacaaaataaaataatatcctcaggaagatacttgaaacttgctaac

SEQ ID NO: 1245310 - DNA, 4001 bp, Homo sapiens
caggcagatccctcaggagatattccagaaggcattgttatcacagatgactgctccatgtgtggtactgccccgatgaccttctagtggaacaagatgtgaatgtggaagacagatgttgatgatcctgaccctgcataggcctaggctaatgtgtgtgtgtgtgtgtattcgtttttgacaaaaaaattttaaaaagttaaaaaaaaatagaaaaaaagctcataaagatataaaaatatttttgtacacctgtacaatgtatttgttttaagctattagaaaagaataaaaaagctaagccaaactaagaagtttattaagtaaaaaagttatagtaagctaaggttaatgtattattgaagaaagtttttcattttttataaatttagtgtagcataagtgtatagtacttataaagcctacagtagtatacagtgatgtcctaggccctcacagtcactgtctcacccacagcaacttccagttctgcaagctccatcaatggtaagtggcctatacaggtgttccatttttaatcttttactgtatcttttctatgtttagatacacaaatactcaccattgtgttacacttgcctaaggtattcagtacagtcacatgctatacgggtttgttgcctaggagcaataggctatatagcctagatatgtagtaggctataccatctaggtttgtgtacatttacgtacattctatgatgtgatgtttgcacaacgacaaaatcatgtaacgcttttgtcagaacacatctccatcattaaggaacgcatgactgtatctctatttagctgtagaaccatggatgccacataaccttcaaatctcaccattggcctatgtgtctcagaaaaacataagtaaataattctaatgaatattcagttcattgttcaatgtaccttacatttttagtatcctccacaatattcaaaatgacattggactatttaaaaaatcgttatgcaaaaatctaaaattacctaagatgcagtcacttaaccaagcaaagatatcattcagagtggaataatcaaaatgcattttgtatatacaaagtcagtggaatctgttttacttaccacagtttcttaatgataaggttttcttaatattgccaatcttttcattaacatgagagcataattgttccagatctgacgaggccatcctttaagcctctgaagaaaaaaacataaacatattcgtaacaagaaaagccacacaaatttctgttcactttcgaaatccaagaatggtcaatgtcaagtaaatcacatgtctttgaaggttaagcacaaaaattcaagagcaatttctttcatttctacaacattcagtttctaaccacggtaccgtactgacttgtcttagagccttaggccatcgatggatcccaaaccaggggaaagaggataagcctgggtcctttccttaaggattcaggaggacaaacgcactatttgtatataaagacaacattggtattttctttaaacacgcaaaataaggacacattttttaaaaatgtgttacactgtcaaagaaatgggcccaggtaatcatttttcctgtgctgtgaggggttggggctttacagtttgggatcggtaaggaggccgagaaatgggaaagaaccagtttcccacccactccgccggtgagagagaaggggagggtctaaagcatccaacccagcctccagccccgtcctcccccaagcccggcgcggtccgcggcccccagctgccaagcagctacctcgggcgcttccaaaggcagggtccccaacacacagactccaacctcaagtccgtccgggagcaaaaggctactcgccgctgggtctccagctgcggataccgcagtctccgttggaagcccaggatggtgagacgggactctgtaagcaaaattcaaaccgcccgccgcgccctagcgcagcgcaggcgcacatccatgcttccgaagcgcaggctcagccgctgttcccggtttgcgtcatccggggccacagctgggcgggaaggaggggtggccgagccggggaaaggcggggcgacggcgaaggcggggcttccggacgaaagggtaacccggaggtgctctttccgcgctaaccagtctggggagatttcagcaggtcatgcagtcttgaccgcagcccagccagggacctggcgtcaccaagtcctggtctttgacatttgctgcaccttagagtcaccaggggcagctattacaagtctcagtgcctagagtacaccccaagtcggtgaaatcagacactggggaaatgaggcacaagccttagtatttataaaaacaccccagaaaattccaaagagcagctaagtttgtgtggaagaaacagtgaccctgtcttctgggtcttagacagcctctgtaagtgttcccgggccaaaccaggggttgggctgcttattctcatgatgaactgggaaagaagagtttatttcggtaaccgggtacagggaaaaggcctggaaaatatcgccaaatcgattcaaaattacaaagttttccagagcttatataccttctaaactatctgtctacatgtaagtgtgcatgtgtgtaaagacgtaaatgattaactgtttctaatctataactaagatcagtcctaaggaaggtctttatttaagtaaatttacttaatctagatggctgcaggtgccagaggtgattacccttatcttgtctcctgctaaatcatgaaggtttgggcagttccttcagacccccgataaacttgtttgtggaggtctgggggagtttcttcagacccccaataaaaacttgtttaatcttgaacaggtcctgttaagaattccttctttattttctcatgcttcaaggaccaggaaaggcctgggcaaaactcttggtgggcttttgttacataccagcctttctataaagacactggctctttcagcttttaatatttaacttaactagtgctgaaacagtggttacggaggcctgtctgttcagctgttagtgagacctggcctgccacttaagagcaaatataaatttaaaataagaaaaacaaaagtttaattctccctgttgaaaaggagggaaaagcacccaaggctggagtggtggcaccgccaggttctgtccatcccttggctccactgcgctattattatgcacttggaccttcaggctgccagcccctgtcctcaggtctttctcccaggcagcagaaacgagcaagaggcatgtgtaataggcttaactgccaacagaaccagcactttgagagcgttgtgctggaagccacacccagtggcttccatctgcttctcactggtcactcccatctgcgaaggagactgaaaaaaatcttttgtaaaaaatgtaatctggacagttactttcactcatgtccgtatgaagagaccaccaaactggcctttgtgtgagcaacaaggctgtttatttcacctgagtgcaggcgggctgagtccgaaaagacagtcagctaagggagataggggtggggtcgttttataagatttgggtaggtaaaggaaaattacagtcaaagggggttgttctctggcaggcaggggtgggggtcaccaggtgctcagtgggggagcttttgagccaggatgagccaggagaaggaatttcacaaggtaatgtcatcagttaaggcaggaacaggccattttcacttcttttgagattcttcagttacttcaggccatctggatgtatacgtgcaggtcacaggggatatgatgacttagcttgggctcagaggcctgacagttacattgcatcctcgagacttaagtttagcctaaagttgcctccatacatattttaagttgtgcctaaagttttctctgtaagtcgcaaactataacctaaatgaaggtgtaaacagactgtaatctactcttgtgccagtcactgagttatggccgatgaa

SEQ ID NO: 1245311 - DNA, 4001 bp, Homo sapiens
tggtggtggtggtggtggtgagggtggtgatggtggtggggatgcgtctgggccgagtggggcgcgcccgccgacgccccgtgcagcttggccaggctctccgcgtcgtccttgccgcccactggccggaaggcgctggaatggtggtagctgccaccgcccgctttgcgcccctccagaaggtgcggatggtggggcgccggaacccgggagcccgcggggccagacccggcggccgcggcccctgccccggcagctgccacagagtccgcgggcggcgtggagcccgcgctgcagtccccgccgctgccgcccgggggcgactcgaagagcgcgtcgcgagagccggcgcccccggcaggaggaggtgggccggagcccgggccgttggccactacctgcgggggctgccccggcgggggcgcggcctcggcgctcccagcagcaccgcctggctcagccaggtccaggaaggcctggcgcagcagggccgggctttcgcctagcgcgcagcctagcgccgagggcggctgaggcgggggctgcaggtaggtgggcaccgggagcccgccaggggtccgcggcggccagaacatgcagaagggcggatagaaggcgtccttgcggcccgcgggccagaagaggccggacaagccggccttgggcgccgcgcccgcgccgcctgcgcccgcgccccccagggcctcagcggcggcacccgcatcctctttcttatggcacaagctgaaggcggcggccgcggcagggaaggtgtaggggtgcgggaagagcccgccgcagcccgggaacttctgcaggacgcccccgaacgagcccttgctgggcaccgggatgactgggtagctgcgcgggcctttggcccctgccccggcacccgcccccgcgcccgcgcccacgcccacgccggccacacagccacccccagcgccgcccccaccagtccccgcgccgcccgaagcagcagccacagagaggctggcggctgcggccgagaggctggcggcggccactacggcggcctcctgcaaggagtcgtcgtcgtcgtcgaagcgcggccgcttgtgatgggcgtgcggggcaccagccagctctgccaagggcggcggtggcggcggcggcggcgggggcgcacccagcaggtgggggcccagcagacccccgcctccggccaccgcggccgcggcggccacggcggccgccttcacagagctgagcgggtggcaggcggggtgcgcgcccggctggggcagtgcgcgcttgcggctgccgccgttgaacatggccttgacgtcctcccaggcgaagaccagctcgtcctggggactcttgtcggtgagcttgagatgacggcgccacgagttgaagttggctgcgtctggctgagtgtacttggcgtcgggcgtgcggtgggagtggaaaatgaacttgttgggcgagaagtacatgttgcagtagctgcatttgatgcacttggcgcgcgagctgttgtagcgcgcgggaatgaagctgccgcggcagccccaggcgcactcgtgtgacacgtcgaaggcgaaattgtctggcagcttgggcggcctgttttcgcccaggaacgacttgcacagacgctcggcctcgcgtttggtgatcatgccgcagcggcgcgatgagatgggcatggccccggcacgccgcaggatctccagttgcaccggcgtgcactgcacacacgtgatgcccagtgccacgcgacggttgtggatctcgttgtagctgaagttcttgagcagagtgttggagatctgcgccaggcacaggcgctcttgcccgtcgatcaccaacgacacgatgggaatgccgtagaggatcacctggcccacctggttgggtttgaggttggcgtgccctggccgcggctggctcagcgtgtcgggctggaaggcgctcgacggcgacgccagcaggatgtcgttgggccctggcagcggactggaagccatctccgccgcagaaccccgggccgagccctacaggtctgccttggacactggaagggaaaggagaaagcgttgacttgagccttttcagactaaaacagaggggtgggatgaatcgctaaccaaagaattagaataactttcttgctttggttaagacacgattattactggaaaaagtgaccaagttttgaacacaagaaagtcatctcttaatttccttcaaggccatcctttagaaatgcaggaatttgcacttcttaacatttaaagtgaattaactatgtattttcctcaaaagcagtgaattcctaagaaacctaagaccttatcccggatttataggagccgttggaataaaatggcttgcttctagaaattaaatagtaacgatagttgtaactagtacagataataaaagttacggaaaactggggcttggccattgaaacccaaatttaaagagctgtcattctcatttgcttggagatagattgattttggttaaaaagtaacccccaaaaccctttaaaaagtgattttcttggtgtctatggtttccttggggaaattcattattggttgaaacacaggtcattaaagcaaaacgaaatcagccttctccctcacccttgccattagatattttgttactgtaattagaattatttttttgaaaaggtgaaaaatgtacaaagtcatatacaccgttgcaccaaaatagaatgtttcagtttttaaaaaacctacttgctgaactgagtggttctggtctcagatggttaggtagcttaaaaacatgaagttgaagatggtagtcatttaaaaactgttttactgtcatttccatgacgataagaaagtaagtagaggcaagggtgttaaacccagaaacagtacacaggaatgaacaattcttggggatcttcattggcagacttcaaaaggcaaattttttagcttgatgtgaaccaccttctgtgactcttttcccctaatttattttgatatctctatatctttatggggaaaagctgccccaccatacagccaatcggtggactaggtaatctatgggagtgttgaaagtcgaaatcccaggttgggtctgtggtaaaatttctaacttcacctccagtcaacagaatgccacaatgagggaaaatattcagtaagttgaaaatacagaacaaggaagcggaaagaaattttagtgacaatgccactaagtggaaagaaggaaagtggctcactccctaggaaaacaaacactgatctttccacagctacatctcaagcgcattggccaaggcatgctttgccctgaaaaatcaccagaggccatagcgtggcccctttcggccacgtacagcgagttcgctattacagtgctttcagagggtacacgatcttactccctcacccaatttcttatccgtgtcctctctctgggcccctgtggcatctatacagcagcctctgtcctgctgccccctggatcctcagttctcattacatttggcggcctccaggaagcttgaacaaacctcgacgcgatcaaaggagaggaaagcctgcttgtcactttgggtggatcagagacaatatttccaggggacagggcgttacatggcagttcaaggcgcagtgacacccgagtctgatacaaccaacactagcttcgtcaggtggcccttcgatgctcatttccctaccaaacaagattcatatccgcttaataagaccctgggataattccaactctcgctccccagcaaggcgcgcggctggccagccggggcgggaagctggctctgcgttaaggactcgcagccttagcagcagtagaccaggcagaagtgtctcctcacttttaccccaagccctcccagaaactgccgtcagagcagacacaaggttttggttggggcattattttttgggtgggtggggaggggagaagagacaattaaaagttagttgaactgagaaaggaacctggtg

SEQ ID NO: 1245312 - DNA, 4001 bp, Homo sapiens
tgcatgttgcattatgaatatttttatttgataaagaacaaatggttaagaaacccagtggtagggctctcatgttatataaagctaaaaacaaagaaataagaaacaatgaagaatgaaaaaagagacaagcaggggttgtcacattttctcagtgtagacagcgtctccttctgcccctgcctggcaccggcctttcctctaccaccaaaatcacacaccttggagaaccccttccttgagctcaacatcaatattttcctagaaccaagagaaatttgagagctaggtaggattttagagaccacgtagttcaagccttcattttatagaagagaaaaccaaggatcagagtgggcatcatccagattcactcagtacgtggcaggcagactgggtcttatggaataggtcagctctggtggttcttaatttttcagtcttgggccaggcacattaatgccacccaaggttcggttcaagtcaacaaacaagtgaagcagcagtttctgtgtgctggagtatgcagagagggctaggacttagcgatgcggtgggcacagactatcttcacggtcactttgaactaatcttggggtgggggttgaacaaccacaaagaaagagctctgctatccccagtttcaccctatgcccttgccagaagcagttactctctgacaaacaaatgtctccctgtgcctcaaagctgacacatctacagcaaggcttatgtgtgctgaagttaacatcccaagaatatcctggaagctgcacctgaagagctttccagcagaagtcaaaaagcacttttcataccccagatcactagtaaaatgaagcagtgcttagcattttaatacaaggcaatatcaagatttcaggtcaactaatatcctctattttattacacgaaataaaatatattctattgccagcatgtattagaaatttgtgcaattggagagacctgaagtcttcaattttccatgcttcagctattacttttaaaaataatatgaagtgttggatatggatatagaagaaagcatttaaacactcatggtctagcataataaagagactttcagcattgacacttatttggtacttactataatctttattttaggtagtttttgattttaagtagcaggagatgcccagttttctttaaagctgtaattggaaacaaagaaaatgctgtcagatattcctgtgtcctggttaaaacacttccctccttggaaaacactactcccagaagtcttgattccagactccagagagtgcagctgcaaggaagctgccaaattcgtggcttcagttgtgactgacttgttctcccgatgggtgcacaagaacattcccttcagcatgacagcacacacagaggagtccataaatccatcactggaaagggccattcccagtggcccacttttttcttttgagtcttgtagacactcgcctcgaacttatttcaagaacacagcccaaattattatttcaagaacacaacctgaaactcctaatagtgttgattaacccagaatcattgagcacattgggtggacacctccctgcaaaccctcttccacatcagctcaggtgctgcatgcaccttgcttcagaaatcacgaataaaggcatgcctttgagcttccaggaagaagcctgtggctttggtaaattgctttctagtctaccagaactctgattttgctacttctgatcaattccggtgatataaaacattttcttcattaagaaaaagagcaaaacttagaactgtgaagacaagccccaaatgatgaatagttggaaatgaatagaaataaggatgagtacttacaccactctagctggcttcctggcagcagaaggcagtggctgataaagatttgcccacctccacgacaagggagagtgcttctcaggagatggtgctggagggaggcacctaacagttatatactcagagccccactctgctctgtgtgtttgtgggctcggctttctcctcccacttcaggcatcaatgccaaagcaacaccaaggaactggtcccctggcttcagtacccgatgtctctctctctgttcttgacagagtaccaactgctttgccacagtttccacagcattccaaggtctttgaccagcaataatcctaccaaaatgcatctttttcttctcctgtttcctctggcccctactcatatttttggaaagatttacaactgaaaaggatcaacacggtgtcaaactaaaaaccatggggcaggttgctgctgtgtggactcggaagctaagcgactgctcctggggtgaaattttcttagacttggcacaacttctacacagatgtaagactccagcaagggcctgaggggctgttgggagggtggggaagataaggtacatgcaagttgttttctgaaggccagctgcctttttcccagtgaggagaaaacaaaaatatcagtgtttccctggaatgtctgtcttcccaggtgagaattcttggacatactctgctgcctctttaaaagtcaggaagcaaacattctatagcagggaaatctaaaactgaattaaaatatctcctccttcccccttctttttaaatttcaattttgtggcttgttctgttatggcaaaaatctaactcaaatctacttttatgagtgcagaattttaaaaaaatatatgtgtatatatgtatatgtgtgtatatatgtaacatatatacatctatattacatacatacatgtatatatgtagatatatacatataataaatatacatatatacatatattacatatgtgtagatatatatgtgtgtatatatgtaatatatatacatatatacatatacttttaaatatatatataatatatatatgtaatcccacagccagccatgcagatgtcataggtcttttatctgggtctcctgcctgcttggatgtgcagatagtacttatcagccttcagctaggtggcccatggctgggagctctctggctccacccgctggacacccgccagaccacagggttcttgccggcttgggacatccttcctccaagtgcctcccgagcagctgaggtagggtgtgtataggtctaggttcataataagagtttccaggttcaggcaaatctccttccaacattttttccctggtaaaataaggagaaaataagctcctcgggtttccctgaaggagaaaaatgaatcttcaggagacagtgtgagtggcctgctttgggaatgaaaggaatcatactagtgtctccatgacttccttatgcaaatggaccactgtccctgatagaaataatcatgctaatgatggtaatgagaataataactgccacaaatggtagagcatttgcaaaattcctatattatactattgtccccattttgtagatgagcaatctgaggctcagagtttaaataacttgctcaaagtctgactcaaagtttgtacttttagccactccagtgctgtccaatatttccaacttctgcctgtatgtttgcttttcattaattccttcactcaacttggccatgatgcatatttatggacctcatcctgaagctgcctccacatgacacccatggagccttctgcctcagtcgcactggtcagggctgaaggtgtgtagtgaatctcagacctccttggaaaaaccacctctttctgtacccaccctccctccctggcctttctcctggtccctgtaaagccacaccttaagtggggggccacaaattacagccttgccatattgtatgcacaaggcagcacaaggcacatggaattccaagtcagataaacctgagtttgaatactagcttttctctgacaagctgtatgaccttaggcatgttactcacagtttctgagcctcagattcctcagtgtaaagtggggtaacttttcttcctttataaagttgtgatgagggatgacatcttcaa

SEQ ID NO: 1245313 - DNA, 4001 bp, Homo sapiens
agaaatcaatatgggtaactgatttattggtagcaattacatttcaattgtattacctcactgcccaactaaccattctgctttttaaacaatgccaaactattaatctttacacaaaaaagcagctttttatacaatgcattccagaccaaggtcattttatctcggtaaaacaatgttagataccaacatctgtgtgacttgcaatgaatcttggaggtcaggaaccaaaattaagtccatatggagctgagttggctccatagttaaagataaaaaaccgtatgaataattaagcacttatgaaaaagtacttctatttcataatctaagtggtggctgtcatttattttcagattatctccctcttcaaatttcatagctgaacatattgcttgataagcccatgcctctgctgtagtgacccattttcaaagccataccaacttatgggaggcatcaggcttcagctcaggcaaggacaagcagcccaaagagataaatgccttgagtttctggaactgaatctataaaaccctaaggtggcagcatcaaatgaaaacactcaagtggcattttccatcaactcccaaagcaggaacatggaccatttcagaataaacaaattcatgttctcaaaattcccagcatatatttatttattttagagggcttgaaatatcccatcacctcagagattttggagatacagattcgaaacctgataatagaactggccagacgtgattgagagcctgagcggcccgagtctcctgttgagccacccaaagttaagtaaagattaaactagttttctccaaatcgacagcccaacatatagaagacttattgccatttgtgaatctaatttcaacataattgggatgggttgtagggctaggatgtcctgcagagaggggtcttctcatgacctgggcagacagttgctgctattttagagtccccaggaaccatttattctgaacagctgaacccttctagagcccctgggagacctgactccttgctccagaagtcaggcatgagaaccacttaggagaaatacgaaacttacagttgtagttggcctagaattttgccatgctaaaatatttgcatttcttagggaactttaagagtccttacatcctaactgggaagacaaggcaaggctatgcagccaggaccttctgctaatgttcaaacatcttagccccagtgaagcaggccattaatttcaactaagaagaagggacaataagtaaaaggcactctaataaaatagacacagggtaaacgtaaaaccccaggtgacttatccccagcttttccatggctgtcaaaacttctcagctcaatggtctagcctctaaaccaaggtgagcgccatggggctttttggaccaagatccctgtgcctttggcttagctcacagccaacccccacttcccaggctctgcccggaaaagatacaccagagtttggagcaggctcccaggttccccgagccagaggctgcacgaaggaagcatacctgttcctgcgacccatctgccagggccaagcttagccgggcgatgcctctgcgcgctgcgtcaccagctttagttccaaaagggtccttccaaacaggaccatgacgggcgtcaccagcgccgccaatcaaagaccgtccattcatccttactttttctcaatacatgacaaagggcaaaaatatgtgaatcagcatgacgtgtgccctagctctaatgaccacgcaaaaggcaagctgaggggggctggagcgcgcccactgggttcctggtgagggaagatgtggccccacatgggagaccgctaatgaagaaggaggactttgccttcaccaaagagctctcagtgggcagaaagacagcagctgactatggaaatttgatgttcatttactttgcttaaaaaaaaaataacgggaagccatcctacacagggaccaatgcccagattttgttctgctgcgtgtctctgctgttggatctgaggttgcttcttccagagggggaggagggggttcatgttctgacacgtttgggggcagattgtgagggctgcatcttggggaccaacaccaaagcaacaggttgccccacagcagtttcccttggccttgtttatgaaatgtgagaagaaggatgcatgatgtgggctctgttttctgtaataagatactagccacgctttgtaagcattcacaagctgcctttaagagactcctaaatggtatttttttttcctgtgccaccacatccagctgtgtttattttaatttattttatttttttttagagacaaagtctcattgtattgtccaggctggttttgaattcctggcctcaagtgatcctcccaccttagcctcccaaaacactgggattacaggcataagtcatcatgccaggccaagaactcttaaattttgaacatcactttgttaataataaacagtttttagttgaattccacaaatgtggcagctttttataaattttctttttcctttttaaaacttccattgcatccaagaatatcactcttttaccagaagttccagttgtgtgtgtggtatttctctttttctccccctgttgtttattctgtttttactttcttcttctggcttggcctaaaacctgaaaacctaccctttaccagaatgactcagaaaaatccacaattttaggaaacacttctgacatgtctcaggtaaaaattgtgtgtgtgcatgcatgtgtgtatatttacctatagtaaactagctggctagttctgtaccacactgatgtgcctgcatgttgcattatgaatatttttatttgataaagaacaaatggttaagaaacccagtggtagggctctcatgttatataaagctaaaaacaaagaaataagaaacaatgaagaatgaaaaaagagacaagcaggggttgtcacattttctcagtgtagacagcgtctccttctgcccctgcctggcaccggcctttcctctaccaccaaaatcacacaccttggagaaccccttccttgagctcaacatcaatattttcctagaaccaagagaaatttgagagctaggtaggattttagagaccacgtagttcaagccttcattttatagaagagaaaaccaaggatcagagtgggcatcatccagattcactcagtacgtggcaggcagactgggtcttatggaataggtcagctctggtggttcttaatttttcagtcttgggccaggcacattaatgccacccaaggttcggttcaagtcaacaaacaagtgaagcagcagtttctgtgtgctggagtatgcagagagggctaggacttagcgatgcggtgggcacagactatcttcacggtcactttgaactaatcttggggtgggggttgaacaaccacaaagaaagagctctgctatccccagtttcaccctatgcccttgccagaagcagttactctctgacaaacaaatgtctccctgtgcctcaaagctgacacatctacagcaaggcttatgtgtgctgaagttaacatcccaagaatatcctggaagctgcacctgaagagctttccagcagaagtcaaaaagcacttttcataccccagatcactagtaaaatgaagcagtgcttagcattttaatacaaggcaatatcaagatttcaggtcaactaatatcctctattttattacacgaaataaaatatattctattgccagcatgtattagaaatttgtgcaattggagagacctgaagtcttcaattttccatgcttcagctattacttttaaaaataatatgaagtgttggatatggatatagaagaaagcatttaaacactcatggtctagcataataaagagactttcagcattgacacttatttggtacttactataatctttattttaggtagtttttgattttaagtagcaggagatgcccagttttcttta

SEQ ID NO: 1245314 - DNA, 4001 bp, Homo sapiens
actggatataagctattaggtatcttttttttcttttatttcttttctttttttttttttttttttttaaagacatggtccgatagatactaaaaccctgcagggtaggggtcacattacctttctcttattattcccagtacctagtctggagcctgatccacagaccgtaagtgttcaataaatgtttgttgttaatgatgacatgttatagacacatctgaaacataatctggataaacataatactggaaaagtgcaaatcatcatttaacaaacatgcaagccaagaaatcaatatgagagagctgtctgagtaccaagtgaaagacaaagtaataccctcttccctgccccaacatctaacatggtgatggattatgctacataaaattatcgataaagaccaatgtagtcacaatgatttctaagcagtaacaagaaatattagatacaaaatgtaacattacaacaaaggcagcagaactgagaggccattgtggaataatagatacattcatctgatgaagaacctctttgcaaataagcaacttcaagcataatgaaagcacagggctttcctttcctccctctctatctccccaacccagagaccgagattctgatttccctcaagatacacagaatgcacgtcacttgccccttaaacagaggaggaggaaggcaaacttgagcattcaactgttgccaaaacaaacccaagcctttcaaatgagttaagttctcatgatatgagtcgggttgagtaaatttatacaattctcatttacatacacacaaagagtaaaacaatctacttatttcttgtctgaattcctatcttcttcaataagatttggcttattaacgtagcagcagaagtttgggccaaatctatctagcaatgaacctcatctcacctatctctgtcactcttgcatacccttttcctacctatacccttccttttatcctggcaggtggggaatgcttaggcagaaagctcggccatttctattgatcatataggtaacatcttcagcactattattggtctgacgactgtgaaacaataataaaagtggtcagtccaaacgtccctgggccctggcagagatctggggcagatgatgggaaagcgagaatcatgggttgatactttcccccaaattgtatatgccttactgtgacataagcagcctgaacaggatcattaatttgactggtcacttcattggaacattgataaggatttgactggtttttaatagcatgtactagttatgtggactaattaaccaatcaataagatttaaaccagtacatttactcctcacctcatcctcttccatgttactcagtcacctttaacgttttgaatgggataaagaacttacaaaactaattagctatatagacagagccataatggcctgcattttctccactattattaatgcttttggtatataaaatctactagttaaaaaaatgaaaattgaataccatgggttaatctaggtatagtagtaacaattccctataaccagcttggcttccttcatagctaaaggatgaccagtaccatctcatctctttgaaacaattgactggtggtgtctttttgtgggtcaatattctcattgaaagaaagaatatattttctcctgaaaaaaatatataaaatattcctaaatttagtgaattcagaaagccatataattacagcatacagagttttccttctagatcctgaagacatggacttataaatgatgcagggcaactcacggtcattcaggtcctgttggcacaatgaatggaggtgctccaagccttttccttgtctgtaggtagaggtgcaaatacttcaatgagatatgttcctgttcagaaacacccaggatgaaaactggaaagggtctgccaagaaatacagaggagctctttcagcatggtcgttttttaggatgatggaggcagcttacaaaatggtgagttggagcaatggctggagccagcctaaggaggcactatggagcagaaagttggatcccccactagatggcgccaggacacatctatggcatacgtgggtactgttaaccatggcacaacagagggatcggatcagttttcacaattctgtataggccaggtcctaatacagtaccaacggactaaagtgagtgtatgtgggtgttttatacgtctttaagtttgaccctacattgaagggtacacctggggtggcatacgtgtgtgttctttggagtatgattacctatgcggttgtgagtgtatctcatgtatcacatgtgcacacacatacaatataataatacacatgtgcgttagattatatagataagggatcaatataggtgtagctaaagattaggggccattattacaataaataaggatcacgttggaggagggggattagcttctcttgcgcgtactgtatgccagaccttttcatgtgctttctcatgtaaccttcacaacagctgcaagaggtgcctactattgccccattttcaccaaaggaaatttgatggactttgtataggttaaggaacttgtccaaggtcacatagctaaggaattacagggcttggattaaaatccagttctgctaagcttcaaaaccataatacagttatacctcataccacattgacttgctacagtttcttacaatgtgcaaattaactccagggaatatggtttgtggtatgtttgcacaaatatactcacatgtgcactatacgaaatgaaaataccttctatgcaaaagtttgatctatgttggactacaaatatacataaaaagttgaataaatatggcattccacttttccctcttcaccccaggataattattaaataaccctatcacagaaaaatatataagaattaattccaatatatgattcaattaaaatgggagtcatttaaaagaatattaactaattttaaagtagatatatcaaatccacatgtatacctaaatgaagccattcactatttacctaaaaatacattagcattaaggtaacaatacaagttccatttatgttgtaggaaaagccttttctattgagatggttggctctcatcttaactcagcccactcaggtatggtttttgtcattggagattttgtagcctttgggcatcagccttttaattttctttttgtacagaaaatgtattgttctgtacattgtgttttgacagactaaagaatgtagtgtacattgagtgtttagcacagtgtctggcaaagagtaagtgctgaataaaagtcaacactagtgattacaatggctataaagaaggagaaaaaagcagaggagggagagagcagaaagaagagaaggagagtaagaaggaggaaagagaaggcaagaaggtaagaagaaagaagagaagagggtagaatggtggagagatcaacatgacaattaatttgaattaatttgtaatttttttcttctccctaaaagttaaagaagtcatctgaaacaatgtggaatttgaaatacctgccttgcacactgcagatcattctatttttcaccttaaattttgtgcagttttctgtttggtctaagattggttagttttcctataggctaaagaataatgtgctaagaactgagcccccggctgagactgtgggatttaaaagggggagaaaggtaaacagcattccatcaagttgtactttgggcactgggaaaatatgttggttgtgctgtcaagaaattgactttttggctgcatgataaaggtgaactctggcactccaaaactggatggaaatcacaatagctccttctagaaaagtcaaagcaaaatagagacattttctctggtgcttcagatccgtaagaacattatctgaaaagagagatcacaactcgggaaaaggggaaaataggaaaacattgcctgttgcctttagtaataaaatttcacttagcaaattt

SEQ ID NO: 1245315 - DNA, 4001 bp, Homo sapiens
ctaaagtggggtgacccttcaatgttccacatattgagccctctcatcccatgaataaatggcaatttatttattgcctcttgcattccatcagttgcaattattcagccatcgagttctccttcagagccctcagtctggatcagcccattatctccctttaagccaggccctccccaacgcaggtcaccttctagctgatttccctcacttcagtctccccagtttttctccaccttgccactggtgatgggtaaattatcttaaaacatgacttggtcgtgccactgctcaaaaaccttctgaggtgctccatgtctgagtgcttcgctcctgaaactgggcatgaaactctgagccagagtagtcaatgcccagggcactgagaagcacagttttctggaatgctgattgagcttgatatgaactaatatagaataatagttgtatatttaagcaaacatggtttataaaatagtcaaatgcaactctttatattattaaaataaaatataaagggaagaaatgtagagtctgcaggtggctgcttcaggctgtgcccacctattacgtaggggtaatgtgtcaattctcccatcagttgaggctacttagggggagaagttaaaaagctctgaagatagcaactgttctcaatctccctcggttctacccaggggtgctccacttgtgcccaagacaattttcagcttctctgcagtgtgtgccactgttctgggcaggtggcctcctgaggtcccacagctacctccaattcagttccacatgcacgaatattgatctcctttactcacacacatcctgctcacacacccacccctaacatggccatggtgccttcctggcctcttaggagcatggtgacctctgctctggcttgtgtggtggactatttcacaatgtagtagtctctctctctccctctctctctctctctctctctcacacacacacacacacacatacacccctacacatacacacatgcacacatacttatatacacaagctgccccgaggtggctctaggtagttaattttagtgttattagacagtggtggcacagtggagacagaatacctggattcaaatcctggctcccccactgcaatagtccattctcatactgctataaagaactacctgagagtgggtgatttattagaaaaaaaaaaaaaagaaatttaattgactcacacttccacattgctggggaggcctcaggaaacttacagtcatggtggaaggcgaaggggaagcaaacttggaccttctcaaatggcggcagaagagagagatggtgtggagcaggaacttgccaaacacttataaaaccatcagatcttgtgagaattcactcactatcacgagaacagcatgggggaaaccgctcccatgatccagtcaccttgccctgggtcctgccctcaacatatggggattactgggattacaatttgagatgatattcaggtgtggacacagagccaaaccatatcattctgcccctggcccctcccagatattatgttctttatacatttcaaaacaaaattgtgccttagcaacagtcccccaaagtcttaacttattccagtattaacttgaaagtcaaagtccaaagtttcatctgaggcaaggcaagtcccttccacctatgagccagtaaaatcaaaagcaaatggccgggtgcggcggcccacgcctgtaatcccagcactttgagaggccgagtcgggtggatcacttgacgtcagaagttcgagaccagcctggccaatgtggtgaaaccctgtctctactaaaaatacaaaaattagcagggtgtggtggcacacacttgtagtcctagctactgggaggctgagacagaagaatctcttgaacctgggaggtggaggttgcagtgagccaagatagtgccaatgtactccagcctgggtgacagagcaaactgtgtctcaaaaaaaaaaaaaaaaaaaaaagcaagttagttacttccaagatacagtgggggtgcaggaggcattggataaatgctcccatttcaaatgggagaaattggccaaaacaaagggctacaggccccacgcaagtccaaaatccagtggtgcagtcattaaatcttaaatctcaaaaataatctcctttgactccatgtctcatatccaggtcatgctgatgcaagaggtgggctcccacagactcaggcagctctgcttctgtggctttgcagggtatagctctcctcctgctgctttcgcaggctggtgttgagtgtctgtggctcttccaggtgcagagtgcaagctgacagtggatttaccattctggggtctggagtacggtggtcctcttctcacagctccactaggcagtcctccagtggggactctgtgtgggggctccaacttcacatttcccttctgcactgccctagcagaggttctctatgaggtctctacccctgcagcaaacttttgcctggacatcctggcgtttcatacatcctctgaaatctaagtggaggttcccaaacctcaattcttgacttctgtgcacctgcaggctcaacaccacatggaagccgccatgggttgaggcttgcaccctctgaagcaatggcctgaactgtacactggccccttttagccatggctgggatgcagggtaccaagtcccgaggctgcatagggcagtagtggggccctggaccagcccattgtttttcctcctaggcctctgggcccaggatggtagggttgctgcaaagttctctgacatgccctggagtaatcttccccattgtcttggcgattaacatttggcttctggttagacaaatttctgcagccagcttgaatttctccccagaaaatgagtttttctttccatcacatcgtcaggctgcaaattttcccaacttttatgctctacttctcttttaaacataagttccaatttcaaacaatctctctgtaaatgcataaaattgaatccttttaagagcaccgaggtcacctcttgaatgctttgctgcttagaaatttcttctgccagatatcctaaatcgtctctctcaagttcaaagttccacagatctctagggaggtggcaaaatgccaccagtctctttgctaaagcatagcaagagtgacctttactccagttcccaacaagttcctcatctccatttgagaccacctctgcctggacttcactgttcatatcactatcagcattttggtcaaaatcattcagcaagtctttaggaagttccaaactttcccacatctttctatctatcttcctccgagctctccaaactgttccaacctctgcctgttacccagttccctacttgcttccacattttcaagtatctttatagcactgtcccactatcttggtaccaatttactgtattagtctgttttcatactgttataaaaactgctggccaggcgcagtggctcacacctgtaatcccagcactttgggaggctgaggcgggcggatcacgaggtcaggagatcaagaccacggtgaaaccccatctctactaaaaatacaaaaaattagctgggcatggtggcgggcgcctgtagtcccagctactcgggaggctgaggcaggagaattgtgtggacctgggaggcggagcttgcagtgagccgagattgcgctactgcactccagcctgggcgacagagtgagactgtctcaaaaaacaacaacaaaaaaaaactgccaaagactgggtaatttataaaggaaagaggtttaattgactcacatttccacaatgctggggagacctgaggaaacttacagtcatggcagaagaaggggaagcaaacttggaccttgtcacatagcagcaggagagagagagtgtgtgagaaggaggaacttgccaaacacttataaaactatcagaccttgtgaaaactcactatcatgagaacagcatagggaa

SEQ ID NO: 1245316 - DNA, 4001 bp, Homo sapiens
acctttgctgagatggcatcaataagtcaaagaaaccaagctaaacagaatttgatctatacacaatatgaaaacttcttaacaggatggaacacctataacaaaatttaagtcccttcatctttcagcaatgaaataagtgaaattaacataagaatattttggaagggttgagggtcacagtcagaatcaaacagaaaactttcaaacctagaaagcaaaacgggaactttcatagctccttgatctaccatatctaaatagaaatagtataatgactatccaataggtgattagtttcaaaactaatacaagcaatgtatcatgaaaagcctctacataacaagctgtttttcttctctgttctgcccctttgtcatatgcttgagcttaatgaagactatcctctgcagctgctcctgagggcacagaagaaagcaatggagtaacaaaggaagcctgaggagcccctggcccctgaggaccttctctctggccggtcatagcaacttatgttttaatgcaggagatttcaagactggtttgagaaaaagaatcttatcttggggattaggttccctgtcaaaggccatcagatggacagctatttaccaggcaattagcctaaagctcttaggtaatgataaaaaaaaaaaaaaaagaaagaaagaaaaagaaaacaaaacaaaaaaaaacccttacattttcctattggaaccttttattctgttttgttgatgcttaaggaaaacagctttgcccgtaactcactgtggcctggagttatgacacgaacttgtatttggccaattaagaaagaggccaaactgcattcttcttagaaggtctattcagttgataaatggcacttaactgatggttttttttcatataaattttaacaagaactcataagttgcattgattatgccccaagagatgagggaccgatggtaattcagatgggcacctctgaaaagatttatcagttttctgtcccgttccagccagattttttggaaaaccttggggaaagactgaaattccccaccaatctgagactgtaggcgagtttttacaacattaattggaaaacacaagaatcccaacatggcacccaatagacctccaccgataaaatcattgaccaaatgagcactgtgagtcgttgcggtaggcagatgctccttaatgggacctcgaaggccgaaaaacaagacattgctgagtccattccggaaaagaatgggcaccaagcctcgataatactctccaattccatgacatttcagtgccttgaaagcctgataagtgttggtaaatttgtcatgatgcttgtggttttgaagcaatgtctgaactctttccagtggagtgaaaattgcttctgctgtccctgcaagcactgccgccacgccatgggttgcaaactctggagcacggacatgcttccggagaaggcaggataaatcctcatacagaccaaacataagtgcaagcgtagttgtcttctgcatcaatgggggaaggattccacgatacaaatttcgaaatccatcccttctcaactgaagtactgcatcccgggttttgatgccatacagctgttgccgaaagaggaccttctgaatgggatatgtgattgcgacgttgttgaaggctgcacagcagccacacaagtaatgcttcatttcaccaacatttgtaatatgaggtgatatatcttgttttgaagatgtaagtattggtggcctcttttcatgagcttctgaatctatcatgttgcttaagatctttctcatgaagggcattttttaacctgtgacatcatctgagcctggagtttggcaggatgatagctttgtgataatgttcccaatttcttccattgttattgttctgttaggttctctcttcccgagtccattttgataactggatttccgttctccaggcgtccatttccccaacccatcgccgccggcgccccgcaggactgcgagcaagccgggacctgcgcaggcgcagaccatgaccgaccccggggcgggggcgcagcgtgacgctctgggcgccgctgggatccgagaagaaacccttttaaagcaagcatggcaatttcttctaaataagctggataaaattaaaaactcattcatccaaagatcctaaaaaatcaacaaattcctaaatattaaatggtatagacacaagtgtttcttaaatcacataaccttctccacggacactgtgaagatgtgttgccagtggcttccctaagagactgtgaaactttttaaatagtgtatacatacaagaaaagtggattttagtgtaatcttgcagaagaacaaaacaaacatggtatctaagagtacaaaggcacaaaagttgaaatttcatagtcactcaggccttggagtactgtattttcttgaaagggaaaaaagtaggccaggtgcagtggttcacacctgtaatcccagcaccttgggaggccaaaacgggaggatcgcttgaggctaggaatttgagaccagcctgggcaacatagcaagacccctgtctctacccaaaaaaagaaaaaagaaaagaaagaaaaaagtaggtggtaaggagaagtaaggagaagatgaattttttttttaaaaaaagttctgtataccacatgaaattttactgggaggaaagtgtctgaggttttaagaggcataaattaaataaccttgaaacccattttgctctaggactacccatgtgttttctagagtaaccaatgtgtatattccatgtatgtgaatgagagatgaaaggaaacaaaaataacttcccttccaggaacagtggaaggcttcagccaacaaagtaggtcacagcatcagactacattgcctgctgatgtgtactgcctagtttttgaatagaatcaaatgacagcttccttgagattaaatgacagtttccctgaccatcatcttaaagcacgcctatggtggatcgctctagaatgaaccataaacccgaagttctctttaagctttagtgaaacgaaatagtaaaagcttttcacggaaagagaagggagtctccaacatttatactgattgattttggcagcaatgactttcattagaaatgtaattgctgggtatgcaaaaattagcactgttggggctagagagatctttgttttcctttcttttgttttgttttgcttttttgcctaatattgatagtgttttctcggttttgccatagcccttctgtcaagatgctggcaatcagtatatcatgaaaaacagactgccctttctcgcatttattgaagagagattctcatgatcctatggtaagataacaattgctttttttcaatccatcctccacactgcagccaaagcagtcatcttagtaacaaacgtgagcacgttttccctcacttaaatctttaaatgattttacacctgaaggacaaaggtcccccatggtctgacgttttcctacccttggcgccatctgccttcacatttctaaaggcaccttccgtccccgccatatcaaactactcggggtctccagaatgaagaataatgtgccatctgacactcctttgtctttattcggttattgcctctgcctgaaatgtccttacttctagttcctactcagcttctggaagccttcgctaactccttagtccaaatgaggaccccttctccacaacacaccctatacacactgtgagtgtggcacgtgtcacactgtacaatgtccacgattcacaatgctgagggcttcttgaagacacagtccacttctcattgaactttattccagtttgtgtccccagtgtccaggcatctggttaggtctccaactgcttaagagtgtaaagagtgttgatgagttctgtattactcatgggtcttggttataagagccaaaaataccattccaactgaagcaagcaaatctagggggtaaggaaaggagaaggaaga

SEQ ID NO: 1245317 - DNA, 4001 bp, Homo sapiens
tgcatataacctacccacatcctcctgtatactttaaatcatctctagattacttttaatacctaatgtaatgtcaaggctatgtatggcagctgttatgctgtattggtttttgattatattattttttattgctttattcttcacatattttccatctgtagttgtttgaatcagtagatgcagaacctcaggctacagggggttgactgtaatatcacaaccaggatactgacattgatacaatgtaccaatgttatccagagattcctggtgttacttgcaccctgtgtgtaggtgtctctatctgtgtctattacgttgcatacaatttgatcacctgtgcaggttcatgtattcaccaccatagttgtaatactgaacagttctaacactacaagtcccctttgtactgtcctcttataattgcagccacctctctcttgcccctctaccacctctttcatctctaagtcctgacaaccactgatctgttctccattcctgaaattttgccatttcaaaatgttttgtcaatagaattatactgtaatgttttgggactgtttctccccacaagcataattccctggagattcatccaagttgttatttgctatccagtgtattttaatgttagacattgtctttttcatctctagaaatttgagttgagtcatttttatatctcttatatttctaattttgtggatgctttactattttgaacatgtggtgcatatttatactaactgttttaatctccttttctagtcactaatacatcatttctatgtctgcttctgttgattgatttttattttcatgacgggtcatttttttcctctgaatggttaggtccttaatttttttttttttttttgtcttcagtctttgcctttatttatccctgtccctcccaacccccaggctcccaagttctatctcactcctccaccttccctgtcctctcacagatgaggttccgggctgtaatgatggcaatgctgcccagcacaacccctgcccccatgatgtcagaaggtgccacagtctcatggagcataaaatactgcagtataagggccatcaccacctcggaatgcaggacagcacacaccagggcagggtgggccttggtgaccgcatagcccacacatgtgaaggagaccaaggtgaggatccccactgcccccacacaactccaactcaggaggtcactgggcaacacgggggactgcagcacaaagaggcctggcacagagcccagcagccccaccaagccagataggaaggccactgttgggaggcaggagggaaagtgcagagaacgatagacgagaagccccagggacagcgccagtcctcccaggaaagcctgcacatagcccaggccggtgtagacacccgtggtcccctcctgtagtgtccagagtccaggtcccacaatgattattagtcctaggatgctgcccaacagtccacaccagtcgtagccactgagaacctggctctcaaggcagagggtgaggatggcggagcagacggtggaagaatgtttgcgaacagtggcagcattgccagtgggcaccacctgaaccgcactataggcacatccaatgttgaggacgttgagcagggcacagaagcaggtgcggcctcggatgtcaggaggtcccagaagggggtcgccacgcagtttaagtagcagggcaatagggaggtggaagaggcatcgacagatgaccagctccagcgagggcaggttggaagcctggtaagccatacgagaaagggggcccacgaagccagcaggcaggcccccacccagcagggccaccagcaggccattggtggcatcagagggctggcagcgctggtgccagtggaggctgggtggagtggagggcggcgatgggtgtgtggagtcaggcaggttgaagtaggggtgactgccagccatctttccttggactttctcctctcctcctggctcagggagcctgggcccctcagagctccagccactgtgacctcattggagttggggtggggttcttccctggaactatcctgaggtggtagcacgcctattttcccgctgagtccaactctgcttcttttctttctttctttttttttttgttgatcattcttgggtgtttctcggagagggggatttggcagggtcataggacaatagtggagggaaggtcagcagataaacaagtgaacaaaggtctctggttttcctaggcagaggaccctgcggccttccgcagtgtttgtgtccctgggtacttgagattagggagtggtgatgactcttaacgagcatgctgccttcaagcatctgtttaacaaagcacatcttgcaccgcccttaatccatttaacccttagtggacacagcacatgtttcagagagcacagggttgggggtaaggtcatagatcaacagcatcccaaggcagaagaatttttcttagtacagaacaaaatggagtctcccatgtctacttctttctacacagacacagtacaatctgatctctctttcttttccccacatttcccccttttctattggacaaaaccgccatcatcatcatggcccgttctcaatgagctgttgggtacacctcccagacggggtggcagccgggcagaggggctcctcacttcccagaaggggcggccgggcagaggcaccccgcacctcccggacggggcggcggctgggcggaggcaccccccacctccctcccggacggggcagccggccgggcgggggctgaccccccacctccctcccggatggggtggctggccaggcgggggaggtccttaatttttgatcccattacaaacattgtcattttcatgttgttgggtgctagatttactgctctatattcttttaaatgtttctgagacttgttctgtgatgcagtcaaattactgggaaatctggatgagattggagactattattctaagtgaagtaactcaggaatggaaaaccaaacattgtatgttctcactcataagtgggagctaagctatgaggatgcaaaggcataagaatgacacaatggactttggagacccagggggaaaaggtaggaaggggagagggataaaagaatacaaattgagtacagtgtgtactgcttgggtgatcagtgcaccaaaatctcacaaatcaccgctaaagaacttgctcttgttacagacaccacctgttccccagtaacctatagggaaaaaaaaaaaaaaagaaatgcaggagctgagtaatggagaatgtaaccccttgtagagatttatgaggtttattttatataggaaatgctaatagaagactttatataggaaatgctaatagaagaaagcagactggcctctgtttcctctgaaccatggaagagtaaaataaccatgagtcagcggtttgacttaactctctaacagtgagcagggctgctggctctgatcacagaaagtgaccaatgccaattagtaatcttgtgccaattagcacaagggctgctttcactgcagtaataaaagttcccacgtggccagaaactttttgagggctatctctgagccttacattaatcttaaaaggaaggttccttatgcattctggcactactatgtctgaattgtgtgtgacctagagcaagttattaacttctctgtgcctccatttcctcatttgccaaaatagagacaataacatacctaagttatagggttgtaaagagcattaaattaggtaatatttgtaatgcaagttacccattctcaataaacactagttgttgtgaatgtaaaaaaattacctggaaacggtttgatcctttgagactgaaatgaccttactttatgggttattttgccccctggtgaggtgataccctttctggattaggtttattccactccagctaggggaaatgtgaactctgactggttctgtgggaaccctagga

SEQ ID NO: 1245318 - DNA, 4001 bp, Homo sapiens
tgggtgtggtggctcatgcctataatcccagcactttgggaggctgaggcaggcagatcacctgaggccaggagtttgtgaccagcctgggcaacattgtgaaaccctgtctcaaaaaaaaaaaagaacgaaatgaaatctagctaccttgatcatcaccatcatttcataaaataaccttcaaacaccaaaaaatagaaataataatctcagaattcacatatttaaaaaattttaaactaatacactctccttacatacaagcccatttaagacccctttccccaatcacaatcctcaaaggtgctcaattttgccagtgtatccctcaggatattttctatgcatactcaaatacatgtatacttaattttttttttaaagttttttttttttttttctagagacgaggtctcactatgttgtccgggttggtcttgaactcctggcctcaagagatcctccacctccaattcccaaagtgctgggattacaggcgtgaccactacgcccagcctcaaataagtgtatactttaaatacacattgaatcttttttccgacttgacaatgaatcagacacattatgtccatacatagaattcttaaagtaaactgaacttcatgaaaaactcactgtagcatccttgtgttactacaaaccagtcaacatttaatcacaggctgttaatcatccacagtagtgtttggaaccaaaggcctgtgccccaaagaggaggaagcaattgagttggagcttgaaaagcagaattcagttaagcagagccagaattcagttaattcagatccagcaggatgtccagcaccaacggtggaggtgatggtggtcaaactcacatctccagcaaaagacgcagacgtcaagtttacaactaagcaagagcatggggctatccagctctaccacggtcagctgttctttggacagggctctcgcattcattaccttatctaaaataccggtaaaacctattttgcaaggcgaaggaggaaaacacatgaaggaatgtatattacaagtactcgttaaactcatgtgttgcacaagtgcgaggtatcatacagggaacagtgggaaatggaggtacggcgtagaacgaggctcctgaaagaggaatctttggggcttgaagtttcgggaattcttttactaggtaaaagataaacatttagaaatcattcccaggagagaggcgaggagcggggtgggaggggactagcacaggggacagctccgagcctttctccagggaggatgctgagcgcggtcgtggacccgttgaaggatctcctttcctgcaagttggtgtgtgctggaggaaaaaggaaagcagaagggaagggccttagagaaaaaggcgagtacagaaaacggaaaagagggcacaaagctctcttctaaaagctttttatttctaaacacgtcagtcccttcttcgaatatgggatgaaaagtacggatcttttcctcaaaaaatcctccgttgcaccccgaagcccatctgagcaccttaagaagtccggctctctagggtgagtgggcgcctgcggcgggctccccccagcatcctctttctgtagcccccctgcccggtccgcaggatccggttctccgcagaaccacccctaccccgccacgcctgtctggcctgaggagctcccctcccagccgccctgctcccggacctgaaagactcacgtctccgcggcctcgttgtcccacggcccggccacgcgcgcaggtttggttccacacgggcggtccagagggctcggaacgggcccactggtgtcttcgagaaatctctaccaggcgcgaacacgcggtggtttcattgggttggctgcccctcggtccgggggcagcgccgcgcagccacccggcagccgcgcccctagccttcgcgaagctggaagacaatcactaattaccgccgcgcgcagcgccgcggggaaccaccgcccccttcgcccaggactgcagggcatgcgcagtgcgaccccggaacccggctccgcagacggatccgcttttccgtgtgttcgccgacgccgcgggggcgtggcgcggccctagcgcattgtaagcagttgggggtcatttcctcgaggccctactcgctagccagcgcccccggggccagccctggctgctgctgggagccgggtcgtaaggggcagcgagatgtttctgacgctgccccaggcacatgagccccgggtccttcgggagggtcccgagccactcgggtcggatttcgctcttgagacaaaggcctggctcgttcgcggagcggggccacggtccaagagcagagctagcaaagcggcggccttgcacaggggttccagcctgcggtgggaacggagagtctcaggggggcggggctgcctccgtctggccctcggctggctgcgaaacgtggactgggtgatgcctcaggagaaaccaccctagtagttccgctccgagggcggaagtgcgcgtctcttgtttgtgcggctgaccagttggcgacatggtggcacccgtgctggagacttctcacgtgttttgctgcccaaaccgggtgcggggagtcctgaactggagctctgggcccagaggacttctggcctttggcacgtcctgctccgtggtgctctatgaccccctggtaagagaggtcgctggacggccgacccttgtgcttttcgggttgaacctgtggacgtgctccgggcgcgctgttagttgccgccccagacctaggaggcgagtcgggtcggctcaggggagcggggtttgggctcggagtctccagtggacctgccggactcgctcctcacccctcaccctttgccgtctcacgcgtggcgtcatcctagggtcattgctgcccatgagctgctagtaacctgttagtcccacgcagaaacccgaatgataagcatcttacctgaagccttccttgggaactgtagtaccgttaatcaatttgggttttaaaacaattgaaatttatatgtagattaaaaccatcatcccacaggtgcaatctcatttcagtatttccttcagttttggttaatgaacttttgttgtattgaatttcaaggaaatgttacctgtgttttagctacgggaatggacattttagagaaagtgtcagtttgggggaaaggtcataggggatggggatcctaagcactgattataaggcgggacttccctcgacttcacccagtcagttggttattttcttggtgctttcctcaccatatttctcaagtgaatagtttttgcatgctccccggaattcattataactccattcccaatggctaagttggtctatacagttagtcttgcatctcaaaaggaggctcagtgtaaaaagtaaaatgttgaaaattcaaatacaacgcaggagatggctatatgtatttctgttcatacggctttattaatttggttaaaaatttcattattggccaggagcgtgtctcatgtctgtaatcccggcactttgggaggcagaggtgggagcatcgcttgagtccaggagttggagaccagtttaggcaacagagcgagaccccagtctctacaaaaagtttaaaaaaaaaaatagctggttgtggtggcgtgcgcctgtagtcccagctactcgggaggtagaggtgggaggatcgcttgagctcagaagtttgaggctgcagtggacgggggtcgcaccactggactccagcctgggcaacagagccagaccctatctcaaaaaaacattattctcacaccctttggagattcaaatatatatatgaaatatttgtaaccacattaccccatcttgagcttgcttgcctcttcctggtttttgtttcttgttatttgcattcttgaatggcaagagaaagtgcaaaaaacaagggtaaactttaaagggaccatgaggcaaggaccgactgtagaatgggagagaccacagcaggctctcc

SEQ ID NO: 1245319 - DNA, 4001 bp, Homo sapiens
ttatacacttaaaatgtgtataattttatggtatgtaaagtatccttcggtaaagcttaaaaaaaataaatgggagttagcagctgcaacaattttcaaaagcatcaactgtgatttttcacagctagctattcatttgtgcttgtccacagacatttcacaaacctctagggcagacctcggccattccatgagaaaactgagccccaaccacctggcactcctggtatgcaatgacttaactgtccacagcatccagacggctcagtgatgcccccatccttgttgctgatggaaacccacttgagaaacactgcaagccatacaaaaaattagatcccatcaagtctaaagacttcatgaaaaataatttcagaggttttgaaaccacttgatatatttttattataattttacatgtttaaagtcaggccagtcacggtggctcacacctataatcccagcactttgggaggccgaggcgggtggatcacctgaggtcaggagctcgagaccagcctggccaacatggcgaaaccctgtttctactaaaaatacaaaaattagccgggcgtgatggcccacacctgtagtcccagctactcaggaggctgaggcacgagaatcacttgaacccaggagggggaggttacagtgagccaagatcgcgccattgcactccaacctgggtgacccagcgagcctatgtctcaaaaaaaaaaaaaaaaaaaaaaaaacccagcctgggtgacagaatgagactctgtctcgaaaaaaataaataaaaagagtcaaaggatgacaatttccttccacgcagtactttttttccccccaaaataaaatatttaatgcttaagtgaggtcagataattaaaaaatctttgttgctgtaaataaacattaaagaataatttcagtgtgtcacagatcactgacttaaggaaaagataccacttaggttaggagggcacttttttcttctttttatttgcacaattctatggagtatatgtgcaatttcgttacatgcataaatttcgtagtggtcaagtcaggacttctagggtatgcattacccgggaaggtgtcttgcacccattaagcaattctcattatcctccctgcacccaccccctcacccttcagagtctccatcatctgacgttccactctccacatccatgtgaacacattcttaagcacccacttaggagtgggaacatgcgatacttgtctttctgggcctggcttcacttaagataatgacctccacttccatccgtgtgccgggggagcatttttaaacagttcgaggttttccacgctagcttggaggccttccatgcctacaagtgagttcagagccagggcccccgaaatgccttctgcccctttagcttcctccagagctcacagcccgccgtgggccctccgtgaaacgcgcggaaggtttatgacaatctcagcaaaggcgccagcttgcaggcctctcccctgccctgctcccgaccccaaggagagcagcgagcgccaggcccccggccgcccccccggctccggccgcccccgccccggccgcccccgctccggctgcccccgccctggctgtcgaccaccagcggggcctctgtgcctgcagccaggcccctgcgcacgccgggggagaggccgtacccggcgcagagcctcgcccagaccgcggtcccggggaagcgcgcgtgccctctccgggacgccgaagttgcggtctgggaacggccggcgcggggcggggatctccgcgaggcccgctgtgaggtccggcctttcctggaccgctccagccgggctcgggagcaggagccggcgtctggacggccccaccgcggccctcagcccggcctcacccaaacacgtgctccgagctccagatcttcattgccgccggcgcagggcgcgggctctgcgatccgggccgggtgcttcgggccgcgcggctccgggcgcggcgtgggcggggcctcgatgggcggggcgcccttggatgccgcccaccccgtctggtggctaggctggctgcagcggctaaaaatagctctgcgggcgcggctgtggcgcagccccagacctgcgctgctaccctggggtgcgcgatgcgcgcttgctgcagatgccgcgggcgtaggaggcgacgctcgtccttactcccactgtccaaattctcccaaggccctgtccagctacgccggtttgtactgtcggggacgtgtgatgaaaaacaaacctgccaaccctcaaaactccactgcagtttgggtcttgaacaaacattaaaccagcatgtgaggccgggcgcggtggctcacgcctgtaatcccagcactttgggaggccgaggcgggcggatcacgaggtcaggagatcaagaccatcctggctaacacggtgaaaccccgtctctactaaaaatacaaaaaattagccgggcgtggtggcgggcgcctgtagtaccagctgctcgggaggctgaggcaggagaatggcgtgaacccgggaggcggagcttgcagtgagccgagatcccgccactgcactccagcctgggcaacagagcgagactccgtctcaaacaaaacaaaacaaaacaaaacaaaacaaaacaaaaccagcatgtgatgtgcatcacaagcaatccgccaaataggctgcaaagacagaaatctcagcctgtatcaaacagccgggaggatgcaacctaccccacgcatgctcccgaggtaaacgagacagccctccggggaggggactccactacaccatttgtcgcagagttcatcctaaattcgcctgatgatggagtggccattggtaaatgcagtggccatttgcgtttgctaattgcctttatccaaaggaaaaatgaattttcatacctttatgacaggaggtaggtttacaatttgaagccaggtgctctctggtagctgggctcctaccctcccacaaaactgggagacggggatgacatttcaaagagatgactcccaagtccttgagaaaatacattcttgagttataaaactggggggaaatcttatttagctttaaaaaaatgtacgtgtatctcaaaaagaatttgtgattacaacttggcaaatcctctaaggaaaaagagtctccctttcgcataaactactttttagctttgcaaagtaccctgcactgccacaaacgaagttgaagtgcacggaagtgagatgcttgttctaagaagagggtactcttctccaggatgagatagggcgagagggcagggcccttgtctgagtcggctgagtctcagcctagagcagcgcctggcgcccctggggcgtccgtgggcgtggggagcgcatttgtgcagtgaggcagggaagtggaagagcacacagcatgacccgaaagacctgggctacagtcctggctccaccgtccactcacattgacctctacctcctacagcgttaagctcaggatgatcttccaaagttggtgctattcttcccgttttacaaatgagttaactgaagttcaagcaggtttcaaagctctctaccccatgatcacacgctgaggtgagaacccaggttacaagattccccctccccactgtgctgcactgattctagattatcactgggccagctgttgaacacttcttgtatgccaagcactattgaaaaaacatgaggcaacacgcttgttccaggtcacatatctaggagttatcccacccagaattcaaagccacatcctgatttcaaagtccagtcttgccatttattatcctctaggagtaggaacagatctagctgtggaacattcattcatccagtccgtcttgttacctgtcaaatgaggatcatactgcccaccccactggtgtgtggtaaggattagatgcatccatgtgtggacattacggtttactagtatctttagaacatccgttccttctatcactagctaaggctagccag

SEQ ID NO: 1245320 - DNA, 4001 bp, Homo sapiens
ttctcccatctctgcttcatctgcttcactaattcatgtattaaaactgttgaaactccatttaactatttgactaacttctctgtaagatggaaactttttaaagggtgttaaagtagaatagcaaattttcagcataataagagcaaatttattactaggctcaaggaaaacatcctatcagcgattcattcatacgaaactatcaggttcaattcatatgaagtcagaagagagaaaaagaattttggaaattaaatcacatttcaaagaccatttctaaaaagatgtaattattccaagttatttatttattaacaattattttacacatgtcgttttaaaagtttcacaaacccaaatttaagatagtccaaattgcaacaaacaagacatgactttgatggaaaatgctgcttgcaaattcgttttacctggaaatttcttttttaaaggtatggttgacaacacactggtggtattttgcttttaaagggtcaagagaaaggaataacaaaaccaacccaggcattctttttctgtttaggatcaaaaggacattttaaggataagtaaaagacaaaagtacctgacccaaagacaatatccccctccaagagaacaaagtaagttgcaattttaaaaaccaagtttgaaatacgagaaatcacttcgagggctttccaaaggcgtgtgataaaaactaataggctccacccgcagaacaactttcacaagtgagtgaaggatgatcacagagttatcagctgtgtgcgtgtttgtgagtacacacaagccatggaaaacccgagactaccactgttaacaaaggttacgagaccaaaaaaaaaaagtggaggcaaagtattacgcgtccctaacaaggcttccccacaactcctgaaacaagagctctggcccttcggctttaaaaatcagaaccacaaactatggagtgtgagagcagcgaggggaagggacgcaggcagcccccgcccccgtcagcctgggcggcagcgcagtgcaaccgagccccgtcccttcccggctctccggccccgaacccgcacgcccgggccggcgcacccacagcccccgaactcaccacaccccagcccccacccgcagcggccatgtgacacggcccatcgccccggccgcggacgcacgcaaacacttccctagctggaggcccgcgggcgcccaggctttacctgcaaggtggcgccaggtcccgccccgtcagatccggggggtccgggaccttttgttccttcctcttccgatgggatggagggggctgggaggggaagaggggaatgggcgattggaggcggaactgaaaacactcccggccgccgtcttcccgccccgcccccaggcccgggcccggccggcggcccgggcgcgcgggagggtaggggaagagaggggaggggaggggaggagagggaaggggaggggagggagcctggccgccgcccgcggggaaggagggggtgaggacgcgcgcgcccgcgctgcccctcctcccctcaggcgcgcgcccgcagccctaccggccgcccgcacggccgcgccctcccccgccagcccacctccgcttccgccctccgccctcggccgccggccgccgcggcgccacgcacccacctcccggcggctggcgggctgctggctggcgagctgcttctccgccgccgcggccgcgcgggtagacccgcctgccaccctgggccgcgggccccgccgattcgccggcgcagccccggggctggcaccctgccgcccgctgattggcgcctccagccgcccgttagggcgcgaggcacgccggccgaaagccgcgcggggcgggtatggaagacggagggagcggaggaggaaaggaacgaggccgagcaccgcgggaagggccggggggcgagcggggcgcggggagtcgccggccaccgcctccccacctccctttgcctacggcccgccccgcctcccggccggaccggcggcgcccgcagccaatcagcacgagggaagctcggggtgtgagccgcgcatcgggggcctcgaatcggaagggagacgtcgctcgctgattggtcccgcctccccagtctagcgtgaggcgaggcggggcgcggccgggcggggcgggacgcccgcggtttcgcttgagttgggcgccggcgcgctcccaccggggctcacgggcggagagggagaggcccgcgccttgccgcgcattaagacgattcccggtgaccgcccgatccctcgccagcgtcgtgggtggggcctgtaggggcctgccgcctcgtccaccgtccgtcgtgaggccggcagcggacacgtgctcatcccacggggaggccccgcgcagcgcggaggacgcgcctgagagagaaaaggggttcgggagaagcccgaggacccggcccgtgactgggcgcgccctatgcaaatgagcgggcggggccctcgtgttgctgaacgagggcgggttcgcgatgtaaataagcccagaggtggggtctttggagagcacttagggcccgggtaggggatgccaggtataagtgtttaacctaaattttggttccgtcttcagtaaaaatgatatcaataatccatgtcccgaagggtctttgtgaagtctaaaagaaacatctgtcacgatgtcccttaatggctgggatatcttcccttccccttttctccactgttgcgacgattaggccccaacttgcacatctgccctacaggaggcagcaaggccctaaacttacggctgcccagaacataactgcacccagggaaaaccttgttgcggttacccttaggaacacccaagcctctgctgacaaaatattgagcccaactaatcacatcaggtgtttactatgcacccactgtgacacaggcagggagtaccgtagaactaaagttgaaaagaaacttaggtttcacacaggtgccagagacaagactagaacacagtttttttttggctgcctgtccagtaattcattctcatgtgtggcttagtttatagatttaattggggacttcaaataagcgggaaagaagcactagcaatacaaatcggtaatcaggaagtaccaaatgagcactccaaacagtaagagtttttgaagtatacgctttcttctgagaaatgaacgtgtcccagaggagggtgccttcagatggaccttaagagagatgtggccatcccctgagtcatacaagttttccagatgtcctttcaaaatctctgtcctttccaccgtctctgtcctcacacatagaggaacttttctcacgggaaggttgcgatgaagagcataaacccaggagtcaggcacgttgtagctttgagtacgactctgttccagatctgtaatctttggcaaatggaactcacctgcaacgatacctacttaaatatagttgtgtgatgattaaataataaatatgaaagtaaataacatagggctttgaagttcaaggaaagtcagtgatcattaacttctcttctgttgcgtgcgaacatttatgctgagacgaacctactcagcagaaattcttcctccaaaaattcccttccagggtggtttcttccattgttagtttagaggcagctctactaaccccttaataaaaataaaaaagtttgtgaaggacacccaggaagccatttggtggagctgtcccacctcctctgccttgtttcctctttccagagccactagggaggacggtccagggcaaaggctgttcaacttacaagtaggaaggctgtttcttgtttttggtctgtcttcctgctaatacaagtcaacagttgtaatatgaagtagcatattaaaagctaccctggtcacacaagtattttctcctgtgtgaacagggtgtggatttgggtgtccacctgagtagtagaaataggaaccaaagcaggcctggctgggattccagaatgtgctcctagtatggaagtt

SEQ ID NO: 1245321 - DNA, 4001 bp, Homo sapiens
accctgcacagtttcttaaaagactattatttcatgaaacttacagactgtgtagagacatgaccacttatgactaagtaaacgtaggttacaaccttgaaaacccaaacttttgttgaacacctacaatgcttgtggccgcactttagaaggtgtggctaagtataaaaaccaagctctaagagcaatttcttactaaaaccccaaaatgaacgtttccaatcacattacattaattaaacctggccagtgaacagccttgaactcaattaaatccagcagagtttaatatttatagtaaaagtgggcacactctttagaaatgccgaaagatgtgaactatttatatttactacgacagctaagtttacggcaacggctaaggaactttaaaaataaaagtattacttttgaatttaatataaacgtttgctaaatgaccttctggcagaggaaattctttaaatatcttgtatgggttttccgaaggcaaattttttaaataccctcaaactatggtacatttatgaagcccattttaaattacttctcccatctctgcttcatctgcttcactaattcatgtattaaaactgttgaaactccatttaactatttgactaacttctctgtaagatggaaactttttaaagggtgttaaagtagaatagcaaattttcagcataataagagcaaatttattactaggctcaaggaaaacatcctatcagcgattcattcatacgaaactatcaggttcaattcatatgaagtcagaagagagaaaaagaattttggaaattaaatcacatttcaaagaccatttctaaaaagatgtaattattccaagttatttatttattaacaattattttacacatgtcgttttaaaagtttcacaaacccaaatttaagatagtccaaattgcaacaaacaagacatgactttgatggaaaatgctgcttgcaaattcgttttacctggaaatttcttttttaaaggtatggttgacaacacactggtggtattttgcttttaaagggtcaagagaaaggaataacaaaaccaacccaggcattctttttctgtttaggatcaaaaggacattttaaggataagtaaaagacaaaagtacctgacccaaagacaatatccccctccaagagaacaaagtaagttgcaattttaaaaaccaagtttgaaatacgagaaatcacttcgagggctttccaaaggcgtgtgataaaaactaataggctccacccgcagaacaactttcacaagtgagtgaaggatgatcacagagttatcagctgtgtgcgtgtttgtgagtacacacaagccatggaaaacccgagactaccactgttaacaaaggttacgagaccaaaaaaaaaaagtggaggcaaagtattacgcgtccctaacaaggcttccccacaactcctgaaacaagagctctggcccttcggctttaaaaatcagaaccacaaactatggagtgtgagagcagcgaggggaagggacgcaggcagcccccgcccccgtcagcctgggcggcagcgcagtgcaaccgagccccgtcccttcccggctctccggccccgaacccgcacgcccgggccggcgcacccacagcccccgaactcaccacaccccagcccccacccgcagcggccatgtgacacggcccatcgccccggccgcggacgcacgcaaacacttccctagctggaggcccgcgggcgcccaggctttacctgcaaggtggcgccaggtcccgccccgtcagatccggggggtccgggaccttttgttccttcctcttccgatgggatggagggggctgggaggggaagaggggaatgggcgattggaggcggaactgaaaacactcccggccgccgtcttcccgccccgcccccaggcccgggcccggccggcggcccgggcgcgcgggagggtaggggaagagaggggaggggaggggaggagagggaaggggaggggagggagcctggccgccgcccgcggggaaggagggggtgaggacgcgcgcgcccgcgctgcccctcctcccctcaggcgcgcgcccgcagccctaccggccgcccgcacggccgcgccctcccccgccagcccacctccgcttccgccctccgccctcggccgccggccgccgcggcgccacgcacccacctcccggcggctggcgggctgctggctggcgagctgcttctccgccgccgcggccgcgcgggtagacccgcctgccaccctgggccgcgggccccgccgattcgccggcgcagccccggggctggcaccctgccgcccgctgattggcgcctccagccgcccgttagggcgcgaggcacgccggccgaaagccgcgcggggcgggtatggaagacggagggagcggaggaggaaaggaacgaggccgagcaccgcgggaagggccggggggcgagcggggcgcggggagtcgccggccaccgcctccccacctccctttgcctacggcccgccccgcctcccggccggaccggcggcgcccgcagccaatcagcacgagggaagctcggggtgtgagccgcgcatcgggggcctcgaatcggaagggagacgtcgctcgctgattggtcccgcctccccagtctagcgtgaggcgaggcggggcgcggccgggcggggcgggacgcccgcggtttcgcttgagttgggcgccggcgcgctcccaccggggctcacgggcggagagggagaggcccgcgccttgccgcgcattaagacgattcccggtgaccgcccgatccctcgccagcgtcgtgggtggggcctgtaggggcctgccgcctcgtccaccgtccgtcgtgaggccggcagcggacacgtgctcatcccacggggaggccccgcgcagcgcggaggacgcgcctgagagagaaaaggggttcgggagaagcccgaggacccggcccgtgactgggcgcgccctatgcaaatgagcgggcggggccctcgtgttgctgaacgagggcgggttcgcgatgtaaataagcccagaggtggggtctttggagagcacttagggcccgggtaggggatgccaggtataagtgtttaacctaaattttggttccgtcttcagtaaaaatgatatcaataatccatgtcccgaagggtctttgtgaagtctaaaagaaacatctgtcacgatgtcccttaatggctgggatatcttcccttccccttttctccactgttgcgacgattaggccccaacttgcacatctgccctacaggaggcagcaaggccctaaacttacggctgcccagaacataactgcacccagggaaaaccttgttgcggttacccttaggaacacccaagcctctgctgacaaaatattgagcccaactaatcacatcaggtgtttactatgcacccactgtgacacaggcagggagtaccgtagaactaaagttgaaaagaaacttaggtttcacacaggtgccagagacaagactagaacacagtttttttttggctgcctgtccagtaattcattctcatgtgtggcttagtttatagatttaattggggacttcaaataagcgggaaagaagcactagcaatacaaatcggtaatcaggaagtaccaaatgagcactccaaacagtaagagtttttgaagtatacgctttcttctgagaaatgaacgtgtcccagaggagggtgccttcagatggaccttaagagagatgtggccatcccctgagtcatacaagttttccagatgtcctttcaaaatctctgtcctttccaccgtctctgtcctcacacatagaggaacttttctcacgggaaggttgcgatgaagagcataaacccaggagtcaggcacgttgtagctttgagtacgactctgttccagatctgtaatctttggcaaatggaactcacctgcaacgatacctacttaaatatagttgt

SEQ ID NO: 1245322 - DNA, 4001 bp, Homo sapiens
ctattaatagagtcacaaaatgttataacgacttttatcaaaagaagcttttagttttaattccaacaacttaaacctacataattcaccatcgtctttagacctaaagctactccgaattacaaatgcttggtccatctctattacatttgttctgtaacaaacccatttaagtaaacaaaatcatgacagcattatggaagaaacactaattttaaaaaccgtatttttaaatgttaatcattttacagtttggaatattatgtactaatcatatcagaactttccaatatagagagagtaagtccttagcattaaaaaaaagttacattttagaacttcctagatttcaactgaaatatatattatctagtctctgcagggtatggcaaaagtaatttatgaaatccaccataaaaattattcaaatgccttgttctaaatctaattacgaaattacgcatttttttttttttgatactaaatggtttttgccagcaaaaaggagtgaacctacttcttaaaacacccgagtaaccaagctgctactaagactagaaggatgctaattctggcaaaagtcaaaggttactaacaaaaattagctaagattatatgtttgcagaaagtcaattcagggtaattccgctattatcctgttgtgtttattattcctaaataactggcaattccaccttaaactacggtgcaaaaactaaatgcattaagaaactaattgggaaataaatgtgtttttttaaataaaaacaaacgtacttaggtttttgaagggaaacagctatcaatcttcaacagggctttttaaagcctctgcaccagcaaataaacctttcaggttaactaaacacacttgtgtctttgaaaatctagtttgagaaatcctaacagcagtttgggacaagtgatggagccaccgccctccaccctacaccaatttcactgtcagtacatgcagtgctaacagtaagatcagctgtgtcttttattaggaagcatgttttattgggggcaaggaggggttcagttaggtgctaagaatgtgtcctgcataccgctgtcactctcagtactcaaaaagtaaacatatcaaagccagaagcgtaaactggcatgacaagactaggaagagaaagtaggggacaaagacaaaacagaaattggctggagaaaataaatttagacaaacaatttacaactttcacttagaccctaaggcaacacattccagccgacccaacgcgctcagccggggcgaccgtgaaactactgagaacaacaaagaggagcggcggccgcggcaggagtcccgtccgagtttaacttgattctcccacgagctgcaagcggagctgggggcccgagggacgcgaggcaccgccgcccggcattcagccggcccgcccggcccggctcgtcaggccgccgcggtcgccctcccagaggattccgcgcgctcccagccgccgccgccgccgccgccgtcgtcgggagcccgccccggggcggggaagccacaggcggggtgcgcgggcccggccgggggaaggggaggggacatggcgcggttacctgggctcgggcggtggcgaggggagtccgctctcccgcgctgctggtccgcggacgcaccgggcccgtagctttccccggcggcccggagagctcctcggcccccgccccgaggcgtcccggccaggccgcccctcctcagcgccgcgccgctgcccgcgcgggccggaccgcctcgagctcccgggccgccctgcggcggggggcctctctcgctgggcgcctggctcccctcacccgctcccaccccctgggcggccgcggagcctaggggagagcaggaagggcctcccgaggagagcgggaaggcgcgaacgcaggctccgccacccaaaccgctccgttaccgcagcggcgacgacgaccagggccgtgttgttgctgccaacttgtcgagaagccactgagcatgcgcgcgcggggaccacatccgggtaatttcagggtttggcccttttcccccgcagctttcctttctcccggctgcccccgcctcccgctccgagtgacggggagggtcgctctgcgcaggcgcctacagggcagcgccagccggcgggcggctctgaatctggacctgggcctgggcctcagcgcgggcggaggcgaaggcctgtttgagggagtggtcgccggggaaattggcatctcgttgcaaaaaagtatccaaggagcgcgggagagctcggcgtagagtgggcgtccagtaagtgtttataaatagctattagcccggcctttgttgtttttttgttttgttctgtgttgaggacctgcgtaggcacaaaaattggccttcaacagccagtcgacagctctggggagaaggtggctaggttgtaggagttcacttcgggaagaaacagacgctggcggcaccttccttctctttctggcagccccgaatcacgagccccagaggtgtttacactcgagagacgcacaggacagtcaaggaatcacatattgaagagccttgccaggcgttgcaagtgtgagtggattttgttggaagagatgtaggcgcactctcggagctggaggcgaacttcgaatcctacgacacacctgttaactaggttacctgtttgtttggtgggggaaggcataggctctgcttttgactttatgcctcttttatttcacattttttacaagacgcatgcatttctttttcatttaaaacgcattaatgatttattttcaccaaccaggaactacttttagtccctccaaaaccaatgattagccagttctaaagtcatttcttaggtcacgtcgcccagaaaatctctacacccaccgtacgccttcgccactcatactcagtgcttcattctatcctccacatcaccgcctgggccattccctctttgaccagaaagcccctaaagctccaaactggtgttctcttacccctggggtttatggagaccagttttaagggaattcatttccacatcttccattgctatatattctattttctaaacttgcccagcttgagaaaggagctgaggacacagcatcccctttcaaaactgtcctcccaccttacagaagaaagtcaaaattctcacccactactaaggtgcatgggatcaatgcagaacctccccagcaatccaaaagggacaattcaaaaatcggtatctatgctgagaaagtaaatgaccttagtgaatggatattaaattatttttcaagtcagatagttttcaaatcttttctgtcaacaaaactgaaggaagatctgtcagctgatagattacaaaacatgatttggtaacagatcaatatgtgaatcttaggtaatatacctcagaagaagtttttaagaaattgagacattgttataactaaacttcttctattccgtctgtattagttacctattgctgtataacaatctcaccacaaatatagaagcctaaaacaacaaacatttatgatcttacagattctctgagtcaggattccaggcatggcttagctgggtcctctacaaagtgaggctggaacaaaggatctgcttccaagttcatgtggttgttggcaccattcagttccttgcaggctacaggactgagggccttagtcctttgcaggctgttggctggagaccccctctgttccttgccatgtggtgctctccatagggaagctaacaatatggcagcttgcctcttcgaagccagcaacgggaagagtctcagcaagacactggtttcaatcttatgtaacatcatcacatacacagtatcactcatactctgtcacctttgccatacattgctggccagaagcaaatcacaggcgccacctacattgaaggggaaggaaacacacaaaagcttgaacaccaggaggtgggaatcatatggggcctctttagagtctaccacaccatg

SEQ ID NO: 1245323 - DNA, 4001 bp, Homo sapiens
cgcacttcacagttcacagggcggggggcgaccatgccccctccccgtcctcggactccagacccagctcccagcaacctcggctccccgccccggcccgccccccaggcgtgcaattcacctctgcccccgccggtccgctcggcactcgcgcgggggacacggggctgcccattcctagcgcactcgggagatgcatcccaagcgtgctggggaacgtgggggatctgcgggcgcccggggtgaaccctcacatcacactctgtgtacagagacgtagagtaaaggaaggaatggagaaagctgagaggataaaaggaaaggagtttcagggtctcagccgagaagcccaggccccagcgcagtaagaggcgacaacgtcactgaggcgccggggccccactaatctacagacttatctgtgcggaaggaaggaaaaagtaggggacacccaacttctcctgcctgtttgttcctctgcaccctggggctggcagagttgaaaggagacagatacccagttcggccttccatccaactctctttgccccaaaactccaaaggtgcgcggccacgacagtatctgggccactggtgttcgacgtgattctccgtatttactaaaggagtaaatacggagaccttccagcctttatagcacgcctctcccagccttccttggcgggcctggaccaaatccaactcggccacacacctcaacgtctttccgggtgcggggaggcgtgacccccccacctccctctgcacccccttgttgatccggaaatgaaggcgtctaatttttaaccgcagactgcaggagcagtgcccgtagaccccttcggggcaacacaggagaaaacctggaagggaacccccagggaatgccctttgagtttccccttgtcccttctctactttcagcccccagtctcttcccaggagggtatgcacactctcccaggagggtatgcacactctcccaggagggtatgcacactccccctggagggatggctgcacaaacgcactgccctaggggcttttcttccagcactggcgctccggaaaatgttgggggtagggggacaacttctcacctagttcgcagagtcggctaaggtgatgggggttgcagcacaccagctcggggttgatcttcccgtaagattcacagcaacacagcctcttgacttccgaggaatgcctgagatccggccacctgaacactttgcacagcaggagggggagcgagtaggacgagggcggctgcgcaggctgcgcgccggcgggcgcccccgggcccagcctgcagtccaggcggccgggcagcaggaggcacgcggtgcgcgtcccgccgcgggactccacggcctggagcagcagctccagctgccgctccttcagtttcttgagcaccgagtgcgtgagcgccttcagatccgcctcggcgcccccggccgcgccggcgcccgcggctggcgggtggggatggtggtgacctttggcacctcgcaccgccttgcccaggcagcatccagccctgcccgggccgccgccaccggccccatgcgctcggctgtccgtcgccccttctccccgcagctcgcctcctcctccacctccccctgcgccctcctcctcgtcctcgccgccgggcgcacggctcctccagagacgccggacgagcgcagatcgtttggtcctgaacatgcggggcgaggaggcgaggagaaaagtcgtttgcctgctaaggagcgaacatgacctccgcacaccatgaagaagtcgggcgccgagttggggcagcaggcgcaggcgacagcagcagcagcaggggcccgggcaggagcggcggcggcccgaggggcgctccgtggcatgcgccagtctcccggaggccggggcgcgcgcgggggcccgggggcgcccgccggggatcgggggcctgcgctccggctgccccaccccgcgcggcccgcgccctgcgcggctctccggccccggcgcgccccggaggaacccggccgccgcttccctggggacggccgagcctgcccccgtcggcgcctccccaaaaagaggcccccccgcagtggctcccgaatgtcgggctcgccagcctcggcttcctacatggaaggtccgcgggggcaaaaaacgaaaggcgttcggctgggctgttggaagaaggaaaaagcctctttcccccttgctaagcaacttaatttgggggtggggagaagcaggcaattaaaaaaaaaaaagcaagcgatttatttttttcctctatatccttagtaaccggatctcctcgaattccgcgcacacgaagactcaggggagggggccgagtggacttcaccccgcatgagacgtctggcaaaataagaaggctctcgcaaaacctaacaaccaaatatgcaaagccccaaatgaaaaccaccacctcctcgaacctcagaggtctgggggcgtccggctggaactggggtttaaaaaaagaaaatgtttacaaagtataacaagatgtttgatgggtggaaaaatgtatccacgagttacatccccccgtttccttgcaaagccccgctggtcttcctctccttttcttctgccaaaaaaaaaaaaaaaaatcgtgtatttttttaatccacagaaagctttggctagaccgcttcaatcctgcgcatctgggtggtttaggggagtctctggtctttccccctgcgctcctgggggcccaggtcctcggcggggacttcctcgaggctggcgcgggcgcaggggcagaagatgctgcggcggcggctgagcccggcggggctgacagcgcgggggagggtggcgcggcggcggcggagggccccagacgggtcgcgcgttctcgccccccccgggcacaagctgcttgctagtgcaggggccgccgatgtcccttcccctggccgcggctggccgccgaggctccccgcatgggctgctcgcctcgacccagctgcggcggcaggaggccccggtgtcctctcggcgcctcctcctccgagactctcctcgtcgcgcccgggagcctccttgtccccggtccgccctctcctggcgctccggtccttctgccgccgccaggggctcgccgcgccgcactcaggggctcaggggccgggcgctcggcggctcggcgccgacggactggctctgtctcgggcagctctctcccgcgcggcgagcggaccgagcacggcgcccggctggctcggctggcgcggctcggggacaggatcttccgtgcgccgagcagcaagcgagtgtgcccggggctcaccgcctcccgcaaggcctcccgcccccgcccccttccctcccccttcctcccccttccctcccccgcccccagccgccgcagccgcgccgcctcctccccgcccccccgcaccccccctccggccctctgctcggctggttccactgcgcagtggcgcgcccggctccggcctcgtcacgtggccgtctagacaccctgtcgctttaaaaaaaaaaaaaaagcgattgtgtttcgcaaacaacagatcgggtttctaaaagctatttctccccccaaccccccgccaccgccaccccctcccgggtctgtagagggggtaccgatggaggggagagagataggtggggggcagagaagctcccagaatggattgagccccggccggagccatggagaaattggaaaagcagggagcaccgagcgggcttcgccgcgagttttggagctgagcgagcgggtcggtggcccgatttcgacccggctgggtttcgcggtggccatctcgcgcgcgctcgccctagcgcttcattcattggttttgttttaaaggccctggcggtggatcccttggccgcgcccgagggcaaggggaggagagcgctgtctcggtttaaaagacatttataccggactggaccgaggccctgggaagtgtgcgctgaggggaacagccgccgag

SEQ ID NO: 1245324 - DNA, 4001 bp, Homo sapiens
gacaacgccccagcaaaacttttaattagtggggggaaaggcccaacagccaaaacgcaggaggcggaaggacttgcagaattccaggagctaaatggtgcccaacccttcacttttccttctcccagaaccttggcaaaataaaaatgtcccaagtattaatgtttttttcaggcaccagtatacaggcacaaaaaccaaggttacatacaacctgtacttttagcaaacagatctatctcctactgtaagagggagctccaggaatttgggtttgtccttgttgtcacccccaagttcattttgctgaccctgtccccagcactgtgatgtccagaggatggacccctgtgctgctgccggccagaagttgaatgcagacaaccacaacagggctggtgccagtctcaaatgggcttctgccatggcttcatgccagccagtgacaaagcagcagacaggcagagctatgcttcaaactttgatagtccctatggcgaatactgagaaaaccccgggagaggactgacttgcaggtgactggagcaggaggaacctaccccccccccccttttactggctgttgcctatacttctgaaaagttctagtgtctactccagaccaaagtcttctttgcacctttttaaaccgtcttcccatctatcgaatcaccctttccattattcccactgatgctcctggcactcactaagtctccgagttatccccatcaaccagtcctatttggttcccaagacacttctctctggactaaagcttccacgtgttaaagctgagcccaccggctacacagcacaaatacatgaaaaaggaacaaaatgtaaagcatatcaagggaacgtctttgcaaaaacagcaaaaaacccagccacaacagaaaaattcaccaaacttccaacagaggaaacctagaaccaacgtgaagcccagcacctccccaagcctttgcctacacacaaaaagccacgttctagaggctctatttctaacttaagataagcaggatattttaaaaatcatctactcaccagttggtttgagaaaatccatcgggtatctggagtaaggaggggggggagactctgaaattaaaaaagcaagagaaaataaaggcccagccatgagaagagagatagaaacttatgataacagaggcattcttttagcccaactgtttgtcttagctgtgggggttggaggcagggccgcgaggcggtgattgccttgatatttagctgtcagataaacaaaagaggccgcctggcgccagcctcggcgctccgctcctccacgtctgcggccgcagccgccgcgctcggctggcccggctggaaaccaccggctcggccggagccgcgcacttcacagttcacagggcggggggcgaccatgccccctccccgtcctcggactccagacccagctcccagcaacctcggctccccgccccggcccgccccccaggcgtgcaattcacctctgcccccgccggtccgctcggcactcgcgcgggggacacggggctgcccattcctagcgcactcgggagatgcatcccaagcgtgctggggaacgtgggggatctgcgggcgcccggggtgaaccctcacatcacactctgtgtacagagacgtagagtaaaggaaggaatggagaaagctgagaggataaaaggaaaggagtttcagggtctcagccgagaagcccaggccccagcgcagtaagaggcgacaacgtcactgaggcgccggggccccactaatctacagacttatctgtgcggaaggaaggaaaaagtaggggacacccaacttctcctgcctgtttgttcctctgcaccctggggctggcagagttgaaaggagacagatacccagttcggccttccatccaactctctttgccccaaaactccaaaggtgcgcggccacgacagtatctgggccactggtgttcgacgtgattctccgtatttactaaaggagtaaatacggagaccttccagcctttatagcacgcctctcccagccttccttggcgggcctggaccaaatccaactcggccacacacctcaacgtctttccgggtgcggggaggcgtgacccccccacctccctctgcacccccttgttgatccggaaatgaaggcgtctaatttttaaccgcagactgcaggagcagtgcccgtagaccccttcggggcaacacaggagaaaacctggaagggaacccccagggaatgccctttgagtttccccttgtcccttctctactttcagcccccagtctcttcccaggagggtatgcacactctcccaggagggtatgcacactctcccaggagggtatgcacactccccctggagggatggctgcacaaacgcactgccctaggggcttttcttccagcactggcgctccggaaaatgttgggggtagggggacaacttctcacctagttcgcagagtcggctaaggtgatgggggttgcagcacaccagctcggggttgatcttcccgtaagattcacagcaacacagcctcttgacttccgaggaatgcctgagatccggccacctgaacactttgcacagcaggagggggagcgagtaggacgagggcggctgcgcaggctgcgcgccggcgggcgcccccgggcccagcctgcagtccaggcggccgggcagcaggaggcacgcggtgcgcgtcccgccgcgggactccacggcctggagcagcagctccagctgccgctccttcagtttcttgagcaccgagtgcgtgagcgccttcagatccgcctcggcgcccccggccgcgccggcgcccgcggctggcgggtggggatggtggtgacctttggcacctcgcaccgccttgcccaggcagcatccagccctgcccgggccgccgccaccggccccatgcgctcggctgtccgtcgccccttctccccgcagctcgcctcctcctccacctccccctgcgccctcctcctcgtcctcgccgccgggcgcacggctcctccagagacgccggacgagcgcagatcgtttggtcctgaacatgcggggcgaggaggcgaggagaaaagtcgtttgcctgctaaggagcgaacatgacctccgcacaccatgaagaagtcgggcgccgagttggggcagcaggcgcaggcgacagcagcagcagcaggggcccgggcaggagcggcggcggcccgaggggcgctccgtggcatgcgccagtctcccggaggccggggcgcgcgcgggggcccgggggcgcccgccggggatcgggggcctgcgctccggctgccccaccccgcgcggcccgcgccctgcgcggctctccggccccggcgcgccccggaggaacccggccgccgcttccctggggacggccgagcctgcccccgtcggcgcctccccaaaaagaggcccccccgcagtggctcccgaatgtcgggctcgccagcctcggcttcctacatggaaggtccgcgggggcaaaaaacgaaaggcgttcggctgggctgttggaagaaggaaaaagcctctttcccccttgctaagcaacttaatttgggggtggggagaagcaggcaattaaaaaaaaaaaagcaagcgatttatttttttcctctatatccttagtaaccggatctcctcgaattccgcgcacacgaagactcaggggagggggccgagtggacttcaccccgcatgagacgtctggcaaaataagaaggctctcgcaaaacctaacaaccaaatatgcaaagccccaaatgaaaaccaccacctcctcgaacctcagaggtctgggggcgtccggctggaactggggtttaaaaaaagaaaatgtttacaaagtataacaagatgtttgatgggtggaaaaatgtatccacgagttacatccccccgtttccttgcaaagccccgctggtcttcctctccttttcttctgccaaaa

SEQ ID NO: 1245325 - DNA, 4001 bp, Homo sapiens
aaaaaagaaaaaaaaaaaaaagcccacccatctcctgagggcttcacaggtcacatggcacgggcgggtgaggaggcactcaggctggtatctcagcctggtgtcgtcatttcctccggcaggggagacagacaagatgttatcaagaagacaaaccttccgaaaggaccctttcaaaagctgccacttcccttgcttatttcatgtggtttggaggggccggggctcctccctgcacattcagggtttaaaaaataaaaccatctaacaacatcctgagcgtgttattctgctgagaccctttcctctcattggccttctttctttcaagaactctctcagccttagaaagcagaaaagatgcagttcacacactgctgccttttctccctcctcaactcctctgtccactcccaccgtactgcctgaagccccctcccttctctaggtccctctttttcctgctcaattctcattagaagctttgagtaaacaataccctcagtctcagataacagagtatatattgcattgaaatgaaaacaaacaagggtctccctaaagacgttctcagcaagctcagttcctgaagaggagagccggggagggagccgtccgggaatgaactttgcctgagccagccatggaagacacaccaccaagtagtcagagcaggtaccccacaaaaaagggtgcccctcacacaagaggatacaccacaacagggcacagcttctattcgagctgctaccacgtgatcctacaggcaaggaaatgccaaatgcccaaaactctgctggaatttctgtttttaaggtcgttttccctcttgcttcagccagttcttagaaaatctagtgatgacatggtggggatggaaaaacaggtagaaataggatttcttcagaacaacatgaaatgcgtcccatgtacataaccagtgagtttctctaagtactgccctcttttcgcatcctcaggaacaacaatgctctggctaccccgtgcctgtcagccagccccgtgaccccccagcactggcattccaggccttcacgcatacctgtgagccctgaggaaaacctgccccgctagggaacaattacagctcctactgttggcagtgctcccaccctggtgctcccagccccagacatgtgctgcaaaatcctgcagcaggctgggctgggaatcagaacttgggagggaagcctcagatctactctgaaatcccatcgtatgcttgggatctgtcttcaacaagttccctaaaggtgggtccattccctttacatcccccatgcgcaaagagcaaaagcaaaaaaagagctcaaatgcatgagttaatgacaccaaagtcaccaagctgaagccccccaagccaggagctgcttaaaaataaccgggcaacacttcacacaccaaagcaatccccagctcgctcttgtctccccgtccacggaacggatccagtgtccagagcgtaaaggactgcaggatgaggagctgaagggcaccacaatgtcaccaccgatgcatccaacttaaggcatataaaaatgagaatgaagtccagaccagctggggtggcagaaggccacccccattcctccagtctttagcaatttcaaaaaaggttggaattgccaggaaaataagagaaagcatcttacctgaaagccccccaggggccagataattcgttccccctgtttcagcggaggaaggcacagcatctggacagtctgctgtggatttgaaaaggggagagaaagaaataaatacacaaataaaaacaccaagatccatctttaagcacgctctaaacagcatgaaagacaaaccacacattccaaaaggctgactcgcggccttgatgctgattattaatggtctgctcaggcttcactgcccatcgtaagacagaccacagcaccttgtcacccgtctgggctccgggcagccagttaatcattactcgagtcaggctcaatgagactggctggaatttctcttgcattaccagtcccccattacggataccaggtggttcccaaggtcaaaggaggtttgggttggactttctcaaccctggttgctctgtcatccctcatcaagggcagaaggctctctccttggagcccatgtcctctctgccttcatccttttaaagacaggtttcccagttcttgaaaacattctcaagattgatgttgggctgccgggacttctttccccttttttaattgaggactaacttaagtagagcaaagtatacaaaatcccaagtagacgcaatgaatgttactcatgtatacatctgtgtaaccaccaccagatcaagacagagaacattctcagcaaggctccgagccggaggggaaatgttctacctctcccaggctagtccaaacccctcatctctggaaaccttcccaggcaaccccagacctgctaaggctctctgccctcagttcctataaaacatttggcacccaacactcggagtttcctcactgatttttacctttagattgcatctgcccttaactagacttctcttcaacttctgtcaccctcaggtactctgcacagtgacctcaccgttaatgaggataatgacaattccagctgagaaacagtctccacaaccgccctccaagcaattaaagcaaaacctaatgtccatgaaccacaactcattagtcccatgaaacacaaatacacaagaccctgtaagcttgtcatgcaccactggcagcgccaaactccctgaagtcctagcggagagcccggctaaggaaaggtgctgcccaggtccgcagcaaacacaacaggttggatcgtgcagacaccaggcctcctaccccaggccaccaggacaatgtccctgtgggtttccagttggaaccacttggccatgctggcaaataggaaagccaaaaaaaaagagcagacgggcaagtagcccatgggaatcctttagtggcctacacatagccccaaaccatctctgggtttctgctgtctgccctcttaatgctaagtttctctctctaactcagggtcactccctctcccacattctcaaggctggaaggacaacttttcaagaactctcctaagcgggcgaggggcagaagtggaggcaggcgtgggggtgaggtggctgcggtgggtagggggaaagaagactgtgtgtgtaatctcattttatcagggtaaagtctaattcctaacaggaatatacagttttacaggatacacttaatcaaacagaaaacaatagaggcaggcaggaaatggagttacttgttaaatggtgtataccctgcactttctaaaccattttgatggccttcatcattttctagagataggcttctcaaccctctcctccacccactcctcccagatggaagacacccccacattaaacataatgacttatccacagccactccccgccacctttggctggcagaatcccaggggcaaggtgtgtttcaaaggaaaagccgggcatctcagagcagagctgagaccacattcagggtgtcagcccatctcagatcaaaggtaagccagctccacacaggcaaccacaagcatttttgtgaaatggtgctctgcccttctgcagtggctttgatctcaagagggatttacaaacgttaattaagcctccctaccacccctgtgaagaagcaaagtatacctgttccataggcagccaggtaaactgaggcgtcactgactagctcaaagggccacccagtgagctgggctattcccaagagtccagccctatcccatggctctcactccccaggcaggctatggagtccctaccctctttcctggaggtggccaggccatccagactggcctcaaggttaaaggagccatacctccatctctcacccacagaaaagctccgcatagacagatctctgaagtcagggtctcaccttaggcctgtgtcgcctgttccccagagc

SEQ ID NO: 1245326 - DNA, 4001 bp, Homo sapiens
tcacctgagcccgggaatatttgggcctgggaaaatgtttattacagcattacttaaaatcaaaaaaattaaaagtaatgtaaatgtcaacagaaaggagagattcggttatgtaaatagtggtagcaaatggaccatttcaaattttgatttgaagacctacgtttaaagaaacttctgacactattaagtgaaaaaattaatagaatataaaacacatattttagtaatttaaaaaatggagtgggaaggaggaggaaggctgaaaagacataacctcaggtgctaagagtagtcatatagtagttttacagcgagtaaaagatttacttgtttcccccctctggttccatattttctttaatgtactgatatttttactataaacacaataaacgtaaaaagtttcccttttgtagaatggttctgaatagaaagcattcaacaaaaaagatgagcattcattcacttttcaaacacaacgggaatctactacgttcaggcacagaattaacttgaggggataggtttttgtcttcattcatttatccattctaatctgggcatttacaatgtcgcaggcacagttctagacgctgggactacagctgtgaacaaaagaaagtccttacttctccaatcgttttcattctacggatcacgatttcaattatttcagcaaccatacagttatatggtctagaacatttctaaacctatcagcctcacgacaaaacacggcttcaaagttctttttttcccttggacgctaagtgttcttaacagcttaaaaagggacctcatatggttaattcagagcatgacaatattccttcttcaaagctcaggcaatgccaccacctcatatctataaagtacatcacagtttaaagcggatttccctccacgttcattttcaaagcgaaccaatacacggggtaggtacgttttctggtgctccacagccacccataccaacctttgacttggtttggaaattcccaagggttagggctcagacaggcagaaggccagctctacctgcagagctgacctggacaagtgtctccgtgcggaaggatcccccccgccgccccgccccagaaggacctgcaacctcgacagggcaacccggggacaccccgcatcatctaatgaacttgggggagatgactccgggcatttcacaacttcccaccgtcgcaacactcacaacagagcccctgggcgttaactcccttctctcgttttaaaaaagttacaaagtaaaaacagacaccaccaacggctttccctagactgcagggccgcaaccgggctaagctcgcccagggccaacaaacgctgagctctccacccgggccggcaaggcctcccgtaaaaggagcggaggcagagggagggccacgggggagccggccctgcacttcgaggcccgggccagggcccgcccgaggcgtccggccaccaggtcacggacatggcgggcacacgggagagggaagccaaggccgcaggaccgggaccgggtgacaggtttattgccctcagtgagcaagttgagtttctcatcaccctcccgcccccaagtctacacgcgcatcccttcctcgccccttcgcgtacctgacacacacacgcgcgaaatcccgcgtagtccgagcgctccccgacctgcagaggccggtccccgagctcggactccttttcgcgccgatcaaacaagtacaccgtcctgtggccgacgcctccgccatcctcctcagtccccacagaggccccaccaggcccgccgccgtccgccgctgccatattggggaaaaggagaaaagacagcgacgcctgccgccgccgggctcagggctgaggtgcgcgctccgcgcggcgccttcagctccagctcccggggcggctcgaggcctcggcccggcgcgctgcagctcctcgtcagcggcggcggccgagcagcggcaggcgcgaggatcacccgggaaccgattcaaacgcgctcctgcccgtgcaccacgtcacttccgcggcccgccactcctgaggagaaggggacgcgcggcgcgctcctcaccgggcccgggcccagcgcctatcgccgcccacgcgagcctcacggtgcgacccgcgaccagcgccgccgccgggactgtggcgcaggaggaagagcggtggcgggtggcgggcggcgggcgacagcgaggggcggggcgaatccagcaggccgcgcgggcaggggcggggcttcgccgcgcgcgcgcccggggcccgccccctcggccctcgcgaagttggaaggaggctgagtctttcgcggctgcctgcgccctgcgggtagtcctcagaggccgaggcgggagagcagggctcgggggcagcgggggaatctcccgaagagctgtgttctctctgtggaaagggccccgctgccttcccgcctctccaggatcccgactgagcttgtaggtgccgcgccggctgactgagccctctctggctgggtcgcgtggacgcggcggcgggaagcttcaggccggcggtactcgccgggcgcagagtccaccaaagcgagcacgtgggtccctctgccgagaaaataggcgctacgagagccggcgcccctttttcctcctcatttcttagtagtactgggtgggctccagcgtgggcccccgaggcaaagcgggtccgtgagaacgtcagaagggcgctctgtgacgtcacagcgtccccgccccccgcaccctctgggggccctggagcgccgacggcattcggggtacgggggtgactccagcgccctagttttaacgctgcctgcgcttcgcggtctcccacgtgcgtgtaaattctgaaagaacccacgccacagttactagggttaaattagatgttcgcaaaattcttaaggcctaatacgttttcaatcaaagcctttaatcgtcgttaccgggcagcgtttcattaactatcctcatcgtgggcaggtagtgccctaactcaacaaataaaatgccattgttagaggactaggtttactctccagttcttagaaatcgtgaatactgtatacttgagagtggtatgtaaattcagaaacccaaaggtagcagatagaggggtttttcaaatctcagaatataagcctggataatagtgcgttttctgttttactaggtttgctaaaaccttatatggacagacttacaaagttagtgttatgttagaaacctagatttgcttgtggatgtcaagacgtttcaagatcgtggggaatgtgtgtataaattgactacacatatactagaggtagacaccaactagaacgaaattgtgaaggcgtgtttggggaacatacattgtttggctggaagtgaggagaactgagcggtagatggtggaagataaaattggaaagacataaactgtggccaaatgccgttcatgttccttaaggtggaggtggaggaaaagaaaacaaaaaagtaacccccgattctaatggaatttctttgaagtctgatgttttatttacctttcaaattcatgcgaatgtctcattctattcctttatatagtggtatttgagttaaatgactcaaagaaaaacacaaattgtttttctaattcttagttaatgggtaagatgaattgcctctctacttcagcaaattgagattagagctggagattcgtcatcagggcaatttctcatttctttgtaataccagattatacaagcacacctctttcatgtctttagaagagatttcaggatcatctctaagagattttttttttaatggtgccagagaagtgtactgcagtattatgggcagctcttgatgggaacattgatgtcttaccttgttgagagatcgagtctgaatcagtttcttaatggcagtatggcatcacttttgttctcagaatatcaaacaattttttcatcaaagaaagatgacgagtttgttctttatttaattgtcatc

SEQ ID NO: 1245327 - DNA, 4001 bp, Homo sapiens
tatcaactggctttcttattgaaaagacagacgaggctgcatgaaaatgcttagcacatgggtaggaagcagtggatgaaaatagcagaagtgggacccagaagatgaactcttttacatttgattattcagattatatgtaagttcccatcctgctgaaatctcttcagcagcaagttaacctccaacctaagaaagatggaagaaatcaagagttgaagatggaggggacagggacagtctctgtatctgtgtgctccctgaggtgggggcccctgcctctcccatctttgcactcctcatgcctactgtgtacctggtgcagaccagctgccctgaaatgtttgaggtgctgtgttaccattgcctcttttgattgcccaccgagtgcctcctgagtcatgcaccccatcacagccctcacgcaaggcctggagacaaacccagcacacaccggcctagtattaattcataaccatcatcatgtacctaagattctacctacctggatgttgattgatgaaatttataaagtattagaaggacttcaaatcgacttacaactatcacatatgaaatgcacaaaaccagcttttaaagccttctataatttgtttaagactgaagaactttaagaccattacttttatttatttatttgtttgtttgtttgtttgtttgtttgttttttgagggacagagtctcgctctgtcacccagcctggagtgcagtggcacaatctcggctcactgcaagctctgcctcccgggttcacaccattctcctgcctcagcctcccaagtagctgggactacaagtgcccgccaccacgactggctaattttttgtatttctagtagagatggggtttcactgtgttagccaggatagtatcaatctcctgaccttgtgatctcctcgcctcggcctcccaaagtgctgagattacaggcatgagccactgcacccggccctagaccattacttttaaaatgtaaaaaaaaaaaaaaaaaaaaaaaaaaaaaaaaaaaaaaaatggaaaaaggaaaaggaaataaagaagcagcagtggggatcaagacagaggaaggagatgctacctgcctgctcccatccatctcctcttcacagtcagaaacactaagaggaaccctgtgctacaggagaagacattccagaaattttgtcttaggactttaacctttccgatatatgactgggtcataaacttccttttcagaagctattgatcaccccatcacctctgcaaatggggtgtctataaatgccatctgttgcctgcacattggctactggttcatgaatggttaaatttgttgcaacttttgcttctgtcctgtaatgaaggaaaagaaactttcttctaggagtgcagtatcaaatttgtctgggtaggttgagtttgtaggtgttgcaggtgcacctaggcttaaagcatttggaggtatccttgcatctgtgttaagaggctctctctgtaggggagagatcattgactcattggcctgtatactgatgtaatgtcaaggggagggcccagtaccttttctgaaaggggcagctcttcctcagattgggaattggaattgggaggttgtcttggccagaactgagaaagaaagagctctggattgacgtctcatcttaaacttcgtagaatctggatttgagagacagagcactcacaggagattggggcaaaagagtgctttgtaggaccatacctgtgcagtgatacgtctctctcataacccaaagttaaagacccataaactcactgtggtaagtgctttcttctgcagcaaattccccttgaatatccgtcccattcctgcagagtcttgtttaaatgttcccagctgtgctatagggaatcggggaggagctgtggacacatactggtccatgtgggggctgcggcggtgaccagtgagaggtctccttgatgacagcgactctgaggacacagagctggtgctataagacctggtaactaagttcccaaggagcttttctcttctttgccaaccttgaagatctgggtattattttatgaagctggatggaatcttcccacatgtagagttctcaggtccaggtattattttatgaagtcggatggaatcttcccgcacatggagttctgaggtttctcaggttgctctctggctcagtgatgctgtgtgagaatgttcaaccatatctccacagcacaagctttggatctgatgtcaagaagcttttgtgaatattaaaaatgaaccgcatctccctgaatcaaaataaatactactatatgcacttcaatggaaataaaatctgggattctttttgggccctaagcaaaatgtagaaattcattttcccatcagacttttcagtaactttcttttaacctaatgagacactccacaggagactaacatttctttcgctgaattccaagtgtaggtttcctgggttgtccatttaattgttaaagtgagagagattctgctggaagacaagcaccatggaacagcaggaggaaagctgaatggaggttacttgggagctaccccaggaagaagcgctgtgcagaccatcatcgcagggtggagagtagccatgagacgtgtgtggtggcctctggatgctgctgtgctgcctcatgggaattttcacagatcttccactgtttgtaaatggtgcccaatgagcggaaaattaagtggtacttaacacacacacgttcaccaaatacttgcagcgttatccccatagtgtggatggcttttgacaaggtgcctgatgaagagagatgcacatagttgtgagtcccagcctacagaagctcatgatgggtgctccacagtgttggtgttgagtaaaaatgcccaggacagtatgcactgtgcttgacgcacagtatgactaagaaaatacctgttattatgtgaacagtgaccatatgcacagcatacaaatcagtagcccagtgctgttctgatggtcttgtcctgagtggtttttcccatctagttggagacaagactcattctctagaaagaagagcaaaaaatggtgggtcccaccaaggccatggacaagggaaaggcagaaacgtgcagagggagcagagacagaggaggcttgagacctgtgtggagggacaggaagggagctcggaagcccgttttgtagcagatcccaaattgtgaaagttgatagttgtggagcacacatatgcagagtaacatctagaattctcagagttggtgatttaaagaaaagagaaaaaaaaaacactgactaaaaattaatcttcaatttcccacaggccttaaacttccagctgctaaaagacagtggggtgtagggggtggaaagagacctcatctaggagggacagcttggtctatgacagttgagacaggtgccaaggagggacgaagttgctctctgccaactagacttaggggaaaaaacaaccataatcatgtttattttcatgataagcatatgcaaatcaggccactacaatctgtaaacatggtaattcctctttatggataagttcaacttaaaagttgtgaacaagagcaaaaggatatagttttctagttttctaatgagctcagagtttatgcccagttatagttgagctctggaatggtttttctagctcttcctgtccttctgtagttctggtagagaacctatgaggaccagaaacagagcaaaggcggtttaaatcctggctgaaccgattgccctccacatgacctaggacaattgacccaacctttgtaggcctcagtttcctttcctacaaaataggcaggataaccaggaggtcaaagtgaagtgacaagatgtgaacctgctctgtaagataataagcactatttgctgggaagggattgcggcttcttagctgtcctttaagtgtggttgtctgtggattaaggaaggaaaactgggtgttaattctaaacag

SEQ ID NO: 1245328 - DNA, 4001 bp, Homo sapiens
tttgagaccgagtctcactctgttgcccaggctggagtgcagtggtgcgatctcagctcactgcaacctcccaggatcaagtgatcctcttacctcagcctcctgagtagctgggattacaggcgcccgccaccatgcccggctaatttttgtattttttcgaaagaatgggtttcaccacgttggccaggcaggtcctgaactcctgacctcaggcgatccgcctgcctcagcctcccaaagtgttgggattacaggcgtgagccaccacgtccagcctaaaaaatgcactttaaattctatgacttcctatccaaagttatagttcaaataaaaatataccaaaaattaaccttaaatgtcttttgtaccaactcctccctgaatataattttttttttttttttttttttttgagatggagtctcgctctgtcgcccaggctggagcgtagtgccacgatatcggctcactgcaacctctgccgcctgggttcaagcgattctcctgcctcagcctcctgagtagctgggattaaaggcgcgcgccaccacgccccactaacttttgtaattttcgtagagacggggtttcaccatgttggtcaggctggtctcgaactcctgacctagtgatccacccgccttggcctcccaaagtgctgggattacagacgtgagccactgcgcctggcctcctccctgagtgttgaaggcttttatgtgttatttaaaacgtttcaaacaaacgttacttcagacgttatctacttgtctgtcatccccactaaccagaaaactccaacaaggcaggtactctgccttttaaaaaatcctattaccagcgcctagtatgtaacaggtgcccaataactatttagcggatattgacaatccttgactcaacaggaaaaaaacaagctaaatatttataattgctggcttagctattagaaacgtctgcctctgttccaggcttagtctcaaggaaaaacaccaaaaccaaatctacttgcaggtagtttagaattattcacatcagcaaacaagttttcagaagactcacctaactgacagggtctatttatttcttaagaaataaaacaggagaactatatattatctgagtaatcagccacaattacgttgtgataatttctgccctatattgggagattttcctaaataaaaagcctaccttaaagggaaatagaggtggaataatcaatcacaaatctaaggaggataaaaaggtaaacttaaaaatcggccgggcacggtggctcaaacctgtaatctcagccctttggaagggcgaggcgggcagaaagcttgagcccaggagttcgagaccagcctggtcaacaaagtgagacaccatctttatttaaaaaaacaaaaacttgtgaagccggaagtccttctctgatttaaaatattttgcaaacaggtttgtttccagataagctcatacagctttctaagtactgttaagcaggactggggagttccactcaaaaagaaaatgagtaactgtaagagggagatgtgtcccaggaggcgctgcatctttaaagcctctaagtcactaggcaggaagaaaaggctcggcctttataccaatctcttggaagacacgcgggatccgcgagcgacccaggcggaagcccaggcccgagcacgagctgcgggcgcagtaaggccggccgttagcaggccgcgcacacgcggctttcccgcctcctgcaaatgggagagcccagccttccggactccgggccaagccctcccttcacagcccccagagctgcttggtcactccctcacctcacgagcttcatcctagcggcgccgtcaccctctgggtccgacagcacacagaatccttcaaccgaacactgaccgactgcagtatgaatggccggaagcgcctactccaggggctccggacgtcaagagcgcgcggagcactgcaggcgcatggcggaaacgccgaggctgcgctgggccgcactctcttccggccgcgaggagcgcgactgcggcccctggcggctggaggttgccttgcgacggctgagggtatcgagggctggtcttggagaaaaatgtcctacaagagagggagattcgaagagattaaatccaattaataggactgtcgcattttgggaggccgaagcgggggtatcacctgaggtcaggagttcaagaccagcctggccaacagggtgaaacccccgtctctactaaaaagacaaaaaattagctgggcgtggtggcgggcgcatgtaatcccagctactcggaaggctgaggcaggggaatcgcttgaacccgggaggcggaggctgcagtgagcggagatcgcaccactacactcctgcctgggcaacaagaacgaaactccgtctcccaaaaaaaaaaaaaaaaaaaaaaagtactgtcaccatcacgtttctgaacagcagggcactgtgagtgcagcacctaatacaaattcctcactgaacggaaagaaggtcttagagaagcccaaagtcttatgctgattctgttccaacaccaggaacctagcattgcttactgtacctgaagcaaatcacacaatgggccaggcgctgtggctcaagcctgtaattccagcactttgggaggccgaggcgggcagatagcgaggtcaagagatcgagaccattctggccaacatggtgaaaccccgcctctactaaaaatacaaaaattagcggggcgtggtgatgcgcgcctgtagtcccagctattcgggaggctgaggcaggagaatcgcttgaacccaggaggtggaggttgcagtgagctgagatcgtgccactgcactccagcctggcaacagagcgagactccgtctcaaaaaataataataataaaaataaaatccacaatgtagcagattattttcactttaagttccaatctataagacaaacttttcagtcttcatctttctcaacatctcatcaaaatatatatattttttatttttttgagatggagtctcactctgtcgcccaggccggagtgcagtagcgcgatctcagctcactgcaacccttgcctcccggtttcaagccattctcgtgcctcagcctctccagtaactgagattacaggcgcgcatcaccatggcccgctaattatcgtctttttatgtatgtatgtatgtacgtacgtatgtatgtattttgagacagagtctccctctgtcgcccaggctgtagtgcagtggcgcgatctcggctcactgcaagctccgccttccgggttcacgctattctcctgcctcggcctcccaagtagctgggactacaggcgccagccaccacgcccggctaatttttttgtatttttagtagagacggggttagccaggatggtttcgatctcctgacctcgtgatccgcccgcctcggcctcccaaagtgctgggattataggcgtgagccaccgcgcccggcattattgtctctttagtatgtgagcttcatcaaaatttaacacaaacactccccttccctctttcgggtttcaggatgccaagctcacctggcctttttccttatcctactaactactcttgctttgttttgttttgtttatagacagggtttctcgctctgttgcccaggcaggagtgcaatggcacaatcagggctcactgcagccttgaccgtctgggctcaagctatcctcctgcctcagccttctcagtagctgggaccacaagtgcgtgccaccatgcccagctaatattttattttttatttcgtagagaagaggtcttactatgttgcccaggctagtatccaactcctgggctcaagagattccactgccgtggcctcccaaagtactgggtttacaggcccagagcctccatgcccagcctctaactactctttctaaatctccttagctggttcctccttccctatggagccaatacatgtcacagtgtttccc

SEQ ID NO: 1245329 - DNA, 4001 bp, Homo sapiens
cccgagggtgtgcgcttgggtgggaggccctgctgaagagaaaggggcaagactaccaatttagagggtaatttagaagataacgataaaggtaagagagaaacagtgtttcaaaagagatgctgaatggagttctaaaaaagtatagattcgggtgaatacctggctgacccttacccaggcacaagcggaaagccctggccaaactccagatagaagttcttctaggaatccttatcaaatccactgtccacgaaccaggttcctccaaggcaccaaggcaggcttagggagggtgtttgaaccaaagggttaaggccacatatttaatttagagctgaatggatcctagaccttaccatatccacgcgtgcacaaaacccactaggaggagaaattagaaagcccacggaaaagtattacagactttttttccggtttttgtgaaacctggtgagcaatgccattcgtgtttttaagtaaggctgtccacagcattaaatattacaattaagattcgttcattcaagtaagctaaatggatttaatgttgtggtagttggttaaaaacaagtcaagataaattgctaccttcagtggttgagaagatgtcagatattttatcttgaagtagaacgtttacttttgtttgattccaaatgtatctttatcccaaggaacacagtaaatttaaaatgtctctgggagacgttcagtgtgtaattcacgttatttctgtcattactgtgttctctgtcctcatgcacagtgcatgctgccttatccgggcagacgttgcagaaacatttgttgaaatgaattcaacattatttattttgctaccggaagactgagtcccgccacatattcccacctggcccttcattccaaacagtggggatgggaaccccaatttcacattccaactgaacgttaagttggcacacacactactgcacatatcccaagttttgtgccaggatctgcccctgagaaacgtccataattctgctccgtgagccacaagggtgtacctgaagttgccaactcccgaagcaaactgaaaattcaggcccgtgtcggtcccaggagcggtttaaattccacaatcgtccggtccctacacccgggtgagtgcgcagccggccggcggcaccttcagccgcagagcagccccggcctgcacctccaccagcgccggcgcgacctcgcggtggggcgggggcgtccccgagtcccagcgccgcgccccaggcccgccctcgcgcctgcggcctcgccgcgccccgaccccgagcccgagcccgagcccgcggaggtccgaggagggacccggccggggcgcagagccgcgcaggccccgcgccgctgcccaggcctcgcggagccccggcctctccccggcgagctgcgggcaacaaaggcggcggcccaggccggcgcgccgcggccgaagaggccgaggggtcgagaagagccgtccgcggccgcgcaggcctcggcccttcaggggccgccgcgccccggccccggcttcccggtttccgcgtccccgctcccgggactggccccggcccccgttccccggccctggcccccgcccgcgcacccgccgagacggcgcagggcctcgcgctgacccagacccgtcgctgcagccccgcgcccggcggcctccctggcccggcccgcgccggatccgccccctgcactccgaggcgaaaaccagccgtgtcccggaccgcgggcgacccggaggcggacggcgaagccctgcccctgcctcccgcccgagctccccggacgcttacccggaggcggcccggctccgcttcctcgcccagcgccggcgcgactgccgcgctcgccttctcctctcggcaactcctcctcccgcctccttcctcctcctcctccaggaggggcgcgcggccgcggcgcctcggcccgagcggggagcgggtgcggaggagccgagcgggccgccccccgtccactactcgggcccgcggcgcaggcggggcgtcggggcgcgcggggctgaggccgggggccgcgcggggcggggcgggggccgggcactaagtgggggttccgaggggaggggcgccgggccggggtcgtggggcggacggagcgcggagccctgatcccttcccccacccccgcgcccctccgctggtgcctgcaggaggccgctcctccggcccccagagtccctgtcctggtttttcctttggtgctttccctctggcgggggtggccccggctaacgcggaaaggaaagtctcctcgttccccggccccgcggatttggcggctgcggtccctgtccccctgtggcgggcggtcggacccccgcactgcccaggtccgctgggctcgcgcggggaccccggcctcgtccccgcagggaggggaccccaggacagacgcgcgcgcacgctgtgcagagccacaagtggggaaaccctccccacacctcgactaaattgtgaaaaatgctttttaaaaaaccaaacattccttgtttcaagccatccacttttccatttagtcgttttcagggaggttttgtacaaggaatagttgtttgtgccgccgaattccaaggtagtgtggtatacaagttgcatgttgggatcttgactaatttctttggaaactggctgaacatactactaatgtatagcagtaccacaaaaacttgatttttgtgcataagaatcaataggaaaatttgtatttctcttacgatgaaaagtggttaaaaaaatgaatatcattagtatttcagtaaagcttggggggagataaatattaaaatctaatgagaattattgtggactttaaaagttgtgtttcttgaatagtatggacctttttaaaagaaaaccgaaaggacagagaaaaaagggctagaaaaaaagtctaaaaagctgttcaggtatgagttggtacccgaattatatctcaataaagttgttagttacaaaaaagttcaagtccagtaatcttaattcctatgtccaatatacaatctggatttccccaagaaatctagattcataacagaaaagttggatctttaggtgatgcaaagttgatgtcatgtatcatacactatcattgtcatcttcagtttttacttgaatttattaataaaatactaccattattgttaccgtgattgaaatgcaacacaattctcaaatatctaattacagtgattggagaatgtaggttgaaatagaattgtcagagaagttagtgggaaacacaacaaacagtaattaacggtggctcatgcctgtaatcccagcactttgggaggccgaggcgggcggatcacaagatcaggagatcgagacctgcctggccaacacagtgaaaccccatctctactaaaaatacaaaaagtagctgggcgtggtggcagctgcctgtaatcccagctactcaggaggctgaggcaggagaatcgtttgaacccgggaggcggaggttgcagtaagccgagatcgcaccactgcactccagcctgggtgacagagctagatgccgtctcaaaaaaaaaaaaaagaaaagaagcaaacgtttcaatcctactgcctcggagttccagtgtctccctatattttctaaaatgacaaccagtaggagctgtgcagcagggggttagtgagcctttcacgcagcaatggggctgtgcaggatggggaagtgttgactcttttaggagacacttaaatgtatggttaagaccctggggttctgagtctggcagagctggtgcagaagcacagttttgacaggtcatacagctgtgtgacctcaaacaagtttctcagttggaacctcagtttctacttttgtaaagggtgagtgagggggctcgatattaattatgtcaaatagttgtaagattacatgaaataatgcacaaaaacccctaggggcctaatctaggtaataaaacttcatgagtccggccttgcatt

SEQ ID NO: 1245330 - DNA, 4001 bp, Homo sapiens
tttgagacggcgtctcgctctgtcacccaggctggagtgcagtggcgcgatctcagctcactacagcctccacctcccaggttcaagcaattctcccacctcagcctcccgagtagctggtattccagcggcacaacaccacgcccggctaatttttgtatttttaatagagacggggtttcaccatgttggccaggctggtctcgaactcctgacctcaggtgatccacctgcctcggcatcccaaagtgctgggattacaggcttgagccaccgcacctggcagacattgctgtattttataaatgtatcttttgtaccatttaatacactataaattataattgcaagtatttcccactaagattaagtccaagtttaaaagcaataagcccatcaaagaaacaaaaatactatttgaaatagtttcaaaagaacaattaaaaagatggctttaaataaaaaatcgtttacctgacgctaaaaaataaaagataaaagcatgtaaataaaaatgtgtttacctgacactaaaaaataaaagataaaaacgttctggtggaactgaaagaataactataaccttgaatattgttttaatcaagttagacaagggttttcattaaatgtcattttactaattcgaaattacatctttcaccttaagcattttgacatttccatcaactttctaaaagtgagggtagattgtttttctatgtttttaatagacttgcctctcaaaagaatgaattagataaaaactgatgggagaaaccttttctcaacctcctcctcctcttcaatgagcatctgagtaaaccctggctataaattactgtttaggtcataatcctgaaaattttacattagacaatgacgtaactaaggcccattttctctttgtatcccgacatcctgtcaacttttcactttacaagcctgtttttcatcacaacaaattttcacatacaggaatgcaatcagtattttctaacgtccaggagccaaaaatcactatttagtctatttttccatttctccccaaagagcagaattctcacggttcagaatcatctttacatttccgaaccgaggaaaggctgtctaatgtggaatactgctagtttcccgtgaggagtgcggtgtttccgacagcggcactgaggatccgtgcggagcccccgcgtgaagcctgcgatgccctccccaccccgtgaacccggccgtgtgtcagcagccacggcgtgaggcgcacaggccgctggcccggagcagggcccagcccaccgctcccaaacgcgccgcgggcagctgtcccgcgggcagcacaatgacgagcgccccgcggcccgcaggcccaggcccacccaaacgtcctccgcacagcggatttgcgccgtcgcccgccacgaggctctgacctccgaggggccccggccagccacggcctgacgccgtcctcccctgcgggtccccgccggatcctcccgggggtctcccgtggcaaaatggggggggacggcgggggcggaagggccggggacgctgagggtaaggcggcccagccgcgggtgttccaagaactacgagggaaaggggcccggcggcctcacccgcaactgggggcggctctcccgcgtcgtcggccgcgggcgccagggtgacggcgccgtccctccagacgcggatctgcgcggccgagcgcacacggtggcggggctggcggcggcgggcggcggcgcgcagggaaccgcagcactggtagcacacggcccacgcctgctcctcgttgatgggctggttgtacagccgcaggatctcctccaggctcagcgcgtcccgggagcccccggccgcgccgccggctgccccgggctcccgcggcccctcgccgcccactgcctcagtccgcggctccccgccgcccgccgggccagccgcctgagccatcccgcgggtgggcgctgcgctcggcagtcgcgccgtgtgccggcgtctcctcagctccggagcatcgtcgtcgcgcgccgccgcctcaccatccccggaaccgccgccgcccaacgcggccgcgcgcgccgccgccgggaccaggcgagtgcccgggaggcgtgggcaagaggagggcggcgaggacacggctgcagtcccggtcagacagccgccggccggtagcgacgcgatggcgtccggcgccccgccccgccccgccccgcctcgcgccgtccagcgccgcccagcgcccgccccttagggggccgcacgggccgggggatgcacgctctggaggtgaggaccaggcaggagggcctcgcctcgaggcgagatggccgcacggtctctagcccgcagggctctcagagtcgcaggcggtgacgcccggtcggggggcccggtcgcaagggacacacagctgggggcgcaatggtgagggcggcgacgcacggtccggaggggatgcgcggccgggtagggcgtgcagggttgtggggcgtgggggacacgcggggccgggcgcgcggtcggggggcgcaggggcaagagggtgtcgcatttatcagggaagtccccggccgactctggcggggaactgggcgcgccaacccgggtcaccgccctgcacagcgggagaagtcacccgcattgacgttccctaggcgctggatcgccgaaggtctggttgaaaacttgaacccgcctggagcggatgcctaagaaaatgcaggcccgctgaagcctccccgccgggccctgggccctgaaagcctccggcagtttcccgtgaccccgcggccgctctgcgcgttttccgatttcttgctggttgaatacctccctctccactcccatcttcagggtaagcaccgtaaagacggggatctttacgggttttcctcactgacttctcccaaaagctaaaccagcgcctggaatataaacatgtacataatttgcaggtgttagttttagcgtccttccggattcatttgtaacattggtcccttccctcactaaggtaatgtctcaagtaccacactcatcagagcatgtggaatgaatatcacagtggtaaaattgaactgagggcaattagccgtagaaagaaagaattccgcccccccaacctattaaatatgcaataaaacagataattcttaatcacccattggtagattaatttaatcgataaaattccactgaggctagtcctgtgtgaaagccctacagagtgttgaaagcatcaaccaaataggcaatgtatattaagttccagtaaaccttttacggcagttttatgtaaaatgttagaaatcacgctctcaacaattgcatcttgcggtagaaactacaacagtctatttaaataacaacagtctattaaaatgagataccatcttacatacagctgggaatggggaggagggagaaaagcaacaggacgaaaaggaaaattaagaaattgaaagagggccgtgcgcagtggcttaggcctgtaatcccagcactttgggaggctgaggcgggcagatcactgaggtcaggagttcgagaccagcctggccaacatggggaaaccctgtctctactaaaaatacaaagaaaattagccgagtgtggtgacgcacgcttgtaatcccagctacccgggaggctgaggcaggagaatcgcttgaacctgggaggtggaagttgcaatgagccaagatcacaccactgcactccagcctgggggacagagcgagagtctgtctcaaaaaaataaataataaattgaaagaggagaagaaagctccccaggcaacttattataatttcagtacgagagagacaaaacaaccccttaaagtagcatcacttaattataggttcataatctcatttgtagcaatgcagtatctatgtgtgccaaagcccagagaggcaaacatgtaattccttatgtgtgacactatatacatataaatatatctctgtcctcttgattaaaaacagacaaa

SEQ ID NO: 1245331 - DNA, 4001 bp, Homo sapiens
aaaactgaaacgagaagtcaggcgcagtggctcacgcctgcaatcccagcactttgggaggccgaggcaggcggatcatgaggtcaagagatcaagaccatcctggccaacatggcgaaaccccatttctaccaaaaatacaaaaattagctgggcgtggtggcatgcgcctatagtcccagctgctcgggaggctgaggcaagagaatcacttgaactcaggaggcagaggttgcagtgagccaagactgttctacagcactccagcctggcaacagagggagactccatctcaaaaaaaaaaagaaagaaagaaaagaaaagaaaaagaaaagagagactgggcaaggtgggttacacctgtaaccccagcactttagcaggccaaggcagttggatcacttaagcccaggagttccaggctgcaatgagctatgactacagcactgcactccagccttcagcagcctgggcaatacagcaagaccctgtcaaaaaaaaaaaagaagaaaagaaaaagagagagagagagagaaagagaaagaaataaagcgaaagaaagaaggaaggaatagaatttttaagtgtgcacaccaccaaattattcatcaagtgtaagaatcaagataaaatcttcagaagactgtatcttcctgagccacgcaactattcttaaagccaatgaggaaataaactaatgttttagtatgaacttcttaaataattttaggcaacagaaaatgctcaagtctctatcaacaactttgattaggcctcctccataactggtagcgcaggtcatgagcagaactgagaaagagaattataaacctattgcgaattgtggagaacaactccactcactattttctccataaaggcagtttattacactgagatcaacatgttatcactcacactagtgatgtaaaaaataatccaattcaacataagattcagaccaaaaaaaaagaaaaaacccatccacgagaatctatcaatctttgacaacaaaactacacgattttgggattaaatttaagtgacaagacaatgtaaactgggggcttgttctctccggaaatcaccactaccaacgctgcttctaaaagcaggctgcacacaaccatttttcctctggaaatagctaaatcccaaggcacgatattgctgtatttttttttgagacggcgtctcgctctgtcacccaggctggagtgcagtggcgcgatctcagctcactacagcctccacctcccaggttcaagcaattctcccacctcagcctcccgagtagctggtattccagcggcacaacaccacgcccggctaatttttgtatttttaatagagacggggtttcaccatgttggccaggctggtctcgaactcctgacctcaggtgatccacctgcctcggcatcccaaagtgctgggattacaggcttgagccaccgcacctggcagacattgctgtattttataaatgtatcttttgtaccatttaatacactataaattataattgcaagtatttcccactaagattaagtccaagtttaaaagcaataagcccatcaaagaaacaaaaatactatttgaaatagtttcaaaagaacaattaaaaagatggctttaaataaaaaatcgtttacctgacgctaaaaaataaaagataaaagcatgtaaataaaaatgtgtttacctgacactaaaaaataaaagataaaaacgttctggtggaactgaaagaataactataaccttgaatattgttttaatcaagttagacaagggttttcattaaatgtcattttactaattcgaaattacatctttcaccttaagcattttgacatttccatcaactttctaaaagtgagggtagattgtttttctatgtttttaatagacttgcctctcaaaagaatgaattagataaaaactgatgggagaaaccttttctcaacctcctcctcctcttcaatgagcatctgagtaaaccctggctataaattactgtttaggtcataatcctgaaaattttacattagacaatgacgtaactaaggcccattttctctttgtatcccgacatcctgtcaacttttcactttacaagcctgtttttcatcacaacaaattttcacatacaggaatgcaatcagtattttctaacgtccaggagccaaaaatcactatttagtctatttttccatttctccccaaagagcagaattctcacggttcagaatcatctttacatttccgaaccgaggaaaggctgtctaatgtggaatactgctagtttcccgtgaggagtgcggtgtttccgacagcggcactgaggatccgtgcggagcccccgcgtgaagcctgcgatgccctccccaccccgtgaacccggccgtgtgtcagcagccacggcgtgaggcgcacaggccgctggcccggagcagggcccagcccaccgctcccaaacgcgccgcgggcagctgtcccgcgggcagcacaatgacgagcgccccgcggcccgcaggcccaggcccacccaaacgtcctccgcacagcggatttgcgccgtcgcccgccacgaggctctgacctccgaggggccccggccagccacggcctgacgccgtcctcccctgcgggtccccgccggatcctcccgggggtctcccgtggcaaaatggggggggacggcgggggcggaagggccggggacgctgagggtaaggcggcccagccgcgggtgttccaagaactacgagggaaaggggcccggcggcctcacccgcaactgggggcggctctcccgcgtcgtcggccgcgggcgccagggtgacggcgccgtccctccagacgcggatctgcgcggccgagcgcacacggtggcggggctggcggcggcgggcggcggcgcgcagggaaccgcagcactggtagcacacggcccacgcctgctcctcgttgatgggctggttgtacagccgcaggatctcctccaggctcagcgcgtcccgggagcccccggccgcgccgccggctgccccgggctcccgcggcccctcgccgcccactgcctcagtccgcggctccccgccgcccgccgggccagccgcctgagccatcccgcgggtgggcgctgcgctcggcagtcgcgccgtgtgccggcgtctcctcagctccggagcatcgtcgtcgcgcgccgccgcctcaccatccccggaaccgccgccgcccaacgcggccgcgcgcgccgccgccgggaccaggcgagtgcccgggaggcgtgggcaagaggagggcggcgaggacacggctgcagtcccggtcagacagccgccggccggtagcgacgcgatggcgtccggcgccccgccccgccccgccccgcctcgcgccgtccagcgccgcccagcgcccgccccttagggggccgcacgggccgggggatgcacgctctggaggtgaggaccaggcaggagggcctcgcctcgaggcgagatggccgcacggtctctagcccgcagggctctcagagtcgcaggcggtgacgcccggtcggggggcccggtcgcaagggacacacagctgggggcgcaatggtgagggcggcgacgcacggtccggaggggatgcgcggccgggtagggcgtgcagggttgtggggcgtgggggacacgcggggccgggcgcgcggtcggggggcgcaggggcaagagggtgtcgcatttatcagggaagtccccggccgactctggcggggaactgggcgcgccaacccgggtcaccgccctgcacagcgggagaagtcacccgcattgacgttccctaggcgctggatcgccgaaggtctggttgaaaacttgaacccgcctggagcggatgcctaagaaaatgcaggcccgctgaagcctccccgccgggccctgggccctgaaagcctccggcagtttcccgtgaccccgcggccgctctgcgcgttttccgatttc

SEQ ID NO: 1245332 - DNA, 4001 bp, Homo sapiens
gttagtttcagtgccagttttgccattttgagcaagtcacttaagttttcaggggctgattcagctgtaagatcaagggactcaggatatgctcctccagaacctgccccaccctaccagtattcaaaagtattagcacaataccataatcacgcaatctaaataaaaggaacatccatttaacattaactgtcacttttttatgcacgtgaatcataatcttcacttactgggggaaaaaaaaaaccactaacatgatctgctaataaatgcagttatttcttaaatagaaccattggatgaccaaaaaaagtccttaaaaagcacgaatccagtcctcaacctaatgatttcacaacttattatctccagtatattcctcaaactattgaacttcaccattaaaatatctgtctcacatctaatatcaatctctcccattgtagaataaggcaattaatttagagcccatttttctgttcagctgagaatggaaaataattgatcagcatcctccgaattaatcattatccatgataaatatcttcagacttatgtaacagaaactataaaaaaaaaagaaaaactctggacttttcctgtgtacaaaaataaaaaaggtgagccctccagaaacgcagttttgcgtgagtgcgtacttggagctgtttgccaggctgcagacttaactcagagcactatatgaaagcactgcatttccaggcactgccaagcccgtttgttcataaaataaagcaacagttgggcaaatgtcaaaagccacactacgaagaacctgacagtaaacagaaaccgattagcataatctacgtggtctgagtggtactaaaacttgacctttttttctattttgatctttgctacacagcataaaacaaaacaaaaatatttaaagtaaactgctaaatacagcagcaacttctgaaagtctaggtcagtaaaatttagaatgctgccttgcttgcaggcaacaaggggtagaggacaataaagaacctttgtgttccgactggcagtaacacagcagcgactgcagcagctctatcctttaaaaaggaggcagctccctgtgtatttatcacgacttacattaactggtcacgacagtctccaccattagactgtaagctccaggaaggcaaggaccatgactcaccacagtagcctcagcgcctaaaataggcgctcaataaatatttgctgcagaataaatgaataggcggcgatgcagaagggaagaagaggctctggggacaaccccagagtccatggggaccttccttgcccgctcctcaaactctatactaaggttccctccagcgttccccaagtcctcctgcgagctcccaaactcggctgagtttgcagggcggcgaccagcgcaccgacttcccctctgcctgccgcgacccgcggtggggtccgcacgaagcagccgcggcacgcggggcggggcgacgccaaagtaactccggagcaacgcgcggggccgccggtccgacacacgcccttccctgagcggccgccgccgggcgcacgcgccccgcagcccgaacgccgccccatccctagagaaatcaggcggcggctgtttgggcttttgtgtctgtagaaaaacgcgtaaatgcgtgaaagactccgagaaaaaccggttcaccctcttccgccacccactcaggcacagccagcagtccgtgttcccaaacactgctgattcccagcaggcccgcctccgcctcggcccggtcgactccgggcccggcccttccccccgcgtctgtctctcccagaggcggtaagggcctggcatccgcaaccccgcgcggtttcaccttctgaatcgcagcgggagtgatctcccccttgcctcgctgcctcggggccgcgaaagccacagacatgttgccgccgtcaccactatcggcaagtcccgagcgctccgggtgaacggcaaactgggggagagacgccggcctctcgggctgaaccacctcgggaatgcggggaggggggatgctccggggccaagcggacgggcggcggggcaggcctgaaggaggcactctggccagggatgtctcgcttctgcgcactctgggggacccctagccctggccgaactttcttgaccgtccctgcatcccccgagctctccttatgggcaccccctggccctttgcgctaatggtagagtcgcgccctagtcctccctccgcttcagcgattcaggaaatggtcccgccgccgcgggagaaggagaggctggggcagcccctgtcacaggaaatgcgagcggcccaagccggcccgcccccttcgcgccgtggcaacttgcctccctctccggccctctgaagcgtctccccgactgtgttgcagagcgtgccctagacctagttcagtttttccaacttcatccttacttacgcctcctggcaagagtggccgccccgagttgtcccggcagcccggagaggggagggaggtcaagactcgggagttcgtgcaaatccgtggagcatctgccgagatagggcagaggtggaaggacaaggtgaacgcggattcgctggtttaaatggctcggctacgccccaaatgcgcacctccgagtccacagtctcgcacgcacgcacaaagtcgtgcctaacaattggaaagtaaccctgacccgaaaccgggacaccaaggttgtgtccagtgctcaggggcaatcggccagcttggctggagcggacagagaagagctcgcctcttgggacaaacccttagcaggaaagtgggtcgatttcgtctgacttggctttttggaattaagttgtgaaacagggcatcctcactctctgttttttaagagagtacttacttagtgccttgtaaattaggcccaagctgccaggcttcaagtcagtgtaagggaaaaaggcaaagttttcaaattatggaaggaacacggacaaatgtgggttttgtgttgccgtggggttttaaagtattctgtaaatttagacttccatataacacaaagggaaagtttatataaagtgttacccaacgttaatgaataataaaaaatatttccatttttatataaattggaaaaataaagaaaaaatacattattttaaaaatttaatcacttgaggccaggagtttgagaccagcctgggcaacaaagtgagacctctgtctctacaagaattttaaaaattggctgggtatggtggtgtgcacctgtagttccagctactaaggaggctgaggtggaagaatcacttgagccaagggggtggagactgcagtaagccatgactgccccaccacactccaccctgggtgacacagcaagaccctgtctcaaaaaaaaaaaaagaaaaattaagtatcaaataaatgctcttcacaaaaatgtcaagaatgtcattgattaaatgcattgtttgttaggctttatactggaaacctagggtacgattgtgaataagctggacatggaacctcctctcaaggagcttatacactaatgggactaacagaccagaaacaaacaaatatgtatatatgcaaagtcccaagaaaaactagccaaaaaaaagggggaggaactaacagaatgacaggaacacttacatgagttagtgtgaaaagtcttcccgattatatttaaactgggacctaaaggatgaagactcaagctgtcataagaataaagggaagaaagtttatgctgctactgacagtaattactcttaaaaatttaattgttatctttcactattgtaagccttgaagaaaacactctggtatagctggacttaaggtaatcacaccaaattggaaaactgtcaaatttggaaaccaatacttgtctaccactatcactgtgcactcaacacctagcatgcagagtcatgtctcaatgctttacacaaaagtaccttagtacttagtagctaagaacagtatttcaataggaaaca

SEQ ID NO: 1245333 - DNA, 4001 bp, Homo sapiens
acttagaaggtttctcttggagttcctgggtgagagaattcgtaatgggcacgaatgacgggtctagaaacttcagcgcaaattgtgacctggagaggagcatgagcacagacaagcgtgctggcctcagctcggggaagccgaggtagccattaaagtgcagcggctggggcgagggcggctggtacgcgtgcgggctccgttccgtcccggagcccctctcatttggtccaccctctgctcccacacacacccgagagaaaaaaagaaaactagggaaccccatctgcattgtccatccctccgggtgccggagagaccataaaatggccgtcatgcggagagcagggcgcacgccgggcgcagggctggagcccgcggcgctgcgaggaccagggaatcagcaccgcggacagcggccgccccgccagcctgacccgctacgcctttgcagccccatagaattgtttttggagaaagggcagaggaaaccggagacccagggaaagtctgggggtggttcctgccttaacctcttccttcccaaacccacgtccgatttcacttcctataacttggctggggacccccgggggccgccggcctactccgctcctcggtccaggcgaggctcctctgggttcctcgcctcggtcccagcttggaccacaggtggcactttgtagttgccacctgcccgtcaggaggccctgctgggagagttcccggggtcacagagcggggcgggggctctcgcagagcggcgtcaagctgcgcctggagccttcacaggccggcccagcgcggagcggtgactccgacctggcgagggtgggcggcccttccgaggctcgcttcccgcagggggcgggggaattgcagaaatcccggaaagctggtggggggcggtggctgcgggggaaagggttgagagagaacgccccaggggcttcctgagaataaacccgcgtgtcctttgataggcgtgggggagtaaaggaggagggcgcgaggggagtccggcgcctgcgccattaaaccgccagcaccgccccgggcccggcccgcggagtctgcggacagggcgcggggagggcgctcccctcacgcctgtccatctctgctcgccgccccctcccgaacaaacacaccgtctttccctccaccctcaccctcctgaaagcctcccccaacccccatttctgaaatgagggaagggatgctgaggaagaatacgagaaatgcaatcacatcgatttggacagcggcttctaggggctttgggttaaaaaaaaaataacagggagggggaagggagaattagagagaggagtggaaggaccgcgcagttatctggcccaaagagtctcggagaggccaaaacacccctcccccacgccttcccttccccaaacaccccatcaaccaaattcccgagggcactaacacagaggcccgcactcaccggaatcccgcgtggaacatgtacattcggggcgcccccgggctggcgtacttgggagtggtgaagatgttctcctttttcagggacacgtagctgatgagcgataaaatcagcagggcgacgctgagcatgaccagccccagcacactggcgacccgggccattttgcagtttctcatcccgggctgggctgggttcagggaaaccggggaaatcggtccattgagcggccagcagctcgctggcgtgtatatatgtgtgtgtgtgtgtgtgtgtgtgtgtgtgtgtgtgtgagcgcgcgcgcgtgtggcggaggagggggacccgggcgggggtggggggaggccaccggggccgggggttggggctggcaggagccccggagagcagcgggaccccgtaggcaggggcgcgcggggcccggtgccgagcaggaagatggaggggctgcgcggcggcgtggcgaaggagcgcgcagcgccgtgcgtccccggccgccggctcaggctcccccgcgcgtttccagcgaggctgccatctcctccgccgcctgcaagataaatgtgattggaataatgttacagttcgatctaagcacaggatttaattaatgaactctaatctcccaaataaccggggggagggggtgcaggagagggagggagtagagggaaatggtggagggagggggactgaggctgccaggctgcagcccgagcctacggcctccccggctgagggtgccggcgaggaggtggctgtggggagacgggatcccaaacttagtttaatggaccattcattactttataatatcacggaatagagagacaaataaccggatttgctgtcctggagggtaaacaacagctgggtgcttctcaaagaagcagggaggatggtttttggaaggcagctatttaaaagcatctcccctcgttaaggcaccgccccggccccctgcccccgccatcctcccaccccaaaggaagctccaaacagcaactgggcctgcctgcctcgggagcccttaaaaccttcttggaatttgccagaatgactcccctgtgcgccttgtatgcccaccacatacttcacttatccctaaagggtgggtagtgcctagcaaagttgcgaggtgacctgtgagtcgggagggcctgccttcctctcccctttccgtcttccagtggatggacaatgtgcttgcccctgacttgactgggcctgttgaagtcagccctggtttaactctccgttgcccactcttcagatccatccttcgggcctggtctcctgatgggctaggtggcctgagcctcccaaaagctgaggccattaaaaaacacagaactttttatgaagcagcccaagaaccaaataatagaggctgcctctgagagtggaaggcaaacgcactaacactttgcattgcttgaccttaaatttattttagcatattcacgtgtttcttgtatatccattagaaatacaaattaatccattttcagtcatgcagttgggtgctcaggggaaactagcatgtttctttagctctgtcctttgcaattagcttatggcctctgctaccctagctttactcttcgcttggtcctcccaatactagttaataagcactaatgagggaagctaggggtgagaaattggcgtttgagttctgataaaacaagttgagattcttccaagatggttatgacttctttctctcctgaacttcttgccttgtaggctttcatggacctaatgttattatctgtctggaggctgtaaattccttgaaggggtgagctcctggattgtaagcttcggcagagcaaggcttgtcttacttctccaatactgtctcttacacatgtcatgcttgctaaatgtttgaagacctgatgagctcccttgggaaacatatctgtgtggttgtggacagtggcacaaagaatgctcctatttgtttccagtgacaaagggggtcactttgcacccactagagactttttaaccaaaatctaaaagtgtgtgtcaggaggacacaaataacctcctttcctctgtggggcttttttattatttaaaaaaatttagaaaaggcttgcatgcctggatatgatgaacacttgaactgtatttttttaaattgctattttttaaaaatgattgtatgagtaaggtgtaaaatgccaaagggagtaagatcttaagagagccatctaggaatgacacctgttagaaaaagtcttcttgaaccagaaatcaggaaacatgctatggagaggcagcctggggtagtgttacaccttcagactgtggagccagaaagacctgacttcaaaagcatactctgggtattatcaaaaacacaaaaaataacaaatgctggcaaggatgcagagaaaagggaactcgtatacactgttggtgggaatgcattctagtacagccactatggagaacagtacagaggtacctgaaaaaaactacaaactgaactattataagatccagtattcccatgactggg

SEQ ID NO: 1245334 - DNA, 4001 bp, Homo sapiens
ggaaggtccggagcagcaactggctgtaaacaaatgttcagaacaaggtgcctcattactccccagctccgggggagttacaaggaggggaaacagcctaagtgctcggcttttccactggacagcgacacctagcagcgatcctcaccctcccaccttcgtgggcagcccagattgggagcacccatacctgatgtatccacctcacccaaaggatgagaagagggctgtttcgttatggggaagtttagagaagaaggtgggatgcttacttagctagagagacatttattttcctatcaacctaggggaggggcggtgagagtagggagacactagcagcaaactaaaaaacagcccagcagctaggagagagggctcttgccaagagaggctctgatatgggtgtatcctagagcaagaacctcccctaatctctcaaaccaggcggaggaaccccaagtgtttccttaagccagcagagccggcagaaggaagtggctggcatttcagtgtatcttctgcaaatagagaggctgaggctgtgcccgaattgaatttctgagtgacacctcctactgctctttctcttggagtttaaccgtggattggggtggagtagggggagagcccaacgaggggttaacttatgctgcagctctgaccttttgcgctaaggatgagaaaaaaaaagccatctgtttcagaaggaatcaggttgttgagtttcacagatccagtggctgtgggattgtaagacttcactatcactatccctgtcgcatagccacagcccacactaccacccccaccgaacccgaagctcctggaggggaaaatgctttttctcccaagggtccttacgaaagttcaggactcgcgaggttataaacaaacaaacaaacaaacaaacaatcgatacgattttgagccctccgaccccggagtccaaacaaatggccatagaactgtgggtctggaggacaccgctccgatccatgcggtctctccgggtattaaatggatttatcgtcagcctggttgcttggaattctattctgtccttcatttttcacagcggaacaaagttgtctggaccctccagccagcgctgggcagaagcaagcaaggatgctcttggaaacgcggtggcccaagcctaagcggccatgctcggggctaggagcggaccccacggccactcaccccggggcgctgcgaccgaagctgccgcggccactgccacccgggggctcgccggccggctccgcgcatcccgccctctcaatggactttcttacctcttaatgtagttcctgccatacaggatctgttgcagcaaggtcaccaaggcaaaggcgcagatgaagatgaagagcaaagttcggctccccaacaaatcccggttggccgaggggtccgcgtagcgcatcctggctaccgggcgccgcgggcgcggggtacggggcggccaggcaatgactcgcggggttccggggccccggggggcgcgcggccgacttggcgcctcacggtgcggtcaggcaggcgggggacttcgaggggcaaagtttctggttggcgcggccggagctgggggcatccaagcgtcgcaggcgctggggcggcaagcaggacagggccggtggcagggagctctgccgcggccaggggccttccccacccccgggtacctttacctccaggcgccggtgccgggtagccgccgatttccccgcggaggggagacgccaggtgccacgagccggaggcggcccctcccgccgaggtggcggccaatggggagcaagacccgggctccgtcccctgtgcgccccagcgcgccgcgcatcgacccctccagtccggcgccggatcgcggttgcccagcgcgctgtgccctgccgggggcgggccacgtttgatctccgggcccgcagcaagggatcgcgaaggttggcctccggttctgccgatagggacggggggagggggcgtacaaaacacccgcgcagtctggctaatgataggcgggccgtggggagggggaggggcggagcgcaaaacgccgggtttgaatcttggaattaaaaagagggcaggggctgggcgcggtggctcactcctgtaatcccagcactttgggaggccgaggcgggcggatcacaaggtcaggagttcaagaccagcctggccaatatggcgaaaacccgtatctactaaaaatacaaaaaacaaaattagccaggcgtggtggcacgcgcctgtagtcccagctacttgggagactgaggcagaagaatcgcttgaacctgggaggcggaggttgcagtgagccgggatcgcgccactgcactccagcctgggcgacagagcgagactccgtctcaaaaagaaaaaaaaagaaaaaaaagagggcaggaagaggaaacaacagttgcggagctggacttgatggaagggagcatttgcgtgcggcgcgcagggcactgagtcaccatcgtggccgcgtcctcgcgctctcctagcgatttctccggagaaagcggagcaaggtcagccgggcagcccttcaaggacggcgcgccgctcctgcatgctgatggcctgcggggctgcctgcccgtgccccggcgcccaactcctacaaggaagaaattcaggggctccccgcccccgccacagtcctcttccccctccccagctgcaactcggcagccgttcgtcaaagaccctgttgtcaccgagacactgggaccttgtctcatccttggaaccactcgtaaatcttaggtcaggcagccggcagccttcggggaccacagtccccccaaagctttaggaagccagttactacatccggaaagattcgtgcttcagaacgcaagccagggagaataatcacagaaacgcaatgcgaatgtcgtgcctctcagaaattcttagcctgaaataccgtccccaccccccaacccggccaggcgacagtcctgtcatcctaacaccgcagaggctccaagcgctgggagtcgtgtgcccgcggcgctcgccactgaggccggttggaagattctagggtgccccttcccaggttccagcaggcactccgggatgttctagagtcaggccagggattcaacagcgaacctgaccgaaactcaaacctcagcacaagaactttgatgggggaagtgcccagactccaatactctcgaccttggcatttagtagtttcttctttgaactggaaagatcaaataatgcacagtaaaatctcatgataagggttccaccaagaattcgggatttgtgttaattcataaggcagaagtggcccctgtgctatccatgaagagtttctgtatttctctgcaaggtcacaggtaggctttttttttttttttttttttttttttttttttttttttgagacggagtctcgctctgtcgcccaggccggactgcggactgcagtggcgcaatctcggctcactgcaagctccgcttcccgggttcacgccattctcctgcctcagcctcccgagtagctgggactacaggcgcccgccaccgcgcccggctaattttttgtatttttagtagagacggggtttcaccttgttagccaggatggtctcgatctcctgacctcatgatccacccgcctcggcctcccaaagtgctgggattacaggcgtgagccaccgcgcccggccacaggtaggctttttaaccaattaaagaaaaactccaacatttagagggcccattattataataattcctgtatttgtttgctgtctggcacataaaaacgtgcttcacttgcatatattaatgaattttcacctcctagcccctggctaacccattttacagctgaaaggactaaagcaacagatgcccaaagtaactcacctagcaacaagtcttgggattctgagatgaggttctttctcccacacacacaggcaggctggcttcttgggagtgggacttgt

SEQ ID NO: 1245335 - DNA, 4001 bp, Homo sapiens
agccataagataataaatgtttaagtagctaagttatgggataatttgttgtgcaccaataaatacctagtatacagtgcatataaatttcactcaaactgtgagtgcaaaaagtaccaattgtttagttttgcatgtaagagtaaaatatctctgatgaaaatttccagtaaagctttagaacagcttaacagaacctattctttggctctaggcatttgtatagcactctctaaataaatactcaataattacttgtagactaaataaataacttccaagcttttaaaaaatgccaaggttgctgtctacactggtctgatctgtaagataccaaaaagccaaattatccaaaagttaattcccctagtgtacctaggcttgaccatacccactcctccctgtttatttttgaaagtgcctgtattagaaccattatttcaataaggtagggattattttcctgatcattgttaaagtgagtgggagaaagcatatcagctttgtccaatggtaaaaaattgggctgaaatataatataggtaaattttattgaaattttaaaaaagcaagaaacataaaatgaggtagttgaaagaaggagtggactccaaaagaaaaggaattgaataaaatttgatgatctgatggccctgatgtactatcatgagcaataaatgaactctgaaagattaagctaaaaaaagtcaatatactttcccttagtgtacttgtatttgaaataattttatccttaaaagtatatttaaaagaagcatacagaaaaaaatgcatatttaaaatgaggaagtaggctgggcacagtggctcacacctgtaatcccagcactttgggaagccaagacaggcagatcgcttgggctcaggagtttgagactggcctgggcaaccccatctctacaaaaacatataaaaattagtcaggtgtggtggtgtgcacctgtagtcccagttattcaggaggccgaggcggaaggactgcttgagcccagaaggcacaggttgcagtgagctgagattgtgccactgcactccagcctggtgacagagcaagaccctgtctcaagaaaataaaataaaatgaagaaatacactttacttgttagtggttcatttaatggacacatgaagggtttaaaattccataaaatattactgttagcaagaaaataccaatctgcttttatagtaattatttcttgaagtgaaaatttcctatttagtgaattagtaattagaagagattttttatctgattgtcatcagatttgaaaatagaagattagatggtatctgattgctgtattttattattatcacatttctgcctagtgacttaataatttctatttattactataaaataatttattatagctaatgaagcagcactgaaattccagatacatcaatggcattgaatttaaaacagtaattgtaaatagaagattgtactcacagatttccatggaattttctagaagccttactggaaacagttatctttttctcaaaggggaataaaaatccacaaataattagctgtcaaatgcaggaaaaatgaaaatgaaaaactaacaaaagtaaaaacacttttttttctggtttgtaaaagaaaaaaatatatatatatatttttcagagacagggtctcactatgttgcccagtctgtagtgtactggctattcacaggcacaatcatggtgcatgacagcctcaaactcctgtgctcaagcagtcctcctgtgttagcctcctgagtagctgggactataggtgcacaccactgcacctggaacagaaaatatttttttaaaaaagtctttacaatgaattgtttcttacttaaaaacaaagtcttgaaacataatttaacttattttcttactgaagttttaaccactttccagcctgatgtatctcgattataacctaaaacttcttgggcagtttgttgggcaattgccttgaagtccatctatctgcaagttttaaaaacaaacaactggtaagaatataaccatataaaaacttaaaaagtgctatcttacattttaatattatttctataatgcctgtcacatagaaatgaacataattacttgatgaatgcatgtatgcatgaacccctctctccttacagtctttcaaatgagaaactgtggtatagtggaaaaatctagactttgaaatcagaaacctgggtcatatcttgtctctgccacctattgtgtgaagcatgttacttaatatttctgtttttccatttctctcaaggtaaaattaggataatatatgtcttgtagaattagcgtgaggattagatgagatgatatgcttaaggttctatccagtgcctggcatgcgatagtcattcaataaataattttaatttctaacagtttaatcacacgtcctttgtcttgtgaagcattatgagctgttggttatgtgttcttgaggattatttaaagtgcgtagcagtggcactacacgatctgacccctggcttcctcttcaaatatacctcctaccagtcttcttcttgtccacttagctccaatcatttgatctcctggctgttcctcacatacaataaagcaatttctgacttcaggttctttgtacttgctgttccttctgcttgtcactgtcttctgcaatgtgttcatataactgactgtttcataggtatctttgcttaaatgtcacctcctcagataggatcaagtttaaatcaactcaatttaaacacattgaaccctgcttgaagttagaaactgcaatggactgaatgtttatgtctccctaaaattcatatgttgaaatcctaactcccagggtgatattaggagatgattaggtcatgagggcaaagcccttatgaatgggattagtgccctcacaaaagagaccccagggagctcaatggccccttcttccatgtgaggacactgccagaagttagcagtctgcaaccagaagagggccctcaccagaacctaaccatgctggcacccagatctcagacttccaggatccagaactctgagaaataaatttattgtttacaagtcattcagtctttggtaatttcttatggcagcccaaaaggactgagacaggcactgtggtagatgtagcaacaacagttgagtaagatactagacataactattactgctgtgaatgagttccggaagctgcagtctcactggtccttcgggtcatcatccagctttcagttaggggaagctggcaggtaaggtgaaaacagaactggattcaaatcctgactttgtcacttagtacagctatattattttggataaattgcttaacctttgaacttcaacttccatatctatagaatggggataataatatctatctcaccgaatcattataaggattagttgagttaatatatgtaaaaatgctttaaacagtgtggagccctatactaggttatcaaaatagttagtttctctttaaaaaaatggacacatataaatccatcatttaaaaaactctccaaagatctgcttccttaagcacttaaataaaccttcttaaagtttaattattggaacatttcttccttagctctcacttaaaactcttcaggttggatcataaatctattttctcttatttaattctccagcaaggcacaacaggtagttgatagtctctatatttgaaaagttttagtaaaccattattataacctcctctttcctagcagagtcctggtttctttacctttcctgacagatctaatgcagaattttagtaactactggggctcctctccaaatccttgtggaaatctccatatctcttaacctgtgaggaaacaaggcagaagtagaattattttgatccatgaattaggtcaatatatttgataattttctttatatcttctcagtgtcctttatctatactttgtcttcattaggaaacatttgctaca

SEQ ID NO: 1245336 - DNA, 4001 bp, Homo sapiens
ctcagagaatgtaaggttaagaaaagacaaatgaaatagaagataaaaaggccaataaaatcgcaataaaaatcctgtattttaatgtacagaaactgaatcatgtaaagatgaaataaacctttgacttctccaggtggaaaaaagaaacagtgactactacagtataaagcaagagctaaagataatcagctaaacttggtatcagcttttcagtttttccttctattcaagtctttgtgaaaaaaaaatgcacccacattcctggaccataataacccaaggccagggagcaaaagcaaagtcatgaactgagagagttctttagccaatgtaaaaacaataaaaacagtagaaaatcattttttaaaagtagactgatagtccatgctagaacatattttcactggcacagtctctaaaaattcctccatattagaaaatcattcaggtttcaaatgaagaattgggaataaatgtcataccaaaataaacccaataacccaaatggaaggctgggaaagaaattcatttatgaacataatatcacaaattgtccctattgaatagttatgtcaaatggcaaacattttctataacgtggaaacacttatctactccctatgtattctctactgataaggtcttacaatcttgaaagtcaagatcatagttattttactcagcttaataacaattatcacacatctgtagatatcactcctcttcacaaccttctatgaaatttcatgatttaaaaaatacgtgtaagtaaaattctgacctttttcctttggaatatactgagatctaaaaatagtacttttttactctatgaagtacgtctaattttatgtactgaaaccaaaaacttggtgtgagaaaaggaaaactgaacgggaaaattggagccctaattcaagtttccagcagcttttagctaattgtgcaacctataatacttccctcatctctctgggctttggttagctcagcagtgaaatgaaatgggctgagccagttcattttgaaactctctttaaccctgctaccatatgattctgtctttcactagcaacatatttcaaggatacaagaaaaacatagcagagaaaaacacccatatggtacgccctgtaataaaatatacattgccaaaccccaatagacaagttgctttttttaaccaagatcaaaccccaatgtaaccagagatatatttatcttctcctaataaaatatagatttacctacaaataagaatcacctacaaaatagatgaaaccaacatgggaaaaacagacccctttttctttactcagtacatgctgcaatttacagaagtacctgaaaatttaagaacttcctgaaggtaaattctccctaacagaagacagtttcagggagagagataccaaggaagggagagaagctgcagaaataagccacaattgcctgactgccattctcattttccttttaaattaactacctaggaaatctgtattcaacaaccgggcaaaaaataaatgaataaacagtccaccccagagtattcaaggaataaccgcagtcataagttcagtaacttgcttaccaaattcttcccggctggtggtgatcggagccattttttactgcgtgttctgtccgaggtgctgaagggaaaactgcctggctggattcacttgcctggatctcaagcgccggctttcggagcgctgaaaacaacagcgcagagcccagggcaccagctcctggaacagggaggaggcaaagagggaggtccactcgccctcgcacagtgatttgccacctcggttcctgttttggctcttctgagaagctcgtctccgagactccagacgtggctggaacccgaattgacgcaatcctgacgctacagggctgaaatcagcacctgcccccctcccctcctcccttcaagctttccttcttgcttcctccctcctctcttgaggattcaacacatgctcatcaattattttaactgttggaccactagagattagctttgctgttttgtgggggctcagaggctcaccgagataagccccgaaactgatccctgtcagttcctaatataaaatctcctgatcacctagatgaataaaaatatgtttctgagttttcagaataacgtaacttacagaggagaagtttctgcttcaaattactctttttaacatgcaaaaacatgttttcttgctttttaatttttttctttgacatgttatacctatgatacttattacatttagaaaagattcactacaaattgatgcatttgatataagatagttttcccagtataatcctttatgttctaataaattattagtctaaatattttgctggaacagttgatctttcctggtctctcagctctcttccctttaatatctgacatttgaccagttaaagcacttaggaacagatggggataattccttggatattcagagtcactctcagttatgacttttgcaaataataaggcgcttctgaaatgacatttatggttaaaaggcctgacttctagtacgtttgtacaaaatagtttccaaaatcaggccaacatctaaagtaacattggtaacattggttatttcaaaggaaagcattcctttttctaaactgatgatattctcggaggtgaaaaactgtgaaaaatatggtgtcggattctgattcattggaatctgaagagtgtgcctttctaaaacaaatgcttagcaatttttcaaaggaaagaagtcaagctgtaactccaactgtcaattattgctctgcaaagaatttctttgctctggagttaataaggaaatggcattcagtgtgtgctgggatgtgggagaagggatacagggtgagtctcagaaagctactgtgcaagtgacaggtccctgcacattggctagcagcagcccagagcatcagggctctgtctggggagaaattggcttcagttctttgcatcatggaaaattttataaaccagtcttttttctttgctattctatttgctcccacatacttggcattggagtgttcctctaacagatttttttaaactttatatcttcatgctttgaaaacacacaaactaatttgctgtatttaatttttctgctggcagagtctgtggttgtgtctttatcatttcactttattcagattacctatttccttaattatgcatgcatgcaccctgtagggttgtccctagaaacaaatatccattaggttaaagaataagtggcatttatttgtgatgcatatcataggtggaccaaatacatggtgtgatgtttactaaagtatatattttctagctaagttattgctaacatatgtttaagctcatttgttgtaaacataaataccttatgtgtttgttctataaattagtatctcattaattttaccttcagatggtataatgttgttatctgtaaactgtacagattgtttaaactctatttctacggaacccaccccatcctttgctgtctgacatctgaggaaacatcgtgataagattacctcttgcccagagctaatgctattgtggactaagtaactatttcattgcttgctttataagcaaactgaaaagaactgttattaattaaaatgcctgaagtttccctcattttcatttgatgaataacattttaggtattattcaatctctttagacaagcttctagcaacaccagatgaggagtgggcagtagacagaccccacacagagaaaaacctgtacgtttttatgattgagattcacaccctaccacattactgaattattctttttagatccatcaaacaagtaaccaatttactgacgtgcaaaataccgctctagcaggggagacttgggaggaggagttgttgctaggtaaccactttttcaccacccaaaacacacagcctcaaacaagttcttgctttggcaaacacagaccattctgtgc

SEQ ID NO: 1245337 - DNA, 4001 bp, Homo sapiens
ttgttaaaagtgcttagcatgataaggccccaatcctccagtaagtgattcactctcacttaccagcaaattttcactcttgacagttctttctttggggggttggggagggatggggaggaacagagtctcactctgttgcctgggctggagtgcagtggcaagatatcttggcttactgcaacctccacctcccgggttcaagcgattctcgtgccttagcctctcagacagttctttcttaatactttttttttttgactatttataaacaaacttcagtgactagacaggatttacagtttaacaaattagggggtaatttcattctaacacattcagaactactttataaacatatatgcagaataacaactcagaataacaatttagaactgccaaataatgtattcggtgctgcacactgccgtaacagtgccttaacaattttacataccttgtataccatataaaactgaaacagaacttcataaaaagtgaaatctatccacaacgtgtatgactaactacaacattagatacaaaaagggtccctgtcattttattaggggatatagaatcttttgaatcaatgcttccccttttttaccatctttgcagttcagagttccaattactgctaaacaaaattaacagaaagcaaactccaagagactttcagtaaagaaaggctgaacaccccaaaatcattcagcatatttacaatatgtaaattatcacaaagcaaaacctttatacaaaccatgaaatacagcccaatagagtaaaaagccctaggatagaaagtagtgaaagactcattaacagtagcgttgacacatggcttcaattgcaactgtaacaattgcatgactgatctgtttgtcaactgtggcacgtgttcccagtcaggggttctgctaattgaaagttagaatcataagacatttaaagattgtgcaggaacagcattattcgtacttggtactagaaagcagtaaaccgattctgacttggttaaatttaaaaatctctttcagttgtaatacacaagaacttcactgttaggccgtacgcggtggctcacgcctgtaatcccagcactttgggaggccgaggcgggaggatcgattgggcccaggagttcgacgtcggtgagccatgatcgtgtcactgcactccagactgggcgacagagcgaaaccatacctcattcgttcattcattcattcataattaataaaataagtacaacgcacttctacataatctaagcgtatggaaatccacggtataaaccggtccatcctccacatggaaattaacttcggctatattatctcctccacctaagagccagtgcctgaaagcccccccgaatacgctgatgtagctttttactgtatcacttaggtgaaaagattctttccttaaatatgaaaagaaaaactatgtagtaatgacacaaaaagaatatgttaactgtaaagtcaagattatgaaatgttcccgtggctcagtttttttaggagcaatctggagctgcgaattttcccgtcgccgccagctggaccgacagacaaggctggaaagggttatcaacatacctggaggaagctgcaaattagcaggaaactggattgtcgtggtgttgggggctttcacggcgactatctgaggagcaggcagcctagggccgctgctgactttaggaggggcgctgaccggagccactttggtcaccagggtccccacgggggaccgcaggggctgggacgccgtgggctccacgcagacgctgacaggagccttagtcacggcgcccagggccaccggagtgctctccacccgcaccggcagcgccccggccggggccatggtcacggtccccgaggcgctcacagcagccgggggagcggcgccggcgggttcggtgaggccggcgggcatcccccaggggctcagcggcagctttggcgctgcggttccgggagcagaggtgaggggaggcttggcgcgcggcagccgactccggtgcggttcgggttccacagcatcgctggggagaggcgcgggggccgcagcagcgaagtcagtgacgggcgcccgctgcacggcaggacacgcgcgtcccggaccttcctctcgtccgcgcgagcctgggctgcccccggagcgacacccgcccgacctctcgcagcttcctcagcggcgctcacacgtgcgctgcctcagccctgcgcctcaggctcgggtcccgctgcgggggagcctggacttgcggctcccggaaggtcgtcgctcacacctcgagcctaactgcgcagctgctcccccgccagaaatttcaaaactacgaaccccgagtgcccacagccccctacgcgcgattggcacggccccgccgcgcggccacgccagccatgtttatatagccacgcggagacctcgcgcacgcgcccaggccgccgccaccgccccgggtttccccgggatccggccgcgtgattggccaaggagcggagccgcgcccgtgacgtcactggggacggctccagggagcgttaaaatcttccccagaatcgccagcaaggaggggcgatgccagaaacctatcacgtgggaggggcaagctgcacttggaaaactgcggcatccgtgttcctctccttgtgtcccctgtagtgtgttcctcgaaaagccagcactagactatctccaggattctattttttaaggagaaaatggggaggactgatttccgagaagagtgactcaataagaattcaatcacgcattttcagtgtttttctctgctgtcttcacactgaagcgttgctaaaattcgcagttagaattgacattgtaaaaattaaaatggcgtatagttttatagtctgtgagatgtgcctattttcatattttagagttaaactgcctaaaatcttaaatggaaaatcgtttcttctttggtgctgctataggtgtctctatcacctctaaacattaaaattgtatgtctgtcttctgaaaaacttaatgccttttgatatctatataattagattctagcacttagatattaagcgtgatcctagatattatctggataaataaaaggtgttgagtgaatcgatatgaaaaaacttgcctgtttgtaatgcagtcagagaagatgccttaatttcaagctaaagtcattatattgtatgtttgtaggaaccaacactgcactgaaaggcgattttacaagtaggcagatgctatgatctgaatgttgtggtgttttgttttgttttgttttgttttgttttgttttggaaacaggatctaactctgtcacccaggctggagtgcagtggcaccattggctcattgcagcctccacctcctgggctcaagtgatcatcctaccctcctacctcagattcccgagtagctggaaccacaggggagcggcactatgcctagcaaaaacgggatctcgttatattgtccaggctggtctccaattcctgagctcccgcctgggcctcccaaagtgctaggattatacccccaactgagtgttaaaatgctaaagctggagttgataatattagaaggttgggcctttgaaaggtgattagatcataagggtggagccctcatgaatgggattccattcaggacaaatcatgttaaagtgatgaatatgttaacttgatttaattatttcacgacacatacaaatgtaacatgatacctcataaatacatacaattattatttgttagttaaatacattaaataaataatttttttaaaaaaagaaacctcagaaagatccctcaccccttccagcaagtgaggttatggtaaaaagactgctgtctagaaagtagactctcatcagataccacatctgccttgatcttgaacttcccaacctctggaattatgggacatgaatttctctttttataagctacccagtttatgatatttcattatagaagccc

SEQ ID NO: 1245338 - DNA, 4001 bp, Homo sapiens
ctctcccacgtcgctgagggcgtccggattgtttctaagcacctgggcacactgctggcgcagcgtcggcacctggagctggcaggcaggcctggagcccgagtacaccggcatcttagcattcactctgcgtccagggaaagcagcttcctcccggaactttggtgaagagagtgcttctggctttgcctgggaggtcatggagtcagaatccgaaagcggatcgtagttggcctgcatccaggcctctgagaggtcccagagctctgagaagacatggctgggcaccgttttcggcccggcggaatcagcgccggccgcctgcagcctctctgactggctttcctggacaggaggcaatttcttagccgaatcccaggactcacgagtgcccttggattcgtttgctttcctttgtttatctccaagtgcagtggtggcagattttccagtctttttcttttgcttccgcaactgatcgtaggtgaggtatttttcacatgacagagtgggctgctcgaattcctcagccatatctacctcctccacctcagagagggagctcacggacgttctgtccaaatgagcagtcggtggcttcccctcttgagtctctcggtcgttggaaagctgctctttctcctcgggcgacaggccgtgtgtcccatttcctgggtcccggccgtctagactgggcctcttcttgttcgagtgactgtgctgaggcctcttctggtgactgtctggagcctcctccaaggcagggacacgctggccgctgccagcttgccccccttccttgtctgtcttgaagtccgaaggctgcctgtccctggcacttgcccaggagggcatccttggggtttcctctcttaagcaggccccgcatgatttctccctgatcaaagtaggggagtgccaatctccctgggcacacaaggggcgtttttcctggcgagacgatttgtgccccttgctgtggctcacaacggctttcccctggggttggccctggcagcctggacacagcagaggcccgccctgagccgcgtgagtgtggcctcttccgggttgcttcccgggcgcagcgggctcagggccctcgggcatccggaggggagctgtgcgcgttggagaggcccgatagcggccggaatcagctggggctattctggggcactttctctcagctctgggctcgcgactgtgagacctcgggtgaggtctctgttgccccggaggtgttctgcgtgctgtccgtctgtgctcagggctgtgagatgggctcctgggggccgtcgcgttttctgggaagccccaggccttttcctggtcctgaagagcctccccgaagcgctgtcgggaagcgctctcctcagggtcctgtgggccaggccgggtgtttcggtccacgagcaccagcttcttccaccgggccgctaagtctctggcaaagtcgcccacgtgctggtgcttccgcaggcgcttcaccgtctttctgattccagtctccgccaggatgtctgccgtcatgggcaaggcggagagtttctgcaaatatttctctagctttttcggctccgtcttagtggccagacgcacctgcagcttctccactgcgtgcagcgtagtggaccctgccgccatctcaccagagctgtgcaggcgtcgctgtcccggcggtcgcagctctgtctttggggctgcgggacaggaagtctggggtggccggtcctcgctgcccggtcgccaggcagcgacctcgggatgtggagtcacagcctggagcgagctgggtcctcggagcagcaggccacttggtctggaacggccgtccttgcagacagctgagcaggcccgcttttgttcctcgggatgtggagccacagcctggagtgacctctgcagtttgctgtgcaacaaagaatgaagctctggtgccagagctgggccttatgtagcccatcccaggctgacactcacggctctagccctgaccctcttagctcttgggctgccccgcccccatacgtactcatgccgtcagcacaatgcagacaatcgggacggtccacgccaggtggactgctgtgccccagaggttgattaggttaatttcagcctcgacacaccccactgagttttaccgttgaccttccatgttcgcaggttccacatctgtgaattccaaaaaacacagactgaatcttcttgggagtaaaacagaaaataacacagcaagacaaaatcatagaaagaagaaccaatacaggataacaactctttgcctaggactgatgttgtgtgaggggacttcccaaatttgtcaaaacagggattaaaagacaaaaataaaaccggtagattttatttcttaacatctgctccatcaatttcgagacagtagttcgagcactgtcttgaccccgccttgtccctcaagccctgatgtttctgggaatttaactatttccaagaaatcttttttccattattaactgaagaaaactgggtgccgtttgcagaatttttaatacgaggaaataaatagaagtcagcaggttccacatcatgactgcaaggtggacgcctcatgatctccttttgaaactcttgccaaactgccctttgttcagtgaaatgctacagcaagaactttttcatgattaggtagaactctctggtaatggtttttctgctcatgctttggctagttttctcaaaaactctgttagtaagcatatttgatcttggtttggcccttcaaaaagtcttttagtcatatcttttgagcattccccaaaactgttgccatgacctcttctcttgactggtcctctctgtctttgactggagtgctgccaccttttggtagcctttgttttgtgctctttcttcaggactatccagtgtagccatgttttatccccgcttacaaatcttggaataaatatttctggatcttcttccacctgttttaaaactttaaagaaatttttactcttgtctctagctattattgttgaaacagatttggtatctggatcggactttaattttcagtgacaattattaaaacaggatcatttgaaatatctatggttttttctcttatttctgttgttacttatttaccctctcaaattagggaacacttggtcctatgtttctgagcatagttgaccaattctgacattgtattaaattcaataaatgtcttttctggatctgtagacacttcttttgatatttctagcatttttttgggttgtacagcatttgaaagttaggaagtttcctggcagagccaggagatagtcaggaaacaaacaagaaacaaattagaacctacaggtatatatattcaaccttttaggggaatattagatgcagggactgtaaaacagaagtatagtaaagacatttgaaagaagtgatgtatgctttttaactgtttgtttttgagattgaaagcttaatgcaaaatttggatcttattactgaaattgaaacgagctcatgcaaattaatctccattgcacccgtaaaaaggaaattaaaagcactaatgttgcatgtggtgtatatacagtaacatttcctaaatatcttctgggtctaaaactgggaatgatattcaatgcttccttttcctcaggctatggtatcataggattcaattttgaatttgataatggaggtatatttgtggcacaatagcccacaaaggaaatgaaagaaaacaaaaacagccagattattgaaacatgcaaatgagacacctagattagatgttcacttctgggcctcctttctttgtacacagaaattaatgagcatgtaattgtgtccatttcaggggcacaccatctcttacagtttaaatggatcctttttgcggggaatggctcattcttagttttttttaattcagaagataattttctaggttaatttgaatggcctgggcagaaagatgtagatctggccaactttatacc

SEQ ID NO: 1245339 - DNA, 4001 bp, Homo sapiens
gaggctcaactttgcaccaagccaagggttctggtgtccgtcgcaagtttcgttccccaacccgcattgactttgcattggccctcctccccccggattttatccgtaaggcaagtcctgagtttatcgtcgggagaatcttcccttgtagtctcgaattgccttggccatcagcggggccactttcttggcagcctgttttcgggttttgtccgcgggcgccgcgtgccggttgctgctgccgccgccgctcacgctgccgccgtcgccgtccccgaggccggagggagcctggctgcttcctgcgggcttgggggctggctccatctctccatttccggggtcagcggctcctgcagacttctcttgcctcctggaagcatcataaggcgtcttggccacagagttgaaacagatcatctttgtctgtcggccgctgggtttgttttcacgtgcggatcggattttcgtggtcactactcgcagccgctgctctcgggcgtcccgaagccgcaggtacagctcccgccaagactcgtgctcctgtggcttttcttccttgaagtcctggaggcaatgaatcctccataattcatctgtctctcgagcgagtgcggcattgtctttctctgtgcggtacagctgatcgggcgtccacccttccagaacgggttcaagaaccgagtaggggaccccttccacgtcgccgagggcgtccggattgttcctaggcacccggaggcactgctggcgcagcgtcggcacctggagctggcaggcaggcctggagcccgagtacaccggcatcttagcgttcactctgcgtccagggaaagcagcttcctcctggagcgctggcgcgcagagtgcttctgggtttgcctgggaggtcatggcctcaaaagcggacagcagatcgtagttggcctgcatccaggcctctgaggggtcccagagctccgagaagacatggctgggcaccgttttcggcccggcggaatcagcgccggccgcctgcagcctctctgactggctttcctggacaggaggcgatttctgagccgaagccccgcgggacgatttgtgccccttgctgtggctccccaccgcttccccctggggttggccctggcagccttgacccagcagaggcccgccctgagcggcgtgagcgtggcctcttccgggttgctccccgggcacagcgggctcagggccctcgggcatcgggaggggagcggtgcgcgttggagggtcccgatgggggccggaatcagctggggccattctggggcgctttctctcggctctgggctcgcgactgggagacctcgggtgaggtctctgttgccccggaggtgttctgcgtgctgtccgtctgtgctcagggctgtgagatgggctcctgggggccgtcgcgttttctgggaagccccaggccttttcccgctcctgaagagcctccccgaagcgctgtcgggaagcgctctcctcagggtcctgcgggtcaggcccggtgtttcggtccacgagcaccagcttcttccaccgggccgctaagtctctggcaaagtcgcccacgtgctggtgcttccgcaggcgcttcaccgtctttctgattccagtctccgccaggatgtctgcggtcatgggcaaggcggagagtttctgcaaatatttctctagctttttcggctccgtcttagtggccagacgcacctgcagcttccccactgcgcgcagcgtagtggaccctgccgccatctcgccagagctgtgcaggcgtcgctgtcctcgcggtcgcggctctgtccgagctcggggcggcggcacaggcagtctggggtggccggtcctcgctgcccggtcgccaggcggcgacctcgggatgtggagtcacagcctggagcgagctgggtcctcggagcagcgggccacttggtctggaacgccggtccttgcagacagctgagcaggcccgcttctgttcctcgggatgtgcggccgcagcctggagtgtgacctgtgcggtgcgccgtccaaggcggagtgaagctccgctgccagagcccggccttatatagccagccccgggcccacccagggctcaagccctgacccccctgggcccctgggctgccccgccccgataggaattcattccgtcagcccaacgcagccaatcggggcggtccacgccaggtggactgctgtgccccgcggggtcattaggttaattgcagcctggacacaccccactgagttctaccgttggccctccatgtacccagcttccacatctgtggattccaaaagacacagagagaatcttcttgggagtaaaagcgaaaataacaacaccgcaagacagaatcgtaggaagaagaaccaacagaggatgacaactctttacctggcattgacgttgtgtgaggggacttggaaacattggtagaaaagtgggattaagggagaaagaggaaaaaggcgtattttactcctcaacctcggctccatcagcatcaagacccttctggaagcagtgtcttttccccgccgtctagcccatcccttaaagcccccagggtcctgggaatttaactatttccatgcaatcttttttccattgttaactgaagaaaactgggtgccccttacaggttttccaagacaaggaaacaaagagaagtcagcaggcgccaaatcaggattgtcaggtggacgcctcacggtttcccatggcaagtcttgcccagctgcccttgttcgaagaaaggcatgatcaggaacactgtcgtggtggagaagaagtctctggtggggaccttcttcgctccagctttggctaactttctgaaaacgctctgctagcgagcagatgtgatcagggtttggccctgcagaaagtcaaccagcagaatccctctagcatctcccccccccaccccgcccccaacggtggccatgacctctgctcttgactgctcctctgcagcttcgactggagcactgccacctcttggtagccatggcttcgtgcttggtcttcaggatcctgccggtagagccaggtttcatctcctgtgaccaatcttggaagaaatgcttcaggatcttgctcccaccggttgtttaaaatctcctcggaaaggcttgctctggcctgcagctgatattggtgccacggtttgggcagccgagttccactctcacctttcagtccaaatgaggaaaacagaaccatttgaagtgtctatggtgtcggctattgtttctgctgtcggcggcgatttcgcgtaatgtttacattctcacatgactttctctctctctctctcagtgtgtgtgtgtgtgtgtgtgtgtgtgtgtgtgtgtgtgtgtgtgtctcttctgcagaaagataatcgttatagcctgagaatcggggaatggggattcgggtgttaagccttttctgagaattaccctccgtgttgtgcagagaaataagtaaatttgctgtgtttccagacttccagctgcctcacgaagaggatcgtagtgcaatactggcgatgcctccagagctccctgaatgaggtttatcttgtaaataggtgggaagagaattgagctgtcctgggtcagtgtagtaatgttacagcaggatccttaggttgatgctgaattctatctggggtagatttatattttgtgcgggggttgtttcctttctgtgttttcgagcgggattgtcgctgtgggagcagggatctgctaaggtttgtctcgttctccagtaatgaatgagtttaatgggtgcagccgctgttttcagtagcatgccagtgggggcatcgatgagctatgaggggctagagcttgctcggattgtttccttgtgtttgtgttttgagatgcgtttgcttgtgtcatgtttgttttccattttggcaggggaaaggttttccaggaagaaaggttgttgccagtggatttggttccgaggggctggggtttct

SEQ ID NO: 1245340 - DNA, 4001 bp, Homo sapiens
gaggctcaactttgcaccaagccaagggttctggtgtccgtcgcaagtttcgttccccaacccgcattgactttgcattggccctcctccccccggattttatccgtaaggcaagtcctgagtttatcgtcgggagaatcttcccttgtagtctcgaattgccttggccatcagcggggccactttcttggcagcctgttttcgggttttgtccgcgggcgccgcgtgccggttgctgctgccgccgccgctcacgctgccgccgtcgccgtccccgaggccggagggagcctggctgcttcctgcgggcttgggggctggctccatctctccatttccggggtcagcggctcctgcagacttctcttgcctcctggaagcatcataaggcgtcttggccacagagttgaaacagatcatctttgtctgtcggccgctgggtttgttttcacgtgcggatcggattttcgtggtcactactcgcagccgctgctctcgggcgtcccgaagccgcaggtacagctcccgccaagactcgtgctcctgtggcttttcttccttgaagtcctggaggcaatgaatcctccataattcatctgtctctcgagcgagtgcggcattgtctttctctgtgcggtacagctgatcgggcgtccacccttccagaacgggttcaagaaccgagtaggggaccccttccacgtcgccgagggcgtccggattgttcctaggcacccggaggcactgctggcgcagcgtcggcacctggagctggcaggcaggcctggagcccgagtacaccggcatcttagcgttcactctgcgtccagggaaagcagcttcctcctggagcgctggcgcggagagtgcttctgggtttgcctgggaggtcatggcctcaaaagcggacagcagatcgtagttggcctgcatccaggcctctgaggggtcccagagctccgagaagacatggctgggcaccgttttcggcccggcggaatcagcgccggccgcctgcagcctctctgactggctttcctggacaggaggcgatttctgagccgaagccccgcgggacgatttgtgccccttgctgtggctccccaccgcttccccctggggttggccctggcagccttgacccagcagaggcccgccctgagcggcgtgagcgtggcctcttccgggttgctccccgggcacagcgggctcagggccctcgggcatcgggaggggagcggtgcgcgttggagggtcccgatgggggccggaatcagctggggccattctggggcgctttctctcggctctgggctcgcgactgggagacctcgggtgaggtctctgttgccccggaggtgttctgcgtgctgtccgtctgtgctcagggctgtgagatgggctcctgggggccgtcgcgttttctgggaagccccaggccttttcccgctcctgaagagcctccccgaagcgctgtcgggaagcgctctcctcagggtcctgcgggtcaggcccggtgtttcggtccacgagcaccagcttcttccaccgggccgctaagtctctggcaaagtcgcccacgtgctggtgcttccgcaggcgcttcaccgtctttctgattccagtctccgccaggatgtctgcggtcatgggcaaggcggagagtttctgcaaatatttctctagctttttcggctccgtcttagtggccagacgcacctgcagcttccccactgcgcgcagcgtagtggaccctgccgccatctcgccagagctgtgcaggcgtcgctgtcctcgcggtcgcggctctgtccgagctcggggcggcggcacaggcagtctggggtggccggtcctcgctgcccggtcgccaggcggcgacctcgggatgtggagtcacagcctggagcgagctgggtcctcggagcagcgggccacttggtctggaacgccggtccttgcagacagctgagcaggcccgcttctgttcctcgggatgtgcggccgcagcctggagtgtgacctgtgcggtgcgccgtccaaggcggagtgaagctccgctgccagagcccggccttatatagccagccccgggcccacccagggctcaagccctgacccccctgggcccctgggctgccccgccccgataggaattcattccgtcagcccaacgcagccaatcggggcggtccacgccaggtggactgctgtgccccgcggggtcattaggttaattgcagcctggacacaccccactgagttctaccgttggccctccatgtacccagcttccacatctgtggattccaaaagacacagagagaatcttcttgggagtaaaagcgaaaataacaacaccgcaagacagaatcgtaggaagaagaaccaacagaggatgacaactctttacctggcattgacgttgtgtgaggggacttggaaacattggtagaaaagtgggattaagggagaaagaggaaaaaggcgtattttactcctcaacctcggctccatcagcatcaagacccttctggaagcagtgtcttttccccgccgtctagcccatcccttaaagcccccagggtcctgggaatttaactatttccatgcaatcttttttccattgttaactgaagaaaactgggtgccccttacaggttttccaagacaaggaaacaaagagaagtcagcaggcgccaaatcaggattgtcaggtggacgcctcacggtttcccatggcaagtcttgcccagctgcccttgttcgaagaaaggcatgatcaggaacactgtcgtggtggagaagaagtctctggtggggaccttcttcgctccagctttggctaactttctgaaaacgctctgctagcgagcagatgtgatcagggtttggccctgcagaaagtcaaccagcagaatccctctagcatctcccccccccccccccgcccccaacggtggccatgacctctgctcttgactgctcctctgcagcttcgactggagcactgccacctcttggtagccatggcttcgtgcttggtcttcaggatcctgccggtagagccaggtttcatctcctgtgaccaatcttggaagaaatgcttcaggatcttgctcccaccggttgtttaaaatctcctcggaaaggcttgctctggtctgcagctgatattggtgccacggtttgggcagcggagttccactcttacctttcagtccgaatgaggaaaacagatccatttgaaatatgtatgttttcggcttttgtttctgctgtcgttggcagtttcgcgtaatttttaatttctcgtgtgactttttttgtgtctctctgtctttctttttgtgtgtgttgtggtgggggcggggtgtgtttcttctgcagaaagaaaatcattatgccctgagaatcggggaatggggattcgggtgttaagccttttcttataagtacccttccacagtttgtagaaaaataggtaaatttgctgtgtttccagacttccagctacttctccaggagaatcgtagtgtaatactggcaattcttcagagctagaatgaggattattttagtagagatgggatctttttcatattggtcgtcctggtctttaactccttaccttatgtgatccacccacctcggcctcccaaagtgctgaggtagggccttgagcctccccacctggacttttttgagttttatatggttactggcagtgtcacatcccttttcccagaaagaatgctttcttgtcttcctgaaatgcagtatccctttgtctccatcctggcttttttcctgtgtgtgtgtgtatcatatctggcatacgttcctttgattaccagcccgtgtgaggccaacaaatgccctgctttataatgaaaagttttaagaaagctagcagacgtccgtgtgatctgaactcaaggtagttaacccggtcctttcatggtaattagaaaatctgattggcctctttagacttcttg

SEQ ID NO: 1245341 - DNA, 4001 bp, Homo sapiens
ctggatgatttcaaaagaaaggagaaaagacaaaagggaatctcacatcttgtacctgatttatgattgcaactagggcgttatttaaaagacgatcagtgaaccaccaaagtagaattgatccgaatgcgttcataatatcttctgaattctgaggtgtcctccaagcagggaggcagtggctgggtgtgggaggcaaaaatcacagggccagcacttgacacctgcaggattcggaggctcaactttgcaccaagccaagggttctggtgtccgtcgcaagtttcgttccccaacccgcattgactttgcattggccctcctccccccagattttatccgtaaggcaagtcctgagtttatcgtcgggagaatcttcccttgtagtctcgaattgccttggccatcagcggggccactttcttggcagcctgttttcgggttttgtccgcgggcgccgcgtgccggttgctgctgccgccgccgctcacgctgccgccgtcgccgtccccgaggccggagggagcctggctgcttcctgcgggcttgggggctggctccatctctccatttccggggtcagcggctcctgcagacttctcttgcctcctggaagcatcataaggcgtcttggccacagagttgaaacagatcatctttgtctgtcggccgctgggtttgttttcacgtgcggatcggattttcgtggtcactactcgcagccgctgctctcgggcgtcccgaagccgcaggtacagctcccgccaagactcgtgctcctgtggcttttcttccttgaagtcctggaggcaatgaatcctccataattcatctgtctctcgagcgagtgcggcattgtctttctctgtgcggtacggctgatcgggcgtccacccttccagaacgggttcaagagccgagtaggggaccccttccacgtcgccgagggcgtccggattgttcctaggcacccggaggcactgctggcgcagcgtcggcacctggagctggcaggcaggcctggagcccgagtacaccggcatcttagcgttcactctgcgtccagggaaagcagcttcctcctggagcgttggcgcggagagtgcttctgggtttgcctgggaggtcatggcctcaaaagcggacagcagatcgtagttggcctgcatccaggcctctgaggggtcccagagctccgagaagacatggctgggcaccgttttcggcccggcggaatcagcgacggccgcctgcagcctctctgactggctttcctggacaggaggcgatttctgagccgaagccccgcgggacgatttgtgccccttgctgtggctccccaccgcttccccctggggttggccctggcagccttgacccagcagaggcccgccctgagcggcgtgagcgtggcctcttccgggttgctccccgggcacagcgggctcagggccctcgggcatcgggaggggagcggtgcgcgttggagggtcccgatgggggccggaatcagctggggccattctggggcgctttctctcggctctgggctcgcgactgggagacctcgggtgaggtctctgttgccccggaggtgttctgcgtgctgtccgtctgtgctcagggctgtgagatgggctcctgggggccgtcgcgttttctgggaagccccaggccttttcccgctcctgaagagcctccccgaagcgctgtcgggaagcgctctcctcagggtcctgcgggtcaggcccggtgtttcggtccacgagcaccagcttcttccaccgggccgctaagtctctggcaaagtcgcccacgtgctggtgcttccgcaggcgcttcaccgtctttctgattccagtctccgccaggatgtctgcggtcatgggcaaggcggagagtttctgcaaatatttctctagctttttcggctccgtcttagtggccagacgcacctgcagcttccccactgcgcgcagcgtagtggaccctgccgccatctcgccagagctgtgcaggcgtcgctgtcctcgcggtcgcggctctgtccgagctcggggcggcggcacaggcagtctggggtggccggtcctcgctgcccggtcgccaggcggcgacctcgggatgtggagtcacagcctggagcgagctgggtcctcggagcagcgggccacttggtctggaacgccggtccttgcagacagctgagcaggcccgcttctgttcctcgggatgtgcggccgcagcctggagtgtgacctgtgcggtgcgccgtccaaggcggagtgaagctccgctgccagagcccggccttatatagccagccccgggcccacccagggctcaagccctgacccccctgggcccctgggctgccccgccccgataggaattcattccgtcagcccaacgcagccaatcggggcggtccacgccaggtggactgctgtgccccgcggggtcattaggttaattgcagcctggacacaccccactgagttctaccgttggccctccatgtacccagcttccacatctgtggattccaaaagacacagagagaatcttcttgggagtaaaagcgaaaataacaacaccgcaagacagaatcgtaggaagaagaaccaacagaggatgacaactctttacctgggattgacgttgtgtgaggggacttggaaacattggtagaaaagtgggattaagggagagagaggaaacaggcgtattttactcctcaacctcggctccatcagcatcaagacccttctggaagcagtgtcttttccccgccgtctagcccatcccttaaagcccccagggtcctgggaatttaactatttccatgcaatcttttttccattgttaactgaagaaaactgggtgccccttacaggttttccaagacaaggaaacaaagagaagtcagcaggcgccaaatcaggattgtcaggtggacgcctcacggtttcccatggcaagtcttgcccagctgcccttgttcgaagaaaggcatgatcaggaacactgtcgtggtggagaagaagtctctggtggggaccttcttcgctccagctttggctaactttctgaaaacgctctgctagcgagcagatgtgatcagggtttggccctgcagaaagtcaaccagcagaatccctctagcatccccgcccccccccccccgcccccaacggtggccatgacctctgctcttgactgctcctctgcagcttcgactggagcactgccacctcttggtagccatggcttcgtgcttggtcttcaggatcctgccggtagagccaggtttcatctcctgtgaccaatcttggaagaaatgcttcaggatcttgctcccaccggttgtttaaaatctcctcggaaaggcttgctctggcctgcagctgatactggtgccacggtttgggcagccgagttccactctcacctttcagtccaaatgaggaaaacagaaccatttgaagtgtctatggtgtcggctattgtttctgctgtcggcggcgatttcgcgtaatgtttacattctcacatgactttctctctctctctctcagtgtgtgtgtgtgtgtgtgtgtgtgtgtgtgtgtgtgtgtgtgtgtgtctcttctgcagaaagataatcgttatagcctgagaatcggggaatggggattcgggtgttaagccttttctgagaattaccctccgtgttgtgcagagaaataagtaaatttgctgtgtttccagacttccagctgcctcacgaagaggatcgtagtgcaatactggcgatgcctccagagctccctgaatgaggtttatcttgtaaataggtgggaggagaattgagctgtcctgggtcagtgtagtaatgttacagcaggatccttaggttgatgctgaattctatctggggtagatttatattttgtgcgggggttgtttcctttctgtgttttcgagcgggattgtcgctgtgggagcagggatctgctaag

SEQ ID NO: 1245342 - DNA, 4001 bp, Homo sapiens
ctggatgatttcaaaagaaaggagaaaagacaaaagggaatctcacatcttgtacctgatttatgattgcaactagggcgttatttaaaagacgatcagtgaaccaccaaagtagaattgatccgaatgcgttcataatatcttctgaattctgaggtgtcctccaagcagggaggcagtggctgggtgtgggaggcaaaaatcacagggccagcacttgacacctgcaggattcggaggctcaactttgcaccaagccaagggttctggtgtccgtcgcaagtttcgttccccaacccgcattgactttgcattggccctcctccccccggattttatccgtaaggcaagtcctgagtttatcgtcgggagaatcttcccttgtagtctcgaattgccttggccatcagcggggccactttcttggcagcctgttttcgggttttgtccgcgggcgccgcgtgccggttgctgctgccgccgccgctcacgctgccgccgtcgccgtccccgaggccggagggagcctggctgcttcctgcgggcttgggggctggctccatctctccatttccggggtcagcggctcctgcagacttctcttgcctcctggaagcatcataaggcgtcttggccacagagttgaaacagatcatctttgtctgtcggccgctgggtttgttttcacgtgcggatcggattttcgtggtcactactcgcagccgctgctctcgggcgtcccgaagccgcaggtacagctcccgccaagactcgtgctcctgtggcttttcttccttgaagtcctggaggcaatgaatcctccataattcatctgtctctcgagcgagtgcggcattgtctttctctgtgcggtacagctgatcgggcgtccacccttccagaacgggttcaagaaccgagtaggggaccccttccacgtcgccgagggcgtccggattgttcctaggcacccggaggcactgctggcgcagcgtcggcacctggagctggcaggcaggcctggagcccgagtacaccggcatcttagcgttcactctgcgtccagggaaagcagcttcctcctggagcgctggcgcgcagagtgcttctgggtttgcctgggaggtcatggcctcaaaagcggacagcagatcgtagttggcctgcatccaggcctctgaggggtcccagagctccgagaagacatggctgggcaccgttttcggcccggcggaatcagcgccggccgcctgcagcctctctgactggctttcctggacaggaggcgatttctgagccgaagccccgcgggacgatttgtgccccttgctgtggctccccaccgcttccccctggggttggccctggcagccttgacccagcagaggcccgccctgagcggcgtgagcgtggcctcttccgggttgctccccgggcacagcgggctcagggccctcgggcatcgggaggggagcggtgcgcgttggagggtcccgatgggggccggaatcagctggggccattctggggcgctttctctcggctctgggctcgcgactgggagacctcgggtgaggtctctgttgccccggaggtgttctgcgtgctgtccgtctgtgctcagggctgtgagatgggctcctgggggccgtcgcgttttctgggaagccccaggccttttcccgctcctgaagagcctccccgaagcgctgtcgggaagcgctctcctcagggtcctgcgggtcaggcccggtgtttcggtccacgagcaccagcttcttccaccgggccgctaagtctctggcaaagtcgcccacgtgctggtgcttccgcaggcgcttcaccgtctttctgattccagtctccgccaggatgtctgcggtcatgggcaaggcggagagtttctgcaaatatttctctagctttttcggctccgtcttagtggccagacgcacctgcagcttccccactgcgcgcagcgtagtggaccctgccgccatctcgccagagctgtgcaggcgtcgctgtcctcgcggtcgcggctctgtccgagctcggggcggcggcacaggcagtctggggtggccggtcctcgctgcccggtcgccaggcggcgacctcgggatgtggagtcacagcctggagcgagctgggtcctcggagcagcgggccacttggtctggaacgccggtccttgcagacagctgagcaggcccgcttctgttcctcgggatgtgcggccgcagcctggagtgtgacctgtgcggtgcgccgtccaaggcggagtgaagctccgctgccagagcccggccttatatagccagccccgggcccacccagggctcaagccctgacccccctgggcccctgggctgccccgccccgataggaattcattccgtcagcccaacgcagccaatcggggcggtccacgccaggtggactgctgtgccccgcggggtcattaggttaattgcagcctggacacaccccactgagttctaccgttggccctccatgtacccagcttccacatctgtggattccaaaagacacagagagaatcttcttgggagtaaaagcgaaaataacaacaccgcaagacagaatcgtaggaagaagaaccaacagaggatgacaactctttacctggcattgacgttgtgtgaggggacttggaaacattggtagaaaagtgggattaagggagaaagaggaaaaaggcgtattttactcctcaacctcggctccatcagcatcaagacccttctggaagcagtgtcttttccccgccgtctagcccatcccttaaagcccccagggtcctgggaatttaactatttccatgcaatcttttttccattgttaactgaagaaaactgggtgccccttacaggttttccaagacaaggaaacaaagagaagtcagcaggcgccaaatcaggattgtcaggtggacgcctcacggtttcccatggcaagtcttgcccagctgcccttgttcgaagaaaggcatgatcaggaacactgtcgtggtggagaagaagtctctggtggggaccttcttcgctccagctttggctaactttctgaaaacgctctgctagcgagcagatgtgatcagggtttggccctgcagaaagtcaaccagcagaatccctctagcatctcccccccccaccccgcccccaacggtggccatgacctctgctcttgactgctcctctgcagcttcgactggagcactgccacctcttggtagccatggcttcgtgcttggtcttcaggatcctgccggtagagccaggtttcatctcctgtgaccaatcttggaagaaatgcttcaggatcttgctcccaccggttgtttaaaatctcctcggaaaggcttgctctggcctgcagctgatattggtgccacggtttgggcagccgagttccactctcacctttcagtccaaatgaggaaaacagaaccatttgaagtgtctatggtgtcggctattgtttctgctgtcggcggcgatttcgcgtaatgtttacattctcacatgactttctctctctctctctcagtgtgtgtgtgtgtgtgtgtgtgtgtgtgtgtgtgtgtgtgtgtgtctcttctgcagaaagataatcgttatagcctgagaatcggggaatggggattcgggtgttaagccttttctgagaattaccctccgtgttgtgcagagaaataagtaaatttgctgtgtttccagacttccagctgcctcacgaagaggatcgtagtgcaatactggcgatgcctccagagctccctgaatgaggtttatcttgtaaataggtgggaagagaattgagctgtcctgggtcagtgtagtaatgttacagcaggatccttaggttgatgctgaattctatctggggtagatttatattttgtgcgggggttgtttcctttctgtgttttcgagcgggattgtcgctgtgggagcagggatctgctaaggttt

SEQ ID NO: 1245343 - DNA, 4001 bp, Homo sapiens
ctggatgatttcaaaagaaaggagaaaagacaaaagggaatctcacatcttgtacctgatttatgattgcaactagggcgttatttaaaagacgatcagtgaaccaccaaagtagaattgatccgaatgcgttcataatatcttctgaattctgaggtgtcctccaagcagggaggcagtggctgggtgtgggaggcaaaaatcacagggccagcacttgacacctgcaggattcggaggctcaactttgcaccaagccaagggttctggtgtccgtcgcaagtttcgttccccaacccgcattgactttgcattggccctcctccccccggattttatccgtaaggcaagtcctgagtttatcgtcgggagaatcttcccttgtagtctcgaattgccttggccatcagcggggccactttcttggcagcctgttttcgggttttgtccgcgggcgccgcgtgccggttgctgctgccgccgccgctcacgctgccgccgtcgccgtccccgaggccggagggagcctggctgcttcctgcgggcttgggggctggctccatctctccatttccggggtcagcggctcctgcagacttctcttgcctcctggaagcatcataaggcgtcttggccacagagttgaaacagatcatctttgtctgtcggccgctgggtttgttttcacgtgcggatcggattttcgtggtcactactcgcagccgctgctctcgggcgtcccgaagccgcaggtacagctcccgccaagactcgtgctcctgtggcttttcttccttgaagtcctggaggcaatgaatcctccataattcatctgtctctcgagcgagtgcggcattgtctttctctgtgcggtacagctgatcgggcgtccacccttccagaacgggttcaagaaccgagtaggggaccccttccacgtcgccgagggcgtccggattgttcctaggcacccggaggcactgctggcgcagcgtcggcacctggagctggcaggcaggcctggagcccgagtacaccggcatcttagcgttcactctgcgtccagggaaagcagcttcctcctggagcgctggcgcggagagtgcttctgggtttgcctgggaggtcatggcctcaaaagcggacagcagatcgtagttggcctgcatccaggcctctgaggggtcccagagctccgagaagacatggctgggcaccgttttcggcccggcggaatcagcgccggccgcctgcagcctctctgactggctttcctggacaggaggcgatttctgagccgaagccccgcgggacgatttgtgccccttgctgtggctccccaccgcttccccctggggttggccctggcagccttgacccagcagaggcccgccctgagcggcgtgagcgtggcctcttccgggttgctccccgggcacagcgggctcagggccctcgggcatcgggaggggagcggtgcgcgttggagggtcccgatgggggccggaatcagctggggccattctggggcgctttctctcggctctgggctcgcgactgggagacctcgggtgaggtctctgttgccccggaggtgttctgcgtgctgtccgtctgtgctcagggctgtgagatgggctcctgggggccgtcgcgttttctgggaagccccaggccttttcccgctcctgaagagcctccccgaagcgctgtcgggaagcgctctcctcagggtcctgcgggtcaggcccggtgtttcggtccacgagcaccagcttcttccaccgggccgctaagtctctggcaaagtcgcccacgtgctggtgcttccgcaggcgcttcaccgtctttctgattccagtctccgccaggatgtctgcggtcatgggcaaggcggagagtttctgcaaatatttctctagctttttcggctccgtcttagtggccagacgcacctgcagcttccccactgcgcgcagcgtagtggaccctgccgccatctcgccagagctgtgcaggcgtcgctgtcctcgcggtcgcggctctgtccgagctcggggcggcggcacaggcagtctggggtggccggtcctcgctgcccggtcgccaggcggcgacctcgggatgtggagtcacagcctggagcgagctgggtcctcggagcagcgggccacttggtctggaacgccggtccttgcagacagctgagcaggcccgcttctgttcctcgggatgtgcggccgcagcctggagtgtgacctgtgcggtgcgccgtccaaggcggagtgaagctccgctgccagagcccggccttatatagccagccccgggcccacccagggctcaagccctgacccccctgggcccctgggctgccccgccccgataggaattcattccgtcagcccaacgcagccaatcggggcggtccacgccaggtggactgctgtgccccgcggggtcattaggttaattgcagcctggacacaccccactgagttctaccgttggccctccatgtacccagcttccacatctgtggattccaaaagacacagagagaatcttcttgggagtaaaagcgaaaataacaacaccgcaagacagaatcgtaggaagaagaaccaacagaggatgacaactctttacctggcattgacgttgtgtgaggggacttggaaacattggtagaaaagtgggattaagggagaaagaggaaaaaggcgtattttactcctcaacctcggctccatcagcatcaagacccttctggaagcagtgtcttttccccgccgtctagcccatcccttaaagcccccagggtcctgggaatttaactatttccatgcaatcttttttccattgttaactgaagaaaactgggtgccccttacaggttttccaagacaaggaaacaaagagaagtcagcaggcgccaaatcaggattgtcaggtggacgcctcacggtttcccatggcaagtcttgcccagctgcccttgttcgaagaaaggcatgatcaggaacactgtcgtggtggagaagaagtctctggtggggaccttcttcgctccagctttggctaactttctgaaaacgctctgctagcgagcagatgtgatcagggtttggccctgcagaaagtcaaccagcagaatccctctagcatctcccccccccccccccgcccccaacggtggccatgacctctgctcttgactgctcctctgcagcttcgactggagcactgccacctcttggtagccatggcttcgtgcttggtcttcaggatcctgccggtagagccaggtttcatctcctgtgaccaatcttggaagaaatgcttcaggatcttgctcccaccggttgtttaaaatctcctcggaaaggcttgctctggtctgcagctgatattggtgccacggtttgggcagcggagttccactcttacctttcagtccgaatgaggaaaacagatccatttgaaatatgtatgttttcggcttttgtttctgctgtcgttggcagtttcgcgtaatttttaatttctcgtgtgactttttttgtgtctctctgtctttctttttgtgtgtgttgtggtgggggcggggtgtgtttcttctgcagaaagaaaatcattatgccctgagaatcggggaatggggattcgggtgttaagccttttcttataagtacccttccacagtttgtagaaaaataggtaaatttgctgtgtttccagacttccagctacttctccaggagaatcgtagtgtaatactggcaattcttcagagctagaatgaggattattttagtagagatgggatctttttcatattggtcgtcctggtctttaactccttaccttatgtgatccacccacctcggcctcccaaagtgctgaggtagggccttgagcctccccacctggacttttttgagttttatatggttactggcagtgtcacatcccttttcccagaaagaatgctttcttgt

SEQ ID NO: 1245344 - DNA, 4001 bp, Homo sapiens
gaggctcaactttgcaccaagccaagggttctggtgtccgtcgcaagtttcgttccccaacccgcattgactttgcattggccctcctccccccagattttatccgtaaggcaagtcctgagtttatcgtcgggagaatcttcccttgtagtctcgaattgccttggccatcagcggggccactttcttggcagcctgttttcgggttttgtccgcgggcgccgcgtgccggttgctgctgccgccgccgctcacgctgccgccgtcgccgtccccgaggccggagggagcctggctgcttcctgcgggcttgggggctggctccatctctccatttccggggtcagcggctcctgcagacttctcttgcctcctggaagcatcataaggcgtcttggccacagagttgaaacagatcatctttgtctgtcggccgctgggtttgttttcacgtgcggatcggattttcgtggtcactactcgcagccgctgctctcgggcgtcccgaagccgcaggtacagctcccgccaagactcgtgctcctgtggcttttcttccttgaagtcctggaggcaatgaatcctccataattcatctgtctctcgagcgagtgcggcattgtctttctctgtgcggtacggctgatcgggcgtccacccttccagaacgggttcaagagccgagtaggggaccccttccacgtcgccgagggcgtccggattgttcctaggcacccggaggcactgctggcgcagcgtcggcacctggagctggcaggcaggcctggagcccgagtacaccggcatcttagcgttcactctgcgtccagggaaagcagcttcctcctggagcgttggcgcggagagtgcttctgggtttgcctgggaggtcatggcctcaaaagcggacagcagatcgtagttggcctgcatccaggcctctgaggggtcccagagctccgagaagacatggctgggcaccgttttcggcccggcggaatcagcgacggccgcctgcagcctctctgactggctttcctggacaggaggcgatttctgagccgaagccccgcgggacgatttgtgccccttgctgtggctccccaccgcttccccctggggttggccctggcagccttgacccagcagaggcccgccctgagcggcgtgagcgtggcctcttccgggttgctccccgggcacagcgggctcagggccctcgggcatcgggaggggagcggtgcgcgttggagggtcccgatgggggccggaatcagctggggccattctggggcgctttctctcggctctgggctcgcgactgggagacctcgggtgaggtctctgttgccccggaggtgttctgcgtgctgtccgtctgtgctcagggctgtgagatgggctcctgggggccgtcgcgttttctgggaagccccaggccttttcccgctcctgaagagcctccccgaagcgctgtcgggaagcgctctcctcagggtcctgcgggtcaggcccggtgtttcggtccacgagcaccagcttcttccaccgggccgctaagtctctggcaaagtcgcccacgtgctggtgcttccgcaggcgcttcaccgtctttctgattccagtctccgccaggatgtctgcggtcatgggcaaggcggagagtttctgcaaatatttctctagctttttcggctccgtcttagtggccagacgcacctgcagcttccccactgcgcgcagcgtagtggaccctgccgccatctcgccagagctgtgcaggcgtcgctgtcctcgcggtcgcggctctgtccgagctcggggcggcggcacaggcagtctggggtggccggtcctcgctgcccggtcgccaggcggcgacctcgggatgtggagtcacagcctggagcgagctgggtcctcggagcagcgggccacttggtctggaacgccggtccttgcagacagctgagcaggcccgcttctgttcctcgggatgtgcggccgcagcctggagtgtgacctgtgcggtgcgccgtccaaggcggagtgaagctccgctgccagagcccggccttatatagccagccccgggcccacccagggctcaagccctgacccccctgggcccctgggctgccccgccccgataggaattcattccgtcagcccaacgcagccaatcggggcggtccacgccaggtggactgctgtgccccgcggggtcattaggttaattgcagcctggacacaccccactgagttctaccgttggccctccatgtacccagcttccacatctgtggattccaaaagacacagagagaatcttcttgggagtaaaagcgaaaataacaacaccgcaagacagaatcgtaggaagaagaaccaacagaggatgacaactctttacctgggattgacgttgtgtgaggggacttggaaacattggtagaaaagtgggattaagggagagagaggaaacaggcgtattttactcctcaacctcggctccatcagcatcaagacccttctggaagcagtgtcttttccccgccgtctagcccatcccttaaagcccccagggtcctgggaatttaactatttccatgcaatcttttttccattgttaactgaagaaaactgggtgccccttacaggttttccaagacaaggaaacaaagagaagtcagcaggcgccaaatcaggattgtcaggtggacgcctcacggtttcccatggcaagtcttgcccagctgcccttgttcgaagaaaggcatgatcaggaacactgtcgtggtggagaagaagtctctggtggggaccttcttcgctccagctttggctaactttctgaaaacgctctgctagcgagcagatgtgatcagggtttggccctgcagaaagtcaaccagcagaatccctctagcatccccgcccccccccccccgcccccaacggtggccatgacctctgctcttgactgctcctctgcagcttcgactggagcactgccacctcttggtagccatggcttcgtgcttggtcttcaggatcctgccggtagagccaggtttcatctcctgtgaccaatcttggaagaaatgcttcaggatcttgctcccaccggttgtttaaaatctcctcggaaaggcttgctctggcctgcagctgatactggtgccacggtttgggcagccgagttccactctcacctttcagtccaaatgaggaaaacagaaccatttgaagtgtctatggtgtcggctattgtttctgctgtcggcggcgatttcgcgtaatgtttacattctcacatgactttctctctctctctctcagtgtgtgtgtgtgtgtgtgtgtgtgtgtgtgtgtgtgtgtgtgtgtgtctcttctgcagaaagataatcgttatagcctgagaatcggggaatggggattcgggtgttaagccttttctgagaattaccctccgtgttgtgcagagaaataagtaaatttgctgtgtttccagacttccagctgcctcacgaagaggatcgtagtgcaatactggcgatgcctccagagctccctgaatgaggtttatcttgtaaataggtgggaggagaattgagctgtcctgggtcagtgtagtaatgttacagcaggatccttaggttgatgctgaattctatctggggtagatttatattttgtgcgggggttgtttcctttctgtgttttcgagcgggattgtcgctgtgggagcagggatctgctaaggtttgtctcgttctccagtaatgaatgagtttaatgggtgcagccgctgttttcagtagcatgccagtgggggcatcgatgagctatgaggggctagagcttgctcggattgtttccttgtgtttgtgttttgagatgcgtttgcttgtgtcatgtttgttttccattttggcaggggaaaggttttccaggaagaaaggttgttgccagtggatttggttccgaggggctggggt

SEQ ID NO: 1245345 - DNA, 4001 bp, Homo sapiens
ctgggtctcctattttctattttccatttccaaaaacaataaataaaacgaagagtagtgtgcaaagtattagtagtctcagtgttcagacatggccaagttttaggggtggtttagttttaggggtgtctatttttgctttccactggggtgagattccattatttggggtaatcagtgggtagggaattgaaggccagtaataaaactcaaaaaaaaaaaaaagcctgaatcttccatcacaccacaaaattatagttaaaaacttgtcaaaaagaccttcatatttaccaaggattcagccaattaaaaattattactgtcctttagattcctactggtttctagctgaagtgtttgggtttttgttttgtttttttcacagctgttgttagtttccaccgttctttcttaccgcactgaaatccagtaaatcactcagctctttgtccgtccctaaggcagccattcgctgttggtgatgcattttagcaaaatcacacaaacctagaaacatggaaataaccgcaatcagaaaatccagtcccaatccttggagaaaacacaatcggatttttggagactggggggttgggggtggggacgtgggggcgggtgggattaaggtggaaaggaggaagggatgggagacttgttgttgggttgggtttggttttgtttttttaagatggaataggcagcaatagcaaaaaaaaaaaaaaaaaaaaaaaaaaaaaaaaaaaaagcgatattgtatttccaaagagacgatcaaactggtaacatccactataaaaccaaatcagggaaagaaaaaaaaaaagccgctcttcagcgcatcattttatgcaacaggaggtagagcgagaaatgaatggatcacagagaaaagagaaactactgagaacgatccgatctcaactttccccccaccctgcaccccacccccctcgcacactcacactcgcacacgcacacacactcgcacacaccactcccctccgcttttcaaagtagctatcaagaaattaaagatgagcgtctctggagtgaaaacacgtccaaagggggaggggtggggtgacagggttggggggagcggagtggagggtcgggtcctctaattgtccagcaccctaatttgtgaaagaaaggggttataaaaattaaagtcaggcccctggcaaagtcctcggtccctccgagggggcatcaaggggaggggcgggggggctggcggcgagggggagggaagcggcgggaggggaaggggtgtctcttctgggagcgccgggcgccgggagcccgcggcgcgggaggcgcggagccgcgtgcggggccgccgagcccgaaccccgcgccgccgggcgcctccgccccgccgagccccgcaggcgccggtacctaccgcccgcgcgcgagaaggggctctccgtgcaccgccggcgccgaggcggcgttcatgtctaaccgccgccgccaccgccgccgcctgctcctgcgcccgctcccgcgcctgctgcctccccgccgccgccgccgccgccgccactacagatccgcagacacacagccaagatccctgactcttaacaccaactctcttctccggggaggggaggggacggagggaaggggggagggggaaacacgccgaggcgcacggaattgcaagttcagcaaagaaatgggtgggggggctccggcggggagacgcgacttgctccgggtcgggcaggctaggatgcatccccctcgcacccaccccgaggggaaaaaaaaaaaatctcaacacctcccccgcctcgccaaaaaatacaaacgaaaattcatcgagcacctcatttttcctcagatcgtcagttacaatctgaagcctgaacagttcagtttttgcccgttgcatccctcggaggcactttgaaatttattcgagtttacatcccctcacttctttctttctcttactctcgttccctctcactcacacatccacacacggcaaagcaagtttatactaggctgcaaatacacgtgatgcaaaaagactttgccaagaggaacaatatttttctttttcgtctataaatcaagccacattttcctggggagattttcgtttcggtagttttgcgttgggggcgaaatctgaattgcatactttctttcccctcccttttaagtcacagaatagtataactgcaaacttcgaaaaaaaaaaagggcaatttttgggggtggatgttgttttgtttttgcacttgagttcctaggcacgctaagtccctgttcgccagcactgtaagtttttaattcaacatttaccattataggccctgcatgctcttaaaacatactttttcacatcactttttaggataaaatttaagcttcataattctatcgtttcgtaataacaagcgtgctttatccggtatatgcaacataagctattttaacgtgtgtttgaaaaaaaaaacacacattctacaaatcctggtattgctagatgtgcgagtacatacacaaaatgcatgcacacactttttcccattggcaattatttaataggttgtcccttttgttttaataaaacatcgggatcgacattttaaaaattaaattcaattacaaacagtttactctgacggcaaattgaaacgttaccttaaatggccacaaatattctcacaatattccaaggaaagagactttaaaaagagagacaaaaatcttctgcaagtacttagtatctcacatgtgtatccccaaaaagtattttaactggtactcagtcctgctccagggatatccacagattacaagattatgcacctggctctggtttttgcattttccaccataaaactgcaacaaaattccctcccccaaaaaagaaatcattaaaaaaaaatccaacaactttttcttattgtttataaaaaaaaaaatgaacacaggatagttataatttttcctcaaacaattcttgttggtgattttttttcttctctcataaagtcttaaacttgttccaagtttagaggtgtctcatcatcatcatcctcctcctcatcatcatcaccatggactcccccgtggagtcacattgataataataggtttccctgaaagatacattgtaatccattcacatccgggaactgcgggcttataaagagaaggagctgcggccgcggctgctcctccagacaatgactgggaaggggcggggcgggagcaggcgaccatagagtggtaaacagagcgcctagagaggcggccaagatggcggtgctggtcgaccacgcctcctccgggagcggaggcgggtggctgttctcgggtaggcgtcgcgcgtggggcggcactgtgggagttcccgaggccgaggtcgttcgcaggccccatttccctgcgctcttattcgtgttgccgcttcttggccgtccttgctctttgacacaaaagtgtagtttcggcacaaatttacaaattaaactccacagacttccgcagggaagtgagatacccccaggtctccctgaggaaggctcgggaaagactgggccggcctcactcacagtaagcctgaccctgggttctcccactgtgtggagccagatttctcagcgagccttgggcggcatgggaaaaggcctctgggccaagttggtcctaggctggaagagggatgtgggtcctctcctccaactcccccaccctatcttcttatagagcgctggaagtgtgtgaactttccaagtccaaaaagtcttcacttggcgaagaccttcatctattgctttgtagactcaaatgtagtttgtgccataagccacgactgactcaacccatttctggccaagcagttaccttctgtagcctgttttctggtctgtgtaaagcaaataacgcccactttacgaattttatagtggatacagataaagatgaagccaccacgaaagaaataattccttttcatctcttaattcctt

SEQ ID NO: 1245346 - DNA, 4001 bp, Homo sapiens
cgcagtggctcacacctgtaatcccagaacttggggaggccaaggcgggcgggtcacctgaggtcaggagttcaagaccagcctggccaacatgatgaaaccccgtctctactaaaaatacaaaaattagccacgcgtggtggcaggggcctgtaatcccagctacatgggaggctgagacaggagaatggcttgagcccaggaggtggaggttgcagtgagccaagattgtgccactgcactccagcctggggcaacagagtgagactccgtctcaaaaaaaacaaaaacaaaaacaaaaaaaaaaactagaatttatatgaaacagttctattagctattaatgtctctgttttattcaccttttttcttttactaatttataatattttacatatttgtttctgtttttttagttgtgaaaactgaggctcatgttgttttagaaacttatccaagttagaagtagcagggaatttaaaaccaaatctgtctgattcaaagtttatgttctttccatttcaaaaagaaaaaacatcccatctagtgtggaggaataggtgcaagcatggtcagaaagatagtttgggccatactgaagggcattggatgccacgggctttgtactttggtgatgggttttgagcaataagttgtgagtcacatgattgcaattttatcctatattaaactgacaatggtgtatttatgaccttgtggtagggagtaacaaagtgagggatattgagcaagaggctgattcaataatctagacaggaaattgttaggatctgaacttgaaagatgttaattacgtagaagtgatattgcacagaaaagtccaactgaacactggaaatagactgttgaaggaagaaccaaaaatgatcctgaaaatggcagctagattgataaaggaagtcgtaagggggtgctgttttatgcagaaattatgagttcctttttagatatattgaatttgagatgccagcatgacatccaaatggaggtgtattagagaaaaaacacatgagagtggttagggctggagatgtggttttataaatgtacatgctggcagagttcttggagagaaagaggaaccatggattatgaatactgagaagcagccaactttagaatgttgatgggaaaggagacagaggagcagtgcaaaagattagacaagagtcaacgccttgtacagtctcagcaagaatctcaagaaggcagggccatgcgtggtggctcatgcctgtaatcccagcactttgggaggccgagatggacagatcacttgaagtcaggaattcgaggccagcccaaccaacatggcaaaaccctgtctctactaaaaatacagaagttagccgggcattgtggtgcatgcctgtaatctcagctacttgggaggctgaggcatgagaattgctagaacccgggaggcagaggctgcagtgagccaagaatgtgccattgcactccagcctgtgagacagagtgaggccctgtctcaaaaaaaaaaaaagaaaagaaaaagaaaaaaagaaaagactctcaagagggcaggccaagtgctgtggagatgtcagggagagaggttagagagctagaaactaccgttatgtttggccatggtggccatgggagatcatttttggtttcagtttctactaagatgctaaagtagcccaaatgctggttcctacctccaagggcctcctggagaagctcgagtagcagttctcaacccaagtgcatgttacaatgtcctgagaagttttaaaaaatgatggctggctttcaactgcaccctccatctttgagtaatttgtcaaaatgatgaagatgaagggaaagaggagaggcacctgtggtattttctccagccttttagaaaacatggtgttgttcctttggccgcataagtgccaatctacaagaaaggtgatactgtagacatcaagagaatgggcactgttcgaaaaggaatgctgcacaagtgttaccatggcaaagctggaagagtctactgtgtaacccagcatgctgttggcattgttgtaaacaaacaagataagagaaagattcttgccaagagaattaatgtacatattgagcatattaagcactctaagagctgagatagcatcctgaaatggtaggaggaaaatgatcagaaaaagaaggaagccgaagagaaagggatctaggttcaaccgaaaaaccagcctgctctgcccagagaagcacattttctgagacccaaagaaaaggagctcgagctgctagaatctattccccatgaattcatggcatgataggcataaactaaataaataaagaccttgggatggttaaaaaaaaaaagaaagaaagaaagaaaaaagaaaaaaaacgatgtctcagtctcatcctaagaacttctaaattaattggtctaggagtgtggcttgggcattgagattttaaaaaatctccccaagtaattctaatacacagccaaaattgagacttatggccatagaggaaaaataccaaattatggagaaaattgtgggaagttcctggggtaatagtagctgttttgaagttgtgtgtgtgtgtgtgtgtgtgtgtgtgtgtgtgtgtgtaccttagggggagacatatctgagaccaggggtggtgcagcacttctgtgggaggttaacataggaagggaatttaggaattttgctcttacttttccaaacattgctttgggacgaataatacccaaccttctacttgcaatgactctgatgcttcaaacataagagcagggcagcataaaagtcttgatcctgtgagatactgagaagaacaggtgtagattcactaaactaggatcgcttttctacctccttttttccatctcaaaatctgcagatctggggatttacagcattggaatgtctctttttttttttttttcggagtctccctctttcgcccaggttggagtgcagtggtgcagtgtcagctcactgcaacttccacctcccgggttcaagcgattctcctggctcagcatcctgagtagctgggattacaggcacgtgccaccatactcggctaatttttgtatttttagtagagatgggatttcaccatgttggtcaggctggtctcaaactcctgacctcatgacctgcccgcctcggcctccccaagtgctgggattacaggtgtgagccactgcacccgaacggaatgtctcttaatatggtatcccaagaagggcaaacagtaaaatcttgacgagctgttctgtggaacgaggaatgattaactttggttttctggggcctccaccagaaaactttccacactaagtctcattcatcccacccctacccccatactaaatactctgatgagggctgaaatccggcttctccccacgtacactgcctgatgccctcgtggggagatgagttcacagtccaaactaataggtcttatcaggagcacaactatttcaaaggaaaaacaaacactggattacatagttcatcagaagcagcattgttagaaagacaaacgatttaaaattagcctaataaaaattctaagacataagaaactagtagtaatatgaaataagaataaaaaatatactcaagcagctatattaggtaaaaaacatgatagctgaaataaaactgtaatgagataaatggcagaatgaatacaactgaaaaataaattagaattggaagaaaggattgaggaaagaatgaaggaaagtacaaacaaattacaaattttttttaaaaagctatacaaaggaaagaaataatggttataagttctggctaataagagtccaataaaagaagtaataatgaaaagaaaacatggaaggaatacatttcccacaatttaaaatacaaggaagaaagacttcaaattgaaagagcccttagaataacagataaagaaaacctacaaggaaacatatttcaattgaatagttt

SEQ ID NO: 1245347 - DNA, 4001 bp, Homo sapiens
aaagtcctcggtccctccgagggggcatcaaggggaggggcgggggggctggcggcgagggggagggaagcggcgggaggggaaggggtgtctcttctgggagcgccgggcgccgggagcccgcggcgcgggaggcgcggagccgcgtgcggggccgccgagcccgaaccccgcgccgccgggcgcctccgccccgccgagccccgcaggcgccggtacctaccgcccgcgcgcgagaaggggctctccgtgcaccgccggcgccgaggcggcgttcatgtctaaccgccgccgccaccgccgccgcctgctcctgcgcccgctcccgcgcctgctgcctccccgccgccgccgccgccgccgccactacagatccgcagacacacagccaagatccctgactcttaacaccaactctcttctccggggaggggaggggacggagggaaggggggagggggaaacacgccgaggcgcacggaattgcaagttcagcaaagaaatgggtgggggggctccggcggggagacgcgacttgctccgggtcgggcaggctaggatgcatccccctcgcacccaccccgaggggaaaaaaaaaaaatctcaacacctcccccgcctcgccaaaaaatacaaacgaaaattcatcgagcacctcatttttcctcagatcgtcagttacaatctgaagcctgaacagttcagtttttgcccgttgcatccctcggaggcactttgaaatttattcgagtttacatcccctcacttctttctttctcttactctcgttccctctcactcacacatccacacacggcaaagcaagtttatactaggctgcaaatacacgtgatgcaaaaagactttgccaagaggaacaatatttttctttttcgtctataaatcaagccacattttcctggggagattttcgtttcggtagttttgcgttgggggcgaaatctgaattgcatactttctttcccctcccttttaagtcacagaatagtataactgcaaacttcgaaaaaaaaaaagggcaatttttgggggtggatgttgttttgtttttgcacttgagttcctaggcacgctaagtccctgttcgccagcactgtaagtttttaattcaacatttaccattataggccctgcatgctcttaaaacatactttttcacatcactttttaggataaaatttaagcttcataattctatcgtttcgtaataacaagcgtgctttatccggtatatgcaacataagctattttaacgtgtgtttgaaaaaaaaaacacacattctacaaatcctggtattgctagatgtgcgagtacatacacaaaatgcatgcacacactttttcccattggcaattatttaataggttgtcccttttgttttaataaaacatcgggatcgacattttaaaaattaaattcaattacaaacagtttactctgacggcaaattgaaacgttaccttaaatggccacaaatattctcacaatattccaaggaaagagactttaaaaagagagacaaaaatcttctgcaagtacttagtatctcacatgtgtatccccaaaaagtattttaactggtactcagtcctgctccagggatatccacagattacaagattatgcacctggctctggtttttgcattttccaccataaaactgcaacaaaattccctcccccaaaaaagaaatcattaaaaaaaaatccaacaactttttcttattgtttataaaaaaaaaaatgaacacaggatagttataatttttcctcaaacaattcttgttggtgattttttttcttctctcataaagtcttaaacttgttccaagtttagaggtgtctcatcatcatcatcctcctcctcatcatcatcaccatggactcccccgtggagtcacattgataataataggtttccctgaaagatacattgtaatccattcacatccgggaactgcgggcttataaagagaaggagctgcggccgcggctgctcctccagacaatgactgggaaggggcggggcgggagcaggcgaccatagagtggtaaacagagcgcctagagaggcggccaagatggcggtgctggtcgaccacgcctcctccgggagcggaggcgggtggctgttctcgggtaggcgtcgcgcgtggggcggcactgtgggagttcccgaggccgaggtcgttcgcaggccccatttccctgcgctcttattcgtgttgccgcttcttggccgtccttgctctttgacacaaaagtgtagtttcggcacaaatttacaaattaaactccacagacttccgcagggaagtgagatacccccaggtctccctgaggaaggctcgggaaagactgggccggcctcactcacagtaagcctgaccctgggttctcccactgtgtggagccagatttctcagcgagccttgggcggcatgggaaaaggcctctgggccaagttggtcctaggctggaagagggatgtgggtcctctcctccaactcccccaccctatcttcttatagagcgctggaagtgtgtgaactttccaagtccaaaaagtcttcacttggcgaagaccttcatctattgctttgtagactcaaatgtagtttgtgccataagccacgactgactcaacccatttctggccaagcagttaccttctgtagcctgttttctggtctgtgtaaagcaaataacgcccactttacgaattttatagtggatacagataaagatgaagccaccacgaaagaaataattccttttcatctcttaattccttgctaaatcaactgataccgctaacctagccaatggaattttaaatggaaatttccctactccaaaacaatagcttttagtctttgcaacagaaaagcaagtaataataatgacagataacacatgtgtttactatatgctaaacagtgttcctataacttcacaaatactggctactttaagcctaagaataaccctatggagtatgtattactactgtaatttgtatattgggcaacagaagcaagtaaaattgagtagcttgacccaaggaagaagttttgtaagtggtacaaacttaactaagtcacacaactatattgagtgacagagcccacctttgaaaccagacagtctgtgataacagtccacattcaaccatattcctatataccatctggcagtgggaacatcctaatctccatttgctgataaaagtttgtggcagtaacagagttcagatcaatttcggcgatcttttacttacatgtaagtttttacagaacaagaattaaggcatttattggttgtttcctgtacattcacacatggtgaagattcctgtcttccatccccattcggtgttctcatctcaaaataatatcttacatttagacattactttttgctgcattatcacaagcatcatccccaattctcagagttaacccctacaggttctgcttagatgatgtaatgaaaagatcacaaacgttgggttaggagaaattccactggctctacctctagtcattctttgaactaaggcccaatgtcaatgtcttttgctgtaaaatccagaggttagattagataatccaataaaaccccttctagcttttaggtttttaagactcctcattccgctgaatttctttttttgtttgtttgttttgttttgttttgagatggagtttcactcttgttgcccaggctggagtgcaatggcacgatcttggctcactgcaacctccacctcccaggttcaagcgattctcctgcctcagcctcccaagtagctgggattacaggcatgcgtcaccccactcggctaattttgtatttttagtagagatgggatttctccatgttcatcagggtggtctcaaacccctgacctcaggtggtctgcccacctcggcctcccaaagtactggaattacaggtgtgagccactgcacccagc

SEQ ID NO: 1245348 - DNA, 4001 bp, Homo sapiens
attcctaggaacacttaataacaaactgcaaataacaaaaccgcaatacacgctaaatgctacaaggtttcatttcaccatccctgcaagaaatttgcttacttttagaaattatgtgctgactttaaaaaatccaaacaaaatgtaaatcgtatttttattaactgttaaacagattatctgaaacattagagtaaatctcctctcaaaaatcatagcaagactcctgtatgttattaaatctctttacattttaaacaggaaaaatactccatttctgagtctaagttcctagcccttcaataatccacactaaaaatcagattaattggaatttaaatatatctgtgtgtgtcttatttctgtaagtccttaaggaacattattgtccactgttatccccaagtcttgcggacttcgtaaaggagtactagacacagggcaggtttttaaaccattatataaaaaaaaactttgatataatctaagttattctcttctctggtaaaactgtagctacctaaaagcaagtaggtacagcaacataaaacactcacacagacagacacacacacacacacacacaaacactcaaacaccaccaccacatactcagttaagatgctggtagtatcgctacttgttttttcagctttaattcactgtgttgaaaactactcagaaaatatttgatgtctctcttgacagtacagcatgtagaggcagcccccagaattataaaccaaattgcgtttaaaaaagaatggactgttgaaagaatgatccccactaaaaatacagtttaaaggcaactaaggtcatcaagagtaaaatggctagtggcttaatgtgacatccaaaatgattcccccaaatctcatcccctttatactaaaacaatagagggttgcctctaataagttaatatcattcctcaaaatctttattgagaagcacctttagaccctcaaatctgcctcccagaggaattccatcaatccagacattactgaagttctgagccaaaaataaagggaaaggggcggggggaaatcacaggaagttaaactgttaggactgcagccagggaaattcctttgataatcaagccctaccttcaccctgaagcgtagctttcaagagttgaaataataactttctttggaattcttcatccatgaaaatgcctgggaaaatgatctaaagcaataatcctaagaaataaccaagagaaatgaaagcaaaaccaaagatttttaacactggtcttccattttctgacactgcttttcatgtttgtctccttcaagtttctactaaaccaaggccaagtctccccctgatgttctatgcagcaccacttactgagtaagactgacagtaaccacattttctgactcaaggttaaaggtgcacattcataaagtaaaactccagatatagcgctcagtctgccccttagactgactgagtcacagcagaggatccagaatggtttccattcctctatttctccgtctaaagagtcatgacattttcaggcattttggtagagatagcaaaaaaaagttagagcttaaaaaagcagaaatgtttataatattccacattactttctcatttatatgtgtccaacctgacagaaatttgaaaccaaaatcctgaaccatgcatttcaacctagaagcctttgtaaaaaccccagtcaaatatgtccagcaattcaaacttctaaggatacagaagtcgatagatcaaacattttaatcaagagtaagcttttaaaatacaagttacataaatatttacctctgctgtcctcttccatatgaataggaagtaataaattcccccaatatatctggtgattaaaattctaaaatactacttcgtaaacttttaaagtttgtgaactgagacctccactttaaaaggcctttcttttaaggggccttccttgttactctcctgtgctccatggaaacagaacatgagttaatgatgaccgtagattttaatttatttgtatatatcagtcagtagaaggggaaatgatactggctgtgtgtttatgagctacattagaaatttgaacaatagcagaccttttctgaaacaaaaataaaatatgaatcaacaagatctctgccaaacagaggtctcaggacagccttgttcagtcttctgggaatcccactgcaataagcacaataaaagcaggacgtgcctcatttccttcaaccgttcaacatgcctctcttggagatgtttgtaaatttccttcctttacgcatcaagctggcaaactgtcgtcatttctttggggtaataatatcctgttgatgtctgagtaggtctgttttgattgtttcttccacataacacatatacttttaatatcattttcaacacacaatacacggaattatttttcaacatactcgaacacagttcagcaaagtataaccggaagcaatgaagggcagaatatgttaataaaatcctagttttatttttggatttgcaacttagatgtaggtaatagagtaattccaaaagtttaaaaaaaaaaaaaaaaaaagcattctctgctgtttaggaagctgaaaatacttacctctactattttaataaggtatatgttttcattcagttcctatactggagtatggggaatttcacatagcaaaagtaccaaatcagcattaaaacactgacttgcaaaaatggcaacttttattttactggatatacaaattgtaccaagtactttaacaacagagttctaaattcattctggaagtaaattatgcttcaaatccagtcaaataccctgagtgattacaaatttttatctaaataaatatttttttcaaaacttaaaatgtatttggacctgacagtatatttcttggacaaagaagttttacctaaactaaattattcctgattgaattgcatttctcaataaagttacatgacataaagggagaaaattatacacagtgacaattttttaaaataatactcaaaaagtaaaataagaccaactctcaactaatgtaacttgcacttaggcagacattctggtccaaagacagcaaaaactgatttgtgaaatactaaaaataattaatcattgctgcaaagcactagatttggagctaaactaaatggcatgtaccattcactacaattccagataacaccttattttacacatgtaataagaatcatgaacatgaaaaacgttcagtgtcattaatccagaaaatgccaatttctaaaagaacacaaccagatactatgtcgactaccacgttaataagataaaaataatacaaattggcacagccttcctagatagcaacttggcaagatacataaagagcctttcacctaataattccctaggaaactatcctaataacatccttgcaaatgcagacaagtgtttatgtgcaaggagtttaagatgtggtcaacagttgcaaactcttaaaataaattatggaagatccatgtgatggaatattacgctgcctttaaaaatcacactttcaaaacattcaaggacattggaaaatattcatggtaaaatatgaagtttaaaagcaataaacaaatttcatgttatgtttttaaaaaccaatggaagatagaatctacacagtaatcaaaatattaacattggctatctccacaatgaggatacgttacattttaataaaaaataaaataaaggggtaggtgtgtgtgtctatgcatatatgtgtgtatgtgcatatatagctgtatatatatgtgtatggtgtctatagacagatatttaattatagtttcaaatttcaaggatctcatagtctattattaagaatttatcaaaatcgagtgggagtggtatatatagatgagccaagaaggcagaatgctggtaaatattgaaactgtatgatggtgacacagaagattattctactactgtgtatacattgcatgtg

SEQ ID NO: 1245349 - DNA, 4001 bp, Homo sapiens
gagacacagcactcagaggcttgtcgcccaggctatctagcccgaacatttgcactcacattccaaagatgtttccgttgcgctggaatggctgtaaatttctttcctgcagaattctttccaaacaaactgccatgaactgcactccggcaggagctcttaaccaagcactgttcacctcaatgcaacaaatctttcagatgccgaatatgactgaattggtggctgggccaagggagtaaactttaaaaatgcaaatatatacagggaaaaaacaaacacaccaacccaccagaagtcgtaccttcctatgtctggtacgtaaaggaaactttcctcataggctcgatttaattacaaaaacaaaactttgcttacatttttcaggggtatattaaatgggctgtttaaaataaaattaaaatagatttttttcccccatcaagaacatcagagggtgagagagttcaagagagtaagcatcccctttccagcatttgaaaaaaaaaaagtacattttgtttgcgtgaataataaaaacagtagagagctctgaatattaaagaggattattaaattccatcaagagttttccaaagtaagaaaccaatgcacttataaaaaggaagtataaatttttaaaaaagattttaaatacatgattaatactgatactgaactgaaaaagaaagcatctataaaaactcagttgtcttgaaacaaagcttatacttttagctattgacagtatttttagaaataggctctctctggagagtttaaagtatacaaatgcaaagtgcccagagacacaaacacacacatgctatacctttgtattacactggcattttattatttaattaaagtactcttatttttctagctcacgcatgcttcccttgagacggctttgctgttagcctgctggccttgacttccagccaaaaacaattcagaaacaaaaagggacaacaaatcatattttcacagacatttttatccctcaatacaaccctgttttcacacaacatcatacagcccctatgaaaactataatttagggcaatagccacccgaaacccagggtctgacacatgactccgcgaagtatttcctgcgtaagaaattcttaagttcttaattgcaaataaactcttttaatagaaccactttcaccgacattgctggtttgcaaacagtgccactggtaccggctgatggattaaaaaataaaaacaagcccatgaatgtagttctgatacagcagcgatctaaagatgaggtgtttattagttctaagctctgtgttatttcattacttaaagagagagccatcatctgacttgccggtgcatctttggtgtcacagtttaaaatgcatcatctaatttagaaaacaaactgatttaccaggttaatcctctcaacccttccgcaacagagattctcacttacctggtggcaaccctgtaagtttgattctctcccataagatgagtatgagcccctttctgttttacctgccaagagaaacgacaaaaaagtgtaaattgtgtttttccttaaaaaaaaatctcctccaggtaacagacatctactgctcttccccgatgtttacatacgtaaagtaggcactactggcaatgtatgcaagcaagagagggaataacacttcctcactctggctatgataaactggaaaaaaatatccttcattcctattcttagccaaactgctccacacttccaaaaactgtcattccaatggcctccactttctctaacaaacaaatcgtaactccttattttcactttctcttgcacaaaatttaaacaatttcatttttatttacacagcaggcaaattatctatgtaatgaccctagcctagtaattcccattgattatattgacacttaatagtgaggccaaaactaatcaatcacaggctctccagatggtgaatttagcaaagaaactattcaaaattctgagtctctctctctctctcttttttaaaaactccctttcccaggagtgaaccccatcatgatcaagatgatgatggaatttacatttgggaaacagggcttttgaaaaattgcctactctgaacccaagttcagattccaccaatagacccagcaggacaagggatcatggaatgtgaatgtcttgttccaattctaacaacccaatttttatctgtagactgctctacagagatctatagacccttcgatgctattcggccacatctaagaataaaatcaagggtgttcatttgtttctttttaaagtttaaccccaataatcattagggaggataatgaaatcacattacaagagatctaagcagtagagtccagatagtgacatgtggagaatcattgtagaaatctgtccataccagaacattaaaaggggctaaaagaggcaggcaggtgcctaagaccccaccccacgcaagtctaaaggatacttctttcgtcaagactggagctttacagtaattgtacttgatacataggactacagtattcctttttccaacaggaaaactctaaacttgtattttgagaggctgaatagatttccttctgaagtttacaacccccaagttttcccctctcaactcaacacgaatgctaaaagtaacagtagtctttttatcttttaggtcaatggcaatggcaatgttattagagtatgccttcctgaccccacacaaagaatgtatctttgatacatttatatccataaatttttctatgtggtcaaaagggtatcctgtatccaagtcattacatatataaaatggatggtggttttcaaagaaagccaaacctaagtcttaaaattaaccccgtttcccagtattaacttttctactgattttaatgaatcttaaagttgggaaaacacctccgccccatttctggtctagcgctcagcgcaaagtataaaatcaatgccccatatcagtttcaatttcagtgaaacaagacaccatcgcacagactgtcagtcttagaagatctaacagaataacttccattgtatgaggattttgcactgaagaaaagataaatttatacttgtatcagcagtgtgaatggtcacaaagacatatttactcatctgtgtacatcaaatttaagctacttataccctttaacttctctctataaatattactaacagaaaaggctcgaccttcatgagctatcaaaggacgcgtgtccttccttaagctcttgcatctaagaatgcttcaatatcaccattacatcacttactttgatgtaatattcacttgtttaacaggtagataggcaggcaggaagctgggcaggtaaggaggcaggcagaaagacagaaagatggataaagtagaatctgctctgacttcctaagaaactgaacatctagtgtcctgttttggtaatttctaaaaatccaaattgtaaaatacagtttaaggaagaaaaagcatctatttttttctctagaaggaattcctgaagctatcccctgtagaatttcaccactcagcattatttcccaacttgactccaacacacagaacaggagggaggaatctttctgccaggatttgcctcacttatagatataagttgggctactccttccattattttaaagataaaagggcaggattttaaaaggagagagagaataagtaggagaaaaacaaagagaggaagagtggaatgcaaagagcaagaggtaggaaaagaaagaggcaggagggagaggaggaggagaagaatatgaattcacgctgcagagtccccaaagtactcttggctacatggaacccagcattctttactatcatatcagatacagactgcttaatcttaattttgcttgttaaaaaatatttatccagatacaaaaataaacccactgcaaattacaagttgtcagggttaaaaatctactcctgtttgtgtgggggaggataagagacc

SEQ ID NO: 1245350 - DNA, 4001 bp, Homo sapiens
tctccagtttactcagtcacataagccaccagaggctaaccacactgacaacaaaagcaagtcccaggattccgggggctaataccatgctaggcattacttgggaagttatgagttggtatacatctgtgaatttggtgggaggagaaaactaacagtaaatttatcaaagccagtggaacgttcagcgttataaaattacaaggatctgcttctcggcgactaacctgctttttcacttctgccatcacttcctcatttacacatattagaagctggtcaaagatttcattagatgtggttttgacaataacagcaaagtgcctaaagccacagatttttaaatgagccccaaattcagatttgggggaaaaaagaaccaatcacagcagaaagcgctttaaaagaaaaaaaaaaaaaaaagaaacattatcttgagcagttattctgcacttagttgtactgtgtgaaaagaaaataaaaaaagctctataaaatgtcagaattaacctatcgtttcagattgcttacaggtgaaattctaccatctggatgggcagtttgcccacacaaaaaaagaaataaactaaaaggaaaaaaaaaaagtaaaaccttcttttgcctgctattttaccacaatagattttacaggagagaggacagagccaccataatctttagacatggacacacacacatttacacacatgcctgtgtacacacacacaggttcatgtacaaactgtgacaaaataaaagttggaagaagcaagagattgaaataaaattctgtttcttggaaccccaagagtttaacaaggaatgaaacccagtcattcttaatcacatacaagggaaaaaagatttattttaaaattttcgtgaaataactgatgattctttctgttttactgaaatactctaaaaaataaggccccgcatatcaaagtttctctcttcccttaacaaggcgtattataatctttatttatgctgggctagcaactttgggaattacaatttaactttaaataaacaggaaactgcatcttaggaactcccagaagtcattttattcatctgagagtgaaaatgcttataaacgttataatttataaagaagtacacttctattttccctttttcttaatcattatacaaaccttttattaaaacatctgcctcagcaaaaagaccagttttaataatcatcattttttaacctaaagatcaaatagaaaatgaagtcagactctgtttaagtttttctttctaaccttgagggccagatagaactttcagtttaacttcaggcttgtctgtcaaacatggtaccaggttggcatcaagtgtacatttgccaacctaaagttccacattttgaaagcaacacacagaggctttcataaattaacagctctctgtgttaaatatttgtcgatatctctgctctggggtttctgggtttccattttgattgcagagtgtctcctaaaattacatttgaagaacaacactaaaccagaagtgttgagtgagagaattatgggcacattctcaaactcttacactaaaccacaaagggaatagattaaaaagaaaaagcacaaaaaaaaaaaaaccactatcatccaaaaaaaaaaaaaaaaaaaaaaacccaccctgaatagagaaatcgaatacttgcttttctttcgaccttatgggtagcacgccgagggaggcaccagaagatctaagcccaaatacgtgatgaagagtcgccaaaaagcatgtggatgaataaactgttgtggcgtgaatctgccagccagaggacagaacacaacatgctggggcttggctgtcctaacatgttttactatgtacatttaaatagtcttgaaagggaaaaggaaagaagggaaaaggtggagggtttggggggttttttttaatattaaaaaaaaagtttgccagaaattctcatacttgggtcacaaataaaagtactttcctattattaaaaaaaagagaatctagttcttaggctaacactcatcacatgtttcctatgatggaaatttaggggggtggtttaaagagttaaagactccctaccattaatttgcatctggtgcttttagtgtgtgtgtgtgtttttttcttccctgaaaagttggcagagccgccgattttccataatgcaagcatttgggaattgtgagcggaatgaaaccgatccaatctcctgactgcgacatgaattttcattaattacaaccttgtcagcaaaagcattatcaaagctgaatatgaaaatgctaatgagtcctcatttgcatatttttctttgttggaatgtcattaattattacattttatgatgatgaatgcagctgtcgaagctctccgatgcataattagccatcagaatgccaggagccgatcagcatttttgggtgaaaaaaaacaaatttcacttccactctcccccaacccaacaccaccaaacacacacacacacacgcacatgctcacacacacacgcacacacagactcggagccctgatgatgacagtcctgaggccggactttgggggaagttgaaaagggctaggttaaagcaaatttatttttgccttaaaattattttgtttttaggcgataatggtcttatacaatagaagcagttcttaataaaaaaaaatcgttattccagcttaattaatgccacgcttaattataacaccatgatgtcagcggttttaattaagtattggctccgttacaaaaaaaaatcctcactgcagtaagagtcacaatacacagagttgtgcaaatcatttctgcgatattttggtcttccgtggttcacgaactattcagatattaacaggcagcattaaaactccacgcacacacgcgtgcgcaggagaggcacacgcgcgcgcgcacacacacacacacacacacacacacaatcaagcaaaggggaaaaaccgtactttcctactacattacttggacagactttagagcttacctacttgaccacttttttgagctaaagtgtaagtgaagatgacaaaacatagctcatcctctctcagcctctgggaacggtgtttataagtaaaaaaagaaaaacaacacagagcagatgggaccattacacatgaccaaaccaatcaatcacagatgaagggcccaggtgcagcgcagccgtgcaacaacgcaccatttcacagtctgtcagacacacacacacggtcgtccatgagtgaccctcctcagctccccccggacctcatctggggcgctgcgcccctctcgcctgcctacactccaactgacgtcttcataatcgccctgtctttctatctgctttggctcctgtaaagagaggaggatggaaggggtggtgactgggcggaaggggggatgggaggggagatgaggacaggggctcacatcattgtcacttatgaggagtccggtcttcctccttctgccatccccatggcccctccctctccaaccaccatcagaatcgcttttctaaccatcattacgctcattaatttttaagggtgactgcttggctgcggcaccccaactgtctgccattagaaatagaaattttgtgtgtgagtttcttgcctgtgaggaaaaaagatgtgtgtcactcgacaaagtcatgattagatggaaatgttagaaattaattaattggaagtgggtaggaagacttttcttagccccctccagattagttaacatgagactctagttacccacaagcttccaaggaatcagctctgtctcaagattttgtgtcttaaagaaattccacagcctttggcatcctatatcacaaactcatccaggaatcactgaacccaaatgaaattgtacatttgtaagggtcacaagcttacactggcaacataactgaaacaccaacttaaacacaaagttagggacaggctccctgctttaaactcagaattcctaactc

SEQ ID NO: 1245351 - DNA, 4001 bp, Homo sapiens
aaattttgtcagttcagatatttaagatgcaaaattaacaattaacatgtaaaagtcacatcattggtaatcctgaaagataaaaaccatggaaacttatattcttttataatgtaagtctttcattacggataagggctatctaatccctgaatctgcttcagagacacttttgcttactgactacgatggcatcattcacaaaattttcattaaaagtgctttaaaatgaaaggtgctgaataagttatgtatgagaacatctaaaagataataggcaaaagtcttatctatatatgagtaactaccaattgcaaatcatgtacttgttaaaaaaaaaaaaagatgttacataatcccaatatttatgtttacagatttaaacactttgatcaaatcacaacgaaaaccatttgttttaaaattatatttcccttaccacacttaactattttaattacaccgtgctcttttttaaaaaagataaaaataggatagcgctatgaacttttgatgatttactcgtacttttcaaaataaaagtaaacgatattatttcaagttgcccattcataaaactggcttcttaaatgaaattattaatcttctgaaactgcaccttcaaacagttgtgtatatgtatgtattacagaatatgctcatctagaaataaccgttatgcatgcatctgtatgtatatacactcacaggcatatagcagcacatacacatgtttaattcgtttgcgccaattgctacagctgaactgggccttcctgaaagctctgatctgtcccctttggcccaactatccctgattaagatcaatccaaatggaagttcaaagtacacaaagagaacagtttataaatggctgcttttcacttttctctcattcttcttttctattttaaaacaataaatttttgctcctctatcacccaacaactcttcccgagagccccacataccgatttgaaaatattgaaatccttttccttcagtgggcccagacgaaggaaaaaaaaaataaacctccagatggcaagtataaaccttctgctggggttatgcacaaaataccagacacatttttttcttaaataaagcgtttctgttggaagggggggaaattgagggaagaagccacacagcacaaataacttatgacaatactgttatatgcatgaatgaacccgtttgtttttccttccccattttggctttaaatatatatctaagcttatataatctactccttaatttgatctctcagttttatgtgtttgctctattttaacctttcaggttctctccactctatccactgcactcaagcttccaacttagtaagactttagatatcacaaaacctcaatccagggagaaacttaccccaaatttcctctcagcctaacttgggctttctcaattctgcttctcatatctgcttttcctttctaacagtcatttggaaggaataagaattttccaaaactctttaaaaaaaaaaaatcataccacctctcaactttacctgactgcaaactttcgctctaggatccactctctaaagctctgaaagcatctatttttctactctgggggaggagtggggggaaaaaaagacgaaggagaagaagtaggcaagaagaagatcttaggattggcaaatgataaatatttcatggcacccaggaaggtgcggcagtcctgcacaactttgcaaacaatgatcaccacctaggatgctcatccctgcgacaataaaacttgtcaaaaatccccctcgcagcccgcattcgcttaccgctttcccattatagtagtacatcaaagagttgccgcccatgcccgggattgtgtatgcgcagtacatggtctcggattcttttttctcctcagtaccactctaacaacttttatttcaaactcgctgtcccttttttcacaacaattccttcagttgcattttcccatatggccgggccaagcgtggtgaatatgcaaagcaggaagagaccattcctggcgggcgggggaggccgcggcgctgctgtcagacgctcaactttgcgcagcggagctggaaggcagcccggccctgatggagctcgaaatcctaatgcatacgcgagatcgattcaacttttccgaggggtttttattagttcctcgaataatgccgattcttacaaatttctgcagtcttcacttttttctttttcttttctttttttttttcctttttttttttttttttgttttgttttgttctaggcacccttttcttctctaaaatttccactcaactgccttagggtaaaagtggaacagggtccattattgagcagaatacaaatgcagttaattgactccccctctctctctctccctctctttcttttttgttttaatttgattaaaaagcgagtggcaggaagggaatcgtatgatgcacatctaataactctgccatctgtctctgctgctggctagctcccagcattgtacgcagctgcctgagaactcgactcggagaaaggggagggaaaggggagggaagaaaaaaaaaaaaaaaaaaaaaaaaacaccacgtctctgacctcgctcaaaaggagagagggggcagtgttttctgactgcttggtcaacaacctacaaaacggggttgcggaatgaaacagagtagcagtgcggcccgccccgggctccgcgggccccggcctccccggagctggtgggaagcgcggccgcccatgaacttcacctcgccccgccgcagacagccgcatgggcccagagcctacggaggggctggggcgctgctcccctcgctggcgctgggcgccccaagggcgcacgttctccactctggagttgggtgctttcactgtagctttagacaatctactgcaacttcacgctatttgctgggctctaaagcaagtttattggtaccttcgaaccgacgaatatcttacagctgtcagtttccccaaaggcacccctgagaccacattttcagagttttgcagcatccccgcagcccagtatctgtataaatattttagcaaacatctcatgcacatttttactaaacttcgattttgctaaactttaagaacgtgaaaacctttgttcacctttattgatcacaactgaacaatagaatccttatagatggcaaggtttctcacaagcaagttgatatatttatttattgtcttttaaaaatattataccaatcaacaaaaaggcggggggaggtacaaaaaaaggaaagaaagaaagggagggatgtggggagaggagatgggctgacttgagcttgccaaattcagagcatcacaggaaaggagggcctctgggaattgatcccaaatgaaactaaatcatttgcatatgccgaagcaaatgccacccgagcatacatctattctcaagaatcaactttaataattcaaagcacctatttccttacaactcaatatgctaacaaaacacatacagtattaataaacaaggaggaatagtggtgttggttccgaggagcaaagcccgggctaatggtggaaagtttccccactctctaaaataaacacacacacaccgcacatccacacacacgtatcgaaggcccagaggtttgtctaactcacttgctctgcatttattcggaaggtccccagaggtttgtgtaaacagtacttgaattataatcacacatttcattcaaatttcatgctttgaggattttttcctcattagaacagttagttgtcaatctgacaggatcacatttgtaacctttaaaccaccctcactgcttaatacacaaggccagggtacccacctaccagaggacagtatgtaaaaaccaccacttagaaaagaggctggaatttaaagagataagttggggagtttcctggttgttgtttctttgttgtttcttcccttattgagaaggcttttctagatcctaactttccatgggt

SEQ ID NO: 1245352 - DNA, 4001 bp, Homo sapiens
acatgcgaagggcctcaggcctggcgttgccatcaaatggtaattgataccatatgagccacaaaatagaaaagcacatgcaaacagcaaccactctcgcggcaccctcctccctcccaccttccaatcccctgcttggccccttgagagggatgaaattgcaggtcttgccgggctgctaagtgcacagtgcaccatgaaaaacaagtgtatgtggctccagtaaccacctgtaaatcagagagaaaggagggtccactagccaagagctcgtcccagagaacaggcgaaggcaaaaggtcactctgggttaatacaaggtcatcgatcatgggggaaaatgagcacaggtgtgaagcagatcacaggcccagagcagggaatgacccccctggtccctcagcacatccggcctggagaaagctcgttaccgctaagccacatctgtcttcctcccctcccaccagtgagatagtgggaaagtggaaaccactccccaattacaaggcaattagaagaaaagtgaccccaatcccgtatctgctgctctccttttctgaagcccttttgcatcccattgttctcacagcagaaaaaaaagtcaagaaaacccgctgagctgggggttctgccaattgctggttgaatgtaatacagtaggtaaaatccgtctcttatttccaccaacactgacagaagtacaagtagcatacggctctcgcctctgcatgtatatattttcttattaactcgatcgggcagaaatttgcagagatttgtttggatttagaagtcacaacagaatgtcagtttcacaaaccaaggctcattctgtggtgaaatgtacagctctggacccaatcgttcaccgcacacagctatttgttccaattcctccagcagccgcttctgaacaaacaactaacttattctaaacacacgcaacggctctaatttttcttccttccccctatcccattatatgtgatattctagtcttatagatcttatgaagtttaaatattttccagatgggcctagggagcacagaaccgtgtaaacactttaaattataaaagggccaagtaaacacttaaaacagaagaggatgatgatgagattcttcttttgcaaacagtaatctagtgagctaacaccaaaaactgtaaaaaaaaaaaaaaaaaaaaaaaagtggggggggattcgggtgggggagagttatcaattccctttctccccctccaaaactcttggaagatgagctgattcatcctcgtttaggttgtatctatttatatcttttctaagtaaaccgtttctgagaaaaaaagatgatttaagctcaatttacaattcaatacatcacaatggtaagaaacaaaaccgtggttgtaaccgaatgataaattccactgtcctgcagagggaaaattaataaggcctattaactccgtccgtttgccctgatcctcagcagtcctctattcctaaaagtctggccacaaaagacctgaacaaggtggcacttgccaaggaccctcggccacgaggcaatccaggaacattcgtaatgacagtcagcaccaatccaaaagaaaaggacgtgagcagatgaaggtggtaaagtaacccgggcagagcgaattaaaatgaaagttctggtgaatgccagggaagacagaagtagtgcaaagcaaatgggtaacatacaagtcaaagcagcacagtgcagcccaagaggtgtcaagtcaggcaggctcaggatagaccactttggggagactctgaccttacctctgctttcccttcgtggtccaggcaacatagccctgtatctgagcatctgcattgtttaaatttcatcctgtggtgttgtttgctgattggtcagacatggctgacagcatcagaacttcaatctgacacacaaggagcaagcaggaccacagcccagaattcataatgggagggagagagggaacttcatgctggatatatgaaactcagacccgcagatgtccgctgtgaggcctgtggctggcctaggggtgggagggcctaggatgagaccgggaggagggcatgaagaaggggaggtgggacaagcccagccacccaaatgaccaggcatgaggcgtcccctggataaagctgcatctggagcccgtttagcagcttccttcttgccactcccagttcctgtgacctcctgggaatagaggaggtctccttccctgaatgcctcttttacagaataaaagtggtgttttcagtttggggcaatgcatttatttctcaaaatatctgacattttcccaagtagagagaagctactaaagagagcccagttgtcaaaagcatcccatccagatttctcttatggtgaggaatggcctccaatttaatggacttccttaactctttgatagcagtaaagcaaaaaagtaaaggaagagacaaaaaggttgaaggtgtttaagacgtggcaagtaaacttgccatagaaataatgaaaacagacagaaaagaaagaaaatagcttgcaagtgggagaggaaagaagaacctccttctcttcctacttccaacctggctcccagtacgtacacacacacacacacacacacacacacacacacacacacacccctacacacctgacccagctactggcaatgggtgcaactgagtttacctgatgtaaaatgcaggatcgctttccctcctgaaagtttatatgtaggattatcacctccaattaagggtcagtgttagtctatttaaacttttgccttcgtgtccctactacatagaatcatgactgcaactctagggaggaatatcagtcgaatataaaaatccaagcagacttcctagggctcagcaaagaacattacttgcaatttttctctttcccaatttctccttttccagaattctttgttagaattttggagaaggtatcatggattctgtaataattacagaagaagaaaagatataaggtgaagtaaggacaacagtgcaataaaaaaagatggataaaagtggcaggatttgaggataaaataatggctggagagatcaggttattaaaacaaacaagtgaaatggacagaaaaaaggaagaagaccctttggctgaggggaaggaaaaggttaacacgacatgaaaatcaagatttaataaaaattaatccttgaaaacaccatcactgatttaaaatcaatttgaaatagtgaaatagcaaagcaggacaaaataaatccatctggtttaaaataaaagaaaacctctaccacaaccttctcacctcttcacttccaaaaaagaaagaaagaatctcattttcctttctacggtgtaaacattagttatatggcctaattttctaaataaagctggaaagacaaaccagtgaaatccaaagagttaaggaaaggatattagcataaaggaaatatatatgaaaattagagcaacaaagcagcaggagcaatagatataagtaaagctagagggtcagtgtgaatggcggaagttgtgaataggaaaagaagcccagaaggaaggaagtggccaaggtggtctgcatttcattcagtgaagaagacggtatgaaagaaacatactaggcaagcatacagaaatgactgaacaccagaaaacataaacaaaaatataggaattcgatgtgagagtaagacaaataagcctaatgtaacagagatcaaatagacattggaaaaacagaatgcagtttgtcagaagcatttaaaaagtgccttaagatacatagaattataaatacagttttgctaaaggtatgctaaacagcacacctttacaaccactatagactgaggagattatatgaaaaacaatatcatgcatttcttgaatctacttcctaattaaaaaaaactgtcccaacttccaagatccatttacgattgcatgagacaacaacgaacatatcacacgagggcagaattccttg

SEQ ID NO: 1245353 - DNA, 4001 bp, Homo sapiens
cttcaaaagggacttcacactctgacctttcggggtgttttgtgtggtttctccaccccccgtccccctccggtgtattttgtttttaaaccaaactgacggcaagttttagttgtaaagcttccagaacacttcgtggaaacaatgacagccttgctctttgcacttacaaccaagcctgcttgtcacatttggacgcattttgactgcatgccgcttgaagctgctggccctgggtgctaactcttcctcctgccccaaaattcatcgtgggaaaacttttagagactggggatttgtaaaagtctagctttccaaagctgtttacacccgagggcgatgagggggtccagaatcgcattccttcgatcgtaaaaacaccacatccctaaagaacagtgctagggcccggctgggagtaggggggcggcgggggcgggggcggggggagcctaggagtggaactttcagacaaagccgcggcggtcccgcggccccggccgcctgggtccggatcgggaaaaacgaggggctgggtcctccctactcggaccccatatccccagcacgcgagaaagagcgagaagccacgcggcggctgggccgagcgtggggtgtcggcggagacaatgaaacttgcaggcgcacaaacaaggcgctgagcgtgtttcttgacaacgtgccagcagcgtggagaggctcgccccacaacagcccctcgtgttgtgtctagcaggaaaacagccgctgccgtttcagacgcagcctcaacaaagagcacggccgccactccagcatgagagcccctgggcggaaaagtccaccaagtgactccgcgcggcgcggcccggccagcacgtttccccggactcgcgtcttctggtgcgcgcagcccgcggccgccttacctttcttgcctttcattctggatctcccctcccagcgcgaggcaaggcgggggtctggaggggccaggagcggggacacaggggataagcgaacgtctccttcacagccgactctcccgtaacttgtaggacgtgctccagccgttattgctaaacaggacgctctgatcccaggcgcccgctccttgggtggaattcaagtgacacttgggcttcctcccgccgggatcttctggcagccggccgggggctctccctcgcccaactctctcccctcccctctccgctcctttgttccctgctcctgctcggcgcacctcggcgctgtcagagtgagagaggcgaggagggaaggtacaggaggtcctgcctccgcccccagccgcccgccccgtccccctcccgccccgccgctcctccgcccctcccccgcaccttccagccgggaagactggaccgagcgcggcggccgctgtcactcgtccctcgggggcggcggtgcggacgcggggggtggccgggtccagaaacacgatcctttccgcctgccgcgcacggaccgcccgcatccctcgcccggcggtgggggcaccagccgagcgccccaggtttctcccttgggcctttcttcccggggctggcgagggtgcgtttggttcggaaactgcaacagatggaaaaaaggacacctccctccttccctcctccacccccgggaagaaaagcctccccgtctcgtttttgacagctgccccgaactctactggccctgctctagccgcacgagacagccgcctctgattcaaggggcggggcacgggaggaaaagtattcgagacaagaaccaacttcttccagaatgcgcggctgccattgacacgcgggcgcggcgcggcgcacccttctcctcccggggctcttcctccagcagcgacagtgggaggtcggcgggggtggggcgggggggaatgatgagacacagcctaaacgaacgtctgttcccccgggctaaagctgcgagttccggactggattgcaaggcagtttcgaaatctgacacgttgcggacagacacttgtcacgctcacatgctctttaaacgtctctgcccggggacggccgggcgcgcgcctgcctcaccaagactccgcctgacaccccgagtcgccgaaccccggcagcggccacttttatagctaaggggtgaccacgccgtgcctgctcgtctgtttcggtcaacagtgtctactcttcggattggaaccctgctaggggatccctcctcccatttcaaacagaaactagccattaagtaaacacccgttcctgttggcttattttggtccacagttaggagggatccaacaggagtttcttgatgaaattgcgctttcaaagaccagatgctgtttggctgacttgaagaaacgcatgccccctcctctggttctagttttcgcgtggttacgtcctgttgttttgaagcaaacgaactgtcacatgccacacaatgagacttcccccatcactttaaaaaaaggaaagaaaagccctaaacgtaaataagcctagcagagacagcgcccgggtctgcctccagtctgggctctgtgctgtttttgttcggtaacctcggtggagatcccggcagaagaaactctgtggaaataagattaaacccgaggagtactaagacggccaagggataactaactcgacttcggagcgtctgtttcaggaactagagctagcctgccaccctccctcaaaaaaaaaaaaaaaaaaaaagacacccccgcccctagaatgcgtggaggccagagtttaaaaagcctgggtggtttttccaattacaggactaaaatgaatcaacagggaaaaaaagcgtctctctaagaaggcagcaaccttacgatttttttcttctgtggtttgctgactgctcgggacagaagagaacacacacctaaaacggctcggggggagcgcggtcctggggacaagccacccgcccggacgctgccctgcaactgccgggagcacagttccttcccggacctggctgcagatgaatcagctgctgcgcccggtgcgggacagatgtggcgcagggagggggccagcgcccccgccgcccgttagagggggccgcctcgctatttcgtttgaagggttgtctgtggctgggattggtggctcctatccgctggggagccgggagcggagggaggagagacgcagggaggaggagccgggggctgggcgacgctgcgactccgcggcctgagtggcaggagcctcgtctggaaccgggcggttactggggagacgctttgtttgctaacttcgaaagcggcttcggctgcctcggccgctttcgaagccactccacaaaacacgccttcggtcggtttaaccctacctccccccccgcccgctttagccagctcgagacaaaaatgtttccctcttccccgtggttctccttggccacgcggtggctctcattatgtacacaaaggtagctttgctttcgtccaagtggacttggctaatgactgcgattctcaggcaaccgagatgggaaccgagaattggaaagggtttatagcttgaaaacaaactttccaggagaaggggggaggggcggagacaattgaaagcctctttcgaattagggggaggaaaaaacggagatgtgaactcaccttggctagaagtcaggcttgatcgggccaatgcacaacttttgcccgagcaagtcatatccaaacggttgttaaagctggcgaggcactccaaagagaaacactggcacaattctgtgatgtagcgaaagcttacagcccaaccgctcccgtagatgcacccccactgcctccccccagccaacgctgatctcaaacttgtttggagtttcggattcttggtgcattctgggaagaaagtgcctagggtcagcgcaacgtaacaaagggaacagcctcaaaaaagtgggcttcagataccagcaattgcttagggtattttttgttgattcgtttttctcgaggtggaaaaacaagtttcatttctagctctgtcagtcccttc

SEQ ID NO: 1245354 - DNA, 4001 bp, Homo sapiens
gctggccttgaggctaccccccaggaacgccccgcagcgggccgggtctgaaagaatgtggagttccaaactccaggcggctcccgggcatgcgcagtagcgccgcccctcccgtccgcttcccgagtgattaacttctgttttgaaccactccacataaatcacgacagaaacgccacctccagcccacagcggaacactcgggggacctcccagccagggactcaatttttgttaacttcaaaagggacttcacactctgacctttcggggtgttttgtgtggtttctccaccccccgtccccctccggtgtattttgtttttaaaccaaactgacggcaagttttagttgtaaagcttccagaacacttcgtggaaacaatgacagccttgctctttgcacttacaaccaagcctgcttgtcacatttggacgcattttgactgcatgccgcttgaagctgctggccctgggtgctaactcttcctcctgccccaaaattcatcgtgggaaaacttttagagactggggatttgtaaaagtctagctttccaaagctgtttacacccgagggcgatgagggggtccagaatcgcattccttcgatcgtaaaaacaccacatccctaaagaacagtgctagggcccggctgggagtaggggggcggcgggggcgggggcggggggagcctaggagtggaactttcagacaaagccgcggcggtcccgcggccccggccgcctgggtccggatcgggaaaaacgaggggctgggtcctccctactcggaccccatatccccagcacgcgagaaagagcgagaagccacgcggcggctgggccgagcgtggggtgtcggcggagacaatgaaacttgcaggcgcacaaacaaggcgctgagcgtgtttcttgacaacgtgccagcagcgtggagaggctcgccccacaacagcccctcgtgttgtgtctagcaggaaaacagccgctgccgtttcagacgcagcctcaacaaagagcacggccgccactccagcatgagagcccctgggcggaaaagtccaccaagtgactccgcgcggcgcggcccggccagcacgtttccccggactcgcgtcttctggtgcgcgcagcccgcggccgccttacctttcttgcctttcattctggatctcccctcccagcgcgaggcaaggcgggggtctggaggggccaggagcggggacacaggggataagcgaacgtctccttcacagccgactctcccgtaacttgtaggacgtgctccagccgttattgctaaacaggacgctctgatcccaggcgcccgctccttgggtggaattcaagtgacacttgggcttcctcccgccgggatcttctggcagccggccgggggctctccctcgcccaactctctcccctcccctctccgctcctttgttccctgctcctgctcggcgcacctcggcgctgtcagagtgagagaggcgaggagggaaggtacaggaggtcctgcctccgcccccagccgcccgccccgtccccctcccgccccgccgctcctccgcccctcccccgcaccttccagccgggaagactggaccgagcgcggcggccgctgtcactcgtccctcgggggcggcggtgcggacgcggggggtggccgggtccagaaacacgatcctttccgcctgccgcgcacggaccgcccgcatccctcgcccggcggtgggggcaccagccgagcgccccaggtttctcccttgggcctttcttcccggggctggcgagggtgcgtttggttcggaaactgcaacagatggaaaaaaggacacctccctccttccctcctccacccccgggaagaaaagcctccccgtctcgtttttgacagctgccccgaactctactggccctgctctagccgcacgagacagccgcctctgattcaaggggcggggcacgggaggaaaagtattcgagacaagaaccaacttcttccagaatgcgcggctgccattgacacgcgggcgcggcgcggcgcacccttctcctcccggggctcttcctccagcagcgacagtgggaggtcggcgggggtggggcgggggggaatgatgagacacagcctaaacgaacgtctgttcccccgggctaaagctgcgagttccggactggattgcaaggcagtttcgaaatctgacacgttgcggacagacacttgtcacgctcacatgctctttaaacgtctctgcccggggacggccgggcgcgcgcctgcctcaccaagactccgcctgacaccccgagtcgccgaaccccggcagcggccacttttatagctaaggggtgaccacgccgtgcctgctcgtctgtttcggtcaacagtgtctactcttcggattggaaccctgctaggggatccctcctcccatttcaaacagaaactagccattaagtaaacacccgttcctgttggcttattttggtccacagttaggagggatccaacaggagtttcttgatgaaattgcgctttcaaagaccagatgctgtttggctgacttgaagaaacgcatgccccctcctctggttctagttttcgcgtggttacgtcctgttgttttgaagcaaacgaactgtcacatgccacacaatgagacttcccccatcactttaaaaaaaggaaagaaaagccctaaacgtaaataagcctagcagagacagcgcccgggtctgcctccagtctgggctctgtgctgtttttgttcggtaacctcggtggagatcccggcagaagaaactctgtggaaataagattaaacccgaggagtactaagacggccaagggataactaactcgacttcggagcgtctgtttcaggaactagagctagcctgccaccctccctcaaaaaaaaaaaaaaaaaaaaagacacccccgcccctagaatgcgtggaggccagagtttaaaaagcctgggtggtttttccaattacaggactaaaatgaatcaacagggaaaaaaagcgtctctctaagaaggcagcaaccttacgatttttttcttctgtggtttgctgactgctcgggacagaagagaacacacacctaaaacggctcggggggagcgcggtcctggggacaagccacccgcccggacgctgccctgcaactgccgggagcacagttccttcccggacctggctgcagatgaatcagctgctgcgcccggtgcgggacagatgtggcgcagggagggggccagcgcccccgccgcccgttagagggggccgcctcgctatttcgtttgaagggttgtctgtggctgggattggtggctcctatccgctggggagccgggagcggagggaggagagacgcagggaggaggagccgggggctgggcgacgctgcgactccgcggcctgagtggcaggagcctcgtctggaaccgggcggttactggggagacgctttgtttgctaacttcgaaagcggcttcggctgcctcggccgctttcgaagccactccacaaaacacgccttcggtcggtttaaccctacctccccccccgcccgctttagccagctcgagacaaaaatgtttccctcttccccgtggttctccttggccacgcggtggctctcattatgtacacaaaggtagctttgctttcgtccaagtggacttggctaatgactgcgattctcaggcaaccgagatgggaaccgagaattggaaagggtttatagcttgaaaacaaactttccaggagaaggggggaggggcggagacaattgaaagcctctttcgaattagggggaggaaaaaacggagatgtgaactcaccttggctagaagtcaggcttgatcgggccaatgcacaacttttgcccgagcaagtcatatccaaacggttgttaaagctggcgaggcactccaaagagaaacactggcacaattctgtgatgtagcgaaagcttacagcccaaccgc

SEQ ID NO: 1245355 - DNA, 4001 bp, Homo sapiens
tcccaggctggccttgaactcctggttcaagtgatcctctgatctcagcctcagagtagcttggactacagctgtgcaccaccatgctggcatagaatattatggggttttgatgaaaaaaaattcttgaaattccttattttctgttttcaaagatatttgaaaggaatgttgagagagacttcatctgttggtaaaaggaaactggacttaaataggatggggttctgaggtctagagaggacacagatgggtcacctctttaagttcactgggtagagccaagggaccgttactagaagtatgtcataagaaagtacaagattagattcacggtaaacaggatcaccaacccaactggggctagacttagagatgaactctggctacaaagccagaaaactgaagggaggtggtggagaaggtttgaaacatgtggatcatgctagagtggcctggaacatgctataataaggtgcagtagctcttgaattagttgtgtaaatgagaatatcaattctagactcagactgcctgggttcacagtaagtgttagggattattgtgatcattatttccattgactgcagcatcatatactcatatccactgaatggaaaagggtttagaagtatttaagtgagaataattacttaacattgtaatataattatgaccagttcagtaaagtgtagaacaaaaattggacacacagccttgggaagaggagacaaaactgtcattttgtataaatgatacgattgtgtatctagaaaacctaagagaattaattagtgcttagtaatgaactctgtgaccttaggcaaattatgtcatctcactgggtttgttttttcatctacacattaggataataactataattaatttataggattattgtgaagatttgctgagaaaatacatttaaaacccacgacatagtgcctgccatttggcaactgctcaatactttaagatacaactgtactttttgtatcactcttgttatttttattacggcagccatagaatgaatttgtaaaaataattcccttgacgatatatcttctataaacagttaaaaccatgaaggagagaaaagtctcatttgtaatcagaaaaaaatttttttttaattgaaaaaattatagagacgaggtctccctgtgttgcccacgctggtcttgaactcccgagttcaagtgatcctcccgccttggcatcccaaagtgctaggattacaggcgttggccaccgtccaggccaaaaaaaaaccttataaaattctcaagaataatctttataaagaatactagactctatgaagagaactccaaaatctactcagagaaaaataacaactcgaataagcaaaggaaactatcattttcctgaaagtttcaatattataaagatgtcaggtttaataaaattcgaatcaaatctcaacctgattttggggtgagaaactttaatgattctaaataaatctctctggattaatgagtggcaaatgagataatggtagttagcaaactttattgtacaagggcagggccaagaagaataaaaatattcataagccatgttcccatcctttaacataaaaacagttccgtgaatttaattttttaaaaatcctcattcttttttactctattaaataaaagaatgctagcgagacaatgagcatttctttgtagacattacactattaataatccggatgtatttgagatttacatatattttatccccagcatttctgaattcaccaagggacattcaatatattatctcatacctggaagagccttgtgaggtttttggtgtttggggacagagcctcgttttgtcgcccaggctggagtgcagtgacgccatcacagctcactgcagtcttgaactcctgagctcaagagatcctcctgtctcagcctcccaagtagataggactacaggcgtgtgacgccacactcggctaatattttattttcttattttttgtagagacagggtctccctgtgttgccctggctaggtaagtctgttttatcatcagctctaacgagaaggggaaaaaccgactcaggctaggaaacttgacaagggcaaagaatgagtcaacggcaaaggccggaatgcagtcatgccactcgatataaggaaccacagcctgtgccaggtcctgggggcccacttaatcttaaatgcagtctttcacttcatacaacacacaggagataggatgcagcaagttagaaaaattactcataccacctcccagatgtgcaaagaatttagagtgcattttccctatgcgtgctcgtttagaagcgcacctgctcctcttcacctcccaggtagcaggggaaaggctagatttaatcttgttacaatatttccatttcttctcattgatacaggcttgtttcagtgtaaacatgtggtccatttgaagttcagcttcccactagtgctaatgaaaataatgaaaatctttacctggttgagtaaatgttttcaggtaaaatactctatctctcaaatttagtctcctcttcctcttccttgacctggtagaaggggcaggacttacctgggtttctcgatgaggagctcctgcggtaaggagggagccccgcgcagcaccgagcatgcgcaggcctcgggatcgcggcggggccggaaccgcggcggggctggaaccgcaggctcgagtctctggctccctgcggccctcggcgaaggctgggctcttccgtcaggcctggcctttgccccgctgaggcaaatcactgttgtcctggaggtgtctttcccccttgtaacagatgtgtttttgaaagattcccgaccaggcttccttaagataagctggtctgtgtttcctgaacccttcccaccccgagatgcgggcgggagtcactcccggaaggaggagcgtaggacagatgctcttccaggctggaagagggcaggcaactcccgcccctgctgctggggtcactgcaggtagccaaaaagagcgggggaacgggatggatggtcagatgttcccaatgtctgtttttgggctgagatgaggtcatgcagcgtggctggggcggagtaggatggtcttggtccccagcaagtgtcaccaggctcagaagctcctgcaggtcttttggatggaggaagacacagaggtggctgacttgaggaccaggggccttttgggtccccagagggcaagagcgagagggcttgacagcaggagcttgtgtggctccaacgggggagagttttggtgggggttgtggcataggctcagagggagtgactttactgaagacagcccactgggcactgaccaagccacgaatgatcccagcagcaaatttcaccccccaacagcagcagagcaaacagtaatcaggcaggcatggggcattgcctctgagaccagaggaggcctgagacaacataccactcaggaacccttttatcctacaggcatcacaaggatatagtaagtcctgccctttctaccaggtcaaggaagaggaagaggagactaaatttgagagatagagtattttacctgaaaacatttactcaaccaggtaaagattttcattagcactagtgggaagttgaacttcaaatggaccaaatgtttacactgaaacaagcctgtatcaatgagaagaaatggaaatattgtaacaagattaaatctagcctttcccctgctacctgggaggtgaagaggagcagatgtgcttctaaatgagcacgcatagggaaaatgcactctaaattctttgcacatctgggaggtggtatgagtaatttttctaacttgctgcatcctatctcctgtgtgttgtatgaagtgaaagactgcatttaagattaagtgggctggccaggcacggaggctcacacctgtaatcccagcaatttgggaggccgaggtgggcagatcacttgaggtcaggagttccagacca

SEQ ID NO: 1245356 - DNA, 4001 bp, Homo sapiens
acggcgctgggggaaggtaggccaaagtgccgcgggagagtcggggggacgccagaaaagccgtggaaaaggagcactggggattcccggggtgggaggcgggccatggaaaggaatcagagccgcccccgccggagcccgaacaatgcggggagcccaccccggcagacacccggctctgcgctagaaccatcctcgaaacacagagcccctcacttattcccgggaggcccaccacaacagacagcgcgtgtctctagacctgtcagtcctcccaagggtcggcacggctttcacggggcgtctcggacgccccccgcgcgttttctcccagggccaattccctgtcccgagtcctccctccgtcccgcggggaggggtccttagggcgttctaccaacaacgactgccagttgatccgagtttcaagtttaatttcactctcgctgggaaagcctggaggcagagggaagctccgcgcgtttcagggcctcccacagaaacgcagccgaaggaaccccgctggccttgaggctaccccccaggaacgccccgcagcgggccgggtctgaaagaatgtggagttccaaactccaggcggctcccgggcatgcgcagtagcgccgcccctcccgtccgcttcccgagtgattaacttctgttttgaaccactccacataaatcacgacagaaacgccacctccagcccacagcggaacactcgggggacctcccagccagggactcaatttttgttaacttcaaaagggacttcacactctgacctttcggggtgttttgtgtggtttctccaccccccgtccccctccggtgtattttgtttttaaaccaaactgacggcaagttttagttgtaaagcttccagaacacttcgtggaaacaatgacagccttgctctttgcacttacaaccaagcctgcttgtcacatttggacgcattttgactgcatgccgcttgaagctgctggccctgggtgctaactcttcctcctgccccaaaattcatcgtgggaaaacttttagagactggggatttgtaaaagtctagctttccaaagctgtttacacccgagggcgatgagggggtccagaatcgcattccttcgatcgtaaaaacaccacatccctaaagaacagtgctagggcccggctgggagtaggggggcggcgggggcgggggcggggggagcctaggagtggaactttcagacaaagccgcggcggtcccgcggccccggccgcctgggtccggatcgggaaaaacgaggggctgggtcctccctactcggaccccatatccccagcacgcgagaaagagcgagaagccacgcggcggctgggccgagcgtggggtgtcggcggagacaatgaaacttgcaggcgcacaaacaaggcgctgagcgtgtttcttgacaacgtgccagcagcgtggagaggctcgccccacaacagcccctcgtgttgtgtctagcaggaaaacagccgctgccgtttcagacgcagcctcaacaaagagcacggccgccactccagcatgagagcccctgggcggaaaagtccaccaagtgactccgcgcggcgcggcccggccagcacgtttccccggactcgcgtcttctggtgcgcgcagcccgcggccgccttacctttcttgcctttcattctggatctcccctcccagcgcgaggcaaggcgggggtctggaggggccaggagcggggacacaggggataagcgaacgtctccttcacagccgactctcccgtaacttgtaggacgtgctccagccgttattgctaaacaggacgctctgatcccaggcgcccgctccttgggtggaattcaagtgacacttgggcttcctcccgccgggatcttctggcagccggccgggggctctccctcgcccaactctctcccctcccctctccgctcctttgttccctgctcctgctcggcgcacctcggcgctgtcagagtgagagaggcgaggagggaaggtacaggaggtcctgcctccgcccccagccgcccgccccgtccccctcccgccccgccgctcctccgcccctcccccgcaccttccagccgggaagactggaccgagcgcggcggccgctgtcactcgtccctcgggggcggcggtgcggacgcggggggtggccgggtccagaaacacgatcctttccgcctgccgcgcacggaccgcccgcatccctcgcccggcggtgggggcaccagccgagcgccccaggtttctcccttgggcctttcttcccggggctggcgagggtgcgtttggttcggaaactgcaacagatggaaaaaaggacacctccctccttccctcctccacccccgggaagaaaagcctccccgtctcgtttttgacagctgccccgaactctactggccctgctctagccgcacgagacagccgcctctgattcaaggggcggggcacgggaggaaaagtattcgagacaagaaccaacttcttccagaatgcgcggctgccattgacacgcgggcgcggcgcggcgcacccttctcctcccggggctcttcctccagcagcgacagtgggaggtcggcgggggtggggcgggggggaatgatgagacacagcctaaacgaacgtctgttcccccgggctaaagctgcgagttccggactggattgcaaggcagtttcgaaatctgacacgttgcggacagacacttgtcacgctcacatgctctttaaacgtctctgcccggggacggccgggcgcgcgcctgcctcaccaagactccgcctgacaccccgagtcgccgaaccccggcagcggccacttttatagctaaggggtgaccacgccgtgcctgctcgtctgtttcggtcaacagtgtctactcttcggattggaaccctgctaggggatccctcctcccatttcaaacagaaactagccattaagtaaacacccgttcctgttggcttattttggtccacagttaggagggatccaacaggagtttcttgatgaaattgcgctttcaaagaccagatgctgtttggctgacttgaagaaacgcatgccccctcctctggttctagttttcgcgtggttacgtcctgttgttttgaagcaaacgaactgtcacatgccacacaatgagacttcccccatcactttaaaaaaaggaaagaaaagccctaaacgtaaataagcctagcagagacagcgcccgggtctgcctccagtctgggctctgtgctgtttttgttcggtaacctcggtggagatcccggcagaagaaactctgtggaaataagattaaacccgaggagtactaagacggccaagggataactaactcgacttcggagcgtctgtttcaggaactagagctagcctgccaccctccctcaaaaaaaaaaaaaaaaaaaaagacacccccgcccctagaatgcgtggaggccagagtttaaaaagcctgggtggtttttccaattacaggactaaaatgaatcaacagggaaaaaaagcgtctctctaagaaggcagcaaccttacgatttttttcttctgtggtttgctgactgctcgggacagaagagaacacacacctaaaacggctcggggggagcgcggtcctggggacaagccacccgcccggacgctgccctgcaactgccgggagcacagttccttcccggacctggctgcagatgaatcagctgctgcgcccggtgcgggacagatgtggcgcagggagggggccagcgcccccgccgcccgttagagggggccgcctcgctatttcgtttgaagggttgtctgtggctgggattggtggctcctatccgctggggagccgggagcggagggaggagagacgcagggaggaggagccgggggctgggcgacgctgcgactccgcggcctgagtggcaggagcctcgtctggaaccgggcggttactggggagacgctt

SEQ ID NO: 1245357 - DNA, 4001 bp, Homo sapiens
cctgcactttcttttctgaatagctcggtaacatcatgagacagggaggcagggagacaccggttgtgaagagactctagaaataagattgatgggaaaagtcgagatgcacaattaggaaaaagcaaatttaactcaacaagtttcctgaccagaagttctcctttgagctgggagcaatgtctcttgcctgtaatcccagaactttgggaggccaaggcgagaggatttcttgagcccaggagttcgagaccagcctgggcaacatagccagacccggtctccaggaacaaaagaaaaaaaaaatcagtatctccttgggagaagcaacaggcattgaacactcaagccaccaaatccaaggtatggttggctaccccagccaaagagcaatcccaaagcaggaattcaacagttaaaaactgggagcaaaaagacttagtggattttccttatcgatccttctcattgtttttaagtcattttaggagatcttttggcgtcactctcagctttctgggaggacacactattatcacaaaccaagcttaccccgggctcaggaatggagctgaaagtgcacttgttttaagaaaacttgaaaagatttgcagacttttataagacaagacagtaaggagggcccgacttcctcaggagtctttccagagccgacggggaaggctcccccctcccaggtagttttagaggaggacggcggaggagcacggggagagggaggggcccaaggaggaaaagcaagtagcttttgttcttgagagttcctcggcctcaagtgaaacaggccggcccgcacactgcacgagttagcacaagcaaaggaactccaggacccaagaaactagaaatgaggccgtgaatcccaccttctcagaggcctgcccaccccagacgactcgccagggaaacctaaaaggggaaagaaacccgggtaacctcggcagcctcggctcccccaaagagccctgaaccagtcgcaaagtttccccttcagcccgtcacctttcattgtttccaggagtcggcgccgaggagctggaccctgtgcgccctgggatggggaccgcggaagttcccaccgatgcggccggcggggcccagccttggtccccagctccggggagagggcacgcggctgtgggcagcgcgccggtggaggagggggggcgcaggaggaccccaggagcgcagagggggtcgccagggaggaccacggcgctgggggaaggtaggccaaagtgccgcgggagagtcggggggacgccagaaaagccgtggaaaaggagcactggggattcccggggtgggaggcgggccatggaaaggaatcagagccgcccccgccggagcccgaacaatgcggggagcccaccccggcagacacccggctctgcgctagaaccatcctcgaaacacagagcccctcacttattcccgggaggcccaccacaacagacagcgcgtgtctctagacctgtcagtcctcccaagggtcggcacggctttcacggggcgtctcggacgccccccgcgcgttttctcccagggccaattccctgtcccgagtcctccctccgtcccgcggggaggggtccttagggcgttctaccaacaacgactgccagttgatccgagtttcaagtttaatttcactctcgctgggaaagcctggaggcagagggaagctccgcgcgtttcagggcctcccacagaaacgcagccgaaggaaccccgctggccttgaggctaccccccaggaacgccccgcagcgggccgggtctgaaagaatgtggagttccaaactccaggcggctcccgggcatgcgcagtagcgccgcccctcccgtccgcttcccgagtgattaacttctgttttgaaccactccacataaatcacgacagaaacgccacctccagcccacagcggaacactcgggggacctcccagccagggactcaatttttgttaacttcaaaagggacttcacactctgacctttcggggtgttttgtgtggtttctccaccccccgtccccctccggtgtattttgtttttaaaccaaactgacggcaagttttagttgtaaagcttccagaacacttcgtggaaacaatgacagccttgctctttgcacttacaaccaagcctgcttgtcacatttggacgcattttgactgcatgccgcttgaagctgctggccctgggtgctaactcttcctcctgccccaaaattcatcgtgggaaaacttttagagactggggatttgtaaaagtctagctttccaaagctgtttacacccgagggcgatgagggggtccagaatcgcattccttcgatcgtaaaaacaccacatccctaaagaacagtgctagggcccggctgggagtaggggggcggcgggggcgggggcggggggagcctaggagtggaactttcagacaaagccgcggcggtcccgcggccccggccgcctgggtccggatcgggaaaaacgaggggctgggtcctccctactcggaccccatatccccagcacgcgagaaagagcgagaagccacgcggcggctgggccgagcgtggggtgtcggcggagacaatgaaacttgcaggcgcacaaacaaggcgctgagcgtgtttcttgacaacgtgccagcagcgtggagaggctcgccccacaacagcccctcgtgttgtgtctagcaggaaaacagccgctgccgtttcagacgcagcctcaacaaagagcacggccgccactccagcatgagagcccctgggcggaaaagtccaccaagtgactccgcgcggcgcggcccggccagcacgtttccccggactcgcgtcttctggtgcgcgcagcccgcggccgccttacctttcttgcctttcattctggatctcccctcccagcgcgaggcaaggcgggggtctggaggggccaggagcggggacacaggggataagcgaacgtctccttcacagccgactctcccgtaacttgtaggacgtgctccagccgttattgctaaacaggacgctctgatcccaggcgcccgctccttgggtggaattcaagtgacacttgggcttcctcccgccgggatcttctggcagccggccgggggctctccctcgcccaactctctcccctcccctctccgctcctttgttccctgctcctgctcggcgcacctcggcgctgtcagagtgagagaggcgaggagggaaggtacaggaggtcctgcctccgcccccagccgcccgccccgtccccctcccgccccgccgctcctccgcccctcccccgcaccttccagccgggaagactggaccgagcgcggcggccgctgtcactcgtccctcgggggcggcggtgcggacgcggggggtggccgggtccagaaacacgatcctttccgcctgccgcgcacggaccgcccgcatccctcgcccggcggtgggggcaccagccgagcgccccaggtttctcccttgggcctttcttcccggggctggcgagggtgcgtttggttcggaaactgcaacagatggaaaaaaggacacctccctccttccctcctccacccccgggaagaaaagcctccccgtctcgtttttgacagctgccccgaactctactggccctgctctagccgcacgagacagccgcctctgattcaaggggcggggcacgggaggaaaagtattcgagacaagaaccaacttcttccagaatgcgcggctgccattgacacgcgggcgcggcgcggcgcacccttctcctcccggggctcttcctccagcagcgacagtgggaggtcggcgggggtggggcgggggggaatgatgagacacagcctaaacgaacgtctgttcccccgggctaaagctgcgagttccggactggattgcaaggcagtttcgaaatctgacacgttgcggacagacacttgtcacgctcacatgctctttaaac

SEQ ID NO: 1245358 - DNA, 4001 bp, Homo sapiens
ttcctccagcagcgacagtgggaggtcggcgggggtggggcgggggggaatgatgagacacagcctaaacgaacgtctgttcccccgggctaaagctgcgagttccggactggattgcaaggcagtttcgaaatctgacacgttgcggacagacacttgtcacgctcacatgctctttaaacgtctctgcccggggacggccgggcgcgcgcctgcctcaccaagactccgcctgacaccccgagtcgccgaaccccggcagcggccacttttatagctaaggggtgaccacgccgtgcctgctcgtctgtttcggtcaacagtgtctactcttcggattggaaccctgctaggggatccctcctcccatttcaaacagaaactagccattaagtaaacacccgttcctgttggcttattttggtccacagttaggagggatccaacaggagtttcttgatgaaattgcgctttcaaagaccagatgctgtttggctgacttgaagaaacgcatgccccctcctctggttctagttttcgcgtggttacgtcctgttgttttgaagcaaacgaactgtcacatgccacacaatgagacttcccccatcactttaaaaaaaggaaagaaaagccctaaacgtaaataagcctagcagagacagcgcccgggtctgcctccagtctgggctctgtgctgtttttgttcggtaacctcggtggagatcccggcagaagaaactctgtggaaataagattaaacccgaggagtactaagacggccaagggataactaactcgacttcggagcgtctgtttcaggaactagagctagcctgccaccctccctcaaaaaaaaaaaaaaaaaaaaagacacccccgcccctagaatgcgtggaggccagagtttaaaaagcctgggtggtttttccaattacaggactaaaatgaatcaacagggaaaaaaagcgtctctctaagaaggcagcaaccttacgatttttttcttctgtggtttgctgactgctcgggacagaagagaacacacacctaaaacggctcggggggagcgcggtcctggggacaagccacccgcccggacgctgccctgcaactgccgggagcacagttccttcccggacctggctgcagatgaatcagctgctgcgcccggtgcgggacagatgtggcgcagggagggggccagcgcccccgccgcccgttagagggggccgcctcgctatttcgtttgaagggttgtctgtggctgggattggtggctcctatccgctggggagccgggagcggagggaggagagacgcagggaggaggagccgggggctgggcgacgctgcgactccgcggcctgagtggcaggagcctcgtctggaaccgggcggttactggggagacgctttgtttgctaacttcgaaagcggcttcggctgcctcggccgctttcgaagccactccacaaaacacgccttcggtcggtttaaccctacctccccccccgcccgctttagccagctcgagacaaaaatgtttccctcttccccgtggttctccttggccacgcggtggctctcattatgtacacaaaggtagctttgctttcgtccaagtggacttggctaatgactgcgattctcaggcaaccgagatgggaaccgagaattggaaagggtttatagcttgaaaacaaactttccaggagaaggggggaggggcggagacaattgaaagcctctttcgaattagggggaggaaaaaacggagatgtgaactcaccttggctagaagtcaggcttgatcgggccaatgcacaacttttgcccgagcaagtcatatccaaacggttgttaaagctggcgaggcactccaaagagaaacactggcacaattctgtgatgtagcgaaagcttacagcccaaccgctcccgtagatgcacccccactgcctccccccagccaacgctgatctcaaacttgtttggagtttcggattcttggtgcattctgggaagaaagtgcctagggtcagcgcaacgtaacaaagggaacagcctcaaaaaagtgggcttcagataccagcaattgcttagggtattttttgttgattcgtttttctcgaggtggaaaaacaagtttcatttctagctctgtcagtcccttccagtctcggggccttgctataaaacggattcaatgacttttaagattctttccagtgctttttttttttttttaaagtatatagattcaaatttgctacatattatttgctgattcatatgaatgttacttgaattgggaaattgcttgagtaaaattgaggcgttgcttggtgctggcggaggctactgataaacgtttttcaccattattttttttctctccaggcacacatagttccttttggcgtcttatcttctgaagctgcctcaaggccaagcaaagaaagttgttaaaaagttaagttacttttcacagcctgcaaacccttcaaaggcaagaactcaaatagaaacttggaaaggcagataagccagaaaagtgtactaataaacgcacttaatatgattattttttgatgccaggtccaccaagtgaagattggaggatgtatttgtttcttctactcaacaacaattgataaagcatgagttccatcaaggactgtgttctaggtggagaaagggtgactcacccagtcattggatctctttcacttccagtctctggaaggcagatatctttataaaatatgcagacagctaggctctaaacactggacaagaggtctgtaatcatccagtcacatctcaggtcagagggtcttggactgcttaagaaagagctgaccattgtcttaagaacctggggtggcctagagccatcttgaggtgattttatcagccccatcaggataattctcctcagcttccttgcatgaatagtgtaactggtgctactacttttgtttttagtcacttttcctagcctgcacttcccttcccggccctcctttttcctctgtagccaagtcatcacttctctttacctaaatgagttttggaatccaggggataaaacgaaaagataggcagggcgctgtggctcacacctgtaatcccaccactttgggaggccgaggtgggtggatcacctgaggtcaggagtttgagaccagcctgaccaatatggtgaaaccccatctctactaaaaatacaaaaattagccgggcgtggtggcgtgtgactgtagtcccagctacttgggaggctgagacaggagggttgcttgaacctgggagacagaggttgcagaaagctgagatcgtgccattgcactccagcctgggtgacagagcaagactctgtctcaaaaacaaaaacaaaaaaacggaaagataattccttgagcacaagcttcactctccttattctcaacatctgtgtctgtattattctttacagtttatgaaacacttatttaatctcacttaatgcccaaactagtgatgttagttattttttttaaaaagtcaagatcacttaacacatccaaatataacaaagttaaaaggcataaaactgggtacccaacataaattatctgattataaatcaagtggtctctgggaaatcttgtcatttcagaaggtcagatggatgtggagggcagaaactaacctcagattatgccagggacgccagggcctcctgaacactgtggggggttgtgctctgaaatctacctccagttttacaagaagctctcttccaatctgtctgcgcttttttttttttttttttttttgcttttcttctcttttttttttttttttttttttttttttttgagacagagtcttgctctgtcacccaggctggagtgcagtggcgcaatctcggctcactgcaagctctgcctcctgggttcacgccattctcctgcctcagcctcccgagtagctgggaccacaggcacctgccacca

SEQ ID NO: 1245359 - DNA, 4001 bp, Homo sapiens
gttaaaattttctgctaacaccatgcatggtcatttcttattcattgctatccacatttattcaaagttagacacctactttaaatgggcagtactagtcaccttttattaaatacgaccactgatgttttcagtttcatcacacaaaaatatttttctactactggtactttagtaaggtcaaaagatgcctaatactaaatgaattaaaaatgtctcctaaatttcagctaccagtttgagctcaacctagaatagaatactacatatcaataagcagagttcagtcttaaatgattacatgacaaaggaaactgaatatgcaagccccagaggaagctcttttggctgtaagtactttaatcctgccagaaattttaagaattcacaagccatagagaatatttaaatcacagatggacggggttcaataaagctccagaactggcctttacagatatttaaacatcattctgaacttaaaaaaaattaaataacaaacgctattaattccacctttcaaaaactacagcaggctactccgaatgactaaagaaatacattcttttgcttgtagacaatctagaatcttaaaaacagaaatgaattacaaacaatggcatgcttgaaaaaaatcagtacttctatattaggggaagtaattaaaataacaaaaatgtaaaggtaagcatttttagctttgtatgctttctttcctctgtagtatgtaattttggttgaaaatatgacttgaccttaattgagccagttccccttgacaggaaataaacacggaatattcctcttaagctaaacaccgtgttttttaaaggaatttttcccacccttttaatgactctgacttggtgacacatttttagttttggactgcagggggcagaaggtgctgcagggtattcctacaaaaggcagaactctccaaagacaaagtaaagttctaacaaagaggtggatgatcttgcaaattcactttagctcacagcttaacaaacagctacaaataaactgcacaagaatcctaagttttaactgccatgtatttgaaattcccctcccctgatgatttaagtttttaaaaaggtttttaaaagtgcccatttaaaactgaaactactttcactattggcaagatgagactttcaaaacctatattgaaatttgggtgaagaactattaataaaatagcttaaagaaattatagctgagttcctgtctcacattggctttaataattaaagaaatcgaacttttaaaaaaagtgttaagttaattaaatgactaaagcaaatttgaataaagcaatttgtttaaactctccaacgtctgaaaagccagacattcttctcaaggctattatctccttcctttttttaatctagaaaaagtgtgaaaatttgctcattgaacagtgaattcccaactgtaagttggtaatcacaaagagtttgaaacaaaaaaagcccctgaaggctgccctttgatctgcttgcctagtttgacaagaagcctgatctttcagaataggttagtgacacacaaaagcaggtttcagttaagcaacaccaaactgcagcgcgactttactctgttctcagttcatttaaataaatgaatgccagacctctggaactcttaacaaatatttccaatatgtgcacaaaagctgaagtaacaggaagttaagacttcagtgccttggctacgccagctgatatttcactgcagtaaaaccacgtttgctgctgtcaggactgttttcattaaaactctccctcctagttgtggctcagcttggaaaaacaaagacttttttcctccttactcatttcctattgtaacagcgcttttgaaaagtttcccggttaagacttgtttccaaacgtcttgctttgcttacactttaaaaaatgtggcggtggggagggtgggggcaggatcacaagcttctttcacgctatccacatacaaggaaatgttgtggagaaagccacaacatggcctgaggatcccaccgccctaagcagcgaccttgttcctgcacgttcttttttttttttttttttttttgagacagagtttcgctcttgtcacccaggctggagtgcaatgccgcaacctcggctcaccgcagcctccgcctccagggttcaagcgattctcttgcctcagcctcccgaatagctgggattacaggcaaaagccaccacgcccggctaattttgtgtttttaggagagacggggtttctccatgttggtcaggctggtctcgaactcccgacctcagatgatctgctcgcctaggcctcccaaagtgctgggattacaggcgtgaaccaccgcgcccagccctgcactttcttttctgaatagctcggtaacatcatgagacagggaggcagggagacaccggttgtgaagagactctagaaataagattgatgggaaaagtcgagatgcacaattaggaaaaagcaaatttaactcaacaagtttcctgaccagaagttctcctttgagctgggagcaatgtctcttgcctgtaatcccagaactttgggaggccaaggcgagaggatttcttgagcccaggagttcgagaccagcctgggcaacatagccagacccggtctccaggaacaaaagaaaaaaaaaatcagtatctccttgggagaagcaacaggcattgaacactcaagccaccaaatccaaggtatggttggctaccccagccaaagagcaatcccaaagcaggaattcaacagttaaaaactgggagcaaaaagacttagtggattttccttatcgatccttctcattgtttttaagtcattttaggagatcttttggcgtcactctcagctttctgggaggacacactattatcacaaaccaagcttaccccgggctcaggaatggagctgaaagtgcacttgttttaagaaaacttgaaaagatttgcagacttttataagacaagacagtaaggagggcccgacttcctcaggagtctttccagagccgacggggaaggctcccccctcccaggtagttttagaggaggacggcggaggagcacggggagagggaggggcccaaggaggaaaagcaagtagcttttgttcttgagagttcctcggcctcaagtgaaacaggccggcccgcacactgcacgagttagcacaagcaaaggaactccaggacccaagaaactagaaatgaggccgtgaatcccaccttctcagaggcctgcccaccccagacgactcgccagggaaacctaaaaggggaaagaaacccgggtaacctcggcagcctcggctcccccaaagagccctgaaccagtcgcaaagtttccccttcagcccgtcacctttcattgtttccaggagtcggcgccgaggagctggaccctgtgcgccctgggatggggaccgcggaagttcccaccgatgcggccggcggggcccagccttggtccccagctccggggagagggcacgcggctgtgggcagcgcgccggtggaggagggggggcgcaggaggaccccaggagcgcagagggggtcgccagggaggaccacggcgctgggggaaggtaggccaaagtgccgcgggagagtcggggggacgccagaaaagccgtggaaaaggagcactggggattcccggggtgggaggcgggccatggaaaggaatcagagccgcccccgccggagcccgaacaatgcggggagcccaccccggcagacacccggctctgcgctagaaccatcctcgaaacacagagcccctcacttattcccgggaggcccaccacaacagacagcgcgtgtctctagacctgtcagtcctcccaagggtcggcacggctttcacggggcgtctcggacgccccccgcgcgttttctcccagggccaattccctgtcccgagtcctccctccgtcccgcggggaggggtccttagggcgttctacca

SEQ ID NO: 1245360 - DNA, 4001 bp, Homo sapiens
aaaacccacgacatagtgcctgccatttggcaactgctcaatactttaagatacaactgtactttttgtatcactcttgttatttttattacggcagccatagaatgaatttgtaaaaataattcccttgacgatatatcttctataaacagttaaaaccatgaaggagagaaaagtctcatttgtaatcagaaaaaaatttttttttaattgaaaaaattatagagacgaggtctccctgtgttgcccacgctggtcttgaactcccgagttcaagtgatcctcccgccttggcatcccaaagtgctaggattacaggcgttggccaccgtccaggccaaaaaaaaaccttataaaattctcaagaataatctttataaagaatactagactctatgaagagaactccaaaatctactcagagaaaaataacaactcgaataagcaaaggaaactatcattttcctgaaagtttcaatattataaagatgtcaggtttaataaaattcgaatcaaatctcaacctgattttggggtgagaaactttaatgattctaaataaatctctctggattaatgagtggcaaatgagataatggtagttagcaaactttattgtacaagggcagggccaagaagaataaaaatattcataagccatgttcccatcctttaacataaaaacagttccgtgaatttaattttttaaaaatcctcattcttttttactctattaaataaaagaatgctagcgagacaatgagcatttctttgtagacattacactattaataatccggatgtatttgagatttacatatattttatccccagcatttctgaattcaccaagggacattcaatatattatctcatacctggaagagccttgtgaggtttttggtgtttggggacagagcctcgttttgtcgcccaggctggagtgcagtgacgccatcacagctcactgcagtcttgaactcctgagctcaagagatcctcctgtctcagcctcccaagtagataggactacaggcgtgtgacgccacactcggctaatattttattttcttattttttgtagagacagggtctccctgtgttgccctggctaggtaagtctgttttatcatcagctctaacgagaaggggaaaaaccgactcaggctaggaaacttgacaagggcaaagaatgagtcaacggcaaaggccggaatgcagtcatgccactcgatataaggaaccacagcctgtgccaggtcctgggggcccacttaatcttaaatgcagtctttcacttcatacaacacacaggagataggatgcagcaagttagaaaaattactcataccacctcccagatgtgcaaagaatttagagtgcattttccctatgcgtgctcgtttagaagcgcacctgctcctcttcacctcccaggtagcaggggaaaggctagatttaatcttgttacaatatttccatttcttctcattgatacaggcttgtttcagtgtaaacatgtggtccatttgaagttcagcttcccactagtgctaatgaaaataatgaaaatctttacctggttgagtaaatgttttcaggtaaaatactctatctctcaaatttagtctcctcttcctcttccttgacctggtagaaggggcaggacttacctgggtttctcgatgaggagctcctgcggtaaggagggagccccgcgcagcaccgagcatgcgcaggcctcgggatcgcggcggggccggaaccgcggcggggctggaaccgcaggctcgagtctctggctccctgcggccctcggcgaaggctgggctcttccgtcaggcctggcctttgccccgctgaggcaaatcactgttgtcctggaggtgtctttcccccttgtaacagatgtgtttttgaaagattcccgaccaggcttccttaagataagctggtctgtgtttcctgaacccttcccaccccgagatgcgggcgggagtcactcccggaaggaggagcgtaggacagatgctcttccaggctggaagagggcaggcaactcccgcccctgctgctggggtcactgcaggtagccaaaaagagcgggggaacgggatggatggtcagatgttcccaatgtctgtttttgggctgagatgaggtcatgcagcgtggctggggcggagtaggatggtcttggtccccagcaagtgtcaccaggctcagaagctcctgcaggtcttttggatggaggaagacacagaggtggctgacttgaggaccaggggccttttgggtccccagagggcaagagcgagagggcttgacagcaggagcttgtgtggctccaacgggggagagttttggtgggggttgtggcataggctcagagggagtgactttactgaagacagcccactgggcactgaccaagccacgaatgatcccagcagcaaatttcaccccccaacagcagcagagcaaacagtaatcaggcaggcatggggcattgcctctgagaccagaggaggcctgagacaacataccactcaggaacccttttatcctacaggcatcacaaggatatagtaagtcctgccctttctaccaggtcaaggaagaggaagaggagactaaatttgagagatagagtattttacctgaaaacatttactcaaccaggtaaagattttcattagcactagtgggaagttgaacttcaaatggaccaaatgtttacactgaaacaagcctgtatcaatgagaagaaatggaaatattgtaacaagattaaatctagcctttcccctgctacctgggaggtgaagaggagcagatgtgcttctaaatgagcacgcatagggaaaatgcactctaaattctttgcacatctgggaggtggtatgagtaatttttctaacttgctgcatcctatctcctgtgtgttgtatgaagtgaaagactgcatttaagattaagtgggctggccaggcacggaggctcacacctgtaatcccagcaatttgggaggccgaggtgggcagatcacttgaggtcaggagttccagaccagactggccaacatggcaaaaccccatctctactaaaaatacagaaaaaaaacaaaattagctgggcatggtggcggacacctgtaatcccagctactcaggaggctgacacatgagagttgcttgaacctaggaggtggaggttgcagggagccgagatcgtgccactgcactccagcctgggcaacagagtgagcctctgtctcaaaaaaaaaaaaaaaaaaaaaatgagctactctgattcaagtgaggtaagatccagggtccggaccaatccctgggacatttcaatgaaagtatctttgtagcacaccaaagcgccaccggaaatgatctgaaagctattaccttacatgtcactccactcccaaaccacttcaacctcccccatttccacccataattacttggtgttgaaagcagagagtctgacatcagcttttgggtacagagtaaatcacaaacaggacagtatggtaggaggaaacataccagctaaatgtaaagacatagacatggtttaactgatcttcttacaacatactaactactattactgtttgaacaagtgctttggggccaatgattgttgaaatattatgactttccatgttgtgaacattcagcctcctggtcagaactgagaggctaatgaggaggattctccaggtgaaaacatccattacccattaaggctgtgtgttggacatctgaacgagagagcagggtggtcgagaggaaattctacaagaggtgacagcagcaagcctgccaacagactgctctgagcggttcccattcacccggtacagctgtctaaaggattatgccaatgaggagagggccttttgtcagagaccctgtcccatccgaccatttgtaaagctgcctcatgagacagggctggcggaggctctgcaaacattctgg

SEQ ID NO: 1245361 - DNA, 4001 bp, Homo sapiens
gtcaggtctcgcctcctggaggtatcttgttcagtccctgacacgtagcactcaataaaaccatgctgacaatctgtagattgttttaaagtaatcataacttaaagacaaaaatattgcaaaaggcattcattctatgaacactcacatacacttagaaagtcatcttattacctcacaggaattagatctatcctaaatgtgtccattccttgctctgccactaacaggctgagtaatttggggcctgttcctttatctctttgtgcttcattttcgtcaccagttaaataagagggtttttgtagatttttactaccagcagcagctacagtggcatcacctaggaagctggtagaaatgcaaaatctcaggctcccttccacacttactgaacaagaatctgcatttcacaagaagcttgagaaacactgaactagatgatctccaatttcatggtccttttcagggctagtatgatttttttttttttttttgagatggagtctccctctgttgcccaggtgttgtgcactggcatgatcttggctcactgcaacctccgctgtccgggttcaagcgattctcctgcctcagcctcccaagtagatgggattacagcgcccaccaccacgcctggctaattttcgtatttttagtagagacggggctttgccatgttggccaggctggccttgaactcttgacctcaggtgatccgcccgcctcggcctcccgaagtactgcatttacaggcgtgagccactgcgcccggccgccaatatgatcttggatagtcctaacagttactcttagcaggctttcaaagcaccagagattgcagcaaaacgcacacaaagaaaatgattatgatgacatacacaaaatataatccatttaaaaaaaacctcacactgtgtgtgtgtgtatatatatattatacgtatacgtatatatatgtatatatatatatatataaccctgcaaacaagaaaactacttactacaaaggatgaatttttctttcacacaattttcatcctggcatccctataactaccaaaacacagccgaatatctgagaaatgttggtgcaaatgctagagacgaatagagtcaggcaacttaaaagtgttcttcatacttacgttgctgtgacgagcaacataaaaagaacagagtgtctaaagtcagaaaaaccactgaagtcacaactttttggggggtgtcagcttctacctcatgtaccaggaataaccaacttagcctacttcacagtgttactctaatagttaaatgagaaagtgatctgtcaagtgtttcccaaatgctcaaaaccacccttccacattgagcaagaataaaatagcatctggttacccttcccaaggtgatctatctgccttttcccgcttaggatctcatcgatcgcttaggagttagacacggtgggttaaggggtggtgaagagacggcgggaacaagcacttggtagctcagaaggctagggcgggagccaggtctttggactgaaaccactcccaccctcccccttcagcagctccccttccccttctcgagacacctgccccactaaacgagctgagaggatggacccaaccagcagtagtctgcaggtgggcactccaagcggggagccgaggcgcccagcacgcagtccggggacccgctggagggtgggcggaggcggacggcccagcccacaaagaagaggcgggtagtgcgtctttccctacccctcaacctccgacggggcccggagcggacgctgaggcggacacacctctgtctcactttaccccagggcaaaattcgagtaatttcagggagaagaggacaaagcatagcgccgggtcaggcctgcaccctcccctctacagctcaccgtaaaccgcgtccgcgcttcgggcaaactgaagagcggcggcgtcggagacatcttctcggctgcgcgtgcccgccactgcgctgcggcgcctgccgatgacgtcaagccaggagcaacgagactgcggtctctctgagcccggctagagtggcctgtgaacaccggtcgggcgagctggcagttgggagtttccctagcgactcagttcgggtgggcgttgggcgcctgagtcagccaaacagcctactcggggttcttgggtagcctttggggtgaggggacttgggcggccttggtctgtaagctctgcgttcccgggcgtggaagagactggccgcgcacatgcgtttctgtggttttcctggtttggggaaagcgggtaaatggtggctggttgcggctaactgggccgcgctaaaaggtaacccaaggcaggtggattacctggggaaacagctggagcagtggtcctgggccgccagtccgcggtcatcccgggagcttaagatgcggagtggtgataggctccggatgtatgagccctgtggctcaagggcgctgttctctctgctccgaaatagaaataatacctgtctcacagagctgttgaaaagctccactgaaataatgaccgcaagtgtgaactgtaaagcaatgtaagtagtatttattattaaaaggtctctactgaaagaaagagacctaggaggaatgcagtgcccggcgctgattggaaaacgggtggcgctgcgtcctgggccgaggcttccctagcgaaaaccttgtctccctccatttcgtcccttgcctgccttcccaggagagacgtggccgatagaagccgagtggcagtaactctaagttggagttacacggtggagaaggaagcactgactcagactcgggtaacttcctcttattccctcacacgtgtatcttgttcccttcttcgaagtctgtaaatttaaaatcctaagccccccaacaactgaacagacccccgtgaggccaaggggacaccagcaaaatcttaacaactgagttcccagtcataacgggatgggaggtcagacggacctggttataccctctcccttttgtgatttagaggagatagctgactggccataaagttaaaatagaggccaggcgcggtggcttacgcctgtaatcccagcactttgggacgccgaagcaggtgggtcacctgaggtcaggagtggatcacctgaggtatggcaaacatggtgaaacgctgtctctactaaaaatacaaaaattagccgggcgtggtggcacgcacctgtaatcccagctactcaggaggccgaggcaggagaatggtttgaacccggcaggcggaggttgcagtgagcggagatcgtgccattgcactccagcctgggcgacaagagtgaaactctgtttcaaaaaaaaaaacggagatgataggactgacggaattgactccatggcaataagataccaaagtataaacaggacctaagcccatgccaagcaagggttaaaagtcatgcatccctacgcttgaaaaataaactatgttctcactatgcttcaaggtttttctttagcagctaaacaagcgctggcctcacagtattaaaacaatttgcagttcatcgaccaccagacactaacaaccctctcccaccagccgtaactacagcttttattgatttcagttactttctcctgataagaaggtcactgaccatggacttgttctggccaatttgtagtgattgcatgcttacgtaacttcctgaaaagatattttgatgtataggaccaaactgtaaatacatttaaatgttaagtctccaccccaaagtgaacatggattgtctgttaaacatgcatatttgtttaatatgcatgtgtcaagaccactttcatgaatattcatagccgctcctctaacttgttgaatatgtatgtttagccaaccagttaagcataaagttcctactccaactcctcctctgaagtgtctgtatgtggtcttggctggaggcatgcttcccagcctgcagaatggccaccttgcaggctgtaactccttataaga

SEQ ID NO: 1245362 - DNA, 4001 bp, Homo sapiens
tatcataacagtcttaagggactgaaaccttctggacctgggctgtctaatacagtagccacttgccactcatggctatttcagttcaattttaaattaattaaaattaaatcaattcagttcttcagtcacaagttttagcaacatttcaagtgctcaaaatagctacaagtggccaggaactacccaaatggacagcacagatataggacatttctatgcagaaagttttatttgaataatgctgttctggacattcaggagaatatcacatttgtctactatatttatgccatcatgttagagcccataagtaacaagtggcaagtgtgttagaaggcttggtcagagaagctgcaagtgtgagaggtgggtccaacaaagatgcagaggctcatcaacacatgagccgacctcgtggggctacactggggcgtgccaagacatgccctcccaagtaaaagacaattgtaccctatacctcctaccacaatgcttcataggcctgtttgaattctggacgcagcatattccatatttgggaatgttgctcccatcaattcactcagccacaaggactgtcacgtctgaatggggtgcagatgagggaaggggtccctaagcaggcctggtgtgcagtgcaagcatgagcactgttgcctgagccagatgacctgatgcacatgctgtttgccacttctatgcctttcacctctgcatacaggttgttccttcgtgctgaactagtatgaatgaaaagctaggtttttggcatagtcagcagactctaaaacaattggtatgatccaattttttgggttaaaaattattaaaaggtatgtgtatgaaagtgcaaaatgttaaaaatagtcatcttcgtgtggtataatcatggcggtctaaattgctttgtctttttttttcctacaaatcacatgcgaaatgaagacattaaaaaaaaatcttaaaatatctgtgaatacatctctgactttccctgacaacttacattccatcctccctattttatgtttttctattactgcaggtaacatgtgaaagttttccctaccagttatgagtcaataatctctctctctctctttttatcctatccaattactctttattatatgtaacagagccaatataacttgagaaaaatttcccaaacataatgaaaaaaagttatatcaaattcaagatcaactttcacatctgagttccaatctgtgaagaaaactgtagatctatatgttctagttctaaattatgtttaaacggtttttaaaaattcatgtgaattgctttttcacctttagcagtgaacttggtataaaagggcattggcagctcttgtcatgtctgttgaaagcccaatcattaaagtactcctttttacctttttgtgatgttgggacggcggttccccctctctgactcctgtgcacagacacttgtttgctgccatcctcctttgcttttcgggggctcggtccctgcgtccagatggttttctgggtgactccaagaatacatctaggtcgcagcgttttcttttgatattgaagcccacatctcaaactgggctcagtcttcaagcacgctttgttaagcacgatgtatggcaaaagcaatcgctttgccgaggacctgtgcagcttctccgtatactgtacggctcgtagaaaagtacaaatcatgttcacggaaaatcgttccgcttagggacgatgctaactacaattaggaaagctttagggttcactacacatgcggccggacacgtactcaagcctatacgtttacattacatggggtgttaggcaaaaacgtcagtttccgcagcgtaaatgaaaacgaaaagtctccagggagaacctgatgtctaccttcccttctgtcttctttccattttaattaacaggctctgatcaccttctgggctgacattcacagtgtccccgccatgccttcgcaaagtcacctgggaaacccccgtcttcctgggaatagtagtttgaaaacctcgctcttaactgggatacggcaaagaggcgcgcaaaagagactacatctcccacaattcaaggcggccagagcacggcgcaggtccttcccgcgcccccagacgcctccgcgcccagcgtcggcgcagacgctgcgcgtccctggagcggcggaaagtggggtgttggtgggggaattggtaccacccaccctacgtggttcaggcgggacttgcaaaagccaaattagcagttacaatctacgtgttttcctgatccttatagagaggactgtgcacagtgggaaatacccccttggactgtggtcttgccaattccgcgtgggcaaatgatttagtttttgcgttttactgtgttttcagaaaaactggacaataaagagtcagcaagtggggatgaacgaggccgctgcaaagcaggcaccggtttcctaaatggttaagccgcgaacttggcttggcgccctaggcggcagaatgttaggggtgggtaaggaagccgaggcccggaagtttctagaagcccgctctgtgagcgggtgtctggcgcggtgccgtctgcgcaagggtgggcataccgttacttttgctcacgcgcgcatgcgcataaggggtgtggcgacgtgcgggcgtgggggcggtgcgtgcactcttcgtttcagccctggcgcggtcctgtggtgaactccttgtctctatggcgactggacgcggtcggatcttgcagcagcactggctcggcctccagacgctgcgcgggcccagcaggggcggtggcgcggcccgggggcgcgccagggcctttgggtgcaggtgactgtagggcctgcgggtggggtcccctggcgggaagcccgtcactgcgcggccccgctctcttcaccgtgtattttattcgtccagcttggcgcaaggcccgtggccgtcttcaacgtgagaagggtatggaagaacgaccggaggaaatcctttctaccctgcaacgtggggtaccctaagttatgacacaaatagagtagcctctcggggaaatattttttcttgcggcgcctgtggccggggatgcgcgcacctgccaggacaggtgcaggtccaagaggtcgtttctccgggatgcgtgccctaaattcacgtgtgctccgcccctgccttcgtattttcgctcttctgtaaccaagaatctcccttcgtgtttttcatgaccttacaacttagggaagtagagtctgttcatcaaaaccttatcagttgacaccctcatcccccaagcagatacctcgggcaggcaggttggtctggcgggtggggggcagcactttctgcacctccaacgtcaaggctaagttgccatctacattgccaggtcttgctcatctgctttccagaagcatcttcagcgtgaagaagtaaaatgagccagtgcatcagaagtatcagcatgcataatggtaccttatgaaatccctctcattatatcgtgagctgttccctagctgtgtacccatcactgcagttagtttacagatggagggataatgccaagaatggtttacattcttgaggattatctttctgcttgtaagactccttgatttataaatagggaaagtcatgcatattttgccttctaataaaccaatggtctatgtttaagcacacaaagggagtctattacatactagttgaactacttgttttttccccctgaatctccagaactatgtcctgtgtcctctctaggtctccattacttccacttacctgttttcagaagcccagccctgttgcttagtgctgtgataatagttcttaattgaatacctataatgctagacataccacaagccttgtcacaaatagaatggtgacaatgcctgcaaaaattcttttatgtaggagaaaaagcaggaatttaaataggaaacttgaacttttaatcaatttgctgctattactaaaattagtctttaca

SEQ ID NO: 1245363 - DNA, 4001 bp, Homo sapiens
agtccacaaaagaaacagggacctgttaatgcactgattcaagtgggcgtttctcccattttctctttcctcctccccaacccacccctttctctaaatgcctgtgctttccagttcttcttctacccctatggcatgagacctggaaatcatgatgagtttctccttgtttgtaaactgcctctgcaccggctgaggttgctcggccgtgggtggctcctggctggcaccctccggcgagctctgctccgcacccagaacgggggcggccacagcagagtctcgcgtttgaccagctactgcgtccaagaccgactcggtggaggtgccggcctcccgcaggggtgtgtagcccttattgctgctggatgggtcatccgactgggagctcccggagtcccgcctggtggggggcgagccctccagccgcaggggtggcgagggggaggcggccttggccagagggctggagtccgggtccgcactccccggggagggcgggggctcgggggacggcggcgcccggtagtccgggagcccgctggtgctgcggcgccgcaaggccgcgtacctgccggtcctgggcaggcggccgccctgccccctggcggcgcgcgccgctaccgcgccctcgggctcctccggctcccggcgcgccccgcgcatgctgccctctgcgccgcggaggttggtcatgctcaggtcgagctcgcccctcgggatctcctgggagccgcgttcccccggaggcctctgccagctgcagctcgcgccctccgcgtccccgcccctatcgcggcccccttgcaagggcagcagcgcgaaggcgctcagcgaggagtccacgaaggagctggccgtgctctggcgcccccagctctcgggtgggctgcagggcgccggactgctgcagctgctagcggctgcggcggcggtggcagcggcggcccggcgactgcctgccacgcccgagcgctcgcggtagacgctgtacacggcctcggccaggctcgggggctcccgcggacagcgcggggaagaggccaggtccggcggggacgcggcgccccgagggcggccgccgctcggcgccgcggggtgaggaggccacgagcccttggccagcatcgccgccgctccgaaggcgtccccggagccaccgcagcccccgggcttcagctccaggccccgcgactgcacgtagctgaggaagccgttgagcggtatggccccggggggcgccgcggcgggggcagacgacgacgaagaggcggcggcggccgcggcggcggccgcggcggccgccaggtctttggcgcggaggctgtgcacgtcgatgacggtggagtagaggtcccgcaggttgatgattttggtcttcttgtcccggttctcgtggaggaccgcgtttgcgcagatgaagaggaagatgccgatgcccatgatgaggggcccgaagaccttgagcttgtcagagtgcaggtagccagagaagatgcggaagaagaagcccacggacgtggaggaggaggacggggaggcggctcgtgctggaggcgtgctcctgggcgcgcccgcggaactggagttgacaccccctggagccctagggtggctcctggaccggtttttgctgccactgctactgctgttggccgtggttgggacccggtggctgctgcccgcaggcggcagctgcttacccccctcccgattggtcccggtggccttgggccagtagcccaccaccgccatggctatgcccaccagcagcaccaggatcccacagagggcgatgagccctgagatggagcacagcttcagcttgcctttcaccaccaccacgtcgttcttgcgcctcttcttggctttccgcttgcgcttgggtatctggcttggggggcggagtggatcctgctttctggcggaaatccttagcaggccgccggtggcgatcatggcgagctcctggagtgcaggactagcctctgggatggaggcttgcacagggagggcgccaactgcccactagctgctcagccacctcctcctgctgcaaagcagaggaagacagtcagagggtgtcagcttggctgcagtgacatctcacgctgcagctgccctactcccagatcccactccgtgtgtgccccccaccccagggcctttatccactaactgaaacaaggccgtgtacagaggctggagccaggtagacactagggaagggaaacgttgttgcaacaactaataggtggttataaaacattgcaataactaatatgtggtgataaaaccatctgagaatatgccttcttctcctcgctccccacccatctcctccacacactccatggtaatatgagggtttgaaatgaacaatggagttccaaccattagtaaaacctaaatgtagggactcaaagtagtggttaaggacctccctgtcaagattctttccctcagtccttcaggaattggaagatttttcaagggagctgtcacaggagtttcaagtctctctaagctggggaatctgtcaatgtgtggcccaaagtcactaaaacagtcaggaaagttactactgtataaagacaaaggaatttatttcactggatgaaaatcaaaggtcatataatggcaggcaggcggtttatttacttcagataattaatagagagttcaccactggggaagcagcagagatattgcaatactctgacaataaatcccttcacaaagttgtctcccacctatgcctgttcctacagctatgtgcaggcagatcccttgcacagccttcttctctcctctcagcaacatctggacagcttcttggggtggaatatttagttttaggtaactgcttatgtaactgagctcttccttctggccttctttcctccctcagaggaactcccttaaaggtatcatgtgtcagatttcatcagggaatttgagaagtcccctggaatctccaagagaaagatctttttctcatatgggaaaattacaattaaaaaaactaacactctgccataatagctttctgaccccttattaaggtgccaagagcatgctacagagtcccagtattcaaatgagtaggcaactaactaggtaaagcagtctacataatatgatgatttgtagaatgacatttcccccaagccaaaactgttttgttttgttttgtttttcccccttatccctttctcatgaggtcatttttaggaagggagggtggcaacaatcaatggactactcttaggaagtttatttagttgtttgtaaaagcctgggtaggaaaattcacaaatgcatatttgtagttattcggcagcctctaaaaattacagtcttgctgtatctccagagtagaacattttctgtcccattagttgttttccctcctatgagatgctaaaatcaaggacattgtatgaactgaaagacttagatatcacgcccaagccttttgctcttctatcctttatcagataattcatgttttagaataaattcccccttgaaaatgtgtggtaggtagaattttgcttttaattggtgattgggtgaaaggctttggcccttgagttcctccattatatcaatataggcaggatcttttctccatcagtgggaatgtaaatggtaatcagctctttgcaatatttgcaaatcaatatctctttgggacttagctgggtttcagtaaagagaagcaccaggtagataagagaggggtcagtatagagaatacatctataaacctttaagctgcaccagtaagtacagattgaaacaaacaaaaaaaagagcttactgtctatctctaatcccaaataagtaagcacatttattatgtggttgtaacatagagactgttgttttaagtgatccttggagtccagcatcttaaataatctggagatccgtggttatcttaagaaggctttaaggaccagacattttttagaagcgaactcagactcagttgg

SEQ ID NO: 1245364 - DNA, 4001 bp, Homo sapiens
ctcggattacaggcctgagccactgtgcctggccaacaccatttccattaactctcacaacaacactttctcttttttttttttttttttttgaaactgagtcttgctctgttgcccaggctggaatgcgatctcggctcactacaacctccgcctctcaggttcaagtgattctcctacctcagccacctgagtagctggaattacaggcgcctgccaccacgcctggctaatttttgtattttcagtagagacggggtttcgccatgctggccaggctggtttcgaactcctggcctcaaacaatccacccgcctcggcctcccaaagtgctgggattacaggcgtgagccaccacgcccgggccacaacaacaatttcaagaggactctttgtcccatcttaaagttaagaaacttaggtttagaaagagtaaggttccaaacgccaagtaagtggagccaggaagtaaaacccatcactgcctcccaggaaggctgcatttatggaccttcaaaggcttatcgccataactaaaaatcaactggaggccaggcgcagtggctcacacctgtaatctcagcattttggaaggctgaggcatgcggatcacctgaggtcaggagttcgagaccagcctggacaacatggtgaaaccccgtctctactaaaaatacaaaaattagcccagcgtggtggcgcacacctgtagccccagctactcacgaggctgaggcaggagaatcgcttgaacccaggaggcagaggttgcagtgagccgagatcacgtcactgcactccagcctgggtgacagagcgagactctatctcaaaaaaataaaaataaaaatcaactggagaaggaaagggggttggggagcatcctctgaatatataaaggcagccattcattgtaggagaggaggtagaaggaaatgctgtttgtcgatggttcttttccagagaggaagagaggagaaaggaagagcggggagcaggtggggagcccgcagtaagaccccacagtggggccaggtggtcttgcaccctgtattcccactttggctggggccagcccagagtccaggccagcaggtaatgccccagccatgcccactcggtcctattggatccaacctttccctgcgtggtaccaaacctaaagccagcttccctctccttgcaaaacaaaaccccaaagctggcaccactgcttctctgcctcctcaccaaaaggttttcatgatgtcatgacattagtttaaacctaaaactaaatgtatgttttattttaaaaaataataattccatgaaaaactcctgaagtgcttacaatggagacgtacaaaaaaattgattcgggaatcagcagtgtgagggggagacggcttaatctcttctatttaaaggcttctggaacttcacgggggctctgggacaggggcgtgtttagaaaaaaggcaggatgtgtcagatttcttctgactcttcctccccgggggagcaggagccaattgcttgctttctcttaaaactagtccacacagccccaaaccaagttcccgggaaatggccagcccaaaaatcctgtttccctggagatgtaccgtgctttacagtgcaggaaacggggacagtacaggctggcaaatcctatttctgaaagagcatcccacacacggaggaggttcgctctccatctccatcgccaccaggaagaatgaggtaaaaagcaggaggaggctccgtttgtcacgggaagattctccgactcaaacctcccacgtgcaatcgctgcctcccgcgcccgccccctcaccttgttcgtgaggtaagaagccaggtagcaggtacaaaaggtgaggccgaccagagacctcctcacgcacatctgtcaactcgtccccttctcggggatccacggtgcctgcccaaatcccctggccgccgcccgacccccgcagcagcagcagcggcagcggcagcagccgcccagagacggccacgtggctccgagctccgccaatcagcgcggggaccgcccccggcgtctgccttcttaaaggggccgcgccctcgaaggacggtcattcttcttttattttttattttttatttttttatcttcttttaaagagtagaaagtggcagaagaggaaaaaagcataccgcagttcacaataccccatcagtgtttaaagaaaaatgttcatcgctatctctaaactatgagaccaaaatattacccgtgcttcactgaattttcccaattttctccactgagtctgtagcgctttggcaaatgacacaaaaaaggtaacagcaacaaatgttcacttaaaagagggaaggtgaaggaagaaggaactggaattgagtataggttttttgagttttgtttgtatttaaagtcattccattctcttgacatttctataaaataagaaccctttcccaagcacagcccctattcctattcctattcctagtctatagggtggaaaactggactcatgaggcttccggcaaatgttagtaaacatgcaagaaaacctattgatggacttggacaatagcaaaaagtgccagtgttctctgcctgtagaaacacacagattttcagaaacacccacacacggggaaaccatcactcttaagccacagcaaaagtcctcctggctctcggtgctggagcagtggatggaaaacgacacaccaacccttatgtaatttttctgtttttcagaagcatgccttgtttctctctgctccctccagcattgagggagggctgacctcggcttgtccccttgaagccactccccagccaccactgtctcatcgcagtcctttgcctctgctcacttttccacaggtctcttcctgggcctgctggttggtctgcagaggggaccaacatagagatggaggtaggctggtcaccccttccctcccttttctcccacagtctccttcaaaccacttgtacagatgggtatagctttctctaccaagactggatgatatggtttggctgtgtccccaaatctcatcttgaatggtagctttcataattcccacatgttatgggaaggacctggtggcagataattgaatcatgggggcagtttcccccatattcgtctcgtggtagtgaataagtctccccagagctgatggtcttataaggggaaacccctttcgcttggctctcattttttctctcttgcctgccaccatgtaagacgtgccttttgccttccaccatgattatgaagcctccccagccccgtggaactgtgagtccattaaacctctttttctttataaattaccaagtctcgggtaagtctttatcagcagcgtgaaaacagactagtacactgggttattaaaaagcaaaaatacagaacaggaagagaggagatgaagcttcaaatgcactaaattttcctctccatagaaataaaatcatgtaagaagttaacacttcacaaggaggccccttcacaagcctacactcgcttctcacctatcactcttgccccagagtttgtgtctccctctccaaaacaccaatctttaacgacaatttaaaaagatcattgtggccaggcgcggtggctcatgcctgtaatcccagcactttgggaggccgaggcaagcagatcacgaggtcaggagatcgagaccaacgtggctaacatggtgaaaccccgtgtctactaaaaaaataccaaaaaaattagccggccgtggtggcgagcgcctgtagtcccaggtactcgggatgctgaggcaggcgaatggcgtgaacttgagaggcggagcttgcagtgagccaagatcgtgccactgcactccagcctgggagacaaagtgagactccgtctcaaaaaaaaaaaaaaaaaaaaaaaaatcattgtaacaagactaatagagatttataaaagaaaaattagcaaaccaataccacactcttaaccactcacataaccaat

SEQ ID NO: 1245365 - DNA, 4001 bp, Homo sapiens
tcctacagcactgaacaaaagtcttctgtctctttatggggggtgagagagaaaaggactagagtagaaaagtgcctccgctgacaccctcaataaagatgttttagcagaagtgctcaggaaatgcctcaggtgaggtcccaataaggaggctgctaaacagagaccactgggttgggagtgtagacatgcaaatgagcgtggctggcctgggaggccgaatccttgactaccactccctccagggactgtaatgcaccggttatacaccaagtttggtgtagggagggcaccttcccctatgccagaaaaagccttgcaattgtctatggtcaagcctgaaagatcacacacaggaatttgggtctgaagtgaacctcctcacttactataagcaaggctgattaatgctgtcatactatgaagataaatacagtacagttaccaaattctaacacccattcaatataattaaaggaaaaagacataaatacaaggtaagataatgaggaaaaaaagaatatgtaaaagtttgccacagttttttgatctcataactattaataaaactcttctgggcacaccctcaccttcacttacaacaagtgaaaaaaatgagtgatatataaaaattggttccaatctaaaatattagaatcacatgcaaatattcagatatctgagttggacagttaaaataatattttaaatatatatatgtatactcacgattcatctaaatcttctacaaatcctttacagacgaccatatcaagtacaacaactgaaaaaaaaagacaaaatgtacacaataaatgctgattatttggctcataccgtataagcttagtcatctctgaagtgtttttgacctttcacaacctaccaaaaaattcatcactgatgcatcccagggtgcaaatgatgcaaaagcaaaggtagttcatccatttaataaatatttagtctgtatgcaaccatatcgtgaccggccaagttctaggtaagccaataaatctaatacacacagttcctttttcctccatattttcactctcatcttacgtctctttttaaccatcctatctttttggaatacaaatagacagcattcttctttatttcttttgctttagtagcaattacctcttccgtaaaaactccaaatgccattcaaaatatttcccctcaaatagatacgtaggaagaaagtcgagctgcaactctaatacttattacacggcagtgcctgacacagagtgggctctaaaaggttgttaagtgagcggaccccagtgagaatgagggcactccatgctgacgggaggcagctgagaaccgctgacacacactcaggtccttttcacaccgcacaatcccggcggcctgaccctgatctgtcctcgaccaccctctcttgagtactggtggtaaaaatccttaaacgtgacaagactcggaacctaaagccaaggcaagatttggtcgttaagctgggacggcggcatccttcttgcccatcaaaggagtaagctttattgaaacttctgccacaatgagaaaaacacaaacacaaggcagcgcgcccttcccacgtccagcattggtccggcacagcggcggcggaaggaccccaaggtgtccgctccgtcagggccaggcagggtggcgcggcgggggcggcaggacgctgccgggaatgggtgggcatctccacgaaccccgcaggcctcgccccagacccgggtccaatcccggccccacggcggggccaggtcccacgcgcccgccagcgtcccgaccgctgagcccccattacctgtggcgcagagccgcagggccgtccaactcttccacgctgccatgctagcccgggagagctgcagaagctgactgtgcaaaagagggataaagacactggggtccgccgcctgcccgcccggaaagggaaacggagccgacccggagcggaagagaagcaccgcgctaactacgggggcggggctacccggccagtctccgtctccggctatgcgcgggagtgcggcgcatgcgaggggagtgcggcgcatgcgacagcgcctgcgcagtcatgtcttaagaatcctttgcgctctcggtgcccccctccacgcccaggagcgtgggaaccctgcttaagggctttactagggaaaacggtgctggttcactggggcgcgtttccgggaaggtgaataccggtgaaagttatgctgagggtgaggtaggctctgacgacgcacttgcaggttgaatactggcacatcatttacttgttactcccgtgtggtgagtgcacctgtgggttttgatgctggatcaaattcctggaaagaggcgcgcattaagactgcggattgctgagctgcgcgacactccgtatttttccaaaacgtatttgtaatattctttcaacctgtttgcataatgggacatctcttaaatgcagcaagctttaatgcatttttgccaaagtaaggattgcctctttaaaaactttctcttgaaacttgagaacatgaagttaagcgtaggatattttttgatggctcttttctgattattttggaactagataaagtagtatgaaatatttatattgctacctgttttttcttctatacgacaatgatttgtaaaaaccatatacttttataagacggttactgcagcaatcactacttacgaactagatgaaatttttatgggacataaggtaccagagaatttagatcaaaccaaattttgaaaacctgtgacaacaacagaagggggatatgatgtcagccggttcaccttaggttcaaaattccaacaggcaaaaatgtcataaaacgtcgttattcctagtgactagaagattaaattgcactctaattgagagcaagccctaaatgtcaccccctttgtgcatgcagcatggtatccagcgcaagccctctacagattcaatttttctttttctttctcttttcctttttttcttttttttttaagaaaaaagtagactaaaacgtaaggggactgttgaaatgatgggaatgttctcccggtggtggtggaacagctttataatagtaccatcgcctcgatactcttatacagaagcttttctactttcttggcaaggtctctgaatgacccatattcaatttttttttttcattctcatgtatttcaaagttttctgtcttccacagcatgcaaagtgaaataatttcctcttatatttgcgttacagtttaagttcacatgtggacaacaacaaaagccagttgacctagatctgtgcttttcagtagtgtagccactaaccacatgtggctattgagcttttgaaatgtgcctagtgtgatgaaataactgaatatttattttttttaatttcagtaaactcaaaaactgacactcgattcagctattggaaagtttttttaatgtggttggaacaactgaggtatgtgaatctactttttcaactgtaaattttatgaaatctaaatactgatcaagtcccaggcatgggtggctcatgcctattatcccagcactttgggaggctgaggcaggaggattgcttgaggtgaggcgtctgagaccagcctggtcaacacagtgagaccccatctgtacaaaaaattaaaaaattagccagatgtggcctggcgcggtggcttacacctgtaatcccagcactttgggaggccgaggcaggtggatcacgaggtcaagagatcgagaccatcctggctaacacagtgaaaccccgtctctactaagaatacagagaattagctgggcgtggtggcagacacctgtggtcccagctacttgggaggctgaggcaggagaatgcatgaacccaagaggccgagcttgcagtgagttgaaatcgcgccactgcactccagcctgggcgacagagcaagactctgtttcaaaaaaaaaaaaaaaaaattagccagatgtggtggcacaca

SEQ ID NO: 1245366 - DNA, 4001 bp, Homo sapiens
aagatcctccaaaacgaactcaaatgtctcaaatctccgccgtgggaatcttctcacccagagaagattctcacccagagaagattaactccgattacaggagaggagacaggaggttgacaccagcccacacaggctctcacctattctccgaagggctggtcagagaccatttttattgcctgagaatcttttatgtgcctgacaagatgtcctttactcaccatatgcttcctccccaaacccgccccaaaatctgttttgcagcaccctgcagaagcccctatggatgctataatgagcttcaatcatctgacccttcctcaagtctcttattttgtaggagtcctgtgcctatgtatgtaattaagtacagtttttctcctgttagtctgtcttatatcaattgaattcgtggcccagccaaggaattcataaggttcctagaaggttcgctcccctagaattggaaatgaccaatgcaaaagtttacatttttaaacatgcataatgaaaggggcttaaaggcaaaaagacgggaaacagcatttgttgaaaggtctccctgaaaaataaacttattttgatagcatttgttgttcatattagaaccgaacgccttttatgcacatatgaatatgtcattttgcgacagcagtgagagataattttgcaactgcgtggtcaggcaggtttttcttaggtggctagctgttcgctgaaaccctggtcctttggttcaaataaggtagcaccccgttcaacctgttgaacacttaattaagcaacacctgaagtgcttaaaatgaaaaaatcctttagacttttccgccttcgtttccctcaaccatactgacagacccatacaattgggaatgaatcttccctagaatcttttgcttcagccttcagtgcacccacattatttctgtcaaggcttttcccctctcttctcacccaaacacgattctccatgcgtccctccccacgcctctccgggttccgtgcccggctgcggagggacggcagcagcctaacctagtgttaacagaggggaaatctgacccagccgaaaccaagaaaaccaccactcgcccttccctgtgagagctttcaagttcgtatcaacgatttttaaagcgtttgttgtgctgggtgtgcttccctctgcggccctcctccacgaggcagaaagtccgtgcctggctgcattcgcttgctaactgtactgagaaacctgttccgagaggaccgggaagccactcgggtctgcgagggtcaagtccagcatccccggggcgcgcgcgcagtctctccccgccgtgcggggcctccaggcgagctggcaggggtgtccccgaaggggctcaggggaggcaaaggcaagcccgcagttcagggacggagggaatcatgtctctttccgggtggaaatttgggacggaggccacccgggagaaatcgtatcgggaacggttatctgccgcaagtgaggtgcccacggcgctgtctcccgcggcaccgcccggcgcaagcgcttagtaggtgctcaagaagcatttggagaaaatgacagcatcaaagcctgcggctaagaggggcttttggaagagcccgtttcgggtgttgcggtcccgccaacctgctccttctgcgccccagtttccctccgcttgccctttcccgccctccgccgtccaactctggaagcgcctccccagcttcccacggcctccgctccccaaaactccggctcctctcggaaggcggaggagccaggatgccgccggccccggcccttcccggggctcccgaggaggcgtcgggccgcgcggcccggcaggcgcgggcgctccttacctgcagccgggcgagcagcgcgcagagcagcagcagcgcgaacagcgggcggcgccgccgggcgcgcggggccatggcgcgggacaggctggcgggcgccgcggcctcagcggcctctgtggcccagcgggcgcggctgccgcggccctgtgtggtcccgcccccgtgccccgccccgcacctgcccccgcgccgccctcctgcgcccccctccggccgggcccggcggtgccagccaggtggtgcccaagctcccctggtttgcggtgggacgcggggccccgctcggggaggggccccgggggtgttcgccgcgcccggtgcctccttggtccggtctccgcccctggcccaggtgctcgggctgcagacaggttggcgggagaccagccctgggttgcccttcacggcactggctcctgccttgccgcaccccaggcctgtgggccccgcctcccgggaaggaatgggggcatcggggtggtcctgctcctgccccgcgcgcccacccttcgaggcccggccttccgaaagtggatgcgccaccgtcgagaatgaacgggaggaggatccttcctggagatttcgtcgactgcagttaaggcatcaacacaatacaccatccgccaatcttcgtaaaatactcctcttgttctttgcttcaaaatgttggggccagcagccactatctctttttcttctcctgatcctctgcctccgcccctcacccgtcctgcacccaccaaattctagaaaggcaccaggctccgccagccttgaggcgtcccccagcccccatcaccacattggccctttcagacataaagtggccagatgtctggggcacagtgttacctaaaaactgaggtccgttcttctggtgcagtaaggccaagccatccgcactaaggtttgcactgggagaaaagagggcgcttatctgcagagctccaggcaaggagaatggggcagctcttgcttaaatcctgaccttcagttggcttgcaagtaaggatttttaaacgcagggttaatttcaagaaagcagaagttacaggcaaaatcataatacacggaggttgcacattggtttggtctaacaagctgggatatcttgaaaatctttaaagtgagggtgcttataggttatacattcaaagattttctgacttgccatcagtgaaggaagagaagctttgttaaaaatttggggtcagcaaaaatgaatgttagctctggctcgtgggtgtgacttcctccttgcccttcaggaagaaatttagaagaaagaatggtggtcagttccgtcctcatttcccccttgtctgaggtctgcatgccagtggatctgttttgttgggggtctgggtttctgagaaacaattcagggacatatgttaagatgttatctttcgtttctatagggaatctaacttccttggttattgttttaagctataattaccttcttgcttatcaagttacttatttacttcttagggctagctaggtacctggaatttcccttgaaggaactcaagattttcctttatttccatgcttaggggtgctccacaggctcctaagatgggttcctgctccatctcaatagcatcctgttgtttttgtttgtcattacttgcttaggattgtgtctttcctcacattctaggtcgatgttggatccatacgtataatccctcctttgtatcatgtattagtccgttttcatgctgctgataaagacagggcaatttacaaaagaaagaggtttaacggacttacagttccatgtggctggggaggtctcacaatcatggtgaaaggcaaggaggagcaagtcacatctttcctggatggcagcaggcaaagagagagcttgtgcaaggaaactcccatttttaaaaccatcagatctcatgagacttactcacttcacaagaacagcacgggaaagacctgcagccatgattcaattacctcccaccaggtccctgccacaacacgtgggaattgaagatgagatttggggtggggacagagccaaaccatatcataaggtaactgtttatatgaagatacttgtcccatgccaatagaatataacctgttttgaattcctggattgccagaactattca

SEQ ID NO: 1245367 - DNA, 4001 bp, Homo sapiens
gtcttggacttctattaaaagagacacaaattttaaaaatcaaccaaacaaatacataatttcaagtagtgaaagtgctataagaataaaagaaaaagcagggtaaggaaagagagagcaagaaagacggcggttattcgaactatattcagggaaggtttctctgaaataatgacatttgatcagagatctgaatgacctgaagaagcgagacattcagagaaagataattccaggtgcaaggactagcaaactgcaaaagccctgaagcaggaacccgcttagtgtgtttaaggtacagctagaaggccatgtgggcaagagtggaaacaaagtcagaaagagatgagagcagatcttacagggacttgtgggtcatggtacagacatttggattttattataattgtgatgggaaggcactgaagcatgcttttcagccttcttaaaagacctttctcctccttagttttctggctaactcctatatgtctttcaaaatctagcatcatctcctctgtgacatgttctttaacttccctggtaagatcagtcccctcctctgtgacatctctgagtaacagattactgacctcttttcacactcctagtgacctcatttgtttatttttttcacagaactgtgtctttttcatatttttaacctcacgtctaacatagtggtgagtactaaagaaacgtttgataggccaggcgcggtggctcacgcctgtaattccagcactttgggaggtcgaggcgggtggatcacctgaggtcaggagttcgagaccagcctggccaacatggtggaaccctgtctctactaaaaatacaaaaaaatagctgggcgaggcaggagaattgcttgaacccaggaggcgcaggttgcagtgagccgagatcgcgccattgcactccagcctgggcaacaagagcaaaactctgtctcaaaatacaaacaagcaagcaaacaaagaaatgttcgataaaagaaaaactctgagtcattcagtggtgcaaggttggattcctttcagacccgacgtagttgtcgccctgggaggtcgggtgcattacttcccccagagaaaggtcttgggtttcggggataatgccctggctgagaatgcctcctagggggagatccaacttcccaaccgtcaggtgcttgctgtgttccctttgcacgtctctgcccgtccttcctgggtgggaccttggttggcggtgagtgggggaaacttcaggcttcccagctctgcctccgaacactcctggcaaacactttcaaggcctaatcacaaacccaggtcccccactttcctctgtaacaacggaagtcccagcagcgatgtccactcctgttctggggccagcgtcgcaccgctcaccccgcacctcatccctccgctcctccttccttctcctccacaccctctcggcaccgtgccccctttcctcacctaggatgcgcgtgatgcccagggtcagcttctccaggtgcggcttgctgcagcccagccccggggacgatgcctcctcctccatggctcgcgaccgcgattcgcgcgcggcgggagcgggtggagggccggaccccgcctcagcgccgaggccaatttcatggcatgccgggaacggtagttctcggcgcctgaaagcgcggcgcagtgatgatgggggcccggggttggtctgacagcagcagctccgtggggcgccggttcccgcggccccgcccggtgccccacaccgcacctccgggacgtagcttccccttcgcccccaccctctcgccccgcaggggccggccgcgcaggcgggggcgggcctctgcgtggtgcggccaatggggaccgagcctgcaggccgaggcgtggcggcccaggcgcgacgccccgagtggcggttgtttcaagatggcggacgtggcgggcccctcccgccccagtgccgcggcgttctggagccgggactgtatcctttgcccgcctgacagggggcgccggcgccctccacgggacggcgaggggcgagccgtcgcgtggcagtccgagagcggaggagaagctccgaactaaccccggggatggggacgtgctgctcggccccagtctaggtgctgggctctccccttgcttgggtgttaggtggccgagagactggtactgtctgcaggtgtggggacacggctcagatgcttcccagcgctcactaccggtgagctcgagaaagatagccttgagtccaggctcagtccagggctgagatggccctccgaggtccctctgcccaccctgtcagagtgcccccaggctgacttgagtgtgcggagctagctcgaagttgagggaggagtcggtgttggctggacagggagcctttttgttttgatttaggattgtctttagtctgcattgctaggagcaagtcaggacctttcggacttaaaaggccctccagtgatgatgtattttaatactggggttttaggagaggtgtggagcttggttactgggatgtggtctggtggtgctggttactgcgtaagatgggaatcattgtgcctggaagtattgttgacttacttgtggagtgcgggtcactggcagtcattgaagttcttggatcgttgtgaggtggagaagcagtggaactttttagtccagtggtagtattaccagttcagcagcagtgatgagatgtttgtgtgacaggagtgtttctttccttggagtaggtagactcttctcgcttgagctttggtcctgataatttacttcacgttccttagaggggttacttgaaagagggacggcaatctgtgttactgagtgcttgcagaggcagctctttttgtgtttgctaggattggtgatggcattaattgaggcgttgctgttacctttggcagaatcactgggcattcttcttagctcccagtgaaacttacaaaactgtgttatcaactcctttgttgagttactaggattagtgtcatgtgtagagagagggatatgtttgtattctgtgctgctcgtgtttagtgtttgcacttactagacataattaccatttgtctctgataggttggtgaaaagcaaatgaaatcatgtacatacactgtggatgaaagcatactagtgcagtgtgcaaattaaatattttttcctttacctttcagaagagaatatgtgcactgtggacaactgggctgaattaggaagttaggaaattgggataagtcttttctcaagaaacactgcttctgcattgacataattttgtgatggaggagatacttgaaggttattagcttatagcatcctatggtactgttcaaatatagaatcaatggtttgggggggggacaagctattgcaatgggactgaataagtgtattaatagatatatggactgaacctaagctcttggtcttcgcacccagtactttcacttactcatgtagttatatcaccccctattttatgtagaagtcatatatactccgttatctcttgtattctgactcccaacatttaatgtaaaatattcgtcctctcatagatagtgaggaattgaaattgtacaggggaaaaatggtggcgattatatcctataagatctaattcagatgtatgaaaggaattgcaaagttgctagtgtcacctttcccctcagactattccacgtaatgaccagttaacatcgagcctcagatattttcattttaaatctccatagagaatgtcactgtaagcaatgtcaaatgtaaatttgttactgaatatttgctgaaaagcataatgatagttattaatcatttgatttagttacatgtctttgcatcttgattcctttgtcatattgattatttcccagaccaccctagagcctttatagtagaattttcaatagaaaaagaccaaaaagtaagtacctataatctggtattcttttcacactattgaaaaaagattttcaatacttcacctaa

SEQ ID NO: 1245368 - DNA, 4001 bp, Homo sapiens
gctcaagtgtttgtgtttttttaggaattcaaggccgggcgcggtggctcacgcccataatccccgcactttgcgaggccgaggcgggcagatcacctgaggtcgggagttcgagaccaacctgaccaacatggagaaaccctgtctctactaaaaatacaaaaattatccgagtatggtggcgcatgcctgtaatctcagttactcagaaggctgaggcaggagaatcgcttgaacctgggaggcggaggtggcggtgggctgagatcgcgccactgcactccagtctgggcaacaagagcgaaactccatctcaaaataaataaataaataaataacaaaaaaataaaaaacgtagggcattttgttgctcttaagtccaacactgaaggaactgagactgatggctacgatacaggctaaagaaaatccaaaagtttccaaactttgtttttttggacagctccctctctccgctaaaaacaaaagctaatttataatggaactattctcccaaaaaacatggtagcgcaaaaatggtacagcactgattttttttgtggataagtcatattaagctaacaaacatcacagtcgtttgcctgacacaggcttattatgaaacccttcagttcttaccgaccttaacaaaaaaaactttacttggactttgttgtttgcaagatattggctaaaacatgcttgaagctttaccacattattttctcctaataaaaaaatccaaaactggagaaaacgggtagcttcttaacaagacattcattaacaagagaagacatttccatccctataactatagataactccaaatatccaggttaaattaaccacaacttgggcttgcttcctcttccttagggcaaaaagctgcttcaagttttattcttcttataatacttttaattttcttgagaggttaagcaaaataccgtatagctaagaatatattagtaaaacagctacacggtagttcagacagagatgaccctcaacgctacaagaatgtaataacatccacaactactttcaaagtccagtttaacatccaagggaggatgacaggtcttccttactcagaccctgtcggtctaagaggcagcattttcctaccttagctgctttgcaagtgcctaattccttcgctatggccgtggagaacagtctcaatgccgttctcgaagactcacgtttatctttgcaccaattacttaacgacctaggttgtccgaggaagaaaggaagtgcccagagaaactggagcttaggactgcgctgtcttgacaacctcacggtccctcctccagccgcccccggagcaccgcggggccacagccccagacgccacggtaccggctccaggacgtaaacactgcccttctcttccctgcccgcccgcaacttccttctcccgaccacggctttgcgggagcccactggaaaagggaggataccacataccctcggaagtgaggcgggagaagggcttaagcagctccgcgaagctgaggtgattgagacgagtgagccgctcggcttcgtcgctgcacagcgcagcgacacaggggacgaaggagtccgggattagctcctgcactgattgtacacactgggccatcgccgcagcacaggcagcggcggcgcccgccctccggcccaccctgcgaggttatcctgcggctgcagcagctaccgccgccgcccgccggcctggcccggccgggcggggccccgaacgcactggagcctagaaacaagaaggaacagacgccgccgcttcggtttctggggcacaatccactgaccccccccttcccgtcaccgccgcttctcagcgctcgtccccgcgtgctcgcattccaccccgataggtggagacgccgacagtcaccacttagtccttcggacggcaaaaccttggtcactgcccggccggaaccgccatgttgaggccgaaccctgaccaaccggcagtactactcccagctgcccccgcgcgcgtccctcacgtgactgtgttaaaggagacggtaggggcaagggaagagagctgaggagagggaagtgaaaaacgacggaggccggttgggaggctggagccggaagtgttgtgacggaagctccctgggcggggcggggctacaagtgcggtgggcgggggcgggggcgggggcgggggcggggggaggtgcacaactgtaggccgggttctcaagctcgcccttagcagagcagagctgagagccacctactagcggcaggtggagcctcgagacgggtgctgtcgtggtgatggaggcgcacgctcgcttcccacgcagtttggcctttttgacgtccctggctgttgtgggcaaccgatttggttggtcgcgctgcttcctacgctcgccggcggagcagctagtggcacctgctcggagagagggagtggatctctcggaagtgcttggggtttcgctgaagcggacctgaacagaccatgtgtcctttaaatacagccatgcttttagaaacggactgtcactttatgtggactcaaccattgaacagaatgtgtgcttttgtgagtgctgcaattccttcaagtgtaattgcgctactgcatttttgttggtcgcagggaaggggtgtgcctgcaaatgtccgcgtggttcgtcctcagcctcttcctttttacactgtgctaggatgtttacttgcttgtggtggaggtaggggaagccagtatttgtgtactgtgtactgtcctgaaccggctttcattcctaacttttcaaagattgctttaaaggggggggggcgcgggtcaaatattgttttaaagggggggacggggtgaggtcaatggtgtgtgccttgtaagtagaaatgaatgaaaggaattttactaatgtgtcactcaattgtttgagctccttctgttttgcatgccaaaaatataaggcaaggaaaaatgtatcattctatcatgattttatggtgctctaattaaaggtgtcttccccaacgtcaatgtctcaaatttttcgacttcttgacaccctcaggttttcactaaggtaataatttatgacaagtaagatgtgtgcttctcatgtaagttgataaatgggaggtaggaaggcacagtaggacatattgatgacatgccttggctacagattaatttataagagagtccatcactttaggagatttatttgccgaagttaagtacgagcccaggaaacaggtctatgcctttcttcgaagatgattttgagtgctccaaatttaaaggggaaagggcgggatattgagaagcacaccgttttcatgtaagggggcggtaggagaaaatagtaattcttgcctttctctggctcagtgaatctgcattttttacataagatgacataaaatgggcagaggaagaatgtgggagtctgcatttttcataagataacagacaaaatggggtaggggaacaatcagataggcatttgtgtctggcgggctggggtggccacctgtaaagataagctatcaatttgcattgccatgaagttttaacagcacactaagaatttccttgtgggcaaaatacgggggagagatgtagcttttcatcttgcagcaatcttatttaggaaccaaaagggggaggcagatttgcgtgaccagtcccagcgtgacttttccctttggctaaatcagtttggggtcccaaaatttaatttccttttgcaagagataacatgttacacacaatcccttttcaatgcttctgattcacttccttaccctttataatgtgagaatctcacataatttagtgtgactcaagttataagatacattttttataacaggactcccaaatgcaaacatactatttatctagtactctaaaaagtttcaaaggccatttatttttatgctgaaagtaaaaacagctgaattagactctttgaaaaggactttcaatggtaatttagcca

SEQ ID NO: 1245369 - DNA, 4001 bp, Homo sapiens
tgtaaaacttctgagacaaaattaaaatggagcagcaaaagggggagcgagagagaaaagttgccctgatagtggcggagctgtcaggagcatgtgtgtttccatggtgagtgatttattgatgtttatcaggaatgaatagatcaaaggctgccagatgacaggcgatcaatcacacatcaaatcaaggatggcaatcctctaataaaacagaaaacaaggaaaaccagctcctgccagttcctcctccagagaaaaataacttttctgttcaatcagagtctgcactatcactgccttgtgctggcctgatcaaaagacatctttagaggtaataaaaaaaaagtgggggcggggggcctcttgcacaggacattaaaggctgctgttttccagagaaatcttctgaacacattctttgcgtcccagcctggtgaccttgttttcaagtgtcaggttcagcctccccgcctttggaggacttttccagtgcgctccggcagccaaggagcaactacttcccctcagcgcacgccccctcctgaggtagccagaagcacccgccgtcccgcggcccccggcctcccccggccatccgggcttcccgcagcgcagagaagcaccgcgaactttctctgctccacgcgccggcccaggttgggggtgtgggggaggacggcgaccgcagcctccagacgactgtggccagcgcaggctgggcctcccctccccagcttggggcggcccgcggcccacgtcccgcacctcggcccgcgaagccccctcctcctgctcctcccggcgcccactccccgcggcgcgggccgcgcgcccgttacctgccgagcgccggggggcctgctgcttcctcctcggcatgctgctcggccgccgcagccgtcgcctcagccgccgccggagttcgcggggcgcggggacgcggggccccgggcgcgggcgcaactccgcggcgcgcccaactttggcctcgtccccgcgggctccgggctccgggcgcgccgcggaccgcggggagccgctcgcatggaccgccgcgcccggggccgctcaggaggcggcggcggcggccgcgcggcccgcttcccggcgccgggctgcgggcggagcgcgcggggcctgggcgccgagcccggagtcatccccggcgcgggccgcgggcgcagcagcgggcgctcggcgggccggcccgcggcccgcgctccatgctgccgcctccccgccgccgcgctgctgctgggcgggcgctcctcccggcgcgccgctccgggcgctcccctgcgccttcttccgcgagccgagagtcgccgagcgcaactttctctccccctctctcctcgctgtttgggggtcgcggcgagtgtttttagtgcgcgggtcgcagctttctcattgtgcgccagcgaggccgatgcaggctgtccttttcctccccgcacttagtctaagaggaagaaagcaaacaagacagaggagtgaagcccccgtacatacatgcgccggggggagatgtcaggcgctgctccaccttccaaacagtcacagatcaaacagtgtcaccccgccggagcgccacttggtgccccgcgcttccacccggggggcttggccgccaggatcgccgcttcttccaatgcgaaatctaatgcaaacacattttgatcatggatttttggccggtcttgatcttccaacagaaaaaaatttgaaaaatacacaaaaagcacccccccctccaagaaaaaaaaaaggcaacaacaacccggagagtgtgtgcaaagggggtgaagagcagacattcactgggtgggcgagatgagcgtggactgtccccccccccctcaaactcctgggagagagggagatgcactctcgctctctcctcttttcagtgaaatataacacacattcggatcgcagagctttcagacagtctcaactgatagacagacacatcgagctgcttttcctgcttcagtttttactcctcctcctctcgccaacgtcaccctgacaattacaaataggtctctcacaaaccatacctgtcaatctttttaattgctttgttttctttttttcggagctaaacaatatgacaaaaaaaagaaatcttaatacagcataacataaaagattgtacattggaggaattcattcagtgttgttattgtaacccactggctgataccgggtaaaacccatatgctctaagttaagtagacattagttcctgcagatttttaaacctgttagttcccccccaacacacacacatacacatacacacacttgcacattcatacacacgcaaccacgtgcatccaaactacccttgggtgaagcatgtcctacatttggggggaaaaatatctgtgtcgcttttgcaatctcaggttggggggttagatttggctggggaggagcccagagtagcttttatattttggtaattcgtgggtaactgaaaagcaagatatttttaaaattaaattttacaatttaaataaaaatgtaaagatggacttagttcatcacagaaaagtgtggaaatatttaatttggcccctctataaaaagtgaattgacatttggtccatgcacgccagtagggagaaaacggacacgatggaacgacagatctttctagctgggttcgaaaatgaggtcctcacacagcagtgcaacgtctccaattcagttaagtccctcggcatccccacgtagaactttaaaatgtgtctgtgctctgggaatttggccttctggttttctatatgtgtgttctctcccaatgggaaacctgtaacagtcttgtagatctacttaaaacattcatggaaaaacatgaaatctaggccaaaataaataaaatggcttagttcctgcaacttgcatgggacagaccgtggacagaaagcacgcgcaaggggttccggggacaggaagccaccagcctggggagcgggaggcactggacatttccccgccccgcggtcggtacgggtgcgcgtgcggcagcggcggcaggggctccccgccctgcccggggtccccggtcgtgccccgccgcccgggccgcgctcggggttgattcgtaccaccttgcaaggaagtgaacgcttcgcacgggaaggggaggcgcctgcgccggccgccgcgcagctccggggacgcccggggctgccgccggctcggggccgcagacgaccgcgggacgcgcgagtcccccgtccccccttgcccgccgtcccccccgccacccttgcccgagaggagtcaaatccggcttttagagctcggggagggtggggatatccggtgcctctcccgcgccaggaggaagggggagggcggagaggatccttggccagtctgcgccgagcagattcaaaccaaaacaaaaagattaaaggagcagcggccggggcggcagcggtccccaggccgggacacccggggtggtgcgcccgggttcgcgggggctgcgccggcgccggggaggcggggggagcgggagcgggcgacgcggggaaggggggagccagggggagggcgccggccggaggaggggcggacccgcccgccctagccgagcagagcacagccgagccgagcggcccgggcgggggccgaccccggccagcgtcggcgcagagagcgggcggaggcgcaggccatgctgcggctggtgcccaccggggcccgggccatcgtggacatgtcgtacgcccgccacttcctggacttccagggctccgccattccccaagccatgcagaagctggtggtgacccggctgagccccaacttccgcgaggccgtcaccctgagccgggactgcccggtgccgctccccggggacggagacctcctcgtccggaaccggtgagcccggcgccccccaaccccacgcccccgttctcgccccgggctcgcgccgcgccgcgccgctcccgcagtccccagcccgcccgcgtgcc

SEQ ID NO: 1245370 - DNA, 4001 bp, Homo sapiens
ggaatcatagcacggtacaggaaatattcacaccttttttcctgagggcttcttaaaaactacaaaagagaaattgtgtgacaagtaaaccttttaaatcccccatcaacagcctttgatgaaactccatcttgaaaccagacctgtatgctttaaaaatgaaatgttctaagtaaagcgaagttgtttttactttcagaccaaaggggggaaaaaatcaccgatttaaaagtaaaagggctttagtgaaaagttcacagttgtgagatacttgcttcgccattaagaaggtggaagctctgctgggtagaaaccaccattctctgaggtctgagactttaggcattctcattcttacagactctgtctcccggtcacagttgtacattggtcctctcattccaaccaaactacagggtctccatagcgtgaagcatgtggtccttaaacgtgttggggaaagctgctaatcaacgtccttaaggctcgtcaacaatcagacggcaaatcacaaacttgcttcctcaacccgagaacaaacactccaggtccccaaagaaatgaaggttccttccactcccacaggaaaactaccaggtttcagttctttcgctttattttttaaaagacaaataaaaaattaactgaacacacgtgttttcctaccattctcatactttttaaaaatccctccattttcttccttcctttatttacgttggaaaaattcttaataaataacgcctgcttgaaagacatcaggaactcattttgaggactgagtttgcagaagacaaggcagagagatgagtgggcagagttgagctgaaatttttaaattcctgcacggcaaagcaattgtgcgtatctgttttcaaacaataaaagcgtctggaattgcacaatgttgcagagccatgcgaggcgcgaggagcaggcagccggagggctccgtgtcacaaaggctgccggggcagcacgcgagccagagtcacgacaagcccgggtcccaggctcgctgctgcctcaaatctcatccggtcccaaagccagctgccctgcagagaggagcctaccggcaccgggcacgtctgtgggagggcgaggctgggagaaagtgagagggggactgcgggcgcgcggggcgggcgcgcggcgggtcccgggagggaaaggacaacggagccgggggtagggggtggacgaggagatgtggcagaggcgcattccctctggctgatcttgccagggaggagacctgaggaccggaatcggtgaccgacaggagggggagggggctcccgggggccgcaggtcgaggcgcgtgagccggacacgaggtgcgcgctgcagggttggggaatcggggacgcgtgggtcacctgtattgtttgaaaagctggtccgactccctgaagccgttgttgagcagcatgttgatgccggccagggccagctccgcgtcctgcaggggcgccgccgccgccgctgccgcgtccgagtctccgtcgtcccgccgccgcggccgctgctgctccgagccggccatgggcgtgcgaggccctgcgctgggccgaggcgagatcgggagcagctgctgcggccccgcgcgcgcccggagcccggctctacctgcccggagccaagcggagccgggaggggaggggaggggaggggagaagacgggagggaagaggagggaaggaccgcggagggaggagccgcggcccggctgcggcgcggcgtgggaggtgggcgtccggccgccgccgcggggattactcagcagcacccgcccgctcctctcgcgccctccgaagcacccaactcgcgcgggccccgaagcggaatccgtttccgggtgtctctcaccccgccaagccggtccccgagcggcggccgcctccacttcctgcagcccccgcgccccggcccctcccgggtccccaagccgcgccttcgcccaccgcccaggactgctcggacacacgcacgcgagacccggagacccgagcgccccaccctcccccgaaggggccggacccaggagtcgggaggagggcaaggcgcggagggagaacgagcgtgcggatgtggaaggaaagggaaagggaaggggaactccgcccgggccgctatgctagcgcgcggcgctttgtccacgagtaactgaaactccacgagtaactgaaaccccacgcagcccgcgcccgcgaccccagacttcatcccgaccctggggccgccccctaggaccagggcagccaattcccgaggaggtgggcggcgggggcggggtctctggcacctgccccgcagctccccggagccccgcgctgcgggactgcaaggcagagcccctcggatcccggtaccacccactccagcccgccaccaacatttgcgcagtggggcaggaggagaaatggaggcctatatgccatgtgcccaaatatttaaaagttataaattcagctgccaaagtgtgttctattctcacactgccaattattcttgcaaagctttggcgttcatatgaccaaatgtcagcaaaacatcaaaagtgactgaatttaaccattatcacagaagtctcactgttctgatgatgggctggtgatatctggatgcctaatattctagagacaagcaattcataaatcatctttatgttttttccacaaatttatttttctctaatttagcaaaatcccttaatgtagtgttgcaatcaagattatgctctaatgccaaattggacaaccttccttgagtcgctgtcgtttttagagtgtagtttattaatttcaacttgaagaaactttgctgaaacatttataacagaattttttttaaatgaaagcaatcctcaggtttagaaataactcctgaattttaaacattatgtcatccattatcatgggaccaatataataagttattacagaaaaatgcaaaataattttgtcatgtaagttgcttttacttattttgtaaattgtaccatcccttataagaatatctaaatccatacaggattttcaacttttataaatagaaattttagagtaataagaattactgccactccttaagtgtcatgtgtaactgttgcaaagccatgctaattcttgagtacatctggaaccacaaactggaacactgacagaagcaagaaaatggacgattcacatccttgggaaacagtacgttgtaatgcaggagtcactgcattcatgctgtctgagaagaaggatttgacaagctgacctttaaaagaaaatctaggttttcttggatttaacataatgttagtctcaaacatcagcagtgtcaccatccttcatggcactgagaggctgtaaccttttgtttttagggcactgagctaaagatgagaagaagcgttccctggagcctgcatggcatcaatcatgagaatggatgttgagggttatgcaccccactgaggcagcactgaatgccagatcccaagttacagaggtgcttgtatgtttttaaataaatttatgcgtgtgtgtgtgtgtgtgtgtgtgtgtgtgtgtgtgttttgatgggcagggccctcaaacgcaggtcttagggactgtactgctcattgaggcccacatgaggccattggcatggagggctcccctggccacacactgcccgaggtcaccctgacaacatgcacttacaggctgctggaactttggatctgtggaaccatttgcccagatccctgaagcagtctagtcaataagggagagaagccaagagcaaaatatcagacataggagatagcctgcagtcccccaactgagaaagacagccaagcacagtcctgtatgtccctattactgggaagaaaaaacaagaatttcaaggaattgatgacactatgtttatgagttatacttgaggccctgcagctgaggatgtggggaggggtgagcaaagtcagagcactctttgtggggctagttctgtctcaagaa

SEQ ID NO: 1245371 - DNA, 4001 bp, Homo sapiens
acagaaagattttgcaattactaatgtaataggatcagagttttagtgcagtcagcaaagacccatagcaacaattctggaggagaatggggaaaatctcgggcagataaatccttccaggtttgttggtgactgtctctccagtaagggagaagcagaaggtggcagctaacatgtatggagggccttccgtgccaggccccctgcatgaggtttcacacgtcatgtcatctaaacctcacagctgctacaaggggaggcaccttaactccaatggcaactatgtggctaggaaggtttgggcaacttgtccaaggtctcagagctagttggtgaaaaacactgggacttcagtccaactatctcctgtctcctatttttcttctcaagtaaacattagtgggaaggaggaacaaagagctttgaattctaatgcagtccaataaggtatttctggtcatttaatcaattcatttaacatcacctattatcctaaaaaatcaaaatgctgtaaagaaaaaatgttataaaaacgtaatgagaatcagagagaagtatcattgcatgtgctacgggaataactgaagtccttcttactacagaaggcaccaagcattttgtagacacacactgaatggcatgaaagctaaaatactgcattaatactacttcttaacaagaggctggacagacatttcatatttaccaatttcatacagacagacatgttgaatttctctctggtctactgcaagttccaaagcagtgtggaaagatgtcaaggcactgttgatttgacactaaggagaaaaggaaaacagaattaccagctaagatctgtcgataacattacaatcatcataattcaaaagcatctttttccttcatagttattttaaacaggttaagcaatatagaagacagtggtttaaagattgctaggaaaatactccaatttgcccccaaacagctgtgaaattaacctaagcacagagaacctctccttgctcaggtggtaagggctcagctcgcgccgccttctcctccagcgttctctcctttgctcaggtgttaagggctcagctcacacccaccttctccttcactcaggtggtaagggctcagctcgcgccgccttctcctccagcgttctctcacacttgtacagtaggacgtgttggattttaattgtttgctaatctagccccttgttaccacacaggtgtggaaagggaagggaccatatttcatccccgtgtgcgcccagccctggcccagaagtctctcaatcgctactgagtgaatgcacgaagccgctccattagcccagttctcagtgagctcttcaccatacagttgatagtttgcttctataccctagaatgctgttctccaattgcttctgctcatcaaatctcctctcccgacacttcagaaattccctgaggatccagattacatttccaacactttcattcacataacactgtctgggacccagcaaactctcaaatgtccgctctacttactcccagtgaaatacatttcgttttcccgccgctgaagatgtcactcagggtctgccaacacgatgccacaagtacccaagaggagcagctcaaaagcatgatcaggattcaaagcatcagtttaatcttaggcattgagaaatgctaaatgtcacataccattaataaataaatcttaaacagccagacgacctgacagcttattctgaacggtgcatgcatttctttcttgctctgctggtgccagggctcctctcactgccctacacttgcagggaggtggacttccctcccctgggcttccaggtgcgtctcctgctgctttctctatgcttcctccccctccaatgctcccaagtgcccattatccccacagccagccaggtgggctggaagggtcctggaggagaagctgcaggcttctcagaggacgggtcccccacccgcagacctgggctcctctcctcagcacgtcactgcaggaggcctcggggaaacaagggcaccaatgagtcagcaggtgatcttcaggacagcctgtgactcgggaacactgtaagccaaatgactcattaaccaaggcccagctggatcaataactgttcatgccccaaagtaacactctcctctgttgtcaggaaggttgaaactgcagcattcaatccattatcaccgtttatgaatgctgaccaggtagccacagaagacacgcaccaatcgcatccctgattcctgttctcagtaacttaacgtccagttggaggaaacctcacaacaatgggaatcgcccacagctcagaaggcagacattgacactgactgttagcacacagctcaaacacaaaacaccaaggttaaaaaaaaaaaatcaatcctttatggcgcaggaatgtgtgcatgagcgcaggtggaggtatctagacacgtcacaccctatgtctaatttttcccttttgggatcaacagttcttttcttgaatcagatatgcactccatttagcatatttatacagaaatcacagcattaggggttcagctttgcaaacatctctctcactttgctaaattaatgacatagttctcacatacagaatgtttctagatgggccatcaccaccgagctgttcccccccgtgtcccccatggtacatgacagtgcaatagcacgctgtccttcagaggacagaaaattaatcaggaaacatttactgggcaaccgctatgtgccagggacaggctctggagataaaaagatgagtccaaataaagctttgaatctaaggaaaggaaaaagaaatccaggtagtatttcaatcaaatcatttctcttaaccctttcaaactctctgaggtaggtatgtattaattccatttgcggatgaagaaagtaaagttcaaagaagttaaggagcttggtcaaggtcaacaaggtaacaattgactaatagtcaaaattctgcccaactgcctctaaaaagtgtgctttcttcggggagtgtgtatgcagatgtgattaagtcaaggatcctgagatgagacagattatcctggattagccaggttggccctaaatacaatcacatgtatccttcaaagtgacacacataggagagaagaggacactgtcaaccatggaggcagagcctggagtgatgctgccacaagtcaaggaaggccagcagccaccagaggctggaagaggcaaggaagggttctccccacagcctccagagggcttgaaagcactgagaccaggttatggagctcaatggcattatgccgagagcaagtagaactacagaattcattctagttctatcctgatcattgagtgaggaattatgatgaacagccattaacacagttgaaataaattttcccatatttttcaccaaaaaaaatatatatatatatatatttttaaagatagggtcttgctctgtctcccatgctggagtgcaatggcgcattcgtagctcactgctgcctcaatctcccaggctcaagagatactcccatctcaacctcctaagtagctgggattatgggcatgcactgctgtgtctggctaagtttttttttaattaatattttgtagacaggggtctcactacactgcccatgctggtcccaaactcctgggctcaggtgatccttccacctcggcttcccaaagtcccgggattataagcataagccaccatgcccagtctcaccaaaaaaatttaaaagaaaaaatgatctttttttttttttttagacagagtctcgctctgtcacccaggctggagtcagtggcgtgatcttggctcaatgcaacctctgcctcctgggttcaagcgattctcctgcctcagcctcctaagtagctgggactacaggcatgtgccactgcgcctggctaatttttatatttttagtacagatgaggtttcaccatattgaccaggctggtctcgaactcctgacctc

SEQ ID NO: 1245372 - DNA, 4001 bp, Homo sapiens
aaggcagttcatagatgctgctgctgctgctgctagcatttcatctgctgagaatcacactcagtagcaacagccgtccaagatacagccctgcggggctttgagtgttaacgttgggtgcatagtgatgaggcttttttaaagccttgaaacggggccaactggtaatacctaaggaacgtaagtaccattcagtgtgtttgtgtaagccctggctatgaggggaggggcgagtgggggaagcacatgatgttaaactaggctaatgggtttaattttcctttgttttcctagatttcctggcaaacagaaaaagctctcttggtctttaaagttcatgacagattccctaagtgtttgtaaaacatctgccaaccacactgatgggctctcacacaaaggttttggaaatacagactgatttcctttggttactaaaactgatttttttttttttttttggttactacaattgattttatctctataattttcttctctgtcatcttattttaaacaaaaaccgtggcacaaaaataaagtgatggtttttgaggaaaacatatctatttgtttttctttttgtatcttcagccaaaacatctaaggaataataatgaaaataatagaaaatcttttgcactgggaaattgtttccctctgtttttagccttcatttatttttttgccagagcttcatatcttttcagagattcatgtgcataacagttttaaatgttttccaaaatgaacttctccagctgaatctcagagaagaaagctttgttaatggcaacaattcatttaagattaatatgaagctttctggatgattgttggtgatgtcatatgaaccattagggtggtgcaaaagtaattgcagttttgccattaaaagcaattatttttgcacaaacctaataccaaaacatctaatgtcaaactatggtccatttctattatatttcccaagacaattaaattagtatataatttttttcatagattttcagtttataatatgtagtgaaattaaataattatctagaatagcattgctaattgtgacattacttaaatatttatgaaaaataaactttgatctggcatttcactcacagctggtcaaggctagtaaaagatgagattctaaatttcacagctggaggcctacatttcgatctttatacaagatttaatgaaattcacagtgacatttttagttattttgatacattctcaaccaagtaggagtacaagatctataagtgagggtctagtaaattatttgatatgaaaaggggtccgtgtacttcataataattagtcataacaagtgctatggcatttattgagcatctgtgtgtggacattttgttattgtagatattttctattaacctgatattaatgcatgtctttacacccaaccctccaagggatactatgcaaatgctttaacatctggcatttgttgaaaaatagcagagattttaaagaatggcactgagaaagtcttgccacgtttttatggaaatccattctggaagcatttctttccattatatgtcttgtctatttcatattgaaagcccttttatcacagcttcaatttgcgttagtattttaccatcaaagatgaacttagccagtgcaatgacaacatgataaaaacataaaatgatacaatgattcttcttgtttatcacttaccctgtctcattaagccacttaccacaaaagaagcttgagatttcttaggagcaagattttagaattcttaggactcagcctttctgagccagtggcaggatagttgcttctaaagaggctgtgtgtgtaggtgctggaggggttaggtctccaggagggacaagatgggcagctggaaataaattcagaatcctgcctctgttgtagcaaaactctccattctctttctcaccttttctcagaacctgcttacataactgtggttaacctatatgcgtaagcatgattaaaaagattgacacagcctggcagtcttttctgtgctatgcacccaggagcacagcccttgggcctgaagcattggcagcgggctctggctctgtgtgtggcgcaggtcagtccggcctgcctgccaattactcagtagttatgtccagggagaagcaagccatgcttgttaggcagattgctgcactctgagcacaaaaatgtcaagggcacataattactcctaatgcaaaaacatagaaaagctgcaattaaaaggcagtggagcagtgcctttcttatttctggagagactggaaattacagtaaggcagcacactgggctttctctgcctcctagtatacacaaatattttcaattaattacaacgtgtaatggtatatttatttttggatctcctgtctccccataggcttcatgtgagcaaagaccacatgtctggcttgttcaccactgcacactcccaggacatggtaggaattcagtgactatttaatgaatggatgaccacggtatttcagttttaggaaagaatttccaaatacatttttccccattcattgagtccttatttaaccaagttaactagacaatacgtcctctacattgttcatggggaattactgagccagacctgggggaaatgacataatatcctattaattttttttaaaaaattatttttaatgttcgtgggtatataataggtatacatatttatgggttacatgacatattttgatataggcatgcaatgcctaataatcacatcagggtaaatggggtatccatcccctcaagcatttatcctttgtgttacaaacaatccatttatattattttagttactttaaaatgtacaattacattattttttgctatagtcaccctgttgcgctagccaatactaagtcttattcatcctatttttttgaaccgattaaccatccccatttccacctactccaccactaccctttccagcctctggtaaccatccttttactatctcaatgagttcaattattttaatttttagctcccacaaataagtgagaacatatgaagtttgtgtttctgtgcctggctcatttcacttaacacaatgatctccagttccatccatgttgctgcaaatgacaggatcttattctttcttatgactgaatagtactccattgtatatatgtaccacattttctttgtccagtcatctattgatggacacttaggttgcttccaaatcttagctattgtgaactgtgctgcaattagttttttatgtaaggtatcatggccatgaaagcttgaatatataaaaaaagtcatagataagatcttgtcttggaagagctacacaaagaagatcttgttttggaagatctacgcatatttcattttgtatagacacattctgtatccaaatgagaaagatttcttagaagggagattcattgcctcctataatttattcaaatgcttaacagccttaaagatgactaccacactgttgccacataacagatgttaaataaatattgttgttgtttttgtgaattgaacttggcagtaaaaaatgaaaattgcagctgctaaatatttggtgtgagttacagcagctctctttaatctctgtttttagttgagttgtgtttgcatgagttaaattgttttccttctgatgtccaatttacttgcagctcttctaccagaggcaagcattttcaccagccattttgaatttgatgtgctcagcactttgaggtagctggctcctgggcgtaagtcagattctgactcactggctggatcaccatcctcaggaccccttgcagggtagaccttgctcagttgttcctcgattttcttctgtgtatttgaaagaaatacatgctcttgtgatgtgcaatgcttcatagatgtcaccttttaagtttattacaaatcacatttgtatagttcgttattgaattttagacccatataacttctaagcatg

SEQ ID NO: 1245373 - DNA, 4001 bp, Homo sapiens
aactccatgaaaattgtgaactggctaatgaaggtgagaagccactcttggacatgaagtcgggtgatcgtgggattagcctggggctgtactttgcctcatggatccatctcttctatctttttttttttaactgagcttgacagcccccagccttgcacacagtaggtgccccaaagtgttcattaggcaaaagccttgggttttgggtgatccatattaactacagacagatgcctggttaataatatttctgaattcctttccttttgttaatgggttaatacacattataccttttcctaaaattctaagacaaggacacttagctttggtgttacccagggacaccagggaatctgtgaaactcctaaaatcacatatatgattttgtatgtgtgtgtatctgtgcattttttctgggcatagaatgtttacttttcatcacctacataaagtgttctgtgacccaaaagggttgcaaaccacagctagaggagaggagttctgattccttcttttctctactgtctgcccctaaatgatgctcaggttcctggtcacttcctagctaagcaaaacaaaaagagggcatccttcagagggcatacttgacctctgcctacgtttttcaatctacttgtaaattctttagcagatgatgtgagcctctctctaccaagtgaggggcaaacgggaagataaaaccaagtcctgtgggagggttctttggcaacttacccagaggcaaatggctcccaggtgtcatcagcagcctttctgaacacatgcacggccacattgatggcaggactgcctcggacagcatctagaactttgaccatcagaggacacttggattcaccggtgccctgggtgtagagaagacacgtgagaagttaacaaaattgatcagagtgaaaggatttattctttgtggtattagaaatctggagcgaaacaagaattacacactgatcccattatcaggaacgtaagtgtcgacaattaatgagcttccctactcagtataacacagacgtaattgtttccaaagcaagaatggtttctgcctccagacacactgctatcaaccagggatgtgtataatgaattttaagggagaaaataggtcccctgagaacagttgctttgttaaaagtctccatttgagtggaattactgaaaagatgtaatgtaccatacatagggccaaacaggttttcctgagatcattttagttgttgctatagtcactccctcttaccagttgttataaaataatgtcagaactacatccagacccattttatagtattagttaattcttctagaggatttaagaattagatatctgactagaatattgttcactaagccttttaaagattaatcaataaatacgttttgaataactatagggccagaatataatctcctgcagtttgtcccccaaatacattttatggagggatacttttctgaaaattcagtattaacagcttccttaatatcatatctttatttctatcatctatctgaggaaacagaggtaccagatattacaaacctaatgcaccaaagcaatgaggtagaatgctcagagttcaagtcccagctcagtaagctcagtggaacttcattctttttgaagtttgaattaattatattaaaaatagatgctgggtacccttgccctagtaataaaagctggttggcaaagctggaaggagtcacttctacttcatttagcgtgaatcttaaatgtaggaatgggatgtcacagaaacactcaccgtagggccagcctcagacacaaataccagtccagcaaggcagaggaggagcagacgatgagaagccatcctgccaagaatgagtggacttctgtgatggctgctcccagcctggggcttttatactcacttctcctgagctaggctgcttatccctgccaatctgactgcaaacctgctgattctgattattgacttagtcaacaaagagagaataagtaacccatacaaatatgaaccttgtctagagagattagagcatcggaacattcgttctatgaaatattcttaataggtcatttgaccagttaggtcaccaaaacaaaacaaccaaaacaaaacaaaacaatcaaaacaaaacaaaaatagtcttctccctgtgtgactgcgtgcactaacattcttgggggtaattttttcctccctcacatatttctatgcatgttttccatttttatagattttttgtctctcattttagatgcaagattttagacagatgcaagttgtaataatgtatttcatgttgaatgacatctagctgcacaggcttaaatatagtgcattagaaaatgtttgcacttgatggatccatgggtcaacaaggaaaaacccttggcagtgctcacatttttaaaagcctacattttagccaaactaagtcatttggaagctttgcttagtcagcaatttctccacaatgtgtgtgtgcatgtgtgtatgtgtgtgtgtgttctgcccagataaagtccacttcaatctaagaatggcatcttccctccctcccttccttccttccttttttccttcctttttttttttttttttgacagggtctcactccaacgccctggctcgagtgcagtggcacgatcacagctcgctgcagccttgacctcccgggctcaggtcatcctcccacctcagcctcttgcccaggctggtctcgaactcctgagctcaagcaatccacccgctttggccttccaaagtgctgggattacacgtgtgagccactgagctgggccagaatggcatatttcaacctggcattgatgcccctgaaatacagagaaccaaatcttctttactgactcttctgcattgggcatgcaggaacaaggctgacagctggtttttgacagaaccaaacttgctggaagaaagtagagatgactgtgagaaccagaagccatgattgacagcagattcttttcctcctggccgacttattaatacaagtccagaaattatgatgatttgatgattcattactcacatacaaagtctctgtgtgtatgtgtgtgtgtgtgtgtgtgcgcgcgcacgcgcatgtgtgtgtgtgtccactagcatgcgtggctttgttcatggataaactaaggcaggtttttgtccttataagacaaacatgtagaaaacatagagaagacaaatattttggacaaatacaagccaagagcaagtccggtttggagcactaagaattgagggaacattcccataactgatagagtcagattagaaaaaattcaacaagaaattgtgaagcacaggagcttacagggagtagtggaagggacagaaaagcctttcaggaacatgagaatgtgcaggagaggactccgggaggtgggttgacccctcacagcaatgagcaaatgtagttgagaccataactaggaatggagtcttagacccttagagtttaactaggaagcagcagcagaaagacttttgcatttggagttggatgaccagagtcattcgatcccagttctgctgccccgtttcccggatgaccttctatgagttatctactatctcagatactcggccaactcgtttgtaaaatagaaatgcctacttttctacttcaaaggactgttctaataacttttaatatgagaggatgtacaagccttttgtaagctgtaaaccactatcttgctgtaaaagcataactaatagaatttggttcaacatctatgcctcaggagagaatcctttctcaaataacatctttcatatattgtcatccaatatcctcttgatgatttcctattgttcagaacctggatagagagccttttctctggctatgaatcataaatatttggaagttctttcataaccgaagcaaaatctactgtgcacgcgtttcagcactgcaccctgttgaaactaagaatcatctcttgtaga

SEQ ID NO: 1245374 - DNA, 4001 bp, Homo sapiens
ctcggcctcccaaagtgctgggattacaggggtgagccaccgtgcctggccgaaaccctgtctcttaaaaaaaagaaagaaaaaaaatcctagaaccttaacactggaatgaggaacgagtccaggcatgacctggcagaggaggttccaggaagaggcaggatgagaaatcaagtcccctgacttcctgcctactgtattttccagctcaccctgacacctctttcctgttaggaagttttacaactttagctccatggaaataaactaggtatttacagcaaattgccaggtttggatgaaattctctgctttgtgacacctcccccatgcatacacatacatgtgcccatgtgcagtctgagaaccttgttacccggagcacgccactggctgtttccccagagtcactctcattttgagtcagagtgttcttgtgtggaaatttcatgccaattgggctagaacttgttcccggtgaggacacggttaatatgattccagataggacctgctcttcaactcctgtcctgcagtgcactcgccaagatcgaaaatggatgtacccaagctgggtgagggattaacatgaagtgcagtgtatactggaactatccttagtgtcctctagaaatttcatcttccatgccctgatgttcccagccttttgtcattgctgcgtaaatgaataaaactccactcgttgctgagaactgcctggagtttcagcttccagggaggttaaagtctttttagaggtctgcaagggaccagaaaagtcacttaagagagcgtttctcaaatttttagccaagaatccccaataagagatacgttttaaactggggggggggggggggaagctttgtttttcccaaggatccttgagaaacgctctaatttattctaacagggtctcgctctgtcacccaggctggagtgcagtggcgcgatcacagctcactgcagcctcgacctcctgagctcaagccctcagttaactggtactacaggggtgggccaccaagcccggctaattttaaaattgttgtagagatcggggcgggaggggggcggggggtggtctcctatgctgcccaggctggtcctgaactcctggccccaaatgatcctccagtctcggcctcccaaagcgctgggattagaggcttgagccaccgcgcccggctagacagagaaggctgggcaggaaccgctacgttgatttcacaacgctaacgggtggtcccgttcaagcgctcagaccctcaggataggctgaatcgagctgtttgaataaactgacggcggatttcccgccccggaggagcgaagggagtggccgggcatcctgctacaccccgagagaacttttcccgaagcaaactcgccgcgctaagaggcggcgccggagcgtccacgcgggtcccggccgggcagggcgcggcggccttgctactcacacgatgactcattgtagtagacgttgattctctccagctgcagcgccgagtctcccacgtagcctccggccgggtcgatgccgtgctcatcgctgatcacttcccaaaacttgggcagggcaaggcggggggacagacgctcagaacccagagcccgggacgccgccacccgcgcccaccccaggcgccccggcggccgaattccaggcgcgcctgagccgccggcagccgctcccagttgggatgggggtggggagcgaagagtagaaggtccccggccggccacgccccgggcgctccctccctgcggccctcgcgggtccgcaccgggctccgaggacccaggggcgcacagcgggtgcgcgccccggcgggggtcgcgccgggagacccggggcccgccagcagccgacccgcggagaggccctgcaccgcgccaggcccaccttggtgccgatctggttcccgcactggcccgcctggatgtgcacgatctccctcatggcgggcgcggctctgcgctaggaactggctctgcggacgacagcggcaactgcgggccggctgcgcgcgtcccggggccgaccctccgcgcccccgcccccgccccgccgctcgccaatggctgcgggccccgccccgccgcccccgctcgacgccgcggcccggcctgcagcagccgagggaggacgcgcgggcgccagtcgggggacccttgccgggagccgggcggaaaaggacgggcccggagctggcggggaggagacgggaaggagcgcggcgcccgcccccaccaccgtttcgctgccccttgtggtgccccgccagagggagacgcgagtcgggccctggcgtcggggcagcggagccgacgtggcccgcggggtcccagcgccgcgcccgggagcattgcagccgcccgcgcccagtccagccaagccgggacactgccctggggttcggcggtggagcttttcagggtctctgccccctgccccccaccccccggtcgcaccccgggcacacgttcttagggcctcttcgtcctggtgtttccgtctccggagatacagaggccattcctctccgacgactcccacccctttggaaccgggtttagctaaagtgactacagggctggatccgaaaatgaacacctcctgcgccgggtctatgcagcctactcctcgcgcgttagcgaagaaatgcgcttcggcctgggagggcgcgccagagtccgtcttcctggccagttttgtgtggtggaaaggaatgactgctgatgccggccgggtgacttggattttaattctagctgttttcagttagctctgcgcttcagcggactcctctgttaacggaaaaggttatcctaggggagcctttcagcctccaaaatgcgggatgctctggcctctgcagtcagaatgtgcatgcatcagggcttttgcggaagtttcctcacgtgaacgctgcaggctgggaccaccggggtagcctctgcgtcccctcccaggcccgtagaaacgccgcacatgaggaagcgacgatgttctgtaatttgcactggcactttctttttagacagatgaaaactttgggaaattcctaattgtgtgtgtgcatgtttgtacgtttggaagggagtggagaacttttaaaagtttttcttctggagttttgcaaatgtttccaaattgaggaatttttttttttaacccttgggtccccgcctccccactgctctctccaccccagtgctgctcctcggccttcttgtgggtccccacacctctttacacagccacacgcccagggagcagatgaggaggccacagcccagcccctgcgctcccatttcaaactatgagcctgagattaatcagccaccttctcctgagtcctcaacacccttatttaggctgtttgtttccattgcttaattattgactccaacgagtgctaccttaacccatcctgccggcccgaagtctagtgtggggagcccgagagcggagggcctgtgccatccctggaagaacccttcctccagctttagtctctctctctaagaaatccagccatcaagtggtttaaaagaaagtgtctactttagaagctttggtcgtttgctgaaatagccaccctttcagtgctagcccttgggctggaatttaagtccaggggtctgatcgagccagaaagtaggtgtcagcgtggcttccggaagtccgttgtcacttggatttgacaagggacaagccgacctgctggtttctgggctcctgctcgctgtgcgctctgcgctgtctgcagggattggtgcccgcggagtgcgctttgtctggagaaactcagtgctcgaagagtgaggagaccgggaggaaaccttccccctgcaaagcttatctcccttccctctcatcagaggcggggccccgcaagacacaagggatttccccgcagaatgaaccaaggcctccccaggacatggggacagttctgctgtgcaaagcctgaattcacgtttctttccta

SEQ ID NO: 1245375 - DNA, 4001 bp, Homo sapiens
aaagtagagtgagtatatctaaaccctcagtaacttgagagtatatcaggcaaataactagcttcaatactgcactgctactattcaactttaattttaggtccattattcaactgtaagcccatataaaactattaatattgtattataattttaagatatttaattttaattcttagaatcaaaacaaaattttaaatggaaattattcaggcttatttagacagaataaagcagctcaaagcaagaagtagagtccacagagtcacttcttaaataattgagcaaataacaaaaggctgtttaattactaattgcattaaaaactctaggtaattattagaatgtgacgatattcttttttttttttttcttttagacgttgtctcgctctgtcgcccaggctggagtgcagtggcgcaatctcggctcactgcaacctccgcctcccgggttcatgcgattctcctgtctcagcctcccgagtagctgggatcacaggagcctatcaccacgccccgctaatttttgtatttttagtagagacggggtttcaccatattggccaggctggtctcgatctcctgacctcaggtgatccacccgcctcggcctcccaaagtgtgggattacaggggtgagctaccgcgcccggccaagatattcttttaattctattagtaccacacattcttcaaagttattaagaagatactacagttcaaaaagaagaaggaaaaaagactagcacaaacacagtctgacaggggccaaacagtatacagttattaaactttaaatacgggaagatatcatttcttcaggttaaaacacctccctatcaaacataataaattaaaataaatgactactgacgtaagagggataaatagtgagtttatgggggcatttatgattactctaaacttttattctaagtgttacaaagtacattaaaggaaaaataataaaagggtgaaaagaataaagggctttggacctggtatgagtcaattttgaaagagaaaaccctggtgatcgttactgaggctcacaaagcattccctaaagaccgttagtaactaattttctaatgtatctaacgccgcataccaagtaggatgatttctggagcaaccagtacatatttgcggaggccaaataaggttatttggagactaactgtcgtggaactagttttcatcctacaaccatgaaaactgggatttcccccctttcccatcttttacggttgtcttatgaaatgttccacaaattcatcttactccccaaatttcactggaaaaagtattcaagtaactacgaccatgtcgaaatcaggtaatagaattaaaggacttatcttttcctaaggagttagaaaccatcatgcatcaaaattgtttcgcatacatcacgcccaagtttctcgttaagggagatggcactgacagcgaccagggcagagccgagcctctgtagagcggtgccagggccccgaaggcgccggacgccccgcgaggcagaggccggtagcggtgtgggggaccgggcacccggaaccacccccaccccggctcggccgacgcgggctgcggaggacgcgggccggcccagagatggtctggaccaaagcggcgcagagatgctgctggctcccggcgtccggcctgtgcgcccgcgcccagcacccccactttgtcctccgcgcagccgggcccaggcttctcccggcccccgcgaagctcgccgcggccccgggcctctagagggccgagctcggcgcccggccccttcccaaccaagaggccaagaggctgcacaaccccccagccgctcccactcaccatgcgccacggtcccgcgaagtcgcccacccctagatccccgccgggtcggccgagcccggggcgcgctgcggcggctttgagtgcgaggccaggccgcgcctcccgccgtcccctcagcgcagcgcccgcgagcctcgggcaccttaaagagacaggcccgcccgccgccctcctcccggctccttgctccccgcccctgctcccctcttcccctccgcccccgctggggtccacagccgccagctcccgccaggaggcgtctctcactcccccggcgctcctgtcagcgcgcacgcccccatctcggccccgcccactccccccgcccctcccaacgccacgccccctccgcgccacccggtttcgcccctccctcgtgccacgcctccaccgcaggctcccgcccgcccgccggcccgcaggccacgcccccaggcgcacccaccccagctgctcaacgcgatttcccttcgcgcttctccgcaccgggatccccagtccctcaggttccgacagaccctcctgtcaggcccattctccgggccccctcagttgcagtgttaagatcaacagtgttaagattaaagccttgtgatgtgctagccactacgctgaggatatgccgtgtactaaaattcctcaggactcctcacagctgccctgtaaggaagcggccatggccgggttctagcgatgcgaggccgaggctcggggcgctgagtagcctagcgcgtcgccgaggagagctggcacgtgaaccccttgtcgtttgccgtcagaggtaggatttatataaaatgcgcgtttcctaggtctacctcagacctactgaataaggatctccaagggtagagctttcgaacttcgttcaccaattcgataaaacttgccaggctccttgtgagtggctggcgctgagctctgcatcggagctctgcatcgggagtcgagaagagggggcgccatggatccgggcgcggaggtcgcgcagcctaggtagaaggtgcgcggttagcacgtaggttaaaaacattgagaatgacactcagttctttcccacaactctgggttgcttttttttttttttcttttgagacaaggtctcactctcaccaggctggagggcagtgacaacatcaggctcgctgcagcctccacctcctaggctcaagcaatcctcccgcctcagcctcccgagtagctggggctacgggcgcgcaccaccacgcctggctaatattttatttttttgtagatatggaggtcttgctatgttgcccaagctggtttcaaatttcggggctcaagcgatcctcccaccgcggtctcctaaatcgttgggatgacaggtgtgaaccatagtgcccggccggaatttgctttttaaagaagattccagggtgattaagttagagcccgctagaccagaccgtccgcggggcaccttcccttggaaatgatgacctagtgtcaaacccttatgctggtaaatcgtaaatgcctaccacccacctttgttgattggaaggaaacagaatgaaaacagctgattggctgggggtggattgcattactgatgttagcccacttttgtacaataaatatgggttttaaaaatcatccttgaaaattatcctagagaaataattaagggtatacccaaatttaagtataagaatcttattcttggcattatatactagttaagtgaattaggaaacttccgatcaatgcactaattcagccattaaaaagtgataccgcagatcagaggttctcaaactttttcgtctcggaatccctttacactcctgaaaattatggagcatgccaaagaggttttgtgtatgtgtgctacatctgttaatactttcaaaattaaaacaattttttacatattcattatttcatttaaaaataacaaacccattatatgataacaaatatttaatgaaaaataagtatatattttaaaacagtaggaagaacagcgtggttttagatttttgctattgcctttaacatcaaacttaatagccactgtttttatatctgcttctgtattcaaactgttgcagtatcatgtattatgtagtttctgcttgtgagagaatgagggtgaaaagtcaaataatgccttagaattaaaat

SEQ ID NO: 1245376 - DNA, 4001 bp, Homo sapiens
tccttgggctggatggtttcttctggggacttggggatgtcaatctccttgggtgggatggcttcctctagggacttgggaatgtcaccctccttgggctggatggcttgttttggagacttgggaatgtcaccctccttgggctggatggcttcttctggggacttggggatgtcacccttcttgggctggatggtttcttctggggacttggggatgtcaccctccttaggctggatggcttcctctagggacttggggatgtcaccctccttgggctggatggcttcttctggggacttggggatgtcaccctccttgggctggatggcttcctctagggacttggggaggtcaccctccttgggctggatggcttcttctggggacttggagatgtcaccctccttgggctggctgggcttcactgaggccttgggaatattgcccagcttgggctggatgggctttgctgaggacttggggatgtcaccctccttgggctggatggtttcttctggggacttggggatatcactctccttgggctggctgggcttcactgaggtcttggcaatattgcccagcttgggctggatgggttttgctgaggacttggggatgtcaccctctttgggctggatggcttcttctgaggacttggggaggtcctccttcttggattggatggtttcttctggggccttggggatgtcaccctccttgggctggctgggcttcactgaggccttgggaatattgcccagcttgggctggatgggttttgctgaggacttggggatgttactctctttgggctggatggctttttctgaggacttggggaggtcctccttcttggattggatggtttcttctggggccttggggatgtcaccctccttgggctggatggtttcttctgaggacttggggctgtcatcctgcttgggatggctggtgtttgctgaggacttgggtaggtcatcgccctcctgtgaggcatcagactcctctgtgcgcatgtggaacgtgtggctgaccatggggagaaaggccttctctttggcctgggctatttccaagaactctagggccaggagaggcacgttgctggacaggactagtaatgagctttctgtaccaaaaaacataaaataaaataaaataaaataaatcaaatagaaatgcaaaagaagaaccaaagaaattctcttcatattccaaggaagactgatgtcactcttcgagatcacgaatgaagtctgatgaatgatgtattaatctgaaaaactcattcagcagaaggacaaacagcgtgtggttacacgtatcttctgtatacatgttcttaagctacaactttcccttcttggttcaacaccctgcccgctccctaactgcataggtctttaaggcaaccctctttcctcccctacttaccattagcatcaccttcacttgtttcttcctgagtgcccagcctcatttctggttttccagaggctccagctttaacactttccattcctagttccttgtctacatccattcctgatccttcatagatgcctcatagtaaaggccgtaccctccaactttttccaagctatccatcctaacatcaaaatatgagtaaaacttacatttgggtggcacgttacagttggttttccctctctgtattcacaacagtgatatttgagagcttcaaggtggctcccctgtgctgaggctgggactacgcattcactggcatcatttcctagaacacaacaaaccactgaggtcagaaccattatgatgagtagtttacacatgagaagctatgtagctcacttaaggtcacaaagctagggtgggggcaggctccaaagctcatgctctgcactgtgaggctgtgctggactgctcgccacaagtcccgtccagcctgggttctgtgaatcaaccatcttatcatctttctccaggatcccccagctccaacattctctttacgactcacccattgtgaccagctcctaagtatctcctcgaaaccatgttagcctcctctgcaaagtgtcccacaatgtcaaatgttcagctcctgctagacagcctctttccccacctcccccacctcccaggcgcaccagcccagcctgtgccctcccccatgcagacacatccaagtacacggctcttccagcctttacatacaggagaacaacctctttgtgaataatcctggttccataagccacatctaccccatcctgtggaatgggaagccaaatacctgtcccccagggagacttattttattagttcaggaccactggctcattttccaccctcactctgcacaacacatccagtccaaggcaggaagaatcagtgtggaattttgccttctctacatgtactttgaacaaatcctcatatgtttcagtttcaccccaacaatataagtgttgaaagtggtcaggcatggtggctcacaccgtgatctcagtactttgggaggccaaggtgggaggatttcttgagcccaggagtttgagatcagcctaggcaacatagcaagaccccatctctacaaaaaatacaaaacctagccaggcacagtggcacacgcctgtcccagctacttgggaagctgaggtgggaggcttgcttgagccagtgagttcaagactgcagtgagccgtgatcactacatcgtactctagcctgggcaacagagcaaggccccgtctctaaaaactaaaaataaaagtgttgaaatctaaatgataagacctccacattgtcaatagaaacctcgaaacatctaatggcaatggttcaattatctggatttttataccaaaacacattttactaaggggtagagagactattggccttagcaaatccatagttccttttttttttttctttgagacagtcttgccctgtcaccgaggctggagtgcagtggcacaatctcgactcactgcaacctctatctcccaggttcaagcaattctcttgcctcaccctctcgagtagctgggattacaggcattcaccaccacacccggctaatttttgtattttttttagtcgagacagggtttcaccatgttagcaaggctggtctctaactcctgacctcaaacgatccacctgcctcagcctcccaaattgctgggattacaggcgtgagccaccatgcctggcccagcaaatccgtagttcttgatgatatgaatcctgttccaggaagagctcatgcttccactccgtttcctcggttactgccaaagaaagctcttccctctctcactgggagactttgggcctttcttatgtgatattttaaaggacgggaggttgtcttcactctccaatgccaacggcttccacagctgacaggactgtttttcatggtgccctattttaaagcagaggatgaaaataaacgtcaggcacttatctgggcaatgtcttctttcttagtgttaggagaaaggaggtgaagcggggaggataggcatcatttgcagaaaccatcatgagcagattttattagcacaaagtgggcagcatctttggcccttgctcattggtaagttaatttacttcctgggaccctatcttgtacagggtccctgctgtttggaagggagtggatgaggacacagaggaactccatcgctgagaggcagaagtgaaaacatcactcctgccatcccagtagatgtggaggcaagaggacagatgcctgtgtcccggcctcctttctccaggttgattgccagcacagatactaatcagatgtgctactctactaaaaatgcgattttagatctctactaaaaatacgaaagttagccggatgtggtgacaaatgtctgtaatcccagctactcaggaggctgaggcaggagaatcgcttgaacctgggaagcagaggttgcagtgagcggagatggtgccactgcactctagcctgagcaacagagcaagac

SEQ ID NO: 1245377 - DNA, 4001 bp, Homo sapiens
gcaatgtttccccagttttctcacttcaatcaatatttatttattattttattatctctcccactgctatggtaagggagaaaaacaatatatcattgagggacaaaaatataaaagcttcgacgggccagaattagaataagtgaactaaaagtgaggtgaggttccttattgaaatcctatcttcccttttctactgtggcctagatacttaatgtactacaggtattcccctattattaagaatacagacatcacaaaattgctaaaaatgagaagacacatttatagaattctaacattccttttaggtgttttatatatatgacatcacttatccttttaaatttagtaaatgcaaaattccgtatatcatatgggtactctagcccaccatatgaaatgcaaggtactatcctttttcaattcagtgtaagagagactggtccaaaaataagtcttaacttgttttcatatctatctgcatccattccctaaaacgatataatcctaatgccaccatttatatactcaacatttagtgaaccatctagtagaaactttgttttttgctctgaaattcaaaatggaattttgtgtttatacagttatttggacaagaaagtgtgttacataaacagtgataccagcagtagactgctccaagttagatgtataaataacgccaaggggtcaaggaaaataaagcggaaacctctcatacttctaactaaatactatcgacatacacaaggagagatctgtgaaacacacacacacgctgaaatcttggttctcaacgccgagttccaacatgtcattcttacaaaggaactttactacacatccactataaaaggtccaccttttctacgacctataattttgttgatatttaccaaagacagttaacatttttcaagatccctgtcctcttaagtgaaaaaacagagccgggtcaaactaagacatccggccaactgtccacctgaaatatattatatatgtactgtcgtgtgtgaccagttgcaatcgcatacataggggagcctaagctacaagttagtggccgaacgaggaagaaaaaagttcaaataatttaaaaagcaccctaacccaacgttaacttagttcgaaatgcattagcagaaattcaggactcagagctacgcatattagttagatcgccccatctgaatcttcaaaggctttagagagatgtaggtggtgaagagaaacaaagtgttcggtaaattaagcttttggagctctggagatgcaaatgacagctggctctgcagaaagaaggggtcaggctcaggcaagggtggctgcggagactcccacaggctggaaggaataggggcgggccacccccaaaaccagtttgtcaaagaattgaaaaggagcaggtgagaaatctcctgagctggagaagccggccagccaggcccccgagcccgtctaggaacccctgtgcataaatgggggttcacacccgagaaacgaggcctaattccggcagctcctggggctgcggcgactgccggacactccggggcagcagacggctaggaaaccagggccaacaaagagtgaaaggaaagcaaggaaggacagacggggacccacagagctcgagcctggcctcaccctctcatggtgaacttgaccacggcgagtctggagcccgcgccgctcagctctggctggaaatccgggtcgctcccgacgggcttcacccccaccatcctcacagagagcccggcagggtggccgcgacgccactggctttgaaactgaaggagaagacgatctgggagaggaaggagagatgctcaggaaggccgaggcctggacagaagaggtggcgaccgccgagtcttctcccgggactctcagtgccgagtcacgccagggagcggagcggccgagggggcggggagggatgggggaggggagaggaggaggatgggaaggcgtgcggcacccagcagccaccgcgcggcagggcccccggcgtgacgtcatttccgcgtcgtccggtttggccttcagcgcccaatcccaaaacgcgaagcgtagtcccaccctcgactgagtagcctcgcgctaacttgagcggcgcaggcgcagaggagacgtgtagaggtcacgtgcgcaggcgcagactgagactcaaaagttggcatatgcatccgcgtttcccagatctgaggcttttacggaggaggtttctgatttgtaacagtagagaggaaactcgttttaccccggggttcttagctgctgtccagggcacccactggaagtactttgaagatgctcctgtactgtattcggggcaggtctacatacaagacaaaataacgtttaggaatatttattaacagacttaattacatatggggcgctttctgtgcagtcattcagaaagtatcgtgcacctgtctttaggttttgaccaaaaagatgaagacactatccctcctttaggaagttcacggtctagtgaccgacgcaaacaataatttgaataggaagcggtggagactaacgagatggaagggtggggcagggtaaacttgctaggaatctgactcctggattgaatctttaaagagaagcaggggttagatggatggtgagaggtaatattccaggcaaggggaccaccaggtgcaaatgcatgagttgagagggtggataagaagaatagctaatatttaccacatgatgtaccaggcaagacataagttctttatatgtgtactagttcatttaatccctgtgaagtaggttctgtgatttcaagtcaaggcaggctaacgccagtgtactcttttaaatattaggctaggtggcaaattatctgtctttggatttagctggggagatgaaattggagggaaggccaaggtcagataatgactagctaaggaatttggattttgtcgggaagagaatggaaaaatcatttcagggcaattttgcaattacaagtgtggtgaaactcccgtctctaccaaaaatacaaaaaagtagccgggcgtcatggcgcgcacatgtggtcccagctactcgggaggccgaggtgggaggattccttgagctggggaggtcaaggctgcagggagccatgattgcgccactgcactccagcctgggcaacagagccagaccctgtctcaaaaaaaaaaaaaaaaggaaaaagaaaaagtgtcttcagaaaagccctcaggtagcatcaaggaggatggaaggcagtgagatccatttaggaggatactgtggtgatccaggaactaaattaggaaagcatctgcagtggaaatgaagaggaaagaacatgtttgagaaacaattattggtccaatttagtgagatgacagaggaatttaaaataactcaaaacatttcaatcgtgtagctttttaaaaatgagttaaaatgcctgtaggacatccaagtgagagatatagtagatcgtgagagggatgagcctggaactaaagaaaaaggactaggacgacgttacagatttgagagtcatcagattgggtgatagttgaagcccaggacatgtgaaaagagaaagctaaaggtgttgcagaaacatattaaaataattaattcttaactgaacccagccacaccagaggcacagtaattacattcctttttcatgtggtatcagcacattgtaatggttttaatagacagaagtccccataataaatatttgctttttttttttttgagacggagtctcactctgtcgttcaggctggagtgcagtggcacaatctcagcccaccacaacctccgcctcctgggttcaagcgattctcctgtctcagcccgccctgggtagctgagaatacaggcacacaccagcacgcctggctacttttttgtatttttagtagagacggggtttcaccatgttagccaggctggtctcaaactcctgacctaaggtgacccgcccgcctcgacct

SEQ ID NO: 1245378 - DNA, 4001 bp, Homo sapiens
taataacaaagaaattggacataaaggagttggaaaagagcaaatctggcaaagaccctaaacacttacattaacacataaaatctgttttctagctaagagcatcttgctgagctgtgctcggatgtgatgagacaaaggccctcacatctccagccatcctagcctcgagctgccggcagcaggatctgaacaccacccgatgtttatgccaccacctgcaatgtagaacagtgaaagattctagaattcataactcaaagtcaatacagcagtgatttacttattgggaaactgctcttagtcaattcttcgctggatttccagtatctgcccttgtccactacagctcaagcaatgacaaactgatgtgtggcactgcctctctcatcatctctaatccccggctggcagaacccccagcgtgtgagagaactgctgctctcccgaattccctaggtccctcctcaagtcctcagtgtccaggaggaagaggctgcgagatggctggtactaaagctactccacctccatccctgacccccatggaaggtggttcaaggtcaagtcgcatcagaattccctgaggggcttctttaaaaagccattgctggacttcaccccatacccatagaatcagaatcacagatgcattctagtaagcactccaagggagtcttgtaataactaaaatataacaacagttcctaacttcatgcctctcctactaaataagaaatagcaaaaattaataaatggcaggccagatagtctttcctttcctgaatataaaatatgtccttacatctgttactctttactcaaaggagttattttaacccaggcctactttttagcatctgtgaaagaaaagatagcttcaatgttacttttactcttcattaaaaggaataacctctcaaattacttatggaaaattaatatggcaaatattttattaacaccctagtatttgtgccctttgccctattgctacagctgcaaaacctcaataaaagtcatcctaaaattgctatgaggaaccacagaaaaagaatgaaatctggttataaaatagtgtcctacaacttttattgtcagcaagtaaatgccaagaccactcagtgtactaatattagaaattcagagaactaattctaacaaagcatatttctattttctcctgatgtttactgcacctcaatcactgtaagctgtaaaccacatgactcacaaaaagcgtggtgggataaaaaaacacacccacagaaaagcaggatttctcatgctatgaacatgaaagtcctgctttatgcatacaacgaataactcaggtaccaaaaaaagacgtccttttaaattaaggatccgcgctctcaataaaacctgcaagtgcattttgttcactgaactataagtttgggaaaaacgccttatcaacagaaataattaattcatttgagaggagggggatcataaaccctttaaaatatgaaaaactacaagagctccccgcagaaaaaggcgtgaaacgccggcacagtccccgagagcgctcgaccgcagcgaggggaggaatcgcctgaacgacggagccgcggcccctcctcggggaacagctcgcgcccccaggcgacgccggcagggcagaggcgcggggcagatgcggaagcacagcccgcagagcgggagagtccggcgcgctaccttctcggcgatgctgtacaggacctcgtccatcttcatgcacgtaggatcccagtcgtggccgaagcggatgacgaccacgcggtcctcctccgagaggatggcctggtccacctgccagccgttgtgcaggtgcgggagcatgtacgacatggcggcccgcgcgctcgccgccgcccaaggcggggcgccagggagggcccagcgaggtgggctcagccggcccctcactccccggcccccgccgcccccgggcccacggacgaaatccggtcccgcccgcacacgcaaactccgctgggactgccacccggcagaacgtctgggcgcgcacgcaccgacgccgtgcgtgctgacggcatgcgcgcgcgctagcgccgtgcgtgctgacggcatgtgcgtataggcgccgcgcgaacgtgtagttggccgggtggagcggcggcgacctgggcaccgtggagcgccgttggttccgtcatagcagctgtcggagtgggggttcctccccagcgtccaggcggcctggtggtcctgagaagccccgggctcgccgtgccctgcccccacgctcccgccccgaggccgcccgccgccgcccgggctgtcctccagccacggatggggacgtccagaaaggcccggaatgcccggcactgcggctcgttttcttcctttctggtgcttgtttctgtgtgttactaagacagttcatgtgtgtcatttgtgaaacttgatcataaaaatgtgtcgttgttgccatacccaaccacagcagagtcgagcagcggggtagggaggaagcactgggcaggccgtccttgaggaatgtcaccatcaggccggctgctgagctgcctgttgtaacctgaaaccaggttttttaatttgtctttttataaagaaaaaaaatttttttttgagacgtgcagtgacgtgatcttggcccactgcagcctccgcctcccggggtcaagcgcttctcctgcctccgcctccccataagctgggactacaaggcgccagcccggctagtgtttttttgtacttagtagagacggggtttaaccatgttggccaggctggtcttgaactcctgacctcaagtgatctgcccgcctcggcctcccaaagcgctgaaattacaggaagaagccaccgcgcccgacctaaagccagttttattccatagcttcagcataacttccacctccaggactgatctggccccctggcttcgctcaccagtcagagctccccaaacccttactagtgccagtgaactttctcaaagagaaataagttaatatttctctttttaaaataaaacctctaacctctgttcttctgagagagcactttgggttcatgctggagactccctggtttgcaaactgatattgatagtaaaactcttgtctactatctagctatcctggtggtcctttagatgacaaatttaaaacaaatcacgcccgggcgcggtggctcacgcctgtaatcccagcactttgggaggccgaggccggcggatcgcctatggtcgggagttcaagaccagtctggccaacatggtgaaaccccgtctctactaaaaatacaaaaaattacccgggcatggtggcgcccgcctataatcccagctactagggaggctgaggcaggagaatcgcttgaacccagggggtggaggttgcagtgagctgagatcgcaccacttcactccagcctgggtgacagagtgagactccatctcaaaaacaacaacaaatcactatgcagatgctgtggtgtctctcagatgggctgtggcatggtgagaactacagtctgaagagcctgctggcatggggattgaaatgggttccatgtttggtttcctctgggacacagcaccataaggtgctttgataatatgcacccacaatttaaatactagaatcacaagtgcagctcactgccagattaagctttttacataatacagaatatttcccaattatatacgaaatgctttattgtaatgaaacaatttcaggttggtaggatattagagatcatctaaatctctttcattttataattgagtaaagcagaggcacagaatataagcatagtggttaacagtgagggttttagttacataaaggcgtgttcaggttcatctgtgccttgcataagttatctcaacaaacttcagtttcctcatccatgagatgggatgataaaacaaaatctcctgtacttcattggcaccaggtacacactggagaaatctgagcccttactaaggt

SEQ ID NO: 1245379 - DNA, 4001 bp, Homo sapiens
agacagatcatgccatccaactttcttcagggaagaaaactgccctgggacgtgaggccctggagcatccagaaagcctagactcccgcaaagtgggccagagatcacggtggagctcccaggctgcaagtcccatcagtggcccgattcaggctgagacagcacttctgtgccccggtgaccagtggacacaggaattccacacagtgagatggtggcgagggcagggatgaacatgtggcaaaagggaggagctatcatccactgcccactagtgctaatcctgtcacaaaggtgtgaagacaacaccaagcatgtgtcccaggaacaaaaagggaggcatcagaagtgtcgagccacagagaaatgaaagtgtaaaaacttatctttaaatgcagtcctcgttcatccgcactcgcttgtggtacagtttatattcagacaacagagagatttttgcaagcacctgcttttatcagaattgcctactaagcattattttctccatttttaacatatagggaagctatatgagaagtaacttgctcaatgtctaagcagaaaggtgggttaaaaatgaggtctatggctcatcaaaggcccctgggcttggagctgcagaaaagtggatccctctcctcagacaaaactccccacgctgtcccacgccaatcagccacagcagctgctatgtattcgtctctagatgggtccgtgggccggagggcttttccgctagctacagtgaatctgcttcaccacgaatgggtttccccattcaaaaccacctccacccctgtgtcaaggctgcgctccatttatctgagcggtcaaggtcagcccctggctcacacaccttcgagtcccctcccccgcgcagctggcgcaggatccaggacggcaggacggtgtggccttagggagggccaacggctgcctaacgtcctgtgcccaccccgccccgccccactgtcccctgaaagcctggcgccaatgacccgcgagacattttttgcctggggtgctcctgtcggaaaggaaagaggaaaggacgactaagaacttatactcgaactcccgaatttctcttttcaaggtttaagaggaaagctggttcgtggggattggatgggaggccaccaggaaaccaagttcccgcgccagcttcagtgctctcctcttcccgccgcctttgccccgcccacatcactttcgctccagtttttgaaaacgctgcgaagcggaatggtccacaggggaaaacggaggaggggccaaagccaggactttgagaccggcgcgcggtcaagcccaggcagctctccctaaccctccagcactgggcaaacgctgcccgatgacgcccgcctcgggggccacggcatcactggggcgactgcgagcccggccgcggagccgctgggacgcggcttacctcccggctgtcgctgctgtgtgtgttgcccgcgccagtcacgtccctaatgggaccctccgtttcggcgtctgtaaggcgaggaggacgatgcgtcccctccctcgcaggattgaggttaggactaaacggggtccgcagcgcccggcagctcccgagcgctctccccagccgcgcctccctccttcccgccacccgtcccgcaggggcccgcggcgtcacctctcaggctgtagcgcgcctgcatgccgaataccgacagggtgccggtgcccgtgcggtcgtccttcctgacgccgcagcggaggatgtgttggatctgccccaggtactgcagctccccgtgcggcggacgcggctcggcgtcccgctcctgtgcggcggggggcaagggccggcgcggcagctccgagccggccacaggcatggcgcggcgggcgggggacggaggcaggcgaagtggcgcggcgggacggaggcaggccaagtggcgcggcgggacggaggcaggccaagtggcgcggtggcaggaccccttccgcgcgccttttcccgcggccgtcccgcgctccgcctcttcctgctcggcggggtcgcggcggcccccgctctagagagcgtgcgccagggggaaacgcaggagccacgggtgtggcacagaacggagcccagggccacagctgagagtcttaggaaacccgggaacctggatgcaggtgcggtggctgggaaggactgcgccctttgggaaccgtctggtcgaccgcgccttctctaagccagcagcacagttcccacgttttcctgcggtcttgtcaacaaaactgctgtttgagatctgtttcctacaactaataagggatttgcatttccatttcttcgttctcactgaagcaaccgaagcaagtggtataatgcagcttttctacttgattaaaaaccgccagggcgctggacgcggtggctcacgcctgtaatcctagtactttggggggccgaggcgggtggatcacctgaggtcaggagttcaagaccagcctggacaacatggtgaaacccccgtctctactaaaagtacaaaaattagctgggcgtggtggctacttgggaggctgaggcagaagaattgcttgaacctgggaggcagaggttgcagtgagccaagatccgaccattgtactccagcctgggcgacagagcaagactgtcccaaaaaaaaaaaaaaaaaaaaaaaaaagaccgccagggcttttccgaggttttttgtttgagccctggcggtcttttttttttttttttgagacagagtctcgctctctcacccaggctggagtgcaatggtgcgatctcggctcactgcaacctccgcctcctgggttcaagcaattctgctgcctcagcctctcgcgtagctgggactacaggcgccgccaccacgcccggctaatttttttttttcatgtttagtagagacggggtttcgccatgttagccaggctggtctcaaactcctgacctcaggtgatccacccacattggcctcccaaagtgctgggattacaggcgtgagccaccgcactcggccccaagtttttaatagaccacatttcccagttttactgaattgtttataacattaacactggggagtgggaactgttgatgaaaagagttaaactctgtaaaatatctgaagaaatttattctgagccaaatatgagtgaccaatggccggtgatagagccctcagcagatcctgagaacatgtccccaaggtggttgggctacaacttgattttttatacatttggttgaaagaattgttatctaaagatctggaatcaatagagggctgggcgcggtggctcacgcctgtaatcccagcacttgggaggtcgaggcgggcagatcacgaggtcaggagattgagaccatcctggccaacatagtgaaaccctctctactgaaaatacaaaaattagtggggcgaggtggcacacgcctgtaaccccaggtactcaggaggctgaggtaggagaatcgcttgaacccaggaggcggaggttgcttgcagtagctgagaaagcgccactgcactccagtctgggtgacagagccgtatggggaaaaaaaaaaaaaagatttgaatgaatagaaaggaatatctgggttaagataaggggttgtggagaccatggattcatcatgcagattaaacctccaggtagcaggctttagagagatagattgtaaatgtttcttgtcagacttaaagagtgtgttctacctgtcttgaggcctgtgttgatgtcaatgctggtcagctgtgcctaaattccaaacggaggagggaataatgaggcatgtctggctccccttcccatcatggcctgaactagtttttgtggttaaatttggaatgcctttgacccagaggagtggtcttttcagatggttctgggcgtagaattttatttttggtttacagaacgattttataatgagtttaaaatgcactgatacatgtgttgtacttgcaagcatccttttacctcaacggttgatt

SEQ ID NO: 1245380 - DNA, 4001 bp, Homo sapiens
agataacaattctttcaaccaaatgtataaaaaatcaagttgtagcccaaccaccttggggacatgttctcaggatctgctgagggctctatcaccggccattggtcactcatatttggctcagaataaatttcttcagatattttacagagtttaactcttttcatcaacagttcccactccccagtgttaatgttataaacaattcagtaaaactgggaaatgtggtctattaaaaacttggggccgagtgcggtggctcacgcctgtaatcccagcactttgggaggccaatgtgggtggatcacctgaggtcaggagtttgagaccagcctggctaacatggcgaaaccccgtctctactaaacatgaaaaaaaaaaattagccgggcgtggtggcggcgcctgtagtcccagctacgcgagaggctgaggcagcagaattgcttgaacccaggaggcggaggttgcagtgagccgagatcgcaccattgcactccagcctgggtgagagagcgagactctgtctcaaaaaaaaaaaaaaaagaccgccagggctcaaacaaaaaacctcggaaaagccctggcggtcttttttttttttttttttttttttttgggacagtcttgctctgtcgcccaggctggagtacaatggtcggatcttggctcactgcaacctctgcctcccaggttcaagcaattcttctgcctcagcctcccaagtagccaccacgcccagctaatttttgtacttttagtagagacgggggtttcaccatgttgtccaggctggtcttgaactcctgacctcaggtgatccacccgcctcggccccccaaagtactaggattacaggcgtgagccaccgcgtccagcgccctggcggtttttaatcaagtagaaaagctgcattataccacttgcttcggttgcttcagtgagaacgaagaaatggaaatgcaaatcccttattagttgtaggaaacagatctcaaacagcagttttgttgacaagaccgcaggaaaacgtgggaactgtgctgctggcttagagaaggcgcggtcgaccagacggttcccaaagggcgcagtccttcccagccaccgcacctgcatccaggttcccgggtttcctaagactctcagctgtggccctgggctccgttctgtgccacacccgtggctcctgcgtttccccctggcgcacgctctctagagcgggggccgccgcgaccccgccgagcaggaagaggcggagcgcgggacggccgcgggaaaaggcgcgcggaaggggtcctgccaccgcgccacttggcctgcctccgtcccgccgcgccacttggcctgcctccgtcccgccgcgccacttcgcctgcctccgtcccccgcccgccgcgccatgcctgtggccggctcggagctgccgcgccggcccttgccccccgccgcacaggagcgggacgccgagccgcgtccgccgcacggggagctgcagtacctggggcagatccaacacatcctccgctgcggcgtcaggaaggacgaccgcacgggcaccggcaccctgtcggtattcggcatgcaggcgcgctacagcctgagaggtgacgccgcgggcccctgcgggacgggtggcgggaaggagggaggcgcggctggggagagcgctcgggagctgccgggcgctgcggaccccgtttagtcctaacctcaatcctgcgagggaggggacgcatcgtcctcctcgccttacagacgccgaaacggagggtcccattagggacgtgactggcgcgggcaacacacacagcagcgacagccgggaggtaagccgcgtcccagcggctccgcggccgggctcgcagtcgccccagtgatgccgtggcccccgaggcgggcgtcatcgggcagcgtttgcccagtgctggagggttagggagagctgcctgggcttgaccgcgcgccggtctcaaagtcctggctttggcccctcctccgttttcccctgtggaccattccgcttcgcagcgttttcaaaaactggagcgaaagtgatgtgggcggggcaaaggcggcgggaagaggagagcactgaagctggcgcgggaacttggtttcctggtggcctcccatccaatccccacgaaccagctttcctcttaaaccttgaaaagagaaattcgggagttcgagtataagttcttagtcgtcctttcctctttcctttccgacaggagcaccccaggcaaaaaatgtctcgcgggtcattggcgccaggctttcaggggacagtggggcggggcggggtgggcacaggacgttaggcagccgttggccctccctaaggccacaccgtcctgccgtcctggatcctgcgccagctgcgcgggggaggggactcgaaggtgtgtgagccaggggctgaccttgaccgctcagataaatggagcgcagccttgacacaggggtggaggtggttttgaatggggaaacccattcgtggtgaagcagattcactgtagctagcggaaaagccctccggcccacggacccatctagagacgaatacatagcagctgctgtggctgattggcgtgggacagcgtggggagttttgtctgaggagagggatccacttttctgcagctccaagcccaggggcctttgatgagccatagacctcatttttaacccacctttctgcttagacattgagcaagttacttctcatatagcttccctatatgttaaaaatggagaaaataatgcttagtaggcaattctgataaaagcaggtgcttgcaaaaatctctctgttgtctgaatataaactgtaccacaagcgagtgcggatgaacgaggactgcatttaaagataagtttttacactttcatttctctgtggctcgacacttctgatgcctccctttttgttcctgggacacatgcttggtgttgtcttcacacctttgtgacaggattagcactagtgggcagtggatgatagctcctcccttttgccacatgttcatccctgccctcgccaccatctcactgtgtggaattcctgtgtccactggtcaccggggcacagaagtgctgtctcagcctgaatcgggccactgatgggacttgcagcctgggagctccaccgtgatctctggcccactttgcgggagtctaggctttctggatgctccagggcctcacgtcccagggcagttttcttccctgaagaaagttggatggcatgatctgtcttcccatcttgaaaccgtatggcaaattgtttttcagatgaattccctctgctgacaaccaaacgtgtgttctggaagggtgttttggaggagttgctgtggtttatcaaggtaaagaagtcgctgctattagaagtcagtagtctgttctcaacacagcagccagtgagatcctttcaaaactcaaagcagccaggtgtggtggctcacgcctgtaatcccaccactttgggaggctgagtcagatcacctgaggttaggaatttgagaccagcctggccaacatggcgacaccccagtctctactaataacacaaaaaattagccaggtgtgctggtgcatgtctgtaatcctagctactcaggaggctgaggcatgagaattgctcacgaggcggaggttgtagtgagctgagatcgtggcactgtactccagcctgggcgacagagggagaacccatgtcaaaaacaaaaaaagacaccaccaaaggtcaaagcatatcattcctcaccctcaagcccttagtggctccatttcactcagtaagagccacggtccttatggtgtccgtttttcagctctgaccttagctgctgctctctgcaccagccctgctgttcttgtgagtttttgagcacaccgggacatccccactccctggaaccttcttcccccacacttggcttcttcctttgagtctctactccactcgggcaagccttcctagacctcctgat

SEQ ID NO: 1245381 - DNA, 4001 bp, Homo sapiens
tggcgtgatcacagatcacagcaccctctaactccttggctcaagtgatcctcccaactcagcttcccgagtagctgggattaaaagcatacatcatggcccctggctttaatttttaactgcacttatccttaaccatttaataatctagatatgtaattttctttttttcttttcttgagacccagtttcgcttttttcacccagactgaagtgcaatggcgcgatcttggctcactacaacctccgcttcacaggttcaagcgattctcctgcctcagcctccccagtagctgggattaccggcacctgccaccactctcgactgattttttgtatttttagtagagacagggtttcaacatgttggccaggcggtctcgaactcctgacctcaagtgatccgcccgcctcgagcctcccaaagagctgggattacaggcgtgagccaccgcgctcagactagatacttaattttctactaaatcttatgaaatagtacttaaaatgttctcttcattttaatatagagctttttgctgaccctcaaaatacagattctcaatatggagaggtcaaaggaagggaccttagaaatctacttgagttccttcatttgggggatgaggaaaagatctgattaaatatttaagataaagctcaaattttaaaaaagaaactctggtcagcgctggcattttgaggaaacagaggggttttgttttatgtgtgtgaatctactggtgtgtttaagtattagaatatttcaagagccattctactgttgttatggctttagaaaggggttgggcaatcattaagaattcgattcaagattctagaccatcaagaatccaccttgagatcaaacaatactcttgattcgtatcatgctttgtaaatgctgaatcttcaataaaggaactgtaacagaataaacagggatggtcaacgaatcacacacctacagccaattggagacaccacacatattttaggtgccattttgaataaggctagggagcagcaaggtccattccctaagtaaaagtgatccctggccagtaccctggactgtcagcaagcaaacaatacaagcccctgtcaaacgccaatcaagaaatgacaccccggggatatgtgtattcatctacttctgaaagctcacaccacgtttcggatacagaaatccaatgcaacgtttgatgaaacgaaaacgaagcaaaaaggtttacaatctgcctcgggacaaaactaaaactggtaccaaaggggcggtcgaacaaaggcaaggggcaagagaagggcgaaggacgacgaagggcggcgaacgccgcttggcaaccccaagaagggtcgctccatccctccccttcttccccgctcccttccacggcgaccactgagaagcccaaaggaatctccctgcacctccagcctggcccagcgccccaggacacaccctcactttcaccgcacaccagggcagcgtcagaaactattctgcagagtcacgactttgagaggcttccccatctccactccccccacccatcggtggctcagggggacggcgctcccctgccacgcagggctccgacccagccgggagaggggacggtgcctgggtcatctccgcgccgccggccccgcgcaccccaccccggcccctcccagtccatgccgggtgcccgcccgtgcaggccaggcctacgcggaggcctagcgccggtccggtgtgctgcgcgcgaggccaggacagggctcaccggagtagagcggcatggcggggcgcggcgggaggcggcggcgcaggagagctgggcctgacgagggcggcaaagggacggggaccaggagcagctgcggcggcggccgaggcggaggcgcggtggtggcggcggcttcggtgcgacgagtctcattcaaaccggccactggcgatgacgcagcaacacgcaaaacacccgtgcagctccggagcgactgcagcgaggagactgggcggcaggaccggggcggggcctagaggtggcgagaggagggaggagggggaaggcggtggaggggtggcgggaaggaaggagggagcaagtgagggacgggcgcggggccccatccaccgcagcaggtgcgcgcctgcgcactgccgcccatcgccctgcgcgcactggccacgtggtcctggcgcggcccagccctgcggcagatgaagtgggaacttggtatcccacctgctgtctgaggctgaggcgggagaatcgcttgagcccaggaggtcgaggctgcagtgagctgtgatcgtgccaccgcactccagcctgggcgacagagcgagaccctgcctcaaaataaaataaataaaattagtggttgtaaagtcagaggtgttttgaaacccagctgttactagctagctgtatgatgtctgcaaacctcagttttcttttcacccacacctcattttattgcgttctatatatatatatttatatatttttatatatttatatatttttatatatttatatatatttatatatttatatatatttatatatatatatatataaattgaaggtttgtggcaaccctgggttagtaagtccatcagttctgtttttctaacagcatgtgctcacttcgtgtctctgtgtcacattttggtaattctcacaatattttgaactttttaaatactattatatctgttccagtgatctatgattactattttagttgttttggggtgccactaaccacccccgtgtaaaacagctaactccaatgttttgtgtattctgactgctctggcaacaagtcttttcccacaagggttcaaggcttgagttcaggacacaactgcaggtgtggtggcaatagcaagagaactagaattagaagtggagcccacagatgtgactgaattgctgcaatctcaagacaaagctttaatgggcaaggagtcgcttcttatggataagcaaagaaagtggtttcttgagatggaaactactcctggtgaagacgctgtgaacactgttgaatgacaacaaaggatttagaatatcataaactatggaactgttgataaaacagcagcagaatttgacaggattgactctaattttgaaagaaattcaaatttgaaagttcttctgtgggtaaaatgctgaacagcactgcatgtcacagggaaaactttcatgaaaggaagagtcaatcgacgtggcagatttcattattgtcttattttaagaaattgccacagctaccccaaactttagcatccaccgctctgatcagtcagcagccatcaacattaaggcaagccctctgccagcaaaaagatgatgattcactgatagctcagatgatccttagcattttttagcagtaaagttttgtttgtttgttttgagacagggtctcactctgtcacccaggctggagtgcagtgacgcaattacggctcactgcagcctcaacctcccagctcaagctatcctctcacctcagcctcctgagtaactgggaccacacacggctaattttttttgtatgttttgtaaagacgggatttcgccatgttgccctggctggtgttgaactcctggtctcaagcaatctgcccacctaggcctcccaaagtgctgggattacaggcataagccactgcacccagccttgacactaaatagactacagtatagtagaaacataacttttatatgcactgggaaaacaaaaactttgtgtgactcattttattacaatatcagcaatattgcagtggtctggaactaaactagcaatgtgttcaagctgtgcatgtaaaatggagatacatctcaggattgttataaggactaaataagattatgtatagaagattcttagcacagtgcattgcacatgtgctatgatacctattttatattacacagtaaaacttcaaagggattttgcagggtatgttagaatagcaggctatggatagc

SEQ ID NO: 1245382 - DNA, 4001 bp, Homo sapiens
atctcaagataatggctgagtcaggactcttcataattcctcaaaggttttcccccagctacaactacgtaaaaatcacacaacttacataaacttgcaataaaatacattcactgcaccttaaaaccaaatccttacccaacaagtagctcacttacacttctattcaaagaaatttgtaaacgcactaaaaagcttgcaatgtagttatgcaatattaatctcataattccagaatatattttaaattcctaaacctgaagtttttcctatggaaaacaatgtagttggctttctcttggactcagccttacacaacaataaaggatttaattttttcttttagcactagaattgctatacacctcacaaaaattgttctcattcaacaattgaaatacaagacatagacttccaaaacgggactcactttacacttaactaaagataggaaggaacctactttctattagatgttcacactctttcagtattccttaaaaacaaagaaaaaaaataaaaatctgtacattttaactctctttcctaaagtacactacatattgacaaggaaaccgaccaaaagcccctgggattcttccaggatcaccaagtcagactaaaaaacttatcacaggcagtactacaaaaacctacaaagttccagagctgggtgacaccttatcagccttctcaggatctgtcggaaaccgcaaacgtaaaagcaaaaaagtcacacgcactgaaggtttctcagcagaggagctcaactaaagggctaaataaaagcacgcgggtggcacactgaaatgtcgtagaaggcaggaagccccgctactatgaacctacaactctccgtttgcggctgacgcatcgctcctgcccgcacgcacctgggtccgtgccaacagcaccgggcagccctcgccaggcacctccaaggactctccacctccccggcgcgtcctacacctgacggccgagttctaaacctggcggaaaggtgacaagcgacgccctccgcggaacccgagggccggctgcagcgagctctccccgggccggggcaggggtcggggggcggctctcactcccaaggggtcccgcgccgtgccctagcctccccgcgccgctgacagccgggagcgggcgacagacgcagcttgcgccacctccagagcccactccccgccgcagcccagagcgcacgccctcgggtgcccagccgcccacgccccgccgaagcacgccgtcggcctctggggccaaggacgcgggcccaggcggaccgcggcgcgggcgggaccggacgcccaggaggcgcccccgcgggaccgcaagatggcggcggcggcggcgccagggccgggctcccctccgcctcgccccggccggcgcgcgcaccgcagcgagggcgggcgggaggggatgaagcgggccggagcaaggggcaggccggccgaggtggcggcaagaaagcagccgggaaagggaaggcgccggggcgtgggggagggggcgctccctcgggccagggccgcggacgtgccctccgcgcccccccgccgacagccagcggtccgcgcgccccaccccacccgggggtgtccccgttctgcctacctttgaatttgaggtctgtgggcggatcgaggaccaggatctgctcgtgcttcgccatggcccctgaggcggacgccatcggagagacagcgcagagcgggggcgcgcccgcggcggcggtttgctgactgggggcgggggacgacggcggcgacggctcggccgagctctaggacgaggccaggctcgcggctcccgagccctaacgcctgccgctgtgtcaccggttcggtgggccacccgctgggtcagcagctccgggtcccacaactgactcaaccccacaccagccgccacggccacgcgcacttgcgagcctcggcgacccacgtgacggcctctgcgtgcctacgtgcgcgcccccggccgggagcttctagcgcttgtcccgccctccaggccggcctagcgcggcgcggggctgctgcgcctgcgcgctcgcggcttgccgcggcccggagcgcagcccagctgtcaagggaacgggtgtggaaggaggcggggcaaaggtccgcgggaccgacgcgatgcgcagcgcagggctggaagcgcagtcctctgtcaccttgagctccgagtacggaactagagaaactgctctggcagcgcatcacactcttccaagtgggaatgcccagtggaagggacaagtagtagtagggaagcgcccactcactacaactcccggcatgccccctgcggggcggggccttcgccgagggcctggccctttgcggccctgcgcggtgcttgctgggaactgtagtaacggctgtttgagggtggaaaggagagctaggtctgttggaggcaatggggtggggttcgcggacgctaattttggctctcagagcgcgtctagtttgcgctaaaaaagaaaaaacttgaagactgaaacgaggccccaatgttagaaatatattaataaaatctgccctgtggagaacaggcgtggggggatgtgtccgtttgctctaattctatccagtcctctgttggcagggctgcattccccgtggtatccaattcagcctctcctgcttcctgagttctctccagtgatgcaaaatcagataaggaaacacacctcgtctaggaagcaaggggaaatatgacaaagcacacagaaactagaaataaaagtcaaaaatctacaccatcgaacccaaataatcttcttcagttttaatgatggacccaaaccaaaacagttctcacgttcacatgttagaaactaactccatctgcatcacttacgataggctgtagtaaactgaaccaaataagaaaaatcccagcagcaaacttgctgacaaaactttagccgattgccagggtagtccggtacaggaacgtcaaatgaaaccaatgtgctgtaaataaacctttattgtattttgtgatacggtttgaatttaaatccctaggtagcgccacgaaacaaaagacatattgatgctactgccatggagcagcacagtttgtctagaaaataaacgagacgaaacagcagtctagaagtaggcaccaaatccaagttttcatgtgcgatccaggtattagggtccatccaggaacagcctgctggaattgctagcctggcattcacagaagattgtgccacccacgaggaatgtgttttcagccctgaaattcctgggagtgagaggtgaagccagctggatttctgggttgggtggggacttggagaacttttcttacaagaggattgtaaaatgcaccaatcagcactctgtagctagctagagttttgtaaaatgcaccaatcagtgctctgtaaaaacgcacctatcagcactctgtaggtagctagaggtttgtaaaatggaccaatcagcactctgtaaaatggaccaatcagcagggcatgggcagggacaaataagccaataaaaactggccaccccagcctgcaggggcagcctgcttgggtccttttccacattgtggaagctttgttcttttgctcttcacaataaatcttgctgctgctcagtctttgggtttgtgccatcatttctttctttctttttttttttttttttttttgagagggagtctcgctctgtcccccaggctagagtgcagtggcgtgatctcagctcactgcaagctccgcctcccaggttcacgccattctcctgcctcagccacctgagtagctgggactacaggcgcctgtctccatgcccagctaatttttttatatttttagtagaggtggggtttcaccgtgttaaccaggatggtctcgatctcctgacctcatgattcacccgccttggcctcccaaagtgctgggattacaggactgacctagtgatccacccgccttggcctcccaaagtgttgggatt

SEQ ID NO: 1245383 - DNA, 4001 bp, Homo sapiens
gacaaatgaaaagctggtggaataaaaattgttaaaaagccaacgatgacaagatgggcacttcagaagagtcacctttaatactcaagggaaaaatacttttaccaaatgaccaacgctttttccaaatacgtttaccaaaaagaacctttccaaataggactacaaaaagctacaaaaaactcaagtgaagattgctgaatcttagtttaatacaaccttggtgaaaaagatagtcatccgggcacggtgactcacgcctgtaatcccagcactttgggaggctgaggtaggcggatcacctgaggtcaagaggccagcctgggccaacatggtgaaacctcatctctactactaaaaatacaaaaattagctgggcgtggtggtgggtgcctgtagtcccaggtactcaggaggctgaggcaagagaatcgcttgaacctgggaggtggaggttgtagtgagctgaaatcacgccactgcactcaagcctgggcgaccgtgcaagactccgtctcaaaaaaaaaaaaaaaaagaaagaaaagaaaaggaaaaaaacacagacaaatcaacacttgacttattccacaaaatgagtcattgttgcaattatacaattataatattttgtgaaagataacaattattttaataatcttctaggtcgattttcaagatgaaagtcccaagcaagcctcctttcccactctttttgtgtatgtgtgtgtgaaattttaatctctgtttaagtgggtctactttgagtggtctttcttcagaatcaattatcatgggttaaggagttcttccattacctttgatgcctctgtcaggcactccaataactgcttgttcaacaaactaccggaagtccacgacggggactcaatacaagtattttaggctactcttttgtgccttattgacttactggactgggagtcctctacattaagccacattacattctaaacgccactgaagccctagatccattctggggatgggagacaccattacattaagaaatttcttttctgaacgaattccattccacagaggactaacgattaagcctaaaatcttaagattccatgatttgtgtacaaaacactgtgctcattgcggtagaggaggggaagtggagccacacagaggtttaagaatactcctcgatcttacacactaccatctgggagccacaggagtgtgcacataaattcaatgacttcacggagattgcatgcaggctggctgtaatctcagattcttggtctgttcccatatctctactcacctgacagctcagaatgaaggggtctgctgtcagcttgagaaactaagaccgaactatgaccaccctatcttcaactggtccagaatagggctttgcaaaaattacgttctttctttctccgttaaccctgattggagaaacctgcccagatcttggctggtttggaagcgggaagtgtcaacaaaagtgaagagtctcacaaagccagtagctcgggagaccccaagagcgggccagaaacgacctttccgttggaaaacgggcccctctcccacctgctgcaggtccccggacccgccctcctgcgcctcgaccacaggcgcggccgcttcctcccttctccccgccccccacccgcttctcgcgcctcccctcgatcccagctccctagggggacgggagatgagcaatgatacctggaggttgggcgaagtggatgacatggcggagttcccaggcggttcccaagggaacgaggggcgaggagagccaacagcagcaacgtcgaagcgcgcacggggtaacagccctcaaactggggaggccggtggttctcggaccgcgaagggcagcctcccttccggaacttgttttagacaacactctctccaccagagctccgaccctccccaccaaacttccgcaatcccgaggccctctaggttctggtcccgcctctgctccgggcacttccgatttcgtcatcagcacgcgcacccagtcaccagactcccttctctagccacagcgcaggccctccctgggccgggagaagtagcctggaagccaatcgagccctggcggaagtcgggctcggcgcaggcgcactgagactctggcctaggcgcgggcggcagcctggcagacctaggagagcgcaagcgcggaagcacagagccgggttttgttgtttgtttgttccccacccccggggacgtcttttactttgagatgaattattggccccggctcccttccctcctcatccacatgctttgttgcctcgtagcttttgagtgaaaaagtcgtccatttccaagacccgccgactgggggctttgggcctgtgactgcgccttcactccgtgtcctctgtggaatgggggcgatcaccgtcctcgtctcggtggtgaataattcaggagggagtgcgcggtgaggcggccgcacagcggtgcgctagcagtcaggccgcgggcgggtcggcgctcgttcccgcttgttcttcccacgccactcggcatcttccaaatgactgttgtgttgggaagatgaatgtaaataaggcgtggacggccgctgtcctcgagtatgtggtctgagagggaagcacttgtcctgtaaaatgggcatatcagatattatttatgccagttatgtttacaagcaaatggcttgaggaggttgaatgcgtcagggattagaggcagaaccaaagtaaaaccctttctcagccttcctatggtttgcagccaccaccacccttttcttcttttcatagttaacattctcaaaggaaagcaacatagatgtttaatcactccatcatttttttctcactcatttcttaattttttctcatctggcatctccgaaagaattaaagtcctctcctcttccctcttcattggtattgtcaactacccagttcttgtttgtccagcttcccaatattccttatctgcttccttcactgtctccctttcttactcctccctgagcttaagctgaatttactcaagagtctgatgtcctcttctctcttcacctctgctcatctaactctcttcttgagcttcagctatcaatagactagaaattgcttcaaatctggatctctagacccaccccatccccagcccagcatttacaacagcctcccagaggtttccttcacagggtttttctgcaagacaaattcaacatactctaattaattaccttctaccctaaacttctttctctggtctctccttagaatagtattgccaaatctgtatcatccaggctcgaagcacagagccctctctctgccctgcatctacccgtcctttcttcccacttgtgaatttgccttcgcaaaatgatgactgagacagtgaaagagatctaacttaaccaactccatcttacttttaacctccaagctgtccttgtacattcctgagcataggctgaactaactgtgggagaaactgagtttataatttaagcaaagatgggccgggcgtggtgactcacgcctgtaatcccagcactttgggaggccgaggtgggtggatcacttgaggtcaggagttcgagaccagcctggccaacatggtgaaactccatctctactaaaaatacaaaaattaggccgggtgtggtgagtcacgcctgtaatcccagcactttgggaggccaaggcgggcgatcacctgaggtcagcagttcaagacccgcctggccaacatggtgaaaccctgtctctactaaaaatacaaaaattagctgggcatggtggtgcgttcctgtaatcccagctactcgggaggctgaggcaggagaatttcttgaaccgggacctaggaggcagaggttgtggtgagctgagatcgcaccacagcactccagcctgggctacagagcgaaactctgtctcaaaacaaacaaacaaaaattagccaggcgtgatggtgcctgcatgtaactccagctactt

SEQ ID NO: 1245384 - DNA, 4001 bp, Homo sapiens
aaaatacaaaaattagccaggcatggtggcacagtctgtaatcccaagctagtcaggaggctgaggcaggagaatcgcttgagcccgggatggggaggttgcagtgagctgagatcacgccactgcactccagcctgggcaataagagcgaaactccatctaaaaaaaaaaaagaagaacgaaaaatgcaggcaggggagatgccttgaacagcccattgaattgagtaagattaactccatcctctgcacctgaggtccaaaatgaactttaaggactcatacatctaataaacatcacaccactaaagctaaatgtcatcctacccctctcacgaagaaaacacaaaacaagctcactactttgaagattttcgatgctaagtgtgttacatggagaaaccacccaacttcctttaacttcaaaacggaacatatatcaaagataaaaggaaactgtaagatacaagggtcactacccctaaaatttaagttaaattcttacagggatattcaaaccaagccaagcccagtccctttgattcacccagtcaccgagatcttttaaaatttagttacaggtggcaataagaaaaaataaagggcatactctcatttttctcttaaagtatttctctgaaacactcttaaaataaggattggcagtaaaataaatgaattttctaccataatccctaattgacattaataataaagcattaattatatttatagtggttcgttttcccaatttataataactaatatgtattgttctggatggaactagacagttttttattctttgtaataatgagggcatttcaacacattatgttcacttttaagctgaccttcatacagccacgagtttgtttataaagcaagaagcagagtcaaactaaaatttttgttttacaaaatgtcaaaaactcagttaatttctttcatacaacaggcaattcctgcaaccttgcccataaaatcctaagacataaacacctgaaagagtcagtttgcctttttttgtctcatggcaaatattacagtgagaggaagctatagctgccactgaccgaaccctaaattcagcagcatcaacaatatcaatgcagcctgtcatgcgacggtaggttccctagtttcagactatctaacccagcaaattctgcctcaaaaagtgacatactaagtgggtaaaaaacataaaacagcaatttttgaatcaaagttagggtagtgctgacttcaaacatagcttcagaacgctgggacccatcactaagtgaatgggagtgactggcatccgctcagacaagtactagggcaaagggataagaactggcagatggcatctcaaaaatgaaattctaacagtggtgtcagtaccttgggcatgggcaaaaatagtaccaacaggaaaggaaagactatatgaaccccaaaagcaagcacatcgcccaaaattgctgtcaataaccaccaacgatcatcaccaatcacctgatcccgtttagattgcacctgggaaccaggcagtcccacctcaagaccaaagcaactgtcacaagtagcaaatatcactcaccaggcaagggagccacaaagacccccggctggcccccacgctcttggtaacggcgcctacttttgggcccgacctgcaggcttgcagccgcagcgatctgacagctagcaccgcccccggctagagcgggtttgtgacctttgacccctgacccctgacctccacggtgcaggaacatcccgccctgtggtttcccatggagaagcttgaaagcccccttacctgtcacagcttcatctcatgccgcgatgtagcctatcagaccgccggtgggcgccccagccaaggaggacaaggatagggcggaactacggaggatgcggggtgcgtagatcctgctgggataatccgtggggcggcaagcgctatacagccgccgtctccccagtgatactgcaaggtgccggtgccgccgccgccgccactgcagtaaatcagctgacaccagccccaactgccgtgactttcgctgcaactgtcgcaaaaatgagggggcgggaaagactcaccatttccctacttgcaaggcctaagccggcgccgagagagccagccgcgttacgatggagaccgaaagtggagaaaaggccagctgtgggcaaggagtgcacggccgccatcttggttgtgggaagtctcgtctaggctgtcctctctccagttgggaggaccaagatggagcgaaggatgaagtagcaagtgcacgtctttcttgggagcaggatgttgcgcaagtttacacttctgaccccatcacactgcttcccactgagatgcaagaggtagggaattccctaaacactggaaagtatgttggatgctggaaagctaaaaagaatgacaaatgtcccccaagatagataagctatagtatagtgcaggatgagaaatgccaaataaggagcaaggaagaaaagagatgaattatttctaggttggggtaaggaaggataatcacattaggtcatatggaagtctagaaaaattggtcagatttggaataataattgggaaaggaaaacaactttgtcaccagcattgaaatgtaaaacatgaatatatgcaataaatagaaagttaaatttggaagaaatacaagggacgtgaagtaggtgaagtgggaaaatgtggtatcagggcttagctgtttctgctccgtgagcggctcctttaacaggcagtctatgccctggagctctcttgtgggttgatagagacttcatcacattcggcctagaccaggtaataaaaaagtaacatggaaaaatagaataatgtagataacaagaggcttttagtggccatataagctttttggtctttattccaaagacaatgaaaagtaattgaagacttttgactaataaatagtgtagcacttttcctaaccacatggtattcaggtttttaaaattgctttacaacaaattatcacagtcttagtgtcttagtggcttaaagcaacacatatgtattgcctcacattccatgggcaaggaggtcaggaacaggttagctgagtcctgtgctcatgctctcacaaggctacaagtggatgtcagccaaactgcaattctcatctggaggctcaactagggaagaatctgattccaaactcctgtcagctcattcagttccttgtggctgtctgactaggggccctggcttcttactggctctgaactggaagtggccatcaggtcctagcagccacccacagttccttaccacatgggccttactaaaggctctctcgcaacatggcagcatactccttcaaagctagcaaggagaatctctctactgagcacaagaaaggagtcacacagatatagatacagccatggatatggacatggacatagatatggaaatggatgtagatgataacctaaattagggagtgacagccatcacctttgccatatattattggttaaagtaagtcacgggttttatctgtactcaaggagaaaggattatacaagagtgtgacttatcggggtcacttaagatgggccagccacaaatattaatttggcagcaatgtgccatgtaaatcaggtgggaaatacagggaagcaaggagacaagtgagatgtcgtcattgttgttgtaaccaaaaatgtatggttatcactgcaaaagaatcataaatgagacccacaggataaaatcgggaatttcaccattttagaggcatatatatatatattttttgagatggagtcttgccctgtcacccaggctggagtacaatggcaccatctcagctcactgcaacatccacctcctgggttcacgcaatcctccttcctcggcctcccgagtagctgggattgcaggtgcacaccatcacacctggctaattttttttatttttagtagagatggggtttcactctattggccag

SEQ ID NO: 1245385 - DNA, 4001 bp, Homo sapiens
aatttttcagcttgtgaatttcctgaactaaaacacacacacaaaaacagcccatgtattaatattatacttcgaccacaagacaaattccacctaacccaggaagacaggtcaaagctgtaatttcactttcagatgaacagaaaggaatcaattttgtggtttatgaagtcagcaaaacctaactacgaaattaaagccattataacattacagtggttacaacagagtatatattttaagagcccttttatcttttatcctggaaacatggatataaactgttttgttttcagatcaaaggcaattgtctttttcaaatgtaggaccctctgaattgtcaaccagcatttaaaatctccaccgacttttagctaatgtccaaaaataaaaatacaatttaacttcctttccttacatgtcaattgtggcaggggtctcacacttataagcaaacaaacaaaaaccaaaaaaccatatatattatttgctaaagtaaaactttcttactgtacaatatatgaacatcgtaagtgatgcatacaagatccttggctaatacaagatactcctttattacctgaccattcaaaatgcttcctgtccaccgtgtgccaagcactgtgatagttaagatattagatttaccatgcacttttccttaaatgcacagtcacgtgtatacatttagtaatactttccttagtgcgtaatttaactttagaagtgtaacaggatggtttaaatatttaaaattatcaaggtatctttggcactgtaatcttacagttataatacatgaagatactataatcatatcatgtgaaatcgactgtgaaaacacacacccgtggaacgtatatacataataaatggacataaaattgtgcttccaccaaagactttcattatttcctttagtaatttataattatacagtatgttattccacgcctgtatcaattaattatgcagaaaatgattcaaccaaatccgaactgttaagtcctactcattacaaaacaaaaactaaagtccctacaccagacttgattttcaaagagcttcttaaaacagctctgccccatgcccaataaagtgaaagctggaagcaattatcaagaagaaaaacacactttaagacaattttctttaacacatgtggacagggaaccgaacgcaacgggaggcggagtggcatgattccgtaaaagtggacgctgaatggtaaatttcccaacccccaacccaaaacaaaggaaaactttaaacatgttgcggttttcaatcaaaccaagtaaagccagaaaggctcatccactcgccccacacacccgctcctctccccgcacagctgctaccggcgtcggccgatacacagacccccagcctttaggacccaaaggggccgcttccctcgcccctacttcggccgtaggggcaaaaataaacctctcctccccgtcgccgggcggtccacacgaccccaaagacaaggggtggggagtgtccccacgcccctggaacctcaggtcggacttgggcgggacccggcaggtctggacagggcagagaccgagtcaggggcgagcaggtagcgcggggaacgagacaagcccgccgggcgatccgggggaggggagaagtttcttcccaacttcccgactcgggcccgcgggggcggggaaccgcggcggcggcggcggcggcggctccgggcgctggggcctagccctgtccgggcagaggtggaaccctccgcccgcggggccccaccgggtccttacctgtcctccggccgcgctctcatgagtcgctgctaccgcagctcgaggtggcggagggcggaggcgaggcccgcgggccctctccctcctccacctcctcgtcccggggcgcccggcggcagcaacgacggcagagccggcccgggacgcgttacttcaggaggagggagttcccgggctccccacgcctcggcctcactctccacctcctccgccccccccccccggccccgccccctgacttctagcgggggcgggggctgcgggtacctgcgcgcgccgccgtccgctcaccggaactcgggccacgccggcccggctccggggcccccagccttccggcgcctacgcccccgtcaggtcccctccgcgggctccgggccgctttgctgtggtcaggataggcgaccggtccgtgtcacttctcccgacccaacatggcggcggggtccggggcggattcccgggggcggtgcaggccgagggggcgtgaggaggaggtgcttccctgcccggagagcaggcccgcggcgtcccttcccacccgcgaacccaccgacgctcggctgccgcggagattgaatggagcgctccgattctgcccctctgcctttctctgttccttggcccagctctcagtagtggccagggctttggggcttgcttttgtgggggaggacggggttgagtttttttggttggctgtttgcttctcagcgctacgcttccgcaccctttgtcgttggtagtaaaatctcaagcccaaccgcgtgagccgggggcgttactcacaccctcatcaccatcctgatcgccgtccaaaaaacgttcacgtcttgcctccttccgaggcagggatcctgtccctgcccccaggagcttcctgttgactgtaggtcgaaccagccttgccgggaggggaaccgaagctgagttctgtttggcgactatcccagtcatggtggctttggcttatgttgggacagcgtttttctatatgatgctggcggcagcccagtgagggaagtgcaacaagtatggttctcctgcttgtcaactgtggaaacagcgaccctgaaagtggaggagccacagctggaatcgtgtccgtctgaatacacgcacctttcctatgagccttgtaaagccagtcgttgaagaagggggaggacccggaaggatggggtgggggcgtaaagatgaaggttaatcaaggtcctcatggactgaaccttgaggcccttctgctgcagtcacttttgccctatcagacttttagagtaacttcctctctttatttcctctttggtggggttatcagaattattttgtgactattggtttcctttgcggtttttagtgaaattcagaatcatcttcgacggataggaaatagtgcaatcatatgtgtcagtattccggtattctaggaacttaaggaaatgcatataagggtttgaacatttttttcttcagctcactaaatgaacgaaaggtaggcgtaggcgttaaagagacacataatgtggaacgatgctgtattttcttagctactaaaacttcatttgtcattgactgtctcagggctttaaaattttatgtaggtctatattcagcttttattaaaatagaaaattccttgagctgttgcctttcttcactaaatagagataatttcgtcttcctaaacactcagtctcaaaaatcacctctaaaataggccgggcacagtggctcacacgtgtaaccccagcattctgggagtccaagacaggaggatcacttgagtctaggagttggagaccagcctgggcaacatgggagacctcctatctatttagtaaaatatattttaaaaaataataatgaaatgaaatagtagtttgccccagtttaaggggtaaggtggctttgaagatgttctatatggagttttaaagttgggagagtatgtcagaatgtcacctacaagttatggattacattgacttactgagtttgcttctcttcgccctccctttttttttttattactacattccctgatttcttttttagtatattcatcaatgtcaaacttcagtctgtaaataacctggaaagttttcaatcttacatttagtggctcacttgtttccaggaatattttttaaaaaattttttaatgaggaagagaaaactggaaagtcttactgagtttggtgtaacaaaaat

SEQ ID NO: 1245386 - DNA, 4001 bp, Homo sapiens
aagggaaaaaccctgtgtggaacttcttgcccgttaaagtttgtttggaaatcttttcagtctggtgtcatctcaacttctagcaaatcactcatgcgttctgtgtgctccacgtgaacacatactcaagcccttctttttagctgggctgggtgcacgctcttactctcaacagcactggcatttcatcccataatgaatcaatcctctgctgtgtccacagccaatgcaaacattttcaaggatccctacacactcccctttaagccattccagaccagccccccacccccgcctccacacaatcctacccatggttcaatcattcttcccaaaaggtttccaaaagttttatatcgtgatcagcattcttccatactacagtcttgttaggaaggctaataggaatctcgaaaatggacaaattaaatgctgcatcaagctacttaggaaggtacattttgtccttcagtccgtgcaagggactttacggtactttctagtacacaatttacaacatagttacagtcagaacttactcctccctttcgatattattattcaacttgacacatgcagcaccgtaaacatttcgatgggactttgcaggcctctgcagagggcatagaggagcgccttgccagtcaagtcgggcagccagggacccacggagcaaagacctaagcgggcatggctccgataaagagtgaggtccgtttcctccctgttgcttcgccagttactaaagatgagtgaggcggaaacacgacggtggggagcgcggggaatggaaaagccagaaggtctcgcaacaacccggtgtcacctgaatgtctgcaaaacgtgccggcaaaggcagccatgcccccaccccgaccctggcccagctgcccgggacacgcgccacgcggcggtcgttaacactcaggggacagacaacagtcacactgcactgacagcacgcagacaacaccggcgaggtgcacacccacacatccaacgacaggctccgccactgcgaggcggctgccaacctggagggaacagggaaagccagccgggtcccagcctccttcctccgaagcacgtttacctaaacgtcgcagtttgcgtccaggctgctcccgctccaccctaaagattatgtcaacgcaggaactgtgggtgcgcgcgggcggcccggcggggagcctccccttctgggtcccgtcggttttatttcgggagcgggagggggaggagggagggctggaggaggggaggggaatcccaaattaaaataaccctcagttatgaggacgttcggtggcatcggatattcacaccagcaacagtcacatcacattcgccttcgccagatggcggcgggttcaacttcccgggatctcgcaaactcaggctgtgcgcccgagcgcgcgccggagtgtgggcacgcgggcgggctggggactgcgggagcggcgcggcgcggcgcgagcccggggcgagaacgggggcgtggggttggggggcgccgggctcaccggttccggacgaggaggtctccgtccccggggagcggcaccgggcagtcccggctcagggtgacggcctcgcggaagttggggctcagccgggtcaccaccagcttctgcatggcttggggaatggcggagccctggaagtccaggaagtggcgggcgtacgacatgtccacgatggcccgggccccggtgggcaccagccgcagcatggcctgcgcctccgcccgctctctgcgccgacgctggccggggtcggcccccgcccgggccgctcggctcggctgtgctctgctcggctagggcgggcgggtccgcccctcctccggccggcgccctccccctggctccccccttccccgcgtcgcccgctcccgctccccccgcctccccggcgccggcgcagcccccgcgaacccgggcgcaccaccccgggtgtcccggcctggggaccgctgccgccccggccgctgctcctttaatctttttgttttggtttgaatctgctcggcgcagactggccaaggatcctctccgccctcccccttcctcctggcgcgggagaggcaccggatatccccaccctccccgagctctaaaagccggatttgactcctctcgggcaagggtggcgggggggacggcgggcaaggggggacgggggactcgcgcgtcccgcggtcgtctgcggccccgagccggcggcagccccgggcgtccccggagctgcgcggcggccggcgcaggcgcctccccttcccgtgcgaagcgttcacttccttgcaaggtggtacgaatcaaccccgagcgcggcccgggcggcggggcacgaccggggaccccgggcagggcggggagcccctgccgccgctgccgcacgcgcacccgtaccgaccgcggggcggggaaatgtccagtgcctcccgctccccaggctggtggcttcctgtccccggaaccccttgcgcgtgctttctgtccacggtctgtcccatgcaagttgcaggaactaagccattttatttattttggcctagatttcatgtttttccatgaatgttttaagtagatctacaagactgttacaggtttcccattgggagagaacacacatatagaaaaccagaaggccaaattcccagagcacagacacattttaaagttctacgtggggatgccgagggacttaactgaattggagacgttgcactgctgtgtgaggacctcattttcgaacccagctagaaagatctgtcgttccatcgtgtccgttttctccctactggcgtgcatggaccaaatgtcaattcactttttatagaggggccaaattaaatatttccacacttttctgtgatgaactaagtccatctttacatttttatttaaattgtaaaatttaattttaaaaatatcttgcttttcagttacccacgaattaccaaaatataaaagctactctgggctcctccccagccaaatctaaccccccaacctgagattgcaaaagcgacacagatatttttccccccaaatgtaggacatgcttcacccaagggtagtttggatgcacgtggttgcgtgtgtatgaatgtgcaagtgtgtgtatgtgtatgtgtgtgtgttgggggggaactaacaggtttaaaaatctgcaggaactaatgtctacttaacttagagcatatgggttttacccggtatcagccagtgggttacaataacaacactgaatgaattcctccaatgtacaatcttttatgttatgctgtattaagatttcttttttttgtcatattgtttagctccgaaaaaaagaaaacaaagcaattaaaaagattgacaggtatggtttgtgagagacctatttgtaattgtcagggtgacgttggcgagaggaggaggagtaaaaactgaagcaggaaaagcagctcgatgtgtctgtctatcagttgagactgtctgaaagctctgcgatccgaatgtgtgttatatttcactgaaaagaggagagagcgagagtgcatctccctctctcccaggagtttgagggggggggggacagtccacgctcatctcgcccacccagtgaatgtctgctcttcaccccctttgcacacactctccgggttgttgttgccttttttttttcttggaggggggggtgctttttgtgtatttttcaaatttttttctgttggaagatcaagaccggccaaaaatccatgatcaaaatgtgtttgcattagatttcgcattggaagaagcggcgatcctggcggccaagccccccgggtggaagcgcggggcaccaagtggcgctccggcggggtgacactgtttgatctgtgactgtttggaaggtggagcagcgcctgacatctccccccggcgcatgtatgtacgggggcttcactcctctgtcttgtttgctttcttcctcttagactaagtgcggggaggaaaaggacagcctgcatc

SEQ ID NO: 1245387 - DNA, 4001 bp, Homo sapiens
agaagcgggatgtctcatctgaagtttgaggttaggcaacatttccaaaagatgattctgacttgatcattctacgtgtttctgcctctctattccctagaagcacccaggcctgtaatcatccagaggctaggcagcccagcaaaaaccttacactgtgacacttactactgttgtcactaactcgtcctagggcttgtgggataaaagtgcatgggaccagagagaggagtggccttagactagctatgacaacatatcaatgtgttgttgttgttttggctagtgtgtacttggccactcgcccctctcccctctctctctcaagatgtatgagacctggaagagagaccatgtgtgtccaaagccgcctcctccccgccccgccccccttgccattgagatgtccaattgctcagttcaggtgagtcaaaactggaagacagctgttgccagcatctgtgtaggcaggtgtaggaaaagacgtagccccaacaccaccttcataataaggctgccccttcctaattgctctccaaactgcgggcgcgctaagccgcgttacagtgcagggagccgggcttcccgcaaagccaaaaacttacataagcagctgcagccgcctcccctgccccgggcagcccgacaatggcggctgcacgacttccttgttgcaagcttgcaacttcggagtcgggaggaagcagggagccaagcgcagacccaagaagccctcaaggcgtatcgagtcctccctctcaatttctttgggcctgggaggtggggagtggaggaggccgtttgcactccttcccagacaaaagctcccagcctgggagccaggtggtgaaagggccactttccctttcataatcagacgtcgagcgcaggcttgggaccgcggctcggagcgcgcagggagggactgcggcccgcggcggccccggcggcgcgacgagcgggagcgggcgtgcggccggctccgcagccccgcgccgcgccgcgccccgctccgcccgcgagcccggagctcgcgccccgcgcactccccggccagctcgcgccgggccctcccccgccctcccgcggccgggggcgggggcggcgcgcggccggctaacccaagctccgcgggcgcacccgggagtgcgtgcgctgggtcccggccccctcctccgccggcggctgtaggcggcgcggcggggcccgcggctcggaggggcggcgcccggcgggccgcgctccgcgctgggttcgggccgtccccacccccaccgcggtgcactgcggcggtgcgagcgggggcggccatgaactcggccgccgaggctctgcgagcgcgcgcgcggggccgccgccgcctggccgctccccgagcccgctcgccggcccgcgcggcccccggggcgccccggccccacgcccaaccctggcccacgcccgtccccgctcgcaccgcgccgcgccgctggcggccgccgcacatcctggagctggctggtgccccagagctcggcgagaacgcgcgtcttccgggccgccccgccagccgccggccgcccccgcgcccgccttgcggacggccccagccccttccgcaccctggcccgcgcttacctgcagcctggcacaggcacagacactgccgtgggttccccgcgctcgctagcaaacgcaggccgggaccggaggggctcggggcgcgggggcacggtgggtggcagtgtgttttggatttttttttggagtttggggagggggcggggtgggggaaatcgtgcacgtccctgatggtagcagccctcctcctgcacgagcacagaatgtctagccggccgtgaacacccccaccgccccccccttcccgtgcatgcgcggtgcgggctggggggaaggcgcgccgccggcttgcgcaggcacggaacccgaccgggtctctaagtgggcgagcaaagaaagggttaatccgggcccttgccgacgctttcgttggagactacggggccgcccccggagggccctggcctgcgcacgcgcgcgcacgcgcgcggcttggggcgcgcggagcccgcgcgcgggagaaggagtgggcggggcaagggcggggcttcgggagccagggaacttaagcacgagcgctgctcgcggacacccgccccgcctcaagctccctcccgccctggttcgtgggcttccgcccgcgcccggcgccggcgcagcgccggggacgcgggagccagcgctcccgtgcgtgtgcatgtgcgtgggccagagcctcccccgggcgcgcgcaggccgggcgctgaggctgcggggctctgccgcgtctcggagcgggcgccccggccactttcgccctccgcgcacaccggccgacaccgggaggcgcgcccacgggtctgcggtcttgcctcttgccgccggcacattgagtttgtgggggagtggacggtgcacaataaacacttgcagaacaaatggaaaaagcgacgtcttcgatttgtagtgtaaagcgcaaccccagttgcccagcagaaagggatcacccatagggcttcggagctagtaggtccgcgcccggacactccaaggaaaagtccaggggctggaggcggcgacccgtctgtggcagtccagaccctggactcgattcggagagctctgataacttggctctgtccttaacatccctgctcagcgccagtaatggctccgttgctgttgaaccacgtcgccttccctctgacgcggcggctgtgcctgtgtctggcgtcgggagctgggaagtccctcccgctcccgcgttttctgctcaccgagatgcaggaggccggacagcaatgccgcgccgccttagagtcgctcatgttgctttacctcacacgcgaagtttccccgaaacgcgtaatttaatatctaaagattagagcagaagcttcctcttgggcttattgaagatgacataagatagtgcttgcaacaggcacctaagtaaacatttgggaaataatatgatgattggatgtgttaattttctaaaggaagttctatatggcctcagttgattttgtaatgttaattgactttggtttaacgttccccaaggcgactttatacgcatcttttttgatgttcacaaaagcacccaagttacggcttatatggaggaaataggatggaagagaccggttgtagagtcagacatatccagttcacatattgggtaaattgtttaacttctctaaacctcagctgaaggagagctatggaaagcacctaataaggcacttgtaaggattaagtgaaataatgcccagctaaggtattagctccatgatggaaaatcacctgcacccacagatagtgggttccagtggcctggacagaaccagaaccaagtcttctgccacgaaagttcacactcatcagacatgataccgtgtactcgctttattcttgtttgcgtagctcttgaagttgcatttcaatcctgtggatgctgtgtgtttatagggggataataatagtactctgtcatagggttgcgtcaccaagcagtaaagcagccactgcagttagcacaatgtgtggacacggccagtactcaagtcatggcgcatctgctgctggcgctcccccttctcccataccacatatggggtttcccactcattctgcgtgtatttttggtctgcctactgtgtaaagacaatcttttcgcatatggctaggaaaagacttcccacgtttccactaacccgataacataattcacaagagttctaaagcactagaatgcatttctcaagtgacggttcctgacatcctggttttgtatcaatgaatcctcttgtctcatttgttttatgttcatgtcacctgggctctgcctggctgtcccttgctggttcacaggggttgtggggatgagtctaaattaaagggacaactctgtgggaaggtggagggatgggaaaccacaaaggaaaggcctgacccaa

SEQ ID NO: 1245388 - DNA, 4001 bp, Homo sapiens
gtatgttagccctctacatttttctctcggctcatacaaacctatagaagtatataccttacaaataaagctatagaagtacataaacccaacaggtaacatgggaggagagggaacaatgattgctttttctttctgcacctgtgtgatgtattaatagcatacacgtttgtttttaagattgtatttgataaatccaggtgtttttacctctatccctacaataagggtgaaagaatttcagcttttttgtgagttttaactcttaccggaagaactccatcctgcagacccatatcctgaaaaacaaaaagtttcctctactgaacagtgaccacacagataagttgtttggtgtggtaggagcaaaggactgggctgtaacagtcttacacaaaaaccatggaacaagactccaacctggagaccaacaccttgaaacccataataagctccttctaaagaaaagtgaacacaccgagctacccagcgtagaagcgggatgtctcatctgaagtttgaggttaggcaacatttccaaaagatgattctgacttgatcattctacgtgtttctgcctctctattccctagaagcacccaggcctgtaatcatccagaggctaggcagcccagcaaaaaccttacactgtgacacttactactgttgtcactaactcgtcctagggcttgtgggataaaagtgcatgggaccagagagaggagtggccttagactagctatgacaacatatcaatgtgttgttgttgttttggctagtgtgtacttggccactcgcccctctcccctctctctctcaagatgtatgagacctggaagagagaccatgtgtgtccaaagccgcctcctccccgccccgccccccttgccattgagatgtccaattgctcagttcaggtgagtcaaaactggaagacagctgttgccagcatctgtgtaggcaggtgtaggaaaagacgtagccccaacaccaccttcataataaggctgccccttcctaattgctctccaaactgcgggcgcgctaagccgcgttacagtgcagggagccgggcttcccgcaaagccaaaaacttacataagcagctgcagccgcctcccctgccccgggcagcccgacaatggcggctgcacgacttccttgttgcaagcttgcaacttcggagtcgggaggaagcagggagccaagcgcagacccaagaagccctcaaggcgtatcgagtcctccctctcaatttctttgggcctgggaggtggggagtggaggaggccgtttgcactccttcccagacaaaagctcccagcctgggagccaggtggtgaaagggccactttccctttcataatcagacgtcgagcgcaggcttgggaccgcggctcggagcgcgcagggagggactgcggcccgcggcggccccggcggcgcgacgagcgggagcgggcgtgcggccggctccgcagccccgcgccgcgccgcgccccgctccgcccgcgagcccggagctcgcgccccgcgcactccccggccagctcgcgccgggccctcccccgccctcccgcggccgggggcgggggcggcgcgcggccggctaacccaagctccgcgggcgcacccgggagtgcgtgcgctgggtcccggccccctcctccgccggcggctgtaggcggcgcggcggggcccgcggctcggaggggcggcgcccggcgggccgcgctccgcgctgggttcgggccgtccccacccccaccgcggtgcactgcggcggtgcgagcgggggcggccatgaactcggccgccgaggctctgcgagcgcgcgcgcggggccgccgccgcctggccgctccccgagcccgctcgccggcccgcgcggcccccggggcgccccggccccacgcccaaccctggcccacgcccgtccccgctcgcaccgcgccgcgccgctggcggccgccgcacatcctggagctggctggtgccccagagctcggcgagaacgcgcgtcttccgggccgccccgccagccgccggccgcccccgcgcccgccttgcggacggccccagccccttccgcaccctggcccgcgcttacctgcagcctggcacaggcacagacactgccgtgggttccccgcgctcgctagcaaacgcaggccgggaccggaggggctcggggcgcgggggcacggtgggtggcagtgtgttttggatttttttttggagtttggggagggggcggggtgggggaaatcgtgcacgtccctgatggtagcagccctcctcctgcacgagcacagaatgtctagccggccgtgaacacccccaccgccccccccttcccgtgcatgcgcggtgcgggctggggggaaggcgcgccgccggcttgcgcaggcacggaacccgaccgggtctctaagtgggcgagcaaagaaagggttaatccgggcccttgccgacgctttcgttggagactacggggccgcccccggagggccctggcctgcgcacgcgcgcgcacgcgcgcggcttggggcgcgcggagcccgcgcgcgggagaaggagtgggcggggcaagggcggggcttcgggagccagggaacttaagcacgagcgctgctcgcggacacccgccccgcctcaagctccctcccgccctggttcgtgggcttccgcccgcgcccggcgccggcgcagcgccggggacgcgggagccagcgctcccgtgcgtgtgcatgtgcgtgggccagagcctcccccgggcgcgcgcaggccgggcgctgaggctgcggggctctgccgcgtctcggagcgggcgccccggccactttcgccctccgcgcacaccggccgacaccgggaggcgcgcccacgggtctgcggtcttgcctcttgccgccggcacattgagtttgtgggggagtggacggtgcacaataaacacttgcagaacaaatggaaaaagcgacgtcttcgatttgtagtgtaaagcgcaaccccagttgcccagcagaaagggatcacccatagggcttcggagctagtaggtccgcgcccggacactccaaggaaaagtccaggggctggaggcggcgacccgtctgtggcagtccagaccctggactcgattcggagagctctgataacttggctctgtccttaacatccctgctcagcgccagtaatggctccgttgctgttgaaccacgtcgccttccctctgacgcggcggctgtgcctgtgtctggcgtcgggagctgggaagtccctcccgctcccgcgttttctgctcaccgagatgcaggaggccggacagcaatgccgcgccgccttagagtcgctcatgttgctttacctcacacgcgaagtttccccgaaacgcgtaatttaatatctaaagattagagcagaagcttcctcttgggcttattgaagatgacataagatagtgcttgcaacaggcacctaagtaaacatttgggaaataatatgatgattggatgtgttaattttctaaaggaagttctatatggcctcagttgattttgtaatgttaattgactttggtttaacgttccccaaggcgactttatacgcatcttttttgatgttcacaaaagcacccaagttacggcttatatggaggaaataggatggaagagaccggttgtagagtcagacatatccagttcacatattgggtaaattgtttaacttctctaaacctcagctgaaggagagctatggaaagcacctaataaggcacttgtaaggattaagtgaaataatgcccagctaaggtattagctccatgatggaaaatcacctgcacccacagatagtgggttccagtggcctggacagaaccagaaccaagtcttctgccacgaaagttcacactcatcagacatgataccgtgtactcgctttattcttgtttgcgtagctcttgaagttgcatttcaatcctgtggatgctgtgtgtt

SEQ ID NO: 1245389 - DNA, 4001 bp, Homo sapiens
ctttccctttcataatcagacgtcgagcgcaggcttgggaccgcggctcggagcgcgcagggagggactgcggcccgcggcggccccggcggcgcgacgagcgggagcgggcgtgcggccggctccgcagccccgcgccgcgccgcgccccgctccgcccgcgagcccggagctcgcgccccgcgcactccccggccagctcgcgccgggccctcccccgccctcccgcggccgggggcgggggcggcgcgcggccggctaacccaagctccgcgggcgcacccgggagtgcgtgcgctgggtcccggccccctcctccgccggcggctgtaggcggcgcggcggggcccgcggctcggaggggcggcgcccggcgggccgcgctccgcgctgggttcgggccgtccccacccccaccgcggtgcactgcggcggtgcgagcgggggcggccatgaactcggccgccgaggctctgcgagcgcgcgcgcggggccgccgccgcctggccgctccccgagcccgctcgccggcccgcgcggcccccggggcgccccggccccacgcccaaccctggcccacgcccgtccccgctcgcaccgcgccgcgccgctggcggccgccgcacatcctggagctggctggtgccccagagctcggcgagaacgcgcgtcttccgggccgccccgccagccgccggccgcccccgcgcccgccttgcggacggccccagccccttccgcaccctggcccgcgcttacctgcagcctggcacaggcacagacactgccgtgggttccccgcgctcgctagcaaacgcaggccgggaccggaggggctcggggcgcgggggcacggtgggtggcagtgtgttttggatttttttttggagtttggggagggggcggggtgggggaaatcgtgcacgtccctgatggtagcagccctcctcctgcacgagcacagaatgtctagccggccgtgaacacccccaccgccccccccttcccgtgcatgcgcggtgcgggctggggggaaggcgcgccgccggcttgcgcaggcacggaacccgaccgggtctctaagtgggcgagcaaagaaagggttaatccgggcccttgccgacgctttcgttggagactacggggccgcccccggagggccctggcctgcgcacgcgcgcgcacgcgcgcggcttggggcgcgcggagcccgcgcgcgggagaaggagtgggcggggcaagggcggggcttcgggagccagggaacttaagcacgagcgctgctcgcggacacccgccccgcctcaagctccctcccgccctggttcgtgggcttccgcccgcgcccggcgccggcgcagcgccggggacgcgggagccagcgctcccgtgcgtgtgcatgtgcgtgggccagagcctcccccgggcgcgcgcaggccgggcgctgaggctgcggggctctgccgcgtctcggagcgggcgccccggccactttcgccctccgcgcacaccggccgacaccgggaggcgcgcccacgggtctgcggtcttgcctcttgccgccggcacattgagtttgtgggggagtggacggtgcacaataaacacttgcagaacaaatggaaaaagcgacgtcttcgatttgtagtgtaaagcgcaaccccagttgcccagcagaaagggatcacccatagggcttcggagctagtaggtccgcgcccggacactccaaggaaaagtccaggggctggaggcggcgacccgtctgtggcagtccagaccctggactcgattcggagagctctgataacttggctctgtccttaacatccctgctcagcgccagtaatggctccgttgctgttgaaccacgtcgccttccctctgacgcggcggctgtgcctgtgtctggcgtcgggagctgggaagtccctcccgctcccgcgttttctgctcaccgagatgcaggaggccggacagcaatgccgcgccgccttagagtcgctcatgttgctttacctcacacgcgaagtttccccgaaacgcgtaatttaatatctaaagattagagcagaagcttcctcttgggcttattgaagatgacataagatagtgcttgcaacaggcacctaagtaaacatttgggaaataatatgatgattggatgtgttaattttctaaaggaagttctatatggcctcagttgattttgtaatgttaattgactttggtttaacgttccccaaggcgactttatacgcatcttttttgatgttcacaaaagcacccaagttacggcttatatggaggaaataggatggaagagaccggttgtagagtcagacatatccagttcacatattgggtaaattgtttaacttctctaaacctcagctgaaggagagctatggaaagcacctaataaggcacttgtaaggattaagtgaaataatgcccagctaaggtattagctccatgatggaaaatcacctgcacccacagatagtgggttccagtggcctggacagaaccagaaccaagtcttctgccacgaaagttcacactcatcagacatgataccgtgtactcgctttattcttgtttgcgtagctcttgaagttgcatttcaatcctgtggatgctgtgtgtttatagggggataataatagtactctgtcatagggttgcgtcaccaagcagtaaagcagccactgcagttagcacaatgtgtggacacggccagtactcaagtcatggcgcatctgctgctggcgctcccccttctcccataccacatatggggtttcccactcattctgcgtgtatttttggtctgcctactgtgtaaagacaatcttttcgcatatggctaggaaaagacttcccacgtttccactaacccgataacataattcacaagagttctaaagcactagaatgcatttctcaagtgacggttcctgacatcctggttttgtatcaatgaatcctcttgtctcatttgttttatgttcatgtcacctgggctctgcctggctgtcccttgctggttcacaggggttgtggggatgagtctaaattaaagggacaactctgtgggaaggtggagggatgggaaaccacaaaggaaaggcctgacccaagcctggcttctcgcctgtgtcgccacccaaaagtgcacttcccagcacccaagaggctttcaataaacatcagcggacagtaagtgacaaccttgaatttgatactaaggggctttgtaaaagtacactgtggcgtcaacgcgggggcagggctttcctgaaatgcactgacccaaggtccttgacaaagttttcctccttttccgacaactctgatgggtgacatttggagcacgttgttcctcacttgggacacccatggcctcctgagtggaacctgtttctaagaattgtgaggcccaggccatggggcccgcagtgtgcagtcccgggtgccagggtctgatgtggttacagagcagcccagtaagggaccgtttggaaacattatgtctcacaggcgggggaggttgatttctccctcatgttgaccttgggccctctggctggttttgaaacagcaggataccagcagatgagagtgggccgggtctgagtagaggttttgagagcagcctttgttctgcgcctcctcctctgctgtgacgtccagcacaacacgaccatggttaggccacaaccccctcttcagcttgggcccttgaatgacaaacagacctgagaatgaagccaacccaaaacctgagcacagccaagcctagagagaagacaactcacccacagacctatgactgagaagtaaatgtttgttttataagccactgggaggttgggttttatgctttgttactgaacaaaatctaatacatctgtgcaaggaaaagtgtcacacccaatgccataaccaccttccccctgtgactctgagaacacttgatacagcaaatgaacaaaaac

SEQ ID NO: 1245390 - DNA, 4001 bp, Homo sapiens
taacacatactattttctgttgtactataattataccaaggcgattcctgtctctgcagttaaagtgtaagattctaaaagacgtggggtacaatgagtggctttcaatcctgcctctgctactacctggacaatgtatttaacccatttgggcctcagtttccccatctgcaaagtggggctaatgattcatatctgatgtggcctaatatgagtcttttttgggagagtgggttctttttctatgcagcccaggttgtgccttaaggggggaggaccggcactggggctacttttctttcctggagtttcacccagcgggggttcctgagcctttctaagcccagagaggatttaactgggtgaaagaaggggaacggagggagtggagctgaaacttgaacctggcagagcctttaccacctccaagccagcgcgcccctcccccttccaaaaaatcttctatctcatctggagaaactgctcgattgtttcaatcacttcctttctattttcaaaattccgcatttagaagaactggaagtggtctgccactagccgaccaataagtcgctggagtggggcttccttctgcgcgaagctgggtaccagctattaaaagaaagaaggcagccgcccgctgcccacccgcctgccggcacagacacagccaggacaacggaagccaggaacagaaaggagcgaccctggagccctcaccacagagcacggcgtgggggacccgacgctggatgctccgcgcggggtgggcggcgggcaggggggcgtgggtgctgggttagggggaagctctctccatcgtccttcccaggccagccccgcggccgctgcgcccgcctgcaggaactcaggcgctccagtgggtgacgccggcccgggcgcccgcgggagtggggacgcacggggtcagtccttttgcgccacccacaccgggccgtctccggagctgagagactatagctcgactcgcctgctcgggtgggagtgctccccatccactcacccccaggttggagtccagggaagagccccccacccacccagctcagcgcgcgatttgagcccagggacctgacagggctcccgccgcgcgcctagctggacttctgccaatcgctcctttaatttctgcccgtatcgccggccctcgacttttgccaagttgccatggcttttgtcccccctccctcccgtccccaagttttgcatctgactctcaggaggaccaagcattcttgggggagacaatttaaactaccaaggtacacccgcaactccctctcggagtgcccttacgttccttcggctggcccctcgccccaaaggagcccgctggcgtgggccggcggcaatggggcagtggcgagagttgctctctgcagagttccagatcctctctcctatttcggaagaggtgcgtggccccacgccccgcaggagctccggcgaggctgggggagttgaacgctttgcggacgccgccacccgcgccagccagagccgccccgcggccacccggccacagggtccccgcagcgcgtagcgagaatgcccgcagcgctctcccggccgcccggaagggcttcctcccccaccccctccccacggcccggccgctgggctccccagagccccgatcctagcccagaggcgggccgaggccgccgcagacccacctggccgccccggggacgccgcgctcgtgcccgggccgtgtcctgagcgccgccagggtcccgggctgggaatccacgcggccgcgctgctcgcgggagcctgccgcagccggcgggaggttgtcattgattcgtgctgggcgagttaagccattccaggagtggttttgagagagcactccctccccaccctccaaccagaagtatttggccgggagcccctttggtccacctgtactgttaagcgcaggacaggacgatctcaccactcgcgcgttacgcttcactttatgacaccaaattaagatctttggaaaaggtaaagcagaaataaaggcaagggcggtggaggagcttttcttttcccctcttttcttccgggttcctccgttttgttttttgtgggtttccccccactctccttctctagtacttcacaaaatgacttaccacttatctcaaagcaagggaggctttttattattattgttttattcaattcagcgtgtctgtctttttagaggcaatttatttccatttgcctgaaacctaagcccaataaaattactagaattatatgttttctccttacagggtcgtgagtgtaacttaaccaaatcaaacactaaacagcaatcctttaagtaacaaaaaaaagagggagtgcaggaagtaaccacagcactgcagctccctcctccgttggagatcatgagaccttgtgggtgggacccacagacaccccttcccctcgaacaaacagacatatcacgcaggctgactcagaaatgccaactggagattccggcagtccacactggggtgggccagccaccaatcacagaggtgtggccaaacaccctctcccaggcctttccttcaaacctcacacaaacctctccttcgagccttcttgaaaactgccacctgggaggctctggccagctgggtgctgtcaggcctcttttaccctggaactgactggtcacctggaggaaataaccatttaatgccttgatacctctgctgactgttctcagaaatgggggaagcgccaggggagtgaatctttcctgttgatcatcttaccccggtgccatggaaaataagcacaaaacaagagtccaacgaggtgcttggccttccatggcctctgccactcttctccggcaggccatgagccttaaaggatcctgaaaccagaagtaaatctcaaaggtgcattggccatgaaggtccagggatgaggctgtgctttgcagagccccagaaagatggttcagacaaaactatctcctccaacaggtgccccttgcctgaaattccaatgttagagattcattccttctcggggtatgccctgcagggagcctgccccagagaggcagggaaacttgtgtcaggaaggcaggaaaggtcgggtctctctctgtggttccctctaaaactgtaaatacccaccgctgcaggcaggggagcaggcatttccacaatagactagaatgcatctgtcaaaccctccatgctgtggaaagagggctgtggactgctgcgtgaggggagagagaggctgggcagccaggatgtggtggggagaggctgctaggtcagggaattgggtgctgaagggaagaagcaggggtgcttcatcagagcaggtggacagtttccaagattggatgactccatagctttttatcaaaaaccaggtactcccggaacacccaagacaaagactgagaagtcaaatccctttgtccacaaaggcactagttaaatatccaatgaagcattaactccacactccactcccagaccccaggaggtaaaggtgccaacacatgacctggatggaatcagtatgaatccagaagtgtttgctgtgtgcccgtaaagggtttgcctcagcggcctgggtggaggtggggtgggtgcagtggggtgccaacctcggagcctctcttcttgtggggcagataaagcacaggcggactggagagtggggcaaggtgcatccagcaccctgtgggtgcataaggaacagggcagtgcttttgcagagcagttagtaaggcaggctcacagggacagggctacaggaggagtggggctgggcaggcctggaagatggtgctgcagggagcaggagaggagggcatgtcaggtgcgggagtggaggcaggagggggagtcactggggaaagccagcagctggcctggttcagagggttcactcagtagttaagaaaacaggagggggtctatgaggtagagccagtttatgggtgcagcttctggctgaaa

SEQ ID NO: 1245391 - DNA, 4001 bp, Homo sapiens
tccaaatcaacacctttcaaaagcctgtgaccccacaaataatctcactttacagttctcactcttactgaaacctactccccaccttcccatggaaaagtcctcctcaaagactcactggaccctaattatcattaaattgctttcatggctgtaaaaaaaattcatctttaatgtttgcgacaagtgtctcatctggattctcgtctactacattttggtgtttaagtgattcttttgggcaacattaacgcctatcgtaaacgctcaacaaatatcccggaaccccaatctgtaggcaggaatcaagcccgtgagaaagcgcgtgtgccggagggaaaaagcatcccaggccgcgctagaaaaggtttctctccccggacaacctgcgttactactcatctcagatccattcgcaggtctctacgtcagatgtctgctgggaacacaagccctcagagcagaagccacaaggacccgtacgaccccttttaactcaggcacacactgggcaaaaaaagtccctctgtgccaaagacaagggcagctcgccgggagcgcaccttcaggacaccccgccgagggcccggcagagcccggagacgggaggcggagccccggccaggcaggcggggaaggacggcgctgcctggggctcactgcggctggctctcacacaggttcctccagcgcccggcggctcccgcaccgagcgctgagatgctcagagccaaaaacgtcccgacacttttcctccgagaggggccccgggcggggagctccacgtcttccgtggcaacaccgtggcacggaagggacttctagagcattctgtgatggcgggtggctgtgtctgccggggtgtggggtggggtgggggagtggaacggagcggcccagcgagacgaagctcagccctctggcgctgggagctgccgggtggggattccgagccacctgcgccgggctggggctcgggcaaggggcgtccgagagcgaggccggggaggccgccggggcagcgatcgcaccgcgagtccagggaggctccgtgcgccttacctgggccctggggccggcaaacttgcacggctctacctccacctccgcgtcctcggggcccccgcggagcgcggcgcggagcctctccaagtgttccctcagggtgacccgctggtggaaggagaaagccgggtgcagcgaggccatggtgaagagcagcagcagttcctcctgggccctggagccaagcccgccgccgacccggggctccacaatgccgccttccgggcctgagccgtccttctcggcgtcctgctcgccgtcgccgtcctcgccgcgctcgtcctccgcgccgccccgcgagccctcgccccgggccgcgcgcaggcttttgagcaccgagtccacctggggtagcaggcggtgcagacggccagcggcctcccggttctccgagcccagcagcgccaggtagacgatgaggcgcgagcgcaccgcgggctctcggaagtcggccagcggccccgggtccgagaggccgttggccttggcctccgagtcgcgcaggtagtggtagtccttgcgcgccaggtcctccaggcacgagccaaggaagcgcagctccagcgggttgcacaggtccagcagcccgcacatgaactccaggcgctgcgccgagcccagcaccagcccgaaccactcgtatacccgctcctgctcgcgcagcgccgccgagggccccccgccgccgcccggcatacccgcccccgccgccgctccaccagcaacaggcggcccgagtccccggggcggcggcggcggcggcagagggccccgcgacgggcccgcgggcggcggcggcggcggcggggggcggcagtcgcggcggcggcgcgaaggcgccttcgcgcccggccgcgcgtccgcctcgggctcctccgcctcgggcggcggctccgcggggtgcgttggcttcagcggcagcttcatcctcagcatcctcggctagggcggcgcagacatgcgagcgggggcgggcgggaggggccgcgaggtggagcacgggccgaggcggcggcgcggccgtcaggagcggggcccctccatgccgccgggggagggccggggccgggggcgggtctcggccggcgaggggggcggtggccggccggcggggtcgctggcgtcgtcttcccgggctgggggcggggcgtgcccgcgacggctcctccccctgggctcctcgccggttctgggagcccgggtgcgggtgggagcaagcgagcgagggtgtcctccttccgcctccctctctccgccgtccgcgctgagccggggcggcggtgcctgagctgttccctcgcgagccggtgaggacggagcggctgggtgaggaggtggagcagccgggccgggcggagaagcttgcgggctccgcgcacctcacctccgccaatcagcaccgcgaatcgacggtgacgtcgctctccccgccccctggggggccgcctttctccaggaagccacgcccaactgctggccggccgcctccctctcggcggcttccgtgcggtcctaaaggctggtgctcggcaggaggaggacgcgggctggggccgtggggcggcgtgagggtagcccgggagcggtgaggagcgtgcgaggcccacgtgagcggagggacgcggccgctctcacctttcctgagggccctggcccggctttggactcctgattctcctctgcttgccagctgccgccccgcctccgccagtggtgcccgggctgcctgcgcggccggagtgaacgcgtcccgggagcaggggtttctccgaagtgagtgcgccagccccgggacgagctcgttcgagtcctcaccgcccagtgcacttcctgaaagccggcggtgggctgtctcccaccttgtgaaactttgccaggtgtcgctcacaggggactgggtccggacgcgggtggcggcgctggtttgcggccccggtttgcggccccggcgccgcgatcccgggccgcgcccacgcccaggctggaggcaccgtgcgcaggtggggacgcgcggccgggaggtgcgcagcgggacccggccggccgagggtgagcgctgctggggacgctcctagtctgtaacgctctgtgaaaattatttcctggatagtttaggaaaagcctctcccttccccgcccctaaacctctatcttttgggaatcattgatttgctaaatgacatttcggtgcctaacccattttgaatccttgttctgctgtgaatttcatgtgactggaggaatttaataagctaccaacttgacaggctttaaacttaaaaaaaaaaagttttgttacgtttttcagatttaggcttccaagatgtttacactcgcactgttacttttttttttttttttttttttttttagcaacatagtccaaatttttaaaactcagctggatcttttgagggttaattaaaaggtgggttaaaaaaaatcttaagactttaaatttagaagtcctactacagctatgtagtaggagtatgcagaaagataagaatcacattgtaactctttgcggtggtgctggaacatctgttgggagagcatatgctgaactctgttcacctcacaagtttatgtcctaagaggctcattcacagttcagtaaaagggtgaactgaagcctgaatcagtttcggggatgaaagggtgagagggagaactgttttcagcacatttgaggttggcaaaatatataaaagtcactctttcttgtaatttgctagttctttacagtctttagatgtaatttacagccaagaaaactttattatgaggacttatacgtcattgcccttttttgctgtcaccctcaactaccctgggatcttctactcatatctcatctcctgttcccacttttctaaagcttagggtgaaatacttaggcaactagtaataatattaatcttgctagatattca

SEQ ID NO: 1245392 - DNA, 4001 bp, Homo sapiens
cagcctgggcaatagagactccaactcaaaaagaaaaaaaaatcaggtatccgctctgagcttcattcccctatctgtaaaaatccctacatcccttgcagagttttcttaggaatgaaattcataatagggcaacaaagaaaataaaaccacttcacttacgagaaatgtgattaacacagtaagtgatagagcaatgtccctcattttggtttcaggaccccttgatacattcttaaatgcagccctcagctggaagcagtggctcatgcctgtaatcccaaaactctgggagactgacgtgggagaatcacttgagcccaggagttcaagaccagcctgggcaacattgtgaaaccccatctctatttaaaacaaaacaaaaaaaaagaggccctagaagccttctagtttatgtaagttatatctattgatgtttgtcctattagaaattaaaactaagcaatttttaaaatatttacttatttaaaatgtctactacacattaacataattatttttatgaaaaatatgtcttccccaaaaatagttaagaatggttttcatttttacaaatctttgtaatgtctcgattaacagaagacagttggattgtcatatctattctgcattttctctggtgcaacctgttcttcttgactgtgatacatgaaggtaatacagcctcactcttaggcaccgccaccaccacctagattcgtgctaagatgtcagcagttgtgccaacaactgcttttgtacaattagtgcaaaaattaacagagtgaaaaagcctaacagtcttagtctatgatatttaccttacagaagcctgaaaacatctcagggaacccccaggggtccaggaaccacagtttgagaaccactttgctacaggaggactggtgttcagaagggaaaggtaacttttaagcaggtttgaggaaggcctctctgaagacgctaaatcacttggagccacaagactagcaaaaagtgcttctcagactaggaaatggcaaatgccctaagacaaaaactaatgtggcatcaaggaacacaaaagactgcatgccagagcaaggaaagagagaagagtcagacaaggcccgatcaacaggatcctggaggaatgggtttctgttaaagggatgaggaagccaatgcacgcttttaatcagggtgtagccatctgatttacatttaacaagttcatccacgctgacaagtgacagatttatttacaggagcccaggactagcagggcccaggaagggggctcctgcagctctccagcccggagagggaggctgggtcagagggtatctctggagatggaaagaggagggcccactggaaatacattcccgaggtagaagctgcaacactaaattaggaagtgtgttgggggataaaagaaatagaataattcttgaggcctgagggtgaaacaccaggtggacagggataccatcggtgagatggggatactgggggaatgggtgccccgcctgtggccgtggaaattttacattctttctctatcctaagccttcttccaagtaactgagacactgcaccttacattatttttggcagatggcatactaacaaaacaattaaactaacgaaataaggtcaaggccaaaactcaaaagcgggagaggcaacaaagacttccttaaaggccagacaccatcaaccattaatcaaaattctgagcactgctgttatccaactacaaatctgcatacctgggtcatggtgcagccaacatctctccagcagcccacaaaggcccatgaggtgtgcgaaagctcgctgaaacgcctgttggtcaccaacgtttccgtaatgtgcacgtgtgttaactctaccaagtgcaatcacgacaagaattcctggtttggtgtggcctatgaataagtttacattgattcctacccattacctctttcttcctaaacacaaaattaacacaatcctttgtagtttccaggcccgacctttctctggggcacctgtgttgtttggtcacaagctctttaatgagcctcagtttactcatccccaagaaaaggggaacacttgagtcactaagctaaacagttaaataaaaatcaacggcagtcaaggtataacccaccgactcccatagggagtcctaggcgcccactcccccttagaacccccttcaaaaccctttccaaacgcggagcgccgctccagttgcacgggtgaccaggaccagggaccaggcctgcagggggagactcgcgtccaaggccgcacgggaaccacggcgcccgcgagaaaaagcgcggcgccccctaccccactgccctcgacctgggaaccgcggcaccggcgagtgcgccccgatccccctgcgcaggaaagtccgttcctcaagctccgggctggggctttggaaggcaagtcaattcctgactgctggaagggccagggtctgggggtgcccggttgtgtgtctgcctgctcttaaattctgggcctttctccttccttggaaaacaaaatctgagttatttcatgactttagcaaagtaccatggagaataaattactggggaaaacacttcctgacgcctactgtgtgcacgatctagcgctccccacataacactgatgcctactgtatgcacgacccacagcgctctccagaagctccaggttcaagctacccggatcacaatggtgcctactgtttgcacgacccacagcgctctccagatgcccagggttccagccccccggatcacaatggcgcctactgtatgcactacccacagcgtctgcagaggctcagggttcaagttcccggatcacaatggcgcctactgtatgcacgccccacagcgcgccccagataacactggagcacactgtgtgcacgaccctgcgcttcccggacaacgctggcgcctactgtgtgcacgaccccgcgctccacggcctccctgtgggccgagcccaacgtccccggggcagccggcgccgcgcagggtcgggcgggggcgccgtccgggaggagcccggggcgcggtatccgcaggcccgggctctggccaggccgcctccccagcgcgccccgcggccctccggccccgggacggaacacggggcggccactttccctcaagttcagcgcgggccgcggcagggccagcgggggcagggcgcgcgcaggaggcggccgcctgctccctcacccgcctcccgcctcccgcctcagccgccgcccggcccaggaaagtaggcccagcgcgcggaggggccgggcggcgactcgcccgtatcattccgcccgcgctgcggcccgcccggccagtcggcggcggcggcggcccgggtctgcgcggcccccgcccccgccccgccgctcccggcgccccccgcgccgcatccggggactggcagggcgcgggccccgcaccggccgccggcggggcgcgagggcgcggccgcgggccttaccggagtcgccgcgcgccttgctctccctgggcttcggggggcggccccgcggcatcgtcggcggcccggctcgcacccacacccactcacactcacactcacactcacacgcggcggcgggggcgcgcacgcgcgggcaccggggcgggggcgcgcccagccggcgctagaggcgggcggagctgcccggcggcgggcggcccggtccgagcgccgccgggctcacgggggaaaggcgcctgaacgcgcgcaccggagcgctcgaaccgcgccggccttggcaggttccatggcccgcgggccgcggtgggggcgttgggcgcgggcgcgggcgcggtgggggcgggggcggcggcggggcgcatgcgcggcgccgcggggccttagcggacggaggggagcgcgggggtcaccgggccgggccggcagccctagagctcggcctggcggggaccctgggccagccccgcgcctccgtggcccgggcgtctcgtgcgtgtccg

SEQ ID NO: 1245393 - DNA, 4001 bp, Homo sapiens
ccactcactcactgacttcttagagcaacttccaatccagcgaggtccattcatggtaagtgccctgtacaggcatatcttttttttttttcaaacattttatatcatattttactcttatcttttctatgttttgatacacaaatagttagcattgtgttacaattctctacagtattcagtacagcaacatgccgtaccggtttgtagcctaggcgcaataggctataccagatagcctaagtgtgtagtaggctacgccatttaggtttgtgcaagtacattctatgacgttcacacaaggatgaaatagcctaacatatttctcagaccatagcactatcgttgagttatgcatgaccttatttactatatggccgcttacagaaaaagtttgccaatcatgacctactaagacgacaaaccctatgtcaataatcaaaagaatccaagtaagaaccagactacttcagtgctttctaaatgtgcctgaccctggaacgcattatttccaattcaggattggtgtttcctgacacacacaagtcaactcaaaaggaaggttcgctttattattatgtgcttaaaaaaattttctttaccatttaaaaaatatttttaaggtgtttaagaactccttggacttatatgtgaaaaaatgttcacttgctgagtagcagatcacataatattgaaaagatcatatgtgaaaaacatcacataattttgaaaaattatcttgcacataatacgtaaatattcagtcttccaccacaccatacgtacatttatatttataatgataggcattaatcacagaaacttctattaagaaaaggcactcgcataagcaccttgacttcctgcagtggtccagtgtcttgtccttacactggaggactcacagtttccccagcttctaccttcagtgaaactgtatactgcttctggacctttattatttgcacgatcatgcccgtgctgttgtttacgacacatactagcaatgagccattcagcctatttatttattcagggcccaaaatctgaacaataacaacttaaaaaaacttattgtaacccaagcaagatgaagactagaatcagaaaaggccttatcagacaagtaatacatactggtttaattaaataccctggagtgtggtggccttatacataaggtctagccaacattcattcgttcctattccaagaccctgcttatcaacggtgcaagtatttctacataattttctcttccttttatgctgtagagcataccgcttgtgggaaatggagggaaggcccacggtcccgacaatgtttgggcagggtacctcgtcccaggtggatcgcccaccttactgctgcatagacctgctgtgtatcccggccccggccccggccccggcccgacgtcctctagcccctcttcccagcactcaggaccgcggatttcagatgaccaaaggccaccctgtgacaacagcgtcggaaccacggcacttccgcctgcggccggtgagactacaaatcccagaagccccgcgcaagtctcgtcccactaccaccccctcccatcacgactcccagaaccctccgcgagacgccagggcctcgaaatagaacaaaaccggccggtgggggagggggaaggtgagggtctcggaggacacagggggttagagagctctctgcaaatgccgaagacccaagcaggcctgccgcctacccctccccgccccacaactgctaggcgcggagaccgcggcctgttccccgcgcctcccgggaagctgaggaaggtcccggacaggcttccccgccggctcctgctaagaggtccgcagaccctagcccggtgtcccccctccctctcataacgttccccgcacaccggcgcaaacctccggctcaggaaccgcagcagcttcgctgtccacggcagacgcagaaacgccgttcacaagccttttcccagaagcccccggcgcgggctgcttccggtctgcgggcctgaggaggcggggagaggtaaagcccacgttgccatggagaagcgccccgggcgggggaggggcggccccacgacaatgaccgcattgaggctgcgcttggcctcgcgcctctcctcgaacagcccagcgtcctctggaccgtttaaaagaaaacataaagaggactctaccattaagatagtccttacaatttcgcaagccctttcacgtgcattatcttgtggatcctctcagtaatcccctgcaagaaggaatgaaagtgagtgtttgtgaaagcttactacattgtgccaggcgctctcgtcgtgctttacatgtcatttttttttccacaaataaatgatgtaggaactttcattatccccatttcacagctgagatagttgaggcacaaatacagtaaataacctgacaagagctcacaactcatttgtgggtagcaagatttgaaaccaagacgtgattcaaatctttggctcccactagttatgtcatggagctttattccgacctatttatctgtcaggaaaactagataagacaggttaagagttttggcagtgatgtcacggtgaatttgtagaatgcatggtcatcttaaagctgggcattttataccataaaacaactgctgacgcgatcatttaaaattacaaatcagaccacttcactcccctatttaaagccctccaatttatgtcataataatttatgacataaaaactccttataatggcctgtaagtcccctgtggtctgttgcctgcccgcacccccagaccctggcgcccccagtcacctcagctcctcggctcattgtggcccaagatcctcagcctcaccacctgcctttcatggcgcatgacccttcatggcactgttattaatggaagtgatctcatttatttacttgttttattttttgttttgttttgtctttaagtcccttaagggcagggaccttgtctgtcttgctcaccacagtatcccatcctagatcctggaagctgactgcctggtaaatagagaactcaataaatatttgttgaataaataaatgaattgtgggatggttacattgctgcctttagctaggtcacatgattggcatcagacaccacacaaaggagccctgttgtttaaggactggtcaaaagtgtagatccagcctaacataagcatttcaagatcctcaggctttgactttttgcctcattggagaaaatgccctctgaaaagtgccgtcaggctccgctggattcgtgcatgagagagcaagtgagcgagcagctgatggtataccactgcttttcattccgaccagagctcttctcacaacccctgctaacacttctctccattgcaggaagcttcagaagtacagccttttcactctgctacttggatacggcccctaagcaacttggctgctcttcccaacctttccctcttatctgatttgtaaaggctagctgaaggcatttttgttttaagagtttttacatctaattaatgttggaaaacaaaaataataaatctgaaacctaaccttgaggaagttaaaaatgttgcaaaattttacaaaacccttttcctgtgattatattgtttgttttgtttttgagacagggtcttgctctgtcacccaggctgtagggcaatggtgcagtcttggctcactgcagcttcaacctcccagactcagtgatcctcccgcctcagcctcctaactgggcattttataccataaaacagctgttgatgcaatcatttaaaattacaaatcaaaccacttcattctcctatttaaaggcctccattttatgctgtaataatttatcttgaaatgcttatggaaggctggacttacacttttgataagtccttaaacaacaggtgtgctccaccatgcccagctaatttgtttgtttgtttgtttgtttttcagagatgagttcttcctatgtttcccaggctgctctcc

SEQ ID NO: 1245394 - DNA, 4001 bp, Homo sapiens
atctgaatgtatttctatttttttccatatccatattacttacttaactattttaaaatacttaggttgtttctaatttcactattataattaatgctgggaggcacatctttatgaatatactgtttttctcctttcaaagtatttctttcaagcatgtcccaaggcctctgcttgttgaggatcaaaggagaagagcaaattctgtcttgctatgtattatcaaaatattgcacaaagactgtatcaattcacaataccatcacaatcatagtgacttgtgagggcaacgatttcttcaagtattattagctcgttagcaacaaagttggggggggacggcactttcctttgtatcattttactgttaagtatcaccagtaactaatctcattttgttgttgttgttgttttgttttgtttgagacagagtctggccctgttgcccaggctggagtacaatggcgggatcttggctcactgcaacctctgccttctgggttcaagcgattctcctgcctcagcctcccaagtagctgggattgcagacgtgtaccaccacgcccggctaatttttataattttagtagagacggggtttcaccatgttggccaggctggtctcgaactcctgacctcaggtgatccctctgcctcggcctcccaaaatgctgggagtacaggcgtgaggctctgcacccggtctaatcatattttttaaattgggcaggaggtatatgatagtgtttgtacaacttcagcaaatgatgactactttaaaaatcttacgtgcgcctccgtcttccatcgttatgtatcctgccatttgacttattttctcacttcaccaagtattgttctaggccctgtataaagcctgtgagttcataaagttgttaccaaataaatgatacaactttacacaatgatgtgctatgaaacaaacaatagcagacacacatattaacagaatttactatgtgccaagcactgttttgaacaccttagtaaaaataaacaaaggttaaatcctcataaaagccctagattatttttacccccatgttgtagacggggaagcagtcacagcaaagccaggtactctggccaagggcaaagctggggtctgaacccaggccgtccacatttatccatggtgctgtgtggttagaggccataggcagcaggggcccttgtggtgacccctgcgcgttgtctcagcgcagaggaggaagtggcggcaggcagccgcgctcccagatgaagcggggccagaagagtctggggaacaagacctgagaggtgggaagggttgaggccaccggtttggagccgtcaggtaccctaagggatatatgagggaccccggggctaaagcagcctctggaagagagtggccgccctgtcacttcagcaccaggcgcagaatctgtgctaaacctgaggtgagggtaaggaacccccgacaccgcacgacaaccagaaagaacgtccctggaggggaggcttcgatcaaagcctgggacgcaggggtctttctgcaggggacgccgctctcggctctaccctgctgtggtgggccggctctgggagggctggcttccgaccatctcccgacctcccgcgcccaccgcgccgcgccgcgcgcctcccaggctgggaaccgccggggcgaagcggcaggtggcgcgggttcacctggcagggcaggcgcccggggtccgccggggaaggacgaggggaaggggtgcgcggactcaggggcaggcagcggaggggaggggcctggggatctgggacggtgtaagggtgctgcacttgcgcgcgaagggaggggtggcgacgagtccgcggccgcctctccgcgtcccccttccaccacccggggaccaccgcctctgaccgcagcctgggggccctaaagaggcctcgggtctcacctcccgacgccgtcggggagaaaccggggaactgccagctgcgcaacaacttccggttctggtggcgggtcggggcggggcccggaacgcggggacgttgccatggagaagagccgctgtggccgcgcacttgggacagggaaagagaaccgggaggctcgaccggtgggaatccagctgctctgctcagtgttccgttcaataaactagcattgttgcttcgcaaagtgcttttgcttacattattcatttactccggtaactcagtaaggttattcccattttacagaaaataaactcaaatgtcctgtgacttgccaaggattacagagaggggcgaatgctgtgctgtctaccgctgagtacaatccctaataccattcccactcccgaagtggttacaccccaagtactgacgttttaagggacaagtttgacatccgcaaccccatgctttcacaggagaacacaatggcccttgaaaaagtgagaactgacccacataaaatttgttacaatacatacacatatctctcctcagataatcttaatctcaattgaaaaataagtttgaggccgggcgcggtggctcatgcctgtaatcccagcactttgggaggtcgagatgggcagatcacatgagccaaggagttcgagaccagcctggccaacatggctaaaccgcatctctacaaaacatacagaaattagccgagtgtagagacgcatgcctgtagtccccgcttcttgggaggctgaggggtgaggatcacctcaatctggggaggtggagactgcagttagccatgattgcgccactgccctccagcctgggctgcaaagtgagagcgtctcaaaaaataaataaataaataaatttaagcctaaatgcaccacagccccacctcgtgacttccttctctagcccctttccctagggactcctggaaaatgtacttgtactcgtaactgaggaattagggagaggacggagatgcttgaaaagcacttgctaattaataaagaacaataacaaaaaatcccttttggtatgacgccgccccaaaagtatgttagtactggaatctgaagtgaagaaagaagaggctggtttactcagtttatgacgctaggggactagggagaggtttggatcccaattagagtacagtaaaactaaatctgaagaaattcttgcttcaaacaaggggctttcacaggataagactttttgctgatgcagctgccaacacaaatagcaaacagcccaaaagtgcaggtgggaatgtgtttctggcgctggtgggtagggtaggttaaatgactcacgtcaggggagaatttgaaacgagggcaaggcttggcagtggtgtgaagtcacaggagacaatttaaggagaatatgaacgacagtcagaagcttcaaggagaaggaggaactgtgggatgtggcaagaggtcagggatgatgaattcatgggtatggtccaccaaacagccagatatcagaggccaaagttaaaaacagcaacaacaaaaaagggagcagacataaaagattgattagaaaagtttcacagtcaggtagttagagcaagaacaggtttttgtttgctgttttaattttttaaaaattttgggggtaaagtgaaaagaaattagcaggaataaggtcccagtagggtgagcacctactatataccagttgtatcgtaaacaccgggaattcaatggtaaaatatagattcttgccctttaggggctaatagactaagtaaagagaaagatgaataaattgacttttctaaacaatgtggcaacattctgatggagacaactgcaggatactataaaagcacaaagaaagggaggtcctgggtagagactgggattggagttgatggagaaagctggtgttgatacatttgagactgaggtaccagtgtgggatgttgtttagatttgctggattaaaggacagcaggatgagtggctgaggatgaggctgaagaggcaaacagcagcctagttttaaagggtttgacaggccaagtaaagggc

SEQ ID NO: 1245395 - DNA, 4001 bp, Homo sapiens
tcaagggtatagacaagtatggctctattagtcacttcaggttagggttcagtagagacataaaaatttttatcctactgttatgataccattacatgctccaggctgtaaattccttttcccacatcacttttctccgttcccacctgctgccctgggtcatcaaactccctctctaaatcctccaacagggtcacagcttcctcgccgctttctggattatgttgctgaacccagatctgcagctcctcaggcagaatgctcaggaactgctccagtaccagcagttctaagatctgctcctttgtgtgcaactctggcattagccactgatagcaaagttcctggagtcggctcagagcctcccggggcccaggtgtctcctggtagcaaaattttctgaattgctgacgaaacaattcttggcaggattgagtactcccattctgcttaaatttctcatcccaggaaaagttatcttctactttcactagtattagttcttgttccggaggatcctgaggtatcagggttgaaatcactccagattccacagccattcttggctgaaacagcttagcaaaaagctcagtacaactggttctgtgcttgcgaaggagtgtgagtaatctcttctttcctgaaggatataaaagcagttaacttacagcaatcaataaaatctctaagtacttgtaataagaaagatgagtaactttagtaatatattgaaagggagtagatttggggctatcactaaataaaacaataatgtgatgataaactaaaaatcattaacctcaattagtgtctcccattatgaagaattcctaccactaatgttagaaaaaactattttagaagcctaagaatgtgaatgcaacattaacatcaatcacatagtgagaaaatttcctttccaattctttcaattctgattgtatcaaggagaaaagtctatctttaacatgtatgtattaataaaacttgtagaactctcttttaaataaaatacaggcttcagaatcagacttccaagagtaaaaatatttaggcagaatttagtaatactgattttaaacatttatttttacttactttctatctaaagcaagtaatgttgattttcatttaaggcagtaataacgtttttttaaaagttcacattaaacatgagttgatgtaaatattggatatttgtcatttgatcgcatttggtgtttaccgaattacttcaacaaacactgaggcacttactgagcattaagatttttgcttatgaataaacgagtctacagaggaattgaccaagaaccaagacgtatctgtaaaatgcttaccatgtgttcaaaaacatgataggtatcacatacacaaaagcagcaaagagatccgtatcagttctgaaaaagcttagaatatcccaagactaaaaatgttcaaaagcaaaatatggtaacaaataggtattaaatgttgtgacacagaccaaacttgacctgcttttaggatggcgagatatcgataggaatgtatgcccttagtttgtcaggacagatgagtaaaattcattcctcacactacggttaacgttaagagatgaattaaaatatttagcctacaaatttaaggtttaaccagtccggccgcactaactaactaactaactagcccttctatttttatatccttggttaaaccgcagcatttacgaagtcacggggtcagcggaactgcgttttcctttggaaagcaggagtttgagtgctggcctcctctgagttccccagtcgcttggagacgccgcgcgggccaaagggccgcgacctggggatgggcaggccgaggagcggagctcctccactgtccggcgcgcgctcccaaccccacctccctcttcctaggggcccacgtccctcaccgcgaagcccaggagcggccaggaaatgagccacccaccccgagctgcaagccacaaagaccggaagtgcgcgtacgcagtgttccgctctcgcgcccttcgggtcctccgccgccccgccccttgctctgaggtagccaatcagagccgcgggctctacagtttccaccgccttctcccggtagccgctagcccggcggaatctccaaggccaggggagggtgcgctaggagtcaggggtccttgtgagcggcggcacctggagggtcccgcatctcgcctgggccgttcccaccctggctttctcctggcaccacccatcattgttggtctcaagtaattcccgaatctcactcccagttttccattaaaatattcagattttcggccgggcgcggtggccgaggcgggcggatcacgaggtcaggagatagagaccatcctggctaacacggtgaaaccccgtctctactaaaaatacaaaaatttagctgggcatgttggcgggcgcctgtagttccagctactcgggaggctgaggcaggagaatggcgtgaacccgggaggcggagcttgcagtgaactgagatgtgctgcactccagcctgggcgacagagcgagactctgtctcaaaaaaaaaaaaaaaaaaaaaacctcagattttcctgtgattccagttcttttccgacaaaagtaaatgtaaggatgaataggctgaacaaaaactaacagtcacttatattgcttttgcctatgagtatcactggagccttacaacagttctgtgctgtggctatataatcccaaatttacagccgtagacatcgcccaaagtcaggcaacttgtgaccagggacgtccacgtccccatagttcaaggagactggtatcgtagactcctggagcctatcttagggtcttcccgttcttcagtggaagcttgctggtattgtctcactgtttaaatttttctttggctatttagtcggtgaaaaatgatgcctcatgtttcaactttgtgagcttaagatagtcccccttcatgtttactgaccatttatggttcttcagagatggcttttcccatttaaaaaattaagggagtaagatttttcttttttatttgtgagaattttttgcttattaaggatagcaactcgtttgttgcaaatcgtttcccatttatttgtatttatttttaaaacgttacattttacatgtttaaatgttacatatttttaaaatgttatattaaaaaagtacacaggataataacaaagcgatacatacatacatagaaacaaattctcctttgtgagccaagacttaaaacacatatttgagaaaaatgttcgttagcattcaaagctattagtgactcactaaataattttatcattgtgaaatgactacagcaattttacaaagcaaaaaaccaaataatattaatttgtttataaattatcaattgcttcataatgaaccacttcaagacttagtgactaaaaacagcagatgttttattgctcacagttctgttgccaggaattcaggaagggcttagcggagatggctagtctgctttatgatgtgtcagctatcttcacttaactggggtggaaggtccaagatggcttcactcaaattgctgaagtcttggtgttgcctcttggttgaagttacttgattcttctccacaaggcctctctccattcaggagtttagcctaagctttcttacatggtgactggcttccaagagagttaaggaggaggaaagatgctaattctcttaaagcctgagtctggaactggcattatatttttctgcagtattccatgacagaaggactagaatggtggaaaagggaaatagacattaagcagcttgatcataggaggaaattttggcagttatctttgcatccaacctaacacaccttgttatattgagaaacctactatgtaagagtgaaactattgaaagagagaaggcatatcagttgaaatgcttttggctgcagtaacaggaaccttactaaatgtccttattgttcaagccttttaaaaacaaatccta

SEQ ID NO: 1245396 - DNA, 4001 bp, Homo sapiens
agtctttggttgaaccaatgaattaatatgcttctcggtggctttgtgttcttccacatctttttcagacaaaaagaacagattacaaggggtgcaaagaaaatgcatattgtgcttttccttcatgtggtctctaagatttatttcatccaaggatataaatgaacaacactgacaactcaggacagaagcagtttgctgatgctggttactgtgcaaatgttcatctaagtcccttcttgacatactagagaagtcacaagtacggcagtaaaatttcatctctctggcatggcaccttttcacatggatttccaaatctgtcctatttgtagctacttgcccacagtctgtacaagcacacaacgtctgagagccagaagctggcttcactgtcagggaatgcagcccggagtccggaggacgggcactcccctggccctgctctgcctcctgggtttctgaggtagtcacacacactctctgcacactgctgcacgcttccaggtgtttcagcactgattctgcatcgtgtgttttcatctgtgttctcaagtgtttcatatacatcctctgagtttcacttgtacctcttttaattcctaaaagattaaaccttttctttgcctggcccttcaaggtgaaagtgctgcttcgtcgacgaaagctattacccaacacgagaatatttcgctcaggtcttggcctcgaggttacactgttaccgtgtgctgcctgaagggtattttttgtagattccaatttctctaagagaccctctgaggttactaaggtgtctagctttctactctggttttcaggattctgagctagaccaagggaagtaacatgttcttcaacaatctctacttcctgtgacaaagtatttctggaaggcatcatttcaacaagaagctcactgctactaccactttgtttagaaatacttcctctgaaatctttaaacgtgcttcccacatttcgtaatccttttgaatcactattctttgctattgatttagaagttcttggttttgagtgaacattttttgttgccattgtacgtgattttttaggaaaaggttgttttgttaagatctgtacaaatcctccacgagcagccagattctgacgacggagatgtgttttgccaagataatgtgcattcaacaagttttcttctgaacactgaaaaccacaaagatcacaggaaaagaccttctgtggcccatgtgcttgtttgatatgcatatgtagtgctgagctgctctctgctttgtggctgcagtgacaacaggtatgttccttaggctgctgcatgtgagactcagcatgtttttccaagtcagagcaagaagaaaacaaatgcccacagatgctgcatttgagaactgtatctacattcccaatggtacaactaacactaatttctttcggggggaaaggagattctctttccagatcaagggaaaccatttcctgagcagatgttttttcagtgtctgttttcagagaaacaacatcaatagtgctaaaattgcaagaaggggagagggcatttgggagacatgtgcctccaactgtgcagtcactcagaaaggtctccttccctgtttcatctaatgcaatacccccttctgtgactgagctctcagaagtttctaatctacaaataccttgctttccagatttaaggggctctgcctcatctaatttcctgcgtttggaagcatgtttatttctgtcttctcctataacaacactatcagagttcgatgattctgaaaaacctcttttgcccatagaattctcagggaaacttgctatcacatcagatacaggcccaccgtcttcattatgggatgaaagctttgtcaagtcttgtgcttctttgtttatcttttcatcctcatcattttcgggtttattctcactatccatcattaataaagtgctgacgatgcttctatctaaggcggctcactggcactcataacctgtgaagtaaacaaacatggtattaaatcttgaatataaagacacacgtattagtctaaaactagatgaaaaagtatcatgaagttagccccaatgaaacaccctttatactgagatgaatttgattacatgtctaaagtcttttatcaaaaagtatgaagtaggattttaggaacaccatgtcaccctattgttgactccagaagaaatactatggtatctttggtagaaaaagtgatttctcaacaagcttgcagaaaaactcccatatttcaattctctgtaccagcatacttcaatttactacccttttaaaaaaaaaacaaaaagagaagctctcctttcaaaaaacatttcaatgagctcctactctgtaaaatatattaaaacaaaactgctgtgatgcaagtctagaagtgaggccttcccctccttaacctctaacagaagcccaagtcctatgtaaaagaaacataattttaaaacaactgtttcggccaggcgtggtggctcacacctgtagtgccaggattttgggaggccgaggcaggcggatcacgaggtcaggagatcgagaccatcctggctaacacagtgaaaccctgtcgctactaaaaatacaaaaaaattagccaggtatggtggcaggcgcctgtagtcccagctactcggtaggctgaggcaggagaatggcgtgaacccgggaggcggagcttgcagtgagccgagattgcaccactgcaccccagcctgggcgacagagcgagactccgtctcaaaaaaaaaaaaaaaaaaaaagacaccactgtttcatccttttctcctaaagcaaagagctttaccatgatttttctaaatatattccaatgaacaacacgtataatctcattacatatcaccattcgtgctcaagctcttttaccaatgaaaagccacttctagtccagctgtcaatcattaatttcctcatctaattgtcattttatattgtctgaaggttaatggcaaagggaaatgtcagtggtagagtagaattaatggagtaaattttgagaaaaaaaagaattttattgaataaaatgccttgaaatcaataatattgattttatttttcattatgctatttaattcaattaaaacatatcattttccatttactttacaccatgatgggaatgttcagccaaatgccacttgattccacgttaataaaaaggcatcaacgtattatagtctcaaggctaatgacaactattttaaactattttagctattttttccataacgttgacaaatcaaatggagcctattgctttgactcagctaaaatcaggcaacaaaaatatgcttataatgcaggacactggaagcgcgaacaatacgagaaaaaaacaagtaaattggacttcatcaaaattaaaaacttcaaaagacactatgcttcaaaagccactatcaagaaagtgaaaacagagcccacagaatgggaacacatttttgcaaatcagatatctgataagggacttgcatctaaaatatatttttaaaacttttattctcaatagtaagataaatcaatttaaaatgagcacagaatatgaaatacatttcttcatagaaaatatacataatacacatatgaaaagatactctacatcagtagtcactaaagaaatgcaaatcaaacccacaaggagataccatttcaaacccactaagatagctatactcaaaaaatcagataacaagcgttggcaagaatgtggaaaaactggaaccctcataacactactaaggggaatgtaaaatggtgcagccactttggaaaacagtctaccagttctttaaacaattaaacatggtgctagcatatagcacagtaattctacttggaggtatacacaaccaagagaagcaaaaacatatatccacccaaaaacttgtatgcaaatgctgactgcagtacttattcataacagccaaaaggtggaaacaacccaaat

SEQ ID NO: 1245397 - DNA, 4001 bp, Homo sapiens
tctttaaggagggaggcgtcagacgatatccatttaaatatattttgtacttccacaaaggatggaaagggaaattcacgaagggagtggaggcggaaagggagctccgagaaagaaggaggggtcattccgcggggggcgggggggggggcgggggccgacgcaggggaaagagttgctctctacaccgaaaagggactttgaccttccattgatctcgaaattcaaaaacgtttcttcacaggtcagattgtaacaaacactcgttcctaatttatgaactcgccgttttgattttattatttaagcatgcgccagcaatcgtgtttccttaagaaagaactgacctatttttggctggagataaacgatcatgttaacagatgttaatcttgtaatctgtttttcctgtaagcactttacctagccgggtttcagaccttaaaaataacatcttttccaaaaagacctgacgtcacaattcactccctgaaaaatcacactccccctccagtttcttcccctgcaatgatttcaaagacattaaatcttttccactttataaatgctgatctgttctgcctctactcccacaggctcttatttgcatttcaaattccacaggttacaccagtcgccttttcaaaaaatgtaaaccaacaatgcagcagcaaatggctttttgtgcatctggattaaataaagcacagaatgaatatatttaaaaagagggctgcgcaagttgatctttgcacacccggagacccggtgactctttatcagcggaatgagtaagacacacacacagcccccagagctcccggtctgctgcgggaagcttattaacgctgataatagatgaggctgacttacagacccacatttttcgggtaaaaggctggttccctctggtccctaattgcgggggtccactggctttcctcaccacacacataaactgctgcttttaaataccccactcggctgccatttaacaaacttattcatacaaagtttcgttaaaacttgaggcggtttaatctaaatactgatcgtaactattcagtctgttagttctccctggaaatggcagcggaggcgcctccccccacctcccgcccaaccacacacaccccaccgcattcttccttcatacacccgggttcatctcgccaccgaggcctcccccacccgcacccggcggggcgcagctccgaggagtccctgcccacccctctccgagtcggtgccagaccctcgcccccacccccacccccgcccgaacttcccttccaggacctctcacttctttaacgttagggtcacttagaagctcccagcagactggcaagcagccggggagggggccgtaaaaaacaaggccacccccacctccacgcaaacacgtcccctaggcagcagcgcgcggtgcccacaggcatcgatcccatccgccaaacccttaataattgaagcggctcctcgggcccgcagccccatcacccaccttcattagccggagcgttttactttaaagtaaggcaatttgctctttgtctcctaatggatggagagcgcatccgagctcccctcctcccgcgtcgcctttgacaaagtgtacaaagccagagcctcttccgcgctcccaccccggcccccaccccgcccctccactgcggtaaaaaccacctcccgggcgctcgccccgccgcccgaagttgcatcttcccctatcctggaattgacgagcagagcaactacccaccgggaaagccaagtagccctccccgcgcccggggggcccctccccggcgcacccccctccccagcgcctccccccctacccccagcggcgcacaccagagtacggggcacgtcggggctccgggccccgcgcccaccgcccgcccgcggcccctgcggcgcagccctccccccgcccgcggcccctaccttggcagggaggcggcgggcctggggaggaggacgcgcacgccccgcgcatctgaaggtgaagccgagcgcccgcggcgcggagccgagcgctgcactagaccgaccgcgccagctgcgcccgggcgcgggggacgcgcgagggcgcgcggggcccgccacgcgcccggccccctcctcgcgccgcccgcgcgcgccccggacgcgtccgccccgcgggggccccggcgcgagccgggctcggggggctgcgcggcacggggagggggccgggcgctcacggcccggcgcaggccggaggcttcccccagcctggaaatggtctgccctgtaggaaacgcacactccactattgtctcatcagcacaaagttctgccacactgaggggacagtctggaggcttgcagtgactcagacacagccaattcctcccctaatagcactgaatcacggttccagcggccagtggtcgcccctcgtcaaggtctaaggctgctgcagccccggctcccggaggccgtttccgcgcgcacacgcgcatccatacgtacagacgtgctcgggatgcgggtcccgccggcgggtacctgggcactgcgccccatctggactgaaatggggacaccccttcgggggtcccaggtgcgtgtgcattacacacggcgtagcgtgtgcgtgtcactcaacttcctggtaaatgcctctgggggtgttcagatgcaggatcaatacattaagtcctgaatcaagggtcacagaggtcccgctggaaagacttcaaacagcggctctgccacccggccatttaaaaatgaaggggttgtttaccggtagcctcgaaagttcaactcttatttttctgttcttaaaacttcatttcttcacctcacctactccccacgagcagtagttagttgtaataagttgagtctgggactagaaatcctaatttgactccaaaacgctctcctgttacagggcagggatggccggggtgggggaggggagggcgggcgcgcgggggcgggggaggggcgggtcggagctagcgagggcgagcgccccttcacggccggtgacgtagacccggggagctgcggcctgcggaggggtaacactatcttctcccaccaggctcctggccgtattgttctccttctcctcgtgataactccgcagtggaggtggattccgtccaagacgcccaacgtggctccgcgtagcaatcagcgctgcaatcctggcggttacctcagcggcggcgtctctctctgcgcctcacactcgcagcccgcggccctccccaacttagggcgtttacaaaagaaactactccagacgcgctgcaaagggaggcgcatgtgcccgaaagctggcgatcagacggggggggcattctgcatgtgtgatgtttctgggggcggtggggagtgtgtgtcggggtcggggggcgggggggagtcaggcagaaagacagggacaacctccgctatgaaggatccgcgagtcctcaaatgtaagctccgtgtgactaacgacctgcactgatttggagagcgggcatgttaaaggtcacggacaattgttgctggcttcagcatgaatgcctaagtgggatgtattcttcagcaatcacgtttaagtctgattcaccgaaaagtattgacgtgcccaccattcatttcagtacactgtgaaaatgcacaaagaaagtatccccaaattcagttaattacaaagccgtaaatgtccttgtatacacatattattacatacatgtaggtaacaacaaagattaaaatttgaagacactttaatagctttttggtaggattttggaatgaatatcagtcctgtaaacctacgttcatctgcattcttgggtctattttaaagtacaaacttgcgctaacaatttccatgtgttgaaaatggacaaggtagatcattgaatggtgatcaagacttccaaacccctccacataaaactgttcatgacttgcttcctttttctagccggtttagggccctgtcttaagtcacccac

SEQ ID NO: 1245398 - DNA, 4001 bp, Homo sapiens
cagggggacaaactcagggagtggcagtgctttctggaacagggacatatgactcaagtgtcaaatcaggccaccttatcccttgggactttctatcacccccatactcctcactgaagtgctcaatgcccaccctcccaggagacactgcactgtgccccactgtgctttttgctttgcaggttcttgcactgcctccctggggtgggtttttcttgtccttcaggttagtttctctcccttcgcaaatataagacaattcagaagacaggaatagtctatctttttctctgaataccagcatctgattggctgacaagcaatgtgtttccatggaatgaaaactggggttgggggaaaaaaaaaaaaaatcttaaaaatcccaagggattctttttttacaggaagggtaagcctggatatttctctcacccccagggcattcagctgctcctttgagaagctgcactcccatccctcagtgtgtcctctggaagattaccaaagggctgctattcaccagaactcccaaaatacatggctctggtttgtatcttgggccatctcaagacagttctaaaactcaggactagaaaaaggcccgaatgtggctaaggaaacattgccccataaagtttcccaacgaaaacctcaatcccaagatggcctaataagggcgtttgtgctaagggaggatacaaggagaaacagcagaaagattttttacagttgagtgccaggggattattttctgcttttttctcatgtgaaatatttgtaagtagaaaataagtattttacaaattgccatccactgctctgtgaaaaagtgattaattcaaatactgtttctgaaatgtgcaataaaggacaaaaacagttgataatgtatgggagcgtagaagttggctttggggaatgtcagcaagaaaccggaaatttaagattttacttcaagccaggttaggctggcagaacagagtagtggatgtgagaccctgcttgccacacatttggaaaatgcaggcgaaaaccagtgtctttgattaaagttaaaataattacatagcagtcatttagactgaagtggctctagtggtctaggcctctatgtaaaaaaagaaatctaactcaaatgcatttttttctaagttactaccttaggaggaaacgaaattcaagcttaaacaactacaaacctccaattaatccctgattacataaccaggaaatttccacccagacactccaaataaagcgactacataactgtacccaattatttaattgtctttgcttcctcacacaccttatacaagcctttctttcaagaccttctagtagccccccaaccacaaaccattgctgagcgctgtcccattaattaatcactgtttactcatataagctgtctatgttttaatggcgcctcagtctaattccgaacagggtaaggtagggacgggggaccccacggaccacagctccttccacgcaggaaccctgcacaccgagtcggcgtctttccgatgactttcgcctcatcacctcacaacctggggaagatgcagggctgcgggcgcagagctgcgcaaagagggctacaggctggggccaaagccgccgtgcagggacaggacaggacgcccggagtccctgcaccggaggggactgagggctgagctgcagactcgactcgcagactaggtcccgtcaccgccatgtccagccggttccaaggagccccctccccagtctcggtacgccctgccccccacactcaccatttctcggcttcaggggtgtcctggagtcttagctataaatcattcaatgccagcaggtcacagagcgacggagtgagtggcagaatcaccgaagtctcccggagcagaggacacaaggcaatgaagccctaaccccgcgctctggctgaagtgagacaaaggccgcgccagattccggaagccgccccttcctccctggctgcgcgcctgattggacagttcccaccccagagccctgattggatagtagtgcaggcaccgcgacctcaggccttgcgtgtcagaagatgctaccatacactgcacggaatgagccgagagtgacaggctcttggctccagtcactttcaggcagggctttctgtctgtgctgcgcctggctctgcccaggggtcatttttttagcattgtggtgtataacgttatgaaggttatgttcgtttataaaacacacacacacgttgttcacaaatggaagcaatataatgacaattatttaatatttcagatttcataacctttctggccgccggtctttggagtgggacacctaagattttaagagagaagcaatcctctaaaaaataaaacgttagctattgtgaattttaaatgtcttattagccagatcaaaaatagtaataaaaagagtcctgacatggtggctcacgcctgtaatcccagcactctgagaggccagaggtcagaagttcgagaccactctggccaacataatgaagccctgtctactaaaaatacaaaaattagccgggcatggtggcgggcgcctgtaatcccagctgcttgggaggctgaggcaggagaatcgcttgaacccaggaggtggaggttgcagtgagctgagtttgtgccactgcactgcagcctgggtgacagagcaagactccatctcagaaataataggaataataaaaagaaacaagtgaaattgtttgtaatactctttaagccattatacccaaaatattatttttcatgtgtggtcaacaaataattataaatattttggatctaaatcttttaaactcgctgtgtattttatgtttgcagcacattttacttcaaaccagcagccatgagggctctgatgctccgatctcagggaggtgaaggcctgaacacctctttttttttgtatttctaggctatttatgatttttaacacagactaaatcaaattactgtgcctgaaaaatcttttgctttgaaggcaagtgacataaagacagagctgctgatattttttcctgctgcaatttagccaatcagcagaatatgctttgaagggtaaagatgttttctaagaccccacattcaggagcagctatggggcaaatccctaaagcacacataaaaatcacatacagccaatgtattcctcaccctgaatcaatgcttctcacccttggctgcatatttcaataaccttgtagaggagtgtttaaagtcttcaaacccaagttgcaatggggtaattaagtcaatctctggagtgagacctaggcaacagtgtgatttaaagctctcgggtgattatagcacacagctcaactcccatgttactgctttaaaccaacatcttttggagagccagttgaaattatttctcaaattaacatagaagtgtttgctgctgagttgcggcctttcagtcttgattacttactttctatcctttgcagaactgacctctgctacttgttttgtttctgattcacaccagttccacacacactgagtgcacactacgtacagggccctgtgctaagtgtcctggccgtggtgagtactatcgtggaggaaggactttgctgtaaaaaattgcattccccaaaactacaaccatgctacttactcaattgaggtaaaaatgaaagatcgagggggacccccaagagtcaggatgtgaataaataccttggaatattaatacccatctcatgatgtctgacactaaatgcctcactttcaaacaaaacaataccaaacattgctattattctgttaagattaaatatgtaatatttaaattttattgaatgacatgcatacagaaatatatgtccaaagcattaacataatgctcagtaaattattacaaacaaatacatttgtgtaggcataggatagaactagccttgtttctgccacacaaaccactttctcttttcctcccctccaaaagtaaccaca

SEQ ID NO: 1245399 - DNA, 4001 bp, Homo sapiens
gtaggggcgaggggcggtcaacttctgggaatggccaagaggggtgctctgaggcccgagccggggtccggtgcccgcggccggcggccggggtctgtttactccggcgacgtgcggagaggacccaagcaggacgcgggcgggcgggaggcggcggccgggaccccgggccacgtttgtcacgagcgggggctgctccccacctccgagatgacttttttcttcttccaaagaaaaggaaaaaagaagcaccgcacggttttgcatatttattctttgcgaaaacacacaacagaaactttttcctccagcccagatgtagatctcagacgggatatttttttttcctccctctccggataatttcgtttctttctctctctctctctttttttttttcggttgttgttgtcttttctcgcccactttctaccgccgccccattcggggatcctcctcccgtcttcgtctccccccaccccgacacctcaccctcactccacctaggggctcagcggggaggggagcgcgcgcgcccccgcactcacactcacactcacgcgcgcacacgcctcgcagccacgcagccctcgctccgctacccacagtgacactcgcggatgggggaaagcggggagcagggggttcctccttacctttgagggatctcggtttcgcttgcttgcggcgagacatcctaaaagcaaacagctgaagttgtttcaattcagccctgaaagaaactatacttcctcgtggccgcgcgcccctcgggccgcggcgcctcgcgccctccgctcggcctccctcgcgccctcgctccgcgctccgctcctcgctccggctccggctcgcgctcgcgcgcggggctcgcggctgcccgagctccgcgctctgcacgacggcggcggcggcggcggcggctgctgcaccaaactttcccagccttcgacccccacccccaatctccaagaaaaaaaaaaaaaaaggaaaaagaaaaaaggaaaggagggaaaaaaagctaaaaaaaaaaccccaaagacaatgtttgaagagccgtcagctacactaaaaagagaaaatccgttactatttccacctcaatcaaaattcacatagttcatgcgaatagaaaaaaactaataaaaagaaaagcgtctgggtgattttttttttctttaccgcttttccttttcaacaaatccgcccccccccccaccggaaaaaaacaaataacactgatttgtttacaaagcgagtcgtgctcttttgtagttggggggacgagggggggaaatcgaccctgcaaggcgatgaaaaggtcttggaaagaaaaatctcccaccatccgaggcagatgcgaacgggccacgaaaataagcaaagggaaaaaaatactttttttctcccttccccccaccctttttttcttaacccacactaaagtaatttctttcaaaaagaaaaagccaaagcacccgagccgacggcccccaggtggtgtgcggggctgcttgtgtgcagggggtgtgcggggcccgggctcggggcgcccctctctgggcgggggcgcggcgccggcggctggcgctggaccggggctctaaagtctacggctgcctcggcagcggcggcggcagcagcggcggcagcggcggcggcagcggcggcgagagcaggaggaggaggaggaggagagccgggagcaggaggaggagaaggagtgtgctgtgtgctccctcctcatcacaaacctgcaaggtcttggactgcgctgtcgctccggtagtccacataataatggaaaatggaagcaaggcccccaaagccatcaggatggctccagagggggcccctaacccgcagggactcgctctgtacgtaatcactgaggaaatcattgtcagcctgcctgcactcacacacagacagaggggcatgattaaaaggcgagagcgcggggagcgggagggaggagggggcccgccaagacccggactggaggcgccggccgcggcgcgcggatccggagccaggcggcggccgagcgccccgagccccgcccgccgccgccgccgccgccgccgcctcccacgcgccgcgcgccccgcccgctcctgcgccgccgcccctcgcgccgcccgcccggccgctcgcacaccccgcgccgccgccgtcgccgccgccgcagctgcgttattagagctccacggcggatctcggggctcttctgctcgctttttttcctcttcagaaattaaagcagaggagcatctgaaagtggaaaggtcccccttctggtaggatggatgtaaaaggaggcaacaatttgttcttgagggggcaaaaaaaaaaaaaaaaaaaaagaaaaagaaaaagaaaaagaaaggaggggggaaattcattgcttggcttttgcattgtcggactttaaaaaagtgtgtctgctgttgttgcccggactcgggaaatcttttttatggcaaccgcagacctgccaagtctctcttacttggaatctttataaaggcaagttatttggactttttttttattttctcgtttagagaaagtcattgatgctgacgaatgtcataatgtgattcaaaagagacagctttgagttcacttttttaacattctcaaattgacatagatctttgtccagaaaataaagctttctgttgattttttctttaagcaagaggtaaggaaatatgcacttaagaatatgtgtacaagaaaatagtttctaaaataaattgaaatgtctgcaggtcggtgggaatttttgtttcttttcgcagttttgttttctaacttttcacctgctcccatcgcaaaacaagaaaccatcacctgtttccttcttttaccttatcttaagggaaaggatgttttagtattattattgttgttgctatttattgattggacacgcttgtcaagttataaatgcctgagagggctaccaagtagagcttagattcacaagtcttggtggaaattaagagattcagaatacggttaattacacaaaacaggcagaattttgtacaaatactattgttcttaatcagattttaaaaattctccgttctgtaaaattaaggtacagctatctattaagccaccatgcaaagacatcaaagctttaaggaagttgtattttttccagtctaacctgtaaactgcctggaccctcatgtggatagctgcaaatacagtatgttttttttcaatatcttcattataattaaatgagttttcaatccatctgcagtaattcctaaagtgaaatcatagttgtagtcaaatttaactttgcatgactgtgaaataaagcaacttttgttgcagaatctgtgttggtacattaaggattctagattttatacataaccttatacattcattttcacagaaatcattcagaaagggaaaaatgtgtaaacaccaagtttttacaagactttcctttcgtgtggtagccatatgtgtgcagaatactatggtgccatgtatgtgtggtcccaagttatgtgtgatattatctaaaatattgatggcatctaatcctggttttattggaaagtgaaaaattgctaacgtaatactaacgcgtaccctaatttgttaaagttttctatatgggttgattttttttgtttctttctcaaagtagtctactttgctttactctaaaattgttctttcatttcccaatgttagtatttctgttgccttcctctattaagagataaataaaacccttagctcagagatttagatctggctcaagagcctgatatttcagtttgggatagtactgcatagcattttaagggaggttaaagcaccaaccacccaaaagacaaacataaaaactattttaacctaaatctgtcaaatattgacctatacagataggtaaaatgcttttgaaacgtatctttaaatactttaatttcctccccccaagttaccaagggggggaagat

SEQ ID NO: 1245400 - DNA, 4001 bp, Homo sapiens
accagtttcagccggttctggtcaccctacataaaaaagctatggcaaccctcgctgagttgccaacaagtccctgaaaatcatcagcacaggggggatctcgctggggtttgctcttccctcttaggtcttcctgaggaggagaaggtcatcgtgtgtccccccaccccacgagcacacagccttggaaatgctcacctcgcaagcaccccagagcccctcagggcccatcccccctcccctccaccccacagcccaccgcagacactgtttccccctccttctccttcccccacttacctcccacaacctggctcagatctttgtgtacgtgtgtgtcagtgtgtgctctctgtgttggtggctgacaaagagcccccaagaaagcgagctatgtgtgtctgctcacacgggatgcgtcggctgcagagccggcctggcctcctagcacagtggtgctggcttgttgaccaggctcctctctgctgtcacccccaccccacccagccccctcctcccttccgtccctctcctctctctcccagccctgtcaccaccaccagcagccccccagtctcctcctcctcctccaaccttctcttctttcaagcacctggggggagaagtccaaatcccttcacctcgggggaagaaaactggggctgtctggggagggggcggggggcgaaggcagggccagtgggagagggggcacggaggcctctggaaacgcatctgtgcccggccggcgccggcggggggagtaggagagccgcgctcacgtggcccccgtctcgtaacctgcggggcctagcccgggcggttcctcctcggccccccaagccagctggcggggcgcgaaggccggctgtccccaaggccagggtgggacaggccactgcgggcaggcccaggggcctgagcctcacgcgctcaccccggcccgcaggagtgggcacgaggggccgcaccccgcctctgcccggcgcccacccgcgcccctgggtccggctgccctgcgcccctcgttcgccccggccgcctcccgccgccccgcacccccagaggcgcacacccacccccttcccggggttggccttcgcggcggtcaagcccgggcgtctgggccgcagctcggatgacctttgttcagcgcggcgccgccggcggctgctgctgtggctgctgctgctgtcgtcggagcggcggcggcggcggcttccatgttacgggcgtgtcatctgcgttcccgctgccggggtctgtgtgtgcgtgtgcggtggagcggcctcgccgccgggccgggcggcggcggcggcggcggctcggcccgggcggcgagcgaacaaaagggagcgcgggcgagggggagggggcggccggtgggggaagggagctccgggaccgggcggcggcagcgcgaagccccgcggccggcgggcgccgacgcccggccgctgcggagccccgagtccggcggcggcgagaaggcgccccgcggacctgccaagtctcgcccatacggggccgctggctcgcggcttcgccccgggagtggagcggggtggtggggctggtgagggggcgcagggagggctgcttttttccaacgacattgcgggctctcacccagtcctttccgtggccccaagccgcgacttactcgagtggaaggaagcaaggcctcgccaaagatggttgaaaagaccgtgagcctctacccaggatcttgaagccaaggtggtggtttgttttcctcgtaatgatggcaaatgagtaagaagagagcacgctatcttcggacaaattaaatctgaaattctccctggaggtggaagaaggggctctcctctggttagttagtggtttggagcccttttcgccttcaactgagccacaaaaggatggaagacaccccctggggtggggagaaagccctggtgtaaaagacacacgtttgctttcagagaaaaagccactggggccagattgaaacatggcatgttcagttcatgtaggtttttttttttccttaatgggggaatgatattgagtaaacaagatgtaatagctaggtctttaaattctagaagggagatggtgtacaaatgtaacaagcacatattgtacatacagcaggtggtcatagcctgcggaacacaaaaagatacatatgtaagcccgctaaaggtcacgaaggtgtataatcgtgacccgtgcaagggcgagagacgatagatttccattccagatgaggtatgctgttttcccagccccgtgtcctcgttcctttattgttcacagacgtgcactccattgaaaggtttttaaaaccagacagaaacccccaagtcaagctaattgtgctgacactggaaataggacaaaatggaaggagctgaaaaaatgtcaccataacctgttaaaaaggttcactcctgtttgataggaatctgaagacacaaaaataacactcaagtagcagtgatgaccaagcataagaaacatttctattttattttaaatttgattcattggttagtatttgcaaactgtgctgaaaagttaaaaaaaaaatctcagtatacctctctactgcgttaacttccattgaggaagccattgttctctgtgatgggagcactgtatgatgtaaattgcaagtagcatttttgctgtttaagacttttcatgtaaatgacccgaattattgtctcacagaagagttgttggtctttaatttcaaacagcaaattgtttggaattgcacataaattggaatacatatttgcatatttacacacgtttagaaagacctatgtaatctgcaaattttgccagtcacagcatcgcatttatcagcattacaagatgatgaaattgaaacccttgtcttcttttggcctgaaaacggtgccagtactctgtgggttgggtttcagctttacctgggcttgatttcatttgaaagggagccttttttcttctcccaaagatgggcctttattaatatgcatataaaaaccgtatgtgcattgaagagtacactaggacctgctaatgtgaaatcttgacatgctacacagtttacaatatatggaatttcataatgtacataccatgataaatcctaggtttcatggatttgggatctttgtttacttagaagactctcttgcccctcccccattcccttcttttaagagttgaaatgacagcaaagcagcacttgaatggttacaagagttgtactaccaaaactaaagtctgaaatgcttatcataaagagccttcagctatacaactgcctcgtggcttcatcatgccaaacacttttttgagcagggctttgtacaaagcccagtgatttagccggagcctcggctggaagaaatttggtctagaagcacaattgatcatttgcacaaatggcaacaaataacattgcatctgcttttaaatatcataaacaaaaagtaaaagatattttattgcaagttatctcagttctatttttgtaaagaggatttcagagaaacccctttgccaggtagaccagtagttaaaagcaaagcacccgtcttagtccattttgcaaaatcactaaatttcacagctgaaaagacagcatttattctgggttgttttttttttaagcggacactacccctcttccaaaaacacaatacaaaaaggttcattctattattctacatatgtaaggctctcttgtgcacctctctgctttgagcaacaatagaatcagtcactcgactgcaagaatgaaataaaactatcatttgagtgcagtcgataaggaagggcagaacaaagaaatcatatgattcttatgccaaatagaaactaaaggaattccaaaccctttgcgattttgttgttgctgtttttattgctaactctcaatgtcttggcttttcctccaatcagtgtattgcaaaatcctagcttttttctttaatcttttgtggctggaagccggc

SEQ ID NO: 1245401 - DNA, 4001 bp, Homo sapiens
atatatacagatggcatataagcacattacaaaatgctaaatattattagtcagtatggaaatgcaaattgaaaccacagtgagatacacagtgagttggtaaggatgtggaggaaccggaactctcatgtactcatgttaggaatgcaaaatgatacagccactctgaaaagtagtgtgggtttttttaaacattaaatgtacatctaccatgagagagggggaaaaaagcatatgtccatataaagacgtgtgtacatgaatgttctcagctttacttgtaacagtaaaaacctggaataacccaaatgcccatgaactggtgattggataaacaaactgtggtatatacatacaatggaatattattcagcaacaaaaattaactattgatacacacagcaataaagataaatctcaaaataaaagcttagtgaaacaactctgacaaaaacaaggacattctgtatgattccatttaaataaatatctagaaaatgcaaactaatctctagtaacagctgaccagtggagggggcattgggagagaggcttaccaacgggcaggaggaaacttttggggtttagatgtaataaacatattattttgattgcagtgatagttccacagctgtattcatttaacaagccttatcaaattatatcctttaaatatttgctgtttatgtcagttatacctcaataaagctgttttgttttgttttgttttgttttgttttgagacaaagtctcgctttgtcacccaggctggagtgcagtggcgcaatctcggctcactgcaacctccgcctcctgggttcatgggttcacgcgattctcctgactcggcctcccaagtagctgggattaaaggcgcacaccaccatgcccagctaatttttgtatttgtagtagagacagggtttcaccttgttggccaggctggtctccaactcctgatctcaggtgatccacctgcctcaacctcccaaagttttaggattacaggcctaagctgcgcctggccaaaaagaaagctgtttttttaaaactatctgcactccctacttgggagggttggactcaagttcccacatctctttcctcttacggttatattaagggcttagtcatacatccctaaatttcatatatcccaacagggacttgggctgggacaggaagccctcttcctccacctcaactaccacttagccacccaccattttctcaaacctcttcctttccccaccggacagcttaaaccaagtcacacgtctcattggtctcaacagaaatgaggtcccaactcctcatttcccaagatatttccatgaacacagcaatatcctttcctaccctgattaccccgcaccctccatttcgggtccttctcaccctgatcagtgagaattgttctagcaagcaaaccttaaatagacctcgtaccctttctagattgcaaagtagataaaaatccaactttccgttaattcagggattaattactgagcatcacttatttcttgggcagtggttctcaaaatgtggtcccaggaccaacagcttcaggatcacctgagaacctgggctgccaccgccccctcccccactactaaatcagcaactccggagttgtggggcagaagtcagtattttaacaaggcctccaggtgattctgatgcgcgctactcttctgggggtgtgaaaaaccagagaggacaggaagaaagttagaattaaagcatacctacgaatcagataagcgatagggggaggggtggttatttaaaaaacgataactaattaagaacttgtatgtagtaagaaaacctaccctgccccagagagctttcccgaaagataatggattccgacattcacctcaagaaccggcagacagagcagcaaaggatctgtcgctggccaagcaggtccctggctaaggcactgctagggacagctcgcggcggttcgggggttaattctcggcagccctccgtcacccggtgccccacccccgccctgcgcctgcgcggtgaagcgccatagagctgagcactcctcccagattcctagagcggacagggcgatggcaggttcgccgggtgtgaggcttcacagcggtccggtgaccaagtcgaggtaagggtgatgtcggctcgcggatagcagaggagttccgggtgatcttgcctaacgagcaggaaactgtgcatggtttctcgagtccttggagagtgaaggcccccggggtcgctcccgggcacggagagacgattggttcacggcctagtgttcggtttgttcccagtcagcccttgctggccttgggttcaaccgaatgaacgccagaaactctgtggggtggggggagtcaccaaccgtggtgcatccatacgaatcagcctaccgtactgggaaagagccacctgaatttgtgaatgttgtaaaagcaaaaggaagaaaaatgatcagtagtgtcatttttggataggaagggcagcgaataacatagtgttaaccactagaattcactgtaaaattcccctctctgcgttatctttccagttatacctttttttggtagcattaacccctaattttgtttgaacatctctagacttggaatggggaatgtgtgtcttaagtgggttaatccctggctcttggatgatggggaggaagcctaatacattctgagagaaaagcaactggaagtcaaatgagattttttgttttctccttcttttatatcttgaggatttttctggtggtctagtctcagagattacatctgtagtcagcacaatgattcccttccaagcccagtggtgcccagttgcctccaggtcccagacctttatgtggacaagaaaagcttacagaggaaatggtaattctccacttgcacactgaggtgtccagttgcagcccatggagatccagttcaattatgaatctcaggaacaccaccttctgtcaggtgagaggcagggtattatatctttcttagtggctttggcggggtggggaggatgagggggtgtcactctatgctagtgtcttcaaatgatcccccttaactctgttaggcagtattacctctttagtgtaccaagcatagtcacatgactttatttcaaaatctggcgatcaaattctcatgcagctctctccacttttttaagaccccaaagtcattcatttttccctgtataatgacctcattgctaatctgtcagttttggtcatttttcttatctactgtaggggcatagttaaaagttctggagtctgacaacctagattcaaacagtagttttgtcacttaactggctccagtaagttactcatatattttacgattctgtttcctcacttttcaagtgcatagtacttcataccttgaagttattttgagatttgtatctatgtattactccagaataaagaaccccaaaatttagtgacctaaaacatcagacttcttaaaccacattatttcttatgattctgtaggtcatcaacttgagctgggttcacctgggcatttttttttctcttggtcttttctggggtcattttgcagtcatctcaaggctgactctactggggccagggtctaagatggtttcaatcacgttgtctcaatgtcaaactgttagtgccggctatggcttgagtcctcatgtcttcagcaggtgacgctggactttttcacaggacagcttgtttccagtcagagaaggcaagctcttttcatacctatgtttgtgtttcatctgttaatgtgtttcatctgttaatgtctcattgatgaaagcaggtcatatgaccagttctaaagtcattatagaaggaaactacacagggatatgggtactgggagataggattcactggggtacactaatactataacaggccaggtgcagtggctcacacctgtaatcccaacactttgggaggccaaggcaggaggaatgcttgaagccag

SEQ ID NO: 1245402 - RNA, 19 nt, Artificial Sequence
  Description of Artificial Sequence: Synthetic oligonucleotide
  Sense strand starting at position 386 of SEQ ID NO: 1241080
gggcauggccaggaucuaa

SEQ ID NO: 1245403 - RNA, 19 nt, Artificial Sequence
  Description of Artificial Sequence: Synthetic oligonucleotide
  Antisense strand to SEQ ID NO: 1245402
uuagauccuggccaugccc

SEQ ID NO: 1245404 - RNA, 19 nt, Artificial Sequence
  Description of Artificial Sequence: Synthetic oligonucleotide
  Sense strand starting at position 571 of SEQ ID NO: 1241080
gcccgucgggaaguguaau

SEQ ID NO: 1245405 - RNA, 19 nt, Artificial Sequence
  Description of Artificial Sequence: Synthetic oligonucleotide
  Antisense strand to SEQ ID NO: 1245404
auuacacuucccgacgggc

SEQ ID NO: 1245406 - RNA, 19 nt, Artificial Sequence
  Description of Artificial Sequence: Synthetic oligonucleotide
  Sense strand starting at position 862 of SEQ ID NO: 1241080
aaauguacacgaugggaua

SEQ ID NO: 1245407 - RNA, 19 nt, Artificial Sequence
  Description of Artificial Sequence: Synthetic oligonucleotide
  Antisense strand to SEQ ID NO: 1245406
uaucccaucguguacauuu

SEQ ID NO: 1245408 - RNA, 19 nt, Artificial Sequence
  Description of Artificial Sequence: Synthetic oligonucleotide
  Sense strand starting at position 1088 of SEQ ID NO: 1241080
ggagacaacugccagaaua

SEQ ID NO: 1245409 - RNA, 19 nt, Artificial Sequence
  Description of Artificial Sequence: Synthetic oligonucleotide
  Antisense strand to SEQ ID NO: 1245408
uauucuggcaguugucucc

SEQ ID NO: 1245410 - RNA, 19 nt, Artificial Sequence
  Description of Artificial Sequence: Synthetic oligonucleotide
  Sense strand starting at position 1098 of SEQ ID NO: 1241080
gccagaauauucguuacag

SEQ ID NO: 1245411 - RNA, 19 nt, Artificial Sequence
  Description of Artificial Sequence: Synthetic oligonucleotide
  Antisense strand to SEQ ID NO: 1245410
cuguaacgaauauucuggc

SEQ ID NO: 1245412 - RNA, 19 nt, Artificial Sequence
  Description of Artificial Sequence: Synthetic oligonucleotide
  Sense strand starting at position 1099 of SEQ ID NO: 1241080
ccagaauauucguuacagu

SEQ ID NO: 1245413 - RNA, 19 nt, Artificial Sequence
  Description of Artificial Sequence: Synthetic oligonucleotide
  Antisense strand to SEQ ID NO: 1245412
acuguaacgaauauucugg

SEQ ID NO: 1245414 - RNA, 19 nt, Artificial Sequence
  Description of Artificial Sequence: Synthetic oligonucleotide
  Sense strand starting at position 1100 of SEQ ID NO: 1241080
cagaauauucguuacagug

SEQ ID NO: 1245415 - RNA, 19 nt, Artificial Sequence
  Description of Artificial Sequence: Synthetic oligonucleotide
  Antisense strand to SEQ ID NO: 1245414
cacuguaacgaauauucug

SEQ ID NO: 1245416 - RNA, 19 nt, Artificial Sequence
  Description of Artificial Sequence: Synthetic oligonucleotide
  Sense strand starting at position 1167 of SEQ ID NO: 1241080
ggaauaagucuaugcacac

SEQ ID NO: 1245417 - RNA, 19 nt, Artificial Sequence
  Description of Artificial Sequence: Synthetic oligonucleotide
  Antisense strand to SEQ ID NO: 1245416
gugugcauagacuuauucc

SEQ ID NO: 1245418 - RNA, 19 nt, Artificial Sequence
  Description of Artificial Sequence: Synthetic oligonucleotide
  Sense strand starting at position 1303 of SEQ ID NO: 1241080
auucgaaaccgcuauauag

SEQ ID NO: 1245419 - RNA, 19 nt, Artificial Sequence
  Description of Artificial Sequence: Synthetic oligonucleotide
  Antisense strand to SEQ ID NO: 1245418
cuauauagcgguuucgaau

SEQ ID NO: 1245420 - RNA, 19 nt, Artificial Sequence
  Description of Artificial Sequence: Synthetic oligonucleotide
  Sense strand starting at position 1305 of SEQ ID NO: 1241080
ucgaaaccgcuauauagau

SEQ ID NO: 1245421 - RNA, 19 nt, Artificial Sequence
  Description of Artificial Sequence: Synthetic oligonucleotide
  Antisense strand to SEQ ID NO: 1245420
aucuauauagcgguuucga

SEQ ID NO: 1245422 - RNA, 19 nt, Artificial Sequence
  Description of Artificial Sequence: Synthetic oligonucleotide
  Sense strand starting at position 1767 of SEQ ID NO: 1241080
cggaacuccugcucccaaa

SEQ ID NO: 1245423 - RNA, 19 nt, Artificial Sequence
  Description of Artificial Sequence: Synthetic oligonucleotide
  Antisense strand to SEQ ID NO: 1245422
uuugggagcaggaguuccg

SEQ ID NO: 1245424 - RNA, 19 nt, Artificial Sequence
  Description of Artificial Sequence: Synthetic oligonucleotide
  Sense strand starting at position 1937 of SEQ ID NO: 1241080
agagacggcguuugauaga

SEQ ID NO: 1245425 - RNA, 19 nt, Artificial Sequence
  Description of Artificial Sequence: Synthetic oligonucleotide
  Antisense strand to SEQ ID NO: 1245424
ucuaucaaacgccgucucu

SEQ ID NO: 1245426 - RNA, 19 nt, Artificial Sequence
  Description of Artificial Sequence: Synthetic oligonucleotide
  Sense strand starting at position 1942 of SEQ ID NO: 1241080
cggcguuugauagagagga

SEQ ID NO: 1245427 - RNA, 19 nt, Artificial Sequence
  Description of Artificial Sequence: Synthetic oligonucleotide
  Antisense strand to SEQ ID NO: 1245426
uccucucuaucaaacgccg

SEQ ID NO: 1245428 - RNA, 19 nt, Artificial Sequence
  Description of Artificial Sequence: Synthetic oligonucleotide
  Sense strand starting at position 1943 of SEQ ID NO: 1241080
ggcguuugauagagaggaa

SEQ ID NO: 1245429 - RNA, 19 nt, Artificial Sequence
  Description of Artificial Sequence: Synthetic oligonucleotide
  Antisense strand to SEQ ID NO: 1245428
uuccucucuaucaaacgcc

SEQ ID NO: 1245430 - RNA, 19 nt, Artificial Sequence
  Description of Artificial Sequence: Synthetic oligonucleotide
  Sense strand starting at position 1944 of SEQ ID NO: 1241080
gcguuugauagagaggaag

SEQ ID NO: 1245431 - RNA, 19 nt, Artificial Sequence
  Description of Artificial Sequence: Synthetic oligonucleotide
  Antisense strand to SEQ ID NO: 1245430
cuuccucucuaucaaacgc

SEQ ID NO: 1245432 - RNA, 19 nt, Artificial Sequence
  Description of Artificial Sequence: Synthetic oligonucleotide
  Sense strand starting at position 1946 of SEQ ID NO: 1241080
guuugauagagaggaaggu

SEQ ID NO: 1245433 - RNA, 19 nt, Artificial Sequence
  Description of Artificial Sequence: Synthetic oligonucleotide
  Antisense strand to SEQ ID NO: 1245432
accuuccucucuaucaaac

SEQ ID NO: 1245434 - RNA, 19 nt, Artificial Sequence
  Description of Artificial Sequence: Synthetic oligonucleotide
  Sense strand starting at position 2080 of SEQ ID NO: 1241080
acaauagguauccgagagu

SEQ ID NO: 1245435 - RNA, 19 nt, Artificial Sequence
  Description of Artificial Sequence: Synthetic oligonucleotide
  Antisense strand to SEQ ID NO: 1245434
acucucggauaccuauugu

SEQ ID NO: 1245436 - RNA, 19 nt, Artificial Sequence
  Description of Artificial Sequence: Synthetic oligonucleotide
  Sense strand starting at position 2083 of SEQ ID NO: 1241080
auagguauccgagagugua

SEQ ID NO: 1245437 - RNA, 19 nt, Artificial Sequence
  Description of Artificial Sequence: Synthetic oligonucleotide
  Antisense strand to SEQ ID NO: 1245436
uacacucucggauaccuau

SEQ ID NO: 1245438 - RNA, 19 nt, Artificial Sequence
  Description of Artificial Sequence: Synthetic oligonucleotide
  Sense strand starting at position 2091 of SEQ ID NO: 1241080
ccgagaguguaacuacuuu

SEQ ID NO: 1245439 - RNA, 19 nt, Artificial Sequence
  Description of Artificial Sequence: Synthetic oligonucleotide
  Antisense strand to SEQ ID NO: 1245438
aaaguaguuacacucucgg

SEQ ID NO: 1245440 - RNA, 19 nt, Artificial Sequence
  Description of Artificial Sequence: Synthetic oligonucleotide
  Sense strand starting at position 2097 of SEQ ID NO: 1241080
guguaacuacuuuauggca

SEQ ID NO: 1245441 - RNA, 19 nt, Artificial Sequence
  Description of Artificial Sequence: Synthetic oligonucleotide
  Antisense strand to SEQ ID NO: 1245440
ugccauaaaguaguuacac

SEQ ID NO: 1245442 - RNA, 19 nt, Artificial Sequence
  Description of Artificial Sequence: Synthetic oligonucleotide
  Sense strand starting at position 2129 of SEQ ID NO: 1241080
cuguguauaauagauguuu

SEQ ID NO: 1245443 - RNA, 19 nt, Artificial Sequence
  Description of Artificial Sequence: Synthetic oligonucleotide
  Antisense strand to SEQ ID NO: 1245442
aaacaucuauuauacacag

SEQ ID NO: 1245444 - RNA, 19 nt, Artificial Sequence
  Description of Artificial Sequence: Synthetic oligonucleotide
  Sense strand starting at position 2512 of SEQ ID NO: 1241080
aucgauagauaagauagau

SEQ ID NO: 1245445 - RNA, 19 nt, Artificial Sequence
  Description of Artificial Sequence: Synthetic oligonucleotide
  Antisense strand to SEQ ID NO: 1245444
aucuaucuuaucuaucgau

SEQ ID NO: 1245446 - RNA, 19 nt, Artificial Sequence
  Description of Artificial Sequence: Synthetic oligonucleotide
  Sense strand starting at position 2539 of SEQ ID NO: 1241080
gaaugaaaugcuuaucagu

SEQ ID NO: 1245447 - RNA, 19 nt, Artificial Sequence
  Description of Artificial Sequence: Synthetic oligonucleotide
  Antisense strand to SEQ ID NO: 1245446
acugauaagcauuucauuc

SEQ ID NO: 1245448 - RNA, 19 nt, Artificial Sequence
  Description of Artificial Sequence: Synthetic oligonucleotide
  Sense strand starting at position 2547 of SEQ ID NO: 1241080
ugcuuaucaguugacugau

SEQ ID NO: 1245449 - RNA, 19 nt, Artificial Sequence
  Description of Artificial Sequence: Synthetic oligonucleotide
  Antisense strand to SEQ ID NO: 1245448
aucagucaacugauaagca

SEQ ID NO: 1245450 - RNA, 19 nt, Artificial Sequence
  Description of Artificial Sequence: Synthetic oligonucleotide
  Sense strand starting at position 2549 of SEQ ID NO: 1241080
cuuaucaguugacugauua

SEQ ID NO: 1245451 - RNA, 19 nt, Artificial Sequence
  Description of Artificial Sequence: Synthetic oligonucleotide
  Antisense strand to SEQ ID NO: 1245450
uaaucagucaacugauaag

SEQ ID NO: 1245452 - RNA, 19 nt, Artificial Sequence
  Description of Artificial Sequence: Synthetic oligonucleotide
  Sense strand starting at position 2550 of SEQ ID NO: 1241080
uuaucaguugacugauuag

SEQ ID NO: 1245453 - RNA, 19 nt, Artificial Sequence
  Description of Artificial Sequence: Synthetic oligonucleotide
  Antisense strand to SEQ ID NO: 1245452
cuaaucagucaacugauaa

SEQ ID NO: 1245454 - RNA, 19 nt, Artificial Sequence
  Description of Artificial Sequence: Synthetic oligonucleotide
  Sense strand starting at position 2553 of SEQ ID NO: 1241080
ucaguugacugauuaguac

SEQ ID NO: 1245455 - RNA, 19 nt, Artificial Sequence
  Description of Artificial Sequence: Synthetic oligonucleotide
  Antisense strand to SEQ ID NO: 1245454
guacuaaucagucaacuga

SEQ ID NO: 1245456 - RNA, 19 nt, Artificial Sequence
  Description of Artificial Sequence: Synthetic oligonucleotide
  Sense strand starting at position 2642 of SEQ ID NO: 1241080
cuggaugugucuucucacu

SEQ ID NO: 1245457 - RNA, 19 nt, Artificial Sequence
  Description of Artificial Sequence: Synthetic oligonucleotide
  Antisense strand to SEQ ID NO: 1245456
agugagaagacacauccag

SEQ ID NO: 1245458 - RNA, 19 nt, Artificial Sequence
  Description of Artificial Sequence: Synthetic oligonucleotide
  Sense strand starting at position 2644 of SEQ ID NO: 1241080
ggaugugucuucucacuuu

SEQ ID NO: 1245459 - RNA, 19 nt, Artificial Sequence
  Description of Artificial Sequence: Synthetic oligonucleotide
  Antisense strand to SEQ ID NO: 1245458
aaagugagaagacacaucc

SEQ ID NO: 1245460 - RNA, 19 nt, Artificial Sequence
  Description of Artificial Sequence: Synthetic oligonucleotide
  Sense strand starting at position 2753 of SEQ ID NO: 1241080
guaggucaaucaguugaca

SEQ ID NO: 1245461 - RNA, 19 nt, Artificial Sequence
  Description of Artificial Sequence: Synthetic oligonucleotide
  Antisense strand to SEQ ID NO: 1245460
ugucaacugauugaccuac

SEQ ID NO: 1245462 - RNA, 19 nt, Artificial Sequence
  Description of Artificial Sequence: Synthetic oligonucleotide
  Sense strand starting at position 2756 of SEQ ID NO: 1241080
ggucaaucaguugacaauu

SEQ ID NO: 1245463 - RNA, 19 nt, Artificial Sequence
  Description of Artificial Sequence: Synthetic oligonucleotide
  Antisense strand to SEQ ID NO: 1245462
aauugucaacugauugacc

SEQ ID NO: 1245464 - RNA, 19 nt, Artificial Sequence
  Description of Artificial Sequence: Synthetic oligonucleotide
  Sense strand starting at position 3485 of SEQ ID NO: 1241080
ugcuguguaggcuuuccua

SEQ ID NO: 1245465 - RNA, 19 nt, Artificial Sequence
  Description of Artificial Sequence: Synthetic oligonucleotide
  Antisense strand to SEQ ID NO: 1245464
uaggaaagccuacacagca

SEQ ID NO: 1245466 - RNA, 19 nt, Artificial Sequence
  Description of Artificial Sequence: Synthetic oligonucleotide
  Sense strand starting at position 3497 of SEQ ID NO: 1241080
uuuccuaugcaauguagga

SEQ ID NO: 1245467 - RNA, 19 nt, Artificial Sequence
  Description of Artificial Sequence: Synthetic oligonucleotide
  Antisense strand to SEQ ID NO: 1245466
uccuacauugcauaggaaa

SEQ ID NO: 1245468 - RNA, 19 nt, Artificial Sequence
  Description of Artificial Sequence: Synthetic oligonucleotide
  Sense strand starting at position 3756 of SEQ ID NO: 1241080
ucaaguaugucuuucuuau

SEQ ID NO: 1245469 - RNA, 19 nt, Artificial Sequence
  Description of Artificial Sequence: Synthetic oligonucleotide
  Antisense strand to SEQ ID NO: 1245468
auaagaaagacauacuuga

SEQ ID NO: 1245470 - RNA, 19 nt, Artificial Sequence
  Description of Artificial Sequence: Synthetic oligonucleotide
  Sense strand starting at position 3847 of SEQ ID NO: 1241080
gucaccucucuaggguaau

SEQ ID NO: 1245471 - RNA, 19 nt, Artificial Sequence
  Description of Artificial Sequence: Synthetic oligonucleotide
  Antisense strand to SEQ ID NO: 1245470
auuacccuagagaggugac

SEQ ID NO: 1245472 - RNA, 19 nt, Artificial Sequence
  Description of Artificial Sequence: Synthetic oligonucleotide
  Sense strand starting at position 3850 of SEQ ID NO: 1241080
accucucuaggguaaucua

SEQ ID NO: 1245473 - RNA, 19 nt, Artificial Sequence
  Description of Artificial Sequence: Synthetic oligonucleotide
  Antisense strand to SEQ ID NO: 1245472
uagauuacccuagagaggu

SEQ ID NO: 1245474 - RNA, 19 nt, Artificial Sequence
  Description of Artificial Sequence: Synthetic oligonucleotide
  Sense strand starting at position 3857 of SEQ ID NO: 1241080
uaggguaaucuagguuuac

SEQ ID NO: 1245475 - RNA, 19 nt, Artificial Sequence
  Description of Artificial Sequence: Synthetic oligonucleotide
  Antisense strand to SEQ ID NO: 1245474
guaaaccuagauuacccua

SEQ ID NO: 1245476 - RNA, 19 nt, Artificial Sequence
  Description of Artificial Sequence: Synthetic oligonucleotide
  Sense strand starting at position 3858 of SEQ ID NO: 1241080
aggguaaucuagguuuaca

SEQ ID NO: 1245477 - RNA, 19 nt, Artificial Sequence
  Description of Artificial Sequence: Synthetic oligonucleotide
  Antisense strand to SEQ ID NO: 1245476
uguaaaccuagauuacccu

SEQ ID NO: 1245478 - RNA, 19 nt, Artificial Sequence
  Description of Artificial Sequence: Synthetic oligonucleotide
  Sense strand starting at position 3861 of SEQ ID NO: 1241080
guaaucuagguuuacagau

SEQ ID NO: 1245479 - RNA, 19 nt, Artificial Sequence
  Description of Artificial Sequence: Synthetic oligonucleotide
  Antisense strand to SEQ ID NO: 1245478
aucuguaaaccuagauuac

SEQ ID NO: 1245480 - RNA, 19 nt, Artificial Sequence
  Description of Artificial Sequence: Synthetic oligonucleotide
  Sense strand starting at position 3946 of SEQ ID NO: 1241080
cucagcauugucuauuacu

SEQ ID NO: 1245481 - RNA, 19 nt, Artificial Sequence
  Description of Artificial Sequence: Synthetic oligonucleotide
  Antisense strand to SEQ ID NO: 1245480
aguaauagacaaugcugag

SEQ ID NO: 1245482 - RNA, 19 nt, Artificial Sequence
  Description of Artificial Sequence: Synthetic oligonucleotide
  Sense strand starting at position 168 of SEQ ID NO: 1241081
aucuuaugguagccaauaa

SEQ ID NO: 1245483 - RNA, 19 nt, Artificial Sequence
  Description of Artificial Sequence: Synthetic oligonucleotide
  Antisense strand to SEQ ID NO: 1245482
uuauuggcuaccauaagau

SEQ ID NO: 1245484 - RNA, 19 nt, Artificial Sequence
  Description of Artificial Sequence: Synthetic oligonucleotide
  Sense strand starting at position 183 of SEQ ID NO: 1241081
auaaucuucugcucagaug

SEQ ID NO: 1245485 - RNA, 19 nt, Artificial Sequence
  Description of Artificial Sequence: Synthetic oligonucleotide
  Antisense strand to SEQ ID NO: 1245484
caucugagcagaagauuau

SEQ ID NO: 1245486 - RNA, 19 nt, Artificial Sequence
  Description of Artificial Sequence: Synthetic oligonucleotide
  Sense strand starting at position 201 of SEQ ID NO: 1241081
gaagacauacgcuaguauu

SEQ ID NO: 1245487 - RNA, 19 nt, Artificial Sequence
  Description of Artificial Sequence: Synthetic oligonucleotide
  Antisense strand to SEQ ID NO: 1245486
aauacuagcguaugucuuc

SEQ ID NO: 1245488 - RNA, 19 nt, Artificial Sequence
  Description of Artificial Sequence: Synthetic oligonucleotide
  Sense strand starting at position 229 of SEQ ID NO: 1241081
caggaagugucucuugaga

SEQ ID NO: 1245489 - RNA, 19 nt, Artificial Sequence
  Description of Artificial Sequence: Synthetic oligonucleotide
  Antisense strand to SEQ ID NO: 1245488
ucucaagagacacuuccug

SEQ ID NO: 1245490 - RNA, 19 nt, Artificial Sequence
  Description of Artificial Sequence: Synthetic oligonucleotide
  Sense strand starting at position 321 of SEQ ID NO: 1241081
guggguuauucucuaugag

SEQ ID NO: 1245491 - RNA, 19 nt, Artificial Sequence
  Description of Artificial Sequence: Synthetic oligonucleotide
  Antisense strand to SEQ ID NO: 1245490
cucauagagaauaacccac

SEQ ID NO: 1245492 - RNA, 19 nt, Artificial Sequence
  Description of Artificial Sequence: Synthetic oligonucleotide
  Sense strand starting at position 322 of SEQ ID NO: 1241081
uggguuauucucuaugagu

SEQ ID NO: 1245493 - RNA, 19 nt, Artificial Sequence
  Description of Artificial Sequence: Synthetic oligonucleotide
  Antisense strand to SEQ ID NO: 1245492
acucauagagaauaaccca

SEQ ID NO: 1245494 - RNA, 19 nt, Artificial Sequence
  Description of Artificial Sequence: Synthetic oligonucleotide
  Sense strand starting at position 324 of SEQ ID NO: 1241081
gguuauucucuaugaguau

SEQ ID NO: 1245495 - RNA, 19 nt, Artificial Sequence
  Description of Artificial Sequence: Synthetic oligonucleotide
  Antisense strand to SEQ ID NO: 1245494
auacucauagagaauaacc

SEQ ID NO: 1245496 - RNA, 19 nt, Artificial Sequence
  Description of Artificial Sequence: Synthetic oligonucleotide
  Sense strand starting at position 335 of SEQ ID NO: 1241081
augaguaugaugugcaacu

SEQ ID NO: 1245497 - RNA, 19 nt, Artificial Sequence
  Description of Artificial Sequence: Synthetic oligonucleotide
  Antisense strand to SEQ ID NO: 1245496
aguugcacaucauacucau

SEQ ID NO: 1245498 - RNA, 19 nt, Artificial Sequence
  Description of Artificial Sequence: Synthetic oligonucleotide
  Sense strand starting at position 337 of SEQ ID NO: 1241081
gaguaugaugugcaacuuu

SEQ ID NO: 1245499 - RNA, 19 nt, Artificial Sequence
  Description of Artificial Sequence: Synthetic oligonucleotide
  Antisense strand to SEQ ID NO: 1245498
aaaguugcacaucauacuc

SEQ ID NO: 1245500 - RNA, 19 nt, Artificial Sequence
  Description of Artificial Sequence: Synthetic oligonucleotide
  Sense strand starting at position 449 of SEQ ID NO: 1241081
augucaacguucccagaau

SEQ ID NO: 1245501 - RNA, 19 nt, Artificial Sequence
  Description of Artificial Sequence: Synthetic oligonucleotide
  Antisense strand to SEQ ID NO: 1245500
auucugggaacguugacau

SEQ ID NO: 1245502 - RNA, 19 nt, Artificial Sequence
  Description of Artificial Sequence: Synthetic oligonucleotide
  Sense strand starting at position 609 of SEQ ID NO: 1241081
gcugucugcaaugagaaua

SEQ ID NO: 1245503 - RNA, 19 nt, Artificial Sequence
  Description of Artificial Sequence: Synthetic oligonucleotide
  Antisense strand to SEQ ID NO: 1245502
uauucucauugcagacagc

SEQ ID NO: 1245504 - RNA, 19 nt, Artificial Sequence
  Description of Artificial Sequence: Synthetic oligonucleotide
  Sense strand starting at position 710 of SEQ ID NO: 1241081
aucugugagcuccaggagu

SEQ ID NO: 1245505 - RNA, 19 nt, Artificial Sequence
  Description of Artificial Sequence: Synthetic oligonucleotide
  Antisense strand to SEQ ID NO: 1245504
acuccuggagcucacagau

SEQ ID NO: 1245506 - RNA, 19 nt, Artificial Sequence
  Description of Artificial Sequence: Synthetic oligonucleotide
  Sense strand starting at position 1183 of SEQ ID NO: 1241081
caauauguugcagguggau

SEQ ID NO: 1245507 - RNA, 19 nt, Artificial Sequence
  Description of Artificial Sequence: Synthetic oligonucleotide
  Antisense strand to SEQ ID NO: 1245506
auccaccugcaacauauug

SEQ ID NO: 1245508 - RNA, 19 nt, Artificial Sequence
  Description of Artificial Sequence: Synthetic oligonucleotide
  Sense strand starting at position 1221 of SEQ ID NO: 1241081
uguuuaaaccgaggaucca

SEQ ID NO: 1245509 - RNA, 19 nt, Artificial Sequence
  Description of Artificial Sequence: Synthetic oligonucleotide
  Antisense strand to SEQ ID NO: 1245508
uggauccucgguuuaaaca

SEQ ID NO: 1245510 - RNA, 19 nt, Artificial Sequence
  Description of Artificial Sequence: Synthetic oligonucleotide
  Sense strand starting at position 1222 of SEQ ID NO: 1241081
guuuaaaccgaggauccau

SEQ ID NO: 1245511 - RNA, 19 nt, Artificial Sequence
  Description of Artificial Sequence: Synthetic oligonucleotide
  Antisense strand to SEQ ID NO: 1245510
auggauccucgguuuaaac

SEQ ID NO: 1245512 - RNA, 19 nt, Artificial Sequence
  Description of Artificial Sequence: Synthetic oligonucleotide
  Sense strand starting at position 1267 of SEQ ID NO: 1241081
cgaaacacccacugauaca

SEQ ID NO: 1245513 - RNA, 19 nt, Artificial Sequence
  Description of Artificial Sequence: Synthetic oligonucleotide
  Antisense strand to SEQ ID NO: 1245512
uguaucaguggguguuucg

SEQ ID NO: 1245514 - RNA, 19 nt, Artificial Sequence
  Description of Artificial Sequence: Synthetic oligonucleotide
  Sense strand starting at position 1384 of SEQ ID NO: 1241081
aaauacaugccagggaguu

SEQ ID NO: 1245515 - RNA, 19 nt, Artificial Sequence
  Description of Artificial Sequence: Synthetic oligonucleotide
  Antisense strand to SEQ ID NO: 1245514
aacucccuggcauguauuu

SEQ ID NO: 1245516 - RNA, 19 nt, Artificial Sequence
  Description of Artificial Sequence: Synthetic oligonucleotide
  Sense strand starting at position 1451 of SEQ ID NO: 1241081
cagauaggcccuugaccua

SEQ ID NO: 1245517 - RNA, 19 nt, Artificial Sequence
  Description of Artificial Sequence: Synthetic oligonucleotide
  Antisense strand to SEQ ID NO: 1245516
uaggucaagggccuaucug

SEQ ID NO: 1245518 - RNA, 19 nt, Artificial Sequence
  Description of Artificial Sequence: Synthetic oligonucleotide
  Sense strand starting at position 1471 of SEQ ID NO: 1241081
gaggaucccguccaagauu

SEQ ID NO: 1245519 - RNA, 19 nt, Artificial Sequence
  Description of Artificial Sequence: Synthetic oligonucleotide
  Antisense strand to SEQ ID NO: 1245518
aaucuuggacgggauccuc

SEQ ID NO: 1245520 - RNA, 19 nt, Artificial Sequence
  Description of Artificial Sequence: Synthetic oligonucleotide
  Sense strand starting at position 1561 of SEQ ID NO: 1241081
gauaauagagauuggugua

SEQ ID NO: 1245521 - RNA, 19 nt, Artificial Sequence
  Description of Artificial Sequence: Synthetic oligonucleotide
  Antisense strand to SEQ ID NO: 1245520
uacaccaaucucuauuauc

SEQ ID NO: 1245522 - RNA, 19 nt, Artificial Sequence
  Description of Artificial Sequence: Synthetic oligonucleotide
  Sense strand starting at position 1568 of SEQ ID NO: 1241081
gagauugguguaggaauuc

SEQ ID NO: 1245523 - RNA, 19 nt, Artificial Sequence
  Description of Artificial Sequence: Synthetic oligonucleotide
  Antisense strand to SEQ ID NO: 1245522
gaauuccuacaccaaucuc

SEQ ID NO: 1245524 - RNA, 19 nt, Artificial Sequence
  Description of Artificial Sequence: Synthetic oligonucleotide
  Sense strand starting at position 1675 of SEQ ID NO: 1241081
ugggauugaggcugaggau

SEQ ID NO: 1245525 - RNA, 19 nt, Artificial Sequence
  Description of Artificial Sequence: Synthetic oligonucleotide
  Antisense strand to SEQ ID NO: 1245524
auccucagccucaauccca

SEQ ID NO: 1245526 - RNA, 19 nt, Artificial Sequence
  Description of Artificial Sequence: Synthetic oligonucleotide
  Sense strand starting at position 1704 of SEQ ID NO: 1241081
accaaagagcccuagaguu

SEQ ID NO: 1245527 - RNA, 19 nt, Artificial Sequence
  Description of Artificial Sequence: Synthetic oligonucleotide
  Antisense strand to SEQ ID NO: 1245526
aacucuagggcucuuuggu

SEQ ID NO: 1245528 - RNA, 19 nt, Artificial Sequence
  Description of Artificial Sequence: Synthetic oligonucleotide
  Sense strand starting at position 2462 of SEQ ID NO: 1241081
cugucacccuuacuauaga

SEQ ID NO: 1245529 - RNA, 19 nt, Artificial Sequence
  Description of Artificial Sequence: Synthetic oligonucleotide
  Antisense strand to SEQ ID NO: 1245528
ucuauaguaagggugacag

SEQ ID NO: 1245530 - RNA, 19 nt, Artificial Sequence
  Description of Artificial Sequence: Synthetic oligonucleotide
  Sense strand starting at position 2490 of SEQ ID NO: 1241081
uuuggcucccuuugauuua

SEQ ID NO: 1245531 - RNA, 19 nt, Artificial Sequence
  Description of Artificial Sequence: Synthetic oligonucleotide
  Antisense strand to SEQ ID NO: 1245530
uaaaucaaagggagccaaa

SEQ ID NO: 1245532 - RNA, 19 nt, Artificial Sequence
  Description of Artificial Sequence: Synthetic oligonucleotide
  Sense strand starting at position 2604 of SEQ ID NO: 1241081
guagcagaaccucaucauu

SEQ ID NO: 1245533 - RNA, 19 nt, Artificial Sequence
  Description of Artificial Sequence: Synthetic oligonucleotide
  Antisense strand to SEQ ID NO: 1245532
aaugaugagguucugcuac

SEQ ID NO: 1245534 - RNA, 19 nt, Artificial Sequence
  Description of Artificial Sequence: Synthetic oligonucleotide
  Sense strand starting at position 2606 of SEQ ID NO: 1241081
agcagaaccucaucauugu

SEQ ID NO: 1245535 - RNA, 19 nt, Artificial Sequence
  Description of Artificial Sequence: Synthetic oligonucleotide
  Antisense strand to SEQ ID NO: 1245534
acaaugaugagguucugcu

SEQ ID NO: 1245536 - RNA, 19 nt, Artificial Sequence
  Description of Artificial Sequence: Synthetic oligonucleotide
  Sense strand starting at position 2711 of SEQ ID NO: 1241081
gcaggaacugucuaccaga

SEQ ID NO: 1245537 - RNA, 19 nt, Artificial Sequence
  Description of Artificial Sequence: Synthetic oligonucleotide
  Antisense strand to SEQ ID NO: 1245536
ucugguagacaguuccugc

SEQ ID NO: 1245538 - RNA, 19 nt, Artificial Sequence
  Description of Artificial Sequence: Synthetic oligonucleotide
  Sense strand starting at position 2936 of SEQ ID NO: 1241081
acccaucugcuugaggaua

SEQ ID NO: 1245539 - RNA, 19 nt, Artificial Sequence
  Description of Artificial Sequence: Synthetic oligonucleotide
  Antisense strand to SEQ ID NO: 1245538
uauccucaagcagaugggu

SEQ ID NO: 1245540 - RNA, 19 nt, Artificial Sequence
  Description of Artificial Sequence: Synthetic oligonucleotide
  Sense strand starting at position 3075 of SEQ ID NO: 1241081
ucuuauacuugcucuggga

SEQ ID NO: 1245541 - RNA, 19 nt, Artificial Sequence
  Description of Artificial Sequence: Synthetic oligonucleotide
  Antisense strand to SEQ ID NO: 1245540
ucccagagcaaguauaaga

SEQ ID NO: 1245542 - RNA, 19 nt, Artificial Sequence
  Description of Artificial Sequence: Synthetic oligonucleotide
  Sense strand starting at position 3077 of SEQ ID NO: 1241081
uuauacuugcucugggaau

SEQ ID NO: 1245543 - RNA, 19 nt, Artificial Sequence
  Description of Artificial Sequence: Synthetic oligonucleotide
  Antisense strand to SEQ ID NO: 1245542
auucccagagcaaguauaa

SEQ ID NO: 1245544 - RNA, 19 nt, Artificial Sequence
  Description of Artificial Sequence: Synthetic oligonucleotide
  Sense strand starting at position 3079 of SEQ ID NO: 1241081
auacuugcucugggaaugu

SEQ ID NO: 1245545 - RNA, 19 nt, Artificial Sequence
  Description of Artificial Sequence: Synthetic oligonucleotide
  Antisense strand to SEQ ID NO: 1245544
acauucccagagcaaguau

SEQ ID NO: 1245546 - RNA, 19 nt, Artificial Sequence
  Description of Artificial Sequence: Synthetic oligonucleotide
  Sense strand starting at position 3426 of SEQ ID NO: 1241081
uguguauagagaugagauc

SEQ ID NO: 1245547 - RNA, 19 nt, Artificial Sequence
  Description of Artificial Sequence: Synthetic oligonucleotide
  Antisense strand to SEQ ID NO: 1245546
gaucucaucucuauacaca

SEQ ID NO: 1245548 - RNA, 19 nt, Artificial Sequence
  Description of Artificial Sequence: Synthetic oligonucleotide
  Sense strand starting at position 3722 of SEQ ID NO: 1241081
ucauaaacguggucuggaa

SEQ ID NO: 1245549 - RNA, 19 nt, Artificial Sequence
  Description of Artificial Sequence: Synthetic oligonucleotide
  Antisense strand to SEQ ID NO: 1245548
uuccagaccacguuuauga

SEQ ID NO: 1245550 - RNA, 19 nt, Artificial Sequence
  Description of Artificial Sequence: Synthetic oligonucleotide
  Sense strand starting at position 3879 of SEQ ID NO: 1241081
acuugcucagguugagaga

SEQ ID NO: 1245551 - RNA, 19 nt, Artificial Sequence
  Description of Artificial Sequence: Synthetic oligonucleotide
  Antisense strand to SEQ ID NO: 1245550
ucucucaaccugagcaagu

SEQ ID NO: 1245552 - RNA, 19 nt, Artificial Sequence
  Description of Artificial Sequence: Synthetic oligonucleotide
  Sense strand starting at position 3895 of SEQ ID NO: 1241081
agaggauauuuccaucuac

SEQ ID NO: 1245553 - RNA, 19 nt, Artificial Sequence
  Description of Artificial Sequence: Synthetic oligonucleotide
  Antisense strand to SEQ ID NO: 1245552
guagauggaaauauccucu

SEQ ID NO: 1245554 - RNA, 19 nt, Artificial Sequence
  Description of Artificial Sequence: Synthetic oligonucleotide
  Sense strand starting at position 3910 of SEQ ID NO: 1241081
cuacuugcuggaugaacaa

SEQ ID NO: 1245555 - RNA, 19 nt, Artificial Sequence
  Description of Artificial Sequence: Synthetic oligonucleotide
  Antisense strand to SEQ ID NO: 1245554
uuguucauccagcaaguag

SEQ ID NO: 1245556 - RNA, 19 nt, Artificial Sequence
  Description of Artificial Sequence: Synthetic oligonucleotide
  Sense strand starting at position 3941 of SEQ ID NO: 1241081
caagucuagggauauguuu

SEQ ID NO: 1245557 - RNA, 19 nt, Artificial Sequence
  Description of Artificial Sequence: Synthetic oligonucleotide
  Antisense strand to SEQ ID NO: 1245556
aaacauaucccuagacuug

SEQ ID NO: 1245558 - RNA, 19 nt, Artificial Sequence
  Description of Artificial Sequence: Synthetic oligonucleotide
  Sense strand starting at position 3943 of SEQ ID NO: 1241081
agucuagggauauguuuga

SEQ ID NO: 1245559 - RNA, 19 nt, Artificial Sequence
  Description of Artificial Sequence: Synthetic oligonucleotide
  Antisense strand to SEQ ID NO: 1245558
ucaaacauaucccuagacu

SEQ ID NO: 1245560 - RNA, 19 nt, Artificial Sequence
  Description of Artificial Sequence: Synthetic oligonucleotide
  Sense strand starting at position 3956 of SEQ ID NO: 1241081
guuugaaaugcucagcaaa

SEQ ID NO: 1245561 - RNA, 19 nt, Artificial Sequence
  Description of Artificial Sequence: Synthetic oligonucleotide
  Antisense strand to SEQ ID NO: 1245560
uuugcugagcauuucaaac

SEQ ID NO: 1245562 - RNA, 19 nt, Artificial Sequence
  Description of Artificial Sequence: Synthetic oligonucleotide
  Sense strand starting at position 229 of SEQ ID NO: 1241082
aucauaaguugucuacauu

SEQ ID NO: 1245563 - RNA, 19 nt, Artificial Sequence
  Description of Artificial Sequence: Synthetic oligonucleotide
  Antisense strand to SEQ ID NO: 1245562
aauguagacaacuuaugau

SEQ ID NO: 1245564 - RNA, 19 nt, Artificial Sequence
  Description of Artificial Sequence: Synthetic oligonucleotide
  Sense strand starting at position 230 of SEQ ID NO: 1241082
ucauaaguugucuacauuc

SEQ ID NO: 1245565 - RNA, 19 nt, Artificial Sequence
  Description of Artificial Sequence: Synthetic oligonucleotide
  Antisense strand to SEQ ID NO: 1245564
gaauguagacaacuuauga

SEQ ID NO: 1245566 - RNA, 19 nt, Artificial Sequence
  Description of Artificial Sequence: Synthetic oligonucleotide
  Sense strand starting at position 280 of SEQ ID NO: 1241082
auguuugaaguuugaaaga

SEQ ID NO: 1245567 - RNA, 19 nt, Artificial Sequence
  Description of Artificial Sequence: Synthetic oligonucleotide
  Antisense strand to SEQ ID NO: 1245566
ucuuucaaacuucaaacau

SEQ ID NO: 1245568 - RNA, 19 nt, Artificial Sequence
  Description of Artificial Sequence: Synthetic oligonucleotide
  Sense strand starting at position 308 of SEQ ID NO: 1241082
guugcagcugggagugaua

SEQ ID NO: 1245569 - RNA, 19 nt, Artificial Sequence
  Description of Artificial Sequence: Synthetic oligonucleotide
  Antisense strand to SEQ ID NO: 1245568
uaucacucccagcugcaac

SEQ ID NO: 1245570 - RNA, 19 nt, Artificial Sequence
  Description of Artificial Sequence: Synthetic oligonucleotide
  Sense strand starting at position 311 of SEQ ID NO: 1241082
gcagcugggagugauacau

SEQ ID NO: 1245571 - RNA, 19 nt, Artificial Sequence
  Description of Artificial Sequence: Synthetic oligonucleotide
  Antisense strand to SEQ ID NO: 1245570
auguaucacucccagcugc

SEQ ID NO: 1245572 - RNA, 19 nt, Artificial Sequence
  Description of Artificial Sequence: Synthetic oligonucleotide
  Sense strand starting at position 342 of SEQ ID NO: 1241082
ccagaugagaguugucaau

SEQ ID NO: 1245573 - RNA, 19 nt, Artificial Sequence
  Description of Artificial Sequence: Synthetic oligonucleotide
  Antisense strand to SEQ ID NO: 1245572
auugacaacucucaucugg

SEQ ID NO: 1245574 - RNA, 19 nt, Artificial Sequence
  Description of Artificial Sequence: Synthetic oligonucleotide
  Sense strand starting at position 344 of SEQ ID NO: 1241082
agaugagaguugucaauau

SEQ ID NO: 1245575 - RNA, 19 nt, Artificial Sequence
  Description of Artificial Sequence: Synthetic oligonucleotide
  Antisense strand to SEQ ID NO: 1245574
auauugacaacucucaucu

SEQ ID NO: 1245576 - RNA, 19 nt, Artificial Sequence
  Description of Artificial Sequence: Synthetic oligonucleotide
  Sense strand starting at position 592 of SEQ ID NO: 1241082
auagacugcucagcagaga

SEQ ID NO: 1245577 - RNA, 19 nt, Artificial Sequence
  Description of Artificial Sequence: Synthetic oligonucleotide
  Antisense strand to SEQ ID NO: 1245576
ucucugcugagcagucuau

SEQ ID NO: 1245578 - RNA, 19 nt, Artificial Sequence
  Description of Artificial Sequence: Synthetic oligonucleotide
  Sense strand starting at position 605 of SEQ ID NO: 1241082
cagagaguccuugguggga

SEQ ID NO: 1245579 - RNA, 19 nt, Artificial Sequence
  Description of Artificial Sequence: Synthetic oligonucleotide
  Antisense strand to SEQ ID NO: 1245578
ucccaccaaggacucucug

SEQ ID NO: 1245580 - RNA, 19 nt, Artificial Sequence
  Description of Artificial Sequence: Synthetic oligonucleotide
  Sense strand starting at position 609 of SEQ ID NO: 1241082
gaguccuuggugggagaau

SEQ ID NO: 1245581 - RNA, 19 nt, Artificial Sequence
  Description of Artificial Sequence: Synthetic oligonucleotide
  Antisense strand to SEQ ID NO: 1245580
auucucccaccaaggacuc

SEQ ID NO: 1245582 - RNA, 19 nt, Artificial Sequence
  Description of Artificial Sequence: Synthetic oligonucleotide
  Sense strand starting at position 621 of SEQ ID NO: 1241082
ggagaauuacuuugcuuuc

SEQ ID NO: 1245583 - RNA, 19 nt, Artificial Sequence
  Description of Artificial Sequence: Synthetic oligonucleotide
  Antisense strand to SEQ ID NO: 1245582
gaaagcaaaguaauucucc

SEQ ID NO: 1245584 - RNA, 19 nt, Artificial Sequence
  Description of Artificial Sequence: Synthetic oligonucleotide
  Sense strand starting at position 672 of SEQ ID NO: 1241082
ggaaauggugccuggcaca

SEQ ID NO: 1245585 - RNA, 19 nt, Artificial Sequence
  Description of Artificial Sequence: Synthetic oligonucleotide
  Antisense strand to SEQ ID NO: 1245584
ugugccaggcaccauuucc

SEQ ID NO: 1245586 - RNA, 19 nt, Artificial Sequence
  Description of Artificial Sequence: Synthetic oligonucleotide
  Sense strand starting at position 826 of SEQ ID NO: 1241082
gguucugugcugggagaga

SEQ ID NO: 1245587 - RNA, 19 nt, Artificial Sequence
  Description of Artificial Sequence: Synthetic oligonucleotide
  Antisense strand to SEQ ID NO: 1245586
ucucucccagcacagaacc

SEQ ID NO: 1245588 - RNA, 19 nt, Artificial Sequence
  Description of Artificial Sequence: Synthetic oligonucleotide
  Sense strand starting at position 840 of SEQ ID NO: 1241082
agagaauccuguucuagac

SEQ ID NO: 1245589 - RNA, 19 nt, Artificial Sequence
  Description of Artificial Sequence: Synthetic oligonucleotide
  Antisense strand to SEQ ID NO: 1245588
gucuagaacaggauucucu

SEQ ID NO: 1245590 - RNA, 19 nt, Artificial Sequence
  Description of Artificial Sequence: Synthetic oligonucleotide
  Sense strand starting at position 852 of SEQ ID NO: 1241082
ucuagaccucugugaucuu

SEQ ID NO: 1245591 - RNA, 19 nt, Artificial Sequence
  Description of Artificial Sequence: Synthetic oligonucleotide
  Antisense strand to SEQ ID NO: 1245590
aagaucacagaggucuaga

SEQ ID NO: 1245592 - RNA, 19 nt, Artificial Sequence
  Description of Artificial Sequence: Synthetic oligonucleotide
  Sense strand starting at position 869 of SEQ ID NO: 1241082
uugggcaagucuccuaauu

SEQ ID NO: 1245593 - RNA, 19 nt, Artificial Sequence
  Description of Artificial Sequence: Synthetic oligonucleotide
  Antisense strand to SEQ ID NO: 1245592
aauuaggagacuugcccaa

SEQ ID NO: 1245594 - RNA, 19 nt, Artificial Sequence
  Description of Artificial Sequence: Synthetic oligonucleotide
  Sense strand starting at position 1145 of SEQ ID NO: 1241082
cccaguucuggugaaacca

SEQ ID NO: 1245595 - RNA, 19 nt, Artificial Sequence
  Description of Artificial Sequence: Synthetic oligonucleotide
  Antisense strand to SEQ ID NO: 1245594
ugguuucaccagaacuggg

SEQ ID NO: 1245596 - RNA, 19 nt, Artificial Sequence
  Description of Artificial Sequence: Synthetic oligonucleotide
  Sense strand starting at position 1212 of SEQ ID NO: 1241082
cuccuaucagauugcgaac

SEQ ID NO: 1245597 - RNA, 19 nt, Artificial Sequence
  Description of Artificial Sequence: Synthetic oligonucleotide
  Antisense strand to SEQ ID NO: 1245596
guucgcaaucugauaggag

SEQ ID NO: 1245598 - RNA, 19 nt, Artificial Sequence
  Description of Artificial Sequence: Synthetic oligonucleotide
  Sense strand starting at position 1264 of SEQ ID NO: 1241082
accugaugcccuugaaaga

SEQ ID NO: 1245599 - RNA, 19 nt, Artificial Sequence
  Description of Artificial Sequence: Synthetic oligonucleotide
  Antisense strand to SEQ ID NO: 1245598
ucuuucaagggcaucaggu

SEQ ID NO: 1245600 - RNA, 19 nt, Artificial Sequence
  Description of Artificial Sequence: Synthetic oligonucleotide
  Sense strand starting at position 1273 of SEQ ID NO: 1241082
ccuugaaagagugguagca

SEQ ID NO: 1245601 - RNA, 19 nt, Artificial Sequence
  Description of Artificial Sequence: Synthetic oligonucleotide
  Antisense strand to SEQ ID NO: 1245600
ugcuaccacucuuucaagg

SEQ ID NO: 1245602 - RNA, 19 nt, Artificial Sequence
  Description of Artificial Sequence: Synthetic oligonucleotide
  Sense strand starting at position 1432 of SEQ ID NO: 1241082
ccaauuucagcgcgaugga

SEQ ID NO: 1245603 - RNA, 19 nt, Artificial Sequence
  Description of Artificial Sequence: Synthetic oligonucleotide
  Antisense strand to SEQ ID NO: 1245602
uccaucgcgcugaaauugg

SEQ ID NO: 1245604 - RNA, 19 nt, Artificial Sequence
  Description of Artificial Sequence: Synthetic oligonucleotide
  Sense strand starting at position 1812 of SEQ ID NO: 1241082
cgggaaggugucuacaacu

SEQ ID NO: 1245605 - RNA, 19 nt, Artificial Sequence
  Description of Artificial Sequence: Synthetic oligonucleotide
  Antisense strand to SEQ ID NO: 1245604
aguuguagacaccuucccg

SEQ ID NO: 1245606 - RNA, 19 nt, Artificial Sequence
  Description of Artificial Sequence: Synthetic oligonucleotide
  Sense strand starting at position 1843 of SEQ ID NO: 1241082
cagacagucccaggaucau

SEQ ID NO: 1245607 - RNA, 19 nt, Artificial Sequence
  Description of Artificial Sequence: Synthetic oligonucleotide
  Antisense strand to SEQ ID NO: 1245606
augauccugggacugucug

SEQ ID NO: 1245608 - RNA, 19 nt, Artificial Sequence
  Description of Artificial Sequence: Synthetic oligonucleotide
  Sense strand starting at position 2177 of SEQ ID NO: 1241082
gacaguaauccuggucaca

SEQ ID NO: 1245609 - RNA, 19 nt, Artificial Sequence
  Description of Artificial Sequence: Synthetic oligonucleotide
  Antisense strand to SEQ ID NO: 1245608
ugugaccaggauuacuguc

SEQ ID NO: 1245610 - RNA, 19 nt, Artificial Sequence
  Description of Artificial Sequence: Synthetic oligonucleotide
  Sense strand starting at position 2180 of SEQ ID NO: 1241082
aguaauccuggucacacau

SEQ ID NO: 1245611 - RNA, 19 nt, Artificial Sequence
  Description of Artificial Sequence: Synthetic oligonucleotide
  Antisense strand to SEQ ID NO: 1245610
augugugaccaggauuacu

SEQ ID NO: 1245612 - RNA, 19 nt, Artificial Sequence
  Description of Artificial Sequence: Synthetic oligonucleotide
  Sense strand starting at position 2320 of SEQ ID NO: 1241082
gaaaucgacccuuguuaau

SEQ ID NO: 1245613 - RNA, 19 nt, Artificial Sequence
  Description of Artificial Sequence: Synthetic oligonucleotide
  Antisense strand to SEQ ID NO: 1245612
auuaacaagggucgauuuc

SEQ ID NO: 1245614 - RNA, 19 nt, Artificial Sequence
  Description of Artificial Sequence: Synthetic oligonucleotide
  Sense strand starting at position 2347 of SEQ ID NO: 1241082
uaguaagaggcuuaaaugu

SEQ ID NO: 1245615 - RNA, 19 nt, Artificial Sequence
  Description of Artificial Sequence: Synthetic oligonucleotide
  Antisense strand to SEQ ID NO: 1245614
acauuuaagccucuuacua

SEQ ID NO: 1245616 - RNA, 19 nt, Artificial Sequence
  Description of Artificial Sequence: Synthetic oligonucleotide
  Sense strand starting at position 2354 of SEQ ID NO: 1241082
aggcuuaaauguuugugga

SEQ ID NO: 1245617 - RNA, 19 nt, Artificial Sequence
  Description of Artificial Sequence: Synthetic oligonucleotide
  Antisense strand to SEQ ID NO: 1245616
uccacaaacauuuaagccu

SEQ ID NO: 1245618 - RNA, 19 nt, Artificial Sequence
  Description of Artificial Sequence: Synthetic oligonucleotide
  Sense strand starting at position 2356 of SEQ ID NO: 1241082
gcuuaaauguuuguggaga

SEQ ID NO: 1245619 - RNA, 19 nt, Artificial Sequence
  Description of Artificial Sequence: Synthetic oligonucleotide
  Antisense strand to SEQ ID NO: 1245618
ucuccacaaacauuuaagc

SEQ ID NO: 1245620 - RNA, 19 nt, Artificial Sequence
  Description of Artificial Sequence: Synthetic oligonucleotide
  Sense strand starting at position 2383 of SEQ ID NO: 1241082
uugguugaaugcuccuaca

SEQ ID NO: 1245621 - RNA, 19 nt, Artificial Sequence
  Description of Artificial Sequence: Synthetic oligonucleotide
  Antisense strand to SEQ ID NO: 1245620
uguaggagcauucaaccaa

SEQ ID NO: 1245622 - RNA, 19 nt, Artificial Sequence
  Description of Artificial Sequence: Synthetic oligonucleotide
  Sense strand starting at position 2436 of SEQ ID NO: 1241082
caggacaccuaguuaaaug

SEQ ID NO: 1245623 - RNA, 19 nt, Artificial Sequence
  Description of Artificial Sequence: Synthetic oligonucleotide
  Antisense strand to SEQ ID NO: 1245622
cauuuaacuagguguccug

SEQ ID NO: 1245624 - RNA, 19 nt, Artificial Sequence
  Description of Artificial Sequence: Synthetic oligonucleotide
  Sense strand starting at position 2507 of SEQ ID NO: 1241082
ugcaguauuugggacauaa

SEQ ID NO: 1245625 - RNA, 19 nt, Artificial Sequence
  Description of Artificial Sequence: Synthetic oligonucleotide
  Antisense strand to SEQ ID NO: 1245624
uuaugucccaaauacugca

SEQ ID NO: 1245626 - RNA, 19 nt, Artificial Sequence
  Description of Artificial Sequence: Synthetic oligonucleotide
  Sense strand starting at position 2776 of SEQ ID NO: 1241082
caguuugcucagcagagga

SEQ ID NO: 1245627 - RNA, 19 nt, Artificial Sequence
  Description of Artificial Sequence: Synthetic oligonucleotide
  Antisense strand to SEQ ID NO: 1245626
uccucugcugagcaaacug

SEQ ID NO: 1245628 - RNA, 19 nt, Artificial Sequence
  Description of Artificial Sequence: Synthetic oligonucleotide
  Sense strand starting at position 3313 of SEQ ID NO: 1241082
ccagaugauucugagauuu

SEQ ID NO: 1245629 - RNA, 19 nt, Artificial Sequence
  Description of Artificial Sequence: Synthetic oligonucleotide
  Antisense strand to SEQ ID NO: 1245628
aaaucucagaaucaucugg

SEQ ID NO: 1245630 - RNA, 19 nt, Artificial Sequence
  Description of Artificial Sequence: Synthetic oligonucleotide
  Sense strand starting at position 3348 of SEQ ID NO: 1241082
caguguuaagcugaucauu

SEQ ID NO: 1245631 - RNA, 19 nt, Artificial Sequence
  Description of Artificial Sequence: Synthetic oligonucleotide
  Antisense strand to SEQ ID NO: 1245630
aaugaucagcuuaacacug

SEQ ID NO: 1245632 - RNA, 19 nt, Artificial Sequence
  Description of Artificial Sequence: Synthetic oligonucleotide
  Sense strand starting at position 3351 of SEQ ID NO: 1241082
uguuaagcugaucauuaua

SEQ ID NO: 1245633 - RNA, 19 nt, Artificial Sequence
  Description of Artificial Sequence: Synthetic oligonucleotide
  Antisense strand to SEQ ID NO: 1245632
uauaaugaucagcuuaaca

SEQ ID NO: 1245634 - RNA, 19 nt, Artificial Sequence
  Description of Artificial Sequence: Synthetic oligonucleotide
  Sense strand starting at position 3426 of SEQ ID NO: 1241082
ccagaugugguacaaagua

SEQ ID NO: 1245635 - RNA, 19 nt, Artificial Sequence
  Description of Artificial Sequence: Synthetic oligonucleotide
  Antisense strand to SEQ ID NO: 1245634
uacuuuguaccacaucugg

SEQ ID NO: 1245636 - RNA, 19 nt, Artificial Sequence
  Description of Artificial Sequence: Synthetic oligonucleotide
  Sense strand starting at position 3609 of SEQ ID NO: 1241082
acuacaugugcccagcuaa

SEQ ID NO: 1245637 - RNA, 19 nt, Artificial Sequence
  Description of Artificial Sequence: Synthetic oligonucleotide
  Antisense strand to SEQ ID NO: 1245636
uuagcugggcacauguagu

SEQ ID NO: 1245638 - RNA, 19 nt, Artificial Sequence
  Description of Artificial Sequence: Synthetic oligonucleotide
  Sense strand starting at position 3781 of SEQ ID NO: 1241082
aaagcacagugguucuaaa

SEQ ID NO: 1245639 - RNA, 19 nt, Artificial Sequence
  Description of Artificial Sequence: Synthetic oligonucleotide
  Antisense strand to SEQ ID NO: 1245638
uuuagaaccacugugcuuu

SEQ ID NO: 1245640 - RNA, 19 nt, Artificial Sequence
  Description of Artificial Sequence: Synthetic oligonucleotide
  Sense strand starting at position 3824 of SEQ ID NO: 1241082
guggauuuauuagaaauuc

SEQ ID NO: 1245641 - RNA, 19 nt, Artificial Sequence
  Description of Artificial Sequence: Synthetic oligonucleotide
  Antisense strand to SEQ ID NO: 1245640
gaauuucuaauaaauccac

SEQ ID NO: 1245642 - RNA, 19 nt, Artificial Sequence
  Description of Artificial Sequence: Synthetic oligonucleotide
  Sense strand starting at position 115 of SEQ ID NO: 1241083
aaagguagccaugguuacu

SEQ ID NO: 1245643 - RNA, 19 nt, Artificial Sequence
  Description of Artificial Sequence: Synthetic oligonucleotide
  Antisense strand to SEQ ID NO: 1245642
aguaaccauggcuaccuuu

SEQ ID NO: 1245644 - RNA, 19 nt, Artificial Sequence
  Description of Artificial Sequence: Synthetic oligonucleotide
  Sense strand starting at position 126 of SEQ ID NO: 1241083
ugguuacuguuacuaaaug

SEQ ID NO: 1245645 - RNA, 19 nt, Artificial Sequence
  Description of Artificial Sequence: Synthetic oligonucleotide
  Antisense strand to SEQ ID NO: 1245644
cauuuaguaacaguaacca

SEQ ID NO: 1245646 - RNA, 19 nt, Artificial Sequence
  Description of Artificial Sequence: Synthetic oligonucleotide
  Sense strand starting at position 177 of SEQ ID NO: 1241083
ugaccuggcuaugucauaa

SEQ ID NO: 1245647 - RNA, 19 nt, Artificial Sequence
  Description of Artificial Sequence: Synthetic oligonucleotide
  Antisense strand to SEQ ID NO: 1245646
uuaugacauagccagguca

SEQ ID NO: 1245648 - RNA, 19 nt, Artificial Sequence
  Description of Artificial Sequence: Synthetic oligonucleotide
  Sense strand starting at position 189 of SEQ ID NO: 1241083
gucauaauaucaguaauag

SEQ ID NO: 1245649 - RNA, 19 nt, Artificial Sequence
  Description of Artificial Sequence: Synthetic oligonucleotide
  Antisense strand to SEQ ID NO: 1245648
cuauuacugauauuaugac

SEQ ID NO: 1245650 - RNA, 19 nt, Artificial Sequence
  Description of Artificial Sequence: Synthetic oligonucleotide
  Sense strand starting at position 330 of SEQ ID NO: 1241083
acggaauuacuuggucaaa

SEQ ID NO: 1245651 - RNA, 19 nt, Artificial Sequence
  Description of Artificial Sequence: Synthetic oligonucleotide
  Antisense strand to SEQ ID NO: 1245650
uuugaccaaguaauuccgu

SEQ ID NO: 1245652 - RNA, 19 nt, Artificial Sequence
  Description of Artificial Sequence: Synthetic oligonucleotide
  Sense strand starting at position 331 of SEQ ID NO: 1241083
cggaauuacuuggucaaag

SEQ ID NO: 1245653 - RNA, 19 nt, Artificial Sequence
  Description of Artificial Sequence: Synthetic oligonucleotide
  Antisense strand to SEQ ID NO: 1245652
cuuugaccaaguaauuccg

SEQ ID NO: 1245654 - RNA, 19 nt, Artificial Sequence
  Description of Artificial Sequence: Synthetic oligonucleotide
  Sense strand starting at position 364 of SEQ ID NO: 1241083
agggucaauuuguauaauu

SEQ ID NO: 1245655 - RNA, 19 nt, Artificial Sequence
  Description of Artificial Sequence: Synthetic oligonucleotide
  Antisense strand to SEQ ID NO: 1245654
aauuauacaaauugacccu

SEQ ID NO: 1245656 - RNA, 19 nt, Artificial Sequence
  Description of Artificial Sequence: Synthetic oligonucleotide
  Sense strand starting at position 470 of SEQ ID NO: 1241083
uguggucuaaccuagucua

SEQ ID NO: 1245657 - RNA, 19 nt, Artificial Sequence
  Description of Artificial Sequence: Synthetic oligonucleotide
  Antisense strand to SEQ ID NO: 1245656
uagacuagguuagaccaca

SEQ ID NO: 1245658 - RNA, 19 nt, Artificial Sequence
  Description of Artificial Sequence: Synthetic oligonucleotide
  Sense strand starting at position 528 of SEQ ID NO: 1241083
cuaucagcuucuguauaag

SEQ ID NO: 1245659 - RNA, 19 nt, Artificial Sequence
  Description of Artificial Sequence: Synthetic oligonucleotide
  Antisense strand to SEQ ID NO: 1245658
cuuauacagaagcugauag

SEQ ID NO: 1245660 - RNA, 19 nt, Artificial Sequence
  Description of Artificial Sequence: Synthetic oligonucleotide
  Sense strand starting at position 531 of SEQ ID NO: 1241083
ucagcuucuguauaagcaa

SEQ ID NO: 1245661 - RNA, 19 nt, Artificial Sequence
  Description of Artificial Sequence: Synthetic oligonucleotide
  Antisense strand to SEQ ID NO: 1245660
uugcuuauacagaagcuga

SEQ ID NO: 1245662 - RNA, 19 nt, Artificial Sequence
  Description of Artificial Sequence: Synthetic oligonucleotide
  Sense strand starting at position 1021 of SEQ ID NO: 1241083
guagguuguagugggauuu

SEQ ID NO: 1245663 - RNA, 19 nt, Artificial Sequence
  Description of Artificial Sequence: Synthetic oligonucleotide
  Antisense strand to SEQ ID NO: 1245662
aaaucccacuacaaccuac

SEQ ID NO: 1245664 - RNA, 19 nt, Artificial Sequence
  Description of Artificial Sequence: Synthetic oligonucleotide
  Sense strand starting at position 1534 of SEQ ID NO: 1241083
cgggcaucuucgguaauuu

SEQ ID NO: 1245665 - RNA, 19 nt, Artificial Sequence
  Description of Artificial Sequence: Synthetic oligonucleotide
  Antisense strand to SEQ ID NO: 1245664
aaauuaccgaagaugcccg

SEQ ID NO: 1245666 - RNA, 19 nt, Artificial Sequence
  Description of Artificial Sequence: Synthetic oligonucleotide
  Sense strand starting at position 1764 of SEQ ID NO: 1241083
aaucgaauauauucggaaa

SEQ ID NO: 1245667 - RNA, 19 nt, Artificial Sequence
  Description of Artificial Sequence: Synthetic oligonucleotide
  Antisense strand to SEQ ID NO: 1245666
uuuccgaauauauucgauu

SEQ ID NO: 1245668 - RNA, 19 nt, Artificial Sequence
  Description of Artificial Sequence: Synthetic oligonucleotide
  Sense strand starting at position 1795 of SEQ ID NO: 1241083
guauaaccauaaucggaga

SEQ ID NO: 1245669 - RNA, 19 nt, Artificial Sequence
  Description of Artificial Sequence: Synthetic oligonucleotide
  Antisense strand to SEQ ID NO: 1245668
ucuccgauuaugguuauac

SEQ ID NO: 1245670 - RNA, 19 nt, Artificial Sequence
  Description of Artificial Sequence: Synthetic oligonucleotide
  Sense strand starting at position 1800 of SEQ ID NO: 1241083
accauaaucggagauguuc

SEQ ID NO: 1245671 - RNA, 19 nt, Artificial Sequence
  Description of Artificial Sequence: Synthetic oligonucleotide
  Antisense strand to SEQ ID NO: 1245670
gaacaucuccgauuauggu

SEQ ID NO: 1245672 - RNA, 19 nt, Artificial Sequence
  Description of Artificial Sequence: Synthetic oligonucleotide
  Sense strand starting at position 1808 of SEQ ID NO: 1241083
cggagauguucguuuauuu

SEQ ID NO: 1245673 - RNA, 19 nt, Artificial Sequence
  Description of Artificial Sequence: Synthetic oligonucleotide
  Antisense strand to SEQ ID NO: 1245672
aaauaaacgaacaucuccg

SEQ ID NO: 1245674 - RNA, 19 nt, Artificial Sequence
  Description of Artificial Sequence: Synthetic oligonucleotide
  Sense strand starting at position 2248 of SEQ ID NO: 1241083
gaucuaugacgcugaacuu

SEQ ID NO: 1245675 - RNA, 19 nt, Artificial Sequence
  Description of Artificial Sequence: Synthetic oligonucleotide
  Antisense strand to SEQ ID NO: 1245674
aaguucagcgucauagauc

SEQ ID NO: 1245676 - RNA, 19 nt, Artificial Sequence
  Description of Artificial Sequence: Synthetic oligonucleotide
  Sense strand starting at position 2260 of SEQ ID NO: 1241083
ugaacuugaguuugaguuu

SEQ ID NO: 1245677 - RNA, 19 nt, Artificial Sequence
  Description of Artificial Sequence: Synthetic oligonucleotide
  Antisense strand to SEQ ID NO: 1245676
aaacucaaacucaaguuca

SEQ ID NO: 1245678 - RNA, 19 nt, Artificial Sequence
  Description of Artificial Sequence: Synthetic oligonucleotide
  Sense strand starting at position 2318 of SEQ ID NO: 1241083
ccuugcuccgcagaagaga

SEQ ID NO: 1245679 - RNA, 19 nt, Artificial Sequence
  Description of Artificial Sequence: Synthetic oligonucleotide
  Antisense strand to SEQ ID NO: 1245678
ucucuucugcggagcaagg

SEQ ID NO: 1245680 - RNA, 19 nt, Artificial Sequence
  Description of Artificial Sequence: Synthetic oligonucleotide
  Sense strand starting at position 2333 of SEQ ID NO: 1241083
gagaguaaguucccuugga

SEQ ID NO: 1245681 - RNA, 19 nt, Artificial Sequence
  Description of Artificial Sequence: Synthetic oligonucleotide
  Antisense strand to SEQ ID NO: 1245680
uccaagggaacuuacucuc

SEQ ID NO: 1245682 - RNA, 19 nt, Artificial Sequence
  Description of Artificial Sequence: Synthetic oligonucleotide
  Sense strand starting at position 2334 of SEQ ID NO: 1241083
agaguaaguucccuuggag

SEQ ID NO: 1245683 - RNA, 19 nt, Artificial Sequence
  Description of Artificial Sequence: Synthetic oligonucleotide
  Antisense strand to SEQ ID NO: 1245682
cuccaagggaacuuacucu

SEQ ID NO: 1245684 - RNA, 19 nt, Artificial Sequence
  Description of Artificial Sequence: Synthetic oligonucleotide
  Sense strand starting at position 2337 of SEQ ID NO: 1241083
guaaguucccuuggaggaa

SEQ ID NO: 1245685 - RNA, 19 nt, Artificial Sequence
  Description of Artificial Sequence: Synthetic oligonucleotide
  Antisense strand to SEQ ID NO: 1245684
uuccuccaagggaacuuac

SEQ ID NO: 1245686 - RNA, 19 nt, Artificial Sequence
  Description of Artificial Sequence: Synthetic oligonucleotide
  Sense strand starting at position 2528 of SEQ ID NO: 1241083
agagauacguuagagauuu

SEQ ID NO: 1245687 - RNA, 19 nt, Artificial Sequence
  Description of Artificial Sequence: Synthetic oligonucleotide
  Antisense strand to SEQ ID NO: 1245686
aaaucucuaacguaucucu

SEQ ID NO: 1245688 - RNA, 19 nt, Artificial Sequence
  Description of Artificial Sequence: Synthetic oligonucleotide
  Sense strand starting at position 2567 of SEQ ID NO: 1241083
agucaaauuggcugaucuu

SEQ ID NO: 1245689 - RNA, 19 nt, Artificial Sequence
  Description of Artificial Sequence: Synthetic oligonucleotide
  Antisense strand to SEQ ID NO: 1245688
aagaucagccaauuugacu

SEQ ID NO: 1245690 - RNA, 19 nt, Artificial Sequence
  Description of Artificial Sequence: Synthetic oligonucleotide
  Sense strand starting at position 2568 of SEQ ID NO: 1241083
gucaaauuggcugaucuuu

SEQ ID NO: 1245691 - RNA, 19 nt, Artificial Sequence
  Description of Artificial Sequence: Synthetic oligonucleotide
  Antisense strand to SEQ ID NO: 1245690
aaagaucagccaauuugac

SEQ ID NO: 1245692 - RNA, 19 nt, Artificial Sequence
  Description of Artificial Sequence: Synthetic oligonucleotide
  Sense strand starting at position 3227 of SEQ ID NO: 1241083
ugcugagauuacuuuggaa

SEQ ID NO: 1245693 - RNA, 19 nt, Artificial Sequence
  Description of Artificial Sequence: Synthetic oligonucleotide
  Antisense strand to SEQ ID NO: 1245692
uuccaaaguaaucucagca

SEQ ID NO: 1245694 - RNA, 19 nt, Artificial Sequence
  Description of Artificial Sequence: Synthetic oligonucleotide
  Sense strand starting at position 3229 of SEQ ID NO: 1241083
cugagauuacuuuggaagu

SEQ ID NO: 1245695 - RNA, 19 nt, Artificial Sequence
  Description of Artificial Sequence: Synthetic oligonucleotide
  Antisense strand to SEQ ID NO: 1245694
acuuccaaaguaaucucag

SEQ ID NO: 1245696 - RNA, 19 nt, Artificial Sequence
  Description of Artificial Sequence: Synthetic oligonucleotide
  Sense strand starting at position 3235 of SEQ ID NO: 1241083
uuacuuuggaagugcaaga

SEQ ID NO: 1245697 - RNA, 19 nt, Artificial Sequence
  Description of Artificial Sequence: Synthetic oligonucleotide
  Antisense strand to SEQ ID NO: 1245696
ucuugcacuuccaaaguaa

SEQ ID NO: 1245698 - RNA, 19 nt, Artificial Sequence
  Description of Artificial Sequence: Synthetic oligonucleotide
  Sense strand starting at position 3292 of SEQ ID NO: 1241083
uguuuaaagacauggauug

SEQ ID NO: 1245699 - RNA, 19 nt, Artificial Sequence
  Description of Artificial Sequence: Synthetic oligonucleotide
  Antisense strand to SEQ ID NO: 1245698
caauccaugucuuuaaaca

SEQ ID NO: 1245700 - RNA, 19 nt, Artificial Sequence
  Description of Artificial Sequence: Synthetic oligonucleotide
  Sense strand starting at position 3293 of SEQ ID NO: 1241083
guuuaaagacauggauugu

SEQ ID NO: 1245701 - RNA, 19 nt, Artificial Sequence
  Description of Artificial Sequence: Synthetic oligonucleotide
  Antisense strand to SEQ ID NO: 1245700
acaauccaugucuuuaaac

SEQ ID NO: 1245702 - RNA, 19 nt, Artificial Sequence
  Description of Artificial Sequence: Synthetic oligonucleotide
  Sense strand starting at position 3321 of SEQ ID NO: 1241083
guauaacacuuguuagauc

SEQ ID NO: 1245703 - RNA, 19 nt, Artificial Sequence
  Description of Artificial Sequence: Synthetic oligonucleotide
  Antisense strand to SEQ ID NO: 1245702
gaucuaacaaguguuauac

SEQ ID NO: 1245704 - RNA, 19 nt, Artificial Sequence
  Description of Artificial Sequence: Synthetic oligonucleotide
  Sense strand starting at position 3330 of SEQ ID NO: 1241083
uuguuagaucucuaagcca

SEQ ID NO: 1245705 - RNA, 19 nt, Artificial Sequence
  Description of Artificial Sequence: Synthetic oligonucleotide
  Antisense strand to SEQ ID NO: 1245704
uggcuuagagaucuaacaa

SEQ ID NO: 1245706 - RNA, 19 nt, Artificial Sequence
  Description of Artificial Sequence: Synthetic oligonucleotide
  Sense strand starting at position 3459 of SEQ ID NO: 1241083
uggugcuuuacaggaaaug

SEQ ID NO: 1245707 - RNA, 19 nt, Artificial Sequence
  Description of Artificial Sequence: Synthetic oligonucleotide
  Antisense strand to SEQ ID NO: 1245706
cauuuccuguaaagcacca

SEQ ID NO: 1245708 - RNA, 19 nt, Artificial Sequence
  Description of Artificial Sequence: Synthetic oligonucleotide
  Sense strand starting at position 3460 of SEQ ID NO: 1241083
ggugcuuuacaggaaaugu

SEQ ID NO: 1245709 - RNA, 19 nt, Artificial Sequence
  Description of Artificial Sequence: Synthetic oligonucleotide
  Antisense strand to SEQ ID NO: 1245708
acauuuccuguaaagcacc

SEQ ID NO: 1245710 - RNA, 19 nt, Artificial Sequence
  Description of Artificial Sequence: Synthetic oligonucleotide
  Sense strand starting at position 3481 of SEQ ID NO: 1241083
ggagguaacggauguuaug

SEQ ID NO: 1245711 - RNA, 19 nt, Artificial Sequence
  Description of Artificial Sequence: Synthetic oligonucleotide
  Antisense strand to SEQ ID NO: 1245710
cauaacauccguuaccucc

SEQ ID NO: 1245712 - RNA, 19 nt, Artificial Sequence
  Description of Artificial Sequence: Synthetic oligonucleotide
  Sense strand starting at position 3518 of SEQ ID NO: 1241083
agaggcuuauaugcacauu

SEQ ID NO: 1245713 - RNA, 19 nt, Artificial Sequence
  Description of Artificial Sequence: Synthetic oligonucleotide
  Antisense strand to SEQ ID NO: 1245712
aaugugcauauaagccucu

SEQ ID NO: 1245714 - RNA, 19 nt, Artificial Sequence
  Description of Artificial Sequence: Synthetic oligonucleotide
  Sense strand starting at position 3521 of SEQ ID NO: 1241083
ggcuuauaugcacauugaa

SEQ ID NO: 1245715 - RNA, 19 nt, Artificial Sequence
  Description of Artificial Sequence: Synthetic oligonucleotide
  Antisense strand to SEQ ID NO: 1245714
uucaaugugcauauaagcc

SEQ ID NO: 1245716 - RNA, 19 nt, Artificial Sequence
  Description of Artificial Sequence: Synthetic oligonucleotide
  Sense strand starting at position 3832 of SEQ ID NO: 1241083
gcaaauaggaaaugaaguu

SEQ ID NO: 1245717 - RNA, 19 nt, Artificial Sequence
  Description of Artificial Sequence: Synthetic oligonucleotide
  Antisense strand to SEQ ID NO: 1245716
aacuucauuuccuauuugc

SEQ ID NO: 1245718 - RNA, 19 nt, Artificial Sequence
  Description of Artificial Sequence: Synthetic oligonucleotide
  Sense strand starting at position 3864 of SEQ ID NO: 1241083
uuucuaagguaguuggaua

SEQ ID NO: 1245719 - RNA, 19 nt, Artificial Sequence
  Description of Artificial Sequence: Synthetic oligonucleotide
  Antisense strand to SEQ ID NO: 1245718
uauccaacuaccuuagaaa

SEQ ID NO: 1245720 - RNA, 19 nt, Artificial Sequence
  Description of Artificial Sequence: Synthetic oligonucleotide
  Sense strand starting at position 3865 of SEQ ID NO: 1241083
uucuaagguaguuggauaa

SEQ ID NO: 1245721 - RNA, 19 nt, Artificial Sequence
  Description of Artificial Sequence: Synthetic oligonucleotide
  Antisense strand to SEQ ID NO: 1245720
uuauccaacuaccuuagaa

SEQ ID NO: 1245722 - RNA, 19 nt, Artificial Sequence
  Description of Artificial Sequence: Synthetic oligonucleotide
  Sense strand starting at position 103 of SEQ ID NO: 1241084
gagagagcaagauguuagu

SEQ ID NO: 1245723 - RNA, 19 nt, Artificial Sequence
  Description of Artificial Sequence: Synthetic oligonucleotide
  Antisense strand to SEQ ID NO: 1245722
acuaacaucuugcucucuc

SEQ ID NO: 1245724 - RNA, 19 nt, Artificial Sequence
  Description of Artificial Sequence: Synthetic oligonucleotide
  Sense strand starting at position 116 of SEQ ID NO: 1241084
guuaguuacugggucagga

SEQ ID NO: 1245725 - RNA, 19 nt, Artificial Sequence
  Description of Artificial Sequence: Synthetic oligonucleotide
  Antisense strand to SEQ ID NO: 1245724
uccugacccaguaacuaac

SEQ ID NO: 1245726 - RNA, 19 nt, Artificial Sequence
  Description of Artificial Sequence: Synthetic oligonucleotide
  Sense strand starting at position 147 of SEQ ID NO: 1241084
ucaucacuugggugggauu

SEQ ID NO: 1245727 - RNA, 19 nt, Artificial Sequence
  Description of Artificial Sequence: Synthetic oligonucleotide
  Antisense strand to SEQ ID NO: 1245726
aaucccacccaagugauga

SEQ ID NO: 1245728 - RNA, 19 nt, Artificial Sequence
  Description of Artificial Sequence: Synthetic oligonucleotide
  Sense strand starting at position 148 of SEQ ID NO: 1241084
caucacuugggugggauua

SEQ ID NO: 1245729 - RNA, 19 nt, Artificial Sequence
  Description of Artificial Sequence: Synthetic oligonucleotide
  Antisense strand to SEQ ID NO: 1245728
uaaucccacccaagugaug

SEQ ID NO: 1245730 - RNA, 19 nt, Artificial Sequence
  Description of Artificial Sequence: Synthetic oligonucleotide
  Sense strand starting at position 268 of SEQ ID NO: 1241084
ccaccuauugcccagauga

SEQ ID NO: 1245731 - RNA, 19 nt, Artificial Sequence
  Description of Artificial Sequence: Synthetic oligonucleotide
  Antisense strand to SEQ ID NO: 1245730
ucaucugggcaauaggugg

SEQ ID NO: 1245732 - RNA, 19 nt, Artificial Sequence
  Description of Artificial Sequence: Synthetic oligonucleotide
  Sense strand starting at position 270 of SEQ ID NO: 1241084
accuauugcccagaugagu

SEQ ID NO: 1245733 - RNA, 19 nt, Artificial Sequence
  Description of Artificial Sequence: Synthetic oligonucleotide
  Antisense strand to SEQ ID NO: 1245732
acucaucugggcaauaggu

SEQ ID NO: 1245734 - RNA, 19 nt, Artificial Sequence
  Description of Artificial Sequence: Synthetic oligonucleotide
  Sense strand starting at position 331 of SEQ ID NO: 1241084
gguaauaacucaccagagu

SEQ ID NO: 1245735 - RNA, 19 nt, Artificial Sequence
  Description of Artificial Sequence: Synthetic oligonucleotide
  Antisense strand to SEQ ID NO: 1245734
acucuggugaguuauuacc

SEQ ID NO: 1245736 - RNA, 19 nt, Artificial Sequence
  Description of Artificial Sequence: Synthetic oligonucleotide
  Sense strand starting at position 340 of SEQ ID NO: 1241084
ucaccagaguacuccuaua

SEQ ID NO: 1245737 - RNA, 19 nt, Artificial Sequence
  Description of Artificial Sequence: Synthetic oligonucleotide
  Antisense strand to SEQ ID NO: 1245736
uauaggaguacucugguga

SEQ ID NO: 1245738 - RNA, 19 nt, Artificial Sequence
  Description of Artificial Sequence: Synthetic oligonucleotide
  Sense strand starting at position 543 of SEQ ID NO: 1241084
ccugaccuguguuuaauca

SEQ ID NO: 1245739 - RNA, 19 nt, Artificial Sequence
  Description of Artificial Sequence: Synthetic oligonucleotide
  Antisense strand to SEQ ID NO: 1245738
ugauuaaacacaggucagg

SEQ ID NO: 1245740 - RNA, 19 nt, Artificial Sequence
  Description of Artificial Sequence: Synthetic oligonucleotide
  Sense strand starting at position 544 of SEQ ID NO: 1241084
cugaccuguguuuaaucaa

SEQ ID NO: 1245741 - RNA, 19 nt, Artificial Sequence
  Description of Artificial Sequence: Synthetic oligonucleotide
  Antisense strand to SEQ ID NO: 1245740
uugauuaaacacaggucag

SEQ ID NO: 1245742 - RNA, 19 nt, Artificial Sequence
  Description of Artificial Sequence: Synthetic oligonucleotide
  Sense strand starting at position 571 of SEQ ID NO: 1241084
uaaguaaaggccugcugau

SEQ ID NO: 1245743 - RNA, 19 nt, Artificial Sequence
  Description of Artificial Sequence: Synthetic oligonucleotide
  Antisense strand to SEQ ID NO: 1245742
aucagcaggccuuuacuua

SEQ ID NO: 1245744 - RNA, 19 nt, Artificial Sequence
  Description of Artificial Sequence: Synthetic oligonucleotide
  Sense strand starting at position 778 of SEQ ID NO: 1241084
ccugcucagagguguagaa

SEQ ID NO: 1245745 - RNA, 19 nt, Artificial Sequence
  Description of Artificial Sequence: Synthetic oligonucleotide
  Antisense strand to SEQ ID NO: 1245744
uucuacaccucugagcagg

SEQ ID NO: 1245746 - RNA, 19 nt, Artificial Sequence
  Description of Artificial Sequence: Synthetic oligonucleotide
  Sense strand starting at position 1315 of SEQ ID NO: 1241084
acacgagauuuagcugcuu

SEQ ID NO: 1245747 - RNA, 19 nt, Artificial Sequence
  Description of Artificial Sequence: Synthetic oligonucleotide
  Antisense strand to SEQ ID NO: 1245746
aagcagcuaaaucucgugu

SEQ ID NO: 1245748 - RNA, 19 nt, Artificial Sequence
  Description of Artificial Sequence: Synthetic oligonucleotide
  Sense strand starting at position 1317 of SEQ ID NO: 1241084
acgagauuuagcugcuuac

SEQ ID NO: 1245749 - RNA, 19 nt, Artificial Sequence
  Description of Artificial Sequence: Synthetic oligonucleotide
  Antisense strand to SEQ ID NO: 1245748
guaagcagcuaaaucucgu

SEQ ID NO: 1245750 - RNA, 19 nt, Artificial Sequence
  Description of Artificial Sequence: Synthetic oligonucleotide
  Sense strand starting at position 1605 of SEQ ID NO: 1241084
guuuaucccuuucuggaau

SEQ ID NO: 1245751 - RNA, 19 nt, Artificial Sequence
  Description of Artificial Sequence: Synthetic oligonucleotide
  Antisense strand to SEQ ID NO: 1245750
auuccagaaagggauaaac

SEQ ID NO: 1245752 - RNA, 19 nt, Artificial Sequence
  Description of Artificial Sequence: Synthetic oligonucleotide
  Sense strand starting at position 1831 of SEQ ID NO: 1241084
uuaagagauaagcguuaag

SEQ ID NO: 1245753 - RNA, 19 nt, Artificial Sequence
  Description of Artificial Sequence: Synthetic oligonucleotide
  Antisense strand to SEQ ID NO: 1245752
cuuaacgcuuaucucuuaa

SEQ ID NO: 1245754 - RNA, 19 nt, Artificial Sequence
  Description of Artificial Sequence: Synthetic oligonucleotide
  Sense strand starting at position 1875 of SEQ ID NO: 1241084
cuggauuggucucucugga

SEQ ID NO: 1245755 - RNA, 19 nt, Artificial Sequence
  Description of Artificial Sequence: Synthetic oligonucleotide
  Antisense strand to SEQ ID NO: 1245754
uccagagagaccaauccag

SEQ ID NO: 1245756 - RNA, 19 nt, Artificial Sequence
  Description of Artificial Sequence: Synthetic oligonucleotide
  Sense strand starting at position 1954 of SEQ ID NO: 1241084
agcgaucagccggagacau

SEQ ID NO: 1245757 - RNA, 19 nt, Artificial Sequence
  Description of Artificial Sequence: Synthetic oligonucleotide
  Antisense strand to SEQ ID NO: 1245756
augucuccggcugaucgcu

SEQ ID NO: 1245758 - RNA, 19 nt, Artificial Sequence
  Description of Artificial Sequence: Synthetic oligonucleotide
  Sense strand starting at position 2075 of SEQ ID NO: 1241084
ugagcaagguucuuauccu

SEQ ID NO: 1245759 - RNA, 19 nt, Artificial Sequence
  Description of Artificial Sequence: Synthetic oligonucleotide
  Antisense strand to SEQ ID NO: 1245758
aggauaagaaccuugcuca

SEQ ID NO: 1245760 - RNA, 19 nt, Artificial Sequence
  Description of Artificial Sequence: Synthetic oligonucleotide
  Sense strand starting at position 2254 of SEQ ID NO: 1241084
agcugcuugauuggaagau

SEQ ID NO: 1245761 - RNA, 19 nt, Artificial Sequence
  Description of Artificial Sequence: Synthetic oligonucleotide
  Antisense strand to SEQ ID NO: 1245760
aucuuccaaucaagcagcu

SEQ ID NO: 1245762 - RNA, 19 nt, Artificial Sequence
  Description of Artificial Sequence: Synthetic oligonucleotide
  Sense strand starting at position 2327 of SEQ ID NO: 1241084
aggauuaaauaagaacgau

SEQ ID NO: 1245763 - RNA, 19 nt, Artificial Sequence
  Description of Artificial Sequence: Synthetic oligonucleotide
  Antisense strand to SEQ ID NO: 1245762
aucguucuuauuuaauccu

SEQ ID NO: 1245764 - RNA, 19 nt, Artificial Sequence
  Description of Artificial Sequence: Synthetic oligonucleotide
  Sense strand starting at position 2369 of SEQ ID NO: 1241084
aaagaaggaugguaaugaa

SEQ ID NO: 1245765 - RNA, 19 nt, Artificial Sequence
  Description of Artificial Sequence: Synthetic oligonucleotide
  Antisense strand to SEQ ID NO: 1245764
uucauuaccauccuucuuu

SEQ ID NO: 1245766 - RNA, 19 nt, Artificial Sequence
  Description of Artificial Sequence: Synthetic oligonucleotide
  Sense strand starting at position 2379 of SEQ ID NO: 1241084
gguaaugaaagcuggauag

SEQ ID NO: 1245767 - RNA, 19 nt, Artificial Sequence
  Description of Artificial Sequence: Synthetic oligonucleotide
  Antisense strand to SEQ ID NO: 1245766
cuauccagcuuucauuacc

SEQ ID NO: 1245768 - RNA, 19 nt, Artificial Sequence
  Description of Artificial Sequence: Synthetic oligonucleotide
  Sense strand starting at position 2442 of SEQ ID NO: 1241084
ccaguaaucuaggcaugga

SEQ ID NO: 1245769 - RNA, 19 nt, Artificial Sequence
  Description of Artificial Sequence: Synthetic oligonucleotide
  Antisense strand to SEQ ID NO: 1245768
uccaugccuagauuacugg

SEQ ID NO: 1245770 - RNA, 19 nt, Artificial Sequence
  Description of Artificial Sequence: Synthetic oligonucleotide
  Sense strand starting at position 2445 of SEQ ID NO: 1241084
guaaucuaggcauggaaca

SEQ ID NO: 1245771 - RNA, 19 nt, Artificial Sequence
  Description of Artificial Sequence: Synthetic oligonucleotide
  Antisense strand to SEQ ID NO: 1245770
uguuccaugccuagauuac

SEQ ID NO: 1245772 - RNA, 19 nt, Artificial Sequence
  Description of Artificial Sequence: Synthetic oligonucleotide
  Sense strand starting at position 2505 of SEQ ID NO: 1241084
ugggaugggaauugucacu

SEQ ID NO: 1245773 - RNA, 19 nt, Artificial Sequence
  Description of Artificial Sequence: Synthetic oligonucleotide
  Antisense strand to SEQ ID NO: 1245772
agugacaauucccauccca

SEQ ID NO: 1245774 - RNA, 19 nt, Artificial Sequence
  Description of Artificial Sequence: Synthetic oligonucleotide
  Sense strand starting at position 2510 of SEQ ID NO: 1241084
ugggaauugucacuaucca

SEQ ID NO: 1245775 - RNA, 19 nt, Artificial Sequence
  Description of Artificial Sequence: Synthetic oligonucleotide
  Antisense strand to SEQ ID NO: 1245774
uggauagugacaauuccca

SEQ ID NO: 1245776 - RNA, 19 nt, Artificial Sequence
  Description of Artificial Sequence: Synthetic oligonucleotide
  Sense strand starting at position 2569 of SEQ ID NO: 1241084
guguuacuacuccaacaug

SEQ ID NO: 1245777 - RNA, 19 nt, Artificial Sequence
  Description of Artificial Sequence: Synthetic oligonucleotide
  Antisense strand to SEQ ID NO: 1245776
cauguuggaguaguaacac

SEQ ID NO: 1245778 - RNA, 19 nt, Artificial Sequence
  Description of Artificial Sequence: Synthetic oligonucleotide
  Sense strand starting at position 2662 of SEQ ID NO: 1241084
caggguuggugucucugaa

SEQ ID NO: 1245779 - RNA, 19 nt, Artificial Sequence
  Description of Artificial Sequence: Synthetic oligonucleotide
  Antisense strand to SEQ ID NO: 1245778
uucagagacaccaacccug

SEQ ID NO: 1245780 - RNA, 19 nt, Artificial Sequence
  Description of Artificial Sequence: Synthetic oligonucleotide
  Sense strand starting at position 2802 of SEQ ID NO: 1241084
aggccacuucuugaagcaa

SEQ ID NO: 1245781 - RNA, 19 nt, Artificial Sequence
  Description of Artificial Sequence: Synthetic oligonucleotide
  Antisense strand to SEQ ID NO: 1245780
uugcuucaagaaguggccu

SEQ ID NO: 1245782 - RNA, 19 nt, Artificial Sequence
  Description of Artificial Sequence: Synthetic oligonucleotide
  Sense strand starting at position 2961 of SEQ ID NO: 1241084
gugggaaacagaugcuaau

SEQ ID NO: 1245783 - RNA, 19 nt, Artificial Sequence
  Description of Artificial Sequence: Synthetic oligonucleotide
  Antisense strand to SEQ ID NO: 1245782
auuagcaucuguuucccac

SEQ ID NO: 1245784 - RNA, 19 nt, Artificial Sequence
  Description of Artificial Sequence: Synthetic oligonucleotide
  Sense strand starting at position 3106 of SEQ ID NO: 1241084
ucguguaacauuugagcuu

SEQ ID NO: 1245785 - RNA, 19 nt, Artificial Sequence
  Description of Artificial Sequence: Synthetic oligonucleotide
  Antisense strand to SEQ ID NO: 1245784
aagcucaaauguuacacga

SEQ ID NO: 1245786 - RNA, 19 nt, Artificial Sequence
  Description of Artificial Sequence: Synthetic oligonucleotide
  Sense strand starting at position 3125 of SEQ ID NO: 1241084
uuaagcuaggaaugaaauu

SEQ ID NO: 1245787 - RNA, 19 nt, Artificial Sequence
  Description of Artificial Sequence: Synthetic oligonucleotide
  Antisense strand to SEQ ID NO: 1245786
aauuucauuccuagcuuaa

SEQ ID NO: 1245788 - RNA, 19 nt, Artificial Sequence
  Description of Artificial Sequence: Synthetic oligonucleotide
  Sense strand starting at position 3248 of SEQ ID NO: 1241084
ucugcucaggguuaagagu

SEQ ID NO: 1245789 - RNA, 19 nt, Artificial Sequence
  Description of Artificial Sequence: Synthetic oligonucleotide
  Antisense strand to SEQ ID NO: 1245788
acucuuaacccugagcaga

SEQ ID NO: 1245790 - RNA, 19 nt, Artificial Sequence
  Description of Artificial Sequence: Synthetic oligonucleotide
  Sense strand starting at position 3421 of SEQ ID NO: 1241084
aagagucuggcuuggagga

SEQ ID NO: 1245791 - RNA, 19 nt, Artificial Sequence
  Description of Artificial Sequence: Synthetic oligonucleotide
  Antisense strand to SEQ ID NO: 1245790
uccuccaagccagacucuu

SEQ ID NO: 1245792 - RNA, 19 nt, Artificial Sequence
  Description of Artificial Sequence: Synthetic oligonucleotide
  Sense strand starting at position 3490 of SEQ ID NO: 1241084
gccauuaucucaucugaug

SEQ ID NO: 1245793 - RNA, 19 nt, Artificial Sequence
  Description of Artificial Sequence: Synthetic oligonucleotide
  Antisense strand to SEQ ID NO: 1245792
caucagaugagauaauggc

SEQ ID NO: 1245794 - RNA, 19 nt, Artificial Sequence
  Description of Artificial Sequence: Synthetic oligonucleotide
  Sense strand starting at position 3519 of SEQ ID NO: 1241084
ggcucugaguuuccucaaa

SEQ ID NO: 1245795 - RNA, 19 nt, Artificial Sequence
  Description of Artificial Sequence: Synthetic oligonucleotide
  Antisense strand to SEQ ID NO: 1245794
uuugaggaaacucagagcc

SEQ ID NO: 1245796 - RNA, 19 nt, Artificial Sequence
  Description of Artificial Sequence: Synthetic oligonucleotide
  Sense strand starting at position 3657 of SEQ ID NO: 1241084
ugcauaauuccucaagggu

SEQ ID NO: 1245797 - RNA, 19 nt, Artificial Sequence
  Description of Artificial Sequence: Synthetic oligonucleotide
  Antisense strand to SEQ ID NO: 1245796
acccuugaggaauuaugca

SEQ ID NO: 1245798 - RNA, 19 nt, Artificial Sequence
  Description of Artificial Sequence: Synthetic oligonucleotide
  Sense strand starting at position 3718 of SEQ ID NO: 1241084
aguaauguucccuaacuau

SEQ ID NO: 1245799 - RNA, 19 nt, Artificial Sequence
  Description of Artificial Sequence: Synthetic oligonucleotide
  Antisense strand to SEQ ID NO: 1245798
auaguuagggaacauuacu

SEQ ID NO: 1245800 - RNA, 19 nt, Artificial Sequence
  Description of Artificial Sequence: Synthetic oligonucleotide
  Sense strand starting at position 3738 of SEQ ID NO: 1241084
ucugaauuagggugucauu

SEQ ID NO: 1245801 - RNA, 19 nt, Artificial Sequence
  Description of Artificial Sequence: Synthetic oligonucleotide
  Antisense strand to SEQ ID NO: 1245800
aaugacacccuaauucaga

SEQ ID NO: 1245802 - RNA, 19 nt, Artificial Sequence
  Description of Artificial Sequence: Synthetic oligonucleotide
  Sense strand starting at position 164 of SEQ ID NO: 1241085
aagugacuuccugguccau

SEQ ID NO: 1245803 - RNA, 19 nt, Artificial Sequence
  Description of Artificial Sequence: Synthetic oligonucleotide
  Antisense strand to SEQ ID NO: 1245802
auggaccaggaagucacuu

SEQ ID NO: 1245804 - RNA, 19 nt, Artificial Sequence
  Description of Artificial Sequence: Synthetic oligonucleotide
  Sense strand starting at position 166 of SEQ ID NO: 1241085
gugacuuccugguccauac

SEQ ID NO: 1245805 - RNA, 19 nt, Artificial Sequence
  Description of Artificial Sequence: Synthetic oligonucleotide
  Antisense strand to SEQ ID NO: 1245804
guauggaccaggaagucac

SEQ ID NO: 1245806 - RNA, 19 nt, Artificial Sequence
  Description of Artificial Sequence: Synthetic oligonucleotide
  Sense strand starting at position 997 of SEQ ID NO: 1241085
acacuaaccuccggaaugu

SEQ ID NO: 1245807 - RNA, 19 nt, Artificial Sequence
  Description of Artificial Sequence: Synthetic oligonucleotide
  Antisense strand to SEQ ID NO: 1245806
acauuccggagguuagugu

SEQ ID NO: 1245808 - RNA, 19 nt, Artificial Sequence
  Description of Artificial Sequence: Synthetic oligonucleotide
  Sense strand starting at position 998 of SEQ ID NO: 1241085
cacuaaccuccggaauguu

SEQ ID NO: 1245809 - RNA, 19 nt, Artificial Sequence
  Description of Artificial Sequence: Synthetic oligonucleotide
  Antisense strand to SEQ ID NO: 1245808
aacauuccggagguuagug

SEQ ID NO: 1245810 - RNA, 19 nt, Artificial Sequence
  Description of Artificial Sequence: Synthetic oligonucleotide
  Sense strand starting at position 1006 of SEQ ID NO: 1241085
uccggaauguuggaagcua

SEQ ID NO: 1245811 - RNA, 19 nt, Artificial Sequence
  Description of Artificial Sequence: Synthetic oligonucleotide
  Antisense strand to SEQ ID NO: 1245810
uagcuuccaacauuccgga

SEQ ID NO: 1245812 - RNA, 19 nt, Artificial Sequence
  Description of Artificial Sequence: Synthetic oligonucleotide
  Sense strand starting at position 1024 of SEQ ID NO: 1241085
acauccuuucuccguauga

SEQ ID NO: 1245813 - RNA, 19 nt, Artificial Sequence
  Description of Artificial Sequence: Synthetic oligonucleotide
  Antisense strand to SEQ ID NO: 1245812
ucauacggagaaaggaugu

SEQ ID NO: 1245814 - RNA, 19 nt, Artificial Sequence
  Description of Artificial Sequence: Synthetic oligonucleotide
  Sense strand starting at position 1026 of SEQ ID NO: 1241085
auccuuucuccguaugaaa

SEQ ID NO: 1245815 - RNA, 19 nt, Artificial Sequence
  Description of Artificial Sequence: Synthetic oligonucleotide
  Antisense strand to SEQ ID NO: 1245814
uuucauacggagaaaggau

SEQ ID NO: 1245816 - RNA, 19 nt, Artificial Sequence
  Description of Artificial Sequence: Synthetic oligonucleotide
  Sense strand starting at position 2394 of SEQ ID NO: 1241085
gcuuucguguucucuguau

SEQ ID NO: 1245817 - RNA, 19 nt, Artificial Sequence
  Description of Artificial Sequence: Synthetic oligonucleotide
  Antisense strand to SEQ ID NO: 1245816
auacagagaacacgaaagc

SEQ ID NO: 1245818 - RNA, 19 nt, Artificial Sequence
  Description of Artificial Sequence: Synthetic oligonucleotide
  Sense strand starting at position 2396 of SEQ ID NO: 1241085
uuucguguucucuguauau

SEQ ID NO: 1245819 - RNA, 19 nt, Artificial Sequence
  Description of Artificial Sequence: Synthetic oligonucleotide
  Antisense strand to SEQ ID NO: 1245818
auauacagagaacacgaaa

SEQ ID NO: 1245820 - RNA, 19 nt, Artificial Sequence
  Description of Artificial Sequence: Synthetic oligonucleotide
  Sense strand starting at position 2468 of SEQ ID NO: 1241085
ugugaccucugagcuuuau

SEQ ID NO: 1245821 - RNA, 19 nt, Artificial Sequence
  Description of Artificial Sequence: Synthetic oligonucleotide
  Antisense strand to SEQ ID NO: 1245820
auaaagcucagaggucaca

SEQ ID NO: 1245822 - RNA, 19 nt, Artificial Sequence
  Description of Artificial Sequence: Synthetic oligonucleotide
  Sense strand starting at position 2478 of SEQ ID NO: 1241085
gagcuuuauuccuuacagg

SEQ ID NO: 1245823 - RNA, 19 nt, Artificial Sequence
  Description of Artificial Sequence: Synthetic oligonucleotide
  Antisense strand to SEQ ID NO: 1245822
ccuguaaggaauaaagcuc

SEQ ID NO: 1245824 - RNA, 19 nt, Artificial Sequence
  Description of Artificial Sequence: Synthetic oligonucleotide
  Sense strand starting at position 2479 of SEQ ID NO: 1241085
agcuuuauuccuuacaggu

SEQ ID NO: 1245825 - RNA, 19 nt, Artificial Sequence
  Description of Artificial Sequence: Synthetic oligonucleotide
  Antisense strand to SEQ ID NO: 1245824
accuguaaggaauaaagcu

SEQ ID NO: 1245826 - RNA, 19 nt, Artificial Sequence
  Description of Artificial Sequence: Synthetic oligonucleotide
  Sense strand starting at position 2506 of SEQ ID NO: 1241085
agccaaaugagguaauagu

SEQ ID NO: 1245827 - RNA, 19 nt, Artificial Sequence
  Description of Artificial Sequence: Synthetic oligonucleotide
  Antisense strand to SEQ ID NO: 1245826
acuauuaccucauuuggcu

SEQ ID NO: 1245828 - RNA, 19 nt, Artificial Sequence
  Description of Artificial Sequence: Synthetic oligonucleotide
  Sense strand starting at position 2668 of SEQ ID NO: 1241085
aguguuaccucucaucuuu

SEQ ID NO: 1245829 - RNA, 19 nt, Artificial Sequence
  Description of Artificial Sequence: Synthetic oligonucleotide
  Antisense strand to SEQ ID NO: 1245828
aaagaugagagguaacacu

SEQ ID NO: 1245830 - RNA, 19 nt, Artificial Sequence
  Description of Artificial Sequence: Synthetic oligonucleotide
  Sense strand starting at position 2974 of SEQ ID NO: 1241085
uuccuaucuugguaauuag

SEQ ID NO: 1245831 - RNA, 19 nt, Artificial Sequence
  Description of Artificial Sequence: Synthetic oligonucleotide
  Antisense strand to SEQ ID NO: 1245830
cuaauuaccaagauaggaa

SEQ ID NO: 1245832 - RNA, 19 nt, Artificial Sequence
  Description of Artificial Sequence: Synthetic oligonucleotide
  Sense strand starting at position 2977 of SEQ ID NO: 1241085
cuaucuugguaauuagaga

SEQ ID NO: 1245833 - RNA, 19 nt, Artificial Sequence
  Description of Artificial Sequence: Synthetic oligonucleotide
  Antisense strand to SEQ ID NO: 1245832
ucucuaauuaccaagauag

SEQ ID NO: 1245834 - RNA, 19 nt, Artificial Sequence
  Description of Artificial Sequence: Synthetic oligonucleotide
  Sense strand starting at position 2998 of SEQ ID NO: 1241085
ccuauaaaugcguaagcuu

SEQ ID NO: 1245835 - RNA, 19 nt, Artificial Sequence
  Description of Artificial Sequence: Synthetic oligonucleotide
  Antisense strand to SEQ ID NO: 1245834
aagcuuacgcauuuauagg

SEQ ID NO: 1245836 - RNA, 19 nt, Artificial Sequence
  Description of Artificial Sequence: Synthetic oligonucleotide
  Sense strand starting at position 3109 of SEQ ID NO: 1241085
ugucccaugucauuaucau

SEQ ID NO: 1245837 - RNA, 19 nt, Artificial Sequence
  Description of Artificial Sequence: Synthetic oligonucleotide
  Antisense strand to SEQ ID NO: 1245836
augauaaugacaugggaca

SEQ ID NO: 1245838 - RNA, 19 nt, Artificial Sequence
  Description of Artificial Sequence: Synthetic oligonucleotide
  Sense strand starting at position 3110 of SEQ ID NO: 1241085
gucccaugucauuaucaua

SEQ ID NO: 1245839 - RNA, 19 nt, Artificial Sequence
  Description of Artificial Sequence: Synthetic oligonucleotide
  Antisense strand to SEQ ID NO: 1245838
uaugauaaugacaugggac

SEQ ID NO: 1245840 - RNA, 19 nt, Artificial Sequence
  Description of Artificial Sequence: Synthetic oligonucleotide
  Sense strand starting at position 3131 of SEQ ID NO: 1241085
acucccuguuaguuguaau

SEQ ID NO: 1245841 - RNA, 19 nt, Artificial Sequence
  Description of Artificial Sequence: Synthetic oligonucleotide
  Antisense strand to SEQ ID NO: 1245840
auuacaacuaacagggagu

SEQ ID NO: 1245842 - RNA, 19 nt, Artificial Sequence
  Description of Artificial Sequence: Synthetic oligonucleotide
  Sense strand starting at position 3134 of SEQ ID NO: 1241085
cccuguuaguuguaauuac

SEQ ID NO: 1245843 - RNA, 19 nt, Artificial Sequence
  Description of Artificial Sequence: Synthetic oligonucleotide
  Antisense strand to SEQ ID NO: 1245842
guaauuacaacuaacaggg

SEQ ID NO: 1245844 - RNA, 19 nt, Artificial Sequence
  Description of Artificial Sequence: Synthetic oligonucleotide
  Sense strand starting at position 3141 of SEQ ID NO: 1241085
aguuguaauuaccuuugua

SEQ ID NO: 1245845 - RNA, 19 nt, Artificial Sequence
  Description of Artificial Sequence: Synthetic oligonucleotide
  Antisense strand to SEQ ID NO: 1245844
uacaaagguaauuacaacu

SEQ ID NO: 1245846 - RNA, 19 nt, Artificial Sequence
  Description of Artificial Sequence: Synthetic oligonucleotide
  Sense strand starting at position 3144 of SEQ ID NO: 1241085
uguaauuaccuuuguauag

SEQ ID NO: 1245847 - RNA, 19 nt, Artificial Sequence
  Description of Artificial Sequence: Synthetic oligonucleotide
  Antisense strand to SEQ ID NO: 1245846
cuauacaaagguaauuaca

SEQ ID NO: 1245848 - RNA, 19 nt, Artificial Sequence
  Description of Artificial Sequence: Synthetic oligonucleotide
  Sense strand starting at position 3180 of SEQ ID NO: 1241085
aaguauauucugugcauag

SEQ ID NO: 1245849 - RNA, 19 nt, Artificial Sequence
  Description of Artificial Sequence: Synthetic oligonucleotide
  Antisense strand to SEQ ID NO: 1245848
cuaugcacagaauauacuu

SEQ ID NO: 1245850 - RNA, 19 nt, Artificial Sequence
  Description of Artificial Sequence: Synthetic oligonucleotide
  Sense strand starting at position 3181 of SEQ ID NO: 1241085
aguauauucugugcauaga

SEQ ID NO: 1245851 - RNA, 19 nt, Artificial Sequence
  Description of Artificial Sequence: Synthetic oligonucleotide
  Antisense strand to SEQ ID NO: 1245850
ucuaugcacagaauauacu

SEQ ID NO: 1245852 - RNA, 19 nt, Artificial Sequence
  Description of Artificial Sequence: Synthetic oligonucleotide
  Sense strand starting at position 3182 of SEQ ID NO: 1241085
guauauucugugcauagaa

SEQ ID NO: 1245853 - RNA, 19 nt, Artificial Sequence
  Description of Artificial Sequence: Synthetic oligonucleotide
  Antisense strand to SEQ ID NO: 1245852
uucuaugcacagaauauac

SEQ ID NO: 1245854 - RNA, 19 nt, Artificial Sequence
  Description of Artificial Sequence: Synthetic oligonucleotide
  Sense strand starting at position 3184 of SEQ ID NO: 1241085
auauucugugcauagaagu

SEQ ID NO: 1245855 - RNA, 19 nt, Artificial Sequence
  Description of Artificial Sequence: Synthetic oligonucleotide
  Antisense strand to SEQ ID NO: 1245854
acuucuaugcacagaauau

SEQ ID NO: 1245856 - RNA, 19 nt, Artificial Sequence
  Description of Artificial Sequence: Synthetic oligonucleotide
  Sense strand starting at position 3195 of SEQ ID NO: 1241085
auagaagucucaggaacua

SEQ ID NO: 1245857 - RNA, 19 nt, Artificial Sequence
  Description of Artificial Sequence: Synthetic oligonucleotide
  Antisense strand to SEQ ID NO: 1245856
uaguuccugagacuucuau

SEQ ID NO: 1245858 - RNA, 19 nt, Artificial Sequence
  Description of Artificial Sequence: Synthetic oligonucleotide
  Sense strand starting at position 3219 of SEQ ID NO: 1241085
gguaaauaauaguagcuaa

SEQ ID NO: 1245859 - RNA, 19 nt, Artificial Sequence
  Description of Artificial Sequence: Synthetic oligonucleotide
  Antisense strand to SEQ ID NO: 1245858
uuagcuacuauuauuuacc

SEQ ID NO: 1245860 - RNA, 19 nt, Artificial Sequence
  Description of Artificial Sequence: Synthetic oligonucleotide
  Sense strand starting at position 3230 of SEQ ID NO: 1241085
guagcuaauuguuaauacu

SEQ ID NO: 1245861 - RNA, 19 nt, Artificial Sequence
  Description of Artificial Sequence: Synthetic oligonucleotide
  Antisense strand to SEQ ID NO: 1245860
aguauuaacaauuagcuac

SEQ ID NO: 1245862 - RNA, 19 nt, Artificial Sequence
  Description of Artificial Sequence: Synthetic oligonucleotide
  Sense strand starting at position 3248 of SEQ ID NO: 1241085
uuacaagaaccguaguagu

SEQ ID NO: 1245863 - RNA, 19 nt, Artificial Sequence
  Description of Artificial Sequence: Synthetic oligonucleotide
  Antisense strand to SEQ ID NO: 1245862
acuacuacgguucuuguaa

SEQ ID NO: 1245864 - RNA, 19 nt, Artificial Sequence
  Description of Artificial Sequence: Synthetic oligonucleotide
  Sense strand starting at position 3251 of SEQ ID NO: 1241085
caagaaccguaguaguaaa

SEQ ID NO: 1245865 - RNA, 19 nt, Artificial Sequence
  Description of Artificial Sequence: Synthetic oligonucleotide
  Antisense strand to SEQ ID NO: 1245864
uuuacuacuacgguucuug

SEQ ID NO: 1245866 - RNA, 19 nt, Artificial Sequence
  Description of Artificial Sequence: Synthetic oligonucleotide
  Sense strand starting at position 3344 of SEQ ID NO: 1241085
cgccuauaaucccaguuua

SEQ ID NO: 1245867 - RNA, 19 nt, Artificial Sequence
  Description of Artificial Sequence: Synthetic oligonucleotide
  Antisense strand to SEQ ID NO: 1245866
uaaacugggauuauaggcg

SEQ ID NO: 1245868 - RNA, 19 nt, Artificial Sequence
  Description of Artificial Sequence: Synthetic oligonucleotide
  Sense strand starting at position 3384 of SEQ ID NO: 1241085
guuucuuaaggccaggagu

SEQ ID NO: 1245869 - RNA, 19 nt, Artificial Sequence
  Description of Artificial Sequence: Synthetic oligonucleotide
  Antisense strand to SEQ ID NO: 1245868
acuccuggccuuaagaaac

SEQ ID NO: 1245870 - RNA, 19 nt, Artificial Sequence
  Description of Artificial Sequence: Synthetic oligonucleotide
  Sense strand starting at position 3415 of SEQ ID NO: 1241085
uggauaagacccugucucu

SEQ ID NO: 1245871 - RNA, 19 nt, Artificial Sequence
  Description of Artificial Sequence: Synthetic oligonucleotide
  Antisense strand to SEQ ID NO: 1245870
agagacagggucuuaucca

SEQ ID NO: 1245872 - RNA, 19 nt, Artificial Sequence
  Description of Artificial Sequence: Synthetic oligonucleotide
  Sense strand starting at position 3880 of SEQ ID NO: 1241085
aaacucauauugguggaua

SEQ ID NO: 1245873 - RNA, 19 nt, Artificial Sequence
  Description of Artificial Sequence: Synthetic oligonucleotide
  Antisense strand to SEQ ID NO: 1245872
uauccaccaauaugaguuu

SEQ ID NO: 1245874 - RNA, 19 nt, Artificial Sequence
  Description of Artificial Sequence: Synthetic oligonucleotide
  Sense strand starting at position 3881 of SEQ ID NO: 1241085
aacucauauugguggauau

SEQ ID NO: 1245875 - RNA, 19 nt, Artificial Sequence
  Description of Artificial Sequence: Synthetic oligonucleotide
  Antisense strand to SEQ ID NO: 1245874
auauccaccaauaugaguu

SEQ ID NO: 1245876 - RNA, 19 nt, Artificial Sequence
  Description of Artificial Sequence: Synthetic oligonucleotide
  Sense strand starting at position 3882 of SEQ ID NO: 1241085
acucauauugguggauaua

SEQ ID NO: 1245877 - RNA, 19 nt, Artificial Sequence
  Description of Artificial Sequence: Synthetic oligonucleotide
  Antisense strand to SEQ ID NO: 1245876
uauauccaccaauaugagu

SEQ ID NO: 1245878 - RNA, 19 nt, Artificial Sequence
  Description of Artificial Sequence: Synthetic oligonucleotide
  Sense strand starting at position 3969 of SEQ ID NO: 1241085
caguuccacgucuaggaau

SEQ ID NO: 1245879 - RNA, 19 nt, Artificial Sequence
  Description of Artificial Sequence: Synthetic oligonucleotide
  Antisense strand to SEQ ID NO: 1245878
auuccuagacguggaacug

SEQ ID NO: 1245880 - RNA, 19 nt, Artificial Sequence
  Description of Artificial Sequence: Synthetic oligonucleotide
  Sense strand starting at position 3971 of SEQ ID NO: 1241085
guuccacgucuaggaauuu

SEQ ID NO: 1245881 - RNA, 19 nt, Artificial Sequence
  Description of Artificial Sequence: Synthetic oligonucleotide
  Antisense strand to SEQ ID NO: 1245880
aaauuccuagacguggaac

SEQ ID NO: 1245882 - RNA, 19 nt, Artificial Sequence
  Description of Artificial Sequence: Synthetic oligonucleotide
  Sense strand starting at position 84 of SEQ ID NO: 1241086
guggcuuccuagucaauac

SEQ ID NO: 1245883 - RNA, 19 nt, Artificial Sequence
  Description of Artificial Sequence: Synthetic oligonucleotide
  Antisense strand to SEQ ID NO: 1245882
guauugacuaggaagccac

SEQ ID NO: 1245884 - RNA, 19 nt, Artificial Sequence
  Description of Artificial Sequence: Synthetic oligonucleotide
  Sense strand starting at position 719 of SEQ ID NO: 1241086
cgccgagacuucccaaagu

SEQ ID NO: 1245885 - RNA, 19 nt, Artificial Sequence
  Description of Artificial Sequence: Synthetic oligonucleotide
  Antisense strand to SEQ ID NO: 1245884
acuuugggaagucucggcg

SEQ ID NO: 1245886 - RNA, 19 nt, Artificial Sequence
  Description of Artificial Sequence: Synthetic oligonucleotide
  Sense strand starting at position 877 of SEQ ID NO: 1241086
cacuaaccuccggaagguu

SEQ ID NO: 1245887 - RNA, 19 nt, Artificial Sequence
  Description of Artificial Sequence: Synthetic oligonucleotide
  Antisense strand to SEQ ID NO: 1245886
aaccuuccggagguuagug

SEQ ID NO: 1245888 - RNA, 19 nt, Artificial Sequence
  Description of Artificial Sequence: Synthetic oligonucleotide
  Sense strand starting at position 904 of SEQ ID NO: 1241086
caucccuucuucgugugaa

SEQ ID NO: 1245889 - RNA, 19 nt, Artificial Sequence
  Description of Artificial Sequence: Synthetic oligonucleotide
  Antisense strand to SEQ ID NO: 1245888
uucacacgaagaagggaug

SEQ ID NO: 1245890 - RNA, 19 nt, Artificial Sequence
  Description of Artificial Sequence: Synthetic oligonucleotide
  Sense strand starting at position 905 of SEQ ID NO: 1241086
aucccuucuucgugugaaa

SEQ ID NO: 1245891 - RNA, 19 nt, Artificial Sequence
  Description of Artificial Sequence: Synthetic oligonucleotide
  Antisense strand to SEQ ID NO: 1245890
uuucacacgaagaagggau

SEQ ID NO: 1245892 - RNA, 19 nt, Artificial Sequence
  Description of Artificial Sequence: Synthetic oligonucleotide
  Sense strand starting at position 2036 of SEQ ID NO: 1241086
cagggcugguucuuaaaga

SEQ ID NO: 1245893 - RNA, 19 nt, Artificial Sequence
  Description of Artificial Sequence: Synthetic oligonucleotide
  Antisense strand to SEQ ID NO: 1245892
ucuuuaagaaccagcccug

SEQ ID NO: 1245894 - RNA, 19 nt, Artificial Sequence
  Description of Artificial Sequence: Synthetic oligonucleotide
  Sense strand starting at position 2037 of SEQ ID NO: 1241086
agggcugguucuuaaagaa

SEQ ID NO: 1245895 - RNA, 19 nt, Artificial Sequence
  Description of Artificial Sequence: Synthetic oligonucleotide
  Antisense strand to SEQ ID NO: 1245894
uucuuuaagaaccagcccu

SEQ ID NO: 1245896 - RNA, 19 nt, Artificial Sequence
  Description of Artificial Sequence: Synthetic oligonucleotide
  Sense strand starting at position 2103 of SEQ ID NO: 1241086
gaaugcagagcuggaguua

SEQ ID NO: 1245897 - RNA, 19 nt, Artificial Sequence
  Description of Artificial Sequence: Synthetic oligonucleotide
  Antisense strand to SEQ ID NO: 1245896
uaacuccagcucugcauuc

SEQ ID NO: 1245898 - RNA, 19 nt, Artificial Sequence
  Description of Artificial Sequence: Synthetic oligonucleotide
  Sense strand starting at position 2332 of SEQ ID NO: 1241086
guaguaauuucucaaacuc

SEQ ID NO: 1245899 - RNA, 19 nt, Artificial Sequence
  Description of Artificial Sequence: Synthetic oligonucleotide
  Antisense strand to SEQ ID NO: 1245898
gaguuugagaaauuacuac

SEQ ID NO: 1245900 - RNA, 19 nt, Artificial Sequence
  Description of Artificial Sequence: Synthetic oligonucleotide
  Sense strand starting at position 2417 of SEQ ID NO: 1241086
cccggcuaauaguuauuau

SEQ ID NO: 1245901 - RNA, 19 nt, Artificial Sequence
  Description of Artificial Sequence: Synthetic oligonucleotide
  Antisense strand to SEQ ID NO: 1245900
auaauaacuauuagccggg

SEQ ID NO: 1245902 - RNA, 19 nt, Artificial Sequence
  Description of Artificial Sequence: Synthetic oligonucleotide
  Sense strand starting at position 2537 of SEQ ID NO: 1241086
gcaguuuaccaucacugca

SEQ ID NO: 1245903 - RNA, 19 nt, Artificial Sequence
  Description of Artificial Sequence: Synthetic oligonucleotide
  Antisense strand to SEQ ID NO: 1245902
ugcagugaugguaaacugc

SEQ ID NO: 1245904 - RNA, 19 nt, Artificial Sequence
  Description of Artificial Sequence: Synthetic oligonucleotide
  Sense strand starting at position 2674 of SEQ ID NO: 1241086
uugguuucaccagaggugu

SEQ ID NO: 1245905 - RNA, 19 nt, Artificial Sequence
  Description of Artificial Sequence: Synthetic oligonucleotide
  Antisense strand to SEQ ID NO: 1245904
acaccucuggugaaaccaa

SEQ ID NO: 1245906 - RNA, 19 nt, Artificial Sequence
  Description of Artificial Sequence: Synthetic oligonucleotide
  Sense strand starting at position 2757 of SEQ ID NO: 1241086
auuuccuaccuguguaauu

SEQ ID NO: 1245907 - RNA, 19 nt, Artificial Sequence
  Description of Artificial Sequence: Synthetic oligonucleotide
  Antisense strand to SEQ ID NO: 1245906
aauuacacagguaggaaau

SEQ ID NO: 1245908 - RNA, 19 nt, Artificial Sequence
  Description of Artificial Sequence: Synthetic oligonucleotide
  Sense strand starting at position 2758 of SEQ ID NO: 1241086
uuuccuaccuguguaauua

SEQ ID NO: 1245909 - RNA, 19 nt, Artificial Sequence
  Description of Artificial Sequence: Synthetic oligonucleotide
  Antisense strand to SEQ ID NO: 1245908
uaauuacacagguaggaaa

SEQ ID NO: 1245910 - RNA, 19 nt, Artificial Sequence
  Description of Artificial Sequence: Synthetic oligonucleotide
  Sense strand starting at position 2759 of SEQ ID NO: 1241086
uuccuaccuguguaauuag

SEQ ID NO: 1245911 - RNA, 19 nt, Artificial Sequence
  Description of Artificial Sequence: Synthetic oligonucleotide
  Antisense strand to SEQ ID NO: 1245910
cuaauuacacagguaggaa

SEQ ID NO: 1245912 - RNA, 19 nt, Artificial Sequence
  Description of Artificial Sequence: Synthetic oligonucleotide
  Sense strand starting at position 2762 of SEQ ID NO: 1241086
cuaccuguguaauuagaga

SEQ ID NO: 1245913 - RNA, 19 nt, Artificial Sequence
  Description of Artificial Sequence: Synthetic oligonucleotide
  Antisense strand to SEQ ID NO: 1245912
ucucuaauuacacagguag

SEQ ID NO: 1245914 - RNA, 19 nt, Artificial Sequence
  Description of Artificial Sequence: Synthetic oligonucleotide
  Sense strand starting at position 2767 of SEQ ID NO: 1241086
uguguaauuagagaaagcu

SEQ ID NO: 1245915 - RNA, 19 nt, Artificial Sequence
  Description of Artificial Sequence: Synthetic oligonucleotide
  Antisense strand to SEQ ID NO: 1245914
agcuuucucuaauuacaca

SEQ ID NO: 1245916 - RNA, 19 nt, Artificial Sequence
  Description of Artificial Sequence: Synthetic oligonucleotide
  Sense strand starting at position 2783 of SEQ ID NO: 1241086
gcuauaaauguguaggcuu

SEQ ID NO: 1245917 - RNA, 19 nt, Artificial Sequence
  Description of Artificial Sequence: Synthetic oligonucleotide
  Antisense strand to SEQ ID NO: 1245916
aagccuacacauuuauagc

SEQ ID NO: 1245918 - RNA, 19 nt, Artificial Sequence
  Description of Artificial Sequence: Synthetic oligonucleotide
  Sense strand starting at position 2881 of SEQ ID NO: 1241086
ucucaugucccacgucauu

SEQ ID NO: 1245919 - RNA, 19 nt, Artificial Sequence
  Description of Artificial Sequence: Synthetic oligonucleotide
  Antisense strand to SEQ ID NO: 1245918
aaugacgugggacaugaga

SEQ ID NO: 1245920 - RNA, 19 nt, Artificial Sequence
  Description of Artificial Sequence: Synthetic oligonucleotide
  Sense strand starting at position 2886 of SEQ ID NO: 1241086
ugucccacgucauuaauca

SEQ ID NO: 1245921 - RNA, 19 nt, Artificial Sequence
  Description of Artificial Sequence: Synthetic oligonucleotide
  Antisense strand to SEQ ID NO: 1245920
ugauuaaugacgugggaca

SEQ ID NO: 1245922 - RNA, 19 nt, Artificial Sequence
  Description of Artificial Sequence: Synthetic oligonucleotide
  Sense strand starting at position 2887 of SEQ ID NO: 1241086
gucccacgucauuaaucau

SEQ ID NO: 1245923 - RNA, 19 nt, Artificial Sequence
  Description of Artificial Sequence: Synthetic oligonucleotide
  Antisense strand to SEQ ID NO: 1245922
augauuaaugacgugggac

SEQ ID NO: 1245924 - RNA, 19 nt, Artificial Sequence
  Description of Artificial Sequence: Synthetic oligonucleotide
  Sense strand starting at position 2912 of SEQ ID NO: 1241086
cccugucaguucuaauuac

SEQ ID NO: 1245925 - RNA, 19 nt, Artificial Sequence
  Description of Artificial Sequence: Synthetic oligonucleotide
  Antisense strand to SEQ ID NO: 1245924
guaauuagaacugacaggg

SEQ ID NO: 1245926 - RNA, 19 nt, Artificial Sequence
  Description of Artificial Sequence: Synthetic oligonucleotide
  Sense strand starting at position 2919 of SEQ ID NO: 1241086
aguucuaauuaccuuugua

SEQ ID NO: 1245927 - RNA, 19 nt, Artificial Sequence
  Description of Artificial Sequence: Synthetic oligonucleotide
  Antisense strand to SEQ ID NO: 1245926
uacaaagguaauuagaacu

SEQ ID NO: 1245928 - RNA, 19 nt, Artificial Sequence
  Description of Artificial Sequence: Synthetic oligonucleotide
  Sense strand starting at position 3423 of SEQ ID NO: 1241086
gcggaacucacgcagguua

SEQ ID NO: 1245929 - RNA, 19 nt, Artificial Sequence
  Description of Artificial Sequence: Synthetic oligonucleotide
  Antisense strand to SEQ ID NO: 1245928
uaaccugcgugaguuccgc

SEQ ID NO: 1245930 - RNA, 19 nt, Artificial Sequence
  Description of Artificial Sequence: Synthetic oligonucleotide
  Sense strand starting at position 3725 of SEQ ID NO: 1241086
aauaguagcuaaugguuaa

SEQ ID NO: 1245931 - RNA, 19 nt, Artificial Sequence
  Description of Artificial Sequence: Synthetic oligonucleotide
  Antisense strand to SEQ ID NO: 1245930
uuaaccauuagcuacuauu

SEQ ID NO: 1245932 - RNA, 19 nt, Artificial Sequence
  Description of Artificial Sequence: Synthetic oligonucleotide
  Sense strand starting at position 3729 of SEQ ID NO: 1241086
guagcuaaugguuaauacu

SEQ ID NO: 1245933 - RNA, 19 nt, Artificial Sequence
  Description of Artificial Sequence: Synthetic oligonucleotide
  Antisense strand to SEQ ID NO: 1245932
aguauuaaccauuagcuac

SEQ ID NO: 1245934 - RNA, 19 nt, Artificial Sequence
  Description of Artificial Sequence: Synthetic oligonucleotide
  Sense strand starting at position 3738 of SEQ ID NO: 1241086
gguuaauacuuacaagaac

SEQ ID NO: 1245935 - RNA, 19 nt, Artificial Sequence
  Description of Artificial Sequence: Synthetic oligonucleotide
  Antisense strand to SEQ ID NO: 1245934
guucuuguaaguauuaacc

SEQ ID NO: 1245936 - RNA, 19 nt, Artificial Sequence
  Description of Artificial Sequence: Synthetic oligonucleotide
  Sense strand starting at position 3894 of SEQ ID NO: 1241086
ccaggaguuucgcaccaac

SEQ ID NO: 1245937 - RNA, 19 nt, Artificial Sequence
  Description of Artificial Sequence: Synthetic oligonucleotide
  Antisense strand to SEQ ID NO: 1245936
guuggugcgaaacuccugg

SEQ ID NO: 1245938 - RNA, 19 nt, Artificial Sequence
  Description of Artificial Sequence: Synthetic oligonucleotide
  Sense strand starting at position 198 of SEQ ID NO: 1241087
uuuaauuagucaguguggu

SEQ ID NO: 1245939 - RNA, 19 nt, Artificial Sequence
  Description of Artificial Sequence: Synthetic oligonucleotide
  Antisense strand to SEQ ID NO: 1245938
accacacugacuaauuaaa

SEQ ID NO: 1245940 - RNA, 19 nt, Artificial Sequence
  Description of Artificial Sequence: Synthetic oligonucleotide
  Sense strand starting at position 199 of SEQ ID NO: 1241087
uuaauuagucaguguggug

SEQ ID NO: 1245941 - RNA, 19 nt, Artificial Sequence
  Description of Artificial Sequence: Synthetic oligonucleotide
  Antisense strand to SEQ ID NO: 1245940
caccacacugacuaauuaa

SEQ ID NO: 1245942 - RNA, 19 nt, Artificial Sequence
  Description of Artificial Sequence: Synthetic oligonucleotide
  Sense strand starting at position 403 of SEQ ID NO: 1241087
acuuuauguucuguugcau

SEQ ID NO: 1245943 - RNA, 19 nt, Artificial Sequence
  Description of Artificial Sequence: Synthetic oligonucleotide
  Antisense strand to SEQ ID NO: 1245942
augcaacagaacauaaagu

SEQ ID NO: 1245944 - RNA, 19 nt, Artificial Sequence
  Description of Artificial Sequence: Synthetic oligonucleotide
  Sense strand starting at position 452 of SEQ ID NO: 1241087
ucagaugucuauguagaaa

SEQ ID NO: 1245945 - RNA, 19 nt, Artificial Sequence
  Description of Artificial Sequence: Synthetic oligonucleotide
  Antisense strand to SEQ ID NO: 1245944
uuucuacauagacaucuga

SEQ ID NO: 1245946 - RNA, 19 nt, Artificial Sequence
  Description of Artificial Sequence: Synthetic oligonucleotide
  Sense strand starting at position 520 of SEQ ID NO: 1241087
aguggagucugaaguguga

SEQ ID NO: 1245947 - RNA, 19 nt, Artificial Sequence
  Description of Artificial Sequence: Synthetic oligonucleotide
  Antisense strand to SEQ ID NO: 1245946
ucacacuucagacuccacu

SEQ ID NO: 1245948 - RNA, 19 nt, Artificial Sequence
  Description of Artificial Sequence: Synthetic oligonucleotide
  Sense strand starting at position 529 of SEQ ID NO: 1241087
ugaagugugaccugugaua

SEQ ID NO: 1245949 - RNA, 19 nt, Artificial Sequence
  Description of Artificial Sequence: Synthetic oligonucleotide
  Antisense strand to SEQ ID NO: 1245948
uaucacaggucacacuuca

SEQ ID NO: 1245950 - RNA, 19 nt, Artificial Sequence
  Description of Artificial Sequence: Synthetic oligonucleotide
  Sense strand starting at position 531 of SEQ ID NO: 1241087
aagugugaccugugauaaa

SEQ ID NO: 1245951 - RNA, 19 nt, Artificial Sequence
  Description of Artificial Sequence: Synthetic oligonucleotide
  Antisense strand to SEQ ID NO: 1245950
uuuaucacaggucacacuu

SEQ ID NO: 1245952 - RNA, 19 nt, Artificial Sequence
  Description of Artificial Sequence: Synthetic oligonucleotide
  Sense strand starting at position 652 of SEQ ID NO: 1241087
caggcugaugccuguagaa

SEQ ID NO: 1245953 - RNA, 19 nt, Artificial Sequence
  Description of Artificial Sequence: Synthetic oligonucleotide
  Antisense strand to SEQ ID NO: 1245952
uucuacaggcaucagccug

SEQ ID NO: 1245954 - RNA, 19 nt, Artificial Sequence
  Description of Artificial Sequence: Synthetic oligonucleotide
  Sense strand starting at position 654 of SEQ ID NO: 1241087
ggcugaugccuguagaaau

SEQ ID NO: 1245955 - RNA, 19 nt, Artificial Sequence
  Description of Artificial Sequence: Synthetic oligonucleotide
  Antisense strand to SEQ ID NO: 1245954
auuucuacaggcaucagcc

SEQ ID NO: 1245956 - RNA, 19 nt, Artificial Sequence
  Description of Artificial Sequence: Synthetic oligonucleotide
  Sense strand starting at position 664 of SEQ ID NO: 1241087
uguagaaaucuguagggua

SEQ ID NO: 1245957 - RNA, 19 nt, Artificial Sequence
  Description of Artificial Sequence: Synthetic oligonucleotide
  Antisense strand to SEQ ID NO: 1245956
uacccuacagauuucuaca

SEQ ID NO: 1245958 - RNA, 19 nt, Artificial Sequence
  Description of Artificial Sequence: Synthetic oligonucleotide
  Sense strand starting at position 666 of SEQ ID NO: 1241087
uagaaaucuguaggguagu

SEQ ID NO: 1245959 - RNA, 19 nt, Artificial Sequence
  Description of Artificial Sequence: Synthetic oligonucleotide
  Antisense strand to SEQ ID NO: 1245958
acuacccuacagauuucua

SEQ ID NO: 1245960 - RNA, 19 nt, Artificial Sequence
  Description of Artificial Sequence: Synthetic oligonucleotide
  Sense strand starting at position 669 of SEQ ID NO: 1241087
aaaucuguaggguagugau

SEQ ID NO: 1245961 - RNA, 19 nt, Artificial Sequence
  Description of Artificial Sequence: Synthetic oligonucleotide
  Antisense strand to SEQ ID NO: 1245960
aucacuacccuacagauuu

SEQ ID NO: 1245962 - RNA, 19 nt, Artificial Sequence
  Description of Artificial Sequence: Synthetic oligonucleotide
  Sense strand starting at position 672 of SEQ ID NO: 1241087
ucuguaggguagugauuaa

SEQ ID NO: 1245963 - RNA, 19 nt, Artificial Sequence
  Description of Artificial Sequence: Synthetic oligonucleotide
  Antisense strand to SEQ ID NO: 1245962
uuaaucacuacccuacaga

SEQ ID NO: 1245964 - RNA, 19 nt, Artificial Sequence
  Description of Artificial Sequence: Synthetic oligonucleotide
  Sense strand starting at position 679 of SEQ ID NO: 1241087
gguagugauuaauagcaaa

SEQ ID NO: 1245965 - RNA, 19 nt, Artificial Sequence
  Description of Artificial Sequence: Synthetic oligonucleotide
  Antisense strand to SEQ ID NO: 1245964
uuugcuauuaaucacuacc

SEQ ID NO: 1245966 - RNA, 19 nt, Artificial Sequence
  Description of Artificial Sequence: Synthetic oligonucleotide
  Sense strand starting at position 691 of SEQ ID NO: 1241087
uagcaaaguggauaaugua

SEQ ID NO: 1245967 - RNA, 19 nt, Artificial Sequence
  Description of Artificial Sequence: Synthetic oligonucleotide
  Antisense strand to SEQ ID NO: 1245966
uacauuauccacuuugcua

SEQ ID NO: 1245968 - RNA, 19 nt, Artificial Sequence
  Description of Artificial Sequence: Synthetic oligonucleotide
  Sense strand starting at position 699 of SEQ ID NO: 1241087
uggauaauguaccugacga

SEQ ID NO: 1245969 - RNA, 19 nt, Artificial Sequence
  Description of Artificial Sequence: Synthetic oligonucleotide
  Antisense strand to SEQ ID NO: 1245968
ucgucagguacauuaucca

SEQ ID NO: 1245970 - RNA, 19 nt, Artificial Sequence
  Description of Artificial Sequence: Synthetic oligonucleotide
  Sense strand starting at position 700 of SEQ ID NO: 1241087
ggauaauguaccugacgac

SEQ ID NO: 1245971 - RNA, 19 nt, Artificial Sequence
  Description of Artificial Sequence: Synthetic oligonucleotide
  Antisense strand to SEQ ID NO: 1245970
gucgucagguacauuaucc

SEQ ID NO: 1245972 - RNA, 19 nt, Artificial Sequence
  Description of Artificial Sequence: Synthetic oligonucleotide
  Sense strand starting at position 775 of SEQ ID NO: 1241087
gagacuaacugauagaaug

SEQ ID NO: 1245973 - RNA, 19 nt, Artificial Sequence
  Description of Artificial Sequence: Synthetic oligonucleotide
  Antisense strand to SEQ ID NO: 1245972
cauucuaucaguuagucuc

SEQ ID NO: 1245974 - RNA, 19 nt, Artificial Sequence
  Description of Artificial Sequence: Synthetic oligonucleotide
  Sense strand starting at position 1155 of SEQ ID NO: 1241087
uagaguggccacugacaua

SEQ ID NO: 1245975 - RNA, 19 nt, Artificial Sequence
  Description of Artificial Sequence: Synthetic oligonucleotide
  Antisense strand to SEQ ID NO: 1245974
uaugucaguggccacucua

SEQ ID NO: 1245976 - RNA, 19 nt, Artificial Sequence
  Description of Artificial Sequence: Synthetic oligonucleotide
  Sense strand starting at position 1178 of SEQ ID NO: 1241087
auguuagcuucucugaucu

SEQ ID NO: 1245977 - RNA, 19 nt, Artificial Sequence
  Description of Artificial Sequence: Synthetic oligonucleotide
  Antisense strand to SEQ ID NO: 1245976
agaucagagaagcuaacau

SEQ ID NO: 1245978 - RNA, 19 nt, Artificial Sequence
  Description of Artificial Sequence: Synthetic oligonucleotide
  Sense strand starting at position 1215 of SEQ ID NO: 1241087
gugcuaaaucagcacugga

SEQ ID NO: 1245979 - RNA, 19 nt, Artificial Sequence
  Description of Artificial Sequence: Synthetic oligonucleotide
  Antisense strand to SEQ ID NO: 1245978
uccagugcugauuuagcac

SEQ ID NO: 1245980 - RNA, 19 nt, Artificial Sequence
  Description of Artificial Sequence: Synthetic oligonucleotide
  Sense strand starting at position 2041 of SEQ ID NO: 1241087
gguuguuggaaugaaaguu

SEQ ID NO: 1245981 - RNA, 19 nt, Artificial Sequence
  Description of Artificial Sequence: Synthetic oligonucleotide
  Antisense strand to SEQ ID NO: 1245980
aacuuucauuccaacaacc

SEQ ID NO: 1245982 - RNA, 19 nt, Artificial Sequence
  Description of Artificial Sequence: Synthetic oligonucleotide
  Sense strand starting at position 2047 of SEQ ID NO: 1241087
uggaaugaaaguuguugga

SEQ ID NO: 1245983 - RNA, 19 nt, Artificial Sequence
  Description of Artificial Sequence: Synthetic oligonucleotide
  Antisense strand to SEQ ID NO: 1245982
uccaacaacuuucauucca

SEQ ID NO: 1245984 - RNA, 19 nt, Artificial Sequence
  Description of Artificial Sequence: Synthetic oligonucleotide
  Sense strand starting at position 2049 of SEQ ID NO: 1241087
gaaugaaaguuguuggaug

SEQ ID NO: 1245985 - RNA, 19 nt, Artificial Sequence
  Description of Artificial Sequence: Synthetic oligonucleotide
  Antisense strand to SEQ ID NO: 1245984
cauccaacaacuuucauuc

SEQ ID NO: 1245986 - RNA, 19 nt, Artificial Sequence
  Description of Artificial Sequence: Synthetic oligonucleotide
  Sense strand starting at position 2050 of SEQ ID NO: 1241087
aaugaaaguuguuggauga

SEQ ID NO: 1245987 - RNA, 19 nt, Artificial Sequence
  Description of Artificial Sequence: Synthetic oligonucleotide
  Antisense strand to SEQ ID NO: 1245986
ucauccaacaacuuucauu

SEQ ID NO: 1245988 - RNA, 19 nt, Artificial Sequence
  Description of Artificial Sequence: Synthetic oligonucleotide
  Sense strand starting at position 2051 of SEQ ID NO: 1241087
augaaaguuguuggaugau

SEQ ID NO: 1245989 - RNA, 19 nt, Artificial Sequence
  Description of Artificial Sequence: Synthetic oligonucleotide
  Antisense strand to SEQ ID NO: 1245988
aucauccaacaacuuucau

SEQ ID NO: 1245990 - RNA, 19 nt, Artificial Sequence
  Description of Artificial Sequence: Synthetic oligonucleotide
  Sense strand starting at position 2054 of SEQ ID NO: 1241087
aaaguuguuggaugaucaa

SEQ ID NO: 1245991 - RNA, 19 nt, Artificial Sequence
  Description of Artificial Sequence: Synthetic oligonucleotide
  Antisense strand to SEQ ID NO: 1245990
uugaucauccaacaacuuu

SEQ ID NO: 1245992 - RNA, 19 nt, Artificial Sequence
  Description of Artificial Sequence: Synthetic oligonucleotide
  Sense strand starting at position 2065 of SEQ ID NO: 1241087
augaucaauuuguggugaa

SEQ ID NO: 1245993 - RNA, 19 nt, Artificial Sequence
  Description of Artificial Sequence: Synthetic oligonucleotide
  Antisense strand to SEQ ID NO: 1245992
uucaccacaaauugaucau

SEQ ID NO: 1245994 - RNA, 19 nt, Artificial Sequence
  Description of Artificial Sequence: Synthetic oligonucleotide
  Sense strand starting at position 2066 of SEQ ID NO: 1241087
ugaucaauuuguggugaaa

SEQ ID NO: 1245995 - RNA, 19 nt, Artificial Sequence
  Description of Artificial Sequence: Synthetic oligonucleotide
  Antisense strand to SEQ ID NO: 1245994
uuucaccacaaauugauca

SEQ ID NO: 1245996 - RNA, 19 nt, Artificial Sequence
  Description of Artificial Sequence: Synthetic oligonucleotide
  Sense strand starting at position 2319 of SEQ ID NO: 1241087
uuuaguaaagagggaguua

SEQ ID NO: 1245997 - RNA, 19 nt, Artificial Sequence
  Description of Artificial Sequence: Synthetic oligonucleotide
  Antisense strand to SEQ ID NO: 1245996
uaacucccucuuuacuaaa

SEQ ID NO: 1245998 - RNA, 19 nt, Artificial Sequence
  Description of Artificial Sequence: Synthetic oligonucleotide
  Sense strand starting at position 2711 of SEQ ID NO: 1241087
gugcuagugauacgugaca

SEQ ID NO: 1245999 - RNA, 19 nt, Artificial Sequence
  Description of Artificial Sequence: Synthetic oligonucleotide
  Antisense strand to SEQ ID NO: 1245998
ugucacguaucacuagcac

SEQ ID NO: 1246000 - RNA, 19 nt, Artificial Sequence
  Description of Artificial Sequence: Synthetic oligonucleotide
  Sense strand starting at position 3627 of SEQ ID NO: 1241087
gcgggaagguuuguucuau

SEQ ID NO: 1246001 - RNA, 19 nt, Artificial Sequence
  Description of Artificial Sequence: Synthetic oligonucleotide
  Antisense strand to SEQ ID NO: 1246000
auagaacaaaccuucccgc

SEQ ID NO: 1246002 - RNA, 19 nt, Artificial Sequence
  Description of Artificial Sequence: Synthetic oligonucleotide
  Sense strand starting at position 3628 of SEQ ID NO: 1241087
cgggaagguuuguucuauu

SEQ ID NO: 1246003 - RNA, 19 nt, Artificial Sequence
  Description of Artificial Sequence: Synthetic oligonucleotide
  Antisense strand to SEQ ID NO: 1246002
aauagaacaaaccuucccg

SEQ ID NO: 1246004 - RNA, 19 nt, Artificial Sequence
  Description of Artificial Sequence: Synthetic oligonucleotide
  Sense strand starting at position 3631 of SEQ ID NO: 1241087
gaagguuuguucuauuuag

SEQ ID NO: 1246005 - RNA, 19 nt, Artificial Sequence
  Description of Artificial Sequence: Synthetic oligonucleotide
  Antisense strand to SEQ ID NO: 1246004
cuaaauagaacaaaccuuc

SEQ ID NO: 1246006 - RNA, 19 nt, Artificial Sequence
  Description of Artificial Sequence: Synthetic oligonucleotide
  Sense strand starting at position 3688 of SEQ ID NO: 1241087
gcuguugugagcuguaaca

SEQ ID NO: 1246007 - RNA, 19 nt, Artificial Sequence
  Description of Artificial Sequence: Synthetic oligonucleotide
  Antisense strand to SEQ ID NO: 1246006
uguuacagcucacaacagc

SEQ ID NO: 1246008 - RNA, 19 nt, Artificial Sequence
  Description of Artificial Sequence: Synthetic oligonucleotide
  Sense strand starting at position 3690 of SEQ ID NO: 1241087
uguugugagcuguaacacu

SEQ ID NO: 1246009 - RNA, 19 nt, Artificial Sequence
  Description of Artificial Sequence: Synthetic oligonucleotide
  Antisense strand to SEQ ID NO: 1246008
aguguuacagcucacaaca

SEQ ID NO: 1246010 - RNA, 19 nt, Artificial Sequence
  Description of Artificial Sequence: Synthetic oligonucleotide
  Sense strand starting at position 3868 of SEQ ID NO: 1241087
ggaacaaacucugagcaca

SEQ ID NO: 1246011 - RNA, 19 nt, Artificial Sequence
  Description of Artificial Sequence: Synthetic oligonucleotide
  Antisense strand to SEQ ID NO: 1246010
ugugcucagaguuuguucc

SEQ ID NO: 1246012 - RNA, 19 nt, Artificial Sequence
  Description of Artificial Sequence: Synthetic oligonucleotide
  Sense strand starting at position 3886 of SEQ ID NO: 1241087
augggaacaucagaaggua

SEQ ID NO: 1246013 - RNA, 19 nt, Artificial Sequence
  Description of Artificial Sequence: Synthetic oligonucleotide
  Antisense strand to SEQ ID NO: 1246012
uaccuucugauguucccau

SEQ ID NO: 1246014 - RNA, 19 nt, Artificial Sequence
  Description of Artificial Sequence: Synthetic oligonucleotide
  Sense strand starting at position 3935 of SEQ ID NO: 1241087
guaacaucuccgcgagggu

SEQ ID NO: 1246015 - RNA, 19 nt, Artificial Sequence
  Description of Artificial Sequence: Synthetic oligonucleotide
  Antisense strand to SEQ ID NO: 1246014
acccucgcggagauguuac

SEQ ID NO: 1246016 - RNA, 19 nt, Artificial Sequence
  Description of Artificial Sequence: Synthetic oligonucleotide
  Sense strand starting at position 3956 of SEQ ID NO: 1241087
guggcuucguuguugaagu

SEQ ID NO: 1246017 - RNA, 19 nt, Artificial Sequence
  Description of Artificial Sequence: Synthetic oligonucleotide
  Antisense strand to SEQ ID NO: 1246016
acuucaacaacgaagccac

SEQ ID NO: 1246018 - RNA, 19 nt, Artificial Sequence
  Description of Artificial Sequence: Synthetic oligonucleotide
  Sense strand starting at position 20 of SEQ ID NO: 1241088
gcuuuccuuccguauccaa

SEQ ID NO: 1246019 - RNA, 19 nt, Artificial Sequence
  Description of Artificial Sequence: Synthetic oligonucleotide
  Antisense strand to SEQ ID NO: 1246018
uuggauacggaaggaaagc

SEQ ID NO: 1246020 - RNA, 19 nt, Artificial Sequence
  Description of Artificial Sequence: Synthetic oligonucleotide
  Sense strand starting at position 105 of SEQ ID NO: 1241088
cccuaauauuuaugaggac

SEQ ID NO: 1246021 - RNA, 19 nt, Artificial Sequence
  Description of Artificial Sequence: Synthetic oligonucleotide
  Antisense strand to SEQ ID NO: 1246020
guccucauaaauauuaggg

SEQ ID NO: 1246022 - RNA, 19 nt, Artificial Sequence
  Description of Artificial Sequence: Synthetic oligonucleotide
  Sense strand starting at position 106 of SEQ ID NO: 1241088
ccuaauauuuaugaggacu

SEQ ID NO: 1246023 - RNA, 19 nt, Artificial Sequence
  Description of Artificial Sequence: Synthetic oligonucleotide
  Antisense strand to SEQ ID NO: 1246022
aguccucauaaauauuagg

SEQ ID NO: 1246024 - RNA, 19 nt, Artificial Sequence
  Description of Artificial Sequence: Synthetic oligonucleotide
  Sense strand starting at position 282 of SEQ ID NO: 1241088
cuuggaauccacuggaguu

SEQ ID NO: 1246025 - RNA, 19 nt, Artificial Sequence
  Description of Artificial Sequence: Synthetic oligonucleotide
  Antisense strand to SEQ ID NO: 1246024
aacuccaguggauuccaag

SEQ ID NO: 1246026 - RNA, 19 nt, Artificial Sequence
  Description of Artificial Sequence: Synthetic oligonucleotide
  Sense strand starting at position 295 of SEQ ID NO: 1241088
ggaguucuguacuggaaag

SEQ ID NO: 1246027 - RNA, 19 nt, Artificial Sequence
  Description of Artificial Sequence: Synthetic oligonucleotide
  Antisense strand to SEQ ID NO: 1246026
cuuuccaguacagaacucc

SEQ ID NO: 1246028 - RNA, 19 nt, Artificial Sequence
  Description of Artificial Sequence: Synthetic oligonucleotide
  Sense strand starting at position 296 of SEQ ID NO: 1241088
gaguucuguacuggaaagu

SEQ ID NO: 1246029 - RNA, 19 nt, Artificial Sequence
  Description of Artificial Sequence: Synthetic oligonucleotide
  Antisense strand to SEQ ID NO: 1246028
acuuuccaguacagaacuc

SEQ ID NO: 1246030 - RNA, 19 nt, Artificial Sequence
  Description of Artificial Sequence: Synthetic oligonucleotide
  Sense strand starting at position 302 of SEQ ID NO: 1241088
uguacuggaaagugacaua

SEQ ID NO: 1246031 - RNA, 19 nt, Artificial Sequence
  Description of Artificial Sequence: Synthetic oligonucleotide
  Antisense strand to SEQ ID NO: 1246030
uaugucacuuuccaguaca

SEQ ID NO: 1246032 - RNA, 19 nt, Artificial Sequence
  Description of Artificial Sequence: Synthetic oligonucleotide
  Sense strand starting at position 431 of SEQ ID NO: 1241088
auguuuaaggccuagguau

SEQ ID NO: 1246033 - RNA, 19 nt, Artificial Sequence
  Description of Artificial Sequence: Synthetic oligonucleotide
  Antisense strand to SEQ ID NO: 1246032
auaccuaggccuuaaacau

SEQ ID NO: 1246034 - RNA, 19 nt, Artificial Sequence
  Description of Artificial Sequence: Synthetic oligonucleotide
  Sense strand starting at position 433 of SEQ ID NO: 1241088
guuuaaggccuagguauau

SEQ ID NO: 1246035 - RNA, 19 nt, Artificial Sequence
  Description of Artificial Sequence: Synthetic oligonucleotide
  Antisense strand to SEQ ID NO: 1246034
auauaccuaggccuuaaac

SEQ ID NO: 1246036 - RNA, 19 nt, Artificial Sequence
  Description of Artificial Sequence: Synthetic oligonucleotide
  Sense strand starting at position 497 of SEQ ID NO: 1241088
aucagagcuguuuggcaga

SEQ ID NO: 1246037 - RNA, 19 nt, Artificial Sequence
  Description of Artificial Sequence: Synthetic oligonucleotide
  Antisense strand to SEQ ID NO: 1246036
ucugccaaacagcucugau

SEQ ID NO: 1246038 - RNA, 19 nt, Artificial Sequence
  Description of Artificial Sequence: Synthetic oligonucleotide
  Sense strand starting at position 499 of SEQ ID NO: 1241088
cagagcuguuuggcagaga

SEQ ID NO: 1246039 - RNA, 19 nt, Artificial Sequence
  Description of Artificial Sequence: Synthetic oligonucleotide
  Antisense strand to SEQ ID NO: 1246038
ucucugccaaacagcucug

SEQ ID NO: 1246040 - RNA, 19 nt, Artificial Sequence
  Description of Artificial Sequence: Synthetic oligonucleotide
  Sense strand starting at position 500 of SEQ ID NO: 1241088
agagcuguuuggcagagaa

SEQ ID NO: 1246041 - RNA, 19 nt, Artificial Sequence
  Description of Artificial Sequence: Synthetic oligonucleotide
  Antisense strand to SEQ ID NO: 1246040
uucucugccaaacagcucu

SEQ ID NO: 1246042 - RNA, 19 nt, Artificial Sequence
  Description of Artificial Sequence: Synthetic oligonucleotide
  Sense strand starting at position 502 of SEQ ID NO: 1241088
agcuguuuggcagagaauu

SEQ ID NO: 1246043 - RNA, 19 nt, Artificial Sequence
  Description of Artificial Sequence: Synthetic oligonucleotide
  Antisense strand to SEQ ID NO: 1246042
aauucucugccaaacagcu

SEQ ID NO: 1246044 - RNA, 19 nt, Artificial Sequence
  Description of Artificial Sequence: Synthetic oligonucleotide
  Sense strand starting at position 504 of SEQ ID NO: 1241088
cuguuuggcagagaauucu

SEQ ID NO: 1246045 - RNA, 19 nt, Artificial Sequence
  Description of Artificial Sequence: Synthetic oligonucleotide
  Antisense strand to SEQ ID NO: 1246044
agaauucucugccaaacag

SEQ ID NO: 1246046 - RNA, 19 nt, Artificial Sequence
  Description of Artificial Sequence: Synthetic oligonucleotide
  Sense strand starting at position 591 of SEQ ID NO: 1241088
acauuagaaugucuggauc

SEQ ID NO: 1246047 - RNA, 19 nt, Artificial Sequence
  Description of Artificial Sequence: Synthetic oligonucleotide
  Antisense strand to SEQ ID NO: 1246046
gauccagacauucuaaugu

SEQ ID NO: 1246048 - RNA, 19 nt, Artificial Sequence
  Description of Artificial Sequence: Synthetic oligonucleotide
  Sense strand starting at position 593 of SEQ ID NO: 1241088
auuagaaugucuggaucuc

SEQ ID NO: 1246049 - RNA, 19 nt, Artificial Sequence
  Description of Artificial Sequence: Synthetic oligonucleotide
  Antisense strand to SEQ ID NO: 1246048
gagauccagacauucuaau

SEQ ID NO: 1246050 - RNA, 19 nt, Artificial Sequence
  Description of Artificial Sequence: Synthetic oligonucleotide
  Sense strand starting at position 594 of SEQ ID NO: 1241088
uuagaaugucuggaucucu

SEQ ID NO: 1246051 - RNA, 19 nt, Artificial Sequence
  Description of Artificial Sequence: Synthetic oligonucleotide
  Antisense strand to SEQ ID NO: 1246050
agagauccagacauucuaa

SEQ ID NO: 1246052 - RNA, 19 nt, Artificial Sequence
  Description of Artificial Sequence: Synthetic oligonucleotide
  Sense strand starting at position 599 of SEQ ID NO: 1241088
augucuggaucucuuuaaa

SEQ ID NO: 1246053 - RNA, 19 nt, Artificial Sequence
  Description of Artificial Sequence: Synthetic oligonucleotide
  Antisense strand to SEQ ID NO: 1246052
uuuaaagagauccagacau

SEQ ID NO: 1246054 - RNA, 19 nt, Artificial Sequence
  Description of Artificial Sequence: Synthetic oligonucleotide
  Sense strand starting at position 609 of SEQ ID NO: 1241088
cucuuuaaaccuggaugau

SEQ ID NO: 1246055 - RNA, 19 nt, Artificial Sequence
  Description of Artificial Sequence: Synthetic oligonucleotide
  Antisense strand to SEQ ID NO: 1246054
aucauccagguuuaaagag

SEQ ID NO: 1246056 - RNA, 19 nt, Artificial Sequence
  Description of Artificial Sequence: Synthetic oligonucleotide
  Sense strand starting at position 715 of SEQ ID NO: 1241088
auucuuguugcccagucua

SEQ ID NO: 1246057 - RNA, 19 nt, Artificial Sequence
  Description of Artificial Sequence: Synthetic oligonucleotide
  Antisense strand to SEQ ID NO: 1246056
uagacugggcaacaagaau

SEQ ID NO: 1246058 - RNA, 19 nt, Artificial Sequence
  Description of Artificial Sequence: Synthetic oligonucleotide
  Sense strand starting at position 730 of SEQ ID NO: 1241088
ucuagagugcaauggugua

SEQ ID NO: 1246059 - RNA, 19 nt, Artificial Sequence
  Description of Artificial Sequence: Synthetic oligonucleotide
  Antisense strand to SEQ ID NO: 1246058
uacaccauugcacucuaga

SEQ ID NO: 1246060 - RNA, 19 nt, Artificial Sequence
  Description of Artificial Sequence: Synthetic oligonucleotide
  Sense strand starting at position 1011 of SEQ ID NO: 1241088
guuaucagauaaggacuuu

SEQ ID NO: 1246061 - RNA, 19 nt, Artificial Sequence
  Description of Artificial Sequence: Synthetic oligonucleotide
  Antisense strand to SEQ ID NO: 1246060
aaaguccuuaucugauaac

SEQ ID NO: 1246062 - RNA, 19 nt, Artificial Sequence
  Description of Artificial Sequence: Synthetic oligonucleotide
  Sense strand starting at position 1206 of SEQ ID NO: 1241088
gagaguaacugccuuauuc

SEQ ID NO: 1246063 - RNA, 19 nt, Artificial Sequence
  Description of Artificial Sequence: Synthetic oligonucleotide
  Antisense strand to SEQ ID NO: 1246062
gaauaaggcaguuacucuc

SEQ ID NO: 1246064 - RNA, 19 nt, Artificial Sequence
  Description of Artificial Sequence: Synthetic oligonucleotide
  Sense strand starting at position 1234 of SEQ ID NO: 1241088
aggccacucugugguagau

SEQ ID NO: 1246065 - RNA, 19 nt, Artificial Sequence
  Description of Artificial Sequence: Synthetic oligonucleotide
  Antisense strand to SEQ ID NO: 1246064
aucuaccacagaguggccu

SEQ ID NO: 1246066 - RNA, 19 nt, Artificial Sequence
  Description of Artificial Sequence: Synthetic oligonucleotide
  Sense strand starting at position 1275 of SEQ ID NO: 1241088
uccugugcucuuugaauuu

SEQ ID NO: 1246067 - RNA, 19 nt, Artificial Sequence
  Description of Artificial Sequence: Synthetic oligonucleotide
  Antisense strand to SEQ ID NO: 1246066
aaauucaaagagcacagga

SEQ ID NO: 1246068 - RNA, 19 nt, Artificial Sequence
  Description of Artificial Sequence: Synthetic oligonucleotide
  Sense strand starting at position 1518 of SEQ ID NO: 1241088
ccuaguaaccuuugaagga

SEQ ID NO: 1246069 - RNA, 19 nt, Artificial Sequence
  Description of Artificial Sequence: Synthetic oligonucleotide
  Antisense strand to SEQ ID NO: 1246068
uccuucaaagguuacuagg

SEQ ID NO: 1246070 - RNA, 19 nt, Artificial Sequence
  Description of Artificial Sequence: Synthetic oligonucleotide
  Sense strand starting at position 1522 of SEQ ID NO: 1241088
guaaccuuugaaggagacu

SEQ ID NO: 1246071 - RNA, 19 nt, Artificial Sequence
  Description of Artificial Sequence: Synthetic oligonucleotide
  Antisense strand to SEQ ID NO: 1246070
agucuccuucaaagguuac

SEQ ID NO: 1246072 - RNA, 19 nt, Artificial Sequence
  Description of Artificial Sequence: Synthetic oligonucleotide
  Sense strand starting at position 1531 of SEQ ID NO: 1241088
gaaggagacuugguaucuc

SEQ ID NO: 1246073 - RNA, 19 nt, Artificial Sequence
  Description of Artificial Sequence: Synthetic oligonucleotide
  Antisense strand to SEQ ID NO: 1246072
gagauaccaagucuccuuc

SEQ ID NO: 1246074 - RNA, 19 nt, Artificial Sequence
  Description of Artificial Sequence: Synthetic oligonucleotide
  Sense strand starting at position 1542 of SEQ ID NO: 1241088
gguaucuccuggcauguuu

SEQ ID NO: 1246075 - RNA, 19 nt, Artificial Sequence
  Description of Artificial Sequence: Synthetic oligonucleotide
  Antisense strand to SEQ ID NO: 1246074
aaacaugccaggagauacc

SEQ ID NO: 1246076 - RNA, 19 nt, Artificial Sequence
  Description of Artificial Sequence: Synthetic oligonucleotide
  Sense strand starting at position 1553 of SEQ ID NO: 1241088
gcauguuucuaguucucag

SEQ ID NO: 1246077 - RNA, 19 nt, Artificial Sequence
  Description of Artificial Sequence: Synthetic oligonucleotide
  Antisense strand to SEQ ID NO: 1246076
cugagaacuagaaacaugc

SEQ ID NO: 1246078 - RNA, 19 nt, Artificial Sequence
  Description of Artificial Sequence: Synthetic oligonucleotide
  Sense strand starting at position 1557 of SEQ ID NO: 1241088
guuucuaguucucaguguu

SEQ ID NO: 1246079 - RNA, 19 nt, Artificial Sequence
  Description of Artificial Sequence: Synthetic oligonucleotide
  Antisense strand to SEQ ID NO: 1246078
aacacugagaacuagaaac

SEQ ID NO: 1246080 - RNA, 19 nt, Artificial Sequence
  Description of Artificial Sequence: Synthetic oligonucleotide
  Sense strand starting at position 1633 of SEQ ID NO: 1241088
aggugaucaccagaacgca

SEQ ID NO: 1246081 - RNA, 19 nt, Artificial Sequence
  Description of Artificial Sequence: Synthetic oligonucleotide
  Antisense strand to SEQ ID NO: 1246080
ugcguucuggugaucaccu

SEQ ID NO: 1246082 - RNA, 19 nt, Artificial Sequence
  Description of Artificial Sequence: Synthetic oligonucleotide
  Sense strand starting at position 2033 of SEQ ID NO: 1241088
guauacuacucaggcgaca

SEQ ID NO: 1246083 - RNA, 19 nt, Artificial Sequence
  Description of Artificial Sequence: Synthetic oligonucleotide
  Antisense strand to SEQ ID NO: 1246082
ugucgccugaguaguauac

SEQ ID NO: 1246084 - RNA, 19 nt, Artificial Sequence
  Description of Artificial Sequence: Synthetic oligonucleotide
  Sense strand starting at position 2823 of SEQ ID NO: 1241088
ugcacuguagccuguagau

SEQ ID NO: 1246085 - RNA, 19 nt, Artificial Sequence
  Description of Artificial Sequence: Synthetic oligonucleotide
  Antisense strand to SEQ ID NO: 1246084
aucuacaggcuacagugca

SEQ ID NO: 1246086 - RNA, 19 nt, Artificial Sequence
  Description of Artificial Sequence: Synthetic oligonucleotide
  Sense strand starting at position 2825 of SEQ ID NO: 1241088
cacuguagccuguagauca

SEQ ID NO: 1246087 - RNA, 19 nt, Artificial Sequence
  Description of Artificial Sequence: Synthetic oligonucleotide
  Antisense strand to SEQ ID NO: 1246086
ugaucuacaggcuacagug

SEQ ID NO: 1246088 - RNA, 19 nt, Artificial Sequence
  Description of Artificial Sequence: Synthetic oligonucleotide
  Sense strand starting at position 2832 of SEQ ID NO: 1241088
gccuguagaucacuguaac

SEQ ID NO: 1246089 - RNA, 19 nt, Artificial Sequence
  Description of Artificial Sequence: Synthetic oligonucleotide
  Antisense strand to SEQ ID NO: 1246088
guuacagugaucuacaggc

SEQ ID NO: 1246090 - RNA, 19 nt, Artificial Sequence
  Description of Artificial Sequence: Synthetic oligonucleotide
  Sense strand starting at position 3489 of SEQ ID NO: 1241088
ggagugauguggugugauu

SEQ ID NO: 1246091 - RNA, 19 nt, Artificial Sequence
  Description of Artificial Sequence: Synthetic oligonucleotide
  Antisense strand to SEQ ID NO: 1246090
aaucacaccacaucacucc

SEQ ID NO: 1246092 - RNA, 19 nt, Artificial Sequence
  Description of Artificial Sequence: Synthetic oligonucleotide
  Sense strand starting at position 88 of SEQ ID NO: 1241089
ucccauguccgauguagau

SEQ ID NO: 1246093 - RNA, 19 nt, Artificial Sequence
  Description of Artificial Sequence: Synthetic oligonucleotide
  Antisense strand to SEQ ID NO: 1246092
aucuacaucggacauggga

SEQ ID NO: 1246094 - RNA, 19 nt, Artificial Sequence
  Description of Artificial Sequence: Synthetic oligonucleotide
  Sense strand starting at position 90 of SEQ ID NO: 1241089
ccauguccgauguagauga

SEQ ID NO: 1246095 - RNA, 19 nt, Artificial Sequence
  Description of Artificial Sequence: Synthetic oligonucleotide
  Antisense strand to SEQ ID NO: 1246094
ucaucuacaucggacaugg

SEQ ID NO: 1246096 - RNA, 19 nt, Artificial Sequence
  Description of Artificial Sequence: Synthetic oligonucleotide
  Sense strand starting at position 164 of SEQ ID NO: 1241089
gucauccugcuuugaggaa

SEQ ID NO: 1246097 - RNA, 19 nt, Artificial Sequence
  Description of Artificial Sequence: Synthetic oligonucleotide
  Antisense strand to SEQ ID NO: 1246096
uuccucaaagcaggaugac

SEQ ID NO: 1246098 - RNA, 19 nt, Artificial Sequence
  Description of Artificial Sequence: Synthetic oligonucleotide
  Sense strand starting at position 199 of SEQ ID NO: 1241089
uuagauuaccucugccugu

SEQ ID NO: 1246099 - RNA, 19 nt, Artificial Sequence
  Description of Artificial Sequence: Synthetic oligonucleotide
  Antisense strand to SEQ ID NO: 1246098
acaggcagagguaaucuaa

SEQ ID NO: 1246100 - RNA, 19 nt, Artificial Sequence
  Description of Artificial Sequence: Synthetic oligonucleotide
  Sense strand starting at position 216 of SEQ ID NO: 1241089
gucugaugaagugaguaaa

SEQ ID NO: 1246101 - RNA, 19 nt, Artificial Sequence
  Description of Artificial Sequence: Synthetic oligonucleotide
  Antisense strand to SEQ ID NO: 1246100
uuuacucacuucaucagac

SEQ ID NO: 1246102 - RNA, 19 nt, Artificial Sequence
  Description of Artificial Sequence: Synthetic oligonucleotide
  Sense strand starting at position 254 of SEQ ID NO: 1241089
uaggauuccugagugagcu

SEQ ID NO: 1246103 - RNA, 19 nt, Artificial Sequence
  Description of Artificial Sequence: Synthetic oligonucleotide
  Antisense strand to SEQ ID NO: 1246102
agcucacucaggaauccua

SEQ ID NO: 1246104 - RNA, 19 nt, Artificial Sequence
  Description of Artificial Sequence: Synthetic oligonucleotide
  Sense strand starting at position 255 of SEQ ID NO: 1241089
aggauuccugagugagcua

SEQ ID NO: 1246105 - RNA, 19 nt, Artificial Sequence
  Description of Artificial Sequence: Synthetic oligonucleotide
  Antisense strand to SEQ ID NO: 1246104
uagcucacucaggaauccu

SEQ ID NO: 1246106 - RNA, 19 nt, Artificial Sequence
  Description of Artificial Sequence: Synthetic oligonucleotide
  Sense strand starting at position 256 of SEQ ID NO: 1241089
ggauuccugagugagcuaa

SEQ ID NO: 1246107 - RNA, 19 nt, Artificial Sequence
  Description of Artificial Sequence: Synthetic oligonucleotide
  Antisense strand to SEQ ID NO: 1246106
uuagcucacucaggaaucc

SEQ ID NO: 1246108 - RNA, 19 nt, Artificial Sequence
  Description of Artificial Sequence: Synthetic oligonucleotide
  Sense strand starting at position 258 of SEQ ID NO: 1241089
auuccugagugagcuaaua

SEQ ID NO: 1246109 - RNA, 19 nt, Artificial Sequence
  Description of Artificial Sequence: Synthetic oligonucleotide
  Antisense strand to SEQ ID NO: 1246108
uauuagcucacucaggaau

SEQ ID NO: 1246110 - RNA, 19 nt, Artificial Sequence
  Description of Artificial Sequence: Synthetic oligonucleotide
  Sense strand starting at position 276 of SEQ ID NO: 1241089
acaggaugccuuuggcuga

SEQ ID NO: 1246111 - RNA, 19 nt, Artificial Sequence
  Description of Artificial Sequence: Synthetic oligonucleotide
  Antisense strand to SEQ ID NO: 1246110
ucagccaaaggcauccugu

SEQ ID NO: 1246112 - RNA, 19 nt, Artificial Sequence
  Description of Artificial Sequence: Synthetic oligonucleotide
  Sense strand starting at position 1025 of SEQ ID NO: 1241089
gguccuucuccaggcagau

SEQ ID NO: 1246113 - RNA, 19 nt, Artificial Sequence
  Description of Artificial Sequence: Synthetic oligonucleotide
  Antisense strand to SEQ ID NO: 1246112
aucugccuggagaaggacc

SEQ ID NO: 1246114 - RNA, 19 nt, Artificial Sequence
  Description of Artificial Sequence: Synthetic oligonucleotide
  Sense strand starting at position 1649 of SEQ ID NO: 1241089
cugcauguaaucguugguu

SEQ ID NO: 1246115 - RNA, 19 nt, Artificial Sequence
  Description of Artificial Sequence: Synthetic oligonucleotide
  Antisense strand to SEQ ID NO: 1246114
aaccaacgauuacaugcag

SEQ ID NO: 1246116 - RNA, 19 nt, Artificial Sequence
  Description of Artificial Sequence: Synthetic oligonucleotide
  Sense strand starting at position 1657 of SEQ ID NO: 1241089
aaucguugguuugcugaga

SEQ ID NO: 1246117 - RNA, 19 nt, Artificial Sequence
  Description of Artificial Sequence: Synthetic oligonucleotide
  Antisense strand to SEQ ID NO: 1246116
ucucagcaaaccaacgauu

SEQ ID NO: 1246118 - RNA, 19 nt, Artificial Sequence
  Description of Artificial Sequence: Synthetic oligonucleotide
  Sense strand starting at position 1658 of SEQ ID NO: 1241089
aucguugguuugcugagaa

SEQ ID NO: 1246119 - RNA, 19 nt, Artificial Sequence
  Description of Artificial Sequence: Synthetic oligonucleotide
  Antisense strand to SEQ ID NO: 1246118
uucucagcaaaccaacgau

SEQ ID NO: 1246120 - RNA, 19 nt, Artificial Sequence
  Description of Artificial Sequence: Synthetic oligonucleotide
  Sense strand starting at position 1674 of SEQ ID NO: 1241089
gaaucauaaugguccauga

SEQ ID NO: 1246121 - RNA, 19 nt, Artificial Sequence
  Description of Artificial Sequence: Synthetic oligonucleotide
  Antisense strand to SEQ ID NO: 1246120
ucauggaccauuaugauuc

SEQ ID NO: 1246122 - RNA, 19 nt, Artificial Sequence
  Description of Artificial Sequence: Synthetic oligonucleotide
  Sense strand starting at position 1678 of SEQ ID NO: 1241089
cauaaugguccaugauggu

SEQ ID NO: 1246123 - RNA, 19 nt, Artificial Sequence
  Description of Artificial Sequence: Synthetic oligonucleotide
  Antisense strand to SEQ ID NO: 1246122
accaucauggaccauuaug

SEQ ID NO: 1246124 - RNA, 19 nt, Artificial Sequence
  Description of Artificial Sequence: Synthetic oligonucleotide
  Sense strand starting at position 2027 of SEQ ID NO: 1241089
ggccgaguugcccaaacuu

SEQ ID NO: 1246125 - RNA, 19 nt, Artificial Sequence
  Description of Artificial Sequence: Synthetic oligonucleotide
  Antisense strand to SEQ ID NO: 1246124
aaguuugggcaacucggcc

SEQ ID NO: 1246126 - RNA, 19 nt, Artificial Sequence
  Description of Artificial Sequence: Synthetic oligonucleotide
  Sense strand starting at position 2052 of SEQ ID NO: 1241089
aucgccucucauugggaau

SEQ ID NO: 1246127 - RNA, 19 nt, Artificial Sequence
  Description of Artificial Sequence: Synthetic oligonucleotide
  Antisense strand to SEQ ID NO: 1246126
auucccaaugagaggcgau

SEQ ID NO: 1246128 - RNA, 19 nt, Artificial Sequence
  Description of Artificial Sequence: Synthetic oligonucleotide
  Sense strand starting at position 2053 of SEQ ID NO: 1241089
ucgccucucauugggaauu

SEQ ID NO: 1246129 - RNA, 19 nt, Artificial Sequence
  Description of Artificial Sequence: Synthetic oligonucleotide
  Antisense strand to SEQ ID NO: 1246128
aauucccaaugagaggcga

SEQ ID NO: 1246130 - RNA, 19 nt, Artificial Sequence
  Description of Artificial Sequence: Synthetic oligonucleotide
  Sense strand starting at position 2457 of SEQ ID NO: 1241089
aaaggaauuucuugggaau

SEQ ID NO: 1246131 - RNA, 19 nt, Artificial Sequence
  Description of Artificial Sequence: Synthetic oligonucleotide
  Antisense strand to SEQ ID NO: 1246130
auucccaagaaauuccuuu

SEQ ID NO: 1246132 - RNA, 19 nt, Artificial Sequence
  Description of Artificial Sequence: Synthetic oligonucleotide
  Sense strand starting at position 2809 of SEQ ID NO: 1241089
ccgagugaucuagguaaau

SEQ ID NO: 1246133 - RNA, 19 nt, Artificial Sequence
  Description of Artificial Sequence: Synthetic oligonucleotide
  Antisense strand to SEQ ID NO: 1246132
auuuaccuagaucacucgg

SEQ ID NO: 1246134 - RNA, 19 nt, Artificial Sequence
  Description of Artificial Sequence: Synthetic oligonucleotide
  Sense strand starting at position 2820 of SEQ ID NO: 1241089
agguaaaucuacuccguac

SEQ ID NO: 1246135 - RNA, 19 nt, Artificial Sequence
  Description of Artificial Sequence: Synthetic oligonucleotide
  Antisense strand to SEQ ID NO: 1246134
guacggaguagauuuaccu

SEQ ID NO: 1246136 - RNA, 19 nt, Artificial Sequence
  Description of Artificial Sequence: Synthetic oligonucleotide
  Sense strand starting at position 2921 of SEQ ID NO: 1241089
aggccaauccgguaaccuu

SEQ ID NO: 1246137 - RNA, 19 nt, Artificial Sequence
  Description of Artificial Sequence: Synthetic oligonucleotide
  Antisense strand to SEQ ID NO: 1246136
aagguuaccggauuggccu

SEQ ID NO: 1246138 - RNA, 19 nt, Artificial Sequence
  Description of Artificial Sequence: Synthetic oligonucleotide
  Sense strand starting at position 2932 of SEQ ID NO: 1241089
guaaccuuaugccugacaa

SEQ ID NO: 1246139 - RNA, 19 nt, Artificial Sequence
  Description of Artificial Sequence: Synthetic oligonucleotide
  Antisense strand to SEQ ID NO: 1246138
uugucaggcauaagguuac

SEQ ID NO: 1246140 - RNA, 19 nt, Artificial Sequence
  Description of Artificial Sequence: Synthetic oligonucleotide
  Sense strand starting at position 2957 of SEQ ID NO: 1241089
ccuuauugucauuggagga

SEQ ID NO: 1246141 - RNA, 19 nt, Artificial Sequence
  Description of Artificial Sequence: Synthetic oligonucleotide
  Antisense strand to SEQ ID NO: 1246140
uccuccaaugacaauaagg

SEQ ID NO: 1246142 - RNA, 19 nt, Artificial Sequence
  Description of Artificial Sequence: Synthetic oligonucleotide
  Sense strand starting at position 2958 of SEQ ID NO: 1241089
cuuauugucauuggaggag

SEQ ID NO: 1246143 - RNA, 19 nt, Artificial Sequence
  Description of Artificial Sequence: Synthetic oligonucleotide
  Antisense strand to SEQ ID NO: 1246142
cuccuccaaugacaauaag

SEQ ID NO: 1246144 - RNA, 19 nt, Artificial Sequence
  Description of Artificial Sequence: Synthetic oligonucleotide
  Sense strand starting at position 3044 of SEQ ID NO: 1241089
ggcuuaguaagaggagagu

SEQ ID NO: 1246145 - RNA, 19 nt, Artificial Sequence
  Description of Artificial Sequence: Synthetic oligonucleotide
  Antisense strand to SEQ ID NO: 1246144
acucuccucuuacuaagcc

SEQ ID NO: 1246146 - RNA, 19 nt, Artificial Sequence
  Description of Artificial Sequence: Synthetic oligonucleotide
  Sense strand starting at position 3058 of SEQ ID NO: 1241089
agagucuaaacgcgcuaau

SEQ ID NO: 1246147 - RNA, 19 nt, Artificial Sequence
  Description of Artificial Sequence: Synthetic oligonucleotide
  Antisense strand to SEQ ID NO: 1246146
auuagcgcguuuagacucu

SEQ ID NO: 1246148 - RNA, 19 nt, Artificial Sequence
  Description of Artificial Sequence: Synthetic oligonucleotide
  Sense strand starting at position 3172 of SEQ ID NO: 1241089
cugucuugugaacaacaga

SEQ ID NO: 1246149 - RNA, 19 nt, Artificial Sequence
  Description of Artificial Sequence: Synthetic oligonucleotide
  Antisense strand to SEQ ID NO: 1246148
ucuguuguucacaagacag

SEQ ID NO: 1246150 - RNA, 19 nt, Artificial Sequence
  Description of Artificial Sequence: Synthetic oligonucleotide
  Sense strand starting at position 3473 of SEQ ID NO: 1241089
guugcagugaggugcauuu

SEQ ID NO: 1246151 - RNA, 19 nt, Artificial Sequence
  Description of Artificial Sequence: Synthetic oligonucleotide
  Antisense strand to SEQ ID NO: 1246150
aaaugcaccucacugcaac

SEQ ID NO: 1246152 - RNA, 19 nt, Artificial Sequence
  Description of Artificial Sequence: Synthetic oligonucleotide
  Sense strand starting at position 3609 of SEQ ID NO: 1241089
cugugagggacuugagcau

SEQ ID NO: 1246153 - RNA, 19 nt, Artificial Sequence
  Description of Artificial Sequence: Synthetic oligonucleotide
  Antisense strand to SEQ ID NO: 1246152
augcucaagucccucacag

SEQ ID NO: 1246154 - RNA, 19 nt, Artificial Sequence
  Description of Artificial Sequence: Synthetic oligonucleotide
  Sense strand starting at position 3689 of SEQ ID NO: 1241089
cuguauuuguaggaugaau

SEQ ID NO: 1246155 - RNA, 19 nt, Artificial Sequence
  Description of Artificial Sequence: Synthetic oligonucleotide
  Antisense strand to SEQ ID NO: 1246154
auucauccuacaaauacag

SEQ ID NO: 1246156 - RNA, 19 nt, Artificial Sequence
  Description of Artificial Sequence: Synthetic oligonucleotide
  Sense strand starting at position 3701 of SEQ ID NO: 1241089
gaugaauggcugcaucaac

SEQ ID NO: 1246157 - RNA, 19 nt, Artificial Sequence
  Description of Artificial Sequence: Synthetic oligonucleotide
  Antisense strand to SEQ ID NO: 1246156
guugaugcagccauucauc

SEQ ID NO: 1246158 - RNA, 19 nt, Artificial Sequence
  Description of Artificial Sequence: Synthetic oligonucleotide
  Sense strand starting at position 3770 of SEQ ID NO: 1241089
agaagugagugaaggaguu

SEQ ID NO: 1246159 - RNA, 19 nt, Artificial Sequence
  Description of Artificial Sequence: Synthetic oligonucleotide
  Antisense strand to SEQ ID NO: 1246158
aacuccuucacucacuucu

SEQ ID NO: 1246160 - RNA, 19 nt, Artificial Sequence
  Description of Artificial Sequence: Synthetic oligonucleotide
  Sense strand starting at position 3808 of SEQ ID NO: 1241089
caggaagggcccugaauua

SEQ ID NO: 1246161 - RNA, 19 nt, Artificial Sequence
  Description of Artificial Sequence: Synthetic oligonucleotide
  Antisense strand to SEQ ID NO: 1246160
uaauucagggcccuuccug

SEQ ID NO: 1246162 - RNA, 19 nt, Artificial Sequence
  Description of Artificial Sequence: Synthetic oligonucleotide
  Sense strand starting at position 3817 of SEQ ID NO: 1241089
cccugaauuaugggcugga

SEQ ID NO: 1246163 - RNA, 19 nt, Artificial Sequence
  Description of Artificial Sequence: Synthetic oligonucleotide
  Antisense strand to SEQ ID NO: 1246162
uccagcccauaauucaggg

SEQ ID NO: 1246164 - RNA, 19 nt, Artificial Sequence
  Description of Artificial Sequence: Synthetic oligonucleotide
  Sense strand starting at position 3818 of SEQ ID NO: 1241089
ccugaauuaugggcuggau

SEQ ID NO: 1246165 - RNA, 19 nt, Artificial Sequence
  Description of Artificial Sequence: Synthetic oligonucleotide
  Antisense strand to SEQ ID NO: 1246164
auccagcccauaauucagg

SEQ ID NO: 1246166 - RNA, 19 nt, Artificial Sequence
  Description of Artificial Sequence: Synthetic oligonucleotide
  Sense strand starting at position 3935 of SEQ ID NO: 1241089
ugcuguugugagcagauau

SEQ ID NO: 1246167 - RNA, 19 nt, Artificial Sequence
  Description of Artificial Sequence: Synthetic oligonucleotide
  Antisense strand to SEQ ID NO: 1246166
auaucugcucacaacagca

SEQ ID NO: 1246168 - RNA, 19 nt, Artificial Sequence
  Description of Artificial Sequence: Synthetic oligonucleotide
  Sense strand starting at position 3946 of SEQ ID NO: 1241089
gcagauaucggaugguguc

SEQ ID NO: 1246169 - RNA, 19 nt, Artificial Sequence
  Description of Artificial Sequence: Synthetic oligonucleotide
  Antisense strand to SEQ ID NO: 1246168
gacaccauccgauaucugc

SEQ ID NO: 1246170 - RNA, 19 nt, Artificial Sequence
  Description of Artificial Sequence: Synthetic oligonucleotide
  Sense strand starting at position 3970 of SEQ ID NO: 1241089
cugcaucauucgucaacca

SEQ ID NO: 1246171 - RNA, 19 nt, Artificial Sequence
  Description of Artificial Sequence: Synthetic oligonucleotide
  Antisense strand to SEQ ID NO: 1246170
ugguugacgaaugaugcag

SEQ ID NO: 1246172 - RNA, 19 nt, Artificial Sequence
  Description of Artificial Sequence: Synthetic oligonucleotide
  Sense strand starting at position 502 of SEQ ID NO: 1241090
auacuaguuuagucuuaac

SEQ ID NO: 1246173 - RNA, 19 nt, Artificial Sequence
  Description of Artificial Sequence: Synthetic oligonucleotide
  Antisense strand to SEQ ID NO: 1246172
guuaagacuaaacuaguau

SEQ ID NO: 1246174 - RNA, 19 nt, Artificial Sequence
  Description of Artificial Sequence: Synthetic oligonucleotide
  Sense strand starting at position 773 of SEQ ID NO: 1241090
acuagaagccucgaacugu

SEQ ID NO: 1246175 - RNA, 19 nt, Artificial Sequence
  Description of Artificial Sequence: Synthetic oligonucleotide
  Antisense strand to SEQ ID NO: 1246174
acaguucgaggcuucuagu

SEQ ID NO: 1246176 - RNA, 19 nt, Artificial Sequence
  Description of Artificial Sequence: Synthetic oligonucleotide
  Sense strand starting at position 839 of SEQ ID NO: 1241090
gggccucgcauagaacaau

SEQ ID NO: 1246177 - RNA, 19 nt, Artificial Sequence
  Description of Artificial Sequence: Synthetic oligonucleotide
  Antisense strand to SEQ ID NO: 1246176
auuguucuaugcgaggccc

SEQ ID NO: 1246178 - RNA, 19 nt, Artificial Sequence
  Description of Artificial Sequence: Synthetic oligonucleotide
  Sense strand starting at position 866 of SEQ ID NO: 1241090
gucauuaaccaaggacuau

SEQ ID NO: 1246179 - RNA, 19 nt, Artificial Sequence
  Description of Artificial Sequence: Synthetic oligonucleotide
  Antisense strand to SEQ ID NO: 1246178
auaguccuugguuaaugac

SEQ ID NO: 1246180 - RNA, 19 nt, Artificial Sequence
  Description of Artificial Sequence: Synthetic oligonucleotide
  Sense strand starting at position 1066 of SEQ ID NO: 1241090
cucuguugagcccaucaca

SEQ ID NO: 1246181 - RNA, 19 nt, Artificial Sequence
  Description of Artificial Sequence: Synthetic oligonucleotide
  Antisense strand to SEQ ID NO: 1246180
ugugaugggcucaacagag

SEQ ID NO: 1246182 - RNA, 19 nt, Artificial Sequence
  Description of Artificial Sequence: Synthetic oligonucleotide
  Sense strand starting at position 1125 of SEQ ID NO: 1241090
ugccaauucccugaaacug

SEQ ID NO: 1246183 - RNA, 19 nt, Artificial Sequence
  Description of Artificial Sequence: Synthetic oligonucleotide
  Antisense strand to SEQ ID NO: 1246182
caguuucagggaauuggca

SEQ ID NO: 1246184 - RNA, 19 nt, Artificial Sequence
  Description of Artificial Sequence: Synthetic oligonucleotide
  Sense strand starting at position 1133 of SEQ ID NO: 1241090
cccugaaacuguguauaag

SEQ ID NO: 1246185 - RNA, 19 nt, Artificial Sequence
  Description of Artificial Sequence: Synthetic oligonucleotide
  Antisense strand to SEQ ID NO: 1246184
cuuauacacaguuucaggg

SEQ ID NO: 1246186 - RNA, 19 nt, Artificial Sequence
  Description of Artificial Sequence: Synthetic oligonucleotide
  Sense strand starting at position 1134 of SEQ ID NO: 1241090
ccugaaacuguguauaagu

SEQ ID NO: 1246187 - RNA, 19 nt, Artificial Sequence
  Description of Artificial Sequence: Synthetic oligonucleotide
  Antisense strand to SEQ ID NO: 1246186
acuuauacacaguuucagg

SEQ ID NO: 1246188 - RNA, 19 nt, Artificial Sequence
  Description of Artificial Sequence: Synthetic oligonucleotide
  Sense strand starting at position 1143 of SEQ ID NO: 1241090
guguauaaguaccuuaaga

SEQ ID NO: 1246189 - RNA, 19 nt, Artificial Sequence
  Description of Artificial Sequence: Synthetic oligonucleotide
  Antisense strand to SEQ ID NO: 1246188
ucuuaagguacuuauacac

SEQ ID NO: 1246190 - RNA, 19 nt, Artificial Sequence
  Description of Artificial Sequence: Synthetic oligonucleotide
  Sense strand starting at position 1145 of SEQ ID NO: 1241090
guauaaguaccuuaagauu

SEQ ID NO: 1246191 - RNA, 19 nt, Artificial Sequence
  Description of Artificial Sequence: Synthetic oligonucleotide
  Antisense strand to SEQ ID NO: 1246190
aaucuuaagguacuuauac

SEQ ID NO: 1246192 - RNA, 19 nt, Artificial Sequence
  Description of Artificial Sequence: Synthetic oligonucleotide
  Sense strand starting at position 1229 of SEQ ID NO: 1241090
cucucuauuguuuacaagu

SEQ ID NO: 1246193 - RNA, 19 nt, Artificial Sequence
  Description of Artificial Sequence: Synthetic oligonucleotide
  Antisense strand to SEQ ID NO: 1246192
acuuguaaacaauagagag

SEQ ID NO: 1246194 - RNA, 19 nt, Artificial Sequence
  Description of Artificial Sequence: Synthetic oligonucleotide
  Sense strand starting at position 1242 of SEQ ID NO: 1241090
acaaguugguuuguuuaaa

SEQ ID NO: 1246195 - RNA, 19 nt, Artificial Sequence
  Description of Artificial Sequence: Synthetic oligonucleotide
  Antisense strand to SEQ ID NO: 1246194
uuuaaacaaaccaacuugu

SEQ ID NO: 1246196 - RNA, 19 nt, Artificial Sequence
  Description of Artificial Sequence: Synthetic oligonucleotide
  Sense strand starting at position 1264 of SEQ ID NO: 1241090
ugucaaaucuaaccuucga

SEQ ID NO: 1246197 - RNA, 19 nt, Artificial Sequence
  Description of Artificial Sequence: Synthetic oligonucleotide
  Antisense strand to SEQ ID NO: 1246196
ucgaagguuagauuugaca

SEQ ID NO: 1246198 - RNA, 19 nt, Artificial Sequence
  Description of Artificial Sequence: Synthetic oligonucleotide
  Sense strand starting at position 1434 of SEQ ID NO: 1241090
ugaugaaauucgucaucga

SEQ ID NO: 1246199 - RNA, 19 nt, Artificial Sequence
  Description of Artificial Sequence: Synthetic oligonucleotide
  Antisense strand to SEQ ID NO: 1246198
ucgaugacgaauuucauca

SEQ ID NO: 1246200 - RNA, 19 nt, Artificial Sequence
  Description of Artificial Sequence: Synthetic oligonucleotide
  Sense strand starting at position 1435 of SEQ ID NO: 1241090
gaugaaauucgucaucgag

SEQ ID NO: 1246201 - RNA, 19 nt, Artificial Sequence
  Description of Artificial Sequence: Synthetic oligonucleotide
  Antisense strand to SEQ ID NO: 1246200
cucgaugacgaauuucauc

SEQ ID NO: 1246202 - RNA, 19 nt, Artificial Sequence
  Description of Artificial Sequence: Synthetic oligonucleotide
  Sense strand starting at position 2545 of SEQ ID NO: 1241090
ugcuaaugaugcuuuagag

SEQ ID NO: 1246203 - RNA, 19 nt, Artificial Sequence
  Description of Artificial Sequence: Synthetic oligonucleotide
  Antisense strand to SEQ ID NO: 1246202
cucuaaagcaucauuagca

SEQ ID NO: 1246204 - RNA, 19 nt, Artificial Sequence
  Description of Artificial Sequence: Synthetic oligonucleotide
  Sense strand starting at position 2590 of SEQ ID NO: 1241090
uuaguagucuuucugaaag

SEQ ID NO: 1246205 - RNA, 19 nt, Artificial Sequence
  Description of Artificial Sequence: Synthetic oligonucleotide
  Antisense strand to SEQ ID NO: 1246204
cuuucagaaagacuacuaa

SEQ ID NO: 1246206 - RNA, 19 nt, Artificial Sequence
  Description of Artificial Sequence: Synthetic oligonucleotide
  Sense strand starting at position 2635 of SEQ ID NO: 1241090
gcuagaguagcgucuguga

SEQ ID NO: 1246207 - RNA, 19 nt, Artificial Sequence
  Description of Artificial Sequence: Synthetic oligonucleotide
  Antisense strand to SEQ ID NO: 1246206
ucacagacgcuacucuagc

SEQ ID NO: 1246208 - RNA, 19 nt, Artificial Sequence
  Description of Artificial Sequence: Synthetic oligonucleotide
  Sense strand starting at position 2849 of SEQ ID NO: 1241090
uguaucuaugcauaggagu

SEQ ID NO: 1246209 - RNA, 19 nt, Artificial Sequence
  Description of Artificial Sequence: Synthetic oligonucleotide
  Antisense strand to SEQ ID NO: 1246208
acuccuaugcauagauaca

SEQ ID NO: 1246210 - RNA, 19 nt, Artificial Sequence
  Description of Artificial Sequence: Synthetic oligonucleotide
  Sense strand starting at position 2883 of SEQ ID NO: 1241090
aggagaggcugugcaauaa

SEQ ID NO: 1246211 - RNA, 19 nt, Artificial Sequence
  Description of Artificial Sequence: Synthetic oligonucleotide
  Antisense strand to SEQ ID NO: 1246210
uuauugcacagccucuccu

SEQ ID NO: 1246212 - RNA, 19 nt, Artificial Sequence
  Description of Artificial Sequence: Synthetic oligonucleotide
  Sense strand starting at position 2887 of SEQ ID NO: 1241090
gaggcugugcaauaagaaa

SEQ ID NO: 1246213 - RNA, 19 nt, Artificial Sequence
  Description of Artificial Sequence: Synthetic oligonucleotide
  Antisense strand to SEQ ID NO: 1246212
uuucuuauugcacagccuc

SEQ ID NO: 1246214 - RNA, 19 nt, Artificial Sequence
  Description of Artificial Sequence: Synthetic oligonucleotide
  Sense strand starting at position 2914 of SEQ ID NO: 1241090
aaggguaaaucggugagga

SEQ ID NO: 1246215 - RNA, 19 nt, Artificial Sequence
  Description of Artificial Sequence: Synthetic oligonucleotide
  Antisense strand to SEQ ID NO: 1246214
uccucaccgauuuacccuu

SEQ ID NO: 1246216 - RNA, 19 nt, Artificial Sequence
  Description of Artificial Sequence: Synthetic oligonucleotide
  Sense strand starting at position 2915 of SEQ ID NO: 1241090
aggguaaaucggugaggac

SEQ ID NO: 1246217 - RNA, 19 nt, Artificial Sequence
  Description of Artificial Sequence: Synthetic oligonucleotide
  Antisense strand to SEQ ID NO: 1246216
guccucaccgauuuacccu

SEQ ID NO: 1246218 - RNA, 19 nt, Artificial Sequence
  Description of Artificial Sequence: Synthetic oligonucleotide
  Sense strand starting at position 2916 of SEQ ID NO: 1241090
ggguaaaucggugaggacu

SEQ ID NO: 1246219 - RNA, 19 nt, Artificial Sequence
  Description of Artificial Sequence: Synthetic oligonucleotide
  Antisense strand to SEQ ID NO: 1246218
aguccucaccgauuuaccc

SEQ ID NO: 1246220 - RNA, 19 nt, Artificial Sequence
  Description of Artificial Sequence: Synthetic oligonucleotide
  Sense strand starting at position 2936 of SEQ ID NO: 1241090
gcaacauuuagcuggugua

SEQ ID NO: 1246221 - RNA, 19 nt, Artificial Sequence
  Description of Artificial Sequence: Synthetic oligonucleotide
  Antisense strand to SEQ ID NO: 1246220
uacaccagcuaaauguugc

SEQ ID NO: 1246222 - RNA, 19 nt, Artificial Sequence
  Description of Artificial Sequence: Synthetic oligonucleotide
  Sense strand starting at position 2949 of SEQ ID NO: 1241090
gguguacuggguugaauga

SEQ ID NO: 1246223 - RNA, 19 nt, Artificial Sequence
  Description of Artificial Sequence: Synthetic oligonucleotide
  Antisense strand to SEQ ID NO: 1246222
ucauucaacccaguacacc

SEQ ID NO: 1246224 - RNA, 19 nt, Artificial Sequence
  Description of Artificial Sequence: Synthetic oligonucleotide
  Sense strand starting at position 2984 of SEQ ID NO: 1241090
auucuuguccacugggaac

SEQ ID NO: 1246225 - RNA, 19 nt, Artificial Sequence
  Description of Artificial Sequence: Synthetic oligonucleotide
  Antisense strand to SEQ ID NO: 1246224
guucccaguggacaagaau

SEQ ID NO: 1246226 - RNA, 19 nt, Artificial Sequence
  Description of Artificial Sequence: Synthetic oligonucleotide
  Sense strand starting at position 3071 of SEQ ID NO: 1241090
guauuaagaugucccaacu

SEQ ID NO: 1246227 - RNA, 19 nt, Artificial Sequence
  Description of Artificial Sequence: Synthetic oligonucleotide
  Antisense strand to SEQ ID NO: 1246226
aguugggacaucuuaauac

SEQ ID NO: 1246228 - RNA, 19 nt, Artificial Sequence
  Description of Artificial Sequence: Synthetic oligonucleotide
  Sense strand starting at position 3270 of SEQ ID NO: 1241090
cuacucuaaugguugguaa

SEQ ID NO: 1246229 - RNA, 19 nt, Artificial Sequence
  Description of Artificial Sequence: Synthetic oligonucleotide
  Antisense strand to SEQ ID NO: 1246228
uuaccaaccauuagaguag

SEQ ID NO: 1246230 - RNA, 19 nt, Artificial Sequence
  Description of Artificial Sequence: Synthetic oligonucleotide
  Sense strand starting at position 3272 of SEQ ID NO: 1241090
acucuaaugguugguaacu

SEQ ID NO: 1246231 - RNA, 19 nt, Artificial Sequence
  Description of Artificial Sequence: Synthetic oligonucleotide
  Antisense strand to SEQ ID NO: 1246230
aguuaccaaccauuagagu

SEQ ID NO: 1246232 - RNA, 19 nt, Artificial Sequence
  Description of Artificial Sequence: Synthetic oligonucleotide
  Sense strand starting at position 3273 of SEQ ID NO: 1241090
cucuaaugguugguaacua

SEQ ID NO: 1246233 - RNA, 19 nt, Artificial Sequence
  Description of Artificial Sequence: Synthetic oligonucleotide
  Antisense strand to SEQ ID NO: 1246232
uaguuaccaaccauuagag

SEQ ID NO: 1246234 - RNA, 19 nt, Artificial Sequence
  Description of Artificial Sequence: Synthetic oligonucleotide
  Sense strand starting at position 3277 of SEQ ID NO: 1241090
aaugguugguaacuagagu

SEQ ID NO: 1246235 - RNA, 19 nt, Artificial Sequence
  Description of Artificial Sequence: Synthetic oligonucleotide
  Antisense strand to SEQ ID NO: 1246234
acucuaguuaccaaccauu

SEQ ID NO: 1246236 - RNA, 19 nt, Artificial Sequence
  Description of Artificial Sequence: Synthetic oligonucleotide
  Sense strand starting at position 3278 of SEQ ID NO: 1241090
augguugguaacuagaguu

SEQ ID NO: 1246237 - RNA, 19 nt, Artificial Sequence
  Description of Artificial Sequence: Synthetic oligonucleotide
  Antisense strand to SEQ ID NO: 1246236
aacucuaguuaccaaccau

SEQ ID NO: 1246238 - RNA, 19 nt, Artificial Sequence
  Description of Artificial Sequence: Synthetic oligonucleotide
  Sense strand starting at position 3443 of SEQ ID NO: 1241090
ggagaaugaaguuggaguu

SEQ ID NO: 1246239 - RNA, 19 nt, Artificial Sequence
  Description of Artificial Sequence: Synthetic oligonucleotide
  Antisense strand to SEQ ID NO: 1246238
aacuccaacuucauucucc

SEQ ID NO: 1246240 - RNA, 19 nt, Artificial Sequence
  Description of Artificial Sequence: Synthetic oligonucleotide
  Sense strand starting at position 3521 of SEQ ID NO: 1241090
gucagauuauuugaauagg

SEQ ID NO: 1246241 - RNA, 19 nt, Artificial Sequence
  Description of Artificial Sequence: Synthetic oligonucleotide
  Antisense strand to SEQ ID NO: 1246240
ccuauucaaauaaucugac

SEQ ID NO: 1246242 - RNA, 19 nt, Artificial Sequence
  Description of Artificial Sequence: Synthetic oligonucleotide
  Sense strand starting at position 3692 of SEQ ID NO: 1241090
ugaugaaguuuguuauuac

SEQ ID NO: 1246243 - RNA, 19 nt, Artificial Sequence
  Description of Artificial Sequence: Synthetic oligonucleotide
  Antisense strand to SEQ ID NO: 1246242
guaauaacaaacuucauca

SEQ ID NO: 1246244 - RNA, 19 nt, Artificial Sequence
  Description of Artificial Sequence: Synthetic oligonucleotide
  Sense strand starting at position 3695 of SEQ ID NO: 1241090
ugaaguuuguuauuaccua

SEQ ID NO: 1246245 - RNA, 19 nt, Artificial Sequence
  Description of Artificial Sequence: Synthetic oligonucleotide
  Antisense strand to SEQ ID NO: 1246244
uagguaauaacaaacuuca

SEQ ID NO: 1246246 - RNA, 19 nt, Artificial Sequence
  Description of Artificial Sequence: Synthetic oligonucleotide
  Sense strand starting at position 3756 of SEQ ID NO: 1241090
uagggacugccguaacaaa

SEQ ID NO: 1246247 - RNA, 19 nt, Artificial Sequence
  Description of Artificial Sequence: Synthetic oligonucleotide
  Antisense strand to SEQ ID NO: 1246246
uuuguuacggcagucccua

SEQ ID NO: 1246248 - RNA, 19 nt, Artificial Sequence
  Description of Artificial Sequence: Synthetic oligonucleotide
  Sense strand starting at position 3818 of SEQ ID NO: 1241090
cacacuucuggaggugaga

SEQ ID NO: 1246249 - RNA, 19 nt, Artificial Sequence
  Description of Artificial Sequence: Synthetic oligonucleotide
  Antisense strand to SEQ ID NO: 1246248
ucucaccuccagaagugug

SEQ ID NO: 1246250 - RNA, 19 nt, Artificial Sequence
  Description of Artificial Sequence: Synthetic oligonucleotide
  Sense strand starting at position 3894 of SEQ ID NO: 1241090
ggaggauccuuucuugucu

SEQ ID NO: 1246251 - RNA, 19 nt, Artificial Sequence
  Description of Artificial Sequence: Synthetic oligonucleotide
  Antisense strand to SEQ ID NO: 1246250
agacaagaaaggauccucc

SEQ ID NO: 1246252 - RNA, 19 nt, Artificial Sequence
  Description of Artificial Sequence: Synthetic oligonucleotide
  Sense strand starting at position 407 of SEQ ID NO: 1241091
agauuccuuccagguuaga

SEQ ID NO: 1246253 - RNA, 19 nt, Artificial Sequence
  Description of Artificial Sequence: Synthetic oligonucleotide
  Antisense strand to SEQ ID NO: 1246252
ucuaaccuggaaggaaucu

SEQ ID NO: 1246254 - RNA, 19 nt, Artificial Sequence
  Description of Artificial Sequence: Synthetic oligonucleotide
  Sense strand starting at position 410 of SEQ ID NO: 1241091
uuccuuccagguuagaauu

SEQ ID NO: 1246255 - RNA, 19 nt, Artificial Sequence
  Description of Artificial Sequence: Synthetic oligonucleotide
  Antisense strand to SEQ ID NO: 1246254
aauucuaaccuggaaggaa

SEQ ID NO: 1246256 - RNA, 19 nt, Artificial Sequence
  Description of Artificial Sequence: Synthetic oligonucleotide
  Sense strand starting at position 644 of SEQ ID NO: 1241091
guccuaacucauuaucugu

SEQ ID NO: 1246257 - RNA, 19 nt, Artificial Sequence
  Description of Artificial Sequence: Synthetic oligonucleotide
  Antisense strand to SEQ ID NO: 1246256
acagauaaugaguuaggac

SEQ ID NO: 1246258 - RNA, 19 nt, Artificial Sequence
  Description of Artificial Sequence: Synthetic oligonucleotide
  Sense strand starting at position 649 of SEQ ID NO: 1241091
aacucauuaucugugggau

SEQ ID NO: 1246259 - RNA, 19 nt, Artificial Sequence
  Description of Artificial Sequence: Synthetic oligonucleotide
  Antisense strand to SEQ ID NO: 1246258
aucccacagauaaugaguu

SEQ ID NO: 1246260 - RNA, 19 nt, Artificial Sequence
  Description of Artificial Sequence: Synthetic oligonucleotide
  Sense strand starting at position 650 of SEQ ID NO: 1241091
acucauuaucugugggauu

SEQ ID NO: 1246261 - RNA, 19 nt, Artificial Sequence
  Description of Artificial Sequence: Synthetic oligonucleotide
  Antisense strand to SEQ ID NO: 1246260
aaucccacagauaaugagu

SEQ ID NO: 1246262 - RNA, 19 nt, Artificial Sequence
  Description of Artificial Sequence: Synthetic oligonucleotide
  Sense strand starting at position 652 of SEQ ID NO: 1241091
ucauuaucugugggauuag

SEQ ID NO: 1246263 - RNA, 19 nt, Artificial Sequence
  Description of Artificial Sequence: Synthetic oligonucleotide
  Antisense strand to SEQ ID NO: 1246262
cuaaucccacagauaauga

SEQ ID NO: 1246264 - RNA, 19 nt, Artificial Sequence
  Description of Artificial Sequence: Synthetic oligonucleotide
  Sense strand starting at position 716 of SEQ ID NO: 1241091
guaaauugagcuugcauuu

SEQ ID NO: 1246265 - RNA, 19 nt, Artificial Sequence
  Description of Artificial Sequence: Synthetic oligonucleotide
  Antisense strand to SEQ ID NO: 1246264
aaaugcaagcucaauuuac

SEQ ID NO: 1246266 - RNA, 19 nt, Artificial Sequence
  Description of Artificial Sequence: Synthetic oligonucleotide
  Sense strand starting at position 749 of SEQ ID NO: 1241091
agggaagauuagccacauu

SEQ ID NO: 1246267 - RNA, 19 nt, Artificial Sequence
  Description of Artificial Sequence: Synthetic oligonucleotide
  Antisense strand to SEQ ID NO: 1246266
aauguggcuaaucuucccu

SEQ ID NO: 1246268 - RNA, 19 nt, Artificial Sequence
  Description of Artificial Sequence: Synthetic oligonucleotide
  Sense strand starting at position 816 of SEQ ID NO: 1241091
ccuuuauugcucuaggaag

SEQ ID NO: 1246269 - RNA, 19 nt, Artificial Sequence
  Description of Artificial Sequence: Synthetic oligonucleotide
  Antisense strand to SEQ ID NO: 1246268
cuuccuagagcaauaaagg

SEQ ID NO: 1246270 - RNA, 19 nt, Artificial Sequence
  Description of Artificial Sequence: Synthetic oligonucleotide
  Sense strand starting at position 818 of SEQ ID NO: 1241091
uuuauugcucuaggaagaa

SEQ ID NO: 1246271 - RNA, 19 nt, Artificial Sequence
  Description of Artificial Sequence: Synthetic oligonucleotide
  Antisense strand to SEQ ID NO: 1246270
uucuuccuagagcaauaaa

SEQ ID NO: 1246272 - RNA, 19 nt, Artificial Sequence
  Description of Artificial Sequence: Synthetic oligonucleotide
  Sense strand starting at position 1099 of SEQ ID NO: 1241091
uaagaaaccugacuugguu

SEQ ID NO: 1246273 - RNA, 19 nt, Artificial Sequence
  Description of Artificial Sequence: Synthetic oligonucleotide
  Antisense strand to SEQ ID NO: 1246272
aaccaagucagguuucuua

SEQ ID NO: 1246274 - RNA, 19 nt, Artificial Sequence
  Description of Artificial Sequence: Synthetic oligonucleotide
  Sense strand starting at position 1103 of SEQ ID NO: 1241091
aaaccugacuugguuugau

SEQ ID NO: 1246275 - RNA, 19 nt, Artificial Sequence
  Description of Artificial Sequence: Synthetic oligonucleotide
  Antisense strand to SEQ ID NO: 1246274
aucaaaccaagucagguuu

SEQ ID NO: 1246276 - RNA, 19 nt, Artificial Sequence
  Description of Artificial Sequence: Synthetic oligonucleotide
  Sense strand starting at position 1106 of SEQ ID NO: 1241091
ccugacuugguuugaugau

SEQ ID NO: 1246277 - RNA, 19 nt, Artificial Sequence
  Description of Artificial Sequence: Synthetic oligonucleotide
  Antisense strand to SEQ ID NO: 1246276
aucaucaaaccaagucagg

SEQ ID NO: 1246278 - RNA, 19 nt, Artificial Sequence
  Description of Artificial Sequence: Synthetic oligonucleotide
  Sense strand starting at position 1182 of SEQ ID NO: 1241091
uaauauguguaucuagaug

SEQ ID NO: 1246279 - RNA, 19 nt, Artificial Sequence
  Description of Artificial Sequence: Synthetic oligonucleotide
  Antisense strand to SEQ ID NO: 1246278
caucuagauacacauauua

SEQ ID NO: 1246280 - RNA, 19 nt, Artificial Sequence
  Description of Artificial Sequence: Synthetic oligonucleotide
  Sense strand starting at position 1533 of SEQ ID NO: 1241091
agaagagugaagggcuauu

SEQ ID NO: 1246281 - RNA, 19 nt, Artificial Sequence
  Description of Artificial Sequence: Synthetic oligonucleotide
  Antisense strand to SEQ ID NO: 1246280
aauagcccuucacucuucu

SEQ ID NO: 1246282 - RNA, 19 nt, Artificial Sequence
  Description of Artificial Sequence: Synthetic oligonucleotide
  Sense strand starting at position 1642 of SEQ ID NO: 1241091
uggaaauggaaacgugagu

SEQ ID NO: 1246283 - RNA, 19 nt, Artificial Sequence
  Description of Artificial Sequence: Synthetic oligonucleotide
  Antisense strand to SEQ ID NO: 1246282
acucacguuuccauuucca

SEQ ID NO: 1246284 - RNA, 19 nt, Artificial Sequence
  Description of Artificial Sequence: Synthetic oligonucleotide
  Sense strand starting at position 1858 of SEQ ID NO: 1241091
ggcuaaucgaccugagaag

SEQ ID NO: 1246285 - RNA, 19 nt, Artificial Sequence
  Description of Artificial Sequence: Synthetic oligonucleotide
  Antisense strand to SEQ ID NO: 1246284
cuucucaggucgauuagcc

SEQ ID NO: 1246286 - RNA, 19 nt, Artificial Sequence
  Description of Artificial Sequence: Synthetic oligonucleotide
  Sense strand starting at position 2330 of SEQ ID NO: 1241091
aggcaaacaucagugaaca

SEQ ID NO: 1246287 - RNA, 19 nt, Artificial Sequence
  Description of Artificial Sequence: Synthetic oligonucleotide
  Antisense strand to SEQ ID NO: 1246286
uguucacugauguuugccu

SEQ ID NO: 1246288 - RNA, 19 nt, Artificial Sequence
  Description of Artificial Sequence: Synthetic oligonucleotide
  Sense strand starting at position 2331 of SEQ ID NO: 1241091
ggcaaacaucagugaacaa

SEQ ID NO: 1246289 - RNA, 19 nt, Artificial Sequence
  Description of Artificial Sequence: Synthetic oligonucleotide
  Antisense strand to SEQ ID NO: 1246288
uuguucacugauguuugcc

SEQ ID NO: 1246290 - RNA, 19 nt, Artificial Sequence
  Description of Artificial Sequence: Synthetic oligonucleotide
  Sense strand starting at position 2363 of SEQ ID NO: 1241091
uccugaggagcuuaauucu

SEQ ID NO: 1246291 - RNA, 19 nt, Artificial Sequence
  Description of Artificial Sequence: Synthetic oligonucleotide
  Antisense strand to SEQ ID NO: 1246290
agaauuaagcuccucagga

SEQ ID NO: 1246292 - RNA, 19 nt, Artificial Sequence
  Description of Artificial Sequence: Synthetic oligonucleotide
  Sense strand starting at position 2371 of SEQ ID NO: 1241091
agcuuaauucuggagguga

SEQ ID NO: 1246293 - RNA, 19 nt, Artificial Sequence
  Description of Artificial Sequence: Synthetic oligonucleotide
  Antisense strand to SEQ ID NO: 1246292
ucaccuccagaauuaagcu

SEQ ID NO: 1246294 - RNA, 19 nt, Artificial Sequence
  Description of Artificial Sequence: Synthetic oligonucleotide
  Sense strand starting at position 2373 of SEQ ID NO: 1241091
cuuaauucuggaggugaga

SEQ ID NO: 1246295 - RNA, 19 nt, Artificial Sequence
  Description of Artificial Sequence: Synthetic oligonucleotide
  Antisense strand to SEQ ID NO: 1246294
ucucaccuccagaauuaag

SEQ ID NO: 1246296 - RNA, 19 nt, Artificial Sequence
  Description of Artificial Sequence: Synthetic oligonucleotide
  Sense strand starting at position 2721 of SEQ ID NO: 1241091
uaaauauguugaguaggau

SEQ ID NO: 1246297 - RNA, 19 nt, Artificial Sequence
  Description of Artificial Sequence: Synthetic oligonucleotide
  Antisense strand to SEQ ID NO: 1246296
auccuacucaacauauuua

SEQ ID NO: 1246298 - RNA, 19 nt, Artificial Sequence
  Description of Artificial Sequence: Synthetic oligonucleotide
  Sense strand starting at position 2724 of SEQ ID NO: 1241091
auauguugaguaggauaca

SEQ ID NO: 1246299 - RNA, 19 nt, Artificial Sequence
  Description of Artificial Sequence: Synthetic oligonucleotide
  Antisense strand to SEQ ID NO: 1246298
uguauccuacucaacauau

SEQ ID NO: 1246300 - RNA, 19 nt, Artificial Sequence
  Description of Artificial Sequence: Synthetic oligonucleotide
  Sense strand starting at position 2776 of SEQ ID NO: 1241091
cuuaaaguuugggucauaa

SEQ ID NO: 1246301 - RNA, 19 nt, Artificial Sequence
  Description of Artificial Sequence: Synthetic oligonucleotide
  Antisense strand to SEQ ID NO: 1246300
uuaugacccaaacuuuaag

SEQ ID NO: 1246302 - RNA, 19 nt, Artificial Sequence
  Description of Artificial Sequence: Synthetic oligonucleotide
  Sense strand starting at position 2906 of SEQ ID NO: 1241091
gucaaauaaugcuugaaca

SEQ ID NO: 1246303 - RNA, 19 nt, Artificial Sequence
  Description of Artificial Sequence: Synthetic oligonucleotide
  Antisense strand to SEQ ID NO: 1246302
uguucaagcauuauuugac

SEQ ID NO: 1246304 - RNA, 19 nt, Artificial Sequence
  Description of Artificial Sequence: Synthetic oligonucleotide
  Sense strand starting at position 2991 of SEQ ID NO: 1241091
aguugagucagucaaucua

SEQ ID NO: 1246305 - RNA, 19 nt, Artificial Sequence
  Description of Artificial Sequence: Synthetic oligonucleotide
  Antisense strand to SEQ ID NO: 1246304
uagauugacugacucaacu

SEQ ID NO: 1246306 - RNA, 19 nt, Artificial Sequence
  Description of Artificial Sequence: Synthetic oligonucleotide
  Sense strand starting at position 3067 of SEQ ID NO: 1241091
uguggaugaagaugguuaa

SEQ ID NO: 1246307 - RNA, 19 nt, Artificial Sequence
  Description of Artificial Sequence: Synthetic oligonucleotide
  Antisense strand to SEQ ID NO: 1246306
uuaaccaucuucauccaca

SEQ ID NO: 1246308 - RNA, 19 nt, Artificial Sequence
  Description of Artificial Sequence: Synthetic oligonucleotide
  Sense strand starting at position 3068 of SEQ ID NO: 1241091
guggaugaagaugguuaaa

SEQ ID NO: 1246309 - RNA, 19 nt, Artificial Sequence
  Description of Artificial Sequence: Synthetic oligonucleotide
  Antisense strand to SEQ ID NO: 1246308
uuuaaccaucuucauccac

SEQ ID NO: 1246310 - RNA, 19 nt, Artificial Sequence
  Description of Artificial Sequence: Synthetic oligonucleotide
  Sense strand starting at position 3089 of SEQ ID NO: 1241091
uagaguugauguguaaaca

SEQ ID NO: 1246311 - RNA, 19 nt, Artificial Sequence
  Description of Artificial Sequence: Synthetic oligonucleotide
  Antisense strand to SEQ ID NO: 1246310
uguuuacacaucaacucua

SEQ ID NO: 1246312 - RNA, 19 nt, Artificial Sequence
  Description of Artificial Sequence: Synthetic oligonucleotide
  Sense strand starting at position 3090 of SEQ ID NO: 1241091
agaguugauguguaaacau

SEQ ID NO: 1246313 - RNA, 19 nt, Artificial Sequence
  Description of Artificial Sequence: Synthetic oligonucleotide
  Antisense strand to SEQ ID NO: 1246312
auguuuacacaucaacucu

SEQ ID NO: 1246314 - RNA, 19 nt, Artificial Sequence
  Description of Artificial Sequence: Synthetic oligonucleotide
  Sense strand starting at position 3149 of SEQ ID NO: 1241091
aacugugguguuuauugau

SEQ ID NO: 1246315 - RNA, 19 nt, Artificial Sequence
  Description of Artificial Sequence: Synthetic oligonucleotide
  Antisense strand to SEQ ID NO: 1246314
aucaauaaacaccacaguu

SEQ ID NO: 1246316 - RNA, 19 nt, Artificial Sequence
  Description of Artificial Sequence: Synthetic oligonucleotide
  Sense strand starting at position 3173 of SEQ ID NO: 1241091
guggauugacuguauacau

SEQ ID NO: 1246317 - RNA, 19 nt, Artificial Sequence
  Description of Artificial Sequence: Synthetic oligonucleotide
  Antisense strand to SEQ ID NO: 1246316
auguauacagucaauccac

SEQ ID NO: 1246318 - RNA, 19 nt, Artificial Sequence
  Description of Artificial Sequence: Synthetic oligonucleotide
  Sense strand starting at position 3216 of SEQ ID NO: 1241091
uccuuaugugaauaugcca

SEQ ID NO: 1246319 - RNA, 19 nt, Artificial Sequence
  Description of Artificial Sequence: Synthetic oligonucleotide
  Antisense strand to SEQ ID NO: 1246318
uggcauauucacauaagga

SEQ ID NO: 1246320 - RNA, 19 nt, Artificial Sequence
  Description of Artificial Sequence: Synthetic oligonucleotide
  Sense strand starting at position 3250 of SEQ ID NO: 1241091
caaugagauauggguuugu

SEQ ID NO: 1246321 - RNA, 19 nt, Artificial Sequence
  Description of Artificial Sequence: Synthetic oligonucleotide
  Antisense strand to SEQ ID NO: 1246320
acaaacccauaucucauug

SEQ ID NO: 1246322 - RNA, 19 nt, Artificial Sequence
  Description of Artificial Sequence: Synthetic oligonucleotide
  Sense strand starting at position 3254 of SEQ ID NO: 1241091
gagauauggguuugugaca

SEQ ID NO: 1246323 - RNA, 19 nt, Artificial Sequence
  Description of Artificial Sequence: Synthetic oligonucleotide
  Antisense strand to SEQ ID NO: 1246322
ugucacaaacccauaucuc

SEQ ID NO: 1246324 - RNA, 19 nt, Artificial Sequence
  Description of Artificial Sequence: Synthetic oligonucleotide
  Sense strand starting at position 3269 of SEQ ID NO: 1241091
gacaguaggcacggaaauu

SEQ ID NO: 1246325 - RNA, 19 nt, Artificial Sequence
  Description of Artificial Sequence: Synthetic oligonucleotide
  Antisense strand to SEQ ID NO: 1246324
aauuuccgugccuacuguc

SEQ ID NO: 1246326 - RNA, 19 nt, Artificial Sequence
  Description of Artificial Sequence: Synthetic oligonucleotide
  Sense strand starting at position 3685 of SEQ ID NO: 1241091
gugcuauaacaaggacaga

SEQ ID NO: 1246327 - RNA, 19 nt, Artificial Sequence
  Description of Artificial Sequence: Synthetic oligonucleotide
  Antisense strand to SEQ ID NO: 1246326
ucuguccuuguuauagcac

SEQ ID NO: 1246328 - RNA, 19 nt, Artificial Sequence
  Description of Artificial Sequence: Synthetic oligonucleotide
  Sense strand starting at position 3872 of SEQ ID NO: 1241091
uggagcuuagaguaaugua

SEQ ID NO: 1246329 - RNA, 19 nt, Artificial Sequence
  Description of Artificial Sequence: Synthetic oligonucleotide
  Antisense strand to SEQ ID NO: 1246328
uacauuacucuaagcucca

SEQ ID NO: 1246330 - RNA, 19 nt, Artificial Sequence
  Description of Artificial Sequence: Synthetic oligonucleotide
  Sense strand starting at position 3885 of SEQ ID NO: 1241091
aauguaguaccauggagau

SEQ ID NO: 1246331 - RNA, 19 nt, Artificial Sequence
  Description of Artificial Sequence: Synthetic oligonucleotide
  Antisense strand to SEQ ID NO: 1246330
aucuccaugguacuacauu

SEQ ID NO: 1246332 - RNA, 19 nt, Artificial Sequence
  Description of Artificial Sequence: Synthetic oligonucleotide
  Sense strand starting at position 34 of SEQ ID NO: 1241092
gaggauaugugggcagcaa

SEQ ID NO: 1246333 - RNA, 19 nt, Artificial Sequence
  Description of Artificial Sequence: Synthetic oligonucleotide
  Antisense strand to SEQ ID NO: 1246332
uugcugcccacauauccuc

SEQ ID NO: 1246334 - RNA, 19 nt, Artificial Sequence
  Description of Artificial Sequence: Synthetic oligonucleotide
  Sense strand starting at position 35 of SEQ ID NO: 1241092
aggauaugugggcagcaaa

SEQ ID NO: 1246335 - RNA, 19 nt, Artificial Sequence
  Description of Artificial Sequence: Synthetic oligonucleotide
  Antisense strand to SEQ ID NO: 1246334
uuugcugcccacauauccu

SEQ ID NO: 1246336 - RNA, 19 nt, Artificial Sequence
  Description of Artificial Sequence: Synthetic oligonucleotide
  Sense strand starting at position 54 of SEQ ID NO: 1241092
uguggagauuuccauuaag

SEQ ID NO: 1246337 - RNA, 19 nt, Artificial Sequence
  Description of Artificial Sequence: Synthetic oligonucleotide
  Antisense strand to SEQ ID NO: 1246336
cuuaauggaaaucuccaca

SEQ ID NO: 1246338 - RNA, 19 nt, Artificial Sequence
  Description of Artificial Sequence: Synthetic oligonucleotide
  Sense strand starting at position 102 of SEQ ID NO: 1241092
gggacuguaauaugaaagu

SEQ ID NO: 1246339 - RNA, 19 nt, Artificial Sequence
  Description of Artificial Sequence: Synthetic oligonucleotide
  Antisense strand to SEQ ID NO: 1246338
acuuucauauuacaguccc

SEQ ID NO: 1246340 - RNA, 19 nt, Artificial Sequence
  Description of Artificial Sequence: Synthetic oligonucleotide
  Sense strand starting at position 117 of SEQ ID NO: 1241092
aaguuaggucaagggaagu

SEQ ID NO: 1246341 - RNA, 19 nt, Artificial Sequence
  Description of Artificial Sequence: Synthetic oligonucleotide
  Antisense strand to SEQ ID NO: 1246340
acuucccuugaccuaacuu

SEQ ID NO: 1246342 - RNA, 19 nt, Artificial Sequence
  Description of Artificial Sequence: Synthetic oligonucleotide
  Sense strand starting at position 152 of SEQ ID NO: 1241092
gggaaaguugaguauaugu

SEQ ID NO: 1246343 - RNA, 19 nt, Artificial Sequence
  Description of Artificial Sequence: Synthetic oligonucleotide
  Antisense strand to SEQ ID NO: 1246342
acauauacucaacuuuccc

SEQ ID NO: 1246344 - RNA, 19 nt, Artificial Sequence
  Description of Artificial Sequence: Synthetic oligonucleotide
  Sense strand starting at position 154 of SEQ ID NO: 1241092
gaaaguugaguauauguua

SEQ ID NO: 1246345 - RNA, 19 nt, Artificial Sequence
  Description of Artificial Sequence: Synthetic oligonucleotide
  Antisense strand to SEQ ID NO: 1246344
uaacauauacucaacuuuc

SEQ ID NO: 1246346 - RNA, 19 nt, Artificial Sequence
  Description of Artificial Sequence: Synthetic oligonucleotide
  Sense strand starting at position 188 of SEQ ID NO: 1241092
aguuuauggagagguauaa

SEQ ID NO: 1246347 - RNA, 19 nt, Artificial Sequence
  Description of Artificial Sequence: Synthetic oligonucleotide
  Antisense strand to SEQ ID NO: 1246346
uuauaccucuccauaaacu

SEQ ID NO: 1246348 - RNA, 19 nt, Artificial Sequence
  Description of Artificial Sequence: Synthetic oligonucleotide
  Sense strand starting at position 197 of SEQ ID NO: 1241092
agagguauaacuugaaguu

SEQ ID NO: 1246349 - RNA, 19 nt, Artificial Sequence
  Description of Artificial Sequence: Synthetic oligonucleotide
  Antisense strand to SEQ ID NO: 1246348
aacuucaaguuauaccucu

SEQ ID NO: 1246350 - RNA, 19 nt, Artificial Sequence
  Description of Artificial Sequence: Synthetic oligonucleotide
  Sense strand starting at position 235 of SEQ ID NO: 1241092
gccgucucucacgucuaua

SEQ ID NO: 1246351 - RNA, 19 nt, Artificial Sequence
  Description of Artificial Sequence: Synthetic oligonucleotide
  Antisense strand to SEQ ID NO: 1246350
uauagacgugagagacggc

SEQ ID NO: 1246352 - RNA, 19 nt, Artificial Sequence
  Description of Artificial Sequence: Synthetic oligonucleotide
  Sense strand starting at position 238 of SEQ ID NO: 1241092
gucucucacgucuauaauc

SEQ ID NO: 1246353 - RNA, 19 nt, Artificial Sequence
  Description of Artificial Sequence: Synthetic oligonucleotide
  Antisense strand to SEQ ID NO: 1246352
gauuauagacgugagagac

SEQ ID NO: 1246354 - RNA, 19 nt, Artificial Sequence
  Description of Artificial Sequence: Synthetic oligonucleotide
  Sense strand starting at position 254 of SEQ ID NO: 1241092
aucucaguacuuugugaga

SEQ ID NO: 1246355 - RNA, 19 nt, Artificial Sequence
  Description of Artificial Sequence: Synthetic oligonucleotide
  Antisense strand to SEQ ID NO: 1246354
ucucacaaaguacugagau

SEQ ID NO: 1246356 - RNA, 19 nt, Artificial Sequence
  Description of Artificial Sequence: Synthetic oligonucleotide
  Sense strand starting at position 744 of SEQ ID NO: 1241092
guggcagugagcuaagagu

SEQ ID NO: 1246357 - RNA, 19 nt, Artificial Sequence
  Description of Artificial Sequence: Synthetic oligonucleotide
  Antisense strand to SEQ ID NO: 1246356
acucuuagcucacugccac

SEQ ID NO: 1246358 - RNA, 19 nt, Artificial Sequence
  Description of Artificial Sequence: Synthetic oligonucleotide
  Sense strand starting at position 889 of SEQ ID NO: 1241092
ggguaaagugauggaguca

SEQ ID NO: 1246359 - RNA, 19 nt, Artificial Sequence
  Description of Artificial Sequence: Synthetic oligonucleotide
  Antisense strand to SEQ ID NO: 1246358
ugacuccaucacuuuaccc

SEQ ID NO: 1246360 - RNA, 19 nt, Artificial Sequence
  Description of Artificial Sequence: Synthetic oligonucleotide
  Sense strand starting at position 902 of SEQ ID NO: 1241092
gagucaauucccggagggu

SEQ ID NO: 1246361 - RNA, 19 nt, Artificial Sequence
  Description of Artificial Sequence: Synthetic oligonucleotide
  Antisense strand to SEQ ID NO: 1246360
acccuccgggaauugacuc

SEQ ID NO: 1246362 - RNA, 19 nt, Artificial Sequence
  Description of Artificial Sequence: Synthetic oligonucleotide
  Sense strand starting at position 903 of SEQ ID NO: 1241092
agucaauucccggagggua

SEQ ID NO: 1246363 - RNA, 19 nt, Artificial Sequence
  Description of Artificial Sequence: Synthetic oligonucleotide
  Antisense strand to SEQ ID NO: 1246362
uacccuccgggaauugacu

SEQ ID NO: 1246364 - RNA, 19 nt, Artificial Sequence
  Description of Artificial Sequence: Synthetic oligonucleotide
  Sense strand starting at position 1127 of SEQ ID NO: 1241092
agcugugggaguugauaau

SEQ ID NO: 1246365 - RNA, 19 nt, Artificial Sequence
  Description of Artificial Sequence: Synthetic oligonucleotide
  Antisense strand to SEQ ID NO: 1246364
auuaucaacucccacagcu

SEQ ID NO: 1246366 - RNA, 19 nt, Artificial Sequence
  Description of Artificial Sequence: Synthetic oligonucleotide
  Sense strand starting at position 1272 of SEQ ID NO: 1241092
uuccuuguaacggguaaca

SEQ ID NO: 1246367 - RNA, 19 nt, Artificial Sequence
  Description of Artificial Sequence: Synthetic oligonucleotide
  Antisense strand to SEQ ID NO: 1246366
uguuacccguuacaaggaa

SEQ ID NO: 1246368 - RNA, 19 nt, Artificial Sequence
  Description of Artificial Sequence: Synthetic oligonucleotide
  Sense strand starting at position 1283 of SEQ ID NO: 1241092
ggguaacagcuguaauaug

SEQ ID NO: 1246369 - RNA, 19 nt, Artificial Sequence
  Description of Artificial Sequence: Synthetic oligonucleotide
  Antisense strand to SEQ ID NO: 1246368
cauauuacagcuguuaccc

SEQ ID NO: 1246370 - RNA, 19 nt, Artificial Sequence
  Description of Artificial Sequence: Synthetic oligonucleotide
  Sense strand starting at position 1323 of SEQ ID NO: 1241092
gaugacugcugucuacauu

SEQ ID NO: 1246371 - RNA, 19 nt, Artificial Sequence
  Description of Artificial Sequence: Synthetic oligonucleotide
  Antisense strand to SEQ ID NO: 1246370
aauguagacagcagucauc

SEQ ID NO: 1246372 - RNA, 19 nt, Artificial Sequence
  Description of Artificial Sequence: Synthetic oligonucleotide
  Sense strand starting at position 1324 of SEQ ID NO: 1241092
augacugcugucuacauua

SEQ ID NO: 1246373 - RNA, 19 nt, Artificial Sequence
  Description of Artificial Sequence: Synthetic oligonucleotide
  Antisense strand to SEQ ID NO: 1246372
uaauguagacagcagucau

SEQ ID NO: 1246374 - RNA, 19 nt, Artificial Sequence
  Description of Artificial Sequence: Synthetic oligonucleotide
  Sense strand starting at position 1344 of SEQ ID NO: 1241092
uuuccaugugcaugaauug

SEQ ID NO: 1246375 - RNA, 19 nt, Artificial Sequence
  Description of Artificial Sequence: Synthetic oligonucleotide
  Antisense strand to SEQ ID NO: 1246374
caauucaugcacauggaaa

SEQ ID NO: 1246376 - RNA, 19 nt, Artificial Sequence
  Description of Artificial Sequence: Synthetic oligonucleotide
  Sense strand starting at position 1345 of SEQ ID NO: 1241092
uuccaugugcaugaauuga

SEQ ID NO: 1246377 - RNA, 19 nt, Artificial Sequence
  Description of Artificial Sequence: Synthetic oligonucleotide
  Antisense strand to SEQ ID NO: 1246376
ucaauucaugcacauggaa

SEQ ID NO: 1246378 - RNA, 19 nt, Artificial Sequence
  Description of Artificial Sequence: Synthetic oligonucleotide
  Sense strand starting at position 1353 of SEQ ID NO: 1241092
gcaugaauugaguaguuac

SEQ ID NO: 1246379 - RNA, 19 nt, Artificial Sequence
  Description of Artificial Sequence: Synthetic oligonucleotide
  Antisense strand to SEQ ID NO: 1246378
guaacuacucaauucaugc

SEQ ID NO: 1246380 - RNA, 19 nt, Artificial Sequence
  Description of Artificial Sequence: Synthetic oligonucleotide
  Sense strand starting at position 1506 of SEQ ID NO: 1241092
cgaucugguaguuaacuuu

SEQ ID NO: 1246381 - RNA, 19 nt, Artificial Sequence
  Description of Artificial Sequence: Synthetic oligonucleotide
  Antisense strand to SEQ ID NO: 1246380
aaaguuaacuaccagaucg

SEQ ID NO: 1246382 - RNA, 19 nt, Artificial Sequence
  Description of Artificial Sequence: Synthetic oligonucleotide
  Sense strand starting at position 1512 of SEQ ID NO: 1241092
gguaguuaacuuuaucauc

SEQ ID NO: 1246383 - RNA, 19 nt, Artificial Sequence
  Description of Artificial Sequence: Synthetic oligonucleotide
  Antisense strand to SEQ ID NO: 1246382
gaugauaaaguuaacuacc

SEQ ID NO: 1246384 - RNA, 19 nt, Artificial Sequence
  Description of Artificial Sequence: Synthetic oligonucleotide
  Sense strand starting at position 1545 of SEQ ID NO: 1241092
agucauuccugggcccuaa

SEQ ID NO: 1246385 - RNA, 19 nt, Artificial Sequence
  Description of Artificial Sequence: Synthetic oligonucleotide
  Antisense strand to SEQ ID NO: 1246384
uuagggcccaggaaugacu

SEQ ID NO: 1246386 - RNA, 19 nt, Artificial Sequence
  Description of Artificial Sequence: Synthetic oligonucleotide
  Sense strand starting at position 1563 of SEQ ID NO: 1241092
aguagagacggcuagaauu

SEQ ID NO: 1246387 - RNA, 19 nt, Artificial Sequence
  Description of Artificial Sequence: Synthetic oligonucleotide
  Antisense strand to SEQ ID NO: 1246386
aauucuagccgucucuacu

SEQ ID NO: 1246388 - RNA, 19 nt, Artificial Sequence
  Description of Artificial Sequence: Synthetic oligonucleotide
  Sense strand starting at position 1574 of SEQ ID NO: 1241092
cuagaauuaccacgugagu

SEQ ID NO: 1246389 - RNA, 19 nt, Artificial Sequence
  Description of Artificial Sequence: Synthetic oligonucleotide
  Antisense strand to SEQ ID NO: 1246388
acucacgugguaauucuag

SEQ ID NO: 1246390 - RNA, 19 nt, Artificial Sequence
  Description of Artificial Sequence: Synthetic oligonucleotide
  Sense strand starting at position 1576 of SEQ ID NO: 1241092
agaauuaccacgugaguaa

SEQ ID NO: 1246391 - RNA, 19 nt, Artificial Sequence
  Description of Artificial Sequence: Synthetic oligonucleotide
  Antisense strand to SEQ ID NO: 1246390
uuacucacgugguaauucu

SEQ ID NO: 1246392 - RNA, 19 nt, Artificial Sequence
  Description of Artificial Sequence: Synthetic oligonucleotide
  Sense strand starting at position 1577 of SEQ ID NO: 1241092
gaauuaccacgugaguaaa

SEQ ID NO: 1246393 - RNA, 19 nt, Artificial Sequence
  Description of Artificial Sequence: Synthetic oligonucleotide
  Antisense strand to SEQ ID NO: 1246392
uuuacucacgugguaauuc

SEQ ID NO: 1246394 - RNA, 19 nt, Artificial Sequence
  Description of Artificial Sequence: Synthetic oligonucleotide
  Sense strand starting at position 1612 of SEQ ID NO: 1241092
auaauuagauuggccacaa

SEQ ID NO: 1246395 - RNA, 19 nt, Artificial Sequence
  Description of Artificial Sequence: Synthetic oligonucleotide
  Antisense strand to SEQ ID NO: 1246394
uuguggccaaucuaauuau

SEQ ID NO: 1246396 - RNA, 19 nt, Artificial Sequence
  Description of Artificial Sequence: Synthetic oligonucleotide
  Sense strand starting at position 1642 of SEQ ID NO: 1241092
gaaagauacugcguagcaa

SEQ ID NO: 1246397 - RNA, 19 nt, Artificial Sequence
  Description of Artificial Sequence: Synthetic oligonucleotide
  Antisense strand to SEQ ID NO: 1246396
uugcuacgcaguaucuuuc

SEQ ID NO: 1246398 - RNA, 19 nt, Artificial Sequence
  Description of Artificial Sequence: Synthetic oligonucleotide
  Sense strand starting at position 1643 of SEQ ID NO: 1241092
aaagauacugcguagcaaa

SEQ ID NO: 1246399 - RNA, 19 nt, Artificial Sequence
  Description of Artificial Sequence: Synthetic oligonucleotide
  Antisense strand to SEQ ID NO: 1246398
uuugcuacgcaguaucuuu

SEQ ID NO: 1246400 - RNA, 19 nt, Artificial Sequence
  Description of Artificial Sequence: Synthetic oligonucleotide
  Sense strand starting at position 1902 of SEQ ID NO: 1241092
aguacaaguucuucuuuga

SEQ ID NO: 1246401 - RNA, 19 nt, Artificial Sequence
  Description of Artificial Sequence: Synthetic oligonucleotide
  Antisense strand to SEQ ID NO: 1246400
ucaaagaagaacuuguacu

SEQ ID NO: 1246402 - RNA, 19 nt, Artificial Sequence
  Description of Artificial Sequence: Synthetic oligonucleotide
  Sense strand starting at position 1906 of SEQ ID NO: 1241092
caaguucuucuuugaagga

SEQ ID NO: 1246403 - RNA, 19 nt, Artificial Sequence
  Description of Artificial Sequence: Synthetic oligonucleotide
  Antisense strand to SEQ ID NO: 1246402
uccuucaaagaagaacuug

SEQ ID NO: 1246404 - RNA, 19 nt, Artificial Sequence
  Description of Artificial Sequence: Synthetic oligonucleotide
  Sense strand starting at position 2670 of SEQ ID NO: 1241092
gcgggaacccuucaguuua

SEQ ID NO: 1246405 - RNA, 19 nt, Artificial Sequence
  Description of Artificial Sequence: Synthetic oligonucleotide
  Antisense strand to SEQ ID NO: 1246404
uaaacugaaggguucccgc

SEQ ID NO: 1246406 - RNA, 19 nt, Artificial Sequence
  Description of Artificial Sequence: Synthetic oligonucleotide
  Sense strand starting at position 2993 of SEQ ID NO: 1241092
guagaaauaguuugcuuua

SEQ ID NO: 1246407 - RNA, 19 nt, Artificial Sequence
  Description of Artificial Sequence: Synthetic oligonucleotide
  Antisense strand to SEQ ID NO: 1246406
uaaagcaaacuauuucuac

SEQ ID NO: 1246408 - RNA, 19 nt, Artificial Sequence
  Description of Artificial Sequence: Synthetic oligonucleotide
  Sense strand starting at position 2994 of SEQ ID NO: 1241092
uagaaauaguuugcuuuag

SEQ ID NO: 1246409 - RNA, 19 nt, Artificial Sequence
  Description of Artificial Sequence: Synthetic oligonucleotide
  Antisense strand to SEQ ID NO: 1246408
cuaaagcaaacuauuucua

SEQ ID NO: 1246410 - RNA, 19 nt, Artificial Sequence
  Description of Artificial Sequence: Synthetic oligonucleotide
  Sense strand starting at position 3046 of SEQ ID NO: 1241092
guguaucugguuuaaaucu

SEQ ID NO: 1246411 - RNA, 19 nt, Artificial Sequence
  Description of Artificial Sequence: Synthetic oligonucleotide
  Antisense strand to SEQ ID NO: 1246410
agauuuaaaccagauacac

SEQ ID NO: 1246412 - RNA, 19 nt, Artificial Sequence
  Description of Artificial Sequence: Synthetic oligonucleotide
  Sense strand starting at position 17 of SEQ ID NO: 1241093
guuaaagugugacuucuga

SEQ ID NO: 1246413 - RNA, 19 nt, Artificial Sequence
  Description of Artificial Sequence: Synthetic oligonucleotide
  Antisense strand to SEQ ID NO: 1246412
ucagaagucacacuuuaac

SEQ ID NO: 1246414 - RNA, 19 nt, Artificial Sequence
  Description of Artificial Sequence: Synthetic oligonucleotide
  Sense strand starting at position 1015 of SEQ ID NO: 1241093
ccaagauugggccaccgua

SEQ ID NO: 1246415 - RNA, 19 nt, Artificial Sequence
  Description of Artificial Sequence: Synthetic oligonucleotide
  Antisense strand to SEQ ID NO: 1246414
uacgguggcccaaucuugg

SEQ ID NO: 1246416 - RNA, 19 nt, Artificial Sequence
  Description of Artificial Sequence: Synthetic oligonucleotide
  Sense strand starting at position 1223 of SEQ ID NO: 1241093
ugugacuuccaaugcugga

SEQ ID NO: 1246417 - RNA, 19 nt, Artificial Sequence
  Description of Artificial Sequence: Synthetic oligonucleotide
  Antisense strand to SEQ ID NO: 1246416
uccagcauuggaagucaca

SEQ ID NO: 1246418 - RNA, 19 nt, Artificial Sequence
  Description of Artificial Sequence: Synthetic oligonucleotide
  Sense strand starting at position 1372 of SEQ ID NO: 1241093
ucuugaagauaucuuugca

SEQ ID NO: 1246419 - RNA, 19 nt, Artificial Sequence
  Description of Artificial Sequence: Synthetic oligonucleotide
  Antisense strand to SEQ ID NO: 1246418
ugcaaagauaucuucaaga

SEQ ID NO: 1246420 - RNA, 19 nt, Artificial Sequence
  Description of Artificial Sequence: Synthetic oligonucleotide
  Sense strand starting at position 1375 of SEQ ID NO: 1241093
ugaagauaucuuugcauuc

SEQ ID NO: 1246421 - RNA, 19 nt, Artificial Sequence
  Description of Artificial Sequence: Synthetic oligonucleotide
  Antisense strand to SEQ ID NO: 1246420
gaaugcaaagauaucuuca

SEQ ID NO: 1246422 - RNA, 19 nt, Artificial Sequence
  Description of Artificial Sequence: Synthetic oligonucleotide
  Sense strand starting at position 1578 of SEQ ID NO: 1241093
uuacgagguaucuaaagua

SEQ ID NO: 1246423 - RNA, 19 nt, Artificial Sequence
  Description of Artificial Sequence: Synthetic oligonucleotide
  Antisense strand to SEQ ID NO: 1246422
uacuuuagauaccucguaa

SEQ ID NO: 1246424 - RNA, 19 nt, Artificial Sequence
  Description of Artificial Sequence: Synthetic oligonucleotide
  Sense strand starting at position 1662 of SEQ ID NO: 1241093
ggaguuccuguucaaugga

SEQ ID NO: 1246425 - RNA, 19 nt, Artificial Sequence
  Description of Artificial Sequence: Synthetic oligonucleotide
  Antisense strand to SEQ ID NO: 1246424
uccauugaacaggaacucc

SEQ ID NO: 1246426 - RNA, 19 nt, Artificial Sequence
  Description of Artificial Sequence: Synthetic oligonucleotide
  Sense strand starting at position 1718 of SEQ ID NO: 1241093
agguaugcuguacaauaau

SEQ ID NO: 1246427 - RNA, 19 nt, Artificial Sequence
  Description of Artificial Sequence: Synthetic oligonucleotide
  Antisense strand to SEQ ID NO: 1246426
auuauuguacagcauaccu

SEQ ID NO: 1246428 - RNA, 19 nt, Artificial Sequence
  Description of Artificial Sequence: Synthetic oligonucleotide
  Sense strand starting at position 1727 of SEQ ID NO: 1241093
guacaauaaugugcauaua

SEQ ID NO: 1246429 - RNA, 19 nt, Artificial Sequence
  Description of Artificial Sequence: Synthetic oligonucleotide
  Antisense strand to SEQ ID NO: 1246428
uauaugcacauuauuguac

SEQ ID NO: 1246430 - RNA, 19 nt, Artificial Sequence
  Description of Artificial Sequence: Synthetic oligonucleotide
  Sense strand starting at position 1896 of SEQ ID NO: 1241093
gacacaagacuugguacua

SEQ ID NO: 1246431 - RNA, 19 nt, Artificial Sequence
  Description of Artificial Sequence: Synthetic oligonucleotide
  Antisense strand to SEQ ID NO: 1246430
uaguaccaagucuuguguc

SEQ ID NO: 1246432 - RNA, 19 nt, Artificial Sequence
  Description of Artificial Sequence: Synthetic oligonucleotide
  Sense strand starting at position 1950 of SEQ ID NO: 1241093
cugagauugaugugggcau

SEQ ID NO: 1246433 - RNA, 19 nt, Artificial Sequence
  Description of Artificial Sequence: Synthetic oligonucleotide
  Antisense strand to SEQ ID NO: 1246432
augcccacaucaaucucag

SEQ ID NO: 1246434 - RNA, 19 nt, Artificial Sequence
  Description of Artificial Sequence: Synthetic oligonucleotide
  Sense strand starting at position 1952 of SEQ ID NO: 1241093
gagauugaugugggcauga

SEQ ID NO: 1246435 - RNA, 19 nt, Artificial Sequence
  Description of Artificial Sequence: Synthetic oligonucleotide
  Antisense strand to SEQ ID NO: 1246434
ucaugcccacaucaaucuc

SEQ ID NO: 1246436 - RNA, 19 nt, Artificial Sequence
  Description of Artificial Sequence: Synthetic oligonucleotide
  Sense strand starting at position 1965 of SEQ ID NO: 1241093
gcaugacccuagucuuaaa

SEQ ID NO: 1246437 - RNA, 19 nt, Artificial Sequence
  Description of Artificial Sequence: Synthetic oligonucleotide
  Antisense strand to SEQ ID NO: 1246436
uuuaagacuagggucaugc

SEQ ID NO: 1246438 - RNA, 19 nt, Artificial Sequence
  Description of Artificial Sequence: Synthetic oligonucleotide
  Sense strand starting at position 2007 of SEQ ID NO: 1241093
uggagaauggcauguaaug

SEQ ID NO: 1246439 - RNA, 19 nt, Artificial Sequence
  Description of Artificial Sequence: Synthetic oligonucleotide
  Antisense strand to SEQ ID NO: 1246438
cauuacaugccauucucca

SEQ ID NO: 1246440 - RNA, 19 nt, Artificial Sequence
  Description of Artificial Sequence: Synthetic oligonucleotide
  Sense strand starting at position 2034 of SEQ ID NO: 1241093
auuaguuacuacucaaugu

SEQ ID NO: 1246441 - RNA, 19 nt, Artificial Sequence
  Description of Artificial Sequence: Synthetic oligonucleotide
  Antisense strand to SEQ ID NO: 1246440
acauugaguaguaacuaau

SEQ ID NO: 1246442 - RNA, 19 nt, Artificial Sequence
  Description of Artificial Sequence: Synthetic oligonucleotide
  Sense strand starting at position 2038 of SEQ ID NO: 1241093
guuacuacucaauguugau

SEQ ID NO: 1246443 - RNA, 19 nt, Artificial Sequence
  Description of Artificial Sequence: Synthetic oligonucleotide
  Antisense strand to SEQ ID NO: 1246442
aucaacauugaguaguaac

SEQ ID NO: 1246444 - RNA, 19 nt, Artificial Sequence
  Description of Artificial Sequence: Synthetic oligonucleotide
  Sense strand starting at position 2060 of SEQ ID NO: 1241093
agugaacugcccuauugac

SEQ ID NO: 1246445 - RNA, 19 nt, Artificial Sequence
  Description of Artificial Sequence: Synthetic oligonucleotide
  Antisense strand to SEQ ID NO: 1246444
gucaauagggcaguucacu

SEQ ID NO: 1246446 - RNA, 19 nt, Artificial Sequence
  Description of Artificial Sequence: Synthetic oligonucleotide
  Sense strand starting at position 2098 of SEQ ID NO: 1241093
aagugacugcugugauaau

SEQ ID NO: 1246447 - RNA, 19 nt, Artificial Sequence
  Description of Artificial Sequence: Synthetic oligonucleotide
  Antisense strand to SEQ ID NO: 1246446
auuaucacagcagucacuu

SEQ ID NO: 1246448 - RNA, 19 nt, Artificial Sequence
  Description of Artificial Sequence: Synthetic oligonucleotide
  Sense strand starting at position 2110 of SEQ ID NO: 1241093
ugauaauuacuaugaguac

SEQ ID NO: 1246449 - RNA, 19 nt, Artificial Sequence
  Description of Artificial Sequence: Synthetic oligonucleotide
  Antisense strand to SEQ ID NO: 1246448
guacucauaguaauuauca

SEQ ID NO: 1246450 - RNA, 19 nt, Artificial Sequence
  Description of Artificial Sequence: Synthetic oligonucleotide
  Sense strand starting at position 2193 of SEQ ID NO: 1241093
cugggaaauuuacaugaug

SEQ ID NO: 1246451 - RNA, 19 nt, Artificial Sequence
  Description of Artificial Sequence: Synthetic oligonucleotide
  Antisense strand to SEQ ID NO: 1246450
caucauguaaauuucccag

SEQ ID NO: 1246452 - RNA, 19 nt, Artificial Sequence
  Description of Artificial Sequence: Synthetic oligonucleotide
  Sense strand starting at position 2213 of SEQ ID NO: 1241093
ggccaaagucuugaaauuc

SEQ ID NO: 1246453 - RNA, 19 nt, Artificial Sequence
  Description of Artificial Sequence: Synthetic oligonucleotide
  Antisense strand to SEQ ID NO: 1246452
gaauuucaagacuuuggcc

SEQ ID NO: 1246454 - RNA, 19 nt, Artificial Sequence
  Description of Artificial Sequence: Synthetic oligonucleotide
  Sense strand starting at position 2322 of SEQ ID NO: 1241093
aauugaaaugcuugcagag

SEQ ID NO: 1246455 - RNA, 19 nt, Artificial Sequence
  Description of Artificial Sequence: Synthetic oligonucleotide
  Antisense strand to SEQ ID NO: 1246454
cucugcaagcauuucaauu

SEQ ID NO: 1246456 - RNA, 19 nt, Artificial Sequence
  Description of Artificial Sequence: Synthetic oligonucleotide
  Sense strand starting at position 2340 of SEQ ID NO: 1241093
gugacaacauaaguugaau

SEQ ID NO: 1246457 - RNA, 19 nt, Artificial Sequence
  Description of Artificial Sequence: Synthetic oligonucleotide
  Antisense strand to SEQ ID NO: 1246456
auucaacuuauguugucac

SEQ ID NO: 1246458 - RNA, 19 nt, Artificial Sequence
  Description of Artificial Sequence: Synthetic oligonucleotide
  Sense strand starting at position 2352 of SEQ ID NO: 1241093
guugaauacauagauacgu

SEQ ID NO: 1246459 - RNA, 19 nt, Artificial Sequence
  Description of Artificial Sequence: Synthetic oligonucleotide
  Antisense strand to SEQ ID NO: 1246458
acguaucuauguauucaac

SEQ ID NO: 1246460 - RNA, 19 nt, Artificial Sequence
  Description of Artificial Sequence: Synthetic oligonucleotide
  Sense strand starting at position 2424 of SEQ ID NO: 1241093
uagagaauuccuggugaau

SEQ ID NO: 1246461 - RNA, 19 nt, Artificial Sequence
  Description of Artificial Sequence: Synthetic oligonucleotide
  Antisense strand to SEQ ID NO: 1246460
auucaccaggaauucucua

SEQ ID NO: 1246462 - RNA, 19 nt, Artificial Sequence
  Description of Artificial Sequence: Synthetic oligonucleotide
  Sense strand starting at position 2481 of SEQ ID NO: 1241093
ccuagucuccuuuacuagu

SEQ ID NO: 1246463 - RNA, 19 nt, Artificial Sequence
  Description of Artificial Sequence: Synthetic oligonucleotide
  Antisense strand to SEQ ID NO: 1246462
acuaguaaaggagacuagg

SEQ ID NO: 1246464 - RNA, 19 nt, Artificial Sequence
  Description of Artificial Sequence: Synthetic oligonucleotide
  Sense strand starting at position 2512 of SEQ ID NO: 1241093
agcucuccugucugagaag

SEQ ID NO: 1246465 - RNA, 19 nt, Artificial Sequence
  Description of Artificial Sequence: Synthetic oligonucleotide
  Antisense strand to SEQ ID NO: 1246464
cuucucagacaggagagcu

SEQ ID NO: 1246466 - RNA, 19 nt, Artificial Sequence
  Description of Artificial Sequence: Synthetic oligonucleotide
  Sense strand starting at position 2521 of SEQ ID NO: 1241093
gucugagaagucuaugcac

SEQ ID NO: 1246467 - RNA, 19 nt, Artificial Sequence
  Description of Artificial Sequence: Synthetic oligonucleotide
  Antisense strand to SEQ ID NO: 1246466
gugcauagacuucucagac

SEQ ID NO: 1246468 - RNA, 19 nt, Artificial Sequence
  Description of Artificial Sequence: Synthetic oligonucleotide
  Sense strand starting at position 2523 of SEQ ID NO: 1241093
cugagaagucuaugcaccu

SEQ ID NO: 1246469 - RNA, 19 nt, Artificial Sequence
  Description of Artificial Sequence: Synthetic oligonucleotide
  Antisense strand to SEQ ID NO: 1246468
aggugcauagacuucucag

SEQ ID NO: 1246470 - RNA, 19 nt, Artificial Sequence
  Description of Artificial Sequence: Synthetic oligonucleotide
  Sense strand starting at position 2595 of SEQ ID NO: 1241093
ugccuagacuccucaagac

SEQ ID NO: 1246471 - RNA, 19 nt, Artificial Sequence
  Description of Artificial Sequence: Synthetic oligonucleotide
  Antisense strand to SEQ ID NO: 1246470
gucuugaggagucuaggca

SEQ ID NO: 1246472 - RNA, 19 nt, Artificial Sequence
  Description of Artificial Sequence: Synthetic oligonucleotide
  Sense strand starting at position 2690 of SEQ ID NO: 1241093
aaaucugaauuggaaggaa

SEQ ID NO: 1246473 - RNA, 19 nt, Artificial Sequence
  Description of Artificial Sequence: Synthetic oligonucleotide
  Antisense strand to SEQ ID NO: 1246472
uuccuuccaauucagauuu

SEQ ID NO: 1246474 - RNA, 19 nt, Artificial Sequence
  Description of Artificial Sequence: Synthetic oligonucleotide
  Sense strand starting at position 2928 of SEQ ID NO: 1241093
aaagucuacuuguugguau

SEQ ID NO: 1246475 - RNA, 19 nt, Artificial Sequence
  Description of Artificial Sequence: Synthetic oligonucleotide
  Antisense strand to SEQ ID NO: 1246474
auaccaacaaguagacuuu

SEQ ID NO: 1246476 - RNA, 19 nt, Artificial Sequence
  Description of Artificial Sequence: Synthetic oligonucleotide
  Sense strand starting at position 2930 of SEQ ID NO: 1241093
agucuacuuguugguauaa

SEQ ID NO: 1246477 - RNA, 19 nt, Artificial Sequence
  Description of Artificial Sequence: Synthetic oligonucleotide
  Antisense strand to SEQ ID NO: 1246476
uuauaccaacaaguagacu

SEQ ID NO: 1246478 - RNA, 19 nt, Artificial Sequence
  Description of Artificial Sequence: Synthetic oligonucleotide
  Sense strand starting at position 2931 of SEQ ID NO: 1241093
gucuacuuguugguauaaa

SEQ ID NO: 1246479 - RNA, 19 nt, Artificial Sequence
  Description of Artificial Sequence: Synthetic oligonucleotide
  Antisense strand to SEQ ID NO: 1246478
uuuauaccaacaaguagac

SEQ ID NO: 1246480 - RNA, 19 nt, Artificial Sequence
  Description of Artificial Sequence: Synthetic oligonucleotide
  Sense strand starting at position 3084 of SEQ ID NO: 1241093
ucaaaugugcaugggacau

SEQ ID NO: 1246481 - RNA, 19 nt, Artificial Sequence
  Description of Artificial Sequence: Synthetic oligonucleotide
  Antisense strand to SEQ ID NO: 1246480
augucccaugcacauuuga

SEQ ID NO: 1246482 - RNA, 19 nt, Artificial Sequence
  Description of Artificial Sequence: Synthetic oligonucleotide
  Sense strand starting at position 3090 of SEQ ID NO: 1241093
gugcaugggacauauacca

SEQ ID NO: 1246483 - RNA, 19 nt, Artificial Sequence
  Description of Artificial Sequence: Synthetic oligonucleotide
  Antisense strand to SEQ ID NO: 1246482
ugguauaugucccaugcac

SEQ ID NO: 1246484 - RNA, 19 nt, Artificial Sequence
  Description of Artificial Sequence: Synthetic oligonucleotide
  Sense strand starting at position 3113 of SEQ ID NO: 1241093
acauaauauccaugggcau

SEQ ID NO: 1246485 - RNA, 19 nt, Artificial Sequence
  Description of Artificial Sequence: Synthetic oligonucleotide
  Antisense strand to SEQ ID NO: 1246484
augcccauggauauuaugu

SEQ ID NO: 1246486 - RNA, 19 nt, Artificial Sequence
  Description of Artificial Sequence: Synthetic oligonucleotide
  Sense strand starting at position 3133 of SEQ ID NO: 1241093
auggaaguaucagcaaauc

SEQ ID NO: 1246487 - RNA, 19 nt, Artificial Sequence
  Description of Artificial Sequence: Synthetic oligonucleotide
  Antisense strand to SEQ ID NO: 1246486
gauuugcugauacuuccau

SEQ ID NO: 1246488 - RNA, 19 nt, Artificial Sequence
  Description of Artificial Sequence: Synthetic oligonucleotide
  Sense strand starting at position 3492 of SEQ ID NO: 1241093
guguaugucccuuaaugac

SEQ ID NO: 1246489 - RNA, 19 nt, Artificial Sequence
  Description of Artificial Sequence: Synthetic oligonucleotide
  Antisense strand to SEQ ID NO: 1246488
gucauuaagggacauacac

SEQ ID NO: 1246490 - RNA, 19 nt, Artificial Sequence
  Description of Artificial Sequence: Synthetic oligonucleotide
  Sense strand starting at position 3498 of SEQ ID NO: 1241093
gucccuuaaugacuacaga

SEQ ID NO: 1246491 - RNA, 19 nt, Artificial Sequence
  Description of Artificial Sequence: Synthetic oligonucleotide
  Antisense strand to SEQ ID NO: 1246490
ucuguagucauuaagggac

SEQ ID NO: 1246492 - RNA, 19 nt, Artificial Sequence
  Description of Artificial Sequence: Synthetic oligonucleotide
  Sense strand starting at position 108 of SEQ ID NO: 1241094
agaauuaguuaaccaagua

SEQ ID NO: 1246493 - RNA, 19 nt, Artificial Sequence
  Description of Artificial Sequence: Synthetic oligonucleotide
  Antisense strand to SEQ ID NO: 1246492
uacuugguuaacuaauucu

SEQ ID NO: 1246494 - RNA, 19 nt, Artificial Sequence
  Description of Artificial Sequence: Synthetic oligonucleotide
  Sense strand starting at position 239 of SEQ ID NO: 1241094
gccauuaacuugcuuaaag

SEQ ID NO: 1246495 - RNA, 19 nt, Artificial Sequence
  Description of Artificial Sequence: Synthetic oligonucleotide
  Antisense strand to SEQ ID NO: 1246494
cuuuaagcaaguuaauggc

SEQ ID NO: 1246496 - RNA, 19 nt, Artificial Sequence
  Description of Artificial Sequence: Synthetic oligonucleotide
  Sense strand starting at position 262 of SEQ ID NO: 1241094
uggauucaucugggcaguu

SEQ ID NO: 1246497 - RNA, 19 nt, Artificial Sequence
  Description of Artificial Sequence: Synthetic oligonucleotide
  Antisense strand to SEQ ID NO: 1246496
aacugcccagaugaaucca

SEQ ID NO: 1246498 - RNA, 19 nt, Artificial Sequence
  Description of Artificial Sequence: Synthetic oligonucleotide
  Sense strand starting at position 263 of SEQ ID NO: 1241094
ggauucaucugggcaguuu

SEQ ID NO: 1246499 - RNA, 19 nt, Artificial Sequence
  Description of Artificial Sequence: Synthetic oligonucleotide
  Antisense strand to SEQ ID NO: 1246498
aaacugcccagaugaaucc

SEQ ID NO: 1246500 - RNA, 19 nt, Artificial Sequence
  Description of Artificial Sequence: Synthetic oligonucleotide
  Sense strand starting at position 318 of SEQ ID NO: 1241094
gcaaguagcauggaagaga

SEQ ID NO: 1246501 - RNA, 19 nt, Artificial Sequence
  Description of Artificial Sequence: Synthetic oligonucleotide
  Antisense strand to SEQ ID NO: 1246500
ucucuuccaugcuacuugc

SEQ ID NO: 1246502 - RNA, 19 nt, Artificial Sequence
  Description of Artificial Sequence: Synthetic oligonucleotide
  Sense strand starting at position 400 of SEQ ID NO: 1241094
cugccagauuugcucucua

SEQ ID NO: 1246503 - RNA, 19 nt, Artificial Sequence
  Description of Artificial Sequence: Synthetic oligonucleotide
  Antisense strand to SEQ ID NO: 1246502
uagagagcaaaucuggcag

SEQ ID NO: 1246504 - RNA, 19 nt, Artificial Sequence
  Description of Artificial Sequence: Synthetic oligonucleotide
  Sense strand starting at position 442 of SEQ ID NO: 1241094
cuuacuauggagugacagu

SEQ ID NO: 1246505 - RNA, 19 nt, Artificial Sequence
  Description of Artificial Sequence: Synthetic oligonucleotide
  Antisense strand to SEQ ID NO: 1246504
acugucacuccauaguaag

SEQ ID NO: 1246506 - RNA, 19 nt, Artificial Sequence
  Description of Artificial Sequence: Synthetic oligonucleotide
  Sense strand starting at position 443 of SEQ ID NO: 1241094
uuacuauggagugacaguu

SEQ ID NO: 1246507 - RNA, 19 nt, Artificial Sequence
  Description of Artificial Sequence: Synthetic oligonucleotide
  Antisense strand to SEQ ID NO: 1246506
aacugucacuccauaguaa

SEQ ID NO: 1246508 - RNA, 19 nt, Artificial Sequence
  Description of Artificial Sequence: Synthetic oligonucleotide
  Sense strand starting at position 451 of SEQ ID NO: 1241094
gagugacaguuguugugga

SEQ ID NO: 1246509 - RNA, 19 nt, Artificial Sequence
  Description of Artificial Sequence: Synthetic oligonucleotide
  Antisense strand to SEQ ID NO: 1246508
uccacaacaacugucacuc

SEQ ID NO: 1246510 - RNA, 19 nt, Artificial Sequence
  Description of Artificial Sequence: Synthetic oligonucleotide
  Sense strand starting at position 534 of SEQ ID NO: 1241094
acaccaaccugugucauau

SEQ ID NO: 1246511 - RNA, 19 nt, Artificial Sequence
  Description of Artificial Sequence: Synthetic oligonucleotide
  Antisense strand to SEQ ID NO: 1246510
auaugacacagguuggugu

SEQ ID NO: 1246512 - RNA, 19 nt, Artificial Sequence
  Description of Artificial Sequence: Synthetic oligonucleotide
  Sense strand starting at position 716 of SEQ ID NO: 1241094
guaaauccauguccucuaa

SEQ ID NO: 1246513 - RNA, 19 nt, Artificial Sequence
  Description of Artificial Sequence: Synthetic oligonucleotide
  Antisense strand to SEQ ID NO: 1246512
uuagaggacauggauuuac

SEQ ID NO: 1246514 - RNA, 19 nt, Artificial Sequence
  Description of Artificial Sequence: Synthetic oligonucleotide
  Sense strand starting at position 989 of SEQ ID NO: 1241094
ccuagaagauccuuagcaa

SEQ ID NO: 1246515 - RNA, 19 nt, Artificial Sequence
  Description of Artificial Sequence: Synthetic oligonucleotide
  Antisense strand to SEQ ID NO: 1246514
uugcuaaggaucuucuagg

SEQ ID NO: 1246516 - RNA, 19 nt, Artificial Sequence
  Description of Artificial Sequence: Synthetic oligonucleotide
  Sense strand starting at position 992 of SEQ ID NO: 1241094
agaagauccuuagcaaccu

SEQ ID NO: 1246517 - RNA, 19 nt, Artificial Sequence
  Description of Artificial Sequence: Synthetic oligonucleotide
  Antisense strand to SEQ ID NO: 1246516
agguugcuaaggaucuucu

SEQ ID NO: 1246518 - RNA, 19 nt, Artificial Sequence
  Description of Artificial Sequence: Synthetic oligonucleotide
  Sense strand starting at position 1080 of SEQ ID NO: 1241094
uuucuuucucuggaauaug

SEQ ID NO: 1246519 - RNA, 19 nt, Artificial Sequence
  Description of Artificial Sequence: Synthetic oligonucleotide
  Antisense strand to SEQ ID NO: 1246518
cauauuccagagaaagaaa

SEQ ID NO: 1246520 - RNA, 19 nt, Artificial Sequence
  Description of Artificial Sequence: Synthetic oligonucleotide
  Sense strand starting at position 1255 of SEQ ID NO: 1241094
ugaggacuguuucuauuaa

SEQ ID NO: 1246521 - RNA, 19 nt, Artificial Sequence
  Description of Artificial Sequence: Synthetic oligonucleotide
  Antisense strand to SEQ ID NO: 1246520
uuaauagaaacaguccuca

SEQ ID NO: 1246522 - RNA, 19 nt, Artificial Sequence
  Description of Artificial Sequence: Synthetic oligonucleotide
  Sense strand starting at position 1339 of SEQ ID NO: 1241094
gugacuaccucauccugau

SEQ ID NO: 1246523 - RNA, 19 nt, Artificial Sequence
  Description of Artificial Sequence: Synthetic oligonucleotide
  Antisense strand to SEQ ID NO: 1246522
aucaggaugagguagucac

SEQ ID NO: 1246524 - RNA, 19 nt, Artificial Sequence
  Description of Artificial Sequence: Synthetic oligonucleotide
  Sense strand starting at position 2012 of SEQ ID NO: 1241094
ugucucucaggugacuaaa

SEQ ID NO: 1246525 - RNA, 19 nt, Artificial Sequence
  Description of Artificial Sequence: Synthetic oligonucleotide
  Antisense strand to SEQ ID NO: 1246524
uuuagucaccugagagaca

SEQ ID NO: 1246526 - RNA, 19 nt, Artificial Sequence
  Description of Artificial Sequence: Synthetic oligonucleotide
  Sense strand starting at position 2014 of SEQ ID NO: 1241094
ucucucaggugacuaaauu

SEQ ID NO: 1246527 - RNA, 19 nt, Artificial Sequence
  Description of Artificial Sequence: Synthetic oligonucleotide
  Antisense strand to SEQ ID NO: 1246526
aauuuagucaccugagaga

SEQ ID NO: 1246528 - RNA, 19 nt, Artificial Sequence
  Description of Artificial Sequence: Synthetic oligonucleotide
  Sense strand starting at position 2192 of SEQ ID NO: 1241094
acagcacagguuuguaauu

SEQ ID NO: 1246529 - RNA, 19 nt, Artificial Sequence
  Description of Artificial Sequence: Synthetic oligonucleotide
  Antisense strand to SEQ ID NO: 1246528
aauuacaaaccugugcugu

SEQ ID NO: 1246530 - RNA, 19 nt, Artificial Sequence
  Description of Artificial Sequence: Synthetic oligonucleotide
  Sense strand starting at position 2227 of SEQ ID NO: 1241094
auuggucuagacugucuaa

SEQ ID NO: 1246531 - RNA, 19 nt, Artificial Sequence
  Description of Artificial Sequence: Synthetic oligonucleotide
  Antisense strand to SEQ ID NO: 1246530
uuagacagucuagaccaau

SEQ ID NO: 1246532 - RNA, 19 nt, Artificial Sequence
  Description of Artificial Sequence: Synthetic oligonucleotide
  Sense strand starting at position 2230 of SEQ ID NO: 1241094
ggucuagacugucuaauca

SEQ ID NO: 1246533 - RNA, 19 nt, Artificial Sequence
  Description of Artificial Sequence: Synthetic oligonucleotide
  Antisense strand to SEQ ID NO: 1246532
ugauuagacagucuagacc

SEQ ID NO: 1246534 - RNA, 19 nt, Artificial Sequence
  Description of Artificial Sequence: Synthetic oligonucleotide
  Sense strand starting at position 2500 of SEQ ID NO: 1241094
uggagaauuuaugguauag

SEQ ID NO: 1246535 - RNA, 19 nt, Artificial Sequence
  Description of Artificial Sequence: Synthetic oligonucleotide
  Antisense strand to SEQ ID NO: 1246534
cuauaccauaaauucucca

SEQ ID NO: 1246536 - RNA, 19 nt, Artificial Sequence
  Description of Artificial Sequence: Synthetic oligonucleotide
  Sense strand starting at position 2502 of SEQ ID NO: 1241094
gagaauuuaugguauagug

SEQ ID NO: 1246537 - RNA, 19 nt, Artificial Sequence
  Description of Artificial Sequence: Synthetic oligonucleotide
  Antisense strand to SEQ ID NO: 1246536
cacuauaccauaaauucuc

SEQ ID NO: 1246538 - RNA, 19 nt, Artificial Sequence
  Description of Artificial Sequence: Synthetic oligonucleotide
  Sense strand starting at position 2510 of SEQ ID NO: 1241094
augguauaguguuugguaa

SEQ ID NO: 1246539 - RNA, 19 nt, Artificial Sequence
  Description of Artificial Sequence: Synthetic oligonucleotide
  Antisense strand to SEQ ID NO: 1246538
uuaccaaacacuauaccau

SEQ ID NO: 1246540 - RNA, 19 nt, Artificial Sequence
  Description of Artificial Sequence: Synthetic oligonucleotide
  Sense strand starting at position 2601 of SEQ ID NO: 1241094
acucuaacuuugggaauuu

SEQ ID NO: 1246541 - RNA, 19 nt, Artificial Sequence
  Description of Artificial Sequence: Synthetic oligonucleotide
  Antisense strand to SEQ ID NO: 1246540
aaauucccaaaguuagagu

SEQ ID NO: 1246542 - RNA, 19 nt, Artificial Sequence
  Description of Artificial Sequence: Synthetic oligonucleotide
  Sense strand starting at position 2612 of SEQ ID NO: 1241094
gggaauuucuguuauagau

SEQ ID NO: 1246543 - RNA, 19 nt, Artificial Sequence
  Description of Artificial Sequence: Synthetic oligonucleotide
  Antisense strand to SEQ ID NO: 1246542
aucuauaacagaaauuccc

SEQ ID NO: 1246544 - RNA, 19 nt, Artificial Sequence
  Description of Artificial Sequence: Synthetic oligonucleotide
  Sense strand starting at position 2715 of SEQ ID NO: 1241094
uccauuuccugccaggaaa

SEQ ID NO: 1246545 - RNA, 19 nt, Artificial Sequence
  Description of Artificial Sequence: Synthetic oligonucleotide
  Antisense strand to SEQ ID NO: 1246544
uuuccuggcaggaaaugga

SEQ ID NO: 1246546 - RNA, 19 nt, Artificial Sequence
  Description of Artificial Sequence: Synthetic oligonucleotide
  Sense strand starting at position 2747 of SEQ ID NO: 1241094
uaugcugguuucuuuagaa

SEQ ID NO: 1246547 - RNA, 19 nt, Artificial Sequence
  Description of Artificial Sequence: Synthetic oligonucleotide
  Antisense strand to SEQ ID NO: 1246546
uucuaaagaaaccagcaua

SEQ ID NO: 1246548 - RNA, 19 nt, Artificial Sequence
  Description of Artificial Sequence: Synthetic oligonucleotide
  Sense strand starting at position 2815 of SEQ ID NO: 1241094
uggagacaccucugccuua

SEQ ID NO: 1246549 - RNA, 19 nt, Artificial Sequence
  Description of Artificial Sequence: Synthetic oligonucleotide
  Antisense strand to SEQ ID NO: 1246548
uaaggcagaggugucucca

SEQ ID NO: 1246550 - RNA, 19 nt, Artificial Sequence
  Description of Artificial Sequence: Synthetic oligonucleotide
  Sense strand starting at position 3035 of SEQ ID NO: 1241094
aaagauaauugaggaagaa

SEQ ID NO: 1246551 - RNA, 19 nt, Artificial Sequence
  Description of Artificial Sequence: Synthetic oligonucleotide
  Antisense strand to SEQ ID NO: 1246550
uucuuccucaauuaucuuu

SEQ ID NO: 1246552 - RNA, 19 nt, Artificial Sequence
  Description of Artificial Sequence: Synthetic oligonucleotide
  Sense strand starting at position 3090 of SEQ ID NO: 1241094
gcaagauccauagguggga

SEQ ID NO: 1246553 - RNA, 19 nt, Artificial Sequence
  Description of Artificial Sequence: Synthetic oligonucleotide
  Antisense strand to SEQ ID NO: 1246552
ucccaccuauggaucuugc

SEQ ID NO: 1246554 - RNA, 19 nt, Artificial Sequence
  Description of Artificial Sequence: Synthetic oligonucleotide
  Sense strand starting at position 3144 of SEQ ID NO: 1241094
ucucucuagcuguaagaag

SEQ ID NO: 1246555 - RNA, 19 nt, Artificial Sequence
  Description of Artificial Sequence: Synthetic oligonucleotide
  Antisense strand to SEQ ID NO: 1246554
cuucuuacagcuagagaga

SEQ ID NO: 1246556 - RNA, 19 nt, Artificial Sequence
  Description of Artificial Sequence: Synthetic oligonucleotide
  Sense strand starting at position 3409 of SEQ ID NO: 1241094
aagaacuucugguuccaga

SEQ ID NO: 1246557 - RNA, 19 nt, Artificial Sequence
  Description of Artificial Sequence: Synthetic oligonucleotide
  Antisense strand to SEQ ID NO: 1246556
ucuggaaccagaaguucuu

SEQ ID NO: 1246558 - RNA, 19 nt, Artificial Sequence
  Description of Artificial Sequence: Synthetic oligonucleotide
  Sense strand starting at position 3474 of SEQ ID NO: 1241094
guaaguccucaaugucaug

SEQ ID NO: 1246559 - RNA, 19 nt, Artificial Sequence
  Description of Artificial Sequence: Synthetic oligonucleotide
  Antisense strand to SEQ ID NO: 1246558
caugacauugaggacuuac

SEQ ID NO: 1246560 - RNA, 19 nt, Artificial Sequence
  Description of Artificial Sequence: Synthetic oligonucleotide
  Sense strand starting at position 3651 of SEQ ID NO: 1241094
gaaccuauugcugauguga

SEQ ID NO: 1246561 - RNA, 19 nt, Artificial Sequence
  Description of Artificial Sequence: Synthetic oligonucleotide
  Antisense strand to SEQ ID NO: 1246560
ucacaucagcaauagguuc

SEQ ID NO: 1246562 - RNA, 19 nt, Artificial Sequence
  Description of Artificial Sequence: Synthetic oligonucleotide
  Sense strand starting at position 3668 of SEQ ID NO: 1241094
gaggacuuacugugcaagu

SEQ ID NO: 1246563 - RNA, 19 nt, Artificial Sequence
  Description of Artificial Sequence: Synthetic oligonucleotide
  Antisense strand to SEQ ID NO: 1246562
acuugcacaguaaguccuc

SEQ ID NO: 1246564 - RNA, 19 nt, Artificial Sequence
  Description of Artificial Sequence: Synthetic oligonucleotide
  Sense strand starting at position 3669 of SEQ ID NO: 1241094
aggacuuacugugcaagua

SEQ ID NO: 1246565 - RNA, 19 nt, Artificial Sequence
  Description of Artificial Sequence: Synthetic oligonucleotide
  Antisense strand to SEQ ID NO: 1246564
uacuugcacaguaaguccu

SEQ ID NO: 1246566 - RNA, 19 nt, Artificial Sequence
  Description of Artificial Sequence: Synthetic oligonucleotide
  Sense strand starting at position 3670 of SEQ ID NO: 1241094
ggacuuacugugcaaguaa

SEQ ID NO: 1246567 - RNA, 19 nt, Artificial Sequence
  Description of Artificial Sequence: Synthetic oligonucleotide
  Antisense strand to SEQ ID NO: 1246566
uuacuugcacaguaagucc

SEQ ID NO: 1246568 - RNA, 19 nt, Artificial Sequence
  Description of Artificial Sequence: Synthetic oligonucleotide
  Sense strand starting at position 3759 of SEQ ID NO: 1241094
guaccuacccugggaucua

SEQ ID NO: 1246569 - RNA, 19 nt, Artificial Sequence
  Description of Artificial Sequence: Synthetic oligonucleotide
  Antisense strand to SEQ ID NO: 1246568
uagaucccaggguagguac

SEQ ID NO: 1246570 - RNA, 19 nt, Artificial Sequence
  Description of Artificial Sequence: Synthetic oligonucleotide
  Sense strand starting at position 3789 of SEQ ID NO: 1241094
gguggugaaucccugaguu

SEQ ID NO: 1246571 - RNA, 19 nt, Artificial Sequence
  Description of Artificial Sequence: Synthetic oligonucleotide
  Antisense strand to SEQ ID NO: 1246570
aacucagggauucaccacc

SEQ ID NO: 1246572 - RNA, 19 nt, Artificial Sequence
  Description of Artificial Sequence: Synthetic oligonucleotide
  Sense strand starting at position 20 of SEQ ID NO: 1241095
cuugcugggcccugaaaua

SEQ ID NO: 1246573 - RNA, 19 nt, Artificial Sequence
  Description of Artificial Sequence: Synthetic oligonucleotide
  Antisense strand to SEQ ID NO: 1246572
uauuucagggcccagcaag

SEQ ID NO: 1246574 - RNA, 19 nt, Artificial Sequence
  Description of Artificial Sequence: Synthetic oligonucleotide
  Sense strand starting at position 79 of SEQ ID NO: 1241095
aggcauauuuagugaguua

SEQ ID NO: 1246575 - RNA, 19 nt, Artificial Sequence
  Description of Artificial Sequence: Synthetic oligonucleotide
  Antisense strand to SEQ ID NO: 1246574
uaacucacuaaauaugccu

SEQ ID NO: 1246576 - RNA, 19 nt, Artificial Sequence
  Description of Artificial Sequence: Synthetic oligonucleotide
  Sense strand starting at position 90 of SEQ ID NO: 1241095
gugaguuacccuggugaag

SEQ ID NO: 1246577 - RNA, 19 nt, Artificial Sequence
  Description of Artificial Sequence: Synthetic oligonucleotide
  Antisense strand to SEQ ID NO: 1246576
cuucaccaggguaacucac

SEQ ID NO: 1246578 - RNA, 19 nt, Artificial Sequence
  Description of Artificial Sequence: Synthetic oligonucleotide
  Sense strand starting at position 442 of SEQ ID NO: 1241095
acagguccuuugucugaca

SEQ ID NO: 1246579 - RNA, 19 nt, Artificial Sequence
  Description of Artificial Sequence: Synthetic oligonucleotide
  Antisense strand to SEQ ID NO: 1246578
ugucagacaaaggaccugu

SEQ ID NO: 1246580 - RNA, 19 nt, Artificial Sequence
  Description of Artificial Sequence: Synthetic oligonucleotide
  Sense strand starting at position 443 of SEQ ID NO: 1241095
cagguccuuugucugacaa

SEQ ID NO: 1246581 - RNA, 19 nt, Artificial Sequence
  Description of Artificial Sequence: Synthetic oligonucleotide
  Antisense strand to SEQ ID NO: 1246580
uugucagacaaaggaccug

SEQ ID NO: 1246582 - RNA, 19 nt, Artificial Sequence
  Description of Artificial Sequence: Synthetic oligonucleotide
  Sense strand starting at position 447 of SEQ ID NO: 1241095
uccuuugucugacaagaaa

SEQ ID NO: 1246583 - RNA, 19 nt, Artificial Sequence
  Description of Artificial Sequence: Synthetic oligonucleotide
  Antisense strand to SEQ ID NO: 1246582
uuucuugucagacaaagga

SEQ ID NO: 1246584 - RNA, 19 nt, Artificial Sequence
  Description of Artificial Sequence: Synthetic oligonucleotide
  Sense strand starting at position 468 of SEQ ID NO: 1241095
gacugcauagcagaaagua

SEQ ID NO: 1246585 - RNA, 19 nt, Artificial Sequence
  Description of Artificial Sequence: Synthetic oligonucleotide
  Antisense strand to SEQ ID NO: 1246584
uacuuucugcuaugcaguc

SEQ ID NO: 1246586 - RNA, 19 nt, Artificial Sequence
  Description of Artificial Sequence: Synthetic oligonucleotide
  Sense strand starting at position 535 of SEQ ID NO: 1241095
ccaguugagaaauggccaa

SEQ ID NO: 1246587 - RNA, 19 nt, Artificial Sequence
  Description of Artificial Sequence: Synthetic oligonucleotide
  Antisense strand to SEQ ID NO: 1246586
uuggccauuucucaacugg

SEQ ID NO: 1246588 - RNA, 19 nt, Artificial Sequence
  Description of Artificial Sequence: Synthetic oligonucleotide
  Sense strand starting at position 571 of SEQ ID NO: 1241095
aagguagaauaugauguaa

SEQ ID NO: 1246589 - RNA, 19 nt, Artificial Sequence
  Description of Artificial Sequence: Synthetic oligonucleotide
  Antisense strand to SEQ ID NO: 1246588
uuacaucauauucuaccuu

SEQ ID NO: 1246590 - RNA, 19 nt, Artificial Sequence
  Description of Artificial Sequence: Synthetic oligonucleotide
  Sense strand starting at position 646 of SEQ ID NO: 1241095
gggaguuaacaguguacaa

SEQ ID NO: 1246591 - RNA, 19 nt, Artificial Sequence
  Description of Artificial Sequence: Synthetic oligonucleotide
  Antisense strand to SEQ ID NO: 1246590
uuguacacuguuaacuccc

SEQ ID NO: 1246592 - RNA, 19 nt, Artificial Sequence
  Description of Artificial Sequence: Synthetic oligonucleotide
  Sense strand starting at position 726 of SEQ ID NO: 1241095
cccguaaccaggugugaag

SEQ ID NO: 1246593 - RNA, 19 nt, Artificial Sequence
  Description of Artificial Sequence: Synthetic oligonucleotide
  Antisense strand to SEQ ID NO: 1246592
cuucacaccugguuacggg

SEQ ID NO: 1246594 - RNA, 19 nt, Artificial Sequence
  Description of Artificial Sequence: Synthetic oligonucleotide
  Sense strand starting at position 742 of SEQ ID NO: 1241095
aagagauagugcuuuaagu

SEQ ID NO: 1246595 - RNA, 19 nt, Artificial Sequence
  Description of Artificial Sequence: Synthetic oligonucleotide
  Antisense strand to SEQ ID NO: 1246594
acuuaaagcacuaucucuu

SEQ ID NO: 1246596 - RNA, 19 nt, Artificial Sequence
  Description of Artificial Sequence: Synthetic oligonucleotide
  Sense strand starting at position 744 of SEQ ID NO: 1241095
gagauagugcuuuaaguuc

SEQ ID NO: 1246597 - RNA, 19 nt, Artificial Sequence
  Description of Artificial Sequence: Synthetic oligonucleotide
  Antisense strand to SEQ ID NO: 1246596
gaacuuaaagcacuaucuc

SEQ ID NO: 1246598 - RNA, 19 nt, Artificial Sequence
  Description of Artificial Sequence: Synthetic oligonucleotide
  Sense strand starting at position 777 of SEQ ID NO: 1241095
ccuauaaagcagugguacu

SEQ ID NO: 1246599 - RNA, 19 nt, Artificial Sequence
  Description of Artificial Sequence: Synthetic oligonucleotide
  Antisense strand to SEQ ID NO: 1246598
aguaccacugcuuuauagg

SEQ ID NO: 1246600 - RNA, 19 nt, Artificial Sequence
  Description of Artificial Sequence: Synthetic oligonucleotide
  Sense strand starting at position 784 of SEQ ID NO: 1241095
agcagugguacucaacgua

SEQ ID NO: 1246601 - RNA, 19 nt, Artificial Sequence
  Description of Artificial Sequence: Synthetic oligonucleotide
  Antisense strand to SEQ ID NO: 1246600
uacguugaguaccacugcu

SEQ ID NO: 1246602 - RNA, 19 nt, Artificial Sequence
  Description of Artificial Sequence: Synthetic oligonucleotide
  Sense strand starting at position 839 of SEQ ID NO: 1241095
gcauguuagaaacgccaau

SEQ ID NO: 1246603 - RNA, 19 nt, Artificial Sequence
  Description of Artificial Sequence: Synthetic oligonucleotide
  Antisense strand to SEQ ID NO: 1246602
auuggcguuucuaacaugc

SEQ ID NO: 1246604 - RNA, 19 nt, Artificial Sequence
  Description of Artificial Sequence: Synthetic oligonucleotide
  Sense strand starting at position 852 of SEQ ID NO: 1241095
gccaauucuugguccucau

SEQ ID NO: 1246605 - RNA, 19 nt, Artificial Sequence
  Description of Artificial Sequence: Synthetic oligonucleotide
  Antisense strand to SEQ ID NO: 1246604
augaggaccaagaauuggc

SEQ ID NO: 1246606 - RNA, 19 nt, Artificial Sequence
  Description of Artificial Sequence: Synthetic oligonucleotide
  Sense strand starting at position 941 of SEQ ID NO: 1241095
gacucuggugcaugcuaaa

SEQ ID NO: 1246607 - RNA, 19 nt, Artificial Sequence
  Description of Artificial Sequence: Synthetic oligonucleotide
  Antisense strand to SEQ ID NO: 1246606
uuuagcaugcaccagaguc

SEQ ID NO: 1246608 - RNA, 19 nt, Artificial Sequence
  Description of Artificial Sequence: Synthetic oligonucleotide
  Sense strand starting at position 966 of SEQ ID NO: 1241095
gaaccacuguaguaagaaa

SEQ ID NO: 1246609 - RNA, 19 nt, Artificial Sequence
  Description of Artificial Sequence: Synthetic oligonucleotide
  Antisense strand to SEQ ID NO: 1246608
uuucuuacuacagugguuc

SEQ ID NO: 1246610 - RNA, 19 nt, Artificial Sequence
  Description of Artificial Sequence: Synthetic oligonucleotide
  Sense strand starting at position 1230 of SEQ ID NO: 1241095
aaguaucauggagguaaac

SEQ ID NO: 1246611 - RNA, 19 nt, Artificial Sequence
  Description of Artificial Sequence: Synthetic oligonucleotide
  Antisense strand to SEQ ID NO: 1246610
guuuaccuccaugauacuu

SEQ ID NO: 1246612 - RNA, 19 nt, Artificial Sequence
  Description of Artificial Sequence: Synthetic oligonucleotide
  Sense strand starting at position 1261 of SEQ ID NO: 1241095
uugaaugacuuucuuguua

SEQ ID NO: 1246613 - RNA, 19 nt, Artificial Sequence
  Description of Artificial Sequence: Synthetic oligonucleotide
  Antisense strand to SEQ ID NO: 1246612
uaacaagaaagucauucaa

SEQ ID NO: 1246614 - RNA, 19 nt, Artificial Sequence
  Description of Artificial Sequence: Synthetic oligonucleotide
  Sense strand starting at position 1265 of SEQ ID NO: 1241095
augacuuucuuguuaguag

SEQ ID NO: 1246615 - RNA, 19 nt, Artificial Sequence
  Description of Artificial Sequence: Synthetic oligonucleotide
  Antisense strand to SEQ ID NO: 1246614
cuacuaacaagaaagucau

SEQ ID NO: 1246616 - RNA, 19 nt, Artificial Sequence
  Description of Artificial Sequence: Synthetic oligonucleotide
  Sense strand starting at position 1268 of SEQ ID NO: 1241095
acuuucuuguuaguagaaa

SEQ ID NO: 1246617 - RNA, 19 nt, Artificial Sequence
  Description of Artificial Sequence: Synthetic oligonucleotide
  Antisense strand to SEQ ID NO: 1246616
uuucuacuaacaagaaagu

SEQ ID NO: 1246618 - RNA, 19 nt, Artificial Sequence
  Description of Artificial Sequence: Synthetic oligonucleotide
  Sense strand starting at position 1293 of SEQ ID NO: 1241095
gccacuuaacccugggaga

SEQ ID NO: 1246619 - RNA, 19 nt, Artificial Sequence
  Description of Artificial Sequence: Synthetic oligonucleotide
  Antisense strand to SEQ ID NO: 1246618
ucucccaggguuaaguggc

SEQ ID NO: 1246620 - RNA, 19 nt, Artificial Sequence
  Description of Artificial Sequence: Synthetic oligonucleotide
  Sense strand starting at position 1304 of SEQ ID NO: 1241095
cugggagagggcuguucua

SEQ ID NO: 1246621 - RNA, 19 nt, Artificial Sequence
  Description of Artificial Sequence: Synthetic oligonucleotide
  Antisense strand to SEQ ID NO: 1246620
uagaacagcccucucccag

SEQ ID NO: 1246622 - RNA, 19 nt, Artificial Sequence
  Description of Artificial Sequence: Synthetic oligonucleotide
  Sense strand starting at position 1313 of SEQ ID NO: 1241095
ggcuguucuaggugucuua

SEQ ID NO: 1246623 - RNA, 19 nt, Artificial Sequence
  Description of Artificial Sequence: Synthetic oligonucleotide
  Antisense strand to SEQ ID NO: 1246622
uaagacaccuagaacagcc

SEQ ID NO: 1246624 - RNA, 19 nt, Artificial Sequence
  Description of Artificial Sequence: Synthetic oligonucleotide
  Sense strand starting at position 1316 of SEQ ID NO: 1241095
uguucuaggugucuuaucu

SEQ ID NO: 1246625 - RNA, 19 nt, Artificial Sequence
  Description of Artificial Sequence: Synthetic oligonucleotide
  Antisense strand to SEQ ID NO: 1246624
agauaagacaccuagaaca

SEQ ID NO: 1246626 - RNA, 19 nt, Artificial Sequence
  Description of Artificial Sequence: Synthetic oligonucleotide
  Sense strand starting at position 1320 of SEQ ID NO: 1241095
cuaggugucuuaucuaaag

SEQ ID NO: 1246627 - RNA, 19 nt, Artificial Sequence
  Description of Artificial Sequence: Synthetic oligonucleotide
  Antisense strand to SEQ ID NO: 1246626
cuuuagauaagacaccuag

SEQ ID NO: 1246628 - RNA, 19 nt, Artificial Sequence
  Description of Artificial Sequence: Synthetic oligonucleotide
  Sense strand starting at position 1322 of SEQ ID NO: 1241095
aggugucuuaucuaaaggu

SEQ ID NO: 1246629 - RNA, 19 nt, Artificial Sequence
  Description of Artificial Sequence: Synthetic oligonucleotide
  Antisense strand to SEQ ID NO: 1246628
accuuuagauaagacaccu

SEQ ID NO: 1246630 - RNA, 19 nt, Artificial Sequence
  Description of Artificial Sequence: Synthetic oligonucleotide
  Sense strand starting at position 1371 of SEQ ID NO: 1241095
acauaucuacugugugauc

SEQ ID NO: 1246631 - RNA, 19 nt, Artificial Sequence
  Description of Artificial Sequence: Synthetic oligonucleotide
  Antisense strand to SEQ ID NO: 1246630
gaucacacaguagauaugu

SEQ ID NO: 1246632 - RNA, 19 nt, Artificial Sequence
  Description of Artificial Sequence: Synthetic oligonucleotide
  Sense strand starting at position 1376 of SEQ ID NO: 1241095
ucuacugugugaucuggaa

SEQ ID NO: 1246633 - RNA, 19 nt, Artificial Sequence
  Description of Artificial Sequence: Synthetic oligonucleotide
  Antisense strand to SEQ ID NO: 1246632
uuccagaucacacaguaga

SEQ ID NO: 1246634 - RNA, 19 nt, Artificial Sequence
  Description of Artificial Sequence: Synthetic oligonucleotide
  Sense strand starting at position 1405 of SEQ ID NO: 1241095
cugcaagaugcuggagaua

SEQ ID NO: 1246635 - RNA, 19 nt, Artificial Sequence
  Description of Artificial Sequence: Synthetic oligonucleotide
  Antisense strand to SEQ ID NO: 1246634
uaucuccagcaucuugcag

SEQ ID NO: 1246636 - RNA, 19 nt, Artificial Sequence
  Description of Artificial Sequence: Synthetic oligonucleotide
  Sense strand starting at position 1632 of SEQ ID NO: 1241095
guggacaggucacaugaaa

SEQ ID NO: 1246637 - RNA, 19 nt, Artificial Sequence
  Description of Artificial Sequence: Synthetic oligonucleotide
  Antisense strand to SEQ ID NO: 1246636
uuucaugugaccuguccac

SEQ ID NO: 1246638 - RNA, 19 nt, Artificial Sequence
  Description of Artificial Sequence: Synthetic oligonucleotide
  Sense strand starting at position 1999 of SEQ ID NO: 1241095
ccugacugcgcuuagugaa

SEQ ID NO: 1246639 - RNA, 19 nt, Artificial Sequence
  Description of Artificial Sequence: Synthetic oligonucleotide
  Antisense strand to SEQ ID NO: 1246638
uucacuaagcgcagucagg

SEQ ID NO: 1246640 - RNA, 19 nt, Artificial Sequence
  Description of Artificial Sequence: Synthetic oligonucleotide
  Sense strand starting at position 2144 of SEQ ID NO: 1241095
gggcgacggacuuggaaua

SEQ ID NO: 1246641 - RNA, 19 nt, Artificial Sequence
  Description of Artificial Sequence: Synthetic oligonucleotide
  Antisense strand to SEQ ID NO: 1246640
uauuccaaguccgucgccc

SEQ ID NO: 1246642 - RNA, 19 nt, Artificial Sequence
  Description of Artificial Sequence: Synthetic oligonucleotide
  Sense strand starting at position 2201 of SEQ ID NO: 1241095
ccagguucguguuuaauga

SEQ ID NO: 1246643 - RNA, 19 nt, Artificial Sequence
  Description of Artificial Sequence: Synthetic oligonucleotide
  Antisense strand to SEQ ID NO: 1246642
ucauuaaacacgaaccugg

SEQ ID NO: 1246644 - RNA, 19 nt, Artificial Sequence
  Description of Artificial Sequence: Synthetic oligonucleotide
  Sense strand starting at position 2202 of SEQ ID NO: 1241095
cagguucguguuuaaugaa

SEQ ID NO: 1246645 - RNA, 19 nt, Artificial Sequence
  Description of Artificial Sequence: Synthetic oligonucleotide
  Antisense strand to SEQ ID NO: 1246644
uucauuaaacacgaaccug

SEQ ID NO: 1246646 - RNA, 19 nt, Artificial Sequence
  Description of Artificial Sequence: Synthetic oligonucleotide
  Sense strand starting at position 2764 of SEQ ID NO: 1241095
ggaacuaguaggcgaagaa

SEQ ID NO: 1246647 - RNA, 19 nt, Artificial Sequence
  Description of Artificial Sequence: Synthetic oligonucleotide
  Antisense strand to SEQ ID NO: 1246646
uucuucgccuacuaguucc

SEQ ID NO: 1246648 - RNA, 19 nt, Artificial Sequence
  Description of Artificial Sequence: Synthetic oligonucleotide
  Sense strand starting at position 3735 of SEQ ID NO: 1241095
aguuaucuuuggcccuuau

SEQ ID NO: 1246649 - RNA, 19 nt, Artificial Sequence
  Description of Artificial Sequence: Synthetic oligonucleotide
  Antisense strand to SEQ ID NO: 1246648
auaagggccaaagauaacu

SEQ ID NO: 1246650 - RNA, 19 nt, Artificial Sequence
  Description of Artificial Sequence: Synthetic oligonucleotide
  Sense strand starting at position 3904 of SEQ ID NO: 1241095
acuuccuguccucaaggua

SEQ ID NO: 1246651 - RNA, 19 nt, Artificial Sequence
  Description of Artificial Sequence: Synthetic oligonucleotide
  Antisense strand to SEQ ID NO: 1246650
uaccuugaggacaggaagu

SEQ ID NO: 1246652 - RNA, 19 nt, Artificial Sequence
  Description of Artificial Sequence: Synthetic oligonucleotide
  Sense strand starting at position 7 of SEQ ID NO: 1241096
aguucugaaaggugucuca

SEQ ID NO: 1246653 - RNA, 19 nt, Artificial Sequence
  Description of Artificial Sequence: Synthetic oligonucleotide
  Antisense strand to SEQ ID NO: 1246652
ugagacaccuuucagaacu

SEQ ID NO: 1246654 - RNA, 19 nt, Artificial Sequence
  Description of Artificial Sequence: Synthetic oligonucleotide
  Sense strand starting at position 68 of SEQ ID NO: 1241096
ucacuuuagguugaaccau

SEQ ID NO: 1246655 - RNA, 19 nt, Artificial Sequence
  Description of Artificial Sequence: Synthetic oligonucleotide
  Antisense strand to SEQ ID NO: 1246654
augguucaaccuaaaguga

SEQ ID NO: 1246656 - RNA, 19 nt, Artificial Sequence
  Description of Artificial Sequence: Synthetic oligonucleotide
  Sense strand starting at position 95 of SEQ ID NO: 1241096
gcuuguguccuacugcuuu

SEQ ID NO: 1246657 - RNA, 19 nt, Artificial Sequence
  Description of Artificial Sequence: Synthetic oligonucleotide
  Antisense strand to SEQ ID NO: 1246656
aaagcaguaggacacaagc

SEQ ID NO: 1246658 - RNA, 19 nt, Artificial Sequence
  Description of Artificial Sequence: Synthetic oligonucleotide
  Sense strand starting at position 560 of SEQ ID NO: 1241096
gaaccaaagcgucaugaag

SEQ ID NO: 1246659 - RNA, 19 nt, Artificial Sequence
  Description of Artificial Sequence: Synthetic oligonucleotide
  Antisense strand to SEQ ID NO: 1246658
cuucaugacgcuuugguuc

SEQ ID NO: 1246660 - RNA, 19 nt, Artificial Sequence
  Description of Artificial Sequence: Synthetic oligonucleotide
  Sense strand starting at position 571 of SEQ ID NO: 1241096
ucaugaagcaagugaaaga

SEQ ID NO: 1246661 - RNA, 19 nt, Artificial Sequence
  Description of Artificial Sequence: Synthetic oligonucleotide
  Antisense strand to SEQ ID NO: 1246660
ucuuucacuugcuucauga

SEQ ID NO: 1246662 - RNA, 19 nt, Artificial Sequence
  Description of Artificial Sequence: Synthetic oligonucleotide
  Sense strand starting at position 610 of SEQ ID NO: 1241096
ggcacuucggaaugaaugu

SEQ ID NO: 1246663 - RNA, 19 nt, Artificial Sequence
  Description of Artificial Sequence: Synthetic oligonucleotide
  Antisense strand to SEQ ID NO: 1246662
acauucauuccgaagugcc

SEQ ID NO: 1246664 - RNA, 19 nt, Artificial Sequence
  Description of Artificial Sequence: Synthetic oligonucleotide
  Sense strand starting at position 617 of SEQ ID NO: 1241096
cggaaugaaugucuccaaa

SEQ ID NO: 1246665 - RNA, 19 nt, Artificial Sequence
  Description of Artificial Sequence: Synthetic oligonucleotide
  Antisense strand to SEQ ID NO: 1246664
uuuggagacauucauuccg

SEQ ID NO: 1246666 - RNA, 19 nt, Artificial Sequence
  Description of Artificial Sequence: Synthetic oligonucleotide
  Sense strand starting at position 639 of SEQ ID NO: 1241096
ggccaauuugcucgggaga

SEQ ID NO: 1246667 - RNA, 19 nt, Artificial Sequence
  Description of Artificial Sequence: Synthetic oligonucleotide
  Antisense strand to SEQ ID NO: 1246666
ucucccgagcaaauuggcc

SEQ ID NO: 1246668 - RNA, 19 nt, Artificial Sequence
  Description of Artificial Sequence: Synthetic oligonucleotide
  Sense strand starting at position 640 of SEQ ID NO: 1241096
gccaauuugcucgggagau

SEQ ID NO: 1246669 - RNA, 19 nt, Artificial Sequence
  Description of Artificial Sequence: Synthetic oligonucleotide
  Antisense strand to SEQ ID NO: 1246668
aucucccgagcaaauuggc

SEQ ID NO: 1246670 - RNA, 19 nt, Artificial Sequence
  Description of Artificial Sequence: Synthetic oligonucleotide
  Sense strand starting at position 844 of SEQ ID NO: 1241096
cggauuuaggcguggacca

SEQ ID NO: 1246671 - RNA, 19 nt, Artificial Sequence
  Description of Artificial Sequence: Synthetic oligonucleotide
  Antisense strand to SEQ ID NO: 1246670
ugguccacgccuaaauccg

SEQ ID NO: 1246672 - RNA, 19 nt, Artificial Sequence
  Description of Artificial Sequence: Synthetic oligonucleotide
  Sense strand starting at position 986 of SEQ ID NO: 1241096
auggguuuacuuugggacu

SEQ ID NO: 1246673 - RNA, 19 nt, Artificial Sequence
  Description of Artificial Sequence: Synthetic oligonucleotide
  Antisense strand to SEQ ID NO: 1246672
agucccaaaguaaacccau

SEQ ID NO: 1246674 - RNA, 19 nt, Artificial Sequence
  Description of Artificial Sequence: Synthetic oligonucleotide
  Sense strand starting at position 1035 of SEQ ID NO: 1241096
ggagucuguggguacaacu

SEQ ID NO: 1246675 - RNA, 19 nt, Artificial Sequence
  Description of Artificial Sequence: Synthetic oligonucleotide
  Antisense strand to SEQ ID NO: 1246674
aguuguacccacagacucc

SEQ ID NO: 1246676 - RNA, 19 nt, Artificial Sequence
  Description of Artificial Sequence: Synthetic oligonucleotide
  Sense strand starting at position 1044 of SEQ ID NO: 1241096
ggguacaacugcucuacau

SEQ ID NO: 1246677 - RNA, 19 nt, Artificial Sequence
  Description of Artificial Sequence: Synthetic oligonucleotide
  Antisense strand to SEQ ID NO: 1246676
auguagagcaguuguaccc

SEQ ID NO: 1246678 - RNA, 19 nt, Artificial Sequence
  Description of Artificial Sequence: Synthetic oligonucleotide
  Sense strand starting at position 1231 of SEQ ID NO: 1241096
agcuuucucccugagcaga

SEQ ID NO: 1246679 - RNA, 19 nt, Artificial Sequence
  Description of Artificial Sequence: Synthetic oligonucleotide
  Antisense strand to SEQ ID NO: 1246678
ucugcucagggagaaagcu

SEQ ID NO: 1246680 - RNA, 19 nt, Artificial Sequence
  Description of Artificial Sequence: Synthetic oligonucleotide
  Sense strand starting at position 1515 of SEQ ID NO: 1241096
ggcuguaguaggucucgua

SEQ ID NO: 1246681 - RNA, 19 nt, Artificial Sequence
  Description of Artificial Sequence: Synthetic oligonucleotide
  Antisense strand to SEQ ID NO: 1246680
uacgagaccuacuacagcc

SEQ ID NO: 1246682 - RNA, 19 nt, Artificial Sequence
  Description of Artificial Sequence: Synthetic oligonucleotide
  Sense strand starting at position 1805 of SEQ ID NO: 1241096
cccucaaacccggauugua

SEQ ID NO: 1246683 - RNA, 19 nt, Artificial Sequence
  Description of Artificial Sequence: Synthetic oligonucleotide
  Antisense strand to SEQ ID NO: 1246682
uacaauccggguuugaggg

SEQ ID NO: 1246684 - RNA, 19 nt, Artificial Sequence
  Description of Artificial Sequence: Synthetic oligonucleotide
  Sense strand starting at position 2225 of SEQ ID NO: 1241096
cccaaugggauguguccaa

SEQ ID NO: 1246685 - RNA, 19 nt, Artificial Sequence
  Description of Artificial Sequence: Synthetic oligonucleotide
  Antisense strand to SEQ ID NO: 1246684
uuggacacaucccauuggg

SEQ ID NO: 1246686 - RNA, 19 nt, Artificial Sequence
  Description of Artificial Sequence: Synthetic oligonucleotide
  Sense strand starting at position 2499 of SEQ ID NO: 1241096
aagcaauguccaggaagca

SEQ ID NO: 1246687 - RNA, 19 nt, Artificial Sequence
  Description of Artificial Sequence: Synthetic oligonucleotide
  Antisense strand to SEQ ID NO: 1246686
ugcuuccuggacauugcuu

SEQ ID NO: 1246688 - RNA, 19 nt, Artificial Sequence
  Description of Artificial Sequence: Synthetic oligonucleotide
  Sense strand starting at position 2500 of SEQ ID NO: 1241096
agcaauguccaggaagcaa

SEQ ID NO: 1246689 - RNA, 19 nt, Artificial Sequence
  Description of Artificial Sequence: Synthetic oligonucleotide
  Antisense strand to SEQ ID NO: 1246688
uugcuuccuggacauugcu

SEQ ID NO: 1246690 - RNA, 19 nt, Artificial Sequence
  Description of Artificial Sequence: Synthetic oligonucleotide
  Sense strand starting at position 2548 of SEQ ID NO: 1241096
gcgucaugaucucuaagag

SEQ ID NO: 1246691 - RNA, 19 nt, Artificial Sequence
  Description of Artificial Sequence: Synthetic oligonucleotide
  Antisense strand to SEQ ID NO: 1246690
cucuuagagaucaugacgc

SEQ ID NO: 1246692 - RNA, 19 nt, Artificial Sequence
  Description of Artificial Sequence: Synthetic oligonucleotide
  Sense strand starting at position 2549 of SEQ ID NO: 1241096
cgucaugaucucuaagagc

SEQ ID NO: 1246693 - RNA, 19 nt, Artificial Sequence
  Description of Artificial Sequence: Synthetic oligonucleotide
  Antisense strand to SEQ ID NO: 1246692
gcucuuagagaucaugacg

SEQ ID NO: 1246694 - RNA, 19 nt, Artificial Sequence
  Description of Artificial Sequence: Synthetic oligonucleotide
  Sense strand starting at position 2642 of SEQ ID NO: 1241096
ucuugagagcccggaagaa

SEQ ID NO: 1246695 - RNA, 19 nt, Artificial Sequence
  Description of Artificial Sequence: Synthetic oligonucleotide
  Antisense strand to SEQ ID NO: 1246694
uucuuccgggcucucaaga

SEQ ID NO: 1246696 - RNA, 19 nt, Artificial Sequence
  Description of Artificial Sequence: Synthetic oligonucleotide
  Sense strand starting at position 2727 of SEQ ID NO: 1241096
gaagcacugcccugagauu

SEQ ID NO: 1246697 - RNA, 19 nt, Artificial Sequence
  Description of Artificial Sequence: Synthetic oligonucleotide
  Antisense strand to SEQ ID NO: 1246696
aaucucagggcagugcuuc

SEQ ID NO: 1246698 - RNA, 19 nt, Artificial Sequence
  Description of Artificial Sequence: Synthetic oligonucleotide
  Sense strand starting at position 2953 of SEQ ID NO: 1241096
cuagcauuccaucauguuu

SEQ ID NO: 1246699 - RNA, 19 nt, Artificial Sequence
  Description of Artificial Sequence: Synthetic oligonucleotide
  Antisense strand to SEQ ID NO: 1246698
aaacaugauggaaugcuag

SEQ ID NO: 1246700 - RNA, 19 nt, Artificial Sequence
  Description of Artificial Sequence: Synthetic oligonucleotide
  Sense strand starting at position 2958 of SEQ ID NO: 1241096
auuccaucauguuuauuga

SEQ ID NO: 1246701 - RNA, 19 nt, Artificial Sequence
  Description of Artificial Sequence: Synthetic oligonucleotide
  Antisense strand to SEQ ID NO: 1246700
ucaauaaacaugauggaau

SEQ ID NO: 1246702 - RNA, 19 nt, Artificial Sequence
  Description of Artificial Sequence: Synthetic oligonucleotide
  Sense strand starting at position 3099 of SEQ ID NO: 1241096
gugcuuuauuucccgcuau

SEQ ID NO: 1246703 - RNA, 19 nt, Artificial Sequence
  Description of Artificial Sequence: Synthetic oligonucleotide
  Antisense strand to SEQ ID NO: 1246702
auagcgggaaauaaagcac

SEQ ID NO: 1246704 - RNA, 19 nt, Artificial Sequence
  Description of Artificial Sequence: Synthetic oligonucleotide
  Sense strand starting at position 3242 of SEQ ID NO: 1241096
ggcaguugucuguugcaua

SEQ ID NO: 1246705 - RNA, 19 nt, Artificial Sequence
  Description of Artificial Sequence: Synthetic oligonucleotide
  Antisense strand to SEQ ID NO: 1246704
uaugcaacagacaacugcc

SEQ ID NO: 1246706 - RNA, 19 nt, Artificial Sequence
  Description of Artificial Sequence: Synthetic oligonucleotide
  Sense strand starting at position 3247 of SEQ ID NO: 1241096
uugucuguugcauagucaa

SEQ ID NO: 1246707 - RNA, 19 nt, Artificial Sequence
  Description of Artificial Sequence: Synthetic oligonucleotide
  Antisense strand to SEQ ID NO: 1246706
uugacuaugcaacagacaa

SEQ ID NO: 1246708 - RNA, 19 nt, Artificial Sequence
  Description of Artificial Sequence: Synthetic oligonucleotide
  Sense strand starting at position 3255 of SEQ ID NO: 1241096
ugcauagucaaguaguugu

SEQ ID NO: 1246709 - RNA, 19 nt, Artificial Sequence
  Description of Artificial Sequence: Synthetic oligonucleotide
  Antisense strand to SEQ ID NO: 1246708
acaacuacuugacuaugca

SEQ ID NO: 1246710 - RNA, 19 nt, Artificial Sequence
  Description of Artificial Sequence: Synthetic oligonucleotide
  Sense strand starting at position 3293 of SEQ ID NO: 1241096
agagcaguuguauauguua

SEQ ID NO: 1246711 - RNA, 19 nt, Artificial Sequence
  Description of Artificial Sequence: Synthetic oligonucleotide
  Antisense strand to SEQ ID NO: 1246710
uaacauauacaacugcucu

SEQ ID NO: 1246712 - RNA, 19 nt, Artificial Sequence
  Description of Artificial Sequence: Synthetic oligonucleotide
  Sense strand starting at position 3396 of SEQ ID NO: 1241096
guaugaagucucuacuugu

SEQ ID NO: 1246713 - RNA, 19 nt, Artificial Sequence
  Description of Artificial Sequence: Synthetic oligonucleotide
  Antisense strand to SEQ ID NO: 1246712
acaaguagagacuucauac

SEQ ID NO: 1246714 - RNA, 19 nt, Artificial Sequence
  Description of Artificial Sequence: Synthetic oligonucleotide
  Sense strand starting at position 3454 of SEQ ID NO: 1241096
agagcuccucuccagaauu

SEQ ID NO: 1246715 - RNA, 19 nt, Artificial Sequence
  Description of Artificial Sequence: Synthetic oligonucleotide
  Antisense strand to SEQ ID NO: 1246714
aauucuggagaggagcucu

SEQ ID NO: 1246716 - RNA, 19 nt, Artificial Sequence
  Description of Artificial Sequence: Synthetic oligonucleotide
  Sense strand starting at position 3456 of SEQ ID NO: 1241096
agcuccucuccagaauugu

SEQ ID NO: 1246717 - RNA, 19 nt, Artificial Sequence
  Description of Artificial Sequence: Synthetic oligonucleotide
  Antisense strand to SEQ ID NO: 1246716
acaauucuggagaggagcu

SEQ ID NO: 1246718 - RNA, 19 nt, Artificial Sequence
  Description of Artificial Sequence: Synthetic oligonucleotide
  Sense strand starting at position 3467 of SEQ ID NO: 1241096
agaauuguguuagcagaag

SEQ ID NO: 1246719 - RNA, 19 nt, Artificial Sequence
  Description of Artificial Sequence: Synthetic oligonucleotide
  Antisense strand to SEQ ID NO: 1246718
cuucugcuaacacaauucu

SEQ ID NO: 1246720 - RNA, 19 nt, Artificial Sequence
  Description of Artificial Sequence: Synthetic oligonucleotide
  Sense strand starting at position 3485 of SEQ ID NO: 1241096
gcucuagagaguggcaauu

SEQ ID NO: 1246721 - RNA, 19 nt, Artificial Sequence
  Description of Artificial Sequence: Synthetic oligonucleotide
  Antisense strand to SEQ ID NO: 1246720
aauugccacucucuagagc

SEQ ID NO: 1246722 - RNA, 19 nt, Artificial Sequence
  Description of Artificial Sequence: Synthetic oligonucleotide
  Sense strand starting at position 3581 of SEQ ID NO: 1241096
gcugguguuguggaaaguu

SEQ ID NO: 1246723 - RNA, 19 nt, Artificial Sequence
  Description of Artificial Sequence: Synthetic oligonucleotide
  Antisense strand to SEQ ID NO: 1246722
aacuuuccacaacaccagc

SEQ ID NO: 1246724 - RNA, 19 nt, Artificial Sequence
  Description of Artificial Sequence: Synthetic oligonucleotide
  Sense strand starting at position 3625 of SEQ ID NO: 1241096
uuuguugugugaccucaga

SEQ ID NO: 1246725 - RNA, 19 nt, Artificial Sequence
  Description of Artificial Sequence: Synthetic oligonucleotide
  Antisense strand to SEQ ID NO: 1246724
ucugaggucacacaacaaa

SEQ ID NO: 1246726 - RNA, 19 nt, Artificial Sequence
  Description of Artificial Sequence: Synthetic oligonucleotide
  Sense strand starting at position 3686 of SEQ ID NO: 1241096
ugagaagguugaguuagau

SEQ ID NO: 1246727 - RNA, 19 nt, Artificial Sequence
  Description of Artificial Sequence: Synthetic oligonucleotide
  Antisense strand to SEQ ID NO: 1246726
aucuaacucaaccuucuca

SEQ ID NO: 1246728 - RNA, 19 nt, Artificial Sequence
  Description of Artificial Sequence: Synthetic oligonucleotide
  Sense strand starting at position 3695 of SEQ ID NO: 1241096
ugaguuagaucaucuucuc

SEQ ID NO: 1246729 - RNA, 19 nt, Artificial Sequence
  Description of Artificial Sequence: Synthetic oligonucleotide
  Antisense strand to SEQ ID NO: 1246728
gagaagaugaucuaacuca

SEQ ID NO: 1246730 - RNA, 19 nt, Artificial Sequence
  Description of Artificial Sequence: Synthetic oligonucleotide
  Sense strand starting at position 3761 of SEQ ID NO: 1241096
ggagucugguggaagaauu

SEQ ID NO: 1246731 - RNA, 19 nt, Artificial Sequence
  Description of Artificial Sequence: Synthetic oligonucleotide
  Antisense strand to SEQ ID NO: 1246730
aauucuuccaccagacucc

SEQ ID NO: 1246732 - RNA, 19 nt, Artificial Sequence
  Description of Artificial Sequence: Synthetic oligonucleotide
  Sense strand starting at position 274 of SEQ ID NO: 1241097
aggugaaugcuguguacag

SEQ ID NO: 1246733 - RNA, 19 nt, Artificial Sequence
  Description of Artificial Sequence: Synthetic oligonucleotide
  Antisense strand to SEQ ID NO: 1246732
cuguacacagcauucaccu

SEQ ID NO: 1246734 - RNA, 19 nt, Artificial Sequence
  Description of Artificial Sequence: Synthetic oligonucleotide
  Sense strand starting at position 276 of SEQ ID NO: 1241097
gugaaugcuguguacagca

SEQ ID NO: 1246735 - RNA, 19 nt, Artificial Sequence
  Description of Artificial Sequence: Synthetic oligonucleotide
  Antisense strand to SEQ ID NO: 1246734
ugcuguacacagcauucac

SEQ ID NO: 1246736 - RNA, 19 nt, Artificial Sequence
  Description of Artificial Sequence: Synthetic oligonucleotide
  Sense strand starting at position 450 of SEQ ID NO: 1241097
gcaguagagcgcuggacau

SEQ ID NO: 1246737 - RNA, 19 nt, Artificial Sequence
  Description of Artificial Sequence: Synthetic oligonucleotide
  Antisense strand to SEQ ID NO: 1246736
auguccagcgcucuacugc

SEQ ID NO: 1246738 - RNA, 19 nt, Artificial Sequence
  Description of Artificial Sequence: Synthetic oligonucleotide
  Sense strand starting at position 615 of SEQ ID NO: 1241097
cccacuguuccaggaagaa

SEQ ID NO: 1246739 - RNA, 19 nt, Artificial Sequence
  Description of Artificial Sequence: Synthetic oligonucleotide
  Antisense strand to SEQ ID NO: 1246738
uucuuccuggaacaguggg

SEQ ID NO: 1246740 - RNA, 19 nt, Artificial Sequence
  Description of Artificial Sequence: Synthetic oligonucleotide
  Sense strand starting at position 627 of SEQ ID NO: 1241097
ggaagaacuuucuaggaag

SEQ ID NO: 1246741 - RNA, 19 nt, Artificial Sequence
  Description of Artificial Sequence: Synthetic oligonucleotide
  Antisense strand to SEQ ID NO: 1246740
cuuccuagaaaguucuucc

SEQ ID NO: 1246742 - RNA, 19 nt, Artificial Sequence
  Description of Artificial Sequence: Synthetic oligonucleotide
  Sense strand starting at position 630 of SEQ ID NO: 1241097
agaacuuucuaggaagcca

SEQ ID NO: 1246743 - RNA, 19 nt, Artificial Sequence
  Description of Artificial Sequence: Synthetic oligonucleotide
  Antisense strand to SEQ ID NO: 1246742
uggcuuccuagaaaguucu

SEQ ID NO: 1246744 - RNA, 19 nt, Artificial Sequence
  Description of Artificial Sequence: Synthetic oligonucleotide
  Sense strand starting at position 787 of SEQ ID NO: 1241097
gggcccuuguuccauuauu

SEQ ID NO: 1246745 - RNA, 19 nt, Artificial Sequence
  Description of Artificial Sequence: Synthetic oligonucleotide
  Antisense strand to SEQ ID NO: 1246744
aauaauggaacaagggccc

SEQ ID NO: 1246746 - RNA, 19 nt, Artificial Sequence
  Description of Artificial Sequence: Synthetic oligonucleotide
  Sense strand starting at position 838 of SEQ ID NO: 1241097
acgcgugcaucccaaaguu

SEQ ID NO: 1246747 - RNA, 19 nt, Artificial Sequence
  Description of Artificial Sequence: Synthetic oligonucleotide
  Antisense strand to SEQ ID NO: 1246746
aacuuugggaugcacgcgu

SEQ ID NO: 1246748 - RNA, 19 nt, Artificial Sequence
  Description of Artificial Sequence: Synthetic oligonucleotide
  Sense strand starting at position 964 of SEQ ID NO: 1241097
gcagcucagucagaacaga

SEQ ID NO: 1246749 - RNA, 19 nt, Artificial Sequence
  Description of Artificial Sequence: Synthetic oligonucleotide
  Antisense strand to SEQ ID NO: 1246748
ucuguucugacugagcugc

SEQ ID NO: 1246750 - RNA, 19 nt, Artificial Sequence
  Description of Artificial Sequence: Synthetic oligonucleotide
  Sense strand starting at position 1115 of SEQ ID NO: 1241097
ucccaugucuggcuaggau

SEQ ID NO: 1246751 - RNA, 19 nt, Artificial Sequence
  Description of Artificial Sequence: Synthetic oligonucleotide
  Antisense strand to SEQ ID NO: 1246750
auccuagccagacauggga

SEQ ID NO: 1246752 - RNA, 19 nt, Artificial Sequence
  Description of Artificial Sequence: Synthetic oligonucleotide
  Sense strand starting at position 1322 of SEQ ID NO: 1241097
ccaggugaucacuguaaau

SEQ ID NO: 1246753 - RNA, 19 nt, Artificial Sequence
  Description of Artificial Sequence: Synthetic oligonucleotide
  Antisense strand to SEQ ID NO: 1246752
auuuacagugaucaccugg

SEQ ID NO: 1246754 - RNA, 19 nt, Artificial Sequence
  Description of Artificial Sequence: Synthetic oligonucleotide
  Sense strand starting at position 1464 of SEQ ID NO: 1241097
cucagcgacuuguauuuau

SEQ ID NO: 1246755 - RNA, 19 nt, Artificial Sequence
  Description of Artificial Sequence: Synthetic oligonucleotide
  Antisense strand to SEQ ID NO: 1246754
auaaauacaagucgcugag

SEQ ID NO: 1246756 - RNA, 19 nt, Artificial Sequence
  Description of Artificial Sequence: Synthetic oligonucleotide
  Sense strand starting at position 1468 of SEQ ID NO: 1241097
gcgacuuguauuuauagcu

SEQ ID NO: 1246757 - RNA, 19 nt, Artificial Sequence
  Description of Artificial Sequence: Synthetic oligonucleotide
  Antisense strand to SEQ ID NO: 1246756
agcuauaaauacaagucgc

SEQ ID NO: 1246758 - RNA, 19 nt, Artificial Sequence
  Description of Artificial Sequence: Synthetic oligonucleotide
  Sense strand starting at position 2125 of SEQ ID NO: 1241097
uugagucucgagcacuuua

SEQ ID NO: 1246759 - RNA, 19 nt, Artificial Sequence
  Description of Artificial Sequence: Synthetic oligonucleotide
  Antisense strand to SEQ ID NO: 1246758
uaaagugcucgagacucaa

SEQ ID NO: 1246760 - RNA, 19 nt, Artificial Sequence
  Description of Artificial Sequence: Synthetic oligonucleotide
  Sense strand starting at position 2202 of SEQ ID NO: 1241097
ccacgaauuugccaacgga

SEQ ID NO: 1246761 - RNA, 19 nt, Artificial Sequence
  Description of Artificial Sequence: Synthetic oligonucleotide
  Antisense strand to SEQ ID NO: 1246760
uccguuggcaaauucgugg

SEQ ID NO: 1246762 - RNA, 19 nt, Artificial Sequence
  Description of Artificial Sequence: Synthetic oligonucleotide
  Sense strand starting at position 2330 of SEQ ID NO: 1241097
ggucguucccuccagggaa

SEQ ID NO: 1246763 - RNA, 19 nt, Artificial Sequence
  Description of Artificial Sequence: Synthetic oligonucleotide
  Antisense strand to SEQ ID NO: 1246762
uucccuggagggaacgacc

SEQ ID NO: 1246764 - RNA, 19 nt, Artificial Sequence
  Description of Artificial Sequence: Synthetic oligonucleotide
  Sense strand starting at position 2493 of SEQ ID NO: 1241097
cguccucuccgaggacuuu

SEQ ID NO: 1246765 - RNA, 19 nt, Artificial Sequence
  Description of Artificial Sequence: Synthetic oligonucleotide
  Antisense strand to SEQ ID NO: 1246764
aaaguccucggagaggacg

SEQ ID NO: 1246766 - RNA, 19 nt, Artificial Sequence
  Description of Artificial Sequence: Synthetic oligonucleotide
  Sense strand starting at position 2993 of SEQ ID NO: 1241097
acggcucucaguugccaaa

SEQ ID NO: 1246767 - RNA, 19 nt, Artificial Sequence
  Description of Artificial Sequence: Synthetic oligonucleotide
  Antisense strand to SEQ ID NO: 1246766
uuuggcaacugagagccgu

SEQ ID NO: 1246768 - RNA, 19 nt, Artificial Sequence
  Description of Artificial Sequence: Synthetic oligonucleotide
  Sense strand starting at position 2995 of SEQ ID NO: 1241097
ggcucucaguugccaaaga

SEQ ID NO: 1246769 - RNA, 19 nt, Artificial Sequence
  Description of Artificial Sequence: Synthetic oligonucleotide
  Antisense strand to SEQ ID NO: 1246768
ucuuuggcaacugagagcc

SEQ ID NO: 1246770 - RNA, 19 nt, Artificial Sequence
  Description of Artificial Sequence: Synthetic oligonucleotide
  Sense strand starting at position 3083 of SEQ ID NO: 1241097
ggacacucccugugaggaa

SEQ ID NO: 1246771 - RNA, 19 nt, Artificial Sequence
  Description of Artificial Sequence: Synthetic oligonucleotide
  Antisense strand to SEQ ID NO: 1246770
uuccucacagggagugucc

SEQ ID NO: 1246772 - RNA, 19 nt, Artificial Sequence
  Description of Artificial Sequence: Synthetic oligonucleotide
  Sense strand starting at position 3107 of SEQ ID NO: 1241097
ggagcuugggccugucaca

SEQ ID NO: 1246773 - RNA, 19 nt, Artificial Sequence
  Description of Artificial Sequence: Synthetic oligonucleotide
  Antisense strand to SEQ ID NO: 1246772
ugugacaggcccaagcucc

SEQ ID NO: 1246774 - RNA, 19 nt, Artificial Sequence
  Description of Artificial Sequence: Synthetic oligonucleotide
  Sense strand starting at position 3131 of SEQ ID NO: 1241097
ggucgcucacacugaguua

SEQ ID NO: 1246775 - RNA, 19 nt, Artificial Sequence
  Description of Artificial Sequence: Synthetic oligonucleotide
  Antisense strand to SEQ ID NO: 1246774
uaacucagugugagcgacc

SEQ ID NO: 1246776 - RNA, 19 nt, Artificial Sequence
  Description of Artificial Sequence: Synthetic oligonucleotide
  Sense strand starting at position 3142 of SEQ ID NO: 1241097
cugaguuagugauucaggu

SEQ ID NO: 1246777 - RNA, 19 nt, Artificial Sequence
  Description of Artificial Sequence: Synthetic oligonucleotide
  Antisense strand to SEQ ID NO: 1246776
accugaaucacuaacucag

SEQ ID NO: 1246778 - RNA, 19 nt, Artificial Sequence
  Description of Artificial Sequence: Synthetic oligonucleotide
  Sense strand starting at position 3360 of SEQ ID NO: 1241097
gccguuguauggguuccaa

SEQ ID NO: 1246779 - RNA, 19 nt, Artificial Sequence
  Description of Artificial Sequence: Synthetic oligonucleotide
  Antisense strand to SEQ ID NO: 1246778
uuggaacccauacaacggc

SEQ ID NO: 1246780 - RNA, 19 nt, Artificial Sequence
  Description of Artificial Sequence: Synthetic oligonucleotide
  Sense strand starting at position 3505 of SEQ ID NO: 1241097
guuggagggcucugagauu

SEQ ID NO: 1246781 - RNA, 19 nt, Artificial Sequence
  Description of Artificial Sequence: Synthetic oligonucleotide
  Antisense strand to SEQ ID NO: 1246780
aaucucagagcccuccaac

SEQ ID NO: 1246782 - RNA, 19 nt, Artificial Sequence
  Description of Artificial Sequence: Synthetic oligonucleotide
  Sense strand starting at position 3584 of SEQ ID NO: 1241097
gggugucaaggagggaauu

SEQ ID NO: 1246783 - RNA, 19 nt, Artificial Sequence
  Description of Artificial Sequence: Synthetic oligonucleotide
  Antisense strand to SEQ ID NO: 1246782
aauucccuccuugacaccc

SEQ ID NO: 1246784 - RNA, 19 nt, Artificial Sequence
  Description of Artificial Sequence: Synthetic oligonucleotide
  Sense strand starting at position 3665 of SEQ ID NO: 1241097
gcgucauggagguuuguuu

SEQ ID NO: 1246785 - RNA, 19 nt, Artificial Sequence
  Description of Artificial Sequence: Synthetic oligonucleotide
  Antisense strand to SEQ ID NO: 1246784
aaacaaaccuccaugacgc

SEQ ID NO: 1246786 - RNA, 19 nt, Artificial Sequence
  Description of Artificial Sequence: Synthetic oligonucleotide
  Sense strand starting at position 3672 of SEQ ID NO: 1241097
ggagguuuguuuccagaug

SEQ ID NO: 1246787 - RNA, 19 nt, Artificial Sequence
  Description of Artificial Sequence: Synthetic oligonucleotide
  Antisense strand to SEQ ID NO: 1246786
caucuggaaacaaaccucc

SEQ ID NO: 1246788 - RNA, 19 nt, Artificial Sequence
  Description of Artificial Sequence: Synthetic oligonucleotide
  Sense strand starting at position 3673 of SEQ ID NO: 1241097
gagguuuguuuccagauga

SEQ ID NO: 1246789 - RNA, 19 nt, Artificial Sequence
  Description of Artificial Sequence: Synthetic oligonucleotide
  Antisense strand to SEQ ID NO: 1246788
ucaucuggaaacaaaccuc

SEQ ID NO: 1246790 - RNA, 19 nt, Artificial Sequence
  Description of Artificial Sequence: Synthetic oligonucleotide
  Sense strand starting at position 3677 of SEQ ID NO: 1241097
uuuguuuccagaugagaga

SEQ ID NO: 1246791 - RNA, 19 nt, Artificial Sequence
  Description of Artificial Sequence: Synthetic oligonucleotide
  Antisense strand to SEQ ID NO: 1246790
ucucucaucuggaaacaaa

SEQ ID NO: 1246792 - RNA, 19 nt, Artificial Sequence
  Description of Artificial Sequence: Synthetic oligonucleotide
  Sense strand starting at position 3812 of SEQ ID NO: 1241097
ugggcuagcagaugucaga

SEQ ID NO: 1246793 - RNA, 19 nt, Artificial Sequence
  Description of Artificial Sequence: Synthetic oligonucleotide
  Antisense strand to SEQ ID NO: 1246792
ucugacaucugcuagccca

SEQ ID NO: 1246794 - RNA, 19 nt, Artificial Sequence
  Description of Artificial Sequence: Synthetic oligonucleotide
  Sense strand starting at position 3906 of SEQ ID NO: 1241097
gcuagugacucacugacuu

SEQ ID NO: 1246795 - RNA, 19 nt, Artificial Sequence
  Description of Artificial Sequence: Synthetic oligonucleotide
  Antisense strand to SEQ ID NO: 1246794
aagucagugagucacuagc

SEQ ID NO: 1246796 - RNA, 19 nt, Artificial Sequence
  Description of Artificial Sequence: Synthetic oligonucleotide
  Sense strand starting at position 133 of SEQ ID NO: 1241098
gggauaagugaugggcaga

SEQ ID NO: 1246797 - RNA, 19 nt, Artificial Sequence
  Description of Artificial Sequence: Synthetic oligonucleotide
  Antisense strand to SEQ ID NO: 1246796
ucugcccaucacuuauccc

SEQ ID NO: 1246798 - RNA, 19 nt, Artificial Sequence
  Description of Artificial Sequence: Synthetic oligonucleotide
  Sense strand starting at position 134 of SEQ ID NO: 1241098
ggauaagugaugggcagaa

SEQ ID NO: 1246799 - RNA, 19 nt, Artificial Sequence
  Description of Artificial Sequence: Synthetic oligonucleotide
  Antisense strand to SEQ ID NO: 1246798
uucugcccaucacuuaucc

SEQ ID NO: 1246800 - RNA, 19 nt, Artificial Sequence
  Description of Artificial Sequence: Synthetic oligonucleotide
  Sense strand starting at position 277 of SEQ ID NO: 1241098
cugcccugcuccucugaaa

SEQ ID NO: 1246801 - RNA, 19 nt, Artificial Sequence
  Description of Artificial Sequence: Synthetic oligonucleotide
  Antisense strand to SEQ ID NO: 1246800
uuucagaggagcagggcag

SEQ ID NO: 1246802 - RNA, 19 nt, Artificial Sequence
  Description of Artificial Sequence: Synthetic oligonucleotide
  Sense strand starting at position 373 of SEQ ID NO: 1241098
gcugcagaguccugcauuu

SEQ ID NO: 1246803 - RNA, 19 nt, Artificial Sequence
  Description of Artificial Sequence: Synthetic oligonucleotide
  Antisense strand to SEQ ID NO: 1246802
aaaugcaggacucugcagc

SEQ ID NO: 1246804 - RNA, 19 nt, Artificial Sequence
  Description of Artificial Sequence: Synthetic oligonucleotide
  Sense strand starting at position 438 of SEQ ID NO: 1241098
cccugcugcuccuaggaaa

SEQ ID NO: 1246805 - RNA, 19 nt, Artificial Sequence
  Description of Artificial Sequence: Synthetic oligonucleotide
  Antisense strand to SEQ ID NO: 1246804
uuuccuaggagcagcaggg

SEQ ID NO: 1246806 - RNA, 19 nt, Artificial Sequence
  Description of Artificial Sequence: Synthetic oligonucleotide
  Sense strand starting at position 508 of SEQ ID NO: 1241098
gacagucacccauguugca

SEQ ID NO: 1246807 - RNA, 19 nt, Artificial Sequence
  Description of Artificial Sequence: Synthetic oligonucleotide
  Antisense strand to SEQ ID NO: 1246806
ugcaacaugggugacuguc

SEQ ID NO: 1246808 - RNA, 19 nt, Artificial Sequence
  Description of Artificial Sequence: Synthetic oligonucleotide
  Sense strand starting at position 545 of SEQ ID NO: 1241098
ggugcugucacagagccau

SEQ ID NO: 1246809 - RNA, 19 nt, Artificial Sequence
  Description of Artificial Sequence: Synthetic oligonucleotide
  Antisense strand to SEQ ID NO: 1246808
auggcucugugacagcacc

SEQ ID NO: 1246810 - RNA, 19 nt, Artificial Sequence
  Description of Artificial Sequence: Synthetic oligonucleotide
  Sense strand starting at position 556 of SEQ ID NO: 1241098
agagccauggcaugaauga

SEQ ID NO: 1246811 - RNA, 19 nt, Artificial Sequence
  Description of Artificial Sequence: Synthetic oligonucleotide
  Antisense strand to SEQ ID NO: 1246810
ucauucaugccauggcucu

SEQ ID NO: 1246812 - RNA, 19 nt, Artificial Sequence
  Description of Artificial Sequence: Synthetic oligonucleotide
  Sense strand starting at position 557 of SEQ ID NO: 1241098
gagccauggcaugaaugau

SEQ ID NO: 1246813 - RNA, 19 nt, Artificial Sequence
  Description of Artificial Sequence: Synthetic oligonucleotide
  Antisense strand to SEQ ID NO: 1246812
aucauucaugccauggcuc

SEQ ID NO: 1246814 - RNA, 19 nt, Artificial Sequence
  Description of Artificial Sequence: Synthetic oligonucleotide
  Sense strand starting at position 742 of SEQ ID NO: 1241098
uugagugaccuguacccaa

SEQ ID NO: 1246815 - RNA, 19 nt, Artificial Sequence
  Description of Artificial Sequence: Synthetic oligonucleotide
  Antisense strand to SEQ ID NO: 1246814
uuggguacaggucacucaa

SEQ ID NO: 1246816 - RNA, 19 nt, Artificial Sequence
  Description of Artificial Sequence: Synthetic oligonucleotide
  Sense strand starting at position 1377 of SEQ ID NO: 1241098
agcuuuaaacaauggaauu

SEQ ID NO: 1246817 - RNA, 19 nt, Artificial Sequence
  Description of Artificial Sequence: Synthetic oligonucleotide
  Antisense strand to SEQ ID NO: 1246816
aauuccauuguuuaaagcu

SEQ ID NO: 1246818 - RNA, 19 nt, Artificial Sequence
  Description of Artificial Sequence: Synthetic oligonucleotide
  Sense strand starting at position 1646 of SEQ ID NO: 1241098
gcuggaguuacagauguac

SEQ ID NO: 1246819 - RNA, 19 nt, Artificial Sequence
  Description of Artificial Sequence: Synthetic oligonucleotide
  Antisense strand to SEQ ID NO: 1246818
guacaucuguaacuccagc

SEQ ID NO: 1246820 - RNA, 19 nt, Artificial Sequence
  Description of Artificial Sequence: Synthetic oligonucleotide
  Sense strand starting at position 2579 of SEQ ID NO: 1241098
gucccuaaauccuugggau

SEQ ID NO: 1246821 - RNA, 19 nt, Artificial Sequence
  Description of Artificial Sequence: Synthetic oligonucleotide
  Antisense strand to SEQ ID NO: 1246820
aucccaaggauuuagggac

SEQ ID NO: 1246822 - RNA, 19 nt, Artificial Sequence
  Description of Artificial Sequence: Synthetic oligonucleotide
  Sense strand starting at position 2580 of SEQ ID NO: 1241098
ucccuaaauccuugggaug

SEQ ID NO: 1246823 - RNA, 19 nt, Artificial Sequence
  Description of Artificial Sequence: Synthetic oligonucleotide
  Antisense strand to SEQ ID NO: 1246822
caucccaaggauuuaggga

SEQ ID NO: 1246824 - RNA, 19 nt, Artificial Sequence
  Description of Artificial Sequence: Synthetic oligonucleotide
  Sense strand starting at position 2712 of SEQ ID NO: 1241098
gcccuuuacugccauggau

SEQ ID NO: 1246825 - RNA, 19 nt, Artificial Sequence
  Description of Artificial Sequence: Synthetic oligonucleotide
  Antisense strand to SEQ ID NO: 1246824
auccauggcaguaaagggc

SEQ ID NO: 1246826 - RNA, 19 nt, Artificial Sequence
  Description of Artificial Sequence: Synthetic oligonucleotide
  Sense strand starting at position 2714 of SEQ ID NO: 1241098
ccuuuacugccauggauga

SEQ ID NO: 1246827 - RNA, 19 nt, Artificial Sequence
  Description of Artificial Sequence: Synthetic oligonucleotide
  Antisense strand to SEQ ID NO: 1246826
ucauccauggcaguaaagg

SEQ ID NO: 1246828 - RNA, 19 nt, Artificial Sequence
  Description of Artificial Sequence: Synthetic oligonucleotide
  Sense strand starting at position 3437 of SEQ ID NO: 1241098
gggugaggucugggacaga

SEQ ID NO: 1246829 - RNA, 19 nt, Artificial Sequence
  Description of Artificial Sequence: Synthetic oligonucleotide
  Antisense strand to SEQ ID NO: 1246828
ucugucccagaccucaccc

SEQ ID NO: 1246830 - RNA, 19 nt, Artificial Sequence
  Description of Artificial Sequence: Synthetic oligonucleotide
  Sense strand starting at position 3438 of SEQ ID NO: 1241098
ggugaggucugggacagaa

SEQ ID NO: 1246831 - RNA, 19 nt, Artificial Sequence
  Description of Artificial Sequence: Synthetic oligonucleotide
  Antisense strand to SEQ ID NO: 1246830
uucugucccagaccucacc

SEQ ID NO: 1246832 - RNA, 19 nt, Artificial Sequence
  Description of Artificial Sequence: Synthetic oligonucleotide
  Sense strand starting at position 3816 of SEQ ID NO: 1241098
agagaaacacccugugauc

SEQ ID NO: 1246833 - RNA, 19 nt, Artificial Sequence
  Description of Artificial Sequence: Synthetic oligonucleotide
  Antisense strand to SEQ ID NO: 1246832
gaucacaggguguuucucu

SEQ ID NO: 1246834 - RNA, 19 nt, Artificial Sequence
  Description of Artificial Sequence: Synthetic oligonucleotide
  Sense strand starting at position 3969 of SEQ ID NO: 1241098
ugggcauggccagacauaa

SEQ ID NO: 1246835 - RNA, 19 nt, Artificial Sequence
  Description of Artificial Sequence: Synthetic oligonucleotide
  Antisense strand to SEQ ID NO: 1246834
uuaugucuggccaugccca

SEQ ID NO: 1246836 - RNA, 19 nt, Artificial Sequence
  Description of Artificial Sequence: Synthetic oligonucleotide
  Sense strand starting at position 126 of SEQ ID NO: 1241099
cagggugcuugucaggaau

SEQ ID NO: 1246837 - RNA, 19 nt, Artificial Sequence
  Description of Artificial Sequence: Synthetic oligonucleotide
  Antisense strand to SEQ ID NO: 1246836
auuccugacaagcacccug

SEQ ID NO: 1246838 - RNA, 19 nt, Artificial Sequence
  Description of Artificial Sequence: Synthetic oligonucleotide
  Sense strand starting at position 129 of SEQ ID NO: 1241099
ggugcuugucaggaaugca

SEQ ID NO: 1246839 - RNA, 19 nt, Artificial Sequence
  Description of Artificial Sequence: Synthetic oligonucleotide
  Antisense strand to SEQ ID NO: 1246838
ugcauuccugacaagcacc

SEQ ID NO: 1246840 - RNA, 19 nt, Artificial Sequence
  Description of Artificial Sequence: Synthetic oligonucleotide
  Sense strand starting at position 203 of SEQ ID NO: 1241099
ucccaaggucucugaucuu

SEQ ID NO: 1246841 - RNA, 19 nt, Artificial Sequence
  Description of Artificial Sequence: Synthetic oligonucleotide
  Antisense strand to SEQ ID NO: 1246840
aagaucagagaccuuggga

SEQ ID NO: 1246842 - RNA, 19 nt, Artificial Sequence
  Description of Artificial Sequence: Synthetic oligonucleotide
  Sense strand starting at position 206 of SEQ ID NO: 1241099
caaggucucugaucuugca

SEQ ID NO: 1246843 - RNA, 19 nt, Artificial Sequence
  Description of Artificial Sequence: Synthetic oligonucleotide
  Antisense strand to SEQ ID NO: 1246842
ugcaagaucagagaccuug

SEQ ID NO: 1246844 - RNA, 19 nt, Artificial Sequence
  Description of Artificial Sequence: Synthetic oligonucleotide
  Sense strand starting at position 209 of SEQ ID NO: 1241099
ggucucugaucuugcaagu

SEQ ID NO: 1246845 - RNA, 19 nt, Artificial Sequence
  Description of Artificial Sequence: Synthetic oligonucleotide
  Antisense strand to SEQ ID NO: 1246844
acuugcaagaucagagacc

SEQ ID NO: 1246846 - RNA, 19 nt, Artificial Sequence
  Description of Artificial Sequence: Synthetic oligonucleotide
  Sense strand starting at position 256 of SEQ ID NO: 1241099
ugaccuuauucccuaagag

SEQ ID NO: 1246847 - RNA, 19 nt, Artificial Sequence
  Description of Artificial Sequence: Synthetic oligonucleotide
  Antisense strand to SEQ ID NO: 1246846
cucuuagggaauaagguca

SEQ ID NO: 1246848 - RNA, 19 nt, Artificial Sequence
  Description of Artificial Sequence: Synthetic oligonucleotide
  Sense strand starting at position 538 of SEQ ID NO: 1241099
gccagucauagugaaagag

SEQ ID NO: 1246849 - RNA, 19 nt, Artificial Sequence
  Description of Artificial Sequence: Synthetic oligonucleotide
  Antisense strand to SEQ ID NO: 1246848
cucuuucacuaugacuggc

SEQ ID NO: 1246850 - RNA, 19 nt, Artificial Sequence
  Description of Artificial Sequence: Synthetic oligonucleotide
  Sense strand starting at position 797 of SEQ ID NO: 1241099
gcagcauugucggcaccau

SEQ ID NO: 1246851 - RNA, 19 nt, Artificial Sequence
  Description of Artificial Sequence: Synthetic oligonucleotide
  Antisense strand to SEQ ID NO: 1246850
auggugccgacaaugcugc

SEQ ID NO: 1246852 - RNA, 19 nt, Artificial Sequence
  Description of Artificial Sequence: Synthetic oligonucleotide
  Sense strand starting at position 798 of SEQ ID NO: 1241099
cagcauugucggcaccauu

SEQ ID NO: 1246853 - RNA, 19 nt, Artificial Sequence
  Description of Artificial Sequence: Synthetic oligonucleotide
  Antisense strand to SEQ ID NO: 1246852
aauggugccgacaaugcug

SEQ ID NO: 1246854 - RNA, 19 nt, Artificial Sequence
  Description of Artificial Sequence: Synthetic oligonucleotide
  Sense strand starting at position 1549 of SEQ ID NO: 1241099
cgagucagccaccgagaaa

SEQ ID NO: 1246855 - RNA, 19 nt, Artificial Sequence
  Description of Artificial Sequence: Synthetic oligonucleotide
  Antisense strand to SEQ ID NO: 1246854
uuucucgguggcugacucg

SEQ ID NO: 1246856 - RNA, 19 nt, Artificial Sequence
  Description of Artificial Sequence: Synthetic oligonucleotide
  Sense strand starting at position 2207 of SEQ ID NO: 1241099
ugucgcguccgcagaauua

SEQ ID NO: 1246857 - RNA, 19 nt, Artificial Sequence
  Description of Artificial Sequence: Synthetic oligonucleotide
  Antisense strand to SEQ ID NO: 1246856
uaauucugcggacgcgaca

SEQ ID NO: 1246858 - RNA, 19 nt, Artificial Sequence
  Description of Artificial Sequence: Synthetic oligonucleotide
  Sense strand starting at position 2316 of SEQ ID NO: 1241099
cagacacuuuagucagaag

SEQ ID NO: 1246859 - RNA, 19 nt, Artificial Sequence
  Description of Artificial Sequence: Synthetic oligonucleotide
  Antisense strand to SEQ ID NO: 1246858
cuucugacuaaagugucug

SEQ ID NO: 1246860 - RNA, 19 nt, Artificial Sequence
  Description of Artificial Sequence: Synthetic oligonucleotide
  Sense strand starting at position 2565 of SEQ ID NO: 1241099
gagucauccuuucugcuga

SEQ ID NO: 1246861 - RNA, 19 nt, Artificial Sequence
  Description of Artificial Sequence: Synthetic oligonucleotide
  Antisense strand to SEQ ID NO: 1246860
ucagcagaaaggaugacuc

SEQ ID NO: 1246862 - RNA, 19 nt, Artificial Sequence
  Description of Artificial Sequence: Synthetic oligonucleotide
  Sense strand starting at position 2575 of SEQ ID NO: 1241099
uucugcugauucuugucaa

SEQ ID NO: 1246863 - RNA, 19 nt, Artificial Sequence
  Description of Artificial Sequence: Synthetic oligonucleotide
  Antisense strand to SEQ ID NO: 1246862
uugacaagaaucagcagaa

SEQ ID NO: 1246864 - RNA, 19 nt, Artificial Sequence
  Description of Artificial Sequence: Synthetic oligonucleotide
  Sense strand starting at position 2576 of SEQ ID NO: 1241099
ucugcugauucuugucaag

SEQ ID NO: 1246865 - RNA, 19 nt, Artificial Sequence
  Description of Artificial Sequence: Synthetic oligonucleotide
  Antisense strand to SEQ ID NO: 1246864
cuugacaagaaucagcaga

SEQ ID NO: 1246866 - RNA, 19 nt, Artificial Sequence
  Description of Artificial Sequence: Synthetic oligonucleotide
  Sense strand starting at position 2578 of SEQ ID NO: 1241099
ugcugauucuugucaagag

SEQ ID NO: 1246867 - RNA, 19 nt, Artificial Sequence
  Description of Artificial Sequence: Synthetic oligonucleotide
  Antisense strand to SEQ ID NO: 1246866
cucuugacaagaaucagca

SEQ ID NO: 1246868 - RNA, 19 nt, Artificial Sequence
  Description of Artificial Sequence: Synthetic oligonucleotide
  Sense strand starting at position 2579 of SEQ ID NO: 1241099
gcugauucuugucaagagc

SEQ ID NO: 1246869 - RNA, 19 nt, Artificial Sequence
  Description of Artificial Sequence: Synthetic oligonucleotide
  Antisense strand to SEQ ID NO: 1246868
gcucuugacaagaaucagc

SEQ ID NO: 1246870 - RNA, 19 nt, Artificial Sequence
  Description of Artificial Sequence: Synthetic oligonucleotide
  Sense strand starting at position 2582 of SEQ ID NO: 1241099
gauucuugucaagagccua

SEQ ID NO: 1246871 - RNA, 19 nt, Artificial Sequence
  Description of Artificial Sequence: Synthetic oligonucleotide
  Antisense strand to SEQ ID NO: 1246870
uaggcucuugacaagaauc

SEQ ID NO: 1246872 - RNA, 19 nt, Artificial Sequence
  Description of Artificial Sequence: Synthetic oligonucleotide
  Sense strand starting at position 2671 of SEQ ID NO: 1241099
caagcaagccuguaaggau

SEQ ID NO: 1246873 - RNA, 19 nt, Artificial Sequence
  Description of Artificial Sequence: Synthetic oligonucleotide
  Antisense strand to SEQ ID NO: 1246872
auccuuacaggcuugcuug

SEQ ID NO: 1246874 - RNA, 19 nt, Artificial Sequence
  Description of Artificial Sequence: Synthetic oligonucleotide
  Sense strand starting at position 2959 of SEQ ID NO: 1241099
gucucugagcguggugaga

SEQ ID NO: 1246875 - RNA, 19 nt, Artificial Sequence
  Description of Artificial Sequence: Synthetic oligonucleotide
  Antisense strand to SEQ ID NO: 1246874
ucucaccacgcucagagac

SEQ ID NO: 1246876 - RNA, 19 nt, Artificial Sequence
  Description of Artificial Sequence: Synthetic oligonucleotide
  Sense strand starting at position 2968 of SEQ ID NO: 1241099
cguggugagagcugaggaa

SEQ ID NO: 1246877 - RNA, 19 nt, Artificial Sequence
  Description of Artificial Sequence: Synthetic oligonucleotide
  Antisense strand to SEQ ID NO: 1246876
uuccucagcucucaccacg

SEQ ID NO: 1246878 - RNA, 19 nt, Artificial Sequence
  Description of Artificial Sequence: Synthetic oligonucleotide
  Sense strand starting at position 3209 of SEQ ID NO: 1241099
guucuaagaguuuggugac

SEQ ID NO: 1246879 - RNA, 19 nt, Artificial Sequence
  Description of Artificial Sequence: Synthetic oligonucleotide
  Antisense strand to SEQ ID NO: 1246878
gucaccaaacucuuagaac

SEQ ID NO: 1246880 - RNA, 19 nt, Artificial Sequence
  Description of Artificial Sequence: Synthetic oligonucleotide
  Sense strand starting at position 3270 of SEQ ID NO: 1241099
aguggaguucugcagggau

SEQ ID NO: 1246881 - RNA, 19 nt, Artificial Sequence
  Description of Artificial Sequence: Synthetic oligonucleotide
  Antisense strand to SEQ ID NO: 1246880
aucccugcagaacuccacu

SEQ ID NO: 1246882 - RNA, 19 nt, Artificial Sequence
  Description of Artificial Sequence: Synthetic oligonucleotide
  Sense strand starting at position 3273 of SEQ ID NO: 1241099
ggaguucugcagggauugu

SEQ ID NO: 1246883 - RNA, 19 nt, Artificial Sequence
  Description of Artificial Sequence: Synthetic oligonucleotide
  Antisense strand to SEQ ID NO: 1246882
acaaucccugcagaacucc

SEQ ID NO: 1246884 - RNA, 19 nt, Artificial Sequence
  Description of Artificial Sequence: Synthetic oligonucleotide
  Sense strand starting at position 3340 of SEQ ID NO: 1241099
ugaggagcugccuggcaau

SEQ ID NO: 1246885 - RNA, 19 nt, Artificial Sequence
  Description of Artificial Sequence: Synthetic oligonucleotide
  Antisense strand to SEQ ID NO: 1246884
auugccaggcagcuccuca

SEQ ID NO: 1246886 - RNA, 19 nt, Artificial Sequence
  Description of Artificial Sequence: Synthetic oligonucleotide
  Sense strand starting at position 3672 of SEQ ID NO: 1241099
acacacaugcucugucaua

SEQ ID NO: 1246887 - RNA, 19 nt, Artificial Sequence
  Description of Artificial Sequence: Synthetic oligonucleotide
  Antisense strand to SEQ ID NO: 1246886
uaugacagagcaugugugu

SEQ ID NO: 1246888 - RNA, 19 nt, Artificial Sequence
  Description of Artificial Sequence: Synthetic oligonucleotide
  Sense strand starting at position 3827 of SEQ ID NO: 1241099
ugagauauuugauacacuc

SEQ ID NO: 1246889 - RNA, 19 nt, Artificial Sequence
  Description of Artificial Sequence: Synthetic oligonucleotide
  Antisense strand to SEQ ID NO: 1246888
gaguguaucaaauaucuca

SEQ ID NO: 1246890 - RNA, 19 nt, Artificial Sequence
  Description of Artificial Sequence: Synthetic oligonucleotide
  Sense strand starting at position 3915 of SEQ ID NO: 1241099
cacgcauuccugggcucau

SEQ ID NO: 1246891 - RNA, 19 nt, Artificial Sequence
  Description of Artificial Sequence: Synthetic oligonucleotide
  Antisense strand to SEQ ID NO: 1246890
augagcccaggaaugcgug

SEQ ID NO: 1246892 - RNA, 19 nt, Artificial Sequence
  Description of Artificial Sequence: Synthetic oligonucleotide
  Sense strand starting at position 3916 of SEQ ID NO: 1241099
acgcauuccugggcucauu

SEQ ID NO: 1246893 - RNA, 19 nt, Artificial Sequence
  Description of Artificial Sequence: Synthetic oligonucleotide
  Antisense strand to SEQ ID NO: 1246892
aaugagcccaggaaugcgu

SEQ ID NO: 1246894 - RNA, 19 nt, Artificial Sequence
  Description of Artificial Sequence: Synthetic oligonucleotide
  Sense strand starting at position 3978 of SEQ ID NO: 1241099
cacgaugacucacccuaga

SEQ ID NO: 1246895 - RNA, 19 nt, Artificial Sequence
  Description of Artificial Sequence: Synthetic oligonucleotide
  Antisense strand to SEQ ID NO: 1246894
ucuagggugagucaucgug

SEQ ID NO: 1246896 - RNA, 19 nt, Artificial Sequence
  Description of Artificial Sequence: Synthetic oligonucleotide
  Sense strand starting at position 79 of SEQ ID NO: 1241100
ucgauacugcuuuacauag

SEQ ID NO: 1246897 - RNA, 19 nt, Artificial Sequence
  Description of Artificial Sequence: Synthetic oligonucleotide
  Antisense strand to SEQ ID NO: 1246896
cuauguaaagcaguaucga

SEQ ID NO: 1246898 - RNA, 19 nt, Artificial Sequence
  Description of Artificial Sequence: Synthetic oligonucleotide
  Sense strand starting at position 217 of SEQ ID NO: 1241100
agacuuaccuguccaguuu

SEQ ID NO: 1246899 - RNA, 19 nt, Artificial Sequence
  Description of Artificial Sequence: Synthetic oligonucleotide
  Antisense strand to SEQ ID NO: 1246898
aaacuggacagguaagucu

SEQ ID NO: 1246900 - RNA, 19 nt, Artificial Sequence
  Description of Artificial Sequence: Synthetic oligonucleotide
  Sense strand starting at position 466 of SEQ ID NO: 1241100
ugcucuaugcaagagaaua

SEQ ID NO: 1246901 - RNA, 19 nt, Artificial Sequence
  Description of Artificial Sequence: Synthetic oligonucleotide
  Antisense strand to SEQ ID NO: 1246900
uauucucuugcauagagca

SEQ ID NO: 1246902 - RNA, 19 nt, Artificial Sequence
  Description of Artificial Sequence: Synthetic oligonucleotide
  Sense strand starting at position 542 of SEQ ID NO: 1241100
acuccaguauguccacaaa

SEQ ID NO: 1246903 - RNA, 19 nt, Artificial Sequence
  Description of Artificial Sequence: Synthetic oligonucleotide
  Antisense strand to SEQ ID NO: 1246902
uuuguggacauacuggagu

SEQ ID NO: 1246904 - RNA, 19 nt, Artificial Sequence
  Description of Artificial Sequence: Synthetic oligonucleotide
  Sense strand starting at position 545 of SEQ ID NO: 1241100
ccaguauguccacaaacau

SEQ ID NO: 1246905 - RNA, 19 nt, Artificial Sequence
  Description of Artificial Sequence: Synthetic oligonucleotide
  Antisense strand to SEQ ID NO: 1246904
auguuuguggacauacugg

SEQ ID NO: 1246906 - RNA, 19 nt, Artificial Sequence
  Description of Artificial Sequence: Synthetic oligonucleotide
  Sense strand starting at position 730 of SEQ ID NO: 1241100
cugcacauauugcugagau

SEQ ID NO: 1246907 - RNA, 19 nt, Artificial Sequence
  Description of Artificial Sequence: Synthetic oligonucleotide
  Antisense strand to SEQ ID NO: 1246906
aucucagcaauaugugcag

SEQ ID NO: 1246908 - RNA, 19 nt, Artificial Sequence
  Description of Artificial Sequence: Synthetic oligonucleotide
  Sense strand starting at position 732 of SEQ ID NO: 1241100
gcacauauugcugagauca

SEQ ID NO: 1246909 - RNA, 19 nt, Artificial Sequence
  Description of Artificial Sequence: Synthetic oligonucleotide
  Antisense strand to SEQ ID NO: 1246908
ugaucucagcaauaugugc

SEQ ID NO: 1246910 - RNA, 19 nt, Artificial Sequence
  Description of Artificial Sequence: Synthetic oligonucleotide
  Sense strand starting at position 836 of SEQ ID NO: 1241100
gguguucugaccuaucaga

SEQ ID NO: 1246911 - RNA, 19 nt, Artificial Sequence
  Description of Artificial Sequence: Synthetic oligonucleotide
  Antisense strand to SEQ ID NO: 1246910
ucugauaggucagaacacc

SEQ ID NO: 1246912 - RNA, 19 nt, Artificial Sequence
  Description of Artificial Sequence: Synthetic oligonucleotide
  Sense strand starting at position 953 of SEQ ID NO: 1241100
ucaaguacucugcauguua

SEQ ID NO: 1246913 - RNA, 19 nt, Artificial Sequence
  Description of Artificial Sequence: Synthetic oligonucleotide
  Antisense strand to SEQ ID NO: 1246912
uaacaugcagaguacuuga

SEQ ID NO: 1246914 - RNA, 19 nt, Artificial Sequence
  Description of Artificial Sequence: Synthetic oligonucleotide
  Sense strand starting at position 1238 of SEQ ID NO: 1241100
cugauaguuccgggugaga

SEQ ID NO: 1246915 - RNA, 19 nt, Artificial Sequence
  Description of Artificial Sequence: Synthetic oligonucleotide
  Antisense strand to SEQ ID NO: 1246914
ucucacccggaacuaucag

SEQ ID NO: 1246916 - RNA, 19 nt, Artificial Sequence
  Description of Artificial Sequence: Synthetic oligonucleotide
  Sense strand starting at position 1240 of SEQ ID NO: 1241100
gauaguuccgggugagagg

SEQ ID NO: 1246917 - RNA, 19 nt, Artificial Sequence
  Description of Artificial Sequence: Synthetic oligonucleotide
  Antisense strand to SEQ ID NO: 1246916
ccucucacccggaacuauc

SEQ ID NO: 1246918 - RNA, 19 nt, Artificial Sequence
  Description of Artificial Sequence: Synthetic oligonucleotide
  Sense strand starting at position 2050 of SEQ ID NO: 1241100
guggguuccgccugauuua

SEQ ID NO: 1246919 - RNA, 19 nt, Artificial Sequence
  Description of Artificial Sequence: Synthetic oligonucleotide
  Antisense strand to SEQ ID NO: 1246918
uaaaucaggcggaacccac

SEQ ID NO: 1246920 - RNA, 19 nt, Artificial Sequence
  Description of Artificial Sequence: Synthetic oligonucleotide
  Sense strand starting at position 2252 of SEQ ID NO: 1241100
gaaggucucgcggaaagga

SEQ ID NO: 1246921 - RNA, 19 nt, Artificial Sequence
  Description of Artificial Sequence: Synthetic oligonucleotide
  Antisense strand to SEQ ID NO: 1246920
uccuuuccgcgagaccuuc

SEQ ID NO: 1246922 - RNA, 19 nt, Artificial Sequence
  Description of Artificial Sequence: Synthetic oligonucleotide
  Sense strand starting at position 2500 of SEQ ID NO: 1241100
ggcgcuguccugagaggga

SEQ ID NO: 1246923 - RNA, 19 nt, Artificial Sequence
  Description of Artificial Sequence: Synthetic oligonucleotide
  Antisense strand to SEQ ID NO: 1246922
ucccucucaggacagcgcc

SEQ ID NO: 1246924 - RNA, 19 nt, Artificial Sequence
  Description of Artificial Sequence: Synthetic oligonucleotide
  Sense strand starting at position 2763 of SEQ ID NO: 1241100
auuuaacucugccagggau

SEQ ID NO: 1246925 - RNA, 19 nt, Artificial Sequence
  Description of Artificial Sequence: Synthetic oligonucleotide
  Antisense strand to SEQ ID NO: 1246924
aucccuggcagaguuaaau

SEQ ID NO: 1246926 - RNA, 19 nt, Artificial Sequence
  Description of Artificial Sequence: Synthetic oligonucleotide
  Sense strand starting at position 2897 of SEQ ID NO: 1241100
ccuggcucggaagauaauu

SEQ ID NO: 1246927 - RNA, 19 nt, Artificial Sequence
  Description of Artificial Sequence: Synthetic oligonucleotide
  Antisense strand to SEQ ID NO: 1246926
aauuaucuuccgagccagg

SEQ ID NO: 1246928 - RNA, 19 nt, Artificial Sequence
  Description of Artificial Sequence: Synthetic oligonucleotide
  Sense strand starting at position 3051 of SEQ ID NO: 1241100
gugggcugucaguaaacaa

SEQ ID NO: 1246929 - RNA, 19 nt, Artificial Sequence
  Description of Artificial Sequence: Synthetic oligonucleotide
  Antisense strand to SEQ ID NO: 1246928
uuguuuacugacagcccac

SEQ ID NO: 1246930 - RNA, 19 nt, Artificial Sequence
  Description of Artificial Sequence: Synthetic oligonucleotide
  Sense strand starting at position 3135 of SEQ ID NO: 1241100
ugacaaucguaccugauua

SEQ ID NO: 1246931 - RNA, 19 nt, Artificial Sequence
  Description of Artificial Sequence: Synthetic oligonucleotide
  Antisense strand to SEQ ID NO: 1246930
uaaucagguacgauuguca

SEQ ID NO: 1246932 - RNA, 19 nt, Artificial Sequence
  Description of Artificial Sequence: Synthetic oligonucleotide
  Sense strand starting at position 3137 of SEQ ID NO: 1241100
acaaucguaccugauuacu

SEQ ID NO: 1246933 - RNA, 19 nt, Artificial Sequence
  Description of Artificial Sequence: Synthetic oligonucleotide
  Antisense strand to SEQ ID NO: 1246932
aguaaucagguacgauugu

SEQ ID NO: 1246934 - RNA, 19 nt, Artificial Sequence
  Description of Artificial Sequence: Synthetic oligonucleotide
  Sense strand starting at position 3140 of SEQ ID NO: 1241100
aucguaccugauuacuuua

SEQ ID NO: 1246935 - RNA, 19 nt, Artificial Sequence
  Description of Artificial Sequence: Synthetic oligonucleotide
  Antisense strand to SEQ ID NO: 1246934
uaaaguaaucagguacgau

SEQ ID NO: 1246936 - RNA, 19 nt, Artificial Sequence
  Description of Artificial Sequence: Synthetic oligonucleotide
  Sense strand starting at position 3142 of SEQ ID NO: 1241100
cguaccugauuacuuuaua

SEQ ID NO: 1246937 - RNA, 19 nt, Artificial Sequence
  Description of Artificial Sequence: Synthetic oligonucleotide
  Antisense strand to SEQ ID NO: 1246936
uauaaaguaaucagguacg

SEQ ID NO: 1246938 - RNA, 19 nt, Artificial Sequence
  Description of Artificial Sequence: Synthetic oligonucleotide
  Sense strand starting at position 3277 of SEQ ID NO: 1241100
ccagaaauccucugguaga

SEQ ID NO: 1246939 - RNA, 19 nt, Artificial Sequence
  Description of Artificial Sequence: Synthetic oligonucleotide
  Antisense strand to SEQ ID NO: 1246938
ucuaccagaggauuucugg

SEQ ID NO: 1246940 - RNA, 19 nt, Artificial Sequence
  Description of Artificial Sequence: Synthetic oligonucleotide
  Sense strand starting at position 3301 of SEQ ID NO: 1241100
guguuuguuagacacauuc

SEQ ID NO: 1246941 - RNA, 19 nt, Artificial Sequence
  Description of Artificial Sequence: Synthetic oligonucleotide
  Antisense strand to SEQ ID NO: 1246940
gaaugugucuaacaaacac

SEQ ID NO: 1246942 - RNA, 19 nt, Artificial Sequence
  Description of Artificial Sequence: Synthetic oligonucleotide
  Sense strand starting at position 3310 of SEQ ID NO: 1241100
agacacauucuaugucuau

SEQ ID NO: 1246943 - RNA, 19 nt, Artificial Sequence
  Description of Artificial Sequence: Synthetic oligonucleotide
  Antisense strand to SEQ ID NO: 1246942
auagacauagaaugugucu

SEQ ID NO: 1246944 - RNA, 19 nt, Artificial Sequence
  Description of Artificial Sequence: Synthetic oligonucleotide
  Sense strand starting at position 3319 of SEQ ID NO: 1241100
cuaugucuaucuguagaua

SEQ ID NO: 1246945 - RNA, 19 nt, Artificial Sequence
  Description of Artificial Sequence: Synthetic oligonucleotide
  Antisense strand to SEQ ID NO: 1246944
uaucuacagauagacauag

SEQ ID NO: 1246946 - RNA, 19 nt, Artificial Sequence
  Description of Artificial Sequence: Synthetic oligonucleotide
  Sense strand starting at position 3322 of SEQ ID NO: 1241100
ugucuaucuguagauaauu

SEQ ID NO: 1246947 - RNA, 19 nt, Artificial Sequence
  Description of Artificial Sequence: Synthetic oligonucleotide
  Antisense strand to SEQ ID NO: 1246946
aauuaucuacagauagaca

SEQ ID NO: 1246948 - RNA, 19 nt, Artificial Sequence
  Description of Artificial Sequence: Synthetic oligonucleotide
  Sense strand starting at position 3350 of SEQ ID NO: 1241100
aaggaaugaucucuaguuu

SEQ ID NO: 1246949 - RNA, 19 nt, Artificial Sequence
  Description of Artificial Sequence: Synthetic oligonucleotide
  Antisense strand to SEQ ID NO: 1246948
aaacuagagaucauuccuu

SEQ ID NO: 1246950 - RNA, 19 nt, Artificial Sequence
  Description of Artificial Sequence: Synthetic oligonucleotide
  Sense strand starting at position 3427 of SEQ ID NO: 1241100
ccagaaagccuggauugua

SEQ ID NO: 1246951 - RNA, 19 nt, Artificial Sequence
  Description of Artificial Sequence: Synthetic oligonucleotide
  Antisense strand to SEQ ID NO: 1246950
uacaauccaggcuuucugg

SEQ ID NO: 1246952 - RNA, 19 nt, Artificial Sequence
  Description of Artificial Sequence: Synthetic oligonucleotide
  Sense strand starting at position 3430 of SEQ ID NO: 1241100
gaaagccuggauuguaauu

SEQ ID NO: 1246953 - RNA, 19 nt, Artificial Sequence
  Description of Artificial Sequence: Synthetic oligonucleotide
  Antisense strand to SEQ ID NO: 1246952
aauuacaauccaggcuuuc

SEQ ID NO: 1246954 - RNA, 19 nt, Artificial Sequence
  Description of Artificial Sequence: Synthetic oligonucleotide
  Sense strand starting at position 3463 of SEQ ID NO: 1241100
uuaacaaaguggcuuugau

SEQ ID NO: 1246955 - RNA, 19 nt, Artificial Sequence
  Description of Artificial Sequence: Synthetic oligonucleotide
  Antisense strand to SEQ ID NO: 1246954
aucaaagccacuuuguuaa

SEQ ID NO: 1246956 - RNA, 19 nt, Artificial Sequence
  Description of Artificial Sequence: Synthetic oligonucleotide
  Sense strand starting at position 3579 of SEQ ID NO: 1241100
cagagugauuuaugaacug

SEQ ID NO: 1246957 - RNA, 19 nt, Artificial Sequence
  Description of Artificial Sequence: Synthetic oligonucleotide
  Antisense strand to SEQ ID NO: 1246956
caguucauaaaucacucug

SEQ ID NO: 1246958 - RNA, 19 nt, Artificial Sequence
  Description of Artificial Sequence: Synthetic oligonucleotide
  Sense strand starting at position 3593 of SEQ ID NO: 1241100
aacugacaugugugccaga

SEQ ID NO: 1246959 - RNA, 19 nt, Artificial Sequence
  Description of Artificial Sequence: Synthetic oligonucleotide
  Antisense strand to SEQ ID NO: 1246958
ucuggcacacaugucaguu

SEQ ID NO: 1246960 - RNA, 19 nt, Artificial Sequence
  Description of Artificial Sequence: Synthetic oligonucleotide
  Sense strand starting at position 3598 of SEQ ID NO: 1241100
acaugugugccagagacau

SEQ ID NO: 1246961 - RNA, 19 nt, Artificial Sequence
  Description of Artificial Sequence: Synthetic oligonucleotide
  Antisense strand to SEQ ID NO: 1246960
augucucuggcacacaugu

SEQ ID NO: 1246962 - RNA, 19 nt, Artificial Sequence
  Description of Artificial Sequence: Synthetic oligonucleotide
  Sense strand starting at position 3639 of SEQ ID NO: 1241100
cagcauuuguggcuacuca

SEQ ID NO: 1246963 - RNA, 19 nt, Artificial Sequence
  Description of Artificial Sequence: Synthetic oligonucleotide
  Antisense strand to SEQ ID NO: 1246962
ugaguagccacaaaugcug

SEQ ID NO: 1246964 - RNA, 19 nt, Artificial Sequence
  Description of Artificial Sequence: Synthetic oligonucleotide
  Sense strand starting at position 3752 of SEQ ID NO: 1241100
aguuacuauugaguguuaa

SEQ ID NO: 1246965 - RNA, 19 nt, Artificial Sequence
  Description of Artificial Sequence: Synthetic oligonucleotide
  Antisense strand to SEQ ID NO: 1246964
uuaacacucaauaguaacu

SEQ ID NO: 1246966 - RNA, 19 nt, Artificial Sequence
  Description of Artificial Sequence: Synthetic oligonucleotide
  Sense strand starting at position 3807 of SEQ ID NO: 1241100
cugguuuacuccucagaac

SEQ ID NO: 1246967 - RNA, 19 nt, Artificial Sequence
  Description of Artificial Sequence: Synthetic oligonucleotide
  Antisense strand to SEQ ID NO: 1246966
guucugaggaguaaaccag

SEQ ID NO: 1246968 - RNA, 19 nt, Artificial Sequence
  Description of Artificial Sequence: Synthetic oligonucleotide
  Sense strand starting at position 3832 of SEQ ID NO: 1241100
uaagguaggucaucuguua

SEQ ID NO: 1246969 - RNA, 19 nt, Artificial Sequence
  Description of Artificial Sequence: Synthetic oligonucleotide
  Antisense strand to SEQ ID NO: 1246968
uaacagaugaccuaccuua

SEQ ID NO: 1246970 - RNA, 19 nt, Artificial Sequence
  Description of Artificial Sequence: Synthetic oligonucleotide
  Sense strand starting at position 3890 of SEQ ID NO: 1241100
ucaguaugauauuccauau

SEQ ID NO: 1246971 - RNA, 19 nt, Artificial Sequence
  Description of Artificial Sequence: Synthetic oligonucleotide
  Antisense strand to SEQ ID NO: 1246970
auauggaauaucauacuga

SEQ ID NO: 1246972 - RNA, 19 nt, Artificial Sequence
  Description of Artificial Sequence: Synthetic oligonucleotide
  Sense strand starting at position 3964 of SEQ ID NO: 1241100
ccugcaacccugugagaua

SEQ ID NO: 1246973 - RNA, 19 nt, Artificial Sequence
  Description of Artificial Sequence: Synthetic oligonucleotide
  Antisense strand to SEQ ID NO: 1246972
uaucucacaggguugcagg

SEQ ID NO: 1246974 - RNA, 19 nt, Artificial Sequence
  Description of Artificial Sequence: Synthetic oligonucleotide
  Sense strand starting at position 3971 of SEQ ID NO: 1241100
cccugugagauaggauaua

SEQ ID NO: 1246975 - RNA, 19 nt, Artificial Sequence
  Description of Artificial Sequence: Synthetic oligonucleotide
  Antisense strand to SEQ ID NO: 1246974
uauauccuaucucacaggg

SEQ ID NO: 1246976 - RNA, 19 nt, Artificial Sequence
  Description of Artificial Sequence: Synthetic oligonucleotide
  Sense strand starting at position 401 of SEQ ID NO: 1241101
gguugaauuuagcagaaau

SEQ ID NO: 1246977 - RNA, 19 nt, Artificial Sequence
  Description of Artificial Sequence: Synthetic oligonucleotide
  Antisense strand to SEQ ID NO: 1246976
auuucugcuaaauucaacc

SEQ ID NO: 1246978 - RNA, 19 nt, Artificial Sequence
  Description of Artificial Sequence: Synthetic oligonucleotide
  Sense strand starting at position 781 of SEQ ID NO: 1241101
cuguuagcucguccuggua

SEQ ID NO: 1246979 - RNA, 19 nt, Artificial Sequence
  Description of Artificial Sequence: Synthetic oligonucleotide
  Antisense strand to SEQ ID NO: 1246978
uaccaggacgagcuaacag

SEQ ID NO: 1246980 - RNA, 19 nt, Artificial Sequence
  Description of Artificial Sequence: Synthetic oligonucleotide
  Sense strand starting at position 1395 of SEQ ID NO: 1241101
cgcugauuucgcucagcgu

SEQ ID NO: 1246981 - RNA, 19 nt, Artificial Sequence
  Description of Artificial Sequence: Synthetic oligonucleotide
  Antisense strand to SEQ ID NO: 1246980
acgcugagcgaaaucagcg

SEQ ID NO: 1246982 - RNA, 19 nt, Artificial Sequence
  Description of Artificial Sequence: Synthetic oligonucleotide
  Sense strand starting at position 2044 of SEQ ID NO: 1241101
ggguguccgcgcagggaua

SEQ ID NO: 1246983 - RNA, 19 nt, Artificial Sequence
  Description of Artificial Sequence: Synthetic oligonucleotide
  Antisense strand to SEQ ID NO: 1246982
uaucccugcgcggacaccc

SEQ ID NO: 1246984 - RNA, 19 nt, Artificial Sequence
  Description of Artificial Sequence: Synthetic oligonucleotide
  Sense strand starting at position 2210 of SEQ ID NO: 1241101
ggacucuuugucugcaguu

SEQ ID NO: 1246985 - RNA, 19 nt, Artificial Sequence
  Description of Artificial Sequence: Synthetic oligonucleotide
  Antisense strand to SEQ ID NO: 1246984
aacugcagacaaagagucc

SEQ ID NO: 1246986 - RNA, 19 nt, Artificial Sequence
  Description of Artificial Sequence: Synthetic oligonucleotide
  Sense strand starting at position 2282 of SEQ ID NO: 1241101
ggaggcauguucugcgcua

SEQ ID NO: 1246987 - RNA, 19 nt, Artificial Sequence
  Description of Artificial Sequence: Synthetic oligonucleotide
  Antisense strand to SEQ ID NO: 1246986
uagcgcagaacaugccucc

SEQ ID NO: 1246988 - RNA, 19 nt, Artificial Sequence
  Description of Artificial Sequence: Synthetic oligonucleotide
  Sense strand starting at position 2295 of SEQ ID NO: 1241101
gcgcuagcaccgugacuuu

SEQ ID NO: 1246989 - RNA, 19 nt, Artificial Sequence
  Description of Artificial Sequence: Synthetic oligonucleotide
  Antisense strand to SEQ ID NO: 1246988
aaagucacggugcuagcgc

SEQ ID NO: 1246990 - RNA, 19 nt, Artificial Sequence
  Description of Artificial Sequence: Synthetic oligonucleotide
  Sense strand starting at position 2427 of SEQ ID NO: 1241101
gguucagagacguguacgu

SEQ ID NO: 1246991 - RNA, 19 nt, Artificial Sequence
  Description of Artificial Sequence: Synthetic oligonucleotide
  Antisense strand to SEQ ID NO: 1246990
acguacacgucucugaacc

SEQ ID NO: 1246992 - RNA, 19 nt, Artificial Sequence
  Description of Artificial Sequence: Synthetic oligonucleotide
  Sense strand starting at position 2429 of SEQ ID NO: 1241101
uucagagacguguacguaa

SEQ ID NO: 1246993 - RNA, 19 nt, Artificial Sequence
  Description of Artificial Sequence: Synthetic oligonucleotide
  Antisense strand to SEQ ID NO: 1246992
uuacguacacgucucugaa

SEQ ID NO: 1246994 - RNA, 19 nt, Artificial Sequence
  Description of Artificial Sequence: Synthetic oligonucleotide
  Sense strand starting at position 2432 of SEQ ID NO: 1241101
agagacguguacguaaaga

SEQ ID NO: 1246995 - RNA, 19 nt, Artificial Sequence
  Description of Artificial Sequence: Synthetic oligonucleotide
  Antisense strand to SEQ ID NO: 1246994
ucuuuacguacacgucucu

SEQ ID NO: 1246996 - RNA, 19 nt, Artificial Sequence
  Description of Artificial Sequence: Synthetic oligonucleotide
  Sense strand starting at position 2581 of SEQ ID NO: 1241101
ggacaagcuuguccagaga

SEQ ID NO: 1246997 - RNA, 19 nt, Artificial Sequence
  Description of Artificial Sequence: Synthetic oligonucleotide
  Antisense strand to SEQ ID NO: 1246996
ucucuggacaagcuugucc

SEQ ID NO: 1246998 - RNA, 19 nt, Artificial Sequence
  Description of Artificial Sequence: Synthetic oligonucleotide
  Sense strand starting at position 2698 of SEQ ID NO: 1241101
ugggacuaaucucuacuuu

SEQ ID NO: 1246999 - RNA, 19 nt, Artificial Sequence
  Description of Artificial Sequence: Synthetic oligonucleotide
  Antisense strand to SEQ ID NO: 1246998
aaaguagagauuaguccca

SEQ ID NO: 1247000 - RNA, 19 nt, Artificial Sequence
  Description of Artificial Sequence: Synthetic oligonucleotide
  Sense strand starting at position 2732 of SEQ ID NO: 1241101
agauauaguguguauguag

SEQ ID NO: 1247001 - RNA, 19 nt, Artificial Sequence
  Description of Artificial Sequence: Synthetic oligonucleotide
  Antisense strand to SEQ ID NO: 1247000
cuacauacacacuauaucu

SEQ ID NO: 1247002 - RNA, 19 nt, Artificial Sequence
  Description of Artificial Sequence: Synthetic oligonucleotide
  Sense strand starting at position 2739 of SEQ ID NO: 1241101
guguguauguagaagcagu

SEQ ID NO: 1247003 - RNA, 19 nt, Artificial Sequence
  Description of Artificial Sequence: Synthetic oligonucleotide
  Antisense strand to SEQ ID NO: 1247002
acugcuucuacauacacac

SEQ ID NO: 1247004 - RNA, 19 nt, Artificial Sequence
  Description of Artificial Sequence: Synthetic oligonucleotide
  Sense strand starting at position 2780 of SEQ ID NO: 1241101
ugggacuaaucucuaccuu

SEQ ID NO: 1247005 - RNA, 19 nt, Artificial Sequence
  Description of Artificial Sequence: Synthetic oligonucleotide
  Antisense strand to SEQ ID NO: 1247004
aagguagagauuaguccca

SEQ ID NO: 1247006 - RNA, 19 nt, Artificial Sequence
  Description of Artificial Sequence: Synthetic oligonucleotide
  Sense strand starting at position 2833 of SEQ ID NO: 1241101
gguguugggaaaugagauu

SEQ ID NO: 1247007 - RNA, 19 nt, Artificial Sequence
  Description of Artificial Sequence: Synthetic oligonucleotide
  Antisense strand to SEQ ID NO: 1247006
aaucucauuucccaacacc

SEQ ID NO: 1247008 - RNA, 19 nt, Artificial Sequence
  Description of Artificial Sequence: Synthetic oligonucleotide
  Sense strand starting at position 2931 of SEQ ID NO: 1241101
acagaagacuggugauaca

SEQ ID NO: 1247009 - RNA, 19 nt, Artificial Sequence
  Description of Artificial Sequence: Synthetic oligonucleotide
  Antisense strand to SEQ ID NO: 1247008
uguaucaccagucuucugu

SEQ ID NO: 1247010 - RNA, 19 nt, Artificial Sequence
  Description of Artificial Sequence: Synthetic oligonucleotide
  Sense strand starting at position 2941 of SEQ ID NO: 1241101
ggugauacagaguaaguau

SEQ ID NO: 1247011 - RNA, 19 nt, Artificial Sequence
  Description of Artificial Sequence: Synthetic oligonucleotide
  Antisense strand to SEQ ID NO: 1247010
auacuuacucuguaucacc

SEQ ID NO: 1247012 - RNA, 19 nt, Artificial Sequence
  Description of Artificial Sequence: Synthetic oligonucleotide
  Sense strand starting at position 2971 of SEQ ID NO: 1241101
aaagaaaugccguguagag

SEQ ID NO: 1247013 - RNA, 19 nt, Artificial Sequence
  Description of Artificial Sequence: Synthetic oligonucleotide
  Antisense strand to SEQ ID NO: 1247012
cucuacacggcauuucuuu

SEQ ID NO: 1247014 - RNA, 19 nt, Artificial Sequence
  Description of Artificial Sequence: Synthetic oligonucleotide
  Sense strand starting at position 2973 of SEQ ID NO: 1241101
agaaaugccguguagagga

SEQ ID NO: 1247015 - RNA, 19 nt, Artificial Sequence
  Description of Artificial Sequence: Synthetic oligonucleotide
  Antisense strand to SEQ ID NO: 1247014
uccucuacacggcauuucu

SEQ ID NO: 1247016 - RNA, 19 nt, Artificial Sequence
  Description of Artificial Sequence: Synthetic oligonucleotide
  Sense strand starting at position 3022 of SEQ ID NO: 1241101
agaggcugauauugacuau

SEQ ID NO: 1247017 - RNA, 19 nt, Artificial Sequence
  Description of Artificial Sequence: Synthetic oligonucleotide
  Antisense strand to SEQ ID NO: 1247016
auagucaauaucagccucu

SEQ ID NO: 1247018 - RNA, 19 nt, Artificial Sequence
  Description of Artificial Sequence: Synthetic oligonucleotide
  Sense strand starting at position 3863 of SEQ ID NO: 1241101
gcaaacaagucaugcauau

SEQ ID NO: 1247019 - RNA, 19 nt, Artificial Sequence
  Description of Artificial Sequence: Synthetic oligonucleotide
  Antisense strand to SEQ ID NO: 1247018
auaugcaugacuuguuugc

SEQ ID NO: 1247020 - RNA, 19 nt, Artificial Sequence
  Description of Artificial Sequence: Synthetic oligonucleotide
  Sense strand starting at position 3947 of SEQ ID NO: 1241101
aaacgagguuaauaucuuu

SEQ ID NO: 1247021 - RNA, 19 nt, Artificial Sequence
  Description of Artificial Sequence: Synthetic oligonucleotide
  Antisense strand to SEQ ID NO: 1247020
aaagauauuaaccucguuu

SEQ ID NO: 1247022 - RNA, 19 nt, Artificial Sequence
  Description of Artificial Sequence: Synthetic oligonucleotide
  Sense strand starting at position 4 of SEQ ID NO: 1241102
uauguaaugucggugaaga

SEQ ID NO: 1247023 - RNA, 19 nt, Artificial Sequence
  Description of Artificial Sequence: Synthetic oligonucleotide
  Antisense strand to SEQ ID NO: 1247022
ucuucaccgacauuacaua

SEQ ID NO: 1247024 - RNA, 19 nt, Artificial Sequence
  Description of Artificial Sequence: Synthetic oligonucleotide
  Sense strand starting at position 5 of SEQ ID NO: 1241102
auguaaugucggugaagaa

SEQ ID NO: 1247025 - RNA, 19 nt, Artificial Sequence
  Description of Artificial Sequence: Synthetic oligonucleotide
  Antisense strand to SEQ ID NO: 1247024
uucuucaccgacauuacau

SEQ ID NO: 1247026 - RNA, 19 nt, Artificial Sequence
  Description of Artificial Sequence: Synthetic oligonucleotide
  Sense strand starting at position 6 of SEQ ID NO: 1241102
uguaaugucggugaagaag

SEQ ID NO: 1247027 - RNA, 19 nt, Artificial Sequence
  Description of Artificial Sequence: Synthetic oligonucleotide
  Antisense strand to SEQ ID NO: 1247026
cuucuucaccgacauuaca

SEQ ID NO: 1247028 - RNA, 19 nt, Artificial Sequence
  Description of Artificial Sequence: Synthetic oligonucleotide
  Sense strand starting at position 162 of SEQ ID NO: 1241102
uaucacaaucuguggugau

SEQ ID NO: 1247029 - RNA, 19 nt, Artificial Sequence
  Description of Artificial Sequence: Synthetic oligonucleotide
  Antisense strand to SEQ ID NO: 1247028
aucaccacagauugugaua

SEQ ID NO: 1247030 - RNA, 19 nt, Artificial Sequence
  Description of Artificial Sequence: Synthetic oligonucleotide
  Sense strand starting at position 241 of SEQ ID NO: 1241102
aggcuaccaugauugagaa

SEQ ID NO: 1247031 - RNA, 19 nt, Artificial Sequence
  Description of Artificial Sequence: Synthetic oligonucleotide
  Antisense strand to SEQ ID NO: 1247030
uucucaaucaugguagccu

SEQ ID NO: 1247032 - RNA, 19 nt, Artificial Sequence
  Description of Artificial Sequence: Synthetic oligonucleotide
  Sense strand starting at position 242 of SEQ ID NO: 1241102
ggcuaccaugauugagaau

SEQ ID NO: 1247033 - RNA, 19 nt, Artificial Sequence
  Description of Artificial Sequence: Synthetic oligonucleotide
  Antisense strand to SEQ ID NO: 1247032
auucucaaucaugguagcc

SEQ ID NO: 1247034 - RNA, 19 nt, Artificial Sequence
  Description of Artificial Sequence: Synthetic oligonucleotide
  Sense strand starting at position 311 of SEQ ID NO: 1241102
aagugauucuaaccaguag

SEQ ID NO: 1247035 - RNA, 19 nt, Artificial Sequence
  Description of Artificial Sequence: Synthetic oligonucleotide
  Antisense strand to SEQ ID NO: 1247034
cuacugguuagaaucacuu

SEQ ID NO: 1247036 - RNA, 19 nt, Artificial Sequence
  Description of Artificial Sequence: Synthetic oligonucleotide
  Sense strand starting at position 315 of SEQ ID NO: 1241102
gauucuaaccaguagcaga

SEQ ID NO: 1247037 - RNA, 19 nt, Artificial Sequence
  Description of Artificial Sequence: Synthetic oligonucleotide
  Antisense strand to SEQ ID NO: 1247036
ucugcuacugguuagaauc

SEQ ID NO: 1247038 - RNA, 19 nt, Artificial Sequence
  Description of Artificial Sequence: Synthetic oligonucleotide
  Sense strand starting at position 892 of SEQ ID NO: 1241102
aucauuccacuuugucaga

SEQ ID NO: 1247039 - RNA, 19 nt, Artificial Sequence
  Description of Artificial Sequence: Synthetic oligonucleotide
  Antisense strand to SEQ ID NO: 1247038
ucugacaaaguggaaugau

SEQ ID NO: 1247040 - RNA, 19 nt, Artificial Sequence
  Description of Artificial Sequence: Synthetic oligonucleotide
  Sense strand starting at position 1071 of SEQ ID NO: 1241102
gagggaagccacuguaaac

SEQ ID NO: 1247041 - RNA, 19 nt, Artificial Sequence
  Description of Artificial Sequence: Synthetic oligonucleotide
  Antisense strand to SEQ ID NO: 1247040
guuuacaguggcuucccuc

SEQ ID NO: 1247042 - RNA, 19 nt, Artificial Sequence
  Description of Artificial Sequence: Synthetic oligonucleotide
  Sense strand starting at position 1198 of SEQ ID NO: 1241102
cagugagacuucucagcug

SEQ ID NO: 1247043 - RNA, 19 nt, Artificial Sequence
  Description of Artificial Sequence: Synthetic oligonucleotide
  Antisense strand to SEQ ID NO: 1247042
cagcugagaagucucacug

SEQ ID NO: 1247044 - RNA, 19 nt, Artificial Sequence
  Description of Artificial Sequence: Synthetic oligonucleotide
  Sense strand starting at position 1201 of SEQ ID NO: 1241102
ugagacuucucagcugaaa

SEQ ID NO: 1247045 - RNA, 19 nt, Artificial Sequence
  Description of Artificial Sequence: Synthetic oligonucleotide
  Antisense strand to SEQ ID NO: 1247044
uuucagcugagaagucuca

SEQ ID NO: 1247046 - RNA, 19 nt, Artificial Sequence
  Description of Artificial Sequence: Synthetic oligonucleotide
  Sense strand starting at position 1335 of SEQ ID NO: 1241102
cugagaaugauggguggua

SEQ ID NO: 1247047 - RNA, 19 nt, Artificial Sequence
  Description of Artificial Sequence: Synthetic oligonucleotide
  Antisense strand to SEQ ID NO: 1247046
uaccacccaucauucucag

SEQ ID NO: 1247048 - RNA, 19 nt, Artificial Sequence
  Description of Artificial Sequence: Synthetic oligonucleotide
  Sense strand starting at position 1337 of SEQ ID NO: 1241102
gagaaugaugggugguacu

SEQ ID NO: 1247049 - RNA, 19 nt, Artificial Sequence
  Description of Artificial Sequence: Synthetic oligonucleotide
  Antisense strand to SEQ ID NO: 1247048
aguaccacccaucauucuc

SEQ ID NO: 1247050 - RNA, 19 nt, Artificial Sequence
  Description of Artificial Sequence: Synthetic oligonucleotide
  Sense strand starting at position 1479 of SEQ ID NO: 1241102
caaaguucgcccuagaaac

SEQ ID NO: 1247051 - RNA, 19 nt, Artificial Sequence
  Description of Artificial Sequence: Synthetic oligonucleotide
  Antisense strand to SEQ ID NO: 1247050
guuucuagggcgaacuuug

SEQ ID NO: 1247052 - RNA, 19 nt, Artificial Sequence
  Description of Artificial Sequence: Synthetic oligonucleotide
  Sense strand starting at position 1842 of SEQ ID NO: 1241102
ggugcuauaugauuugcau

SEQ ID NO: 1247053 - RNA, 19 nt, Artificial Sequence
  Description of Artificial Sequence: Synthetic oligonucleotide
  Antisense strand to SEQ ID NO: 1247052
augcaaaucauauagcacc

SEQ ID NO: 1247054 - RNA, 19 nt, Artificial Sequence
  Description of Artificial Sequence: Synthetic oligonucleotide
  Sense strand starting at position 1846 of SEQ ID NO: 1241102
cuauaugauuugcauagag

SEQ ID NO: 1247055 - RNA, 19 nt, Artificial Sequence
  Description of Artificial Sequence: Synthetic oligonucleotide
  Antisense strand to SEQ ID NO: 1247054
cucuaugcaaaucauauag

SEQ ID NO: 1247056 - RNA, 19 nt, Artificial Sequence
  Description of Artificial Sequence: Synthetic oligonucleotide
  Sense strand starting at position 1920 of SEQ ID NO: 1241102
uuugccugagcauaucuau

SEQ ID NO: 1247057 - RNA, 19 nt, Artificial Sequence
  Description of Artificial Sequence: Synthetic oligonucleotide
  Antisense strand to SEQ ID NO: 1247056
auagauaugcucaggcaaa

SEQ ID NO: 1247058 - RNA, 19 nt, Artificial Sequence
  Description of Artificial Sequence: Synthetic oligonucleotide
  Sense strand starting at position 1956 of SEQ ID NO: 1241102
gucuccuuccagggacaga

SEQ ID NO: 1247059 - RNA, 19 nt, Artificial Sequence
  Description of Artificial Sequence: Synthetic oligonucleotide
  Antisense strand to SEQ ID NO: 1247058
ucugucccuggaaggagac

SEQ ID NO: 1247060 - RNA, 19 nt, Artificial Sequence
  Description of Artificial Sequence: Synthetic oligonucleotide
  Sense strand starting at position 1982 of SEQ ID NO: 1241102
gaggucaggacuggaguua

SEQ ID NO: 1247061 - RNA, 19 nt, Artificial Sequence
  Description of Artificial Sequence: Synthetic oligonucleotide
  Antisense strand to SEQ ID NO: 1247060
uaacuccaguccugaccuc

SEQ ID NO: 1247062 - RNA, 19 nt, Artificial Sequence
  Description of Artificial Sequence: Synthetic oligonucleotide
  Sense strand starting at position 2008 of SEQ ID NO: 1241102
aggacaaagugcuuuguuu

SEQ ID NO: 1247063 - RNA, 19 nt, Artificial Sequence
  Description of Artificial Sequence: Synthetic oligonucleotide
  Antisense strand to SEQ ID NO: 1247062
aaacaaagcacuuuguccu

SEQ ID NO: 1247064 - RNA, 19 nt, Artificial Sequence
  Description of Artificial Sequence: Synthetic oligonucleotide
  Sense strand starting at position 2012 of SEQ ID NO: 1241102
caaagugcuuuguuuggaa

SEQ ID NO: 1247065 - RNA, 19 nt, Artificial Sequence
  Description of Artificial Sequence: Synthetic oligonucleotide
  Antisense strand to SEQ ID NO: 1247064
uuccaaacaaagcacuuug

SEQ ID NO: 1247066 - RNA, 19 nt, Artificial Sequence
  Description of Artificial Sequence: Synthetic oligonucleotide
  Sense strand starting at position 2114 of SEQ ID NO: 1241102
ccaggaucuucuuccagca

SEQ ID NO: 1247067 - RNA, 19 nt, Artificial Sequence
  Description of Artificial Sequence: Synthetic oligonucleotide
  Antisense strand to SEQ ID NO: 1247066
ugcuggaagaagauccugg

SEQ ID NO: 1247068 - RNA, 19 nt, Artificial Sequence
  Description of Artificial Sequence: Synthetic oligonucleotide
  Sense strand starting at position 2177 of SEQ ID NO: 1241102
cucccaggugucuacauua

SEQ ID NO: 1247069 - RNA, 19 nt, Artificial Sequence
  Description of Artificial Sequence: Synthetic oligonucleotide
  Antisense strand to SEQ ID NO: 1247068
uaauguagacaccugggag

SEQ ID NO: 1247070 - RNA, 19 nt, Artificial Sequence
  Description of Artificial Sequence: Synthetic oligonucleotide
  Sense strand starting at position 2184 of SEQ ID NO: 1241102
gugucuacauuaucaggga

SEQ ID NO: 1247071 - RNA, 19 nt, Artificial Sequence
  Description of Artificial Sequence: Synthetic oligonucleotide
  Antisense strand to SEQ ID NO: 1247070
ucccugauaauguagacac

SEQ ID NO: 1247072 - RNA, 19 nt, Artificial Sequence
  Description of Artificial Sequence: Synthetic oligonucleotide
  Sense strand starting at position 2481 of SEQ ID NO: 1241102
agguuuagcaaaggaauca

SEQ ID NO: 1247073 - RNA, 19 nt, Artificial Sequence
  Description of Artificial Sequence: Synthetic oligonucleotide
  Antisense strand to SEQ ID NO: 1247072
ugauuccuuugcuaaaccu

SEQ ID NO: 1247074 - RNA, 19 nt, Artificial Sequence
  Description of Artificial Sequence: Synthetic oligonucleotide
  Sense strand starting at position 3009 of SEQ ID NO: 1241102
cugcucugugagcaaauga

SEQ ID NO: 1247075 - RNA, 19 nt, Artificial Sequence
  Description of Artificial Sequence: Synthetic oligonucleotide
  Antisense strand to SEQ ID NO: 1247074
ucauuugcucacagagcag

SEQ ID NO: 1247076 - RNA, 19 nt, Artificial Sequence
  Description of Artificial Sequence: Synthetic oligonucleotide
  Sense strand starting at position 3212 of SEQ ID NO: 1241102
gauacaggugccugagaag

SEQ ID NO: 1247077 - RNA, 19 nt, Artificial Sequence
  Description of Artificial Sequence: Synthetic oligonucleotide
  Antisense strand to SEQ ID NO: 1247076
cuucucaggcaccuguauc

SEQ ID NO: 1247078 - RNA, 19 nt, Artificial Sequence
  Description of Artificial Sequence: Synthetic oligonucleotide
  Sense strand starting at position 3335 of SEQ ID NO: 1241102
gcucccuucugaguagaga

SEQ ID NO: 1247079 - RNA, 19 nt, Artificial Sequence
  Description of Artificial Sequence: Synthetic oligonucleotide
  Antisense strand to SEQ ID NO: 1247078
ucucuacucagaagggagc

SEQ ID NO: 1247080 - RNA, 19 nt, Artificial Sequence
  Description of Artificial Sequence: Synthetic oligonucleotide
  Sense strand starting at position 3378 of SEQ ID NO: 1241102
aagaucuuggcugagcaga

SEQ ID NO: 1247081 - RNA, 19 nt, Artificial Sequence
  Description of Artificial Sequence: Synthetic oligonucleotide
  Antisense strand to SEQ ID NO: 1247080
ucugcucagccaagaucuu

SEQ ID NO: 1247082 - RNA, 19 nt, Artificial Sequence
  Description of Artificial Sequence: Synthetic oligonucleotide
  Sense strand starting at position 3494 of SEQ ID NO: 1241102
aagauauggucccuggcau

SEQ ID NO: 1247083 - RNA, 19 nt, Artificial Sequence
  Description of Artificial Sequence: Synthetic oligonucleotide
  Antisense strand to SEQ ID NO: 1247082
augccagggaccauaucuu

SEQ ID NO: 1247084 - RNA, 19 nt, Artificial Sequence
  Description of Artificial Sequence: Synthetic oligonucleotide
  Sense strand starting at position 3495 of SEQ ID NO: 1241102
agauauggucccuggcauu

SEQ ID NO: 1247085 - RNA, 19 nt, Artificial Sequence
  Description of Artificial Sequence: Synthetic oligonucleotide
  Antisense strand to SEQ ID NO: 1247084
aaugccagggaccauaucu

SEQ ID NO: 1247086 - RNA, 19 nt, Artificial Sequence
  Description of Artificial Sequence: Synthetic oligonucleotide
  Sense strand starting at position 3650 of SEQ ID NO: 1241102
gcaggcuaggcccagaaau

SEQ ID NO: 1247087 - RNA, 19 nt, Artificial Sequence
  Description of Artificial Sequence: Synthetic oligonucleotide
  Antisense strand to SEQ ID NO: 1247086
auuucugggccuagccugc

SEQ ID NO: 1247088 - RNA, 19 nt, Artificial Sequence
  Description of Artificial Sequence: Synthetic oligonucleotide
  Sense strand starting at position 3662 of SEQ ID NO: 1241102
cagaaaucgucucugggac

SEQ ID NO: 1247089 - RNA, 19 nt, Artificial Sequence
  Description of Artificial Sequence: Synthetic oligonucleotide
  Antisense strand to SEQ ID NO: 1247088
gucccagagacgauuucug

SEQ ID NO: 1247090 - RNA, 19 nt, Artificial Sequence
  Description of Artificial Sequence: Synthetic oligonucleotide
  Sense strand starting at position 3663 of SEQ ID NO: 1241102
agaaaucgucucugggacu

SEQ ID NO: 1247091 - RNA, 19 nt, Artificial Sequence
  Description of Artificial Sequence: Synthetic oligonucleotide
  Antisense strand to SEQ ID NO: 1247090
agucccagagacgauuucu

SEQ ID NO: 1247092 - RNA, 19 nt, Artificial Sequence
  Description of Artificial Sequence: Synthetic oligonucleotide
  Sense strand starting at position 3682 of SEQ ID NO: 1241102
ucaguuucccaucagucaa

SEQ ID NO: 1247093 - RNA, 19 nt, Artificial Sequence
  Description of Artificial Sequence: Synthetic oligonucleotide
  Antisense strand to SEQ ID NO: 1247092
uugacugaugggaaacuga

SEQ ID NO: 1247094 - RNA, 19 nt, Artificial Sequence
  Description of Artificial Sequence: Synthetic oligonucleotide
  Sense strand starting at position 3737 of SEQ ID NO: 1241102
gcagacuuccaaggaugga

SEQ ID NO: 1247095 - RNA, 19 nt, Artificial Sequence
  Description of Artificial Sequence: Synthetic oligonucleotide
  Antisense strand to SEQ ID NO: 1247094
uccauccuuggaagucugc

SEQ ID NO: 1247096 - RNA, 19 nt, Artificial Sequence
  Description of Artificial Sequence: Synthetic oligonucleotide
  Sense strand starting at position 3759 of SEQ ID NO: 1241102
aaggaucuggcuuggcaga

SEQ ID NO: 1247097 - RNA, 19 nt, Artificial Sequence
  Description of Artificial Sequence: Synthetic oligonucleotide
  Antisense strand to SEQ ID NO: 1247096
ucugccaagccagauccuu

SEQ ID NO: 1247098 - RNA, 19 nt, Artificial Sequence
  Description of Artificial Sequence: Synthetic oligonucleotide
  Sense strand starting at position 3794 of SEQ ID NO: 1241102
ggaccaugugagcaugauu

SEQ ID NO: 1247099 - RNA, 19 nt, Artificial Sequence
  Description of Artificial Sequence: Synthetic oligonucleotide
  Antisense strand to SEQ ID NO: 1247098
aaucaugcucacauggucc

SEQ ID NO: 1247100 - RNA, 19 nt, Artificial Sequence
  Description of Artificial Sequence: Synthetic oligonucleotide
  Sense strand starting at position 3842 of SEQ ID NO: 1241102
ggguguguuccaggaacca

SEQ ID NO: 1247101 - RNA, 19 nt, Artificial Sequence
  Description of Artificial Sequence: Synthetic oligonucleotide
  Antisense strand to SEQ ID NO: 1247100
ugguuccuggaacacaccc

SEQ ID NO: 1247102 - RNA, 19 nt, Artificial Sequence
  Description of Artificial Sequence: Synthetic oligonucleotide
  Sense strand starting at position 306 of SEQ ID NO: 1241103
gaugguacacuggguuaaa

SEQ ID NO: 1247103 - RNA, 19 nt, Artificial Sequence
  Description of Artificial Sequence: Synthetic oligonucleotide
  Antisense strand to SEQ ID NO: 1247102
uuuaacccaguguaccauc

SEQ ID NO: 1247104 - RNA, 19 nt, Artificial Sequence
  Description of Artificial Sequence: Synthetic oligonucleotide
  Sense strand starting at position 307 of SEQ ID NO: 1241103
augguacacuggguuaaau

SEQ ID NO: 1247105 - RNA, 19 nt, Artificial Sequence
  Description of Artificial Sequence: Synthetic oligonucleotide
  Antisense strand to SEQ ID NO: 1247104
auuuaacccaguguaccau

SEQ ID NO: 1247106 - RNA, 19 nt, Artificial Sequence
  Description of Artificial Sequence: Synthetic oligonucleotide
  Sense strand starting at position 434 of SEQ ID NO: 1241103
uagggugaguccucaucca

SEQ ID NO: 1247107 - RNA, 19 nt, Artificial Sequence
  Description of Artificial Sequence: Synthetic oligonucleotide
  Antisense strand to SEQ ID NO: 1247106
uggaugaggacucacccua

SEQ ID NO: 1247108 - RNA, 19 nt, Artificial Sequence
  Description of Artificial Sequence: Synthetic oligonucleotide
  Sense strand starting at position 557 of SEQ ID NO: 1241103
ugccaagaauuauuggcaa

SEQ ID NO: 1247109 - RNA, 19 nt, Artificial Sequence
  Description of Artificial Sequence: Synthetic oligonucleotide
  Antisense strand to SEQ ID NO: 1247108
uugccaauaauucuuggca

SEQ ID NO: 1247110 - RNA, 19 nt, Artificial Sequence
  Description of Artificial Sequence: Synthetic oligonucleotide
  Sense strand starting at position 617 of SEQ ID NO: 1241103
uggagcuuccaguagaaac

SEQ ID NO: 1247111 - RNA, 19 nt, Artificial Sequence
  Description of Artificial Sequence: Synthetic oligonucleotide
  Antisense strand to SEQ ID NO: 1247110
guuucuacuggaagcucca

SEQ ID NO: 1247112 - RNA, 19 nt, Artificial Sequence
  Description of Artificial Sequence: Synthetic oligonucleotide
  Sense strand starting at position 700 of SEQ ID NO: 1241103
uuuauaaggucauccaguu

SEQ ID NO: 1247113 - RNA, 19 nt, Artificial Sequence
  Description of Artificial Sequence: Synthetic oligonucleotide
  Antisense strand to SEQ ID NO: 1247112
aacuggaugaccuuauaaa

SEQ ID NO: 1247114 - RNA, 19 nt, Artificial Sequence
  Description of Artificial Sequence: Synthetic oligonucleotide
  Sense strand starting at position 720 of SEQ ID NO: 1241103
guggcaauugguuaccaca

SEQ ID NO: 1247115 - RNA, 19 nt, Artificial Sequence
  Description of Artificial Sequence: Synthetic oligonucleotide
  Antisense strand to SEQ ID NO: 1247114
ugugguaaccaauugccac

SEQ ID NO: 1247116 - RNA, 19 nt, Artificial Sequence
  Description of Artificial Sequence: Synthetic oligonucleotide
  Sense strand starting at position 755 of SEQ ID NO: 1241103
acagauuguacguacugua

SEQ ID NO: 1247117 - RNA, 19 nt, Artificial Sequence
  Description of Artificial Sequence: Synthetic oligonucleotide
  Antisense strand to SEQ ID NO: 1247116
uacaguacguacaaucugu

SEQ ID NO: 1247118 - RNA, 19 nt, Artificial Sequence
  Description of Artificial Sequence: Synthetic oligonucleotide
  Sense strand starting at position 768 of SEQ ID NO: 1241103
acuguagccucauccuauu

SEQ ID NO: 1247119 - RNA, 19 nt, Artificial Sequence
  Description of Artificial Sequence: Synthetic oligonucleotide
  Antisense strand to SEQ ID NO: 1247118
aauaggaugaggcuacagu

SEQ ID NO: 1247120 - RNA, 19 nt, Artificial Sequence
  Description of Artificial Sequence: Synthetic oligonucleotide
  Sense strand starting at position 788 of SEQ ID NO: 1241103
uaagcagauuuguccuguu

SEQ ID NO: 1247121 - RNA, 19 nt, Artificial Sequence
  Description of Artificial Sequence: Synthetic oligonucleotide
  Antisense strand to SEQ ID NO: 1247120
aacaggacaaaucugcuua

SEQ ID NO: 1247122 - RNA, 19 nt, Artificial Sequence
  Description of Artificial Sequence: Synthetic oligonucleotide
  Sense strand starting at position 795 of SEQ ID NO: 1241103
auuuguccuguucgaaagu

SEQ ID NO: 1247123 - RNA, 19 nt, Artificial Sequence
  Description of Artificial Sequence: Synthetic oligonucleotide
  Antisense strand to SEQ ID NO: 1247122
acuuucgaacaggacaaau

SEQ ID NO: 1247124 - RNA, 19 nt, Artificial Sequence
  Description of Artificial Sequence: Synthetic oligonucleotide
  Sense strand starting at position 813 of SEQ ID NO: 1241103
ugcagucauuagccucaga

SEQ ID NO: 1247125 - RNA, 19 nt, Artificial Sequence
  Description of Artificial Sequence: Synthetic oligonucleotide
  Antisense strand to SEQ ID NO: 1247124
ucugaggcuaaugacugca

SEQ ID NO: 1247126 - RNA, 19 nt, Artificial Sequence
  Description of Artificial Sequence: Synthetic oligonucleotide
  Sense strand starting at position 816 of SEQ ID NO: 1241103
agucauuagccucagagaa

SEQ ID NO: 1247127 - RNA, 19 nt, Artificial Sequence
  Description of Artificial Sequence: Synthetic oligonucleotide
  Antisense strand to SEQ ID NO: 1247126
uucucugaggcuaaugacu

SEQ ID NO: 1247128 - RNA, 19 nt, Artificial Sequence
  Description of Artificial Sequence: Synthetic oligonucleotide
  Sense strand starting at position 829 of SEQ ID NO: 1241103
agagaagucuguccagggu

SEQ ID NO: 1247129 - RNA, 19 nt, Artificial Sequence
  Description of Artificial Sequence: Synthetic oligonucleotide
  Antisense strand to SEQ ID NO: 1247128
acccuggacagacuucucu

SEQ ID NO: 1247130 - RNA, 19 nt, Artificial Sequence
  Description of Artificial Sequence: Synthetic oligonucleotide
  Sense strand starting at position 851 of SEQ ID NO: 1241103
auuagauuucucuguagcu

SEQ ID NO: 1247131 - RNA, 19 nt, Artificial Sequence
  Description of Artificial Sequence: Synthetic oligonucleotide
  Antisense strand to SEQ ID NO: 1247130
agcuacagagaaaucuaau

SEQ ID NO: 1247132 - RNA, 19 nt, Artificial Sequence
  Description of Artificial Sequence: Synthetic oligonucleotide
  Sense strand starting at position 852 of SEQ ID NO: 1241103
uuagauuucucuguagcuc

SEQ ID NO: 1247133 - RNA, 19 nt, Artificial Sequence
  Description of Artificial Sequence: Synthetic oligonucleotide
  Antisense strand to SEQ ID NO: 1247132
gagcuacagagaaaucuaa

SEQ ID NO: 1247134 - RNA, 19 nt, Artificial Sequence
  Description of Artificial Sequence: Synthetic oligonucleotide
  Sense strand starting at position 941 of SEQ ID NO: 1241103
cugaucauauuagcaugaa

SEQ ID NO: 1247135 - RNA, 19 nt, Artificial Sequence
  Description of Artificial Sequence: Synthetic oligonucleotide
  Antisense strand to SEQ ID NO: 1247134
uucaugcuaauaugaucag

SEQ ID NO: 1247136 - RNA, 19 nt, Artificial Sequence
  Description of Artificial Sequence: Synthetic oligonucleotide
  Sense strand starting at position 1164 of SEQ ID NO: 1241103
uggauuuacucggccugua

SEQ ID NO: 1247137 - RNA, 19 nt, Artificial Sequence
  Description of Artificial Sequence: Synthetic oligonucleotide
  Antisense strand to SEQ ID NO: 1247136
uacaggccgaguaaaucca

SEQ ID NO: 1247138 - RNA, 19 nt, Artificial Sequence
  Description of Artificial Sequence: Synthetic oligonucleotide
  Sense strand starting at position 1167 of SEQ ID NO: 1241103
auuuacucggccuguaauu

SEQ ID NO: 1247139 - RNA, 19 nt, Artificial Sequence
  Description of Artificial Sequence: Synthetic oligonucleotide
  Antisense strand to SEQ ID NO: 1247138
aauuacaggccgaguaaau

SEQ ID NO: 1247140 - RNA, 19 nt, Artificial Sequence
  Description of Artificial Sequence: Synthetic oligonucleotide
  Sense strand starting at position 1545 of SEQ ID NO: 1241103
gccucaacucucuauguga

SEQ ID NO: 1247141 - RNA, 19 nt, Artificial Sequence
  Description of Artificial Sequence: Synthetic oligonucleotide
  Antisense strand to SEQ ID NO: 1247140
ucacauagagaguugaggc

SEQ ID NO: 1247142 - RNA, 19 nt, Artificial Sequence
  Description of Artificial Sequence: Synthetic oligonucleotide
  Sense strand starting at position 1628 of SEQ ID NO: 1241103
accagugauuuccagacac

SEQ ID NO: 1247143 - RNA, 19 nt, Artificial Sequence
  Description of Artificial Sequence: Synthetic oligonucleotide
  Antisense strand to SEQ ID NO: 1247142
gugucuggaaaucacuggu

SEQ ID NO: 1247144 - RNA, 19 nt, Artificial Sequence
  Description of Artificial Sequence: Synthetic oligonucleotide
  Sense strand starting at position 2516 of SEQ ID NO: 1241103
aaucuccauuguucggaaa

SEQ ID NO: 1247145 - RNA, 19 nt, Artificial Sequence
  Description of Artificial Sequence: Synthetic oligonucleotide
  Antisense strand to SEQ ID NO: 1247144
uuuccgaacaauggagauu

SEQ ID NO: 1247146 - RNA, 19 nt, Artificial Sequence
  Description of Artificial Sequence: Synthetic oligonucleotide
  Sense strand starting at position 2559 of SEQ ID NO: 1241103
gcuugacccgaugacuaaa

SEQ ID NO: 1247147 - RNA, 19 nt, Artificial Sequence
  Description of Artificial Sequence: Synthetic oligonucleotide
  Antisense strand to SEQ ID NO: 1247146
uuuagucaucgggucaagc

SEQ ID NO: 1247148 - RNA, 19 nt, Artificial Sequence
  Description of Artificial Sequence: Synthetic oligonucleotide
  Sense strand starting at position 2884 of SEQ ID NO: 1241103
ccgggauucgcucacauuc

SEQ ID NO: 1247149 - RNA, 19 nt, Artificial Sequence
  Description of Artificial Sequence: Synthetic oligonucleotide
  Antisense strand to SEQ ID NO: 1247148
gaaugugagcgaaucccgg

SEQ ID NO: 1247150 - RNA, 19 nt, Artificial Sequence
  Description of Artificial Sequence: Synthetic oligonucleotide
  Sense strand starting at position 2924 of SEQ ID NO: 1241103
uugaccguuccacaagaga

SEQ ID NO: 1247151 - RNA, 19 nt, Artificial Sequence
  Description of Artificial Sequence: Synthetic oligonucleotide
  Antisense strand to SEQ ID NO: 1247150
ucucuuguggaacggucaa

SEQ ID NO: 1247152 - RNA, 19 nt, Artificial Sequence
  Description of Artificial Sequence: Synthetic oligonucleotide
  Sense strand starting at position 2927 of SEQ ID NO: 1241103
accguuccacaagagauua

SEQ ID NO: 1247153 - RNA, 19 nt, Artificial Sequence
  Description of Artificial Sequence: Synthetic oligonucleotide
  Antisense strand to SEQ ID NO: 1247152
uaaucucuuguggaacggu

SEQ ID NO: 1247154 - RNA, 19 nt, Artificial Sequence
  Description of Artificial Sequence: Synthetic oligonucleotide
  Sense strand starting at position 2948 of SEQ ID NO: 1241103
caugcaguugcugagauaa

SEQ ID NO: 1247155 - RNA, 19 nt, Artificial Sequence
  Description of Artificial Sequence: Synthetic oligonucleotide
  Antisense strand to SEQ ID NO: 1247154
uuaucucagcaacugcaug

SEQ ID NO: 1247156 - RNA, 19 nt, Artificial Sequence
  Description of Artificial Sequence: Synthetic oligonucleotide
  Sense strand starting at position 2996 of SEQ ID NO: 1241103
cggugaucacuggaccaua

SEQ ID NO: 1247157 - RNA, 19 nt, Artificial Sequence
  Description of Artificial Sequence: Synthetic oligonucleotide
  Antisense strand to SEQ ID NO: 1247156
uaugguccagugaucaccg

SEQ ID NO: 1247158 - RNA, 19 nt, Artificial Sequence
  Description of Artificial Sequence: Synthetic oligonucleotide
  Sense strand starting at position 3014 of SEQ ID NO: 1241103
aaagguugugguggacuaa

SEQ ID NO: 1247159 - RNA, 19 nt, Artificial Sequence
  Description of Artificial Sequence: Synthetic oligonucleotide
  Antisense strand to SEQ ID NO: 1247158
uuaguccaccacaaccuuu

SEQ ID NO: 1247160 - RNA, 19 nt, Artificial Sequence
  Description of Artificial Sequence: Synthetic oligonucleotide
  Sense strand starting at position 3038 of SEQ ID NO: 1241103
cgcaguucccuuggaauag

SEQ ID NO: 1247161 - RNA, 19 nt, Artificial Sequence
  Description of Artificial Sequence: Synthetic oligonucleotide
  Antisense strand to SEQ ID NO: 1247160
cuauuccaagggaacugcg

SEQ ID NO: 1247162 - RNA, 19 nt, Artificial Sequence
  Description of Artificial Sequence: Synthetic oligonucleotide
  Sense strand starting at position 3047 of SEQ ID NO: 1241103
cuuggaauagccugaucau

SEQ ID NO: 1247163 - RNA, 19 nt, Artificial Sequence
  Description of Artificial Sequence: Synthetic oligonucleotide
  Antisense strand to SEQ ID NO: 1247162
augaucaggcuauuccaag

SEQ ID NO: 1247164 - RNA, 19 nt, Artificial Sequence
  Description of Artificial Sequence: Synthetic oligonucleotide
  Sense strand starting at position 3050 of SEQ ID NO: 1241103
ggaauagccugaucauauu

SEQ ID NO: 1247165 - RNA, 19 nt, Artificial Sequence
  Description of Artificial Sequence: Synthetic oligonucleotide
  Antisense strand to SEQ ID NO: 1247164
aauaugaucaggcuauucc

SEQ ID NO: 1247166 - RNA, 19 nt, Artificial Sequence
  Description of Artificial Sequence: Synthetic oligonucleotide
  Sense strand starting at position 3565 of SEQ ID NO: 1241103
cucaaagugcugugauuua

SEQ ID NO: 1247167 - RNA, 19 nt, Artificial Sequence
  Description of Artificial Sequence: Synthetic oligonucleotide
  Antisense strand to SEQ ID NO: 1247166
uaaaucacagcacuuugag

SEQ ID NO: 1247168 - RNA, 19 nt, Artificial Sequence
  Description of Artificial Sequence: Synthetic oligonucleotide
  Sense strand starting at position 3690 of SEQ ID NO: 1241103
ucaggcacucaugagacuu

SEQ ID NO: 1247169 - RNA, 19 nt, Artificial Sequence
  Description of Artificial Sequence: Synthetic oligonucleotide
  Antisense strand to SEQ ID NO: 1247168
aagucucaugagugccuga

SEQ ID NO: 1247170 - RNA, 19 nt, Artificial Sequence
  Description of Artificial Sequence: Synthetic oligonucleotide
  Sense strand starting at position 3698 of SEQ ID NO: 1241103
ucaugagacuuggcuuuga

SEQ ID NO: 1247171 - RNA, 19 nt, Artificial Sequence
  Description of Artificial Sequence: Synthetic oligonucleotide
  Antisense strand to SEQ ID NO: 1247170
ucaaagccaagucucauga

SEQ ID NO: 1247172 - RNA, 19 nt, Artificial Sequence
  Description of Artificial Sequence: Synthetic oligonucleotide
  Sense strand starting at position 3702 of SEQ ID NO: 1241103
gagacuuggcuuugaguuu

SEQ ID NO: 1247173 - RNA, 19 nt, Artificial Sequence
  Description of Artificial Sequence: Synthetic oligonucleotide
  Antisense strand to SEQ ID NO: 1247172
aaacucaaagccaagucuc

SEQ ID NO: 1247174 - RNA, 19 nt, Artificial Sequence
  Description of Artificial Sequence: Synthetic oligonucleotide
  Sense strand starting at position 3720 of SEQ ID NO: 1241103
ucagcucuccagugauuug

SEQ ID NO: 1247175 - RNA, 19 nt, Artificial Sequence
  Description of Artificial Sequence: Synthetic oligonucleotide
  Antisense strand to SEQ ID NO: 1247174
caaaucacuggagagcuga

SEQ ID NO: 1247176 - RNA, 19 nt, Artificial Sequence
  Description of Artificial Sequence: Synthetic oligonucleotide
  Sense strand starting at position 3798 of SEQ ID NO: 1241103
gagugauaccaccagccua

SEQ ID NO: 1247177 - RNA, 19 nt, Artificial Sequence
  Description of Artificial Sequence: Synthetic oligonucleotide
  Antisense strand to SEQ ID NO: 1247176
uaggcuggugguaucacuc

SEQ ID NO: 1247178 - RNA, 19 nt, Artificial Sequence
  Description of Artificial Sequence: Synthetic oligonucleotide
  Sense strand starting at position 3860 of SEQ ID NO: 1241103
ugaaguggucgccaaaggu

SEQ ID NO: 1247179 - RNA, 19 nt, Artificial Sequence
  Description of Artificial Sequence: Synthetic oligonucleotide
  Antisense strand to SEQ ID NO: 1247178
accuuuggcgaccacuuca

SEQ ID NO: 1247180 - RNA, 19 nt, Artificial Sequence
  Description of Artificial Sequence: Synthetic oligonucleotide
  Sense strand starting at position 3866 of SEQ ID NO: 1241103
ggucgccaaaggugaaauu

SEQ ID NO: 1247181 - RNA, 19 nt, Artificial Sequence
  Description of Artificial Sequence: Synthetic oligonucleotide
  Antisense strand to SEQ ID NO: 1247180
aauuucaccuuuggcgacc

SEQ ID NO: 1247182 - RNA, 19 nt, Artificial Sequence
  Description of Artificial Sequence: Synthetic oligonucleotide
  Sense strand starting at position 11 of SEQ ID NO: 1241104
cucuuaaauuaguuguaca

SEQ ID NO: 1247183 - RNA, 19 nt, Artificial Sequence
  Description of Artificial Sequence: Synthetic oligonucleotide
  Antisense strand to SEQ ID NO: 1247182
uguacaacuaauuuaagag

SEQ ID NO: 1247184 - RNA, 19 nt, Artificial Sequence
  Description of Artificial Sequence: Synthetic oligonucleotide
  Sense strand starting at position 96 of SEQ ID NO: 1241104
guuggaagucaguaagagu

SEQ ID NO: 1247185 - RNA, 19 nt, Artificial Sequence
  Description of Artificial Sequence: Synthetic oligonucleotide
  Antisense strand to SEQ ID NO: 1247184
acucuuacugacuuccaac

SEQ ID NO: 1247186 - RNA, 19 nt, Artificial Sequence
  Description of Artificial Sequence: Synthetic oligonucleotide
  Sense strand starting at position 213 of SEQ ID NO: 1241104
gguaucaccacguacagau

SEQ ID NO: 1247187 - RNA, 19 nt, Artificial Sequence
  Description of Artificial Sequence: Synthetic oligonucleotide
  Antisense strand to SEQ ID NO: 1247186
aucuguacguggugauacc

SEQ ID NO: 1247188 - RNA, 19 nt, Artificial Sequence
  Description of Artificial Sequence: Synthetic oligonucleotide
  Sense strand starting at position 252 of SEQ ID NO: 1241104
acggcagagcuguaacaga

SEQ ID NO: 1247189 - RNA, 19 nt, Artificial Sequence
  Description of Artificial Sequence: Synthetic oligonucleotide
  Antisense strand to SEQ ID NO: 1247188
ucuguuacagcucugccgu

SEQ ID NO: 1247190 - RNA, 19 nt, Artificial Sequence
  Description of Artificial Sequence: Synthetic oligonucleotide
  Sense strand starting at position 262 of SEQ ID NO: 1241104
uguaacagagcucagauua

SEQ ID NO: 1247191 - RNA, 19 nt, Artificial Sequence
  Description of Artificial Sequence: Synthetic oligonucleotide
  Antisense strand to SEQ ID NO: 1247190
uaaucugagcucuguuaca

SEQ ID NO: 1247192 - RNA, 19 nt, Artificial Sequence
  Description of Artificial Sequence: Synthetic oligonucleotide
  Sense strand starting at position 312 of SEQ ID NO: 1241104
uucugaaacugggcuuuaa

SEQ ID NO: 1247193 - RNA, 19 nt, Artificial Sequence
  Description of Artificial Sequence: Synthetic oligonucleotide
  Antisense strand to SEQ ID NO: 1247192
uuaaagcccaguuucagaa

SEQ ID NO: 1247194 - RNA, 19 nt, Artificial Sequence
  Description of Artificial Sequence: Synthetic oligonucleotide
  Sense strand starting at position 327 of SEQ ID NO: 1241104
uuaagaguuucgucagaaa

SEQ ID NO: 1247195 - RNA, 19 nt, Artificial Sequence
  Description of Artificial Sequence: Synthetic oligonucleotide
  Antisense strand to SEQ ID NO: 1247194
uuucugacgaaacucuuaa

SEQ ID NO: 1247196 - RNA, 19 nt, Artificial Sequence
  Description of Artificial Sequence: Synthetic oligonucleotide
  Sense strand starting at position 360 of SEQ ID NO: 1241104
gauacuaaucugcaguguu

SEQ ID NO: 1247197 - RNA, 19 nt, Artificial Sequence
  Description of Artificial Sequence: Synthetic oligonucleotide
  Antisense strand to SEQ ID NO: 1247196
aacacugcagauuaguauc

SEQ ID NO: 1247198 - RNA, 19 nt, Artificial Sequence
  Description of Artificial Sequence: Synthetic oligonucleotide
  Sense strand starting at position 458 of SEQ ID NO: 1241104
uagacugaguucuugucau

SEQ ID NO: 1247199 - RNA, 19 nt, Artificial Sequence
  Description of Artificial Sequence: Synthetic oligonucleotide
  Antisense strand to SEQ ID NO: 1247198
augacaagaacucagucua

SEQ ID NO: 1247200 - RNA, 19 nt, Artificial Sequence
  Description of Artificial Sequence: Synthetic oligonucleotide
  Sense strand starting at position 603 of SEQ ID NO: 1241104
auuuaauccuuagaauggu

SEQ ID NO: 1247201 - RNA, 19 nt, Artificial Sequence
  Description of Artificial Sequence: Synthetic oligonucleotide
  Antisense strand to SEQ ID NO: 1247200
accauucuaaggauuaaau

SEQ ID NO: 1247202 - RNA, 19 nt, Artificial Sequence
  Description of Artificial Sequence: Synthetic oligonucleotide
  Sense strand starting at position 710 of SEQ ID NO: 1241104
gggacucauucuuuauauu

SEQ ID NO: 1247203 - RNA, 19 nt, Artificial Sequence
  Description of Artificial Sequence: Synthetic oligonucleotide
  Antisense strand to SEQ ID NO: 1247202
aauauaaagaaugaguccc

SEQ ID NO: 1247204 - RNA, 19 nt, Artificial Sequence
  Description of Artificial Sequence: Synthetic oligonucleotide
  Sense strand starting at position 811 of SEQ ID NO: 1241104
aucaguuuaugaucuaagu

SEQ ID NO: 1247205 - RNA, 19 nt, Artificial Sequence
  Description of Artificial Sequence: Synthetic oligonucleotide
  Antisense strand to SEQ ID NO: 1247204
acuuagaucauaaacugau

SEQ ID NO: 1247206 - RNA, 19 nt, Artificial Sequence
  Description of Artificial Sequence: Synthetic oligonucleotide
  Sense strand starting at position 928 of SEQ ID NO: 1241104
aguguuucuccucacaaug

SEQ ID NO: 1247207 - RNA, 19 nt, Artificial Sequence
  Description of Artificial Sequence: Synthetic oligonucleotide
  Antisense strand to SEQ ID NO: 1247206
cauugugaggagaaacacu

SEQ ID NO: 1247208 - RNA, 19 nt, Artificial Sequence
  Description of Artificial Sequence: Synthetic oligonucleotide
  Sense strand starting at position 958 of SEQ ID NO: 1241104
acuagaaccuaagcugaua

SEQ ID NO: 1247209 - RNA, 19 nt, Artificial Sequence
  Description of Artificial Sequence: Synthetic oligonucleotide
  Antisense strand to SEQ ID NO: 1247208
uaucagcuuagguucuagu

SEQ ID NO: 1247210 - RNA, 19 nt, Artificial Sequence
  Description of Artificial Sequence: Synthetic oligonucleotide
  Sense strand starting at position 970 of SEQ ID NO: 1241104
gcugauaacuguuuaaauc

SEQ ID NO: 1247211 - RNA, 19 nt, Artificial Sequence
  Description of Artificial Sequence: Synthetic oligonucleotide
  Antisense strand to SEQ ID NO: 1247210
gauuuaaacaguuaucagc

SEQ ID NO: 1247212 - RNA, 19 nt, Artificial Sequence
  Description of Artificial Sequence: Synthetic oligonucleotide
  Sense strand starting at position 1036 of SEQ ID NO: 1241104
gaggcuguauuaccacaua

SEQ ID NO: 1247213 - RNA, 19 nt, Artificial Sequence
  Description of Artificial Sequence: Synthetic oligonucleotide
  Antisense strand to SEQ ID NO: 1247212
uaugugguaauacagccuc

SEQ ID NO: 1247214 - RNA, 19 nt, Artificial Sequence
  Description of Artificial Sequence: Synthetic oligonucleotide
  Sense strand starting at position 1080 of SEQ ID NO: 1241104
aggagucugucauuggaaa

SEQ ID NO: 1247215 - RNA, 19 nt, Artificial Sequence
  Description of Artificial Sequence: Synthetic oligonucleotide
  Antisense strand to SEQ ID NO: 1247214
uuuccaaugacagacuccu

SEQ ID NO: 1247216 - RNA, 19 nt, Artificial Sequence
  Description of Artificial Sequence: Synthetic oligonucleotide
  Sense strand starting at position 1081 of SEQ ID NO: 1241104
ggagucugucauuggaaac

SEQ ID NO: 1247217 - RNA, 19 nt, Artificial Sequence
  Description of Artificial Sequence: Synthetic oligonucleotide
  Antisense strand to SEQ ID NO: 1247216
guuuccaaugacagacucc

SEQ ID NO: 1247218 - RNA, 19 nt, Artificial Sequence
  Description of Artificial Sequence: Synthetic oligonucleotide
  Sense strand starting at position 1114 of SEQ ID NO: 1241104
caaagacaaucguuugaga

SEQ ID NO: 1247219 - RNA, 19 nt, Artificial Sequence
  Description of Artificial Sequence: Synthetic oligonucleotide
  Antisense strand to SEQ ID NO: 1247218
ucucaaacgauugucuuug

SEQ ID NO: 1247220 - RNA, 19 nt, Artificial Sequence
  Description of Artificial Sequence: Synthetic oligonucleotide
  Sense strand starting at position 1116 of SEQ ID NO: 1241104
aagacaaucguuugagaag

SEQ ID NO: 1247221 - RNA, 19 nt, Artificial Sequence
  Description of Artificial Sequence: Synthetic oligonucleotide
  Antisense strand to SEQ ID NO: 1247220
cuucucaaacgauugucuu

SEQ ID NO: 1247222 - RNA, 19 nt, Artificial Sequence
  Description of Artificial Sequence: Synthetic oligonucleotide
  Sense strand starting at position 1125 of SEQ ID NO: 1241104
guuugagaagcucacuuga

SEQ ID NO: 1247223 - RNA, 19 nt, Artificial Sequence
  Description of Artificial Sequence: Synthetic oligonucleotide
  Antisense strand to SEQ ID NO: 1247222
ucaagugagcuucucaaac

SEQ ID NO: 1247224 - RNA, 19 nt, Artificial Sequence
  Description of Artificial Sequence: Synthetic oligonucleotide
  Sense strand starting at position 1127 of SEQ ID NO: 1241104
uugagaagcucacuugaau

SEQ ID NO: 1247225 - RNA, 19 nt, Artificial Sequence
  Description of Artificial Sequence: Synthetic oligonucleotide
  Antisense strand to SEQ ID NO: 1247224
auucaagugagcuucucaa

SEQ ID NO: 1247226 - RNA, 19 nt, Artificial Sequence
  Description of Artificial Sequence: Synthetic oligonucleotide
  Sense strand starting at position 1130 of SEQ ID NO: 1241104
agaagcucacuugaaugua

SEQ ID NO: 1247227 - RNA, 19 nt, Artificial Sequence
  Description of Artificial Sequence: Synthetic oligonucleotide
  Antisense strand to SEQ ID NO: 1247226
uacauucaagugagcuucu

SEQ ID NO: 1247228 - RNA, 19 nt, Artificial Sequence
  Description of Artificial Sequence: Synthetic oligonucleotide
  Sense strand starting at position 1207 of SEQ ID NO: 1241104
uaaugcagucuguagacaa

SEQ ID NO: 1247229 - RNA, 19 nt, Artificial Sequence
  Description of Artificial Sequence: Synthetic oligonucleotide
  Antisense strand to SEQ ID NO: 1247228
uugucuacagacugcauua

SEQ ID NO: 1247230 - RNA, 19 nt, Artificial Sequence
  Description of Artificial Sequence: Synthetic oligonucleotide
  Sense strand starting at position 1229 of SEQ ID NO: 1241104
aacuuugcagaaugucaga

SEQ ID NO: 1247231 - RNA, 19 nt, Artificial Sequence
  Description of Artificial Sequence: Synthetic oligonucleotide
  Antisense strand to SEQ ID NO: 1247230
ucugacauucugcaaaguu

SEQ ID NO: 1247232 - RNA, 19 nt, Artificial Sequence
  Description of Artificial Sequence: Synthetic oligonucleotide
  Sense strand starting at position 1281 of SEQ ID NO: 1241104
gcuuuaucgccucaggaaa

SEQ ID NO: 1247233 - RNA, 19 nt, Artificial Sequence
  Description of Artificial Sequence: Synthetic oligonucleotide
  Antisense strand to SEQ ID NO: 1247232
uuuccugaggcgauaaagc

SEQ ID NO: 1247234 - RNA, 19 nt, Artificial Sequence
  Description of Artificial Sequence: Synthetic oligonucleotide
  Sense strand starting at position 1322 of SEQ ID NO: 1241104
uccugauggaauugcaagu

SEQ ID NO: 1247235 - RNA, 19 nt, Artificial Sequence
  Description of Artificial Sequence: Synthetic oligonucleotide
  Antisense strand to SEQ ID NO: 1247234
acuugcaauuccaucagga

SEQ ID NO: 1247236 - RNA, 19 nt, Artificial Sequence
  Description of Artificial Sequence: Synthetic oligonucleotide
  Sense strand starting at position 1437 of SEQ ID NO: 1241104
aagcuuccuccuggaggaa

SEQ ID NO: 1247237 - RNA, 19 nt, Artificial Sequence
  Description of Artificial Sequence: Synthetic oligonucleotide
  Antisense strand to SEQ ID NO: 1247236
uuccuccaggaggaagcuu

SEQ ID NO: 1247238 - RNA, 19 nt, Artificial Sequence
  Description of Artificial Sequence: Synthetic oligonucleotide
  Sense strand starting at position 2444 of SEQ ID NO: 1241104
auagaauagcgaggucaug

SEQ ID NO: 1247239 - RNA, 19 nt, Artificial Sequence
  Description of Artificial Sequence: Synthetic oligonucleotide
  Antisense strand to SEQ ID NO: 1247238
caugaccucgcuauucuau

SEQ ID NO: 1247240 - RNA, 19 nt, Artificial Sequence
  Description of Artificial Sequence: Synthetic oligonucleotide
  Sense strand starting at position 2603 of SEQ ID NO: 1241104
aggugauuggugcagaacu

SEQ ID NO: 1247241 - RNA, 19 nt, Artificial Sequence
  Description of Artificial Sequence: Synthetic oligonucleotide
  Antisense strand to SEQ ID NO: 1247240
aguucugcaccaaucaccu

SEQ ID NO: 1247242 - RNA, 19 nt, Artificial Sequence
  Description of Artificial Sequence: Synthetic oligonucleotide
  Sense strand starting at position 2605 of SEQ ID NO: 1241104
gugauuggugcagaacuuu

SEQ ID NO: 1247243 - RNA, 19 nt, Artificial Sequence
  Description of Artificial Sequence: Synthetic oligonucleotide
  Antisense strand to SEQ ID NO: 1247242
aaaguucugcaccaaucac

SEQ ID NO: 1247244 - RNA, 19 nt, Artificial Sequence
  Description of Artificial Sequence: Synthetic oligonucleotide
  Sense strand starting at position 2616 of SEQ ID NO: 1241104
agaacuuuggccugcagga

SEQ ID NO: 1247245 - RNA, 19 nt, Artificial Sequence
  Description of Artificial Sequence: Synthetic oligonucleotide
  Antisense strand to SEQ ID NO: 1247244
uccugcaggccaaaguucu

SEQ ID NO: 1247246 - RNA, 19 nt, Artificial Sequence
  Description of Artificial Sequence: Synthetic oligonucleotide
  Sense strand starting at position 2938 of SEQ ID NO: 1241104
gaccuuagggaguguaaau

SEQ ID NO: 1247247 - RNA, 19 nt, Artificial Sequence
  Description of Artificial Sequence: Synthetic oligonucleotide
  Antisense strand to SEQ ID NO: 1247246
auuuacacucccuaagguc

SEQ ID NO: 1247248 - RNA, 19 nt, Artificial Sequence
  Description of Artificial Sequence: Synthetic oligonucleotide
  Sense strand starting at position 3012 of SEQ ID NO: 1241104
guaguuuccacagaggcuu

SEQ ID NO: 1247249 - RNA, 19 nt, Artificial Sequence
  Description of Artificial Sequence: Synthetic oligonucleotide
  Antisense strand to SEQ ID NO: 1247248
aagccucuguggaaacuac

SEQ ID NO: 1247250 - RNA, 19 nt, Artificial Sequence
  Description of Artificial Sequence: Synthetic oligonucleotide
  Sense strand starting at position 3072 of SEQ ID NO: 1241104
auaagcugucaagaucuua

SEQ ID NO: 1247251 - RNA, 19 nt, Artificial Sequence
  Description of Artificial Sequence: Synthetic oligonucleotide
  Antisense strand to SEQ ID NO: 1247250
uaagaucuugacagcuuau

SEQ ID NO: 1247252 - RNA, 19 nt, Artificial Sequence
  Description of Artificial Sequence: Synthetic oligonucleotide
  Sense strand starting at position 3485 of SEQ ID NO: 1241104
agcaaacacgucuaucgaa

SEQ ID NO: 1247253 - RNA, 19 nt, Artificial Sequence
  Description of Artificial Sequence: Synthetic oligonucleotide
  Antisense strand to SEQ ID NO: 1247252
uucgauagacguguuugcu

SEQ ID NO: 1247254 - RNA, 19 nt, Artificial Sequence
  Description of Artificial Sequence: Synthetic oligonucleotide
  Sense strand starting at position 3596 of SEQ ID NO: 1241104
ugagaacuauuccuuauug

SEQ ID NO: 1247255 - RNA, 19 nt, Artificial Sequence
  Description of Artificial Sequence: Synthetic oligonucleotide
  Antisense strand to SEQ ID NO: 1247254
caauaaggaauaguucuca

SEQ ID NO: 1247256 - RNA, 19 nt, Artificial Sequence
  Description of Artificial Sequence: Synthetic oligonucleotide
  Sense strand starting at position 3635 of SEQ ID NO: 1241104
cuagcagaccugggaguuu

SEQ ID NO: 1247257 - RNA, 19 nt, Artificial Sequence
  Description of Artificial Sequence: Synthetic oligonucleotide
  Antisense strand to SEQ ID NO: 1247256
aaacucccaggucugcuag

SEQ ID NO: 1247258 - RNA, 19 nt, Artificial Sequence
  Description of Artificial Sequence: Synthetic oligonucleotide
  Sense strand starting at position 3646 of SEQ ID NO: 1241104
gggaguuugcaagaguuuc

SEQ ID NO: 1247259 - RNA, 19 nt, Artificial Sequence
  Description of Artificial Sequence: Synthetic oligonucleotide
  Antisense strand to SEQ ID NO: 1247258
gaaacucuugcaaacuccc

SEQ ID NO: 1247260 - RNA, 19 nt, Artificial Sequence
  Description of Artificial Sequence: Synthetic oligonucleotide
  Sense strand starting at position 3768 of SEQ ID NO: 1241104
gguacaaucccuggcucaa

SEQ ID NO: 1247261 - RNA, 19 nt, Artificial Sequence
  Description of Artificial Sequence: Synthetic oligonucleotide
  Antisense strand to SEQ ID NO: 1247260
uugagccagggauuguacc

SEQ ID NO: 1247262 - RNA, 19 nt, Artificial Sequence
  Description of Artificial Sequence: Synthetic oligonucleotide
  Sense strand starting at position 414 of SEQ ID NO: 1241105
agcuuaaaggacugagagu

SEQ ID NO: 1247263 - RNA, 19 nt, Artificial Sequence
  Description of Artificial Sequence: Synthetic oligonucleotide
  Antisense strand to SEQ ID NO: 1247262
acucucaguccuuuaagcu

SEQ ID NO: 1247264 - RNA, 19 nt, Artificial Sequence
  Description of Artificial Sequence: Synthetic oligonucleotide
  Sense strand starting at position 445 of SEQ ID NO: 1241105
cgugaugugguauaaacaa

SEQ ID NO: 1247265 - RNA, 19 nt, Artificial Sequence
  Description of Artificial Sequence: Synthetic oligonucleotide
  Antisense strand to SEQ ID NO: 1247264
uuguuuauaccacaucacg

SEQ ID NO: 1247266 - RNA, 19 nt, Artificial Sequence
  Description of Artificial Sequence: Synthetic oligonucleotide
  Sense strand starting at position 499 of SEQ ID NO: 1241105
gccuaaugggacuagcaua

SEQ ID NO: 1247267 - RNA, 19 nt, Artificial Sequence
  Description of Artificial Sequence: Synthetic oligonucleotide
  Antisense strand to SEQ ID NO: 1247266
uaugcuagucccauuaggc

SEQ ID NO: 1247268 - RNA, 19 nt, Artificial Sequence
  Description of Artificial Sequence: Synthetic oligonucleotide
  Sense strand starting at position 655 of SEQ ID NO: 1241105
guugccauucuuucgugua

SEQ ID NO: 1247269 - RNA, 19 nt, Artificial Sequence
  Description of Artificial Sequence: Synthetic oligonucleotide
  Antisense strand to SEQ ID NO: 1247268
uacacgaaagaauggcaac

SEQ ID NO: 1247270 - RNA, 19 nt, Artificial Sequence
  Description of Artificial Sequence: Synthetic oligonucleotide
  Sense strand starting at position 727 of SEQ ID NO: 1241105
cccugauucuaaguggaca

SEQ ID NO: 1247271 - RNA, 19 nt, Artificial Sequence
  Description of Artificial Sequence: Synthetic oligonucleotide
  Antisense strand to SEQ ID NO: 1247270
uguccacuuagaaucaggg

SEQ ID NO: 1247272 - RNA, 19 nt, Artificial Sequence
  Description of Artificial Sequence: Synthetic oligonucleotide
  Sense strand starting at position 799 of SEQ ID NO: 1241105
ucagcuguaccagggaaau

SEQ ID NO: 1247273 - RNA, 19 nt, Artificial Sequence
  Description of Artificial Sequence: Synthetic oligonucleotide
  Antisense strand to SEQ ID NO: 1247272
auuucccugguacagcuga

SEQ ID NO: 1247274 - RNA, 19 nt, Artificial Sequence
  Description of Artificial Sequence: Synthetic oligonucleotide
  Sense strand starting at position 856 of SEQ ID NO: 1241105
cuuaucugacacugucaga

SEQ ID NO: 1247275 - RNA, 19 nt, Artificial Sequence
  Description of Artificial Sequence: Synthetic oligonucleotide
  Antisense strand to SEQ ID NO: 1247274
ucugacagugucagauaag

SEQ ID NO: 1247276 - RNA, 19 nt, Artificial Sequence
  Description of Artificial Sequence: Synthetic oligonucleotide
  Sense strand starting at position 920 of SEQ ID NO: 1241105
agagcuaggaguugaaaug

SEQ ID NO: 1247277 - RNA, 19 nt, Artificial Sequence
  Description of Artificial Sequence: Synthetic oligonucleotide
  Antisense strand to SEQ ID NO: 1247276
cauuucaacuccuagcucu

SEQ ID NO: 1247278 - RNA, 19 nt, Artificial Sequence
  Description of Artificial Sequence: Synthetic oligonucleotide
  Sense strand starting at position 961 of SEQ ID NO: 1241105
uuggaauugaguugagguu

SEQ ID NO: 1247279 - RNA, 19 nt, Artificial Sequence
  Description of Artificial Sequence: Synthetic oligonucleotide
  Antisense strand to SEQ ID NO: 1247278
aaccucaacucaauuccaa

SEQ ID NO: 1247280 - RNA, 19 nt, Artificial Sequence
  Description of Artificial Sequence: Synthetic oligonucleotide
  Sense strand starting at position 967 of SEQ ID NO: 1241105
uugaguugagguuaugacu

SEQ ID NO: 1247281 - RNA, 19 nt, Artificial Sequence
  Description of Artificial Sequence: Synthetic oligonucleotide
  Antisense strand to SEQ ID NO: 1247280
agucauaaccucaacucaa

SEQ ID NO: 1247282 - RNA, 19 nt, Artificial Sequence
  Description of Artificial Sequence: Synthetic oligonucleotide
  Sense strand starting at position 974 of SEQ ID NO: 1241105
gagguuaugacugagucca

SEQ ID NO: 1247283 - RNA, 19 nt, Artificial Sequence
  Description of Artificial Sequence: Synthetic oligonucleotide
  Antisense strand to SEQ ID NO: 1247282
uggacucagucauaaccuc

SEQ ID NO: 1247284 - RNA, 19 nt, Artificial Sequence
  Description of Artificial Sequence: Synthetic oligonucleotide
  Sense strand starting at position 976 of SEQ ID NO: 1241105
gguuaugacugaguccaga

SEQ ID NO: 1247285 - RNA, 19 nt, Artificial Sequence
  Description of Artificial Sequence: Synthetic oligonucleotide
  Antisense strand to SEQ ID NO: 1247284
ucuggacucagucauaacc

SEQ ID NO: 1247286 - RNA, 19 nt, Artificial Sequence
  Description of Artificial Sequence: Synthetic oligonucleotide
  Sense strand starting at position 1014 of SEQ ID NO: 1241105
cacugaggacccugauauu

SEQ ID NO: 1247287 - RNA, 19 nt, Artificial Sequence
  Description of Artificial Sequence: Synthetic oligonucleotide
  Antisense strand to SEQ ID NO: 1247286
aauaucaggguccucagug

SEQ ID NO: 1247288 - RNA, 19 nt, Artificial Sequence
  Description of Artificial Sequence: Synthetic oligonucleotide
  Sense strand starting at position 1017 of SEQ ID NO: 1241105
ugaggacccugauauuuau

SEQ ID NO: 1247289 - RNA, 19 nt, Artificial Sequence
  Description of Artificial Sequence: Synthetic oligonucleotide
  Antisense strand to SEQ ID NO: 1247288
auaaauaucaggguccuca

SEQ ID NO: 1247290 - RNA, 19 nt, Artificial Sequence
  Description of Artificial Sequence: Synthetic oligonucleotide
  Sense strand starting at position 1136 of SEQ ID NO: 1241105
agaggagacuuguuccuuu

SEQ ID NO: 1247291 - RNA, 19 nt, Artificial Sequence
  Description of Artificial Sequence: Synthetic oligonucleotide
  Antisense strand to SEQ ID NO: 1247290
aaaggaacaagucuccucu

SEQ ID NO: 1247292 - RNA, 19 nt, Artificial Sequence
  Description of Artificial Sequence: Synthetic oligonucleotide
  Sense strand starting at position 1329 of SEQ ID NO: 1241105
uucugucuugaauaugcaa

SEQ ID NO: 1247293 - RNA, 19 nt, Artificial Sequence
  Description of Artificial Sequence: Synthetic oligonucleotide
  Antisense strand to SEQ ID NO: 1247292
uugcauauucaagacagaa

SEQ ID NO: 1247294 - RNA, 19 nt, Artificial Sequence
  Description of Artificial Sequence: Synthetic oligonucleotide
  Sense strand starting at position 1389 of SEQ ID NO: 1241105
agcauuuguuccuugccau

SEQ ID NO: 1247295 - RNA, 19 nt, Artificial Sequence
  Description of Artificial Sequence: Synthetic oligonucleotide
  Antisense strand to SEQ ID NO: 1247294
auggcaaggaacaaaugcu

SEQ ID NO: 1247296 - RNA, 19 nt, Artificial Sequence
  Description of Artificial Sequence: Synthetic oligonucleotide
  Sense strand starting at position 1390 of SEQ ID NO: 1241105
gcauuuguuccuugccaug

SEQ ID NO: 1247297 - RNA, 19 nt, Artificial Sequence
  Description of Artificial Sequence: Synthetic oligonucleotide
  Antisense strand to SEQ ID NO: 1247296
cauggcaaggaacaaaugc

SEQ ID NO: 1247298 - RNA, 19 nt, Artificial Sequence
  Description of Artificial Sequence: Synthetic oligonucleotide
  Sense strand starting at position 1392 of SEQ ID NO: 1241105
auuuguuccuugccaugaa

SEQ ID NO: 1247299 - RNA, 19 nt, Artificial Sequence
  Description of Artificial Sequence: Synthetic oligonucleotide
  Antisense strand to SEQ ID NO: 1247298
uucauggcaaggaacaaau

SEQ ID NO: 1247300 - RNA, 19 nt, Artificial Sequence
  Description of Artificial Sequence: Synthetic oligonucleotide
  Sense strand starting at position 1396 of SEQ ID NO: 1241105
guuccuugccaugaagaaa

SEQ ID NO: 1247301 - RNA, 19 nt, Artificial Sequence
  Description of Artificial Sequence: Synthetic oligonucleotide
  Antisense strand to SEQ ID NO: 1247300
uuucuucauggcaaggaac

SEQ ID NO: 1247302 - RNA, 19 nt, Artificial Sequence
  Description of Artificial Sequence: Synthetic oligonucleotide
  Sense strand starting at position 1836 of SEQ ID NO: 1241105
gcaauuaaggcccagacau

SEQ ID NO: 1247303 - RNA, 19 nt, Artificial Sequence
  Description of Artificial Sequence: Synthetic oligonucleotide
  Antisense strand to SEQ ID NO: 1247302
augucugggccuuaauugc

SEQ ID NO: 1247304 - RNA, 19 nt, Artificial Sequence
  Description of Artificial Sequence: Synthetic oligonucleotide
  Sense strand starting at position 2069 of SEQ ID NO: 1241105
acggaagcccuguaagaaa

SEQ ID NO: 1247305 - RNA, 19 nt, Artificial Sequence
  Description of Artificial Sequence: Synthetic oligonucleotide
  Antisense strand to SEQ ID NO: 1247304
uuucuuacagggcuuccgu

SEQ ID NO: 1247306 - RNA, 19 nt, Artificial Sequence
  Description of Artificial Sequence: Synthetic oligonucleotide
  Sense strand starting at position 2119 of SEQ ID NO: 1241105
gaggauuccucauuggacu

SEQ ID NO: 1247307 - RNA, 19 nt, Artificial Sequence
  Description of Artificial Sequence: Synthetic oligonucleotide
  Antisense strand to SEQ ID NO: 1247306
aguccaaugaggaauccuc

SEQ ID NO: 1247308 - RNA, 19 nt, Artificial Sequence
  Description of Artificial Sequence: Synthetic oligonucleotide
  Sense strand starting at position 2120 of SEQ ID NO: 1241105
aggauuccucauuggacua

SEQ ID NO: 1247309 - RNA, 19 nt, Artificial Sequence
  Description of Artificial Sequence: Synthetic oligonucleotide
  Antisense strand to SEQ ID NO: 1247308
uaguccaaugaggaauccu

SEQ ID NO: 1247310 - RNA, 19 nt, Artificial Sequence
  Description of Artificial Sequence: Synthetic oligonucleotide
  Sense strand starting at position 2552 of SEQ ID NO: 1241105
agaaccuucccaugcagaa

SEQ ID NO: 1247311 - RNA, 19 nt, Artificial Sequence
  Description of Artificial Sequence: Synthetic oligonucleotide
  Antisense strand to SEQ ID NO: 1247310
uucugcaugggaagguucu

SEQ ID NO: 1247312 - RNA, 19 nt, Artificial Sequence
  Description of Artificial Sequence: Synthetic oligonucleotide
  Sense strand starting at position 2731 of SEQ ID NO: 1241105
aaaccuagugguuggaaca

SEQ ID NO: 1247313 - RNA, 19 nt, Artificial Sequence
  Description of Artificial Sequence: Synthetic oligonucleotide
  Antisense strand to SEQ ID NO: 1247312
uguuccaaccacuagguuu

SEQ ID NO: 1247314 - RNA, 19 nt, Artificial Sequence
  Description of Artificial Sequence: Synthetic oligonucleotide
  Sense strand starting at position 2732 of SEQ ID NO: 1241105
aaccuagugguuggaacaa

SEQ ID NO: 1247315 - RNA, 19 nt, Artificial Sequence
  Description of Artificial Sequence: Synthetic oligonucleotide
  Antisense strand to SEQ ID NO: 1247314
uuguuccaaccacuagguu

SEQ ID NO: 1247316 - RNA, 19 nt, Artificial Sequence
  Description of Artificial Sequence: Synthetic oligonucleotide
  Sense strand starting at position 2754 of SEQ ID NO: 1241105
gcagaccugcuagaaacuu

SEQ ID NO: 1247317 - RNA, 19 nt, Artificial Sequence
  Description of Artificial Sequence: Synthetic oligonucleotide
  Antisense strand to SEQ ID NO: 1247316
aaguuucuagcaggucugc

SEQ ID NO: 1247318 - RNA, 19 nt, Artificial Sequence
  Description of Artificial Sequence: Synthetic oligonucleotide
  Sense strand starting at position 2970 of SEQ ID NO: 1241105
uccaguccugagcagaaau

SEQ ID NO: 1247319 - RNA, 19 nt, Artificial Sequence
  Description of Artificial Sequence: Synthetic oligonucleotide
  Antisense strand to SEQ ID NO: 1247318
auuucugcucaggacugga

SEQ ID NO: 1247320 - RNA, 19 nt, Artificial Sequence
  Description of Artificial Sequence: Synthetic oligonucleotide
  Sense strand starting at position 2972 of SEQ ID NO: 1241105
caguccugagcagaaauca

SEQ ID NO: 1247321 - RNA, 19 nt, Artificial Sequence
  Description of Artificial Sequence: Synthetic oligonucleotide
  Antisense strand to SEQ ID NO: 1247320
ugauuucugcucaggacug

SEQ ID NO: 1247322 - RNA, 19 nt, Artificial Sequence
  Description of Artificial Sequence: Synthetic oligonucleotide
  Sense strand starting at position 2980 of SEQ ID NO: 1241105
agcagaaaucaacgucaug

SEQ ID NO: 1247323 - RNA, 19 nt, Artificial Sequence
  Description of Artificial Sequence: Synthetic oligonucleotide
  Antisense strand to SEQ ID NO: 1247322
caugacguugauuucugcu

SEQ ID NO: 1247324 - RNA, 19 nt, Artificial Sequence
  Description of Artificial Sequence: Synthetic oligonucleotide
  Sense strand starting at position 2991 of SEQ ID NO: 1241105
acgucauguggugagaacu

SEQ ID NO: 1247325 - RNA, 19 nt, Artificial Sequence
  Description of Artificial Sequence: Synthetic oligonucleotide
  Antisense strand to SEQ ID NO: 1247324
aguucucaccacaugacgu

SEQ ID NO: 1247326 - RNA, 19 nt, Artificial Sequence
  Description of Artificial Sequence: Synthetic oligonucleotide
  Sense strand starting at position 3053 of SEQ ID NO: 1241105
uuaauauuugcaggccauu

SEQ ID NO: 1247327 - RNA, 19 nt, Artificial Sequence
  Description of Artificial Sequence: Synthetic oligonucleotide
  Antisense strand to SEQ ID NO: 1247326
aauggccugcaaauauuaa

SEQ ID NO: 1247328 - RNA, 19 nt, Artificial Sequence
  Description of Artificial Sequence: Synthetic oligonucleotide
  Sense strand starting at position 3086 of SEQ ID NO: 1241105
gaaucaaguugaccuguau

SEQ ID NO: 1247329 - RNA, 19 nt, Artificial Sequence
  Description of Artificial Sequence: Synthetic oligonucleotide
  Antisense strand to SEQ ID NO: 1247328
auacaggucaacuugauuc

SEQ ID NO: 1247330 - RNA, 19 nt, Artificial Sequence
  Description of Artificial Sequence: Synthetic oligonucleotide
  Sense strand starting at position 3356 of SEQ ID NO: 1241105
ggaagacagacuuguucuu

SEQ ID NO: 1247331 - RNA, 19 nt, Artificial Sequence
  Description of Artificial Sequence: Synthetic oligonucleotide
  Antisense strand to SEQ ID NO: 1247330
aagaacaagucugucuucc

SEQ ID NO: 1247332 - RNA, 19 nt, Artificial Sequence
  Description of Artificial Sequence: Synthetic oligonucleotide
  Sense strand starting at position 3536 of SEQ ID NO: 1241105
agaguacagaucugagagu

SEQ ID NO: 1247333 - RNA, 19 nt, Artificial Sequence
  Description of Artificial Sequence: Synthetic oligonucleotide
  Antisense strand to SEQ ID NO: 1247332
acucucagaucuguacucu

SEQ ID NO: 1247334 - RNA, 19 nt, Artificial Sequence
  Description of Artificial Sequence: Synthetic oligonucleotide
  Sense strand starting at position 3599 of SEQ ID NO: 1241105
gugauaucaggccaauuga

SEQ ID NO: 1247335 - RNA, 19 nt, Artificial Sequence
  Description of Artificial Sequence: Synthetic oligonucleotide
  Antisense strand to SEQ ID NO: 1247334
ucaauuggccugauaucac

SEQ ID NO: 1247336 - RNA, 19 nt, Artificial Sequence
  Description of Artificial Sequence: Synthetic oligonucleotide
  Sense strand starting at position 3906 of SEQ ID NO: 1241105
uuagucuuuccagagcuga

SEQ ID NO: 1247337 - RNA, 19 nt, Artificial Sequence
  Description of Artificial Sequence: Synthetic oligonucleotide
  Antisense strand to SEQ ID NO: 1247336
ucagcucuggaaagacuaa

SEQ ID NO: 1247338 - RNA, 19 nt, Artificial Sequence
  Description of Artificial Sequence: Synthetic oligonucleotide
  Sense strand starting at position 3919 of SEQ ID NO: 1241105
agcugaaauccacaugcua

SEQ ID NO: 1247339 - RNA, 19 nt, Artificial Sequence
  Description of Artificial Sequence: Synthetic oligonucleotide
  Antisense strand to SEQ ID NO: 1247338
uagcauguggauuucagcu

SEQ ID NO: 1247340 - RNA, 19 nt, Artificial Sequence
  Description of Artificial Sequence: Synthetic oligonucleotide
  Sense strand starting at position 3983 of SEQ ID NO: 1241105
auggcuucucaagauggua

SEQ ID NO: 1247341 - RNA, 19 nt, Artificial Sequence
  Description of Artificial Sequence: Synthetic oligonucleotide
  Antisense strand to SEQ ID NO: 1247340
uaccaucuugagaagccau

SEQ ID NO: 1247342 - RNA, 19 nt, Artificial Sequence
  Description of Artificial Sequence: Synthetic oligonucleotide
  Sense strand starting at position 70 of SEQ ID NO: 1241106
ugcucuuccugugagcagu

SEQ ID NO: 1247343 - RNA, 19 nt, Artificial Sequence
  Description of Artificial Sequence: Synthetic oligonucleotide
  Antisense strand to SEQ ID NO: 1247342
acugcucacaggaagagca

SEQ ID NO: 1247344 - RNA, 19 nt, Artificial Sequence
  Description of Artificial Sequence: Synthetic oligonucleotide
  Sense strand starting at position 281 of SEQ ID NO: 1241106
guugcuuugcacugauugu

SEQ ID NO: 1247345 - RNA, 19 nt, Artificial Sequence
  Description of Artificial Sequence: Synthetic oligonucleotide
  Antisense strand to SEQ ID NO: 1247344
acaaucagugcaaagcaac

SEQ ID NO: 1247346 - RNA, 19 nt, Artificial Sequence
  Description of Artificial Sequence: Synthetic oligonucleotide
  Sense strand starting at position 285 of SEQ ID NO: 1241106
cuuugcacugauugucuua

SEQ ID NO: 1247347 - RNA, 19 nt, Artificial Sequence
  Description of Artificial Sequence: Synthetic oligonucleotide
  Antisense strand to SEQ ID NO: 1247346
uaagacaaucagugcaaag

SEQ ID NO: 1247348 - RNA, 19 nt, Artificial Sequence
  Description of Artificial Sequence: Synthetic oligonucleotide
  Sense strand starting at position 618 of SEQ ID NO: 1241106
uguccagagccauguguaa

SEQ ID NO: 1247349 - RNA, 19 nt, Artificial Sequence
  Description of Artificial Sequence: Synthetic oligonucleotide
  Antisense strand to SEQ ID NO: 1247348
uuacacauggcucuggaca

SEQ ID NO: 1247350 - RNA, 19 nt, Artificial Sequence
  Description of Artificial Sequence: Synthetic oligonucleotide
  Sense strand starting at position 639 of SEQ ID NO: 1241106
auacaucugugcucacaca

SEQ ID NO: 1247351 - RNA, 19 nt, Artificial Sequence
  Description of Artificial Sequence: Synthetic oligonucleotide
  Antisense strand to SEQ ID NO: 1247350
ugugugagcacagauguau

SEQ ID NO: 1247352 - RNA, 19 nt, Artificial Sequence
  Description of Artificial Sequence: Synthetic oligonucleotide
  Sense strand starting at position 661 of SEQ ID NO: 1241106
ugguguacgucugcacaga

SEQ ID NO: 1247353 - RNA, 19 nt, Artificial Sequence
  Description of Artificial Sequence: Synthetic oligonucleotide
  Antisense strand to SEQ ID NO: 1247352
ucugugcagacguacacca

SEQ ID NO: 1247354 - RNA, 19 nt, Artificial Sequence
  Description of Artificial Sequence: Synthetic oligonucleotide
  Sense strand starting at position 662 of SEQ ID NO: 1241106
gguguacgucugcacagaa

SEQ ID NO: 1247355 - RNA, 19 nt, Artificial Sequence
  Description of Artificial Sequence: Synthetic oligonucleotide
  Antisense strand to SEQ ID NO: 1247354
uucugugcagacguacacc

SEQ ID NO: 1247356 - RNA, 19 nt, Artificial Sequence
  Description of Artificial Sequence: Synthetic oligonucleotide
  Sense strand starting at position 853 of SEQ ID NO: 1241106
ccagaacccugguguauga

SEQ ID NO: 1247357 - RNA, 19 nt, Artificial Sequence
  Description of Artificial Sequence: Synthetic oligonucleotide
  Antisense strand to SEQ ID NO: 1247356
ucauacaccaggguucugg

SEQ ID NO: 1247358 - RNA, 19 nt, Artificial Sequence
  Description of Artificial Sequence: Synthetic oligonucleotide
  Sense strand starting at position 868 of SEQ ID NO: 1241106
augagaagucuacacagcu

SEQ ID NO: 1247359 - RNA, 19 nt, Artificial Sequence
  Description of Artificial Sequence: Synthetic oligonucleotide
  Antisense strand to SEQ ID NO: 1247358
agcuguguagacuucucau

SEQ ID NO: 1247360 - RNA, 19 nt, Artificial Sequence
  Description of Artificial Sequence: Synthetic oligonucleotide
  Sense strand starting at position 1333 of SEQ ID NO: 1241106
cggcgagucuuucuccaac

SEQ ID NO: 1247361 - RNA, 19 nt, Artificial Sequence
  Description of Artificial Sequence: Synthetic oligonucleotide
  Antisense strand to SEQ ID NO: 1247360
guuggagaaagacucgccg

SEQ ID NO: 1247362 - RNA, 19 nt, Artificial Sequence
  Description of Artificial Sequence: Synthetic oligonucleotide
  Sense strand starting at position 2323 of SEQ ID NO: 1241106
ggacgaaucccggacuucu

SEQ ID NO: 1247363 - RNA, 19 nt, Artificial Sequence
  Description of Artificial Sequence: Synthetic oligonucleotide
  Antisense strand to SEQ ID NO: 1247362
agaaguccgggauucgucc

SEQ ID NO: 1247364 - RNA, 19 nt, Artificial Sequence
  Description of Artificial Sequence: Synthetic oligonucleotide
  Sense strand starting at position 2775 of SEQ ID NO: 1241106
ccggguauggaaugaguaa

SEQ ID NO: 1247365 - RNA, 19 nt, Artificial Sequence
  Description of Artificial Sequence: Synthetic oligonucleotide
  Antisense strand to SEQ ID NO: 1247364
uuacucauuccauacccgg

SEQ ID NO: 1247366 - RNA, 19 nt, Artificial Sequence
  Description of Artificial Sequence: Synthetic oligonucleotide
  Sense strand starting at position 2866 of SEQ ID NO: 1241106
gccagaaguuccuccgaca

SEQ ID NO: 1247367 - RNA, 19 nt, Artificial Sequence
  Description of Artificial Sequence: Synthetic oligonucleotide
  Antisense strand to SEQ ID NO: 1247366
ugucggaggaacuucuggc

SEQ ID NO: 1247368 - RNA, 19 nt, Artificial Sequence
  Description of Artificial Sequence: Synthetic oligonucleotide
  Sense strand starting at position 2869 of SEQ ID NO: 1241106
agaaguuccuccgacaacu

SEQ ID NO: 1247369 - RNA, 19 nt, Artificial Sequence
  Description of Artificial Sequence: Synthetic oligonucleotide
  Antisense strand to SEQ ID NO: 1247368
aguugucggaggaacuucu

SEQ ID NO: 1247370 - RNA, 19 nt, Artificial Sequence
  Description of Artificial Sequence: Synthetic oligonucleotide
  Sense strand starting at position 2937 of SEQ ID NO: 1241106
aagacagacucuugugagu

SEQ ID NO: 1247371 - RNA, 19 nt, Artificial Sequence
  Description of Artificial Sequence: Synthetic oligonucleotide
  Antisense strand to SEQ ID NO: 1247370
acucacaagagucugucuu

SEQ ID NO: 1247372 - RNA, 19 nt, Artificial Sequence
  Description of Artificial Sequence: Synthetic oligonucleotide
  Sense strand starting at position 2939 of SEQ ID NO: 1241106
gacagacucuugugaguua

SEQ ID NO: 1247373 - RNA, 19 nt, Artificial Sequence
  Description of Artificial Sequence: Synthetic oligonucleotide
  Antisense strand to SEQ ID NO: 1247372
uaacucacaagagucuguc

SEQ ID NO: 1247374 - RNA, 19 nt, Artificial Sequence
  Description of Artificial Sequence: Synthetic oligonucleotide
  Sense strand starting at position 2952 of SEQ ID NO: 1241106
gaguuaccuuccugaggcu

SEQ ID NO: 1247375 - RNA, 19 nt, Artificial Sequence
  Description of Artificial Sequence: Synthetic oligonucleotide
  Antisense strand to SEQ ID NO: 1247374
agccucaggaagguaacuc

SEQ ID NO: 1247376 - RNA, 19 nt, Artificial Sequence
  Description of Artificial Sequence: Synthetic oligonucleotide
  Sense strand starting at position 2961 of SEQ ID NO: 1241106
uccugaggcugcuaaguau

SEQ ID NO: 1247377 - RNA, 19 nt, Artificial Sequence
  Description of Artificial Sequence: Synthetic oligonucleotide
  Antisense strand to SEQ ID NO: 1247376
auacuuagcagccucagga

SEQ ID NO: 1247378 - RNA, 19 nt, Artificial Sequence
  Description of Artificial Sequence: Synthetic oligonucleotide
  Sense strand starting at position 3443 of SEQ ID NO: 1241106
gaggaagaguuccugguau

SEQ ID NO: 1247379 - RNA, 19 nt, Artificial Sequence
  Description of Artificial Sequence: Synthetic oligonucleotide
  Antisense strand to SEQ ID NO: 1247378
auaccaggaacucuuccuc

SEQ ID NO: 1247380 - RNA, 19 nt, Artificial Sequence
  Description of Artificial Sequence: Synthetic oligonucleotide
  Sense strand starting at position 3445 of SEQ ID NO: 1241106
ggaagaguuccugguaucu

SEQ ID NO: 1247381 - RNA, 19 nt, Artificial Sequence
  Description of Artificial Sequence: Synthetic oligonucleotide
  Antisense strand to SEQ ID NO: 1247380
agauaccaggaacucuucc

SEQ ID NO: 1247382 - RNA, 19 nt, Artificial Sequence
  Description of Artificial Sequence: Synthetic oligonucleotide
  Sense strand starting at position 3447 of SEQ ID NO: 1241106
aagaguuccugguaucugu

SEQ ID NO: 1247383 - RNA, 19 nt, Artificial Sequence
  Description of Artificial Sequence: Synthetic oligonucleotide
  Antisense strand to SEQ ID NO: 1247382
acagauaccaggaacucuu

SEQ ID NO: 1247384 - RNA, 19 nt, Artificial Sequence
  Description of Artificial Sequence: Synthetic oligonucleotide
  Sense strand starting at position 3454 of SEQ ID NO: 1241106
ccugguaucuguccaccau

SEQ ID NO: 1247385 - RNA, 19 nt, Artificial Sequence
  Description of Artificial Sequence: Synthetic oligonucleotide
  Antisense strand to SEQ ID NO: 1247384
augguggacagauaccagg

SEQ ID NO: 1247386 - RNA, 19 nt, Artificial Sequence
  Description of Artificial Sequence: Synthetic oligonucleotide
  Sense strand starting at position 3889 of SEQ ID NO: 1241106
acagaauggucaggagaga

SEQ ID NO: 1247387 - RNA, 19 nt, Artificial Sequence
  Description of Artificial Sequence: Synthetic oligonucleotide
  Antisense strand to SEQ ID NO: 1247386
ucucuccugaccauucugu

SEQ ID NO: 1247388 - RNA, 19 nt, Artificial Sequence
  Description of Artificial Sequence: Synthetic oligonucleotide
  Sense strand starting at position 3952 of SEQ ID NO: 1241106
gccagauguuuccgacaaa

SEQ ID NO: 1247389 - RNA, 19 nt, Artificial Sequence
  Description of Artificial Sequence: Synthetic oligonucleotide
  Antisense strand to SEQ ID NO: 1247388
uuugucggaaacaucuggc

SEQ ID NO: 1247390 - RNA, 19 nt, Artificial Sequence
  Description of Artificial Sequence: Synthetic oligonucleotide
  Sense strand starting at position 69 of SEQ ID NO: 1241107
gucugcuccagcuguguuu

SEQ ID NO: 1247391 - RNA, 19 nt, Artificial Sequence
  Description of Artificial Sequence: Synthetic oligonucleotide
  Antisense strand to SEQ ID NO: 1247390
aaacacagcuggagcagac

SEQ ID NO: 1247392 - RNA, 19 nt, Artificial Sequence
  Description of Artificial Sequence: Synthetic oligonucleotide
  Sense strand starting at position 1313 of SEQ ID NO: 1241107
agggcugccaagugucaaa

SEQ ID NO: 1247393 - RNA, 19 nt, Artificial Sequence
  Description of Artificial Sequence: Synthetic oligonucleotide
  Antisense strand to SEQ ID NO: 1247392
uuugacacuuggcagcccu

SEQ ID NO: 1247394 - RNA, 19 nt, Artificial Sequence
  Description of Artificial Sequence: Synthetic oligonucleotide
  Sense strand starting at position 1324 of SEQ ID NO: 1241107
gugucaaauccauguaauu

SEQ ID NO: 1247395 - RNA, 19 nt, Artificial Sequence
  Description of Artificial Sequence: Synthetic oligonucleotide
  Antisense strand to SEQ ID NO: 1247394
aauuacauggauuugacac

SEQ ID NO: 1247396 - RNA, 19 nt, Artificial Sequence
  Description of Artificial Sequence: Synthetic oligonucleotide
  Sense strand starting at position 1646 of SEQ ID NO: 1241107
ugguguuccuacccaugga

SEQ ID NO: 1247397 - RNA, 19 nt, Artificial Sequence
  Description of Artificial Sequence: Synthetic oligonucleotide
  Antisense strand to SEQ ID NO: 1247396
uccauggguaggaacacca

SEQ ID NO: 1247398 - RNA, 19 nt, Artificial Sequence
  Description of Artificial Sequence: Synthetic oligonucleotide
  Sense strand starting at position 1850 of SEQ ID NO: 1241107
cggucugaaucugguucau

SEQ ID NO: 1247399 - RNA, 19 nt, Artificial Sequence
  Description of Artificial Sequence: Synthetic oligonucleotide
  Antisense strand to SEQ ID NO: 1247398
augaaccagauucagaccg

SEQ ID NO: 1247400 - RNA, 19 nt, Artificial Sequence
  Description of Artificial Sequence: Synthetic oligonucleotide
  Sense strand starting at position 2212 of SEQ ID NO: 1241107
ugcucuuccugugagcagu

SEQ ID NO: 1247401 - RNA, 19 nt, Artificial Sequence
  Description of Artificial Sequence: Synthetic oligonucleotide
  Antisense strand to SEQ ID NO: 1247400
acugcucacaggaagagca

SEQ ID NO: 1247402 - RNA, 19 nt, Artificial Sequence
  Description of Artificial Sequence: Synthetic oligonucleotide
  Sense strand starting at position 2423 of SEQ ID NO: 1241107
guugcuuugcacugauugu

SEQ ID NO: 1247403 - RNA, 19 nt, Artificial Sequence
  Description of Artificial Sequence: Synthetic oligonucleotide
  Antisense strand to SEQ ID NO: 1247402
acaaucagugcaaagcaac

SEQ ID NO: 1247404 - RNA, 19 nt, Artificial Sequence
  Description of Artificial Sequence: Synthetic oligonucleotide
  Sense strand starting at position 2427 of SEQ ID NO: 1241107
cuuugcacugauugucuua

SEQ ID NO: 1247405 - RNA, 19 nt, Artificial Sequence
  Description of Artificial Sequence: Synthetic oligonucleotide
  Antisense strand to SEQ ID NO: 1247404
uaagacaaucagugcaaag

SEQ ID NO: 1247406 - RNA, 19 nt, Artificial Sequence
  Description of Artificial Sequence: Synthetic oligonucleotide
  Sense strand starting at position 2760 of SEQ ID NO: 1241107
uguccagagccauguguaa

SEQ ID NO: 1247407 - RNA, 19 nt, Artificial Sequence
  Description of Artificial Sequence: Synthetic oligonucleotide
  Antisense strand to SEQ ID NO: 1247406
uuacacauggcucuggaca

SEQ ID NO: 1247408 - RNA, 19 nt, Artificial Sequence
  Description of Artificial Sequence: Synthetic oligonucleotide
  Sense strand starting at position 2781 of SEQ ID NO: 1241107
auacaucugugcucacaca

SEQ ID NO: 1247409 - RNA, 19 nt, Artificial Sequence
  Description of Artificial Sequence: Synthetic oligonucleotide
  Antisense strand to SEQ ID NO: 1247408
ugugugagcacagauguau

SEQ ID NO: 1247410 - RNA, 19 nt, Artificial Sequence
  Description of Artificial Sequence: Synthetic oligonucleotide
  Sense strand starting at position 2803 of SEQ ID NO: 1241107
ugguguacgucugcacaga

SEQ ID NO: 1247411 - RNA, 19 nt, Artificial Sequence
  Description of Artificial Sequence: Synthetic oligonucleotide
  Antisense strand to SEQ ID NO: 1247410
ucugugcagacguacacca

SEQ ID NO: 1247412 - RNA, 19 nt, Artificial Sequence
  Description of Artificial Sequence: Synthetic oligonucleotide
  Sense strand starting at position 2804 of SEQ ID NO: 1241107
gguguacgucugcacagaa

SEQ ID NO: 1247413 - RNA, 19 nt, Artificial Sequence
  Description of Artificial Sequence: Synthetic oligonucleotide
  Antisense strand to SEQ ID NO: 1247412
uucugugcagacguacacc

SEQ ID NO: 1247414 - RNA, 19 nt, Artificial Sequence
  Description of Artificial Sequence: Synthetic oligonucleotide
  Sense strand starting at position 2995 of SEQ ID NO: 1241107
ccagaacccugguguauga

SEQ ID NO: 1247415 - RNA, 19 nt, Artificial Sequence
  Description of Artificial Sequence: Synthetic oligonucleotide
  Antisense strand to SEQ ID NO: 1247414
ucauacaccaggguucugg

SEQ ID NO: 1247416 - RNA, 19 nt, Artificial Sequence
  Description of Artificial Sequence: Synthetic oligonucleotide
  Sense strand starting at position 3010 of SEQ ID NO: 1241107
augagaagucuacacagcu

SEQ ID NO: 1247417 - RNA, 19 nt, Artificial Sequence
  Description of Artificial Sequence: Synthetic oligonucleotide
  Antisense strand to SEQ ID NO: 1247416
agcuguguagacuucucau

SEQ ID NO: 1247418 - RNA, 19 nt, Artificial Sequence
  Description of Artificial Sequence: Synthetic oligonucleotide
  Sense strand starting at position 3475 of SEQ ID NO: 1241107
cggcgagucuuucuccaac

SEQ ID NO: 1247419 - RNA, 19 nt, Artificial Sequence
  Description of Artificial Sequence: Synthetic oligonucleotide
  Antisense strand to SEQ ID NO: 1247418
guuggagaaagacucgccg

SEQ ID NO: 1247420 - RNA, 19 nt, Artificial Sequence
  Description of Artificial Sequence: Synthetic oligonucleotide
  Sense strand starting at position 254 of SEQ ID NO: 1241108
cuccuaguuggcugaggau

SEQ ID NO: 1247421 - RNA, 19 nt, Artificial Sequence
  Description of Artificial Sequence: Synthetic oligonucleotide
  Antisense strand to SEQ ID NO: 1247420
auccucagccaacuaggag

SEQ ID NO: 1247422 - RNA, 19 nt, Artificial Sequence
  Description of Artificial Sequence: Synthetic oligonucleotide
  Sense strand starting at position 266 of SEQ ID NO: 1241108
ugaggauuacucuaucugu

SEQ ID NO: 1247423 - RNA, 19 nt, Artificial Sequence
  Description of Artificial Sequence: Synthetic oligonucleotide
  Antisense strand to SEQ ID NO: 1247422
acagauagaguaauccuca

SEQ ID NO: 1247424 - RNA, 19 nt, Artificial Sequence
  Description of Artificial Sequence: Synthetic oligonucleotide
  Sense strand starting at position 269 of SEQ ID NO: 1241108
ggauuacucuaucuguucu

SEQ ID NO: 1247425 - RNA, 19 nt, Artificial Sequence
  Description of Artificial Sequence: Synthetic oligonucleotide
  Antisense strand to SEQ ID NO: 1247424
agaacagauagaguaaucc

SEQ ID NO: 1247426 - RNA, 19 nt, Artificial Sequence
  Description of Artificial Sequence: Synthetic oligonucleotide
  Sense strand starting at position 301 of SEQ ID NO: 1241108
ucagaaguuucuccaaaug

SEQ ID NO: 1247427 - RNA, 19 nt, Artificial Sequence
  Description of Artificial Sequence: Synthetic oligonucleotide
  Antisense strand to SEQ ID NO: 1247426
cauuuggagaaacuucuga

SEQ ID NO: 1247428 - RNA, 19 nt, Artificial Sequence
  Description of Artificial Sequence: Synthetic oligonucleotide
  Sense strand starting at position 368 of SEQ ID NO: 1241108
gagagauucuucuccuuga

SEQ ID NO: 1247429 - RNA, 19 nt, Artificial Sequence
  Description of Artificial Sequence: Synthetic oligonucleotide
  Antisense strand to SEQ ID NO: 1247428
ucaaggagaagaaucucuc

SEQ ID NO: 1247430 - RNA, 19 nt, Artificial Sequence
  Description of Artificial Sequence: Synthetic oligonucleotide
  Sense strand starting at position 369 of SEQ ID NO: 1241108
agagauucuucuccuugau

SEQ ID NO: 1247431 - RNA, 19 nt, Artificial Sequence
  Description of Artificial Sequence: Synthetic oligonucleotide
  Antisense strand to SEQ ID NO: 1247430
aucaaggagaagaaucucu

SEQ ID NO: 1247432 - RNA, 19 nt, Artificial Sequence
  Description of Artificial Sequence: Synthetic oligonucleotide
  Sense strand starting at position 372 of SEQ ID NO: 1241108
gauucuucuccuugaugga

SEQ ID NO: 1247433 - RNA, 19 nt, Artificial Sequence
  Description of Artificial Sequence: Synthetic oligonucleotide
  Antisense strand to SEQ ID NO: 1247432
uccaucaaggagaagaauc

SEQ ID NO: 1247434 - RNA, 19 nt, Artificial Sequence
  Description of Artificial Sequence: Synthetic oligonucleotide
  Sense strand starting at position 406 of SEQ ID NO: 1241108
uucuuaagguucucaauga

SEQ ID NO: 1247435 - RNA, 19 nt, Artificial Sequence
  Description of Artificial Sequence: Synthetic oligonucleotide
  Antisense strand to SEQ ID NO: 1247434
ucauugagaaccuuaagaa

SEQ ID NO: 1247436 - RNA, 19 nt, Artificial Sequence
  Description of Artificial Sequence: Synthetic oligonucleotide
  Sense strand starting at position 417 of SEQ ID NO: 1241108
cucaaugacucauugugau

SEQ ID NO: 1247437 - RNA, 19 nt, Artificial Sequence
  Description of Artificial Sequence: Synthetic oligonucleotide
  Antisense strand to SEQ ID NO: 1247436
aucacaaugagucauugag

SEQ ID NO: 1247438 - RNA, 19 nt, Artificial Sequence
  Description of Artificial Sequence: Synthetic oligonucleotide
  Sense strand starting at position 559 of SEQ ID NO: 1241108
caaggaucgcagcaagaaa

SEQ ID NO: 1247439 - RNA, 19 nt, Artificial Sequence
  Description of Artificial Sequence: Synthetic oligonucleotide
  Antisense strand to SEQ ID NO: 1247438
uuucuugcugcgauccuug

SEQ ID NO: 1247440 - RNA, 19 nt, Artificial Sequence
  Description of Artificial Sequence: Synthetic oligonucleotide
  Sense strand starting at position 668 of SEQ ID NO: 1241108
ugacucugccaagaaucuu

SEQ ID NO: 1247441 - RNA, 19 nt, Artificial Sequence
  Description of Artificial Sequence: Synthetic oligonucleotide
  Antisense strand to SEQ ID NO: 1247440
aagauucuuggcagaguca

SEQ ID NO: 1247442 - RNA, 19 nt, Artificial Sequence
  Description of Artificial Sequence: Synthetic oligonucleotide
  Sense strand starting at position 693 of SEQ ID NO: 1241108
gcccaaguuucuuuacuag

SEQ ID NO: 1247443 - RNA, 19 nt, Artificial Sequence
  Description of Artificial Sequence: Synthetic oligonucleotide
  Antisense strand to SEQ ID NO: 1247442
cuaguaaagaaacuugggc

SEQ ID NO: 1247444 - RNA, 19 nt, Artificial Sequence
  Description of Artificial Sequence: Synthetic oligonucleotide
  Sense strand starting at position 763 of SEQ ID NO: 1241108
agaggaaauucucagacug

SEQ ID NO: 1247445 - RNA, 19 nt, Artificial Sequence
  Description of Artificial Sequence: Synthetic oligonucleotide
  Antisense strand to SEQ ID NO: 1247444
cagucugagaauuuccucu

SEQ ID NO: 1247446 - RNA, 19 nt, Artificial Sequence
  Description of Artificial Sequence: Synthetic oligonucleotide
  Sense strand starting at position 765 of SEQ ID NO: 1241108
aggaaauucucagacugga

SEQ ID NO: 1247447 - RNA, 19 nt, Artificial Sequence
  Description of Artificial Sequence: Synthetic oligonucleotide
  Antisense strand to SEQ ID NO: 1247446
uccagucugagaauuuccu

SEQ ID NO: 1247448 - RNA, 19 nt, Artificial Sequence
  Description of Artificial Sequence: Synthetic oligonucleotide
  Sense strand starting at position 790 of SEQ ID NO: 1241108
gaauaagaacggcacuguu

SEQ ID NO: 1247449 - RNA, 19 nt, Artificial Sequence
  Description of Artificial Sequence: Synthetic oligonucleotide
  Antisense strand to SEQ ID NO: 1247448
aacagugccguucuuauuc

SEQ ID NO: 1247450 - RNA, 19 nt, Artificial Sequence
  Description of Artificial Sequence: Synthetic oligonucleotide
  Sense strand starting at position 822 of SEQ ID NO: 1241108
uguuucuugccugcgguaa

SEQ ID NO: 1247451 - RNA, 19 nt, Artificial Sequence
  Description of Artificial Sequence: Synthetic oligonucleotide
  Antisense strand to SEQ ID NO: 1247450
uuaccgcaggcaagaaaca

SEQ ID NO: 1247452 - RNA, 19 nt, Artificial Sequence
  Description of Artificial Sequence: Synthetic oligonucleotide
  Sense strand starting at position 835 of SEQ ID NO: 1241108
cgguaaaucuugccacaua

SEQ ID NO: 1247453 - RNA, 19 nt, Artificial Sequence
  Description of Artificial Sequence: Synthetic oligonucleotide
  Antisense strand to SEQ ID NO: 1247452
uauguggcaagauuuaccg

SEQ ID NO: 1247454 - RNA, 19 nt, Artificial Sequence
  Description of Artificial Sequence: Synthetic oligonucleotide
  Sense strand starting at position 1085 of SEQ ID NO: 1241108
uaaagauguuugguaccuu

SEQ ID NO: 1247455 - RNA, 19 nt, Artificial Sequence
  Description of Artificial Sequence: Synthetic oligonucleotide
  Antisense strand to SEQ ID NO: 1247454
aagguaccaaacaucuuua

SEQ ID NO: 1247456 - RNA, 19 nt, Artificial Sequence
  Description of Artificial Sequence: Synthetic oligonucleotide
  Sense strand starting at position 1089 of SEQ ID NO: 1241108
gauguuugguaccuugaac

SEQ ID NO: 1247457 - RNA, 19 nt, Artificial Sequence
  Description of Artificial Sequence: Synthetic oligonucleotide
  Antisense strand to SEQ ID NO: 1247456
guucaagguaccaaacauc

SEQ ID NO: 1247458 - RNA, 19 nt, Artificial Sequence
  Description of Artificial Sequence: Synthetic oligonucleotide
  Sense strand starting at position 1149 of SEQ ID NO: 1241108
cuacccuaucuauguagau

SEQ ID NO: 1247459 - RNA, 19 nt, Artificial Sequence
  Description of Artificial Sequence: Synthetic oligonucleotide
  Antisense strand to SEQ ID NO: 1247458
aucuacauagauaggguag

SEQ ID NO: 1247460 - RNA, 19 nt, Artificial Sequence
  Description of Artificial Sequence: Synthetic oligonucleotide
  Sense strand starting at position 1162 of SEQ ID NO: 1241108
guagaugugcccuaucuau

SEQ ID NO: 1247461 - RNA, 19 nt, Artificial Sequence
  Description of Artificial Sequence: Synthetic oligonucleotide
  Antisense strand to SEQ ID NO: 1247460
auagauagggcacaucuac

SEQ ID NO: 1247462 - RNA, 19 nt, Artificial Sequence
  Description of Artificial Sequence: Synthetic oligonucleotide
  Sense strand starting at position 1177 of SEQ ID NO: 1241108
cuauguaaacuguaacuua

SEQ ID NO: 1247463 - RNA, 19 nt, Artificial Sequence
  Description of Artificial Sequence: Synthetic oligonucleotide
  Antisense strand to SEQ ID NO: 1247462
uaaguuacaguuuacauag

SEQ ID NO: 1247464 - RNA, 19 nt, Artificial Sequence
  Description of Artificial Sequence: Synthetic oligonucleotide
  Sense strand starting at position 1184 of SEQ ID NO: 1241108
aacuguaacuuagcugaga

SEQ ID NO: 1247465 - RNA, 19 nt, Artificial Sequence
  Description of Artificial Sequence: Synthetic oligonucleotide
  Antisense strand to SEQ ID NO: 1247464
ucucagcuaaguuacaguu

SEQ ID NO: 1247466 - RNA, 19 nt, Artificial Sequence
  Description of Artificial Sequence: Synthetic oligonucleotide
  Sense strand starting at position 1185 of SEQ ID NO: 1241108
acuguaacuuagcugagaa

SEQ ID NO: 1247467 - RNA, 19 nt, Artificial Sequence
  Description of Artificial Sequence: Synthetic oligonucleotide
  Antisense strand to SEQ ID NO: 1247466
uucucagcuaaguuacagu

SEQ ID NO: 1247468 - RNA, 19 nt, Artificial Sequence
  Description of Artificial Sequence: Synthetic oligonucleotide
  Sense strand starting at position 1389 of SEQ ID NO: 1241108
ucagaucaccacggauagu

SEQ ID NO: 1247469 - RNA, 19 nt, Artificial Sequence
  Description of Artificial Sequence: Synthetic oligonucleotide
  Antisense strand to SEQ ID NO: 1247468
acuauccguggugaucuga

SEQ ID NO: 1247470 - RNA, 19 nt, Artificial Sequence
  Description of Artificial Sequence: Synthetic oligonucleotide
  Sense strand starting at position 2072 of SEQ ID NO: 1241108
gggauaagugauugguuag

SEQ ID NO: 1247471 - RNA, 19 nt, Artificial Sequence
  Description of Artificial Sequence: Synthetic oligonucleotide
  Antisense strand to SEQ ID NO: 1247470
cuaaccaaucacuuauccc

SEQ ID NO: 1247472 - RNA, 19 nt, Artificial Sequence
  Description of Artificial Sequence: Synthetic oligonucleotide
  Sense strand starting at position 2346 of SEQ ID NO: 1241108
ggcaaagauugcccuauga

SEQ ID NO: 1247473 - RNA, 19 nt, Artificial Sequence
  Description of Artificial Sequence: Synthetic oligonucleotide
  Antisense strand to SEQ ID NO: 1247472
ucauagggcaaucuuugcc

SEQ ID NO: 1247474 - RNA, 19 nt, Artificial Sequence
  Description of Artificial Sequence: Synthetic oligonucleotide
  Sense strand starting at position 2541 of SEQ ID NO: 1241108
uuugcucuacugggaacau

SEQ ID NO: 1247475 - RNA, 19 nt, Artificial Sequence
  Description of Artificial Sequence: Synthetic oligonucleotide
  Antisense strand to SEQ ID NO: 1247474
auguucccaguagagcaaa

SEQ ID NO: 1247476 - RNA, 19 nt, Artificial Sequence
  Description of Artificial Sequence: Synthetic oligonucleotide
  Sense strand starting at position 2873 of SEQ ID NO: 1241108
aggaucaguucucuucuga

SEQ ID NO: 1247477 - RNA, 19 nt, Artificial Sequence
  Description of Artificial Sequence: Synthetic oligonucleotide
  Antisense strand to SEQ ID NO: 1247476
ucagaagagaacugauccu

SEQ ID NO: 1247478 - RNA, 19 nt, Artificial Sequence
  Description of Artificial Sequence: Synthetic oligonucleotide
  Sense strand starting at position 3057 of SEQ ID NO: 1241108
ugagagucgcgaggagaau

SEQ ID NO: 1247479 - RNA, 19 nt, Artificial Sequence
  Description of Artificial Sequence: Synthetic oligonucleotide
  Antisense strand to SEQ ID NO: 1247478
auucuccucgcgacucuca

SEQ ID NO: 1247480 - RNA, 19 nt, Artificial Sequence
  Description of Artificial Sequence: Synthetic oligonucleotide
  Sense strand starting at position 3089 of SEQ ID NO: 1241108
uuaagugucgucuugcaca

SEQ ID NO: 1247481 - RNA, 19 nt, Artificial Sequence
  Description of Artificial Sequence: Synthetic oligonucleotide
  Antisense strand to SEQ ID NO: 1247480
ugugcaagacgacacuuaa

SEQ ID NO: 1247482 - RNA, 19 nt, Artificial Sequence
  Description of Artificial Sequence: Synthetic oligonucleotide
  Sense strand starting at position 3142 of SEQ ID NO: 1241108
guuucuuaaggcugaguga

SEQ ID NO: 1247483 - RNA, 19 nt, Artificial Sequence
  Description of Artificial Sequence: Synthetic oligonucleotide
  Antisense strand to SEQ ID NO: 1247482
ucacucagccuuaagaaac

SEQ ID NO: 1247484 - RNA, 19 nt, Artificial Sequence
  Description of Artificial Sequence: Synthetic oligonucleotide
  Sense strand starting at position 3143 of SEQ ID NO: 1241108
uuucuuaaggcugagugaa

SEQ ID NO: 1247485 - RNA, 19 nt, Artificial Sequence
  Description of Artificial Sequence: Synthetic oligonucleotide
  Antisense strand to SEQ ID NO: 1247484
uucacucagccuuaagaaa

SEQ ID NO: 1247486 - RNA, 19 nt, Artificial Sequence
  Description of Artificial Sequence: Synthetic oligonucleotide
  Sense strand starting at position 3145 of SEQ ID NO: 1241108
ucuuaaggcugagugaauu

SEQ ID NO: 1247487 - RNA, 19 nt, Artificial Sequence
  Description of Artificial Sequence: Synthetic oligonucleotide
  Antisense strand to SEQ ID NO: 1247486
aauucacucagccuuaaga

SEQ ID NO: 1247488 - RNA, 19 nt, Artificial Sequence
  Description of Artificial Sequence: Synthetic oligonucleotide
  Sense strand starting at position 3151 of SEQ ID NO: 1241108
ggcugagugaauuaacgau

SEQ ID NO: 1247489 - RNA, 19 nt, Artificial Sequence
  Description of Artificial Sequence: Synthetic oligonucleotide
  Antisense strand to SEQ ID NO: 1247488
aucguuaauucacucagcc

SEQ ID NO: 1247490 - RNA, 19 nt, Artificial Sequence
  Description of Artificial Sequence: Synthetic oligonucleotide
  Sense strand starting at position 3458 of SEQ ID NO: 1241108
acaugaaaggcauaaugcu

SEQ ID NO: 1247491 - RNA, 19 nt, Artificial Sequence
  Description of Artificial Sequence: Synthetic oligonucleotide
  Antisense strand to SEQ ID NO: 1247490
agcauuaugccuuucaugu

SEQ ID NO: 1247492 - RNA, 19 nt, Artificial Sequence
  Description of Artificial Sequence: Synthetic oligonucleotide
  Sense strand starting at position 3478 of SEQ ID NO: 1241108
ggugcuuugggagaccaaa

SEQ ID NO: 1247493 - RNA, 19 nt, Artificial Sequence
  Description of Artificial Sequence: Synthetic oligonucleotide
  Antisense strand to SEQ ID NO: 1247492
uuuggucucccaaagcacc

SEQ ID NO: 1247494 - RNA, 19 nt, Artificial Sequence
  Description of Artificial Sequence: Synthetic oligonucleotide
  Sense strand starting at position 3560 of SEQ ID NO: 1241108
cccaaagagucuuucuuag

SEQ ID NO: 1247495 - RNA, 19 nt, Artificial Sequence
  Description of Artificial Sequence: Synthetic oligonucleotide
  Antisense strand to SEQ ID NO: 1247494
cuaagaaagacucuuuggg

SEQ ID NO: 1247496 - RNA, 19 nt, Artificial Sequence
  Description of Artificial Sequence: Synthetic oligonucleotide
  Sense strand starting at position 3741 of SEQ ID NO: 1241108
acaguaggucuuuaauuaa

SEQ ID NO: 1247497 - RNA, 19 nt, Artificial Sequence
  Description of Artificial Sequence: Synthetic oligonucleotide
  Antisense strand to SEQ ID NO: 1247496
uuaauuaaagaccuacugu

SEQ ID NO: 1247498 - RNA, 19 nt, Artificial Sequence
  Description of Artificial Sequence: Synthetic oligonucleotide
  Sense strand starting at position 3744 of SEQ ID NO: 1241108
guaggucuuuaauuaacau

SEQ ID NO: 1247499 - RNA, 19 nt, Artificial Sequence
  Description of Artificial Sequence: Synthetic oligonucleotide
  Antisense strand to SEQ ID NO: 1247498
auguuaauuaaagaccuac

SEQ ID NO: 1247500 - RNA, 19 nt, Artificial Sequence
  Description of Artificial Sequence: Synthetic oligonucleotide
  Sense strand starting at position 356 of SEQ ID NO: 1241109
acucucagaggugauguua

SEQ ID NO: 1247501 - RNA, 19 nt, Artificial Sequence
  Description of Artificial Sequence: Synthetic oligonucleotide
  Antisense strand to SEQ ID NO: 1247500
uaacaucaccucugagagu

SEQ ID NO: 1247502 - RNA, 19 nt, Artificial Sequence
  Description of Artificial Sequence: Synthetic oligonucleotide
  Sense strand starting at position 603 of SEQ ID NO: 1241109
gguccuguacuagacacau

SEQ ID NO: 1247503 - RNA, 19 nt, Artificial Sequence
  Description of Artificial Sequence: Synthetic oligonucleotide
  Antisense strand to SEQ ID NO: 1247502
augugucuaguacaggacc

SEQ ID NO: 1247504 - RNA, 19 nt, Artificial Sequence
  Description of Artificial Sequence: Synthetic oligonucleotide
  Sense strand starting at position 903 of SEQ ID NO: 1241109
ucuagacaucuguggacaa

SEQ ID NO: 1247505 - RNA, 19 nt, Artificial Sequence
  Description of Artificial Sequence: Synthetic oligonucleotide
  Antisense strand to SEQ ID NO: 1247504
uuguccacagaugucuaga

SEQ ID NO: 1247506 - RNA, 19 nt, Artificial Sequence
  Description of Artificial Sequence: Synthetic oligonucleotide
  Sense strand starting at position 955 of SEQ ID NO: 1241109
aacguuaaaguggauugua

SEQ ID NO: 1247507 - RNA, 19 nt, Artificial Sequence
  Description of Artificial Sequence: Synthetic oligonucleotide
  Antisense strand to SEQ ID NO: 1247506
uacaauccacuuuaacguu

SEQ ID NO: 1247508 - RNA, 19 nt, Artificial Sequence
  Description of Artificial Sequence: Synthetic oligonucleotide
  Sense strand starting at position 958 of SEQ ID NO: 1241109
guuaaaguggauuguaaag

SEQ ID NO: 1247509 - RNA, 19 nt, Artificial Sequence
  Description of Artificial Sequence: Synthetic oligonucleotide
  Antisense strand to SEQ ID NO: 1247508
cuuuacaauccacuuuaac

SEQ ID NO: 1247510 - RNA, 19 nt, Artificial Sequence
  Description of Artificial Sequence: Synthetic oligonucleotide
  Sense strand starting at position 1019 of SEQ ID NO: 1241109
cccucuugccuguuauguu

SEQ ID NO: 1247511 - RNA, 19 nt, Artificial Sequence
  Description of Artificial Sequence: Synthetic oligonucleotide
  Antisense strand to SEQ ID NO: 1247510
aacauaacaggcaagaggg

SEQ ID NO: 1247512 - RNA, 19 nt, Artificial Sequence
  Description of Artificial Sequence: Synthetic oligonucleotide
  Sense strand starting at position 2194 of SEQ ID NO: 1241109
gagugagugauggagaugu

SEQ ID NO: 1247513 - RNA, 19 nt, Artificial Sequence
  Description of Artificial Sequence: Synthetic oligonucleotide
  Antisense strand to SEQ ID NO: 1247512
acaucuccaucacucacuc

SEQ ID NO: 1247514 - RNA, 19 nt, Artificial Sequence
  Description of Artificial Sequence: Synthetic oligonucleotide
  Sense strand starting at position 2235 of SEQ ID NO: 1241109
ccaagugauccucaaagcu

SEQ ID NO: 1247515 - RNA, 19 nt, Artificial Sequence
  Description of Artificial Sequence: Synthetic oligonucleotide
  Antisense strand to SEQ ID NO: 1247514
agcuuugaggaucacuugg

SEQ ID NO: 1247516 - RNA, 19 nt, Artificial Sequence
  Description of Artificial Sequence: Synthetic oligonucleotide
  Sense strand starting at position 2345 of SEQ ID NO: 1241109
caguuaaccguuuagggau

SEQ ID NO: 1247517 - RNA, 19 nt, Artificial Sequence
  Description of Artificial Sequence: Synthetic oligonucleotide
  Antisense strand to SEQ ID NO: 1247516
aucccuaaacgguuaacug

SEQ ID NO: 1247518 - RNA, 19 nt, Artificial Sequence
  Description of Artificial Sequence: Synthetic oligonucleotide
  Sense strand starting at position 2433 of SEQ ID NO: 1241109
auuacuugguaaccaagau

SEQ ID NO: 1247519 - RNA, 19 nt, Artificial Sequence
  Description of Artificial Sequence: Synthetic oligonucleotide
  Antisense strand to SEQ ID NO: 1247518
aucuugguuaccaaguaau

SEQ ID NO: 1247520 - RNA, 19 nt, Artificial Sequence
  Description of Artificial Sequence: Synthetic oligonucleotide
  Sense strand starting at position 2571 of SEQ ID NO: 1241109
cugaauuagggcgauggua

SEQ ID NO: 1247521 - RNA, 19 nt, Artificial Sequence
  Description of Artificial Sequence: Synthetic oligonucleotide
  Antisense strand to SEQ ID NO: 1247520
uaccaucgcccuaauucag

SEQ ID NO: 1247522 - RNA, 19 nt, Artificial Sequence
  Description of Artificial Sequence: Synthetic oligonucleotide
  Sense strand starting at position 2573 of SEQ ID NO: 1241109
gaauuagggcgaugguaga

SEQ ID NO: 1247523 - RNA, 19 nt, Artificial Sequence
  Description of Artificial Sequence: Synthetic oligonucleotide
  Antisense strand to SEQ ID NO: 1247522
ucuaccaucgcccuaauuc

SEQ ID NO: 1247524 - RNA, 19 nt, Artificial Sequence
  Description of Artificial Sequence: Synthetic oligonucleotide
  Sense strand starting at position 2590 of SEQ ID NO: 1241109
gaaggaugguggucagaug

SEQ ID NO: 1247525 - RNA, 19 nt, Artificial Sequence
  Description of Artificial Sequence: Synthetic oligonucleotide
  Antisense strand to SEQ ID NO: 1247524
caucugaccaccauccuuc

SEQ ID NO: 1247526 - RNA, 19 nt, Artificial Sequence
  Description of Artificial Sequence: Synthetic oligonucleotide
  Sense strand starting at position 2597 of SEQ ID NO: 1241109
gguggucagaugcauuaau

SEQ ID NO: 1247527 - RNA, 19 nt, Artificial Sequence
  Description of Artificial Sequence: Synthetic oligonucleotide
  Antisense strand to SEQ ID NO: 1247526
auuaaugcaucugaccacc

SEQ ID NO: 1247528 - RNA, 19 nt, Artificial Sequence
  Description of Artificial Sequence: Synthetic oligonucleotide
  Sense strand starting at position 2630 of SEQ ID NO: 1241109
uuagaugccguuucgugau

SEQ ID NO: 1247529 - RNA, 19 nt, Artificial Sequence
  Description of Artificial Sequence: Synthetic oligonucleotide
  Antisense strand to SEQ ID NO: 1247528
aucacgaaacggcaucuaa

SEQ ID NO: 1247530 - RNA, 19 nt, Artificial Sequence
  Description of Artificial Sequence: Synthetic oligonucleotide
  Sense strand starting at position 2646 of SEQ ID NO: 1241109
gauggcuuaagugggagaa

SEQ ID NO: 1247531 - RNA, 19 nt, Artificial Sequence
  Description of Artificial Sequence: Synthetic oligonucleotide
  Antisense strand to SEQ ID NO: 1247530
uucucccacuuaagccauc

SEQ ID NO: 1247532 - RNA, 19 nt, Artificial Sequence
  Description of Artificial Sequence: Synthetic oligonucleotide
  Sense strand starting at position 2650 of SEQ ID NO: 1241109
gcuuaagugggagaagugu

SEQ ID NO: 1247533 - RNA, 19 nt, Artificial Sequence
  Description of Artificial Sequence: Synthetic oligonucleotide
  Antisense strand to SEQ ID NO: 1247532
acacuucucccacuuaagc

SEQ ID NO: 1247534 - RNA, 19 nt, Artificial Sequence
  Description of Artificial Sequence: Synthetic oligonucleotide
  Sense strand starting at position 2658 of SEQ ID NO: 1241109
gggagaaguguacggaaua

SEQ ID NO: 1247535 - RNA, 19 nt, Artificial Sequence
  Description of Artificial Sequence: Synthetic oligonucleotide
  Antisense strand to SEQ ID NO: 1247534
uauuccguacacuucuccc

SEQ ID NO: 1247536 - RNA, 19 nt, Artificial Sequence
  Description of Artificial Sequence: Synthetic oligonucleotide
  Sense strand starting at position 2716 of SEQ ID NO: 1241109
ugaauuguuuguuuagaag

SEQ ID NO: 1247537 - RNA, 19 nt, Artificial Sequence
  Description of Artificial Sequence: Synthetic oligonucleotide
  Antisense strand to SEQ ID NO: 1247536
cuucuaaacaaacaauuca

SEQ ID NO: 1247538 - RNA, 19 nt, Artificial Sequence
  Description of Artificial Sequence: Synthetic oligonucleotide
  Sense strand starting at position 2756 of SEQ ID NO: 1241109
augaguaaaguuugaaugu

SEQ ID NO: 1247539 - RNA, 19 nt, Artificial Sequence
  Description of Artificial Sequence: Synthetic oligonucleotide
  Antisense strand to SEQ ID NO: 1247538
acauucaaacuuuacucau

SEQ ID NO: 1247540 - RNA, 19 nt, Artificial Sequence
  Description of Artificial Sequence: Synthetic oligonucleotide
  Sense strand starting at position 2771 of SEQ ID NO: 1241109
auguguugacuuugagaaa

SEQ ID NO: 1247541 - RNA, 19 nt, Artificial Sequence
  Description of Artificial Sequence: Synthetic oligonucleotide
  Antisense strand to SEQ ID NO: 1247540
uuucucaaagucaacacau

SEQ ID NO: 1247542 - RNA, 19 nt, Artificial Sequence
  Description of Artificial Sequence: Synthetic oligonucleotide
  Sense strand starting at position 2813 of SEQ ID NO: 1241109
uuggacaaagguuguauau

SEQ ID NO: 1247543 - RNA, 19 nt, Artificial Sequence
  Description of Artificial Sequence: Synthetic oligonucleotide
  Antisense strand to SEQ ID NO: 1247542
auauacaaccuuuguccaa

SEQ ID NO: 1247544 - RNA, 19 nt, Artificial Sequence
  Description of Artificial Sequence: Synthetic oligonucleotide
  Sense strand starting at position 2828 of SEQ ID NO: 1241109
auaucauuguggcugagaa

SEQ ID NO: 1247545 - RNA, 19 nt, Artificial Sequence
  Description of Artificial Sequence: Synthetic oligonucleotide
  Antisense strand to SEQ ID NO: 1247544
uucucagccacaaugauau

SEQ ID NO: 1247546 - RNA, 19 nt, Artificial Sequence
  Description of Artificial Sequence: Synthetic oligonucleotide
  Sense strand starting at position 2830 of SEQ ID NO: 1241109
aucauuguggcugagaagu

SEQ ID NO: 1247547 - RNA, 19 nt, Artificial Sequence
  Description of Artificial Sequence: Synthetic oligonucleotide
  Antisense strand to SEQ ID NO: 1247546
acuucucagccacaaugau

SEQ ID NO: 1247548 - RNA, 19 nt, Artificial Sequence
  Description of Artificial Sequence: Synthetic oligonucleotide
  Sense strand starting at position 2891 of SEQ ID NO: 1241109
ccauuuaaucguuguuauc

SEQ ID NO: 1247549 - RNA, 19 nt, Artificial Sequence
  Description of Artificial Sequence: Synthetic oligonucleotide
  Antisense strand to SEQ ID NO: 1247548
gauaacaacgauuaaaugg

SEQ ID NO: 1247550 - RNA, 19 nt, Artificial Sequence
  Description of Artificial Sequence: Synthetic oligonucleotide
  Sense strand starting at position 2893 of SEQ ID NO: 1241109
auuuaaucguuguuaucac

SEQ ID NO: 1247551 - RNA, 19 nt, Artificial Sequence
  Description of Artificial Sequence: Synthetic oligonucleotide
  Antisense strand to SEQ ID NO: 1247550
gugauaacaacgauuaaau

SEQ ID NO: 1247552 - RNA, 19 nt, Artificial Sequence
  Description of Artificial Sequence: Synthetic oligonucleotide
  Sense strand starting at position 3007 of SEQ ID NO: 1241109
uguugagaggauugaguuu

SEQ ID NO: 1247553 - RNA, 19 nt, Artificial Sequence
  Description of Artificial Sequence: Synthetic oligonucleotide
  Antisense strand to SEQ ID NO: 1247552
aaacucaauccucucaaca

SEQ ID NO: 1247554 - RNA, 19 nt, Artificial Sequence
  Description of Artificial Sequence: Synthetic oligonucleotide
  Sense strand starting at position 3113 of SEQ ID NO: 1241109
acgggagaggccuagucua

SEQ ID NO: 1247555 - RNA, 19 nt, Artificial Sequence
  Description of Artificial Sequence: Synthetic oligonucleotide
  Antisense strand to SEQ ID NO: 1247554
uagacuaggccucucccgu

SEQ ID NO: 1247556 - RNA, 19 nt, Artificial Sequence
  Description of Artificial Sequence: Synthetic oligonucleotide
  Sense strand starting at position 3118 of SEQ ID NO: 1241109
agaggccuagucuacagau

SEQ ID NO: 1247557 - RNA, 19 nt, Artificial Sequence
  Description of Artificial Sequence: Synthetic oligonucleotide
  Antisense strand to SEQ ID NO: 1247556
aucuguagacuaggccucu

SEQ ID NO: 1247558 - RNA, 19 nt, Artificial Sequence
  Description of Artificial Sequence: Synthetic oligonucleotide
  Sense strand starting at position 3120 of SEQ ID NO: 1241109
aggccuagucuacagauaa

SEQ ID NO: 1247559 - RNA, 19 nt, Artificial Sequence
  Description of Artificial Sequence: Synthetic oligonucleotide
  Antisense strand to SEQ ID NO: 1247558
uuaucuguagacuaggccu

SEQ ID NO: 1247560 - RNA, 19 nt, Artificial Sequence
  Description of Artificial Sequence: Synthetic oligonucleotide
  Sense strand starting at position 3142 of SEQ ID NO: 1241109
uuggaauaauuaguucuga

SEQ ID NO: 1247561 - RNA, 19 nt, Artificial Sequence
  Description of Artificial Sequence: Synthetic oligonucleotide
  Antisense strand to SEQ ID NO: 1247560
ucagaacuaauuauuccaa

SEQ ID NO: 1247562 - RNA, 19 nt, Artificial Sequence
  Description of Artificial Sequence: Synthetic oligonucleotide
  Sense strand starting at position 3143 of SEQ ID NO: 1241109
uggaauaauuaguucugaa

SEQ ID NO: 1247563 - RNA, 19 nt, Artificial Sequence
  Description of Artificial Sequence: Synthetic oligonucleotide
  Antisense strand to SEQ ID NO: 1247562
uucagaacuaauuauucca

SEQ ID NO: 1247564 - RNA, 19 nt, Artificial Sequence
  Description of Artificial Sequence: Synthetic oligonucleotide
  Sense strand starting at position 3332 of SEQ ID NO: 1241109
cucagaugugaguaguaga

SEQ ID NO: 1247565 - RNA, 19 nt, Artificial Sequence
  Description of Artificial Sequence: Synthetic oligonucleotide
  Antisense strand to SEQ ID NO: 1247564
ucuacuacucacaucugag

SEQ ID NO: 1247566 - RNA, 19 nt, Artificial Sequence
  Description of Artificial Sequence: Synthetic oligonucleotide
  Sense strand starting at position 3478 of SEQ ID NO: 1241109
ggaugcaaguuuccagaca

SEQ ID NO: 1247567 - RNA, 19 nt, Artificial Sequence
  Description of Artificial Sequence: Synthetic oligonucleotide
  Antisense strand to SEQ ID NO: 1247566
ugucuggaaacuugcaucc

SEQ ID NO: 1247568 - RNA, 19 nt, Artificial Sequence
  Description of Artificial Sequence: Synthetic oligonucleotide
  Sense strand starting at position 3524 of SEQ ID NO: 1241109
aagagucagcauuauguac

SEQ ID NO: 1247569 - RNA, 19 nt, Artificial Sequence
  Description of Artificial Sequence: Synthetic oligonucleotide
  Antisense strand to SEQ ID NO: 1247568
guacauaaugcugacucuu

SEQ ID NO: 1247570 - RNA, 19 nt, Artificial Sequence
  Description of Artificial Sequence: Synthetic oligonucleotide
  Sense strand starting at position 3704 of SEQ ID NO: 1241109
aaaucagugucuucuagga

SEQ ID NO: 1247571 - RNA, 19 nt, Artificial Sequence
  Description of Artificial Sequence: Synthetic oligonucleotide
  Antisense strand to SEQ ID NO: 1247570
uccuagaagacacugauuu

SEQ ID NO: 1247572 - RNA, 19 nt, Artificial Sequence
  Description of Artificial Sequence: Synthetic oligonucleotide
  Sense strand starting at position 3720 of SEQ ID NO: 1241109
ggacuuuaauuaucuggua

SEQ ID NO: 1247573 - RNA, 19 nt, Artificial Sequence
  Description of Artificial Sequence: Synthetic oligonucleotide
  Antisense strand to SEQ ID NO: 1247572
uaccagauaauuaaagucc

SEQ ID NO: 1247574 - RNA, 19 nt, Artificial Sequence
  Description of Artificial Sequence: Synthetic oligonucleotide
  Sense strand starting at position 3782 of SEQ ID NO: 1241109
cugugagaccuugaucuug

SEQ ID NO: 1247575 - RNA, 19 nt, Artificial Sequence
  Description of Artificial Sequence: Synthetic oligonucleotide
  Antisense strand to SEQ ID NO: 1247574
caagaucaaggucucacag

SEQ ID NO: 1247576 - RNA, 19 nt, Artificial Sequence
  Description of Artificial Sequence: Synthetic oligonucleotide
  Sense strand starting at position 3848 of SEQ ID NO: 1241109
guggauuguuggaaggauu

SEQ ID NO: 1247577 - RNA, 19 nt, Artificial Sequence
  Description of Artificial Sequence: Synthetic oligonucleotide
  Antisense strand to SEQ ID NO: 1247576
aauccuuccaacaauccac

SEQ ID NO: 1247578 - RNA, 19 nt, Artificial Sequence
  Description of Artificial Sequence: Synthetic oligonucleotide
  Sense strand starting at position 3936 of SEQ ID NO: 1241109
gguuuauaugcugagggag

SEQ ID NO: 1247579 - RNA, 19 nt, Artificial Sequence
  Description of Artificial Sequence: Synthetic oligonucleotide
  Antisense strand to SEQ ID NO: 1247578
cucccucagcauauaaacc

SEQ ID NO: 1247580 - RNA, 19 nt, Artificial Sequence
  Description of Artificial Sequence: Synthetic oligonucleotide
  Sense strand starting at position 105 of SEQ ID NO: 1241110
ggauuaagcugucccaucu

SEQ ID NO: 1247581 - RNA, 19 nt, Artificial Sequence
  Description of Artificial Sequence: Synthetic oligonucleotide
  Antisense strand to SEQ ID NO: 1247580
agaugggacagcuuaaucc

SEQ ID NO: 1247582 - RNA, 19 nt, Artificial Sequence
  Description of Artificial Sequence: Synthetic oligonucleotide
  Sense strand starting at position 315 of SEQ ID NO: 1241110
gggacacuuucccuagugu

SEQ ID NO: 1247583 - RNA, 19 nt, Artificial Sequence
  Description of Artificial Sequence: Synthetic oligonucleotide
  Antisense strand to SEQ ID NO: 1247582
acacuagggaaaguguccc

SEQ ID NO: 1247584 - RNA, 19 nt, Artificial Sequence
  Description of Artificial Sequence: Synthetic oligonucleotide
  Sense strand starting at position 316 of SEQ ID NO: 1241110
ggacacuuucccuaguguu

SEQ ID NO: 1247585 - RNA, 19 nt, Artificial Sequence
  Description of Artificial Sequence: Synthetic oligonucleotide
  Antisense strand to SEQ ID NO: 1247584
aacacuagggaaagugucc

SEQ ID NO: 1247586 - RNA, 19 nt, Artificial Sequence
  Description of Artificial Sequence: Synthetic oligonucleotide
  Sense strand starting at position 322 of SEQ ID NO: 1241110
uuucccuaguguucuaaag

SEQ ID NO: 1247587 - RNA, 19 nt, Artificial Sequence
  Description of Artificial Sequence: Synthetic oligonucleotide
  Antisense strand to SEQ ID NO: 1247586
cuuuagaacacuagggaaa

SEQ ID NO: 1247588 - RNA, 19 nt, Artificial Sequence
  Description of Artificial Sequence: Synthetic oligonucleotide
  Sense strand starting at position 332 of SEQ ID NO: 1241110
guucuaaagauggagcuuu

SEQ ID NO: 1247589 - RNA, 19 nt, Artificial Sequence
  Description of Artificial Sequence: Synthetic oligonucleotide
  Antisense strand to SEQ ID NO: 1247588
aaagcuccaucuuuagaac

SEQ ID NO: 1247590 - RNA, 19 nt, Artificial Sequence
  Description of Artificial Sequence: Synthetic oligonucleotide
  Sense strand starting at position 1244 of SEQ ID NO: 1241110
agaggacagcguuguuaag

SEQ ID NO: 1247591 - RNA, 19 nt, Artificial Sequence
  Description of Artificial Sequence: Synthetic oligonucleotide
  Antisense strand to SEQ ID NO: 1247590
cuuaacaacgcuguccucu

SEQ ID NO: 1247592 - RNA, 19 nt, Artificial Sequence
  Description of Artificial Sequence: Synthetic oligonucleotide
  Sense strand starting at position 2153 of SEQ ID NO: 1241110
caccuuagguucucaggaa

SEQ ID NO: 1247593 - RNA, 19 nt, Artificial Sequence
  Description of Artificial Sequence: Synthetic oligonucleotide
  Antisense strand to SEQ ID NO: 1247592
uuccugagaaccuaaggug

SEQ ID NO: 1247594 - RNA, 19 nt, Artificial Sequence
  Description of Artificial Sequence: Synthetic oligonucleotide
  Sense strand starting at position 2365 of SEQ ID NO: 1241110
guggugguuggaugauaga

SEQ ID NO: 1247595 - RNA, 19 nt, Artificial Sequence
  Description of Artificial Sequence: Synthetic oligonucleotide
  Antisense strand to SEQ ID NO: 1247594
ucuaucauccaaccaccac

SEQ ID NO: 1247596 - RNA, 19 nt, Artificial Sequence
  Description of Artificial Sequence: Synthetic oligonucleotide
  Sense strand starting at position 2404 of SEQ ID NO: 1241110
augguauguggaugguaua

SEQ ID NO: 1247597 - RNA, 19 nt, Artificial Sequence
  Description of Artificial Sequence: Synthetic oligonucleotide
  Antisense strand to SEQ ID NO: 1247596
uauaccauccacauaccau

SEQ ID NO: 1247598 - RNA, 19 nt, Artificial Sequence
  Description of Artificial Sequence: Synthetic oligonucleotide
  Sense strand starting at position 2519 of SEQ ID NO: 1241110
ggacgcauggcagaugaau

SEQ ID NO: 1247599 - RNA, 19 nt, Artificial Sequence
  Description of Artificial Sequence: Synthetic oligonucleotide
  Antisense strand to SEQ ID NO: 1247598
auucaucugccaugcgucc

SEQ ID NO: 1247600 - RNA, 19 nt, Artificial Sequence
  Description of Artificial Sequence: Synthetic oligonucleotide
  Sense strand starting at position 2525 of SEQ ID NO: 1241110
auggcagaugaaugguaaa

SEQ ID NO: 1247601 - RNA, 19 nt, Artificial Sequence
  Description of Artificial Sequence: Synthetic oligonucleotide
  Antisense strand to SEQ ID NO: 1247600
uuuaccauucaucugccau

SEQ ID NO: 1247602 - RNA, 19 nt, Artificial Sequence
  Description of Artificial Sequence: Synthetic oligonucleotide
  Sense strand starting at position 2555 of SEQ ID NO: 1241110
guggauggugagugauaga

SEQ ID NO: 1247603 - RNA, 19 nt, Artificial Sequence
  Description of Artificial Sequence: Synthetic oligonucleotide
  Antisense strand to SEQ ID NO: 1247602
ucuaucacucaccauccac

SEQ ID NO: 1247604 - RNA, 19 nt, Artificial Sequence
  Description of Artificial Sequence: Synthetic oligonucleotide
  Sense strand starting at position 2951 of SEQ ID NO: 1241110
gggagugguggauggauaa

SEQ ID NO: 1247605 - RNA, 19 nt, Artificial Sequence
  Description of Artificial Sequence: Synthetic oligonucleotide
  Antisense strand to SEQ ID NO: 1247604
uuauccauccaccacuccc

SEQ ID NO: 1247606 - RNA, 19 nt, Artificial Sequence
  Description of Artificial Sequence: Synthetic oligonucleotide
  Sense strand starting at position 2952 of SEQ ID NO: 1241110
ggagugguggauggauaau

SEQ ID NO: 1247607 - RNA, 19 nt, Artificial Sequence
  Description of Artificial Sequence: Synthetic oligonucleotide
  Antisense strand to SEQ ID NO: 1247606
auuauccauccaccacucc

SEQ ID NO: 1247608 - RNA, 19 nt, Artificial Sequence
  Description of Artificial Sequence: Synthetic oligonucleotide
  Sense strand starting at position 2988 of SEQ ID NO: 1241110
ggccgacagguagaucaua

SEQ ID NO: 1247609 - RNA, 19 nt, Artificial Sequence
  Description of Artificial Sequence: Synthetic oligonucleotide
  Antisense strand to SEQ ID NO: 1247608
uaugaucuaccugucggcc

SEQ ID NO: 1247610 - RNA, 19 nt, Artificial Sequence
  Description of Artificial Sequence: Synthetic oligonucleotide
  Sense strand starting at position 3233 of SEQ ID NO: 1241110
ggagguuguggugaucgga

SEQ ID NO: 1247611 - RNA, 19 nt, Artificial Sequence
  Description of Artificial Sequence: Synthetic oligonucleotide
  Antisense strand to SEQ ID NO: 1247610
uccgaucaccacaaccucc

SEQ ID NO: 1247612 - RNA, 19 nt, Artificial Sequence
  Description of Artificial Sequence: Synthetic oligonucleotide
  Sense strand starting at position 3235 of SEQ ID NO: 1241110
agguuguggugaucggaga

SEQ ID NO: 1247613 - RNA, 19 nt, Artificial Sequence
  Description of Artificial Sequence: Synthetic oligonucleotide
  Antisense strand to SEQ ID NO: 1247612
ucuccgaucaccacaaccu

SEQ ID NO: 1247614 - RNA, 19 nt, Artificial Sequence
  Description of Artificial Sequence: Synthetic oligonucleotide
  Sense strand starting at position 3314 of SEQ ID NO: 1241110
guggguguuaaauggugga

SEQ ID NO: 1247615 - RNA, 19 nt, Artificial Sequence
  Description of Artificial Sequence: Synthetic oligonucleotide
  Antisense strand to SEQ ID NO: 1247614
uccaccauuuaacacccac

SEQ ID NO: 1247616 - RNA, 19 nt, Artificial Sequence
  Description of Artificial Sequence: Synthetic oligonucleotide
  Sense strand starting at position 3319 of SEQ ID NO: 1241110
uguuaaaugguggauguuu

SEQ ID NO: 1247617 - RNA, 19 nt, Artificial Sequence
  Description of Artificial Sequence: Synthetic oligonucleotide
  Antisense strand to SEQ ID NO: 1247616
aaacauccaccauuuaaca

SEQ ID NO: 1247618 - RNA, 19 nt, Artificial Sequence
  Description of Artificial Sequence: Synthetic oligonucleotide
  Sense strand starting at position 3331 of SEQ ID NO: 1241110
gauguuuggugagugauga

SEQ ID NO: 1247619 - RNA, 19 nt, Artificial Sequence
  Description of Artificial Sequence: Synthetic oligonucleotide
  Antisense strand to SEQ ID NO: 1247618
ucaucacucaccaaacauc

SEQ ID NO: 1247620 - RNA, 19 nt, Artificial Sequence
  Description of Artificial Sequence: Synthetic oligonucleotide
  Sense strand starting at position 3332 of SEQ ID NO: 1241110
auguuuggugagugaugaa

SEQ ID NO: 1247621 - RNA, 19 nt, Artificial Sequence
  Description of Artificial Sequence: Synthetic oligonucleotide
  Antisense strand to SEQ ID NO: 1247620
uucaucacucaccaaacau

SEQ ID NO: 1247622 - RNA, 19 nt, Artificial Sequence
  Description of Artificial Sequence: Synthetic oligonucleotide
  Sense strand starting at position 3339 of SEQ ID NO: 1241110
gugagugaugaaugcugaa

SEQ ID NO: 1247623 - RNA, 19 nt, Artificial Sequence
  Description of Artificial Sequence: Synthetic oligonucleotide
  Antisense strand to SEQ ID NO: 1247622
uucagcauucaucacucac

SEQ ID NO: 1247624 - RNA, 19 nt, Artificial Sequence
  Description of Artificial Sequence: Synthetic oligonucleotide
  Sense strand starting at position 3414 of SEQ ID NO: 1241110
gguugcauaaauggugaau

SEQ ID NO: 1247625 - RNA, 19 nt, Artificial Sequence
  Description of Artificial Sequence: Synthetic oligonucleotide
  Antisense strand to SEQ ID NO: 1247624
auucaccauuuaugcaacc

SEQ ID NO: 1247626 - RNA, 19 nt, Artificial Sequence
  Description of Artificial Sequence: Synthetic oligonucleotide
  Sense strand starting at position 3427 of SEQ ID NO: 1241110
gugaauuguggauggagau

SEQ ID NO: 1247627 - RNA, 19 nt, Artificial Sequence
  Description of Artificial Sequence: Synthetic oligonucleotide
  Antisense strand to SEQ ID NO: 1247626
aucuccauccacaauucac

SEQ ID NO: 1247628 - RNA, 19 nt, Artificial Sequence
  Description of Artificial Sequence: Synthetic oligonucleotide
  Sense strand starting at position 3456 of SEQ ID NO: 1241110
uagugaauagaugguggau

SEQ ID NO: 1247629 - RNA, 19 nt, Artificial Sequence
  Description of Artificial Sequence: Synthetic oligonucleotide
  Antisense strand to SEQ ID NO: 1247628
auccaccaucuauucacua

SEQ ID NO: 1247630 - RNA, 19 nt, Artificial Sequence
  Description of Artificial Sequence: Synthetic oligonucleotide
  Sense strand starting at position 3459 of SEQ ID NO: 1241110
ugaauagaugguggauagu

SEQ ID NO: 1247631 - RNA, 19 nt, Artificial Sequence
  Description of Artificial Sequence: Synthetic oligonucleotide
  Antisense strand to SEQ ID NO: 1247630
acuauccaccaucuauuca

SEQ ID NO: 1247632 - RNA, 19 nt, Artificial Sequence
  Description of Artificial Sequence: Synthetic oligonucleotide
  Sense strand starting at position 3477 of SEQ ID NO: 1241110
ugaauagacaguggauagu

SEQ ID NO: 1247633 - RNA, 19 nt, Artificial Sequence
  Description of Artificial Sequence: Synthetic oligonucleotide
  Antisense strand to SEQ ID NO: 1247632
acuauccacugucuauuca

SEQ ID NO: 1247634 - RNA, 19 nt, Artificial Sequence
  Description of Artificial Sequence: Synthetic oligonucleotide
  Sense strand starting at position 3493 of SEQ ID NO: 1241110
aguggauaauggguggaua

SEQ ID NO: 1247635 - RNA, 19 nt, Artificial Sequence
  Description of Artificial Sequence: Synthetic oligonucleotide
  Antisense strand to SEQ ID NO: 1247634
uauccacccauuauccacu

SEQ ID NO: 1247636 - RNA, 19 nt, Artificial Sequence
  Description of Artificial Sequence: Synthetic oligonucleotide
  Sense strand starting at position 3495 of SEQ ID NO: 1241110
uggauaauggguggauagu

SEQ ID NO: 1247637 - RNA, 19 nt, Artificial Sequence
  Description of Artificial Sequence: Synthetic oligonucleotide
  Antisense strand to SEQ ID NO: 1247636
acuauccacccauuaucca

SEQ ID NO: 1247638 - RNA, 19 nt, Artificial Sequence
  Description of Artificial Sequence: Synthetic oligonucleotide
  Sense strand starting at position 3539 of SEQ ID NO: 1241110
auggguaauggaugguaga

SEQ ID NO: 1247639 - RNA, 19 nt, Artificial Sequence
  Description of Artificial Sequence: Synthetic oligonucleotide
  Antisense strand to SEQ ID NO: 1247638
ucuaccauccauuacccau

SEQ ID NO: 1247640 - RNA, 19 nt, Artificial Sequence
  Description of Artificial Sequence: Synthetic oligonucleotide
  Sense strand starting at position 3540 of SEQ ID NO: 1241110
uggguaauggaugguagau

SEQ ID NO: 1247641 - RNA, 19 nt, Artificial Sequence
  Description of Artificial Sequence: Synthetic oligonucleotide
  Antisense strand to SEQ ID NO: 1247640
aucuaccauccauuaccca

SEQ ID NO: 1247642 - RNA, 19 nt, Artificial Sequence
  Description of Artificial Sequence: Synthetic oligonucleotide
  Sense strand starting at position 3626 of SEQ ID NO: 1241110
uggacaagugaauggugau

SEQ ID NO: 1247643 - RNA, 19 nt, Artificial Sequence
  Description of Artificial Sequence: Synthetic oligonucleotide
  Antisense strand to SEQ ID NO: 1247642
aucaccauucacuugucca

SEQ ID NO: 1247644 - RNA, 19 nt, Artificial Sequence
  Description of Artificial Sequence: Synthetic oligonucleotide
  Sense strand starting at position 3641 of SEQ ID NO: 1241110
ugaugaguagauggugaau

SEQ ID NO: 1247645 - RNA, 19 nt, Artificial Sequence
  Description of Artificial Sequence: Synthetic oligonucleotide
  Antisense strand to SEQ ID NO: 1247644
auucaccaucuacucauca

SEQ ID NO: 1247646 - RNA, 19 nt, Artificial Sequence
  Description of Artificial Sequence: Synthetic oligonucleotide
  Sense strand starting at position 3653 of SEQ ID NO: 1241110
ggugaauauuaaguggaug

SEQ ID NO: 1247647 - RNA, 19 nt, Artificial Sequence
  Description of Artificial Sequence: Synthetic oligonucleotide
  Antisense strand to SEQ ID NO: 1247646
cauccacuuaauauucacc

SEQ ID NO: 1247648 - RNA, 19 nt, Artificial Sequence
  Description of Artificial Sequence: Synthetic oligonucleotide
  Sense strand starting at position 3687 of SEQ ID NO: 1241110
guagauaguggaugauaga

SEQ ID NO: 1247649 - RNA, 19 nt, Artificial Sequence
  Description of Artificial Sequence: Synthetic oligonucleotide
  Antisense strand to SEQ ID NO: 1247648
ucuaucauccacuaucuac

SEQ ID NO: 1247650 - RNA, 19 nt, Artificial Sequence
  Description of Artificial Sequence: Synthetic oligonucleotide
  Sense strand starting at position 3728 of SEQ ID NO: 1241110
ugaauagugguugguggau

SEQ ID NO: 1247651 - RNA, 19 nt, Artificial Sequence
  Description of Artificial Sequence: Synthetic oligonucleotide
  Antisense strand to SEQ ID NO: 1247650
auccaccaaccacuauuca

SEQ ID NO: 1247652 - RNA, 19 nt, Artificial Sequence
  Description of Artificial Sequence: Synthetic oligonucleotide
  Sense strand starting at position 3772 of SEQ ID NO: 1241110
ggaaggauggguggugaau

SEQ ID NO: 1247653 - RNA, 19 nt, Artificial Sequence
  Description of Artificial Sequence: Synthetic oligonucleotide
  Antisense strand to SEQ ID NO: 1247652
auucaccacccauccuucc

SEQ ID NO: 1247654 - RNA, 19 nt, Artificial Sequence
  Description of Artificial Sequence: Synthetic oligonucleotide
  Sense strand starting at position 3793 of SEQ ID NO: 1241110
gugaaugguggauggugaa

SEQ ID NO: 1247655 - RNA, 19 nt, Artificial Sequence
  Description of Artificial Sequence: Synthetic oligonucleotide
  Antisense strand to SEQ ID NO: 1247654
uucaccauccaccauucac

SEQ ID NO: 1247656 - RNA, 19 nt, Artificial Sequence
  Description of Artificial Sequence: Synthetic oligonucleotide
  Sense strand starting at position 3849 of SEQ ID NO: 1241110
gguggaugugaauggugau

SEQ ID NO: 1247657 - RNA, 19 nt, Artificial Sequence
  Description of Artificial Sequence: Synthetic oligonucleotide
  Antisense strand to SEQ ID NO: 1247656
aucaccauucacauccacc

SEQ ID NO: 1247658 - RNA, 19 nt, Artificial Sequence
  Description of Artificial Sequence: Synthetic oligonucleotide
  Sense strand starting at position 3919 of SEQ ID NO: 1241110
ggauaaguggaugguggau

SEQ ID NO: 1247659 - RNA, 19 nt, Artificial Sequence
  Description of Artificial Sequence: Synthetic oligonucleotide
  Antisense strand to SEQ ID NO: 1247658
auccaccauccacuuaucc

SEQ ID NO: 1247660 - RNA, 19 nt, Artificial Sequence
  Description of Artificial Sequence: Synthetic oligonucleotide
  Sense strand starting at position 341 of SEQ ID NO: 1241111
caguaagagacagaucguu

SEQ ID NO: 1247661 - RNA, 19 nt, Artificial Sequence
  Description of Artificial Sequence: Synthetic oligonucleotide
  Antisense strand to SEQ ID NO: 1247660
aacgaucugucucuuacug

SEQ ID NO: 1247662 - RNA, 19 nt, Artificial Sequence
  Description of Artificial Sequence: Synthetic oligonucleotide
  Sense strand starting at position 371 of SEQ ID NO: 1241111
agugaaucugccuaagcca

SEQ ID NO: 1247663 - RNA, 19 nt, Artificial Sequence
  Description of Artificial Sequence: Synthetic oligonucleotide
  Antisense strand to SEQ ID NO: 1247662
uggcuuaggcagauucacu

SEQ ID NO: 1247664 - RNA, 19 nt, Artificial Sequence
  Description of Artificial Sequence: Synthetic oligonucleotide
  Sense strand starting at position 426 of SEQ ID NO: 1241111
auagauauauccuucugua

SEQ ID NO: 1247665 - RNA, 19 nt, Artificial Sequence
  Description of Artificial Sequence: Synthetic oligonucleotide
  Antisense strand to SEQ ID NO: 1247664
uacagaaggauauaucuau

SEQ ID NO: 1247666 - RNA, 19 nt, Artificial Sequence
  Description of Artificial Sequence: Synthetic oligonucleotide
  Sense strand starting at position 453 of SEQ ID NO: 1241111
cguaacugucugucagcuu

SEQ ID NO: 1247667 - RNA, 19 nt, Artificial Sequence
  Description of Artificial Sequence: Synthetic oligonucleotide
  Antisense strand to SEQ ID NO: 1247666
aagcugacagacaguuacg

SEQ ID NO: 1247668 - RNA, 19 nt, Artificial Sequence
  Description of Artificial Sequence: Synthetic oligonucleotide
  Sense strand starting at position 1140 of SEQ ID NO: 1241111
ccaacuguucuuuagagua

SEQ ID NO: 1247669 - RNA, 19 nt, Artificial Sequence
  Description of Artificial Sequence: Synthetic oligonucleotide
  Antisense strand to SEQ ID NO: 1247668
uacucuaaagaacaguugg

SEQ ID NO: 1247670 - RNA, 19 nt, Artificial Sequence
  Description of Artificial Sequence: Synthetic oligonucleotide
  Sense strand starting at position 1174 of SEQ ID NO: 1241111
ucaaaugaaucuguuagua

SEQ ID NO: 1247671 - RNA, 19 nt, Artificial Sequence
  Description of Artificial Sequence: Synthetic oligonucleotide
  Antisense strand to SEQ ID NO: 1247670
uacuaacagauucauuuga

SEQ ID NO: 1247672 - RNA, 19 nt, Artificial Sequence
  Description of Artificial Sequence: Synthetic oligonucleotide
  Sense strand starting at position 1269 of SEQ ID NO: 1241111
gggaguuaacuugacaguu

SEQ ID NO: 1247673 - RNA, 19 nt, Artificial Sequence
  Description of Artificial Sequence: Synthetic oligonucleotide
  Antisense strand to SEQ ID NO: 1247672
aacugucaaguuaacuccc

SEQ ID NO: 1247674 - RNA, 19 nt, Artificial Sequence
  Description of Artificial Sequence: Synthetic oligonucleotide
  Sense strand starting at position 1284 of SEQ ID NO: 1241111
aguuuaugaugaguaacua

SEQ ID NO: 1247675 - RNA, 19 nt, Artificial Sequence
  Description of Artificial Sequence: Synthetic oligonucleotide
  Antisense strand to SEQ ID NO: 1247674
uaguuacucaucauaaacu

SEQ ID NO: 1247676 - RNA, 19 nt, Artificial Sequence
  Description of Artificial Sequence: Synthetic oligonucleotide
  Sense strand starting at position 1285 of SEQ ID NO: 1241111
guuuaugaugaguaacuau

SEQ ID NO: 1247677 - RNA, 19 nt, Artificial Sequence
  Description of Artificial Sequence: Synthetic oligonucleotide
  Antisense strand to SEQ ID NO: 1247676
auaguuacucaucauaaac

SEQ ID NO: 1247678 - RNA, 19 nt, Artificial Sequence
  Description of Artificial Sequence: Synthetic oligonucleotide
  Sense strand starting at position 1288 of SEQ ID NO: 1241111
uaugaugaguaacuauagu

SEQ ID NO: 1247679 - RNA, 19 nt, Artificial Sequence
  Description of Artificial Sequence: Synthetic oligonucleotide
  Antisense strand to SEQ ID NO: 1247678
acuauaguuacucaucaua

SEQ ID NO: 1247680 - RNA, 19 nt, Artificial Sequence
  Description of Artificial Sequence: Synthetic oligonucleotide
  Sense strand starting at position 1337 of SEQ ID NO: 1241111
uuauacauccuagggcaaa

SEQ ID NO: 1247681 - RNA, 19 nt, Artificial Sequence
  Description of Artificial Sequence: Synthetic oligonucleotide
  Antisense strand to SEQ ID NO: 1247680
uuugcccuaggauguauaa

SEQ ID NO: 1247682 - RNA, 19 nt, Artificial Sequence
  Description of Artificial Sequence: Synthetic oligonucleotide
  Sense strand starting at position 1451 of SEQ ID NO: 1241111
gaucuugggauguguucca

SEQ ID NO: 1247683 - RNA, 19 nt, Artificial Sequence
  Description of Artificial Sequence: Synthetic oligonucleotide
  Antisense strand to SEQ ID NO: 1247682
uggaacacaucccaagauc

SEQ ID NO: 1247684 - RNA, 19 nt, Artificial Sequence
  Description of Artificial Sequence: Synthetic oligonucleotide
  Sense strand starting at position 1464 of SEQ ID NO: 1241111
guuccacuuuguuugaaag

SEQ ID NO: 1247685 - RNA, 19 nt, Artificial Sequence
  Description of Artificial Sequence: Synthetic oligonucleotide
  Antisense strand to SEQ ID NO: 1247684
cuuucaaacaaaguggaac

SEQ ID NO: 1247686 - RNA, 19 nt, Artificial Sequence
  Description of Artificial Sequence: Synthetic oligonucleotide
  Sense strand starting at position 1465 of SEQ ID NO: 1241111
uuccacuuuguuugaaaga

SEQ ID NO: 1247687 - RNA, 19 nt, Artificial Sequence
  Description of Artificial Sequence: Synthetic oligonucleotide
  Antisense strand to SEQ ID NO: 1247686
ucuuucaaacaaaguggaa

SEQ ID NO: 1247688 - RNA, 19 nt, Artificial Sequence
  Description of Artificial Sequence: Synthetic oligonucleotide
  Sense strand starting at position 1576 of SEQ ID NO: 1241111
guguaaugccuguaacagg

SEQ ID NO: 1247689 - RNA, 19 nt, Artificial Sequence
  Description of Artificial Sequence: Synthetic oligonucleotide
  Antisense strand to SEQ ID NO: 1247688
ccuguuacaggcauuacac

SEQ ID NO: 1247690 - RNA, 19 nt, Artificial Sequence
  Description of Artificial Sequence: Synthetic oligonucleotide
  Sense strand starting at position 2122 of SEQ ID NO: 1241111
gggcaugauuggguuagau

SEQ ID NO: 1247691 - RNA, 19 nt, Artificial Sequence
  Description of Artificial Sequence: Synthetic oligonucleotide
  Antisense strand to SEQ ID NO: 1247690
aucuaacccaaucaugccc

SEQ ID NO: 1247692 - RNA, 19 nt, Artificial Sequence
  Description of Artificial Sequence: Synthetic oligonucleotide
  Sense strand starting at position 2124 of SEQ ID NO: 1241111
gcaugauuggguuagauau

SEQ ID NO: 1247693 - RNA, 19 nt, Artificial Sequence
  Description of Artificial Sequence: Synthetic oligonucleotide
  Antisense strand to SEQ ID NO: 1247692
auaucuaacccaaucaugc

SEQ ID NO: 1247694 - RNA, 19 nt, Artificial Sequence
  Description of Artificial Sequence: Synthetic oligonucleotide
  Sense strand starting at position 2151 of SEQ ID NO: 1241111
cugaauggauuagagauuu

SEQ ID NO: 1247695 - RNA, 19 nt, Artificial Sequence
  Description of Artificial Sequence: Synthetic oligonucleotide
  Antisense strand to SEQ ID NO: 1247694
aaaucucuaauccauucag

SEQ ID NO: 1247696 - RNA, 19 nt, Artificial Sequence
  Description of Artificial Sequence: Synthetic oligonucleotide
  Sense strand starting at position 2162 of SEQ ID NO: 1241111
agagauuuguucuggaaga

SEQ ID NO: 1247697 - RNA, 19 nt, Artificial Sequence
  Description of Artificial Sequence: Synthetic oligonucleotide
  Antisense strand to SEQ ID NO: 1247696
ucuuccagaacaaaucucu

SEQ ID NO: 1247698 - RNA, 19 nt, Artificial Sequence
  Description of Artificial Sequence: Synthetic oligonucleotide
  Sense strand starting at position 2185 of SEQ ID NO: 1241111
guuugagaaacauggccuu

SEQ ID NO: 1247699 - RNA, 19 nt, Artificial Sequence
  Description of Artificial Sequence: Synthetic oligonucleotide
  Antisense strand to SEQ ID NO: 1247698
aaggccauguuucucaaac

SEQ ID NO: 1247700 - RNA, 19 nt, Artificial Sequence
  Description of Artificial Sequence: Synthetic oligonucleotide
  Sense strand starting at position 2260 of SEQ ID NO: 1241111
gacugagguuucccuauuc

SEQ ID NO: 1247701 - RNA, 19 nt, Artificial Sequence
  Description of Artificial Sequence: Synthetic oligonucleotide
  Antisense strand to SEQ ID NO: 1247700
gaauagggaaaccucaguc

SEQ ID NO: 1247702 - RNA, 19 nt, Artificial Sequence
  Description of Artificial Sequence: Synthetic oligonucleotide
  Sense strand starting at position 2334 of SEQ ID NO: 1241111
caagaacugccuuggaaga

SEQ ID NO: 1247703 - RNA, 19 nt, Artificial Sequence
  Description of Artificial Sequence: Synthetic oligonucleotide
  Antisense strand to SEQ ID NO: 1247702
ucuuccaaggcaguucuug

SEQ ID NO: 1247704 - RNA, 19 nt, Artificial Sequence
  Description of Artificial Sequence: Synthetic oligonucleotide
  Sense strand starting at position 2335 of SEQ ID NO: 1241111
aagaacugccuuggaagau

SEQ ID NO: 1247705 - RNA, 19 nt, Artificial Sequence
  Description of Artificial Sequence: Synthetic oligonucleotide
  Antisense strand to SEQ ID NO: 1247704
aucuuccaaggcaguucuu

SEQ ID NO: 1247706 - RNA, 19 nt, Artificial Sequence
  Description of Artificial Sequence: Synthetic oligonucleotide
  Sense strand starting at position 2341 of SEQ ID NO: 1241111
ugccuuggaagaugucaca

SEQ ID NO: 1247707 - RNA, 19 nt, Artificial Sequence
  Description of Artificial Sequence: Synthetic oligonucleotide
  Antisense strand to SEQ ID NO: 1247706
ugugacaucuuccaaggca

SEQ ID NO: 1247708 - RNA, 19 nt, Artificial Sequence
  Description of Artificial Sequence: Synthetic oligonucleotide
  Sense strand starting at position 2364 of SEQ ID NO: 1241111
aagauauggucuuccagua

SEQ ID NO: 1247709 - RNA, 19 nt, Artificial Sequence
  Description of Artificial Sequence: Synthetic oligonucleotide
  Antisense strand to SEQ ID NO: 1247708
uacuggaagaccauaucuu

SEQ ID NO: 1247710 - RNA, 19 nt, Artificial Sequence
  Description of Artificial Sequence: Synthetic oligonucleotide
  Sense strand starting at position 2369 of SEQ ID NO: 1241111
auggucuuccaguaggaug

SEQ ID NO: 1247711 - RNA, 19 nt, Artificial Sequence
  Description of Artificial Sequence: Synthetic oligonucleotide
  Antisense strand to SEQ ID NO: 1247710
cauccuacuggaagaccau

SEQ ID NO: 1247712 - RNA, 19 nt, Artificial Sequence
  Description of Artificial Sequence: Synthetic oligonucleotide
  Sense strand starting at position 2473 of SEQ ID NO: 1241111
acguuauuccaucgauuuc

SEQ ID NO: 1247713 - RNA, 19 nt, Artificial Sequence
  Description of Artificial Sequence: Synthetic oligonucleotide
  Antisense strand to SEQ ID NO: 1247712
gaaaucgauggaauaacgu

SEQ ID NO: 1247714 - RNA, 19 nt, Artificial Sequence
  Description of Artificial Sequence: Synthetic oligonucleotide
  Sense strand starting at position 2505 of SEQ ID NO: 1241111
agcacuuccagagaagguu

SEQ ID NO: 1247715 - RNA, 19 nt, Artificial Sequence
  Description of Artificial Sequence: Synthetic oligonucleotide
  Antisense strand to SEQ ID NO: 1247714
aaccuucucuggaagugcu

SEQ ID NO: 1247716 - RNA, 19 nt, Artificial Sequence
  Description of Artificial Sequence: Synthetic oligonucleotide
  Sense strand starting at position 2511 of SEQ ID NO: 1241111
uccagagaagguuguguga

SEQ ID NO: 1247717 - RNA, 19 nt, Artificial Sequence
  Description of Artificial Sequence: Synthetic oligonucleotide
  Antisense strand to SEQ ID NO: 1247716
ucacacaaccuucucugga

SEQ ID NO: 1247718 - RNA, 19 nt, Artificial Sequence
  Description of Artificial Sequence: Synthetic oligonucleotide
  Sense strand starting at position 2755 of SEQ ID NO: 1241111
ggccaaaggucaccaggau

SEQ ID NO: 1247719 - RNA, 19 nt, Artificial Sequence
  Description of Artificial Sequence: Synthetic oligonucleotide
  Antisense strand to SEQ ID NO: 1247718
auccuggugaccuuuggcc

SEQ ID NO: 1247720 - RNA, 19 nt, Artificial Sequence
  Description of Artificial Sequence: Synthetic oligonucleotide
  Sense strand starting at position 2864 of SEQ ID NO: 1241111
gaucuaggacaguguuauc

SEQ ID NO: 1247721 - RNA, 19 nt, Artificial Sequence
  Description of Artificial Sequence: Synthetic oligonucleotide
  Antisense strand to SEQ ID NO: 1247720
gauaacacuguccuagauc

SEQ ID NO: 1247722 - RNA, 19 nt, Artificial Sequence
  Description of Artificial Sequence: Synthetic oligonucleotide
  Sense strand starting at position 3088 of SEQ ID NO: 1241111
gugugagguaggcauuaug

SEQ ID NO: 1247723 - RNA, 19 nt, Artificial Sequence
  Description of Artificial Sequence: Synthetic oligonucleotide
  Antisense strand to SEQ ID NO: 1247722
cauaaugccuaccucacac

SEQ ID NO: 1247724 - RNA, 19 nt, Artificial Sequence
  Description of Artificial Sequence: Synthetic oligonucleotide
  Sense strand starting at position 3091 of SEQ ID NO: 1241111
ugagguaggcauuauguaa

SEQ ID NO: 1247725 - RNA, 19 nt, Artificial Sequence
  Description of Artificial Sequence: Synthetic oligonucleotide
  Antisense strand to SEQ ID NO: 1247724
uuacauaaugccuaccuca

SEQ ID NO: 1247726 - RNA, 19 nt, Artificial Sequence
  Description of Artificial Sequence: Synthetic oligonucleotide
  Sense strand starting at position 3113 of SEQ ID NO: 1241111
ugcucugcucaugaggaaa

SEQ ID NO: 1247727 - RNA, 19 nt, Artificial Sequence
  Description of Artificial Sequence: Synthetic oligonucleotide
  Antisense strand to SEQ ID NO: 1247726
uuuccucaugagcagagca

SEQ ID NO: 1247728 - RNA, 19 nt, Artificial Sequence
  Description of Artificial Sequence: Synthetic oligonucleotide
  Sense strand starting at position 3649 of SEQ ID NO: 1241111
aucacaucuuugucaguaa

SEQ ID NO: 1247729 - RNA, 19 nt, Artificial Sequence
  Description of Artificial Sequence: Synthetic oligonucleotide
  Antisense strand to SEQ ID NO: 1247728
uuacugacaaagaugugau

SEQ ID NO: 1247730 - RNA, 19 nt, Artificial Sequence
  Description of Artificial Sequence: Synthetic oligonucleotide
  Sense strand starting at position 3895 of SEQ ID NO: 1241111
cugucuuaggacuaauuau

SEQ ID NO: 1247731 - RNA, 19 nt, Artificial Sequence
  Description of Artificial Sequence: Synthetic oligonucleotide
  Antisense strand to SEQ ID NO: 1247730
auaauuaguccuaagacag

SEQ ID NO: 1247732 - RNA, 19 nt, Artificial Sequence
  Description of Artificial Sequence: Synthetic oligonucleotide
  Sense strand starting at position 3917 of SEQ ID NO: 1241111
auuagaugaugggaagaau

SEQ ID NO: 1247733 - RNA, 19 nt, Artificial Sequence
  Description of Artificial Sequence: Synthetic oligonucleotide
  Antisense strand to SEQ ID NO: 1247732
auucuucccaucaucuaau

SEQ ID NO: 1247734 - RNA, 19 nt, Artificial Sequence
  Description of Artificial Sequence: Synthetic oligonucleotide
  Sense strand starting at position 3976 of SEQ ID NO: 1241111
uuaggucuauaagcaugaa

SEQ ID NO: 1247735 - RNA, 19 nt, Artificial Sequence
  Description of Artificial Sequence: Synthetic oligonucleotide
  Antisense strand to SEQ ID NO: 1247734
uucaugcuuauagaccuaa

SEQ ID NO: 1247736 - RNA, 19 nt, Artificial Sequence
  Description of Artificial Sequence: Synthetic oligonucleotide
  Sense strand starting at position 3979 of SEQ ID NO: 1241111
ggucuauaagcaugaacuu

SEQ ID NO: 1247737 - RNA, 19 nt, Artificial Sequence
  Description of Artificial Sequence: Synthetic oligonucleotide
  Antisense strand to SEQ ID NO: 1247736
aaguucaugcuuauagacc

SEQ ID NO: 1247738 - RNA, 19 nt, Artificial Sequence
  Description of Artificial Sequence: Synthetic oligonucleotide
  Sense strand starting at position 3980 of SEQ ID NO: 1241111
gucuauaagcaugaacuua

SEQ ID NO: 1247739 - RNA, 19 nt, Artificial Sequence
  Description of Artificial Sequence: Synthetic oligonucleotide
  Antisense strand to SEQ ID NO: 1247738
uaaguucaugcuuauagac

SEQ ID NO: 1247740 - RNA, 19 nt, Artificial Sequence
  Description of Artificial Sequence: Synthetic oligonucleotide
  Sense strand starting at position 55 of SEQ ID NO: 1241112
acauguauugcccaaggaa

SEQ ID NO: 1247741 - RNA, 19 nt, Artificial Sequence
  Description of Artificial Sequence: Synthetic oligonucleotide
  Antisense strand to SEQ ID NO: 1247740
uuccuugggcaauacaugu

SEQ ID NO: 1247742 - RNA, 19 nt, Artificial Sequence
  Description of Artificial Sequence: Synthetic oligonucleotide
  Sense strand starting at position 485 of SEQ ID NO: 1241112
gaaaguugcuguucgaagg

SEQ ID NO: 1247743 - RNA, 19 nt, Artificial Sequence
  Description of Artificial Sequence: Synthetic oligonucleotide
  Antisense strand to SEQ ID NO: 1247742
ccuucgaacagcaacuuuc

SEQ ID NO: 1247744 - RNA, 19 nt, Artificial Sequence
  Description of Artificial Sequence: Synthetic oligonucleotide
  Sense strand starting at position 486 of SEQ ID NO: 1241112
aaaguugcuguucgaagga

SEQ ID NO: 1247745 - RNA, 19 nt, Artificial Sequence
  Description of Artificial Sequence: Synthetic oligonucleotide
  Antisense strand to SEQ ID NO: 1247744
uccuucgaacagcaacuuu

SEQ ID NO: 1247746 - RNA, 19 nt, Artificial Sequence
  Description of Artificial Sequence: Synthetic oligonucleotide
  Sense strand starting at position 547 of SEQ ID NO: 1241112
ucugcuugucaucaguaaa

SEQ ID NO: 1247747 - RNA, 19 nt, Artificial Sequence
  Description of Artificial Sequence: Synthetic oligonucleotide
  Antisense strand to SEQ ID NO: 1247746
uuuacugaugacaagcaga

SEQ ID NO: 1247748 - RNA, 19 nt, Artificial Sequence
  Description of Artificial Sequence: Synthetic oligonucleotide
  Sense strand starting at position 575 of SEQ ID NO: 1241112
ugaauugaagcguauguaa

SEQ ID NO: 1247749 - RNA, 19 nt, Artificial Sequence
  Description of Artificial Sequence: Synthetic oligonucleotide
  Antisense strand to SEQ ID NO: 1247748
uuacauacgcuucaauuca

SEQ ID NO: 1247750 - RNA, 19 nt, Artificial Sequence
  Description of Artificial Sequence: Synthetic oligonucleotide
  Sense strand starting at position 577 of SEQ ID NO: 1241112
aauugaagcguauguaaua

SEQ ID NO: 1247751 - RNA, 19 nt, Artificial Sequence
  Description of Artificial Sequence: Synthetic oligonucleotide
  Antisense strand to SEQ ID NO: 1247750
uauuacauacgcuucaauu

SEQ ID NO: 1247752 - RNA, 19 nt, Artificial Sequence
  Description of Artificial Sequence: Synthetic oligonucleotide
  Sense strand starting at position 578 of SEQ ID NO: 1241112
auugaagcguauguaauaa

SEQ ID NO: 1247753 - RNA, 19 nt, Artificial Sequence
  Description of Artificial Sequence: Synthetic oligonucleotide
  Antisense strand to SEQ ID NO: 1247752
uuauuacauacgcuucaau

SEQ ID NO: 1247754 - RNA, 19 nt, Artificial Sequence
  Description of Artificial Sequence: Synthetic oligonucleotide
  Sense strand starting at position 623 of SEQ ID NO: 1241112
uggcucugugguuaaguaa

SEQ ID NO: 1247755 - RNA, 19 nt, Artificial Sequence
  Description of Artificial Sequence: Synthetic oligonucleotide
  Antisense strand to SEQ ID NO: 1247754
uuacuuaaccacagagcca

SEQ ID NO: 1247756 - RNA, 19 nt, Artificial Sequence
  Description of Artificial Sequence: Synthetic oligonucleotide
  Sense strand starting at position 630 of SEQ ID NO: 1241112
gugguuaaguaagucuuga

SEQ ID NO: 1247757 - RNA, 19 nt, Artificial Sequence
  Description of Artificial Sequence: Synthetic oligonucleotide
  Antisense strand to SEQ ID NO: 1247756
ucaagacuuacuuaaccac

SEQ ID NO: 1247758 - RNA, 19 nt, Artificial Sequence
  Description of Artificial Sequence: Synthetic oligonucleotide
  Sense strand starting at position 638 of SEQ ID NO: 1241112
guaagucuugaauaccuga

SEQ ID NO: 1247759 - RNA, 19 nt, Artificial Sequence
  Description of Artificial Sequence: Synthetic oligonucleotide
  Antisense strand to SEQ ID NO: 1247758
ucagguauucaagacuuac

SEQ ID NO: 1247760 - RNA, 19 nt, Artificial Sequence
  Description of Artificial Sequence: Synthetic oligonucleotide
  Sense strand starting at position 675 of SEQ ID NO: 1241112
gguccugugccacagauaa

SEQ ID NO: 1247761 - RNA, 19 nt, Artificial Sequence
  Description of Artificial Sequence: Synthetic oligonucleotide
  Antisense strand to SEQ ID NO: 1247760
uuaucuguggcacaggacc

SEQ ID NO: 1247762 - RNA, 19 nt, Artificial Sequence
  Description of Artificial Sequence: Synthetic oligonucleotide
  Sense strand starting at position 692 of SEQ ID NO: 1241112
aaugaugucccuuggguuu

SEQ ID NO: 1247763 - RNA, 19 nt, Artificial Sequence
  Description of Artificial Sequence: Synthetic oligonucleotide
  Antisense strand to SEQ ID NO: 1247762
aaacccaagggacaucauu

SEQ ID NO: 1247764 - RNA, 19 nt, Artificial Sequence
  Description of Artificial Sequence: Synthetic oligonucleotide
  Sense strand starting at position 706 of SEQ ID NO: 1241112
gguuucuacugauuacauu

SEQ ID NO: 1247765 - RNA, 19 nt, Artificial Sequence
  Description of Artificial Sequence: Synthetic oligonucleotide
  Antisense strand to SEQ ID NO: 1247764
aauguaaucaguagaaacc

SEQ ID NO: 1247766 - RNA, 19 nt, Artificial Sequence
  Description of Artificial Sequence: Synthetic oligonucleotide
  Sense strand starting at position 707 of SEQ ID NO: 1241112
guuucuacugauuacauua

SEQ ID NO: 1247767 - RNA, 19 nt, Artificial Sequence
  Description of Artificial Sequence: Synthetic oligonucleotide
  Antisense strand to SEQ ID NO: 1247766
uaauguaaucaguagaaac

SEQ ID NO: 1247768 - RNA, 19 nt, Artificial Sequence
  Description of Artificial Sequence: Synthetic oligonucleotide
  Sense strand starting at position 762 of SEQ ID NO: 1241112
ggucuuggcucaucugaga

SEQ ID NO: 1247769 - RNA, 19 nt, Artificial Sequence
  Description of Artificial Sequence: Synthetic oligonucleotide
  Antisense strand to SEQ ID NO: 1247768
ucucagaugagccaagacc

SEQ ID NO: 1247770 - RNA, 19 nt, Artificial Sequence
  Description of Artificial Sequence: Synthetic oligonucleotide
  Sense strand starting at position 861 of SEQ ID NO: 1241112
acgugcugucucagagcga

SEQ ID NO: 1247771 - RNA, 19 nt, Artificial Sequence
  Description of Artificial Sequence: Synthetic oligonucleotide
  Antisense strand to SEQ ID NO: 1247770
ucgcucugagacagcacgu

SEQ ID NO: 1247772 - RNA, 19 nt, Artificial Sequence
  Description of Artificial Sequence: Synthetic oligonucleotide
  Sense strand starting at position 931 of SEQ ID NO: 1241112
uggcaagugucucuaagaa

SEQ ID NO: 1247773 - RNA, 19 nt, Artificial Sequence
  Description of Artificial Sequence: Synthetic oligonucleotide
  Antisense strand to SEQ ID NO: 1247772
uucuuagagacacuugcca

SEQ ID NO: 1247774 - RNA, 19 nt, Artificial Sequence
  Description of Artificial Sequence: Synthetic oligonucleotide
  Sense strand starting at position 1024 of SEQ ID NO: 1241112
auguuaguuacgcuugcaa

SEQ ID NO: 1247775 - RNA, 19 nt, Artificial Sequence
  Description of Artificial Sequence: Synthetic oligonucleotide
  Antisense strand to SEQ ID NO: 1247774
uugcaagcguaacuaacau

SEQ ID NO: 1247776 - RNA, 19 nt, Artificial Sequence
  Description of Artificial Sequence: Synthetic oligonucleotide
  Sense strand starting at position 1068 of SEQ ID NO: 1241112
uggugauuagccugaauaa

SEQ ID NO: 1247777 - RNA, 19 nt, Artificial Sequence
  Description of Artificial Sequence: Synthetic oligonucleotide
  Antisense strand to SEQ ID NO: 1247776
uuauucaggcuaaucacca

SEQ ID NO: 1247778 - RNA, 19 nt, Artificial Sequence
  Description of Artificial Sequence: Synthetic oligonucleotide
  Sense strand starting at position 1069 of SEQ ID NO: 1241112
ggugauuagccugaauaac

SEQ ID NO: 1247779 - RNA, 19 nt, Artificial Sequence
  Description of Artificial Sequence: Synthetic oligonucleotide
  Antisense strand to SEQ ID NO: 1247778
guuauucaggcuaaucacc

SEQ ID NO: 1247780 - RNA, 19 nt, Artificial Sequence
  Description of Artificial Sequence: Synthetic oligonucleotide
  Sense strand starting at position 1214 of SEQ ID NO: 1241112
aguaaaccugagugggaau

SEQ ID NO: 1247781 - RNA, 19 nt, Artificial Sequence
  Description of Artificial Sequence: Synthetic oligonucleotide
  Antisense strand to SEQ ID NO: 1247780
auucccacucagguuuacu

SEQ ID NO: 1247782 - RNA, 19 nt, Artificial Sequence
  Description of Artificial Sequence: Synthetic oligonucleotide
  Sense strand starting at position 1230 of SEQ ID NO: 1241112
aauguaaagucguuaacuc

SEQ ID NO: 1247783 - RNA, 19 nt, Artificial Sequence
  Description of Artificial Sequence: Synthetic oligonucleotide
  Antisense strand to SEQ ID NO: 1247782
gaguuaacgacuuuacauu

SEQ ID NO: 1247784 - RNA, 19 nt, Artificial Sequence
  Description of Artificial Sequence: Synthetic oligonucleotide
  Sense strand starting at position 1231 of SEQ ID NO: 1241112
auguaaagucguuaacuca

SEQ ID NO: 1247785 - RNA, 19 nt, Artificial Sequence
  Description of Artificial Sequence: Synthetic oligonucleotide
  Antisense strand to SEQ ID NO: 1247784
ugaguuaacgacuuuacau

SEQ ID NO: 1247786 - RNA, 19 nt, Artificial Sequence
  Description of Artificial Sequence: Synthetic oligonucleotide
  Sense strand starting at position 2008 of SEQ ID NO: 1241112
ucgcgagacaguuuguguu

SEQ ID NO: 1247787 - RNA, 19 nt, Artificial Sequence
  Description of Artificial Sequence: Synthetic oligonucleotide
  Antisense strand to SEQ ID NO: 1247786
aacacaaacugucucgcga

SEQ ID NO: 1247788 - RNA, 19 nt, Artificial Sequence
  Description of Artificial Sequence: Synthetic oligonucleotide
  Sense strand starting at position 2376 of SEQ ID NO: 1241112
uuuagacuuuaggucacau

SEQ ID NO: 1247789 - RNA, 19 nt, Artificial Sequence
  Description of Artificial Sequence: Synthetic oligonucleotide
  Antisense strand to SEQ ID NO: 1247788
augugaccuaaagucuaaa

SEQ ID NO: 1247790 - RNA, 19 nt, Artificial Sequence
  Description of Artificial Sequence: Synthetic oligonucleotide
  Sense strand starting at position 2555 of SEQ ID NO: 1241112
ggccuuuggacuuaacgua

SEQ ID NO: 1247791 - RNA, 19 nt, Artificial Sequence
  Description of Artificial Sequence: Synthetic oligonucleotide
  Antisense strand to SEQ ID NO: 1247790
uacguuaaguccaaaggcc

SEQ ID NO: 1247792 - RNA, 19 nt, Artificial Sequence
  Description of Artificial Sequence: Synthetic oligonucleotide
  Sense strand starting at position 2562 of SEQ ID NO: 1241112
ggacuuaacguagaagcca

SEQ ID NO: 1247793 - RNA, 19 nt, Artificial Sequence
  Description of Artificial Sequence: Synthetic oligonucleotide
  Antisense strand to SEQ ID NO: 1247792
uggcuucuacguuaagucc

SEQ ID NO: 1247794 - RNA, 19 nt, Artificial Sequence
  Description of Artificial Sequence: Synthetic oligonucleotide
  Sense strand starting at position 2975 of SEQ ID NO: 1241112
aucucuuuauacccggaaa

SEQ ID NO: 1247795 - RNA, 19 nt, Artificial Sequence
  Description of Artificial Sequence: Synthetic oligonucleotide
  Antisense strand to SEQ ID NO: 1247794
uuuccggguauaaagagau

SEQ ID NO: 1247796 - RNA, 19 nt, Artificial Sequence
  Description of Artificial Sequence: Synthetic oligonucleotide
  Sense strand starting at position 2977 of SEQ ID NO: 1241112
cucuuuauacccggaaagu

SEQ ID NO: 1247797 - RNA, 19 nt, Artificial Sequence
  Description of Artificial Sequence: Synthetic oligonucleotide
  Antisense strand to SEQ ID NO: 1247796
acuuuccggguauaaagag

SEQ ID NO: 1247798 - RNA, 19 nt, Artificial Sequence
  Description of Artificial Sequence: Synthetic oligonucleotide
  Sense strand starting at position 2978 of SEQ ID NO: 1241112
ucuuuauacccggaaagua

SEQ ID NO: 1247799 - RNA, 19 nt, Artificial Sequence
  Description of Artificial Sequence: Synthetic oligonucleotide
  Antisense strand to SEQ ID NO: 1247798
uacuuuccggguauaaaga

SEQ ID NO: 1247800 - RNA, 19 nt, Artificial Sequence
  Description of Artificial Sequence: Synthetic oligonucleotide
  Sense strand starting at position 3587 of SEQ ID NO: 1241112
ucauaaggagugcaguuua

SEQ ID NO: 1247801 - RNA, 19 nt, Artificial Sequence
  Description of Artificial Sequence: Synthetic oligonucleotide
  Antisense strand to SEQ ID NO: 1247800
uaaacugcacuccuuauga

SEQ ID NO: 1247802 - RNA, 19 nt, Artificial Sequence
  Description of Artificial Sequence: Synthetic oligonucleotide
  Sense strand starting at position 3599 of SEQ ID NO: 1241112
caguuuagaucccuggcau

SEQ ID NO: 1247803 - RNA, 19 nt, Artificial Sequence
  Description of Artificial Sequence: Synthetic oligonucleotide
  Antisense strand to SEQ ID NO: 1247802
augccagggaucuaaacug

SEQ ID NO: 1247804 - RNA, 19 nt, Artificial Sequence
  Description of Artificial Sequence: Synthetic oligonucleotide
  Sense strand starting at position 3600 of SEQ ID NO: 1241112
aguuuagaucccuggcaug

SEQ ID NO: 1247805 - RNA, 19 nt, Artificial Sequence
  Description of Artificial Sequence: Synthetic oligonucleotide
  Antisense strand to SEQ ID NO: 1247804
caugccagggaucuaaacu

SEQ ID NO: 1247806 - RNA, 19 nt, Artificial Sequence
  Description of Artificial Sequence: Synthetic oligonucleotide
  Sense strand starting at position 3635 of SEQ ID NO: 1241112
guucgcgcuccugugagau

SEQ ID NO: 1247807 - RNA, 19 nt, Artificial Sequence
  Description of Artificial Sequence: Synthetic oligonucleotide
  Antisense strand to SEQ ID NO: 1247806
aucucacaggagcgcgaac

SEQ ID NO: 1247808 - RNA, 19 nt, Artificial Sequence
  Description of Artificial Sequence: Synthetic oligonucleotide
  Sense strand starting at position 3806 of SEQ ID NO: 1241112
gggcaaacccaauguuucu

SEQ ID NO: 1247809 - RNA, 19 nt, Artificial Sequence
  Description of Artificial Sequence: Synthetic oligonucleotide
  Antisense strand to SEQ ID NO: 1247808
agaaacauuggguuugccc

SEQ ID NO: 1247810 - RNA, 19 nt, Artificial Sequence
  Description of Artificial Sequence: Synthetic oligonucleotide
  Sense strand starting at position 3815 of SEQ ID NO: 1241112
caauguuucugugugaauu

SEQ ID NO: 1247811 - RNA, 19 nt, Artificial Sequence
  Description of Artificial Sequence: Synthetic oligonucleotide
  Antisense strand to SEQ ID NO: 1247810
aauucacacagaaacauug

SEQ ID NO: 1247812 - RNA, 19 nt, Artificial Sequence
  Description of Artificial Sequence: Synthetic oligonucleotide
  Sense strand starting at position 3821 of SEQ ID NO: 1241112
uucugugugaauucgcuuu

SEQ ID NO: 1247813 - RNA, 19 nt, Artificial Sequence
  Description of Artificial Sequence: Synthetic oligonucleotide
  Antisense strand to SEQ ID NO: 1247812
aaagcgaauucacacagaa

SEQ ID NO: 1247814 - RNA, 19 nt, Artificial Sequence
  Description of Artificial Sequence: Synthetic oligonucleotide
  Sense strand starting at position 3843 of SEQ ID NO: 1241112
agauaauauuugcagcuca

SEQ ID NO: 1247815 - RNA, 19 nt, Artificial Sequence
  Description of Artificial Sequence: Synthetic oligonucleotide
  Antisense strand to SEQ ID NO: 1247814
ugagcugcaaauauuaucu

SEQ ID NO: 1247816 - RNA, 19 nt, Artificial Sequence
  Description of Artificial Sequence: Synthetic oligonucleotide
  Sense strand starting at position 3874 of SEQ ID NO: 1241112
gccacauuucucugcguua

SEQ ID NO: 1247817 - RNA, 19 nt, Artificial Sequence
  Description of Artificial Sequence: Synthetic oligonucleotide
  Antisense strand to SEQ ID NO: 1247816
uaacgcagagaaauguggc

SEQ ID NO: 1247818 - RNA, 19 nt, Artificial Sequence
  Description of Artificial Sequence: Synthetic oligonucleotide
  Sense strand starting at position 3875 of SEQ ID NO: 1241112
ccacauuucucugcguuaa

SEQ ID NO: 1247819 - RNA, 19 nt, Artificial Sequence
  Description of Artificial Sequence: Synthetic oligonucleotide
  Antisense strand to SEQ ID NO: 1247818
uuaacgcagagaaaugugg

SEQ ID NO: 1247820 - RNA, 19 nt, Artificial Sequence
  Description of Artificial Sequence: Synthetic oligonucleotide
  Sense strand starting at position 197 of SEQ ID NO: 1241113
gcaucuagugguuagagga

SEQ ID NO: 1247821 - RNA, 19 nt, Artificial Sequence
  Description of Artificial Sequence: Synthetic oligonucleotide
  Antisense strand to SEQ ID NO: 1247820
uccucuaaccacuagaugc

SEQ ID NO: 1247822 - RNA, 19 nt, Artificial Sequence
  Description of Artificial Sequence: Synthetic oligonucleotide
  Sense strand starting at position 340 of SEQ ID NO: 1241113
gagcuuuagccucaaggac

SEQ ID NO: 1247823 - RNA, 19 nt, Artificial Sequence
  Description of Artificial Sequence: Synthetic oligonucleotide
  Antisense strand to SEQ ID NO: 1247822
guccuugaggcuaaagcuc

SEQ ID NO: 1247824 - RNA, 19 nt, Artificial Sequence
  Description of Artificial Sequence: Synthetic oligonucleotide
  Sense strand starting at position 378 of SEQ ID NO: 1241113
ugaaauauccucuguguau

SEQ ID NO: 1247825 - RNA, 19 nt, Artificial Sequence
  Description of Artificial Sequence: Synthetic oligonucleotide
  Antisense strand to SEQ ID NO: 1247824
auacacagaggauauuuca

SEQ ID NO: 1247826 - RNA, 19 nt, Artificial Sequence
  Description of Artificial Sequence: Synthetic oligonucleotide
  Sense strand starting at position 389 of SEQ ID NO: 1241113
cuguguauaccagauggca

SEQ ID NO: 1247827 - RNA, 19 nt, Artificial Sequence
  Description of Artificial Sequence: Synthetic oligonucleotide
  Antisense strand to SEQ ID NO: 1247826
ugccaucugguauacacag

SEQ ID NO: 1247828 - RNA, 19 nt, Artificial Sequence
  Description of Artificial Sequence: Synthetic oligonucleotide
  Sense strand starting at position 391 of SEQ ID NO: 1241113
guguauaccagauggcaga

SEQ ID NO: 1247829 - RNA, 19 nt, Artificial Sequence
  Description of Artificial Sequence: Synthetic oligonucleotide
  Antisense strand to SEQ ID NO: 1247828
ucugccaucugguauacac

SEQ ID NO: 1247830 - RNA, 19 nt, Artificial Sequence
  Description of Artificial Sequence: Synthetic oligonucleotide
  Sense strand starting at position 544 of SEQ ID NO: 1241113
aguaaauauaagugggacu

SEQ ID NO: 1247831 - RNA, 19 nt, Artificial Sequence
  Description of Artificial Sequence: Synthetic oligonucleotide
  Antisense strand to SEQ ID NO: 1247830
agucccacuuauauuuacu

SEQ ID NO: 1247832 - RNA, 19 nt, Artificial Sequence
  Description of Artificial Sequence: Synthetic oligonucleotide
  Sense strand starting at position 545 of SEQ ID NO: 1241113
guaaauauaagugggacua

SEQ ID NO: 1247833 - RNA, 19 nt, Artificial Sequence
  Description of Artificial Sequence: Synthetic oligonucleotide
  Antisense strand to SEQ ID NO: 1247832
uagucccacuuauauuuac

SEQ ID NO: 1247834 - RNA, 19 nt, Artificial Sequence
  Description of Artificial Sequence: Synthetic oligonucleotide
  Sense strand starting at position 614 of SEQ ID NO: 1241113
gaacucuacuggucuggaa

SEQ ID NO: 1247835 - RNA, 19 nt, Artificial Sequence
  Description of Artificial Sequence: Synthetic oligonucleotide
  Antisense strand to SEQ ID NO: 1247834
uuccagaccaguagaguuc

SEQ ID NO: 1247836 - RNA, 19 nt, Artificial Sequence
  Description of Artificial Sequence: Synthetic oligonucleotide
  Sense strand starting at position 616 of SEQ ID NO: 1241113
acucuacuggucuggaaac

SEQ ID NO: 1247837 - RNA, 19 nt, Artificial Sequence
  Description of Artificial Sequence: Synthetic oligonucleotide
  Antisense strand to SEQ ID NO: 1247836
guuuccagaccaguagagu

SEQ ID NO: 1247838 - RNA, 19 nt, Artificial Sequence
  Description of Artificial Sequence: Synthetic oligonucleotide
  Sense strand starting at position 626 of SEQ ID NO: 1241113
ucuggaaaccucuggacua

SEQ ID NO: 1247839 - RNA, 19 nt, Artificial Sequence
  Description of Artificial Sequence: Synthetic oligonucleotide
  Antisense strand to SEQ ID NO: 1247838
uaguccagagguuuccaga

SEQ ID NO: 1247840 - RNA, 19 nt, Artificial Sequence
  Description of Artificial Sequence: Synthetic oligonucleotide
  Sense strand starting at position 641 of SEQ ID NO: 1241113
acuaguauacuguaucacu

SEQ ID NO: 1247841 - RNA, 19 nt, Artificial Sequence
  Description of Artificial Sequence: Synthetic oligonucleotide
  Antisense strand to SEQ ID NO: 1247840
agugauacaguauacuagu

SEQ ID NO: 1247842 - RNA, 19 nt, Artificial Sequence
  Description of Artificial Sequence: Synthetic oligonucleotide
  Sense strand starting at position 703 of SEQ ID NO: 1241113
agaauauguuuaguucucu

SEQ ID NO: 1247843 - RNA, 19 nt, Artificial Sequence
  Description of Artificial Sequence: Synthetic oligonucleotide
  Antisense strand to SEQ ID NO: 1247842
agagaacuaaacauauucu

SEQ ID NO: 1247844 - RNA, 19 nt, Artificial Sequence
  Description of Artificial Sequence: Synthetic oligonucleotide
  Sense strand starting at position 707 of SEQ ID NO: 1241113
uauguuuaguucucuggaa

SEQ ID NO: 1247845 - RNA, 19 nt, Artificial Sequence
  Description of Artificial Sequence: Synthetic oligonucleotide
  Antisense strand to SEQ ID NO: 1247844
uuccagagaacuaaacaua

SEQ ID NO: 1247846 - RNA, 19 nt, Artificial Sequence
  Description of Artificial Sequence: Synthetic oligonucleotide
  Sense strand starting at position 708 of SEQ ID NO: 1241113
auguuuaguucucuggaaa

SEQ ID NO: 1247847 - RNA, 19 nt, Artificial Sequence
  Description of Artificial Sequence: Synthetic oligonucleotide
  Antisense strand to SEQ ID NO: 1247846
uuuccagagaacuaaacau

SEQ ID NO: 1247848 - RNA, 19 nt, Artificial Sequence
  Description of Artificial Sequence: Synthetic oligonucleotide
  Sense strand starting at position 726 of SEQ ID NO: 1241113
acaauuacuucuguggagu

SEQ ID NO: 1247849 - RNA, 19 nt, Artificial Sequence
  Description of Artificial Sequence: Synthetic oligonucleotide
  Antisense strand to SEQ ID NO: 1247848
acuccacagaaguaauugu

SEQ ID NO: 1247850 - RNA, 19 nt, Artificial Sequence
  Description of Artificial Sequence: Synthetic oligonucleotide
  Sense strand starting at position 739 of SEQ ID NO: 1241113
uggaguuucccacauuccu

SEQ ID NO: 1247851 - RNA, 19 nt, Artificial Sequence
  Description of Artificial Sequence: Synthetic oligonucleotide
  Antisense strand to SEQ ID NO: 1247850
aggaaugugggaaacucca

SEQ ID NO: 1247852 - RNA, 19 nt, Artificial Sequence
  Description of Artificial Sequence: Synthetic oligonucleotide
  Sense strand starting at position 945 of SEQ ID NO: 1241113
acacacauugcguaccaau

SEQ ID NO: 1247853 - RNA, 19 nt, Artificial Sequence
  Description of Artificial Sequence: Synthetic oligonucleotide
  Antisense strand to SEQ ID NO: 1247852
auugguacgcaaugugugu

SEQ ID NO: 1247854 - RNA, 19 nt, Artificial Sequence
  Description of Artificial Sequence: Synthetic oligonucleotide
  Sense strand starting at position 956 of SEQ ID NO: 1241113
guaccaauuguguaaaguu

SEQ ID NO: 1247855 - RNA, 19 nt, Artificial Sequence
  Description of Artificial Sequence: Synthetic oligonucleotide
  Antisense strand to SEQ ID NO: 1247854
aacuuuacacaauugguac

SEQ ID NO: 1247856 - RNA, 19 nt, Artificial Sequence
  Description of Artificial Sequence: Synthetic oligonucleotide
  Sense strand starting at position 1031 of SEQ ID NO: 1241113
gguccugucccauaaauua

SEQ ID NO: 1247857 - RNA, 19 nt, Artificial Sequence
  Description of Artificial Sequence: Synthetic oligonucleotide
  Antisense strand to SEQ ID NO: 1247856
uaauuuaugggacaggacc

SEQ ID NO: 1247858 - RNA, 19 nt, Artificial Sequence
  Description of Artificial Sequence: Synthetic oligonucleotide
  Sense strand starting at position 1083 of SEQ ID NO: 1241113
agaaacugauggucgcaua

SEQ ID NO: 1247859 - RNA, 19 nt, Artificial Sequence
  Description of Artificial Sequence: Synthetic oligonucleotide
  Antisense strand to SEQ ID NO: 1247858
uaugcgaccaucaguuucu

SEQ ID NO: 1247860 - RNA, 19 nt, Artificial Sequence
  Description of Artificial Sequence: Synthetic oligonucleotide
  Sense strand starting at position 1084 of SEQ ID NO: 1241113
gaaacugauggucgcauaa

SEQ ID NO: 1247861 - RNA, 19 nt, Artificial Sequence
  Description of Artificial Sequence: Synthetic oligonucleotide
  Antisense strand to SEQ ID NO: 1247860
uuaugcgaccaucaguuuc

SEQ ID NO: 1247862 - RNA, 19 nt, Artificial Sequence
  Description of Artificial Sequence: Synthetic oligonucleotide
  Sense strand starting at position 1246 of SEQ ID NO: 1241113
gcaggaaugcuccaaagcu

SEQ ID NO: 1247863 - RNA, 19 nt, Artificial Sequence
  Description of Artificial Sequence: Synthetic oligonucleotide
  Antisense strand to SEQ ID NO: 1247862
agcuuuggagcauuccugc

SEQ ID NO: 1247864 - RNA, 19 nt, Artificial Sequence
  Description of Artificial Sequence: Synthetic oligonucleotide
  Sense strand starting at position 1268 of SEQ ID NO: 1241113
aucuaaaugugucucugau

SEQ ID NO: 1247865 - RNA, 19 nt, Artificial Sequence
  Description of Artificial Sequence: Synthetic oligonucleotide
  Antisense strand to SEQ ID NO: 1247864
aucagagacacauuuagau

SEQ ID NO: 1247866 - RNA, 19 nt, Artificial Sequence
  Description of Artificial Sequence: Synthetic oligonucleotide
  Sense strand starting at position 1385 of SEQ ID NO: 1241113
caguacuucggccauaaac

SEQ ID NO: 1247867 - RNA, 19 nt, Artificial Sequence
  Description of Artificial Sequence: Synthetic oligonucleotide
  Antisense strand to SEQ ID NO: 1247866
guuuauggccgaaguacug

SEQ ID NO: 1247868 - RNA, 19 nt, Artificial Sequence
  Description of Artificial Sequence: Synthetic oligonucleotide
  Sense strand starting at position 1387 of SEQ ID NO: 1241113
guacuucggccauaaaccu

SEQ ID NO: 1247869 - RNA, 19 nt, Artificial Sequence
  Description of Artificial Sequence: Synthetic oligonucleotide
  Antisense strand to SEQ ID NO: 1247868
agguuuauggccgaaguac

SEQ ID NO: 1247870 - RNA, 19 nt, Artificial Sequence
  Description of Artificial Sequence: Synthetic oligonucleotide
  Sense strand starting at position 2369 of SEQ ID NO: 1241113
cucagauucuaggucacaa

SEQ ID NO: 1247871 - RNA, 19 nt, Artificial Sequence
  Description of Artificial Sequence: Synthetic oligonucleotide
  Antisense strand to SEQ ID NO: 1247870
uugugaccuagaaucugag

SEQ ID NO: 1247872 - RNA, 19 nt, Artificial Sequence
  Description of Artificial Sequence: Synthetic oligonucleotide
  Sense strand starting at position 2475 of SEQ ID NO: 1241113
aggguuucccauugguaag

SEQ ID NO: 1247873 - RNA, 19 nt, Artificial Sequence
  Description of Artificial Sequence: Synthetic oligonucleotide
  Antisense strand to SEQ ID NO: 1247872
cuuaccaaugggaaacccu

SEQ ID NO: 1247874 - RNA, 19 nt, Artificial Sequence
  Description of Artificial Sequence: Synthetic oligonucleotide
  Sense strand starting at position 2823 of SEQ ID NO: 1241113
uaggcaucuguggaaaucu

SEQ ID NO: 1247875 - RNA, 19 nt, Artificial Sequence
  Description of Artificial Sequence: Synthetic oligonucleotide
  Antisense strand to SEQ ID NO: 1247874
agauuuccacagaugccua

SEQ ID NO: 1247876 - RNA, 19 nt, Artificial Sequence
  Description of Artificial Sequence: Synthetic oligonucleotide
  Sense strand starting at position 2923 of SEQ ID NO: 1241113
gcaguaacucaagacaagu

SEQ ID NO: 1247877 - RNA, 19 nt, Artificial Sequence
  Description of Artificial Sequence: Synthetic oligonucleotide
  Antisense strand to SEQ ID NO: 1247876
acuugucuugaguuacugc

SEQ ID NO: 1247878 - RNA, 19 nt, Artificial Sequence
  Description of Artificial Sequence: Synthetic oligonucleotide
  Sense strand starting at position 3004 of SEQ ID NO: 1241113
uucuuaaagccucgcauuu

SEQ ID NO: 1247879 - RNA, 19 nt, Artificial Sequence
  Description of Artificial Sequence: Synthetic oligonucleotide
  Antisense strand to SEQ ID NO: 1247878
aaaugcgaggcuuuaagaa

SEQ ID NO: 1247880 - RNA, 19 nt, Artificial Sequence
  Description of Artificial Sequence: Synthetic oligonucleotide
  Sense strand starting at position 3153 of SEQ ID NO: 1241113
gccgaaucugcauucgcua

SEQ ID NO: 1247881 - RNA, 19 nt, Artificial Sequence
  Description of Artificial Sequence: Synthetic oligonucleotide
  Antisense strand to SEQ ID NO: 1247880
uagcgaaugcagauucggc

SEQ ID NO: 1247882 - RNA, 19 nt, Artificial Sequence
  Description of Artificial Sequence: Synthetic oligonucleotide
  Sense strand starting at position 3216 of SEQ ID NO: 1241113
agcauaugucacuaaauga

SEQ ID NO: 1247883 - RNA, 19 nt, Artificial Sequence
  Description of Artificial Sequence: Synthetic oligonucleotide
  Antisense strand to SEQ ID NO: 1247882
ucauuuagugacauaugcu

SEQ ID NO: 1247884 - RNA, 19 nt, Artificial Sequence
  Description of Artificial Sequence: Synthetic oligonucleotide
  Sense strand starting at position 3372 of SEQ ID NO: 1241113
gucugaguugcacgauuuc

SEQ ID NO: 1247885 - RNA, 19 nt, Artificial Sequence
  Description of Artificial Sequence: Synthetic oligonucleotide
  Antisense strand to SEQ ID NO: 1247884
gaaaucgugcaacucagac

SEQ ID NO: 1247886 - RNA, 19 nt, Artificial Sequence
  Description of Artificial Sequence: Synthetic oligonucleotide
  Sense strand starting at position 3497 of SEQ ID NO: 1241113
aggagagaguuaguauugu

SEQ ID NO: 1247887 - RNA, 19 nt, Artificial Sequence
  Description of Artificial Sequence: Synthetic oligonucleotide
  Antisense strand to SEQ ID NO: 1247886
acaauacuaacucucuccu

SEQ ID NO: 1247888 - RNA, 19 nt, Artificial Sequence
  Description of Artificial Sequence: Synthetic oligonucleotide
  Sense strand starting at position 3623 of SEQ ID NO: 1241113
uugggaagcugcuuagaaa

SEQ ID NO: 1247889 - RNA, 19 nt, Artificial Sequence
  Description of Artificial Sequence: Synthetic oligonucleotide
  Antisense strand to SEQ ID NO: 1247888
uuucuaagcagcuucccaa

SEQ ID NO: 1247890 - RNA, 19 nt, Artificial Sequence
  Description of Artificial Sequence: Synthetic oligonucleotide
  Sense strand starting at position 3624 of SEQ ID NO: 1241113
ugggaagcugcuuagaaau

SEQ ID NO: 1247891 - RNA, 19 nt, Artificial Sequence
  Description of Artificial Sequence: Synthetic oligonucleotide
  Antisense strand to SEQ ID NO: 1247890
auuucuaagcagcuuccca

SEQ ID NO: 1247892 - RNA, 19 nt, Artificial Sequence
  Description of Artificial Sequence: Synthetic oligonucleotide
  Sense strand starting at position 3696 of SEQ ID NO: 1241113
uuugauguagcuuaaguaa

SEQ ID NO: 1247893 - RNA, 19 nt, Artificial Sequence
  Description of Artificial Sequence: Synthetic oligonucleotide
  Antisense strand to SEQ ID NO: 1247892
uuacuuaagcuacaucaaa

SEQ ID NO: 1247894 - RNA, 19 nt, Artificial Sequence
  Description of Artificial Sequence: Synthetic oligonucleotide
  Sense strand starting at position 3748 of SEQ ID NO: 1241113
augaguuauccagaagucc

SEQ ID NO: 1247895 - RNA, 19 nt, Artificial Sequence
  Description of Artificial Sequence: Synthetic oligonucleotide
  Antisense strand to SEQ ID NO: 1247894
ggacuucuggauaacucau

SEQ ID NO: 1247896 - RNA, 19 nt, Artificial Sequence
  Description of Artificial Sequence: Synthetic oligonucleotide
  Sense strand starting at position 3804 of SEQ ID NO: 1241113
ccuuaucuccacugggaaa

SEQ ID NO: 1247897 - RNA, 19 nt, Artificial Sequence
  Description of Artificial Sequence: Synthetic oligonucleotide
  Antisense strand to SEQ ID NO: 1247896
uuucccaguggagauaagg

SEQ ID NO: 1247898 - RNA, 19 nt, Artificial Sequence
  Description of Artificial Sequence: Synthetic oligonucleotide
  Sense strand starting at position 3922 of SEQ ID NO: 1241113
uugggaaccucugcuaaag

SEQ ID NO: 1247899 - RNA, 19 nt, Artificial Sequence
  Description of Artificial Sequence: Synthetic oligonucleotide
  Antisense strand to SEQ ID NO: 1247898
cuuuagcagagguucccaa

SEQ ID NO: 1247900 - RNA, 19 nt, Artificial Sequence
  Description of Artificial Sequence: Synthetic oligonucleotide
  Sense strand starting at position 330 of SEQ ID NO: 1241114
cgccuccauccuugaucua

SEQ ID NO: 1247901 - RNA, 19 nt, Artificial Sequence
  Description of Artificial Sequence: Synthetic oligonucleotide
  Antisense strand to SEQ ID NO: 1247900
uagaucaaggauggaggcg

SEQ ID NO: 1247902 - RNA, 19 nt, Artificial Sequence
  Description of Artificial Sequence: Synthetic oligonucleotide
  Sense strand starting at position 388 of SEQ ID NO: 1241114
uggcaccucugcuggaaau

SEQ ID NO: 1247903 - RNA, 19 nt, Artificial Sequence
  Description of Artificial Sequence: Synthetic oligonucleotide
  Antisense strand to SEQ ID NO: 1247902
auuuccagcagaggugcca

SEQ ID NO: 1247904 - RNA, 19 nt, Artificial Sequence
  Description of Artificial Sequence: Synthetic oligonucleotide
  Sense strand starting at position 740 of SEQ ID NO: 1241114
ggccgagccucagcuuuau

SEQ ID NO: 1247905 - RNA, 19 nt, Artificial Sequence
  Description of Artificial Sequence: Synthetic oligonucleotide
  Antisense strand to SEQ ID NO: 1247904
auaaagcugaggcucggcc

SEQ ID NO: 1247906 - RNA, 19 nt, Artificial Sequence
  Description of Artificial Sequence: Synthetic oligonucleotide
  Sense strand starting at position 746 of SEQ ID NO: 1241114
gccucagcuuuaucuguaa

SEQ ID NO: 1247907 - RNA, 19 nt, Artificial Sequence
  Description of Artificial Sequence: Synthetic oligonucleotide
  Antisense strand to SEQ ID NO: 1247906
uuacagauaaagcugaggc

SEQ ID NO: 1247908 - RNA, 19 nt, Artificial Sequence
  Description of Artificial Sequence: Synthetic oligonucleotide
  Sense strand starting at position 749 of SEQ ID NO: 1241114
ucagcuuuaucuguaagaa

SEQ ID NO: 1247909 - RNA, 19 nt, Artificial Sequence
  Description of Artificial Sequence: Synthetic oligonucleotide
  Antisense strand to SEQ ID NO: 1247908
uucuuacagauaaagcuga

SEQ ID NO: 1247910 - RNA, 19 nt, Artificial Sequence
  Description of Artificial Sequence: Synthetic oligonucleotide
  Sense strand starting at position 837 of SEQ ID NO: 1241114
cauguuugcuuacacguua

SEQ ID NO: 1247911 - RNA, 19 nt, Artificial Sequence
  Description of Artificial Sequence: Synthetic oligonucleotide
  Antisense strand to SEQ ID NO: 1247910
uaacguguaagcaaacaug

SEQ ID NO: 1247912 - RNA, 19 nt, Artificial Sequence
  Description of Artificial Sequence: Synthetic oligonucleotide
  Sense strand starting at position 1004 of SEQ ID NO: 1241114
ggcacaagcuucuccaauu

SEQ ID NO: 1247913 - RNA, 19 nt, Artificial Sequence
  Description of Artificial Sequence: Synthetic oligonucleotide
  Antisense strand to SEQ ID NO: 1247912
aauuggagaagcuugugcc

SEQ ID NO: 1247914 - RNA, 19 nt, Artificial Sequence
  Description of Artificial Sequence: Synthetic oligonucleotide
  Sense strand starting at position 1076 of SEQ ID NO: 1241114
gucucaguuugggcucauu

SEQ ID NO: 1247915 - RNA, 19 nt, Artificial Sequence
  Description of Artificial Sequence: Synthetic oligonucleotide
  Antisense strand to SEQ ID NO: 1247914
aaugagcccaaacugagac

SEQ ID NO: 1247916 - RNA, 19 nt, Artificial Sequence
  Description of Artificial Sequence: Synthetic oligonucleotide
  Sense strand starting at position 1084 of SEQ ID NO: 1241114
uugggcucauuccagaauu

SEQ ID NO: 1247917 - RNA, 19 nt, Artificial Sequence
  Description of Artificial Sequence: Synthetic oligonucleotide
  Antisense strand to SEQ ID NO: 1247916
aauucuggaaugagcccaa

SEQ ID NO: 1247918 - RNA, 19 nt, Artificial Sequence
  Description of Artificial Sequence: Synthetic oligonucleotide
  Sense strand starting at position 1232 of SEQ ID NO: 1241114
ggguaagcccuuggucaca

SEQ ID NO: 1247919 - RNA, 19 nt, Artificial Sequence
  Description of Artificial Sequence: Synthetic oligonucleotide
  Antisense strand to SEQ ID NO: 1247918
ugugaccaagggcuuaccc

SEQ ID NO: 1247920 - RNA, 19 nt, Artificial Sequence
  Description of Artificial Sequence: Synthetic oligonucleotide
  Sense strand starting at position 1307 of SEQ ID NO: 1241114
cuggcaguaacugaguuaa

SEQ ID NO: 1247921 - RNA, 19 nt, Artificial Sequence
  Description of Artificial Sequence: Synthetic oligonucleotide
  Antisense strand to SEQ ID NO: 1247920
uuaacucaguuacugccag

SEQ ID NO: 1247922 - RNA, 19 nt, Artificial Sequence
  Description of Artificial Sequence: Synthetic oligonucleotide
  Sense strand starting at position 1309 of SEQ ID NO: 1241114
ggcaguaacugaguuaaag

SEQ ID NO: 1247923 - RNA, 19 nt, Artificial Sequence
  Description of Artificial Sequence: Synthetic oligonucleotide
  Antisense strand to SEQ ID NO: 1247922
cuuuaacucaguuacugcc

SEQ ID NO: 1247924 - RNA, 19 nt, Artificial Sequence
  Description of Artificial Sequence: Synthetic oligonucleotide
  Sense strand starting at position 1494 of SEQ ID NO: 1241114
ggccgcggcucgugaauaa

SEQ ID NO: 1247925 - RNA, 19 nt, Artificial Sequence
  Description of Artificial Sequence: Synthetic oligonucleotide
  Antisense strand to SEQ ID NO: 1247924
uuauucacgagccgcggcc

SEQ ID NO: 1247926 - RNA, 19 nt, Artificial Sequence
  Description of Artificial Sequence: Synthetic oligonucleotide
  Sense strand starting at position 2059 of SEQ ID NO: 1241114
gcaccauuguuacgucacu

SEQ ID NO: 1247927 - RNA, 19 nt, Artificial Sequence
  Description of Artificial Sequence: Synthetic oligonucleotide
  Antisense strand to SEQ ID NO: 1247926
agugacguaacaauggugc

SEQ ID NO: 1247928 - RNA, 19 nt, Artificial Sequence
  Description of Artificial Sequence: Synthetic oligonucleotide
  Sense strand starting at position 2361 of SEQ ID NO: 1241114
uuucuuugaccuuacguga

SEQ ID NO: 1247929 - RNA, 19 nt, Artificial Sequence
  Description of Artificial Sequence: Synthetic oligonucleotide
  Antisense strand to SEQ ID NO: 1247928
ucacguaaggucaaagaaa

SEQ ID NO: 1247930 - RNA, 19 nt, Artificial Sequence
  Description of Artificial Sequence: Synthetic oligonucleotide
  Sense strand starting at position 2736 of SEQ ID NO: 1241114
cccacaucugggcgggaua

SEQ ID NO: 1247931 - RNA, 19 nt, Artificial Sequence
  Description of Artificial Sequence: Synthetic oligonucleotide
  Antisense strand to SEQ ID NO: 1247930
uaucccgcccagauguggg

SEQ ID NO: 1247932 - RNA, 19 nt, Artificial Sequence
  Description of Artificial Sequence: Synthetic oligonucleotide
  Sense strand starting at position 2739 of SEQ ID NO: 1241114
acaucugggcgggauagau

SEQ ID NO: 1247933 - RNA, 19 nt, Artificial Sequence
  Description of Artificial Sequence: Synthetic oligonucleotide
  Antisense strand to SEQ ID NO: 1247932
aucuaucccgcccagaugu

SEQ ID NO: 1247934 - RNA, 19 nt, Artificial Sequence
  Description of Artificial Sequence: Synthetic oligonucleotide
  Sense strand starting at position 2751 of SEQ ID NO: 1241114
gauagauucgauugggccu

SEQ ID NO: 1247935 - RNA, 19 nt, Artificial Sequence
  Description of Artificial Sequence: Synthetic oligonucleotide
  Antisense strand to SEQ ID NO: 1247934
aggcccaaucgaaucuauc

SEQ ID NO: 1247936 - RNA, 19 nt, Artificial Sequence
  Description of Artificial Sequence: Synthetic oligonucleotide
  Sense strand starting at position 2882 of SEQ ID NO: 1241114
cugggaauucuaggcccau

SEQ ID NO: 1247937 - RNA, 19 nt, Artificial Sequence
  Description of Artificial Sequence: Synthetic oligonucleotide
  Antisense strand to SEQ ID NO: 1247936
augggccuagaauucccag

SEQ ID NO: 1247938 - RNA, 19 nt, Artificial Sequence
  Description of Artificial Sequence: Synthetic oligonucleotide
  Sense strand starting at position 2883 of SEQ ID NO: 1241114
ugggaauucuaggcccauu

SEQ ID NO: 1247939 - RNA, 19 nt, Artificial Sequence
  Description of Artificial Sequence: Synthetic oligonucleotide
  Antisense strand to SEQ ID NO: 1247938
aaugggccuagaauuccca

SEQ ID NO: 1247940 - RNA, 19 nt, Artificial Sequence
  Description of Artificial Sequence: Synthetic oligonucleotide
  Sense strand starting at position 3064 of SEQ ID NO: 1241114
ucugguuccuucccuagaa

SEQ ID NO: 1247941 - RNA, 19 nt, Artificial Sequence
  Description of Artificial Sequence: Synthetic oligonucleotide
  Antisense strand to SEQ ID NO: 1247940
uucuagggaaggaaccaga

SEQ ID NO: 1247942 - RNA, 19 nt, Artificial Sequence
  Description of Artificial Sequence: Synthetic oligonucleotide
  Sense strand starting at position 3065 of SEQ ID NO: 1241114
cugguuccuucccuagaau

SEQ ID NO: 1247943 - RNA, 19 nt, Artificial Sequence
  Description of Artificial Sequence: Synthetic oligonucleotide
  Antisense strand to SEQ ID NO: 1247942
auucuagggaaggaaccag

SEQ ID NO: 1247944 - RNA, 19 nt, Artificial Sequence
  Description of Artificial Sequence: Synthetic oligonucleotide
  Sense strand starting at position 3066 of SEQ ID NO: 1241114
ugguuccuucccuagaaug

SEQ ID NO: 1247945 - RNA, 19 nt, Artificial Sequence
  Description of Artificial Sequence: Synthetic oligonucleotide
  Antisense strand to SEQ ID NO: 1247944
cauucuagggaaggaacca

SEQ ID NO: 1247946 - RNA, 19 nt, Artificial Sequence
  Description of Artificial Sequence: Synthetic oligonucleotide
  Sense strand starting at position 3068 of SEQ ID NO: 1241114
guuccuucccuagaaugcu

SEQ ID NO: 1247947 - RNA, 19 nt, Artificial Sequence
  Description of Artificial Sequence: Synthetic oligonucleotide
  Antisense strand to SEQ ID NO: 1247946
agcauucuagggaaggaac

SEQ ID NO: 1247948 - RNA, 19 nt, Artificial Sequence
  Description of Artificial Sequence: Synthetic oligonucleotide
  Sense strand starting at position 3101 of SEQ ID NO: 1241114
aguacuaucucaccaggga

SEQ ID NO: 1247949 - RNA, 19 nt, Artificial Sequence
  Description of Artificial Sequence: Synthetic oligonucleotide
  Antisense strand to SEQ ID NO: 1247948
ucccuggugagauaguacu

SEQ ID NO: 1247950 - RNA, 19 nt, Artificial Sequence
  Description of Artificial Sequence: Synthetic oligonucleotide
  Sense strand starting at position 3595 of SEQ ID NO: 1241114
ccagguugucagcaggagu

SEQ ID NO: 1247951 - RNA, 19 nt, Artificial Sequence
  Description of Artificial Sequence: Synthetic oligonucleotide
  Antisense strand to SEQ ID NO: 1247950
acuccugcugacaaccugg

SEQ ID NO: 1247952 - RNA, 19 nt, Artificial Sequence
  Description of Artificial Sequence: Synthetic oligonucleotide
  Sense strand starting at position 3666 of SEQ ID NO: 1241114
ccacaugucuccuccugua

SEQ ID NO: 1247953 - RNA, 19 nt, Artificial Sequence
  Description of Artificial Sequence: Synthetic oligonucleotide
  Antisense strand to SEQ ID NO: 1247952
uacaggaggagacaugugg

SEQ ID NO: 1247954 - RNA, 19 nt, Artificial Sequence
  Description of Artificial Sequence: Synthetic oligonucleotide
  Sense strand starting at position 3724 of SEQ ID NO: 1241114
ucuggaugccucugaguac

SEQ ID NO: 1247955 - RNA, 19 nt, Artificial Sequence
  Description of Artificial Sequence: Synthetic oligonucleotide
  Antisense strand to SEQ ID NO: 1247954
guacucagaggcauccaga

SEQ ID NO: 1247956 - RNA, 19 nt, Artificial Sequence
  Description of Artificial Sequence: Synthetic oligonucleotide
  Sense strand starting at position 3727 of SEQ ID NO: 1241114
ggaugccucugaguacgau

SEQ ID NO: 1247957 - RNA, 19 nt, Artificial Sequence
  Description of Artificial Sequence: Synthetic oligonucleotide
  Antisense strand to SEQ ID NO: 1247956
aucguacucagaggcaucc

SEQ ID NO: 1247958 - RNA, 19 nt, Artificial Sequence
  Description of Artificial Sequence: Synthetic oligonucleotide
  Sense strand starting at position 3886 of SEQ ID NO: 1241114
gaaggcuggaguugagaua

SEQ ID NO: 1247959 - RNA, 19 nt, Artificial Sequence
  Description of Artificial Sequence: Synthetic oligonucleotide
  Antisense strand to SEQ ID NO: 1247958
uaucucaacuccagccuuc

SEQ ID NO: 1247960 - RNA, 19 nt, Artificial Sequence
  Description of Artificial Sequence: Synthetic oligonucleotide
  Sense strand starting at position 1621 of SEQ ID NO: 1241115
cgaagugggucuccaaauu

SEQ ID NO: 1247961 - RNA, 19 nt, Artificial Sequence
  Description of Artificial Sequence: Synthetic oligonucleotide
  Antisense strand to SEQ ID NO: 1247960
aauuuggagacccacuucg

SEQ ID NO: 1247962 - RNA, 19 nt, Artificial Sequence
  Description of Artificial Sequence: Synthetic oligonucleotide
  Sense strand starting at position 1811 of SEQ ID NO: 1241115
gcuguuucuuccgcgagcu

SEQ ID NO: 1247963 - RNA, 19 nt, Artificial Sequence
  Description of Artificial Sequence: Synthetic oligonucleotide
  Antisense strand to SEQ ID NO: 1247962
agcucgcggaagaaacagc

SEQ ID NO: 1247964 - RNA, 19 nt, Artificial Sequence
  Description of Artificial Sequence: Synthetic oligonucleotide
  Sense strand starting at position 1812 of SEQ ID NO: 1241115
cuguuucuuccgcgagcuu

SEQ ID NO: 1247965 - RNA, 19 nt, Artificial Sequence
  Description of Artificial Sequence: Synthetic oligonucleotide
  Antisense strand to SEQ ID NO: 1247964
aagcucgcggaagaaacag

SEQ ID NO: 1247966 - RNA, 19 nt, Artificial Sequence
  Description of Artificial Sequence: Synthetic oligonucleotide
  Sense strand starting at position 2277 of SEQ ID NO: 1241115
gcggcacuguuguaguuua

SEQ ID NO: 1247967 - RNA, 19 nt, Artificial Sequence
  Description of Artificial Sequence: Synthetic oligonucleotide
  Antisense strand to SEQ ID NO: 1247966
uaaacuacaacagugccgc

SEQ ID NO: 1247968 - RNA, 19 nt, Artificial Sequence
  Description of Artificial Sequence: Synthetic oligonucleotide
  Sense strand starting at position 2376 of SEQ ID NO: 1241115
aaacaagaguuugacuaga

SEQ ID NO: 1247969 - RNA, 19 nt, Artificial Sequence
  Description of Artificial Sequence: Synthetic oligonucleotide
  Antisense strand to SEQ ID NO: 1247968
ucuagucaaacucuuguuu

SEQ ID NO: 1247970 - RNA, 19 nt, Artificial Sequence
  Description of Artificial Sequence: Synthetic oligonucleotide
  Sense strand starting at position 2433 of SEQ ID NO: 1241115
aaggccauuccuugaggga

SEQ ID NO: 1247971 - RNA, 19 nt, Artificial Sequence
  Description of Artificial Sequence: Synthetic oligonucleotide
  Antisense strand to SEQ ID NO: 1247970
ucccucaaggaauggccuu

SEQ ID NO: 1247972 - RNA, 19 nt, Artificial Sequence
  Description of Artificial Sequence: Synthetic oligonucleotide
  Sense strand starting at position 2646 of SEQ ID NO: 1241115
cugggaagcaugugagauc

SEQ ID NO: 1247973 - RNA, 19 nt, Artificial Sequence
  Description of Artificial Sequence: Synthetic oligonucleotide
  Antisense strand to SEQ ID NO: 1247972
gaucucacaugcuucccag

SEQ ID NO: 1247974 - RNA, 19 nt, Artificial Sequence
  Description of Artificial Sequence: Synthetic oligonucleotide
  Sense strand starting at position 2659 of SEQ ID NO: 1241115
gagaucagcuaucuuugau

SEQ ID NO: 1247975 - RNA, 19 nt, Artificial Sequence
  Description of Artificial Sequence: Synthetic oligonucleotide
  Antisense strand to SEQ ID NO: 1247974
aucaaagauagcugaucuc

SEQ ID NO: 1247976 - RNA, 19 nt, Artificial Sequence
  Description of Artificial Sequence: Synthetic oligonucleotide
  Sense strand starting at position 2705 of SEQ ID NO: 1241115
acaagauucugauguaaag

SEQ ID NO: 1247977 - RNA, 19 nt, Artificial Sequence
  Description of Artificial Sequence: Synthetic oligonucleotide
  Antisense strand to SEQ ID NO: 1247976
cuuuacaucagaaucuugu

SEQ ID NO: 1247978 - RNA, 19 nt, Artificial Sequence
  Description of Artificial Sequence: Synthetic oligonucleotide
  Sense strand starting at position 2792 of SEQ ID NO: 1241115
guuaucuugucugguccua

SEQ ID NO: 1247979 - RNA, 19 nt, Artificial Sequence
  Description of Artificial Sequence: Synthetic oligonucleotide
  Antisense strand to SEQ ID NO: 1247978
uaggaccagacaagauaac

SEQ ID NO: 1247980 - RNA, 19 nt, Artificial Sequence
  Description of Artificial Sequence: Synthetic oligonucleotide
  Sense strand starting at position 2989 of SEQ ID NO: 1241115
gggagaagucaguggcaaa

SEQ ID NO: 1247981 - RNA, 19 nt, Artificial Sequence
  Description of Artificial Sequence: Synthetic oligonucleotide
  Antisense strand to SEQ ID NO: 1247980
uuugccacugacuucuccc

SEQ ID NO: 1247982 - RNA, 19 nt, Artificial Sequence
  Description of Artificial Sequence: Synthetic oligonucleotide
  Sense strand starting at position 2990 of SEQ ID NO: 1241115
ggagaagucaguggcaaag

SEQ ID NO: 1247983 - RNA, 19 nt, Artificial Sequence
  Description of Artificial Sequence: Synthetic oligonucleotide
  Antisense strand to SEQ ID NO: 1247982
cuuugccacugacuucucc

SEQ ID NO: 1247984 - RNA, 19 nt, Artificial Sequence
  Description of Artificial Sequence: Synthetic oligonucleotide
  Sense strand starting at position 3023 of SEQ ID NO: 1241115
acuugacugcauuggauau

SEQ ID NO: 1247985 - RNA, 19 nt, Artificial Sequence
  Description of Artificial Sequence: Synthetic oligonucleotide
  Antisense strand to SEQ ID NO: 1247984
auauccaaugcagucaagu

SEQ ID NO: 1247986 - RNA, 19 nt, Artificial Sequence
  Description of Artificial Sequence: Synthetic oligonucleotide
  Sense strand starting at position 3034 of SEQ ID NO: 1241115
uuggauauucucuguuccu

SEQ ID NO: 1247987 - RNA, 19 nt, Artificial Sequence
  Description of Artificial Sequence: Synthetic oligonucleotide
  Antisense strand to SEQ ID NO: 1247986
aggaacagagaauauccaa

SEQ ID NO: 1247988 - RNA, 19 nt, Artificial Sequence
  Description of Artificial Sequence: Synthetic oligonucleotide
  Sense strand starting at position 3035 of SEQ ID NO: 1241115
uggauauucucuguuccuu

SEQ ID NO: 1247989 - RNA, 19 nt, Artificial Sequence
  Description of Artificial Sequence: Synthetic oligonucleotide
  Antisense strand to SEQ ID NO: 1247988
aaggaacagagaauaucca

SEQ ID NO: 1247990 - RNA, 19 nt, Artificial Sequence
  Description of Artificial Sequence: Synthetic oligonucleotide
  Sense strand starting at position 3202 of SEQ ID NO: 1241115
agcucagugcuuggaggua

SEQ ID NO: 1247991 - RNA, 19 nt, Artificial Sequence
  Description of Artificial Sequence: Synthetic oligonucleotide
  Antisense strand to SEQ ID NO: 1247990
uaccuccaagcacugagcu

SEQ ID NO: 1247992 - RNA, 19 nt, Artificial Sequence
  Description of Artificial Sequence: Synthetic oligonucleotide
  Sense strand starting at position 3207 of SEQ ID NO: 1241115
agugcuuggagguaagaua

SEQ ID NO: 1247993 - RNA, 19 nt, Artificial Sequence
  Description of Artificial Sequence: Synthetic oligonucleotide
  Antisense strand to SEQ ID NO: 1247992
uaucuuaccuccaagcacu

SEQ ID NO: 1247994 - RNA, 19 nt, Artificial Sequence
  Description of Artificial Sequence: Synthetic oligonucleotide
  Sense strand starting at position 3218 of SEQ ID NO: 1241115
guaagauaauagccuccaa

SEQ ID NO: 1247995 - RNA, 19 nt, Artificial Sequence
  Description of Artificial Sequence: Synthetic oligonucleotide
  Antisense strand to SEQ ID NO: 1247994
uuggaggcuauuaucuuac

SEQ ID NO: 1247996 - RNA, 19 nt, Artificial Sequence
  Description of Artificial Sequence: Synthetic oligonucleotide
  Sense strand starting at position 3392 of SEQ ID NO: 1241115
ccaggagucuccuuaggac

SEQ ID NO: 1247997 - RNA, 19 nt, Artificial Sequence
  Description of Artificial Sequence: Synthetic oligonucleotide
  Antisense strand to SEQ ID NO: 1247996
guccuaaggagacuccugg

SEQ ID NO: 1247998 - RNA, 19 nt, Artificial Sequence
  Description of Artificial Sequence: Synthetic oligonucleotide
  Sense strand starting at position 3427 of SEQ ID NO: 1241115
cagcgaaguugaggucuaa

SEQ ID NO: 1247999 - RNA, 19 nt, Artificial Sequence
  Description of Artificial Sequence: Synthetic oligonucleotide
  Antisense strand to SEQ ID NO: 1247998
uuagaccucaacuucgcug

SEQ ID NO: 1248000 - RNA, 19 nt, Artificial Sequence
  Description of Artificial Sequence: Synthetic oligonucleotide
  Sense strand starting at position 3465 of SEQ ID NO: 1241115
ggagcaauggucugacuua

SEQ ID NO: 1248001 - RNA, 19 nt, Artificial Sequence
  Description of Artificial Sequence: Synthetic oligonucleotide
  Antisense strand to SEQ ID NO: 1248000
uaagucagaccauugcucc

SEQ ID NO: 1248002 - RNA, 19 nt, Artificial Sequence
  Description of Artificial Sequence: Synthetic oligonucleotide
  Sense strand starting at position 3466 of SEQ ID NO: 1241115
gagcaauggucugacuuag

SEQ ID NO: 1248003 - RNA, 19 nt, Artificial Sequence
  Description of Artificial Sequence: Synthetic oligonucleotide
  Antisense strand to SEQ ID NO: 1248002
cuaagucagaccauugcuc

SEQ ID NO: 1248004 - RNA, 19 nt, Artificial Sequence
  Description of Artificial Sequence: Synthetic oligonucleotide
  Sense strand starting at position 3472 of SEQ ID NO: 1241115
uggucugacuuagauuugu

SEQ ID NO: 1248005 - RNA, 19 nt, Artificial Sequence
  Description of Artificial Sequence: Synthetic oligonucleotide
  Antisense strand to SEQ ID NO: 1248004
acaaaucuaagucagacca

SEQ ID NO: 1248006 - RNA, 19 nt, Artificial Sequence
  Description of Artificial Sequence: Synthetic oligonucleotide
  Sense strand starting at position 3476 of SEQ ID NO: 1241115
cugacuuagauuugugugu

SEQ ID NO: 1248007 - RNA, 19 nt, Artificial Sequence
  Description of Artificial Sequence: Synthetic oligonucleotide
  Antisense strand to SEQ ID NO: 1248006
acacacaaaucuaagucag

SEQ ID NO: 1248008 - RNA, 19 nt, Artificial Sequence
  Description of Artificial Sequence: Synthetic oligonucleotide
  Sense strand starting at position 3478 of SEQ ID NO: 1241115
gacuuagauuugugugucu

SEQ ID NO: 1248009 - RNA, 19 nt, Artificial Sequence
  Description of Artificial Sequence: Synthetic oligonucleotide
  Antisense strand to SEQ ID NO: 1248008
agacacacaaaucuaaguc

SEQ ID NO: 1248010 - RNA, 19 nt, Artificial Sequence
  Description of Artificial Sequence: Synthetic oligonucleotide
  Sense strand starting at position 3480 of SEQ ID NO: 1241115
cuuagauuugugugucuca

SEQ ID NO: 1248011 - RNA, 19 nt, Artificial Sequence
  Description of Artificial Sequence: Synthetic oligonucleotide
  Antisense strand to SEQ ID NO: 1248010
ugagacacacaaaucuaag

SEQ ID NO: 1248012 - RNA, 19 nt, Artificial Sequence
  Description of Artificial Sequence: Synthetic oligonucleotide
  Sense strand starting at position 3485 of SEQ ID NO: 1241115
auuugugugucucagagaa

SEQ ID NO: 1248013 - RNA, 19 nt, Artificial Sequence
  Description of Artificial Sequence: Synthetic oligonucleotide
  Antisense strand to SEQ ID NO: 1248012
uucucugagacacacaaau

SEQ ID NO: 1248014 - RNA, 19 nt, Artificial Sequence
  Description of Artificial Sequence: Synthetic oligonucleotide
  Sense strand starting at position 3487 of SEQ ID NO: 1241115
uugugugucucagagaaga

SEQ ID NO: 1248015 - RNA, 19 nt, Artificial Sequence
  Description of Artificial Sequence: Synthetic oligonucleotide
  Antisense strand to SEQ ID NO: 1248014
ucuucucugagacacacaa

SEQ ID NO: 1248016 - RNA, 19 nt, Artificial Sequence
  Description of Artificial Sequence: Synthetic oligonucleotide
  Sense strand starting at position 3489 of SEQ ID NO: 1241115
gugugucucagagaagaca

SEQ ID NO: 1248017 - RNA, 19 nt, Artificial Sequence
  Description of Artificial Sequence: Synthetic oligonucleotide
  Antisense strand to SEQ ID NO: 1248016
ugucuucucugagacacac

SEQ ID NO: 1248018 - RNA, 19 nt, Artificial Sequence
  Description of Artificial Sequence: Synthetic oligonucleotide
  Sense strand starting at position 3610 of SEQ ID NO: 1241115
augagauaaucugaaagaa

SEQ ID NO: 1248019 - RNA, 19 nt, Artificial Sequence
  Description of Artificial Sequence: Synthetic oligonucleotide
  Antisense strand to SEQ ID NO: 1248018
uucuuucagauuaucucau

SEQ ID NO: 1248020 - RNA, 19 nt, Artificial Sequence
  Description of Artificial Sequence: Synthetic oligonucleotide
  Sense strand starting at position 1933 of SEQ ID NO: 1241116
cgaagugggucuccaaauu

SEQ ID NO: 1248021 - RNA, 19 nt, Artificial Sequence
  Description of Artificial Sequence: Synthetic oligonucleotide
  Antisense strand to SEQ ID NO: 1248020
aauuuggagacccacuucg

SEQ ID NO: 1248022 - RNA, 19 nt, Artificial Sequence
  Description of Artificial Sequence: Synthetic oligonucleotide
  Sense strand starting at position 2123 of SEQ ID NO: 1241116
gcuguuucuuccgcgagcu

SEQ ID NO: 1248023 - RNA, 19 nt, Artificial Sequence
  Description of Artificial Sequence: Synthetic oligonucleotide
  Antisense strand to SEQ ID NO: 1248022
agcucgcggaagaaacagc

SEQ ID NO: 1248024 - RNA, 19 nt, Artificial Sequence
  Description of Artificial Sequence: Synthetic oligonucleotide
  Sense strand starting at position 2124 of SEQ ID NO: 1241116
cuguuucuuccgcgagcuu

SEQ ID NO: 1248025 - RNA, 19 nt, Artificial Sequence
  Description of Artificial Sequence: Synthetic oligonucleotide
  Antisense strand to SEQ ID NO: 1248024
aagcucgcggaagaaacag

SEQ ID NO: 1248026 - RNA, 19 nt, Artificial Sequence
  Description of Artificial Sequence: Synthetic oligonucleotide
  Sense strand starting at position 2589 of SEQ ID NO: 1241116
gcggcacuguuguaguuua

SEQ ID NO: 1248027 - RNA, 19 nt, Artificial Sequence
  Description of Artificial Sequence: Synthetic oligonucleotide
  Antisense strand to SEQ ID NO: 1248026
uaaacuacaacagugccgc

SEQ ID NO: 1248028 - RNA, 19 nt, Artificial Sequence
  Description of Artificial Sequence: Synthetic oligonucleotide
  Sense strand starting at position 2688 of SEQ ID NO: 1241116
aaacaagaguuugacuaga

SEQ ID NO: 1248029 - RNA, 19 nt, Artificial Sequence
  Description of Artificial Sequence: Synthetic oligonucleotide
  Antisense strand to SEQ ID NO: 1248028
ucuagucaaacucuuguuu

SEQ ID NO: 1248030 - RNA, 19 nt, Artificial Sequence
  Description of Artificial Sequence: Synthetic oligonucleotide
  Sense strand starting at position 2745 of SEQ ID NO: 1241116
aaggccauuccuugaggga

SEQ ID NO: 1248031 - RNA, 19 nt, Artificial Sequence
  Description of Artificial Sequence: Synthetic oligonucleotide
  Antisense strand to SEQ ID NO: 1248030
ucccucaaggaauggccuu

SEQ ID NO: 1248032 - RNA, 19 nt, Artificial Sequence
  Description of Artificial Sequence: Synthetic oligonucleotide
  Sense strand starting at position 2958 of SEQ ID NO: 1241116
cugggaagcaugugagauc

SEQ ID NO: 1248033 - RNA, 19 nt, Artificial Sequence
  Description of Artificial Sequence: Synthetic oligonucleotide
  Antisense strand to SEQ ID NO: 1248032
gaucucacaugcuucccag

SEQ ID NO: 1248034 - RNA, 19 nt, Artificial Sequence
  Description of Artificial Sequence: Synthetic oligonucleotide
  Sense strand starting at position 2971 of SEQ ID NO: 1241116
gagaucagcuaucuuugau

SEQ ID NO: 1248035 - RNA, 19 nt, Artificial Sequence
  Description of Artificial Sequence: Synthetic oligonucleotide
  Antisense strand to SEQ ID NO: 1248034
aucaaagauagcugaucuc

SEQ ID NO: 1248036 - RNA, 19 nt, Artificial Sequence
  Description of Artificial Sequence: Synthetic oligonucleotide
  Sense strand starting at position 3017 of SEQ ID NO: 1241116
acaagauucugauguaaag

SEQ ID NO: 1248037 - RNA, 19 nt, Artificial Sequence
  Description of Artificial Sequence: Synthetic oligonucleotide
  Antisense strand to SEQ ID NO: 1248036
cuuuacaucagaaucuugu

SEQ ID NO: 1248038 - RNA, 19 nt, Artificial Sequence
  Description of Artificial Sequence: Synthetic oligonucleotide
  Sense strand starting at position 3104 of SEQ ID NO: 1241116
guuaucuugucugguccua

SEQ ID NO: 1248039 - RNA, 19 nt, Artificial Sequence
  Description of Artificial Sequence: Synthetic oligonucleotide
  Antisense strand to SEQ ID NO: 1248038
uaggaccagacaagauaac

SEQ ID NO: 1248040 - RNA, 19 nt, Artificial Sequence
  Description of Artificial Sequence: Synthetic oligonucleotide
  Sense strand starting at position 3301 of SEQ ID NO: 1241116
gggagaagucaguggcaaa

SEQ ID NO: 1248041 - RNA, 19 nt, Artificial Sequence
  Description of Artificial Sequence: Synthetic oligonucleotide
  Antisense strand to SEQ ID NO: 1248040
uuugccacugacuucuccc

SEQ ID NO: 1248042 - RNA, 19 nt, Artificial Sequence
  Description of Artificial Sequence: Synthetic oligonucleotide
  Sense strand starting at position 3302 of SEQ ID NO: 1241116
ggagaagucaguggcaaag

SEQ ID NO: 1248043 - RNA, 19 nt, Artificial Sequence
  Description of Artificial Sequence: Synthetic oligonucleotide
  Antisense strand to SEQ ID NO: 1248042
cuuugccacugacuucucc

SEQ ID NO: 1248044 - RNA, 19 nt, Artificial Sequence
  Description of Artificial Sequence: Synthetic oligonucleotide
  Sense strand starting at position 3335 of SEQ ID NO: 1241116
acuugacugcauuggauau

SEQ ID NO: 1248045 - RNA, 19 nt, Artificial Sequence
  Description of Artificial Sequence: Synthetic oligonucleotide
  Antisense strand to SEQ ID NO: 1248044
auauccaaugcagucaagu

SEQ ID NO: 1248046 - RNA, 19 nt, Artificial Sequence
  Description of Artificial Sequence: Synthetic oligonucleotide
  Sense strand starting at position 3346 of SEQ ID NO: 1241116
uuggauauucucuguuccu

SEQ ID NO: 1248047 - RNA, 19 nt, Artificial Sequence
  Description of Artificial Sequence: Synthetic oligonucleotide
  Antisense strand to SEQ ID NO: 1248046
aggaacagagaauauccaa

SEQ ID NO: 1248048 - RNA, 19 nt, Artificial Sequence
  Description of Artificial Sequence: Synthetic oligonucleotide
  Sense strand starting at position 3347 of SEQ ID NO: 1241116
uggauauucucuguuccuu

SEQ ID NO: 1248049 - RNA, 19 nt, Artificial Sequence
  Description of Artificial Sequence: Synthetic oligonucleotide
  Antisense strand to SEQ ID NO: 1248048
aaggaacagagaauaucca

SEQ ID NO: 1248050 - RNA, 19 nt, Artificial Sequence
  Description of Artificial Sequence: Synthetic oligonucleotide
  Sense strand starting at position 3514 of SEQ ID NO: 1241116
agcucagugcuuggaggua

SEQ ID NO: 1248051 - RNA, 19 nt, Artificial Sequence
  Description of Artificial Sequence: Synthetic oligonucleotide
  Antisense strand to SEQ ID NO: 1248050
uaccuccaagcacugagcu

SEQ ID NO: 1248052 - RNA, 19 nt, Artificial Sequence
  Description of Artificial Sequence: Synthetic oligonucleotide
  Sense strand starting at position 3519 of SEQ ID NO: 1241116
agugcuuggagguaagaua

SEQ ID NO: 1248053 - RNA, 19 nt, Artificial Sequence
  Description of Artificial Sequence: Synthetic oligonucleotide
  Antisense strand to SEQ ID NO: 1248052
uaucuuaccuccaagcacu

SEQ ID NO: 1248054 - RNA, 19 nt, Artificial Sequence
  Description of Artificial Sequence: Synthetic oligonucleotide
  Sense strand starting at position 3530 of SEQ ID NO: 1241116
guaagauaauagccuccaa

SEQ ID NO: 1248055 - RNA, 19 nt, Artificial Sequence
  Description of Artificial Sequence: Synthetic oligonucleotide
  Antisense strand to SEQ ID NO: 1248054
uuggaggcuauuaucuuac

SEQ ID NO: 1248056 - RNA, 19 nt, Artificial Sequence
  Description of Artificial Sequence: Synthetic oligonucleotide
  Sense strand starting at position 3704 of SEQ ID NO: 1241116
ccaggagucuccuuaggac

SEQ ID NO: 1248057 - RNA, 19 nt, Artificial Sequence
  Description of Artificial Sequence: Synthetic oligonucleotide
  Antisense strand to SEQ ID NO: 1248056
guccuaaggagacuccugg

SEQ ID NO: 1248058 - RNA, 19 nt, Artificial Sequence
  Description of Artificial Sequence: Synthetic oligonucleotide
  Sense strand starting at position 3739 of SEQ ID NO: 1241116
cagcgaaguugaggucuaa

SEQ ID NO: 1248059 - RNA, 19 nt, Artificial Sequence
  Description of Artificial Sequence: Synthetic oligonucleotide
  Antisense strand to SEQ ID NO: 1248058
uuagaccucaacuucgcug

SEQ ID NO: 1248060 - RNA, 19 nt, Artificial Sequence
  Description of Artificial Sequence: Synthetic oligonucleotide
  Sense strand starting at position 3777 of SEQ ID NO: 1241116
ggagcaauggucugacuua

SEQ ID NO: 1248061 - RNA, 19 nt, Artificial Sequence
  Description of Artificial Sequence: Synthetic oligonucleotide
  Antisense strand to SEQ ID NO: 1248060
uaagucagaccauugcucc

SEQ ID NO: 1248062 - RNA, 19 nt, Artificial Sequence
  Description of Artificial Sequence: Synthetic oligonucleotide
  Sense strand starting at position 3778 of SEQ ID NO: 1241116
gagcaauggucugacuuag

SEQ ID NO: 1248063 - RNA, 19 nt, Artificial Sequence
  Description of Artificial Sequence: Synthetic oligonucleotide
  Antisense strand to SEQ ID NO: 1248062
cuaagucagaccauugcuc

SEQ ID NO: 1248064 - RNA, 19 nt, Artificial Sequence
  Description of Artificial Sequence: Synthetic oligonucleotide
  Sense strand starting at position 3784 of SEQ ID NO: 1241116
uggucugacuuagauuugu

SEQ ID NO: 1248065 - RNA, 19 nt, Artificial Sequence
  Description of Artificial Sequence: Synthetic oligonucleotide
  Antisense strand to SEQ ID NO: 1248064
acaaaucuaagucagacca

SEQ ID NO: 1248066 - RNA, 19 nt, Artificial Sequence
  Description of Artificial Sequence: Synthetic oligonucleotide
  Sense strand starting at position 3788 of SEQ ID NO: 1241116
cugacuuagauuugugugu

SEQ ID NO: 1248067 - RNA, 19 nt, Artificial Sequence
  Description of Artificial Sequence: Synthetic oligonucleotide
  Antisense strand to SEQ ID NO: 1248066
acacacaaaucuaagucag

SEQ ID NO: 1248068 - RNA, 19 nt, Artificial Sequence
  Description of Artificial Sequence: Synthetic oligonucleotide
  Sense strand starting at position 3790 of SEQ ID NO: 1241116
gacuuagauuugugugucu

SEQ ID NO: 1248069 - RNA, 19 nt, Artificial Sequence
  Description of Artificial Sequence: Synthetic oligonucleotide
  Antisense strand to SEQ ID NO: 1248068
agacacacaaaucuaaguc

SEQ ID NO: 1248070 - RNA, 19 nt, Artificial Sequence
  Description of Artificial Sequence: Synthetic oligonucleotide
  Sense strand starting at position 3792 of SEQ ID NO: 1241116
cuuagauuugugugucuca

SEQ ID NO: 1248071 - RNA, 19 nt, Artificial Sequence
  Description of Artificial Sequence: Synthetic oligonucleotide
  Antisense strand to SEQ ID NO: 1248070
ugagacacacaaaucuaag

SEQ ID NO: 1248072 - RNA, 19 nt, Artificial Sequence
  Description of Artificial Sequence: Synthetic oligonucleotide
  Sense strand starting at position 3797 of SEQ ID NO: 1241116
auuugugugucucagagaa

SEQ ID NO: 1248073 - RNA, 19 nt, Artificial Sequence
  Description of Artificial Sequence: Synthetic oligonucleotide
  Antisense strand to SEQ ID NO: 1248072
uucucugagacacacaaau

SEQ ID NO: 1248074 - RNA, 19 nt, Artificial Sequence
  Description of Artificial Sequence: Synthetic oligonucleotide
  Sense strand starting at position 3799 of SEQ ID NO: 1241116
uugugugucucagagaaga

SEQ ID NO: 1248075 - RNA, 19 nt, Artificial Sequence
  Description of Artificial Sequence: Synthetic oligonucleotide
  Antisense strand to SEQ ID NO: 1248074
ucuucucugagacacacaa

SEQ ID NO: 1248076 - RNA, 19 nt, Artificial Sequence
  Description of Artificial Sequence: Synthetic oligonucleotide
  Sense strand starting at position 3801 of SEQ ID NO: 1241116
gugugucucagagaagaca

SEQ ID NO: 1248077 - RNA, 19 nt, Artificial Sequence
  Description of Artificial Sequence: Synthetic oligonucleotide
  Antisense strand to SEQ ID NO: 1248076
ugucuucucugagacacac

SEQ ID NO: 1248078 - RNA, 19 nt, Artificial Sequence
  Description of Artificial Sequence: Synthetic oligonucleotide
  Sense strand starting at position 3922 of SEQ ID NO: 1241116
augagauaaucugaaagaa

SEQ ID NO: 1248079 - RNA, 19 nt, Artificial Sequence
  Description of Artificial Sequence: Synthetic oligonucleotide
  Antisense strand to SEQ ID NO: 1248078
uucuuucagauuaucucau

SEQ ID NO: 1248080 - RNA, 19 nt, Artificial Sequence
  Description of Artificial Sequence: Synthetic oligonucleotide
  Sense strand starting at position 985 of SEQ ID NO: 1241117
gcaugcugugcgcuaguga

SEQ ID NO: 1248081 - RNA, 19 nt, Artificial Sequence
  Description of Artificial Sequence: Synthetic oligonucleotide
  Antisense strand to SEQ ID NO: 1248080
ucacuagcgcacagcaugc

SEQ ID NO: 1248082 - RNA, 19 nt, Artificial Sequence
  Description of Artificial Sequence: Synthetic oligonucleotide
  Sense strand starting at position 1066 of SEQ ID NO: 1241117
cccuaaagugagugaguga

SEQ ID NO: 1248083 - RNA, 19 nt, Artificial Sequence
  Description of Artificial Sequence: Synthetic oligonucleotide
  Antisense strand to SEQ ID NO: 1248082
ucacucacucacuuuaggg

SEQ ID NO: 1248084 - RNA, 19 nt, Artificial Sequence
  Description of Artificial Sequence: Synthetic oligonucleotide
  Sense strand starting at position 2117 of SEQ ID NO: 1241117
uugggacugaccugugaag

SEQ ID NO: 1248085 - RNA, 19 nt, Artificial Sequence
  Description of Artificial Sequence: Synthetic oligonucleotide
  Antisense strand to SEQ ID NO: 1248084
cuucacaggucagucccaa

SEQ ID NO: 1248086 - RNA, 19 nt, Artificial Sequence
  Description of Artificial Sequence: Synthetic oligonucleotide
  Sense strand starting at position 2119 of SEQ ID NO: 1241117
gggacugaccugugaaguu

SEQ ID NO: 1248087 - RNA, 19 nt, Artificial Sequence
  Description of Artificial Sequence: Synthetic oligonucleotide
  Antisense strand to SEQ ID NO: 1248086
aacuucacaggucaguccc

SEQ ID NO: 1248088 - RNA, 19 nt, Artificial Sequence
  Description of Artificial Sequence: Synthetic oligonucleotide
  Sense strand starting at position 2160 of SEQ ID NO: 1241117
aguacuuucucaccugaga

SEQ ID NO: 1248089 - RNA, 19 nt, Artificial Sequence
  Description of Artificial Sequence: Synthetic oligonucleotide
  Antisense strand to SEQ ID NO: 1248088
ucucaggugagaaaguacu

SEQ ID NO: 1248090 - RNA, 19 nt, Artificial Sequence
  Description of Artificial Sequence: Synthetic oligonucleotide
  Sense strand starting at position 2364 of SEQ ID NO: 1241117
uuaauauucccuugaagug

SEQ ID NO: 1248091 - RNA, 19 nt, Artificial Sequence
  Description of Artificial Sequence: Synthetic oligonucleotide
  Antisense strand to SEQ ID NO: 1248090
cacuucaagggaauauuaa

SEQ ID NO: 1248092 - RNA, 19 nt, Artificial Sequence
  Description of Artificial Sequence: Synthetic oligonucleotide
  Sense strand starting at position 2374 of SEQ ID NO: 1241117
cuugaagugaaacguaguu

SEQ ID NO: 1248093 - RNA, 19 nt, Artificial Sequence
  Description of Artificial Sequence: Synthetic oligonucleotide
  Antisense strand to SEQ ID NO: 1248092
aacuacguuucacuucaag

SEQ ID NO: 1248094 - RNA, 19 nt, Artificial Sequence
  Description of Artificial Sequence: Synthetic oligonucleotide
  Sense strand starting at position 2376 of SEQ ID NO: 1241117
ugaagugaaacguaguuau

SEQ ID NO: 1248095 - RNA, 19 nt, Artificial Sequence
  Description of Artificial Sequence: Synthetic oligonucleotide
  Antisense strand to SEQ ID NO: 1248094
auaacuacguuucacuuca

SEQ ID NO: 1248096 - RNA, 19 nt, Artificial Sequence
  Description of Artificial Sequence: Synthetic oligonucleotide
  Sense strand starting at position 2379 of SEQ ID NO: 1241117
agugaaacguaguuauauc

SEQ ID NO: 1248097 - RNA, 19 nt, Artificial Sequence
  Description of Artificial Sequence: Synthetic oligonucleotide
  Antisense strand to SEQ ID NO: 1248096
gauauaacuacguuucacu

SEQ ID NO: 1248098 - RNA, 19 nt, Artificial Sequence
  Description of Artificial Sequence: Synthetic oligonucleotide
  Sense strand starting at position 2380 of SEQ ID NO: 1241117
gugaaacguaguuauauca

SEQ ID NO: 1248099 - RNA, 19 nt, Artificial Sequence
  Description of Artificial Sequence: Synthetic oligonucleotide
  Antisense strand to SEQ ID NO: 1248098
ugauauaacuacguuucac

SEQ ID NO: 1248100 - RNA, 19 nt, Artificial Sequence
  Description of Artificial Sequence: Synthetic oligonucleotide
  Sense strand starting at position 2460 of SEQ ID NO: 1241117
uugacucgauccucauaau

SEQ ID NO: 1248101 - RNA, 19 nt, Artificial Sequence
  Description of Artificial Sequence: Synthetic oligonucleotide
  Antisense strand to SEQ ID NO: 1248100
auuaugaggaucgagucaa

SEQ ID NO: 1248102 - RNA, 19 nt, Artificial Sequence
  Description of Artificial Sequence: Synthetic oligonucleotide
  Sense strand starting at position 2526 of SEQ ID NO: 1241117
gcucauguccuggaucuca

SEQ ID NO: 1248103 - RNA, 19 nt, Artificial Sequence
  Description of Artificial Sequence: Synthetic oligonucleotide
  Antisense strand to SEQ ID NO: 1248102
ugagauccaggacaugagc

SEQ ID NO: 1248104 - RNA, 19 nt, Artificial Sequence
  Description of Artificial Sequence: Synthetic oligonucleotide
  Sense strand starting at position 2573 of SEQ ID NO: 1241117
uuuaacuuucuuggguauu

SEQ ID NO: 1248105 - RNA, 19 nt, Artificial Sequence
  Description of Artificial Sequence: Synthetic oligonucleotide
  Antisense strand to SEQ ID NO: 1248104
aauacccaagaaaguuaaa

SEQ ID NO: 1248106 - RNA, 19 nt, Artificial Sequence
  Description of Artificial Sequence: Synthetic oligonucleotide
  Sense strand starting at position 2583 of SEQ ID NO: 1241117
uuggguauuuguguuuauu

SEQ ID NO: 1248107 - RNA, 19 nt, Artificial Sequence
  Description of Artificial Sequence: Synthetic oligonucleotide
  Antisense strand to SEQ ID NO: 1248106
aauaaacacaaauacccaa

SEQ ID NO: 1248108 - RNA, 19 nt, Artificial Sequence
  Description of Artificial Sequence: Synthetic oligonucleotide
  Sense strand starting at position 2607 of SEQ ID NO: 1241117
auaccuuuccagggcaaau

SEQ ID NO: 1248109 - RNA, 19 nt, Artificial Sequence
  Description of Artificial Sequence: Synthetic oligonucleotide
  Antisense strand to SEQ ID NO: 1248108
auuugcccuggaaagguau

SEQ ID NO: 1248110 - RNA, 19 nt, Artificial Sequence
  Description of Artificial Sequence: Synthetic oligonucleotide
  Sense strand starting at position 2623 of SEQ ID NO: 1241117
aauuuaggcuuagaaggaa

SEQ ID NO: 1248111 - RNA, 19 nt, Artificial Sequence
  Description of Artificial Sequence: Synthetic oligonucleotide
  Antisense strand to SEQ ID NO: 1248110
uuccuucuaagccuaaauu

SEQ ID NO: 1248112 - RNA, 19 nt, Artificial Sequence
  Description of Artificial Sequence: Synthetic oligonucleotide
  Sense strand starting at position 2676 of SEQ ID NO: 1241117
ucagacuguuguguauuua

SEQ ID NO: 1248113 - RNA, 19 nt, Artificial Sequence
  Description of Artificial Sequence: Synthetic oligonucleotide
  Antisense strand to SEQ ID NO: 1248112
uaaauacacaacagucuga

SEQ ID NO: 1248114 - RNA, 19 nt, Artificial Sequence
  Description of Artificial Sequence: Synthetic oligonucleotide
  Sense strand starting at position 2724 of SEQ ID NO: 1241117
gucauaugccuauggugaa

SEQ ID NO: 1248115 - RNA, 19 nt, Artificial Sequence
  Description of Artificial Sequence: Synthetic oligonucleotide
  Antisense strand to SEQ ID NO: 1248114
uucaccauaggcauaugac

SEQ ID NO: 1248116 - RNA, 19 nt, Artificial Sequence
  Description of Artificial Sequence: Synthetic oligonucleotide
  Sense strand starting at position 2734 of SEQ ID NO: 1241117
uauggugaaucguuaggca

SEQ ID NO: 1248117 - RNA, 19 nt, Artificial Sequence
  Description of Artificial Sequence: Synthetic oligonucleotide
  Antisense strand to SEQ ID NO: 1248116
ugccuaacgauucaccaua

SEQ ID NO: 1248118 - RNA, 19 nt, Artificial Sequence
  Description of Artificial Sequence: Synthetic oligonucleotide
  Sense strand starting at position 2738 of SEQ ID NO: 1241117
gugaaucguuaggcaaaug

SEQ ID NO: 1248119 - RNA, 19 nt, Artificial Sequence
  Description of Artificial Sequence: Synthetic oligonucleotide
  Antisense strand to SEQ ID NO: 1248118
cauuugccuaacgauucac

SEQ ID NO: 1248120 - RNA, 19 nt, Artificial Sequence
  Description of Artificial Sequence: Synthetic oligonucleotide
  Sense strand starting at position 2739 of SEQ ID NO: 1241117
ugaaucguuaggcaaaugu

SEQ ID NO: 1248121 - RNA, 19 nt, Artificial Sequence
  Description of Artificial Sequence: Synthetic oligonucleotide
  Antisense strand to SEQ ID NO: 1248120
acauuugccuaacgauuca

SEQ ID NO: 1248122 - RNA, 19 nt, Artificial Sequence
  Description of Artificial Sequence: Synthetic oligonucleotide
  Sense strand starting at position 2787 of SEQ ID NO: 1241117
uagaaaggguguccucaaa

SEQ ID NO: 1248123 - RNA, 19 nt, Artificial Sequence
  Description of Artificial Sequence: Synthetic oligonucleotide
  Antisense strand to SEQ ID NO: 1248122
uuugaggacacccuuucua

SEQ ID NO: 1248124 - RNA, 19 nt, Artificial Sequence
  Description of Artificial Sequence: Synthetic oligonucleotide
  Sense strand starting at position 2805 of SEQ ID NO: 1241117
auaugcaucucuuuaguuu

SEQ ID NO: 1248125 - RNA, 19 nt, Artificial Sequence
  Description of Artificial Sequence: Synthetic oligonucleotide
  Antisense strand to SEQ ID NO: 1248124
aaacuaaagagaugcauau

SEQ ID NO: 1248126 - RNA, 19 nt, Artificial Sequence
  Description of Artificial Sequence: Synthetic oligonucleotide
  Sense strand starting at position 2813 of SEQ ID NO: 1241117
cucuuuaguuugguucuga

SEQ ID NO: 1248127 - RNA, 19 nt, Artificial Sequence
  Description of Artificial Sequence: Synthetic oligonucleotide
  Antisense strand to SEQ ID NO: 1248126
ucagaaccaaacuaaagag

SEQ ID NO: 1248128 - RNA, 19 nt, Artificial Sequence
  Description of Artificial Sequence: Synthetic oligonucleotide
  Sense strand starting at position 2814 of SEQ ID NO: 1241117
ucuuuaguuugguucugaa

SEQ ID NO: 1248129 - RNA, 19 nt, Artificial Sequence
  Description of Artificial Sequence: Synthetic oligonucleotide
  Antisense strand to SEQ ID NO: 1248128
uucagaaccaaacuaaaga

SEQ ID NO: 1248130 - RNA, 19 nt, Artificial Sequence
  Description of Artificial Sequence: Synthetic oligonucleotide
  Sense strand starting at position 2854 of SEQ ID NO: 1241117
ccacaaagugggugaaguu

SEQ ID NO: 1248131 - RNA, 19 nt, Artificial Sequence
  Description of Artificial Sequence: Synthetic oligonucleotide
  Antisense strand to SEQ ID NO: 1248130
aacuucacccacuuugugg

SEQ ID NO: 1248132 - RNA, 19 nt, Artificial Sequence
  Description of Artificial Sequence: Synthetic oligonucleotide
  Sense strand starting at position 3042 of SEQ ID NO: 1241117
uguacagucugcuuuaaca

SEQ ID NO: 1248133 - RNA, 19 nt, Artificial Sequence
  Description of Artificial Sequence: Synthetic oligonucleotide
  Antisense strand to SEQ ID NO: 1248132
uguuaaagcagacuguaca

SEQ ID NO: 1248134 - RNA, 19 nt, Artificial Sequence
  Description of Artificial Sequence: Synthetic oligonucleotide
  Sense strand starting at position 3074 of SEQ ID NO: 1241117
uagaauucuguugguauac

SEQ ID NO: 1248135 - RNA, 19 nt, Artificial Sequence
  Description of Artificial Sequence: Synthetic oligonucleotide
  Antisense strand to SEQ ID NO: 1248134
guauaccaacagaauucua

SEQ ID NO: 1248136 - RNA, 19 nt, Artificial Sequence
  Description of Artificial Sequence: Synthetic oligonucleotide
  Sense strand starting at position 3075 of SEQ ID NO: 1241117
agaauucuguugguauaca

SEQ ID NO: 1248137 - RNA, 19 nt, Artificial Sequence
  Description of Artificial Sequence: Synthetic oligonucleotide
  Antisense strand to SEQ ID NO: 1248136
uguauaccaacagaauucu

SEQ ID NO: 1248138 - RNA, 19 nt, Artificial Sequence
  Description of Artificial Sequence: Synthetic oligonucleotide
  Sense strand starting at position 3127 of SEQ ID NO: 1241117
gugugaguaaaguaaguaa

SEQ ID NO: 1248139 - RNA, 19 nt, Artificial Sequence
  Description of Artificial Sequence: Synthetic oligonucleotide
  Antisense strand to SEQ ID NO: 1248138
uuacuuacuuuacucacac

SEQ ID NO: 1248140 - RNA, 19 nt, Artificial Sequence
  Description of Artificial Sequence: Synthetic oligonucleotide
  Sense strand starting at position 3185 of SEQ ID NO: 1241117
ggccuaagcucacuaaaua

SEQ ID NO: 1248141 - RNA, 19 nt, Artificial Sequence
  Description of Artificial Sequence: Synthetic oligonucleotide
  Antisense strand to SEQ ID NO: 1248140
uauuuagugagcuuaggcc

SEQ ID NO: 1248142 - RNA, 19 nt, Artificial Sequence
  Description of Artificial Sequence: Synthetic oligonucleotide
  Sense strand starting at position 3219 of SEQ ID NO: 1241117
cugcuaugguuucuuagac

SEQ ID NO: 1248143 - RNA, 19 nt, Artificial Sequence
  Description of Artificial Sequence: Synthetic oligonucleotide
  Antisense strand to SEQ ID NO: 1248142
gucuaagaaaccauagcag

SEQ ID NO: 1248144 - RNA, 19 nt, Artificial Sequence
  Description of Artificial Sequence: Synthetic oligonucleotide
  Sense strand starting at position 3484 of SEQ ID NO: 1241117
ucaauucuauugguacagu

SEQ ID NO: 1248145 - RNA, 19 nt, Artificial Sequence
  Description of Artificial Sequence: Synthetic oligonucleotide
  Antisense strand to SEQ ID NO: 1248144
acuguaccaauagaauuga

SEQ ID NO: 1248146 - RNA, 19 nt, Artificial Sequence
  Description of Artificial Sequence: Synthetic oligonucleotide
  Sense strand starting at position 3546 of SEQ ID NO: 1241117
gaagaaguccuacaguguu

SEQ ID NO: 1248147 - RNA, 19 nt, Artificial Sequence
  Description of Artificial Sequence: Synthetic oligonucleotide
  Antisense strand to SEQ ID NO: 1248146
aacacuguaggacuucuuc

SEQ ID NO: 1248148 - RNA, 19 nt, Artificial Sequence
  Description of Artificial Sequence: Synthetic oligonucleotide
  Sense strand starting at position 3552 of SEQ ID NO: 1241117
guccuacaguguuucuaga

SEQ ID NO: 1248149 - RNA, 19 nt, Artificial Sequence
  Description of Artificial Sequence: Synthetic oligonucleotide
  Antisense strand to SEQ ID NO: 1248148
ucuagaaacacuguaggac

SEQ ID NO: 1248150 - RNA, 19 nt, Artificial Sequence
  Description of Artificial Sequence: Synthetic oligonucleotide
  Sense strand starting at position 3554 of SEQ ID NO: 1241117
ccuacaguguuucuagacu

SEQ ID NO: 1248151 - RNA, 19 nt, Artificial Sequence
  Description of Artificial Sequence: Synthetic oligonucleotide
  Antisense strand to SEQ ID NO: 1248150
agucuagaaacacuguagg

SEQ ID NO: 1248152 - RNA, 19 nt, Artificial Sequence
  Description of Artificial Sequence: Synthetic oligonucleotide
  Sense strand starting at position 3721 of SEQ ID NO: 1241117
gcuugugagaugcguauuu

SEQ ID NO: 1248153 - RNA, 19 nt, Artificial Sequence
  Description of Artificial Sequence: Synthetic oligonucleotide
  Antisense strand to SEQ ID NO: 1248152
aaauacgcaucucacaagc

SEQ ID NO: 1248154 - RNA, 19 nt, Artificial Sequence
  Description of Artificial Sequence: Synthetic oligonucleotide
  Sense strand starting at position 3743 of SEQ ID NO: 1241117
aauguauguguugaauaca

SEQ ID NO: 1248155 - RNA, 19 nt, Artificial Sequence
  Description of Artificial Sequence: Synthetic oligonucleotide
  Antisense strand to SEQ ID NO: 1248154
uguauucaacacauacauu

SEQ ID NO: 1248156 - RNA, 19 nt, Artificial Sequence
  Description of Artificial Sequence: Synthetic oligonucleotide
  Sense strand starting at position 3774 of SEQ ID NO: 1241117
gguguagugaagcaucagu

SEQ ID NO: 1248157 - RNA, 19 nt, Artificial Sequence
  Description of Artificial Sequence: Synthetic oligonucleotide
  Antisense strand to SEQ ID NO: 1248156
acugaugcuucacuacacc

SEQ ID NO: 1248158 - RNA, 19 nt, Artificial Sequence
  Description of Artificial Sequence: Synthetic oligonucleotide
  Sense strand starting at position 3779 of SEQ ID NO: 1241117
agugaagcaucaguggauu

SEQ ID NO: 1248159 - RNA, 19 nt, Artificial Sequence
  Description of Artificial Sequence: Synthetic oligonucleotide
  Antisense strand to SEQ ID NO: 1248158
aauccacugaugcuucacu

SEQ ID NO: 1248160 - RNA, 19 nt, Artificial Sequence
  Description of Artificial Sequence: Synthetic oligonucleotide
  Sense strand starting at position 13 of SEQ ID NO: 1241118
cacaaaugucucugugugu

SEQ ID NO: 1248161 - RNA, 19 nt, Artificial Sequence
  Description of Artificial Sequence: Synthetic oligonucleotide
  Antisense strand to SEQ ID NO: 1248160
acacacagagacauuugug

SEQ ID NO: 1248162 - RNA, 19 nt, Artificial Sequence
  Description of Artificial Sequence: Synthetic oligonucleotide
  Sense strand starting at position 53 of SEQ ID NO: 1241118
uguguaugucuuugaggca

SEQ ID NO: 1248163 - RNA, 19 nt, Artificial Sequence
  Description of Artificial Sequence: Synthetic oligonucleotide
  Antisense strand to SEQ ID NO: 1248162
ugccucaaagacauacaca

SEQ ID NO: 1248164 - RNA, 19 nt, Artificial Sequence
  Description of Artificial Sequence: Synthetic oligonucleotide
  Sense strand starting at position 58 of SEQ ID NO: 1241118
augucuuugaggcagcaua

SEQ ID NO: 1248165 - RNA, 19 nt, Artificial Sequence
  Description of Artificial Sequence: Synthetic oligonucleotide
  Antisense strand to SEQ ID NO: 1248164
uaugcugccucaaagacau

SEQ ID NO: 1248166 - RNA, 19 nt, Artificial Sequence
  Description of Artificial Sequence: Synthetic oligonucleotide
  Sense strand starting at position 141 of SEQ ID NO: 1241118
guauguugguaacucuaag

SEQ ID NO: 1248167 - RNA, 19 nt, Artificial Sequence
  Description of Artificial Sequence: Synthetic oligonucleotide
  Antisense strand to SEQ ID NO: 1248166
cuuagaguuaccaacauac

SEQ ID NO: 1248168 - RNA, 19 nt, Artificial Sequence
  Description of Artificial Sequence: Synthetic oligonucleotide
  Sense strand starting at position 147 of SEQ ID NO: 1241118
ugguaacucuaagauaaau

SEQ ID NO: 1248169 - RNA, 19 nt, Artificial Sequence
  Description of Artificial Sequence: Synthetic oligonucleotide
  Antisense strand to SEQ ID NO: 1248168
auuuaucuuagaguuacca

SEQ ID NO: 1248170 - RNA, 19 nt, Artificial Sequence
  Description of Artificial Sequence: Synthetic oligonucleotide
  Sense strand starting at position 334 of SEQ ID NO: 1241118
cagcuaucaggaggcuaaa

SEQ ID NO: 1248171 - RNA, 19 nt, Artificial Sequence
  Description of Artificial Sequence: Synthetic oligonucleotide
  Antisense strand to SEQ ID NO: 1248170
uuuagccuccugauagcug

SEQ ID NO: 1248172 - RNA, 19 nt, Artificial Sequence
  Description of Artificial Sequence: Synthetic oligonucleotide
  Sense strand starting at position 487 of SEQ ID NO: 1241118
gguccuuaacauuauagua

SEQ ID NO: 1248173 - RNA, 19 nt, Artificial Sequence
  Description of Artificial Sequence: Synthetic oligonucleotide
  Antisense strand to SEQ ID NO: 1248172
uacuauaauguuaaggacc

SEQ ID NO: 1248174 - RNA, 19 nt, Artificial Sequence
  Description of Artificial Sequence: Synthetic oligonucleotide
  Sense strand starting at position 549 of SEQ ID NO: 1241118
gcaugaguaacagguccaa

SEQ ID NO: 1248175 - RNA, 19 nt, Artificial Sequence
  Description of Artificial Sequence: Synthetic oligonucleotide
  Antisense strand to SEQ ID NO: 1248174
uuggaccuguuacucaugc

SEQ ID NO: 1248176 - RNA, 19 nt, Artificial Sequence
  Description of Artificial Sequence: Synthetic oligonucleotide
  Sense strand starting at position 561 of SEQ ID NO: 1241118
gguccaaucugcuuuccau

SEQ ID NO: 1248177 - RNA, 19 nt, Artificial Sequence
  Description of Artificial Sequence: Synthetic oligonucleotide
  Antisense strand to SEQ ID NO: 1248176
auggaaagcagauuggacc

SEQ ID NO: 1248178 - RNA, 19 nt, Artificial Sequence
  Description of Artificial Sequence: Synthetic oligonucleotide
  Sense strand starting at position 584 of SEQ ID NO: 1241118
cuguaauaacaguaaagca

SEQ ID NO: 1248179 - RNA, 19 nt, Artificial Sequence
  Description of Artificial Sequence: Synthetic oligonucleotide
  Antisense strand to SEQ ID NO: 1248178
ugcuuuacuguuauuacag

SEQ ID NO: 1248180 - RNA, 19 nt, Artificial Sequence
  Description of Artificial Sequence: Synthetic oligonucleotide
  Sense strand starting at position 665 of SEQ ID NO: 1241118
gugcauacuccauaguaca

SEQ ID NO: 1248181 - RNA, 19 nt, Artificial Sequence
  Description of Artificial Sequence: Synthetic oligonucleotide
  Antisense strand to SEQ ID NO: 1248180
uguacuauggaguaugcac

SEQ ID NO: 1248182 - RNA, 19 nt, Artificial Sequence
  Description of Artificial Sequence: Synthetic oligonucleotide
  Sense strand starting at position 747 of SEQ ID NO: 1241118
uuuccugcaucgcuauuaa

SEQ ID NO: 1248183 - RNA, 19 nt, Artificial Sequence
  Description of Artificial Sequence: Synthetic oligonucleotide
  Antisense strand to SEQ ID NO: 1248182
uuaauagcgaugcaggaaa

SEQ ID NO: 1248184 - RNA, 19 nt, Artificial Sequence
  Description of Artificial Sequence: Synthetic oligonucleotide
  Sense strand starting at position 858 of SEQ ID NO: 1241118
acacuagugcauuaggaua

SEQ ID NO: 1248185 - RNA, 19 nt, Artificial Sequence
  Description of Artificial Sequence: Synthetic oligonucleotide
  Antisense strand to SEQ ID NO: 1248184
uauccuaaugcacuagugu

SEQ ID NO: 1248186 - RNA, 19 nt, Artificial Sequence
  Description of Artificial Sequence: Synthetic oligonucleotide
  Sense strand starting at position 924 of SEQ ID NO: 1241118
auauuagccuugucucuua

SEQ ID NO: 1248187 - RNA, 19 nt, Artificial Sequence
  Description of Artificial Sequence: Synthetic oligonucleotide
  Antisense strand to SEQ ID NO: 1248186
uaagagacaaggcuaauau

SEQ ID NO: 1248188 - RNA, 19 nt, Artificial Sequence
  Description of Artificial Sequence: Synthetic oligonucleotide
  Sense strand starting at position 2158 of SEQ ID NO: 1241118
gcaugcugugcgcuaguga

SEQ ID NO: 1248189 - RNA, 19 nt, Artificial Sequence
  Description of Artificial Sequence: Synthetic oligonucleotide
  Antisense strand to SEQ ID NO: 1248188
ucacuagcgcacagcaugc

SEQ ID NO: 1248190 - RNA, 19 nt, Artificial Sequence
  Description of Artificial Sequence: Synthetic oligonucleotide
  Sense strand starting at position 2239 of SEQ ID NO: 1241118
cccuaaagugagugaguga

SEQ ID NO: 1248191 - RNA, 19 nt, Artificial Sequence
  Description of Artificial Sequence: Synthetic oligonucleotide
  Antisense strand to SEQ ID NO: 1248190
ucacucacucacuuuaggg

SEQ ID NO: 1248192 - RNA, 19 nt, Artificial Sequence
  Description of Artificial Sequence: Synthetic oligonucleotide
  Sense strand starting at position 3290 of SEQ ID NO: 1241118
uugggacugaccugugaag

SEQ ID NO: 1248193 - RNA, 19 nt, Artificial Sequence
  Description of Artificial Sequence: Synthetic oligonucleotide
  Antisense strand to SEQ ID NO: 1248192
cuucacaggucagucccaa

SEQ ID NO: 1248194 - RNA, 19 nt, Artificial Sequence
  Description of Artificial Sequence: Synthetic oligonucleotide
  Sense strand starting at position 3292 of SEQ ID NO: 1241118
gggacugaccugugaaguu

SEQ ID NO: 1248195 - RNA, 19 nt, Artificial Sequence
  Description of Artificial Sequence: Synthetic oligonucleotide
  Antisense strand to SEQ ID NO: 1248194
aacuucacaggucaguccc

SEQ ID NO: 1248196 - RNA, 19 nt, Artificial Sequence
  Description of Artificial Sequence: Synthetic oligonucleotide
  Sense strand starting at position 3333 of SEQ ID NO: 1241118
aguacuuucucaccugaga

SEQ ID NO: 1248197 - RNA, 19 nt, Artificial Sequence
  Description of Artificial Sequence: Synthetic oligonucleotide
  Antisense strand to SEQ ID NO: 1248196
ucucaggugagaaaguacu

SEQ ID NO: 1248198 - RNA, 19 nt, Artificial Sequence
  Description of Artificial Sequence: Synthetic oligonucleotide
  Sense strand starting at position 3537 of SEQ ID NO: 1241118
uuaauauucccuugaagug

SEQ ID NO: 1248199 - RNA, 19 nt, Artificial Sequence
  Description of Artificial Sequence: Synthetic oligonucleotide
  Antisense strand to SEQ ID NO: 1248198
cacuucaagggaauauuaa

SEQ ID NO: 1248200 - RNA, 19 nt, Artificial Sequence
  Description of Artificial Sequence: Synthetic oligonucleotide
  Sense strand starting at position 3547 of SEQ ID NO: 1241118
cuugaagugaaacguaguu

SEQ ID NO: 1248201 - RNA, 19 nt, Artificial Sequence
  Description of Artificial Sequence: Synthetic oligonucleotide
  Antisense strand to SEQ ID NO: 1248200
aacuacguuucacuucaag

SEQ ID NO: 1248202 - RNA, 19 nt, Artificial Sequence
  Description of Artificial Sequence: Synthetic oligonucleotide
  Sense strand starting at position 3549 of SEQ ID NO: 1241118
ugaagugaaacguaguuau

SEQ ID NO: 1248203 - RNA, 19 nt, Artificial Sequence
  Description of Artificial Sequence: Synthetic oligonucleotide
  Antisense strand to SEQ ID NO: 1248202
auaacuacguuucacuuca

SEQ ID NO: 1248204 - RNA, 19 nt, Artificial Sequence
  Description of Artificial Sequence: Synthetic oligonucleotide
  Sense strand starting at position 3552 of SEQ ID NO: 1241118
agugaaacguaguuauauc

SEQ ID NO: 1248205 - RNA, 19 nt, Artificial Sequence
  Description of Artificial Sequence: Synthetic oligonucleotide
  Antisense strand to SEQ ID NO: 1248204
gauauaacuacguuucacu

SEQ ID NO: 1248206 - RNA, 19 nt, Artificial Sequence
  Description of Artificial Sequence: Synthetic oligonucleotide
  Sense strand starting at position 3553 of SEQ ID NO: 1241118
gugaaacguaguuauauca

SEQ ID NO: 1248207 - RNA, 19 nt, Artificial Sequence
  Description of Artificial Sequence: Synthetic oligonucleotide
  Antisense strand to SEQ ID NO: 1248206
ugauauaacuacguuucac

SEQ ID NO: 1248208 - RNA, 19 nt, Artificial Sequence
  Description of Artificial Sequence: Synthetic oligonucleotide
  Sense strand starting at position 3633 of SEQ ID NO: 1241118
uugacucgauccucauaau

SEQ ID NO: 1248209 - RNA, 19 nt, Artificial Sequence
  Description of Artificial Sequence: Synthetic oligonucleotide
  Antisense strand to SEQ ID NO: 1248208
auuaugaggaucgagucaa

SEQ ID NO: 1248210 - RNA, 19 nt, Artificial Sequence
  Description of Artificial Sequence: Synthetic oligonucleotide
  Sense strand starting at position 3699 of SEQ ID NO: 1241118
gcucauguccuggaucuca

SEQ ID NO: 1248211 - RNA, 19 nt, Artificial Sequence
  Description of Artificial Sequence: Synthetic oligonucleotide
  Antisense strand to SEQ ID NO: 1248210
ugagauccaggacaugagc

SEQ ID NO: 1248212 - RNA, 19 nt, Artificial Sequence
  Description of Artificial Sequence: Synthetic oligonucleotide
  Sense strand starting at position 3745 of SEQ ID NO: 1241118
auuuaacuuucuuggguau

SEQ ID NO: 1248213 - RNA, 19 nt, Artificial Sequence
  Description of Artificial Sequence: Synthetic oligonucleotide
  Antisense strand to SEQ ID NO: 1248212
auacccaagaaaguuaaau

SEQ ID NO: 1248214 - RNA, 19 nt, Artificial Sequence
  Description of Artificial Sequence: Synthetic oligonucleotide
  Sense strand starting at position 3746 of SEQ ID NO: 1241118
uuuaacuuucuuggguauu

SEQ ID NO: 1248215 - RNA, 19 nt, Artificial Sequence
  Description of Artificial Sequence: Synthetic oligonucleotide
  Antisense strand to SEQ ID NO: 1248214
aauacccaagaaaguuaaa

SEQ ID NO: 1248216 - RNA, 19 nt, Artificial Sequence
  Description of Artificial Sequence: Synthetic oligonucleotide
  Sense strand starting at position 3756 of SEQ ID NO: 1241118
uuggguauuuguguuuauu

SEQ ID NO: 1248217 - RNA, 19 nt, Artificial Sequence
  Description of Artificial Sequence: Synthetic oligonucleotide
  Antisense strand to SEQ ID NO: 1248216
aauaaacacaaauacccaa

SEQ ID NO: 1248218 - RNA, 19 nt, Artificial Sequence
  Description of Artificial Sequence: Synthetic oligonucleotide
  Sense strand starting at position 3780 of SEQ ID NO: 1241118
auaccuuuccagggcaaau

SEQ ID NO: 1248219 - RNA, 19 nt, Artificial Sequence
  Description of Artificial Sequence: Synthetic oligonucleotide
  Antisense strand to SEQ ID NO: 1248218
auuugcccuggaaagguau

SEQ ID NO: 1248220 - RNA, 19 nt, Artificial Sequence
  Description of Artificial Sequence: Synthetic oligonucleotide
  Sense strand starting at position 3796 of SEQ ID NO: 1241118
aauuuaggcuuagaaggaa

SEQ ID NO: 1248221 - RNA, 19 nt, Artificial Sequence
  Description of Artificial Sequence: Synthetic oligonucleotide
  Antisense strand to SEQ ID NO: 1248220
uuccuucuaagccuaaauu

SEQ ID NO: 1248222 - RNA, 19 nt, Artificial Sequence
  Description of Artificial Sequence: Synthetic oligonucleotide
  Sense strand starting at position 3849 of SEQ ID NO: 1241118
ucagacuguuguguauuua

SEQ ID NO: 1248223 - RNA, 19 nt, Artificial Sequence
  Description of Artificial Sequence: Synthetic oligonucleotide
  Antisense strand to SEQ ID NO: 1248222
uaaauacacaacagucuga

SEQ ID NO: 1248224 - RNA, 19 nt, Artificial Sequence
  Description of Artificial Sequence: Synthetic oligonucleotide
  Sense strand starting at position 3878 of SEQ ID NO: 1241118
aguauuugcugucauauau

SEQ ID NO: 1248225 - RNA, 19 nt, Artificial Sequence
  Description of Artificial Sequence: Synthetic oligonucleotide
  Antisense strand to SEQ ID NO: 1248224
auauaugacagcaaauacu

SEQ ID NO: 1248226 - RNA, 19 nt, Artificial Sequence
  Description of Artificial Sequence: Synthetic oligonucleotide
  Sense strand starting at position 3885 of SEQ ID NO: 1241118
gcugucauauaugucauau

SEQ ID NO: 1248227 - RNA, 19 nt, Artificial Sequence
  Description of Artificial Sequence: Synthetic oligonucleotide
  Antisense strand to SEQ ID NO: 1248226
auaugacauauaugacagc

SEQ ID NO: 1248228 - RNA, 19 nt, Artificial Sequence
  Description of Artificial Sequence: Synthetic oligonucleotide
  Sense strand starting at position 3897 of SEQ ID NO: 1241118
gucauaugccuauggugaa

SEQ ID NO: 1248229 - RNA, 19 nt, Artificial Sequence
  Description of Artificial Sequence: Synthetic oligonucleotide
  Antisense strand to SEQ ID NO: 1248228
uucaccauaggcauaugac

SEQ ID NO: 1248230 - RNA, 19 nt, Artificial Sequence
  Description of Artificial Sequence: Synthetic oligonucleotide
  Sense strand starting at position 3907 of SEQ ID NO: 1241118
uauggugaaucguuaggca

SEQ ID NO: 1248231 - RNA, 19 nt, Artificial Sequence
  Description of Artificial Sequence: Synthetic oligonucleotide
  Antisense strand to SEQ ID NO: 1248230
ugccuaacgauucaccaua

SEQ ID NO: 1248232 - RNA, 19 nt, Artificial Sequence
  Description of Artificial Sequence: Synthetic oligonucleotide
  Sense strand starting at position 3911 of SEQ ID NO: 1241118
gugaaucguuaggcaaaug

SEQ ID NO: 1248233 - RNA, 19 nt, Artificial Sequence
  Description of Artificial Sequence: Synthetic oligonucleotide
  Antisense strand to SEQ ID NO: 1248232
cauuugccuaacgauucac

SEQ ID NO: 1248234 - RNA, 19 nt, Artificial Sequence
  Description of Artificial Sequence: Synthetic oligonucleotide
  Sense strand starting at position 3912 of SEQ ID NO: 1241118
ugaaucguuaggcaaaugu

SEQ ID NO: 1248235 - RNA, 19 nt, Artificial Sequence
  Description of Artificial Sequence: Synthetic oligonucleotide
  Antisense strand to SEQ ID NO: 1248234
acauuugccuaacgauuca

SEQ ID NO: 1248236 - RNA, 19 nt, Artificial Sequence
  Description of Artificial Sequence: Synthetic oligonucleotide
  Sense strand starting at position 3960 of SEQ ID NO: 1241118
uagaaaggguguccucaaa

SEQ ID NO: 1248237 - RNA, 19 nt, Artificial Sequence
  Description of Artificial Sequence: Synthetic oligonucleotide
  Antisense strand to SEQ ID NO: 1248236
uuugaggacacccuuucua

SEQ ID NO: 1248238 - RNA, 19 nt, Artificial Sequence
  Description of Artificial Sequence: Synthetic oligonucleotide
  Sense strand starting at position 3978 of SEQ ID NO: 1241118
auaugcaucucuuuaguuu

SEQ ID NO: 1248239 - RNA, 19 nt, Artificial Sequence
  Description of Artificial Sequence: Synthetic oligonucleotide
  Antisense strand to SEQ ID NO: 1248238
aaacuaaagagaugcauau

SEQ ID NO: 1248240 - RNA, 19 nt, Artificial Sequence
  Description of Artificial Sequence: Synthetic oligonucleotide
  Sense strand starting at position 621 of SEQ ID NO: 1241119
gcaugcugugcgcuaguga

SEQ ID NO: 1248241 - RNA, 19 nt, Artificial Sequence
  Description of Artificial Sequence: Synthetic oligonucleotide
  Antisense strand to SEQ ID NO: 1248240
ucacuagcgcacagcaugc

SEQ ID NO: 1248242 - RNA, 19 nt, Artificial Sequence
  Description of Artificial Sequence: Synthetic oligonucleotide
  Sense strand starting at position 702 of SEQ ID NO: 1241119
cccuaaagugagugaguga

SEQ ID NO: 1248243 - RNA, 19 nt, Artificial Sequence
  Description of Artificial Sequence: Synthetic oligonucleotide
  Antisense strand to SEQ ID NO: 1248242
ucacucacucacuuuaggg

SEQ ID NO: 1248244 - RNA, 19 nt, Artificial Sequence
  Description of Artificial Sequence: Synthetic oligonucleotide
  Sense strand starting at position 1753 of SEQ ID NO: 1241119
uugggacugaccugugaag

SEQ ID NO: 1248245 - RNA, 19 nt, Artificial Sequence
  Description of Artificial Sequence: Synthetic oligonucleotide
  Antisense strand to SEQ ID NO: 1248244
cuucacaggucagucccaa

SEQ ID NO: 1248246 - RNA, 19 nt, Artificial Sequence
  Description of Artificial Sequence: Synthetic oligonucleotide
  Sense strand starting at position 1755 of SEQ ID NO: 1241119
gggacugaccugugaaguu

SEQ ID NO: 1248247 - RNA, 19 nt, Artificial Sequence
  Description of Artificial Sequence: Synthetic oligonucleotide
  Antisense strand to SEQ ID NO: 1248246
aacuucacaggucaguccc

SEQ ID NO: 1248248 - RNA, 19 nt, Artificial Sequence
  Description of Artificial Sequence: Synthetic oligonucleotide
  Sense strand starting at position 1796 of SEQ ID NO: 1241119
aguacuuucucaccugaga

SEQ ID NO: 1248249 - RNA, 19 nt, Artificial Sequence
  Description of Artificial Sequence: Synthetic oligonucleotide
  Antisense strand to SEQ ID NO: 1248248
ucucaggugagaaaguacu

SEQ ID NO: 1248250 - RNA, 19 nt, Artificial Sequence
  Description of Artificial Sequence: Synthetic oligonucleotide
  Sense strand starting at position 2000 of SEQ ID NO: 1241119
uuaauauucccuugaagug

SEQ ID NO: 1248251 - RNA, 19 nt, Artificial Sequence
  Description of Artificial Sequence: Synthetic oligonucleotide
  Antisense strand to SEQ ID NO: 1248250
cacuucaagggaauauuaa

SEQ ID NO: 1248252 - RNA, 19 nt, Artificial Sequence
  Description of Artificial Sequence: Synthetic oligonucleotide
  Sense strand starting at position 2012 of SEQ ID NO: 1241119
ugaagugaaacguaguuau

SEQ ID NO: 1248253 - RNA, 19 nt, Artificial Sequence
  Description of Artificial Sequence: Synthetic oligonucleotide
  Antisense strand to SEQ ID NO: 1248252
auaacuacguuucacuuca

SEQ ID NO: 1248254 - RNA, 19 nt, Artificial Sequence
  Description of Artificial Sequence: Synthetic oligonucleotide
  Sense strand starting at position 2015 of SEQ ID NO: 1241119
agugaaacguaguuauauc

SEQ ID NO: 1248255 - RNA, 19 nt, Artificial Sequence
  Description of Artificial Sequence: Synthetic oligonucleotide
  Antisense strand to SEQ ID NO: 1248254
gauauaacuacguuucacu

SEQ ID NO: 1248256 - RNA, 19 nt, Artificial Sequence
  Description of Artificial Sequence: Synthetic oligonucleotide
  Sense strand starting at position 2016 of SEQ ID NO: 1241119
gugaaacguaguuauauca

SEQ ID NO: 1248257 - RNA, 19 nt, Artificial Sequence
  Description of Artificial Sequence: Synthetic oligonucleotide
  Antisense strand to SEQ ID NO: 1248256
ugauauaacuacguuucac

SEQ ID NO: 1248258 - RNA, 19 nt, Artificial Sequence
  Description of Artificial Sequence: Synthetic oligonucleotide
  Sense strand starting at position 2096 of SEQ ID NO: 1241119
uugacucgauccucauaau

SEQ ID NO: 1248259 - RNA, 19 nt, Artificial Sequence
  Description of Artificial Sequence: Synthetic oligonucleotide
  Antisense strand to SEQ ID NO: 1248258
auuaugaggaucgagucaa

SEQ ID NO: 1248260 - RNA, 19 nt, Artificial Sequence
  Description of Artificial Sequence: Synthetic oligonucleotide
  Sense strand starting at position 2162 of SEQ ID NO: 1241119
gcucauguccuggaucuca

SEQ ID NO: 1248261 - RNA, 19 nt, Artificial Sequence
  Description of Artificial Sequence: Synthetic oligonucleotide
  Antisense strand to SEQ ID NO: 1248260
ugagauccaggacaugagc

SEQ ID NO: 1248262 - RNA, 19 nt, Artificial Sequence
  Description of Artificial Sequence: Synthetic oligonucleotide
  Sense strand starting at position 2209 of SEQ ID NO: 1241119
uuuaacuuucuuggguauu

SEQ ID NO: 1248263 - RNA, 19 nt, Artificial Sequence
  Description of Artificial Sequence: Synthetic oligonucleotide
  Antisense strand to SEQ ID NO: 1248262
aauacccaagaaaguuaaa

SEQ ID NO: 1248264 - RNA, 19 nt, Artificial Sequence
  Description of Artificial Sequence: Synthetic oligonucleotide
  Sense strand starting at position 2219 of SEQ ID NO: 1241119
uuggguauuuguguuuauu

SEQ ID NO: 1248265 - RNA, 19 nt, Artificial Sequence
  Description of Artificial Sequence: Synthetic oligonucleotide
  Antisense strand to SEQ ID NO: 1248264
aauaaacacaaauacccaa

SEQ ID NO: 1248266 - RNA, 19 nt, Artificial Sequence
  Description of Artificial Sequence: Synthetic oligonucleotide
  Sense strand starting at position 2243 of SEQ ID NO: 1241119
auaccuuuccagggcaaau

SEQ ID NO: 1248267 - RNA, 19 nt, Artificial Sequence
  Description of Artificial Sequence: Synthetic oligonucleotide
  Antisense strand to SEQ ID NO: 1248266
auuugcccuggaaagguau

SEQ ID NO: 1248268 - RNA, 19 nt, Artificial Sequence
  Description of Artificial Sequence: Synthetic oligonucleotide
  Sense strand starting at position 2259 of SEQ ID NO: 1241119
aauuuaggcuuagaaggaa

SEQ ID NO: 1248269 - RNA, 19 nt, Artificial Sequence
  Description of Artificial Sequence: Synthetic oligonucleotide
  Antisense strand to SEQ ID NO: 1248268
uuccuucuaagccuaaauu

SEQ ID NO: 1248270 - RNA, 19 nt, Artificial Sequence
  Description of Artificial Sequence: Synthetic oligonucleotide
  Sense strand starting at position 2312 of SEQ ID NO: 1241119
ucagacuguuguguauuua

SEQ ID NO: 1248271 - RNA, 19 nt, Artificial Sequence
  Description of Artificial Sequence: Synthetic oligonucleotide
  Antisense strand to SEQ ID NO: 1248270
uaaauacacaacagucuga

SEQ ID NO: 1248272 - RNA, 19 nt, Artificial Sequence
  Description of Artificial Sequence: Synthetic oligonucleotide
  Sense strand starting at position 2375 of SEQ ID NO: 1241119
ugaaucguuaggcaaaugu

SEQ ID NO: 1248273 - RNA, 19 nt, Artificial Sequence
  Description of Artificial Sequence: Synthetic oligonucleotide
  Antisense strand to SEQ ID NO: 1248272
acauuugccuaacgauuca

SEQ ID NO: 1248274 - RNA, 19 nt, Artificial Sequence
  Description of Artificial Sequence: Synthetic oligonucleotide
  Sense strand starting at position 2423 of SEQ ID NO: 1241119
uagaaaggguguccucaaa

SEQ ID NO: 1248275 - RNA, 19 nt, Artificial Sequence
  Description of Artificial Sequence: Synthetic oligonucleotide
  Antisense strand to SEQ ID NO: 1248274
uuugaggacacccuuucua

SEQ ID NO: 1248276 - RNA, 19 nt, Artificial Sequence
  Description of Artificial Sequence: Synthetic oligonucleotide
  Sense strand starting at position 2450 of SEQ ID NO: 1241119
ucuuuaguuugguucugaa

SEQ ID NO: 1248277 - RNA, 19 nt, Artificial Sequence
  Description of Artificial Sequence: Synthetic oligonucleotide
  Antisense strand to SEQ ID NO: 1248276
uucagaaccaaacuaaaga

SEQ ID NO: 1248278 - RNA, 19 nt, Artificial Sequence
  Description of Artificial Sequence: Synthetic oligonucleotide
  Sense strand starting at position 2490 of SEQ ID NO: 1241119
ccacaaagugggugaaguu

SEQ ID NO: 1248279 - RNA, 19 nt, Artificial Sequence
  Description of Artificial Sequence: Synthetic oligonucleotide
  Antisense strand to SEQ ID NO: 1248278
aacuucacccacuuugugg

SEQ ID NO: 1248280 - RNA, 19 nt, Artificial Sequence
  Description of Artificial Sequence: Synthetic oligonucleotide
  Sense strand starting at position 2710 of SEQ ID NO: 1241119
uagaauucuguugguauac

SEQ ID NO: 1248281 - RNA, 19 nt, Artificial Sequence
  Description of Artificial Sequence: Synthetic oligonucleotide
  Antisense strand to SEQ ID NO: 1248280
guauaccaacagaauucua

SEQ ID NO: 1248282 - RNA, 19 nt, Artificial Sequence
  Description of Artificial Sequence: Synthetic oligonucleotide
  Sense strand starting at position 2711 of SEQ ID NO: 1241119
agaauucuguugguauaca

SEQ ID NO: 1248283 - RNA, 19 nt, Artificial Sequence
  Description of Artificial Sequence: Synthetic oligonucleotide
  Antisense strand to SEQ ID NO: 1248282
uguauaccaacagaauucu

SEQ ID NO: 1248284 - RNA, 19 nt, Artificial Sequence
  Description of Artificial Sequence: Synthetic oligonucleotide
  Sense strand starting at position 2763 of SEQ ID NO: 1241119
gugugaguaaaguaaguaa

SEQ ID NO: 1248285 - RNA, 19 nt, Artificial Sequence
  Description of Artificial Sequence: Synthetic oligonucleotide
  Antisense strand to SEQ ID NO: 1248284
uuacuuacuuuacucacac

SEQ ID NO: 1248286 - RNA, 19 nt, Artificial Sequence
  Description of Artificial Sequence: Synthetic oligonucleotide
  Sense strand starting at position 2821 of SEQ ID NO: 1241119
ggccuaagcucacuaaaua

SEQ ID NO: 1248287 - RNA, 19 nt, Artificial Sequence
  Description of Artificial Sequence: Synthetic oligonucleotide
  Antisense strand to SEQ ID NO: 1248286
uauuuagugagcuuaggcc

SEQ ID NO: 1248288 - RNA, 19 nt, Artificial Sequence
  Description of Artificial Sequence: Synthetic oligonucleotide
  Sense strand starting at position 3120 of SEQ ID NO: 1241119
ucaauucuauugguacagu

SEQ ID NO: 1248289 - RNA, 19 nt, Artificial Sequence
  Description of Artificial Sequence: Synthetic oligonucleotide
  Antisense strand to SEQ ID NO: 1248288
acuguaccaauagaauuga

SEQ ID NO: 1248290 - RNA, 19 nt, Artificial Sequence
  Description of Artificial Sequence: Synthetic oligonucleotide
  Sense strand starting at position 3182 of SEQ ID NO: 1241119
gaagaaguccuacaguguu

SEQ ID NO: 1248291 - RNA, 19 nt, Artificial Sequence
  Description of Artificial Sequence: Synthetic oligonucleotide
  Antisense strand to SEQ ID NO: 1248290
aacacuguaggacuucuuc

SEQ ID NO: 1248292 - RNA, 19 nt, Artificial Sequence
  Description of Artificial Sequence: Synthetic oligonucleotide
  Sense strand starting at position 3190 of SEQ ID NO: 1241119
ccuacaguguuucuagacu

SEQ ID NO: 1248293 - RNA, 19 nt, Artificial Sequence
  Description of Artificial Sequence: Synthetic oligonucleotide
  Antisense strand to SEQ ID NO: 1248292
agucuagaaacacuguagg

SEQ ID NO: 1248294 - RNA, 19 nt, Artificial Sequence
  Description of Artificial Sequence: Synthetic oligonucleotide
  Sense strand starting at position 3357 of SEQ ID NO: 1241119
gcuugugagaugcguauuu

SEQ ID NO: 1248295 - RNA, 19 nt, Artificial Sequence
  Description of Artificial Sequence: Synthetic oligonucleotide
  Antisense strand to SEQ ID NO: 1248294
aaauacgcaucucacaagc

SEQ ID NO: 1248296 - RNA, 19 nt, Artificial Sequence
  Description of Artificial Sequence: Synthetic oligonucleotide
  Sense strand starting at position 3379 of SEQ ID NO: 1241119
aauguauguguugaauaca

SEQ ID NO: 1248297 - RNA, 19 nt, Artificial Sequence
  Description of Artificial Sequence: Synthetic oligonucleotide
  Antisense strand to SEQ ID NO: 1248296
uguauucaacacauacauu

SEQ ID NO: 1248298 - RNA, 19 nt, Artificial Sequence
  Description of Artificial Sequence: Synthetic oligonucleotide
  Sense strand starting at position 3415 of SEQ ID NO: 1241119
agugaagcaucaguggauu

SEQ ID NO: 1248299 - RNA, 19 nt, Artificial Sequence
  Description of Artificial Sequence: Synthetic oligonucleotide
  Antisense strand to SEQ ID NO: 1248298
aauccacugaugcuucacu

SEQ ID NO: 1248300 - RNA, 19 nt, Artificial Sequence
  Description of Artificial Sequence: Synthetic oligonucleotide
  Sense strand starting at position 3631 of SEQ ID NO: 1241119
uuucccuggcuuugggaaa

SEQ ID NO: 1248301 - RNA, 19 nt, Artificial Sequence
  Description of Artificial Sequence: Synthetic oligonucleotide
  Antisense strand to SEQ ID NO: 1248300
uuucccaaagccagggaaa

SEQ ID NO: 1248302 - RNA, 19 nt, Artificial Sequence
  Description of Artificial Sequence: Synthetic oligonucleotide
  Sense strand starting at position 3673 of SEQ ID NO: 1241119
augauucuguucucuguaa

SEQ ID NO: 1248303 - RNA, 19 nt, Artificial Sequence
  Description of Artificial Sequence: Synthetic oligonucleotide
  Antisense strand to SEQ ID NO: 1248302
uuacagagaacagaaucau

SEQ ID NO: 1248304 - RNA, 19 nt, Artificial Sequence
  Description of Artificial Sequence: Synthetic oligonucleotide
  Sense strand starting at position 3674 of SEQ ID NO: 1241119
ugauucuguucucuguaaa

SEQ ID NO: 1248305 - RNA, 19 nt, Artificial Sequence
  Description of Artificial Sequence: Synthetic oligonucleotide
  Antisense strand to SEQ ID NO: 1248304
uuuacagagaacagaauca

SEQ ID NO: 1248306 - RNA, 19 nt, Artificial Sequence
  Description of Artificial Sequence: Synthetic oligonucleotide
  Sense strand starting at position 3701 of SEQ ID NO: 1241119
agaguaaaggucugucuua

SEQ ID NO: 1248307 - RNA, 19 nt, Artificial Sequence
  Description of Artificial Sequence: Synthetic oligonucleotide
  Antisense strand to SEQ ID NO: 1248306
uaagacagaccuuuacucu

SEQ ID NO: 1248308 - RNA, 19 nt, Artificial Sequence
  Description of Artificial Sequence: Synthetic oligonucleotide
  Sense strand starting at position 3702 of SEQ ID NO: 1241119
gaguaaaggucugucuuag

SEQ ID NO: 1248309 - RNA, 19 nt, Artificial Sequence
  Description of Artificial Sequence: Synthetic oligonucleotide
  Antisense strand to SEQ ID NO: 1248308
cuaagacagaccuuuacuc

SEQ ID NO: 1248310 - RNA, 19 nt, Artificial Sequence
  Description of Artificial Sequence: Synthetic oligonucleotide
  Sense strand starting at position 3793 of SEQ ID NO: 1241119
gguaaagcauuguuaguaa

SEQ ID NO: 1248311 - RNA, 19 nt, Artificial Sequence
  Description of Artificial Sequence: Synthetic oligonucleotide
  Antisense strand to SEQ ID NO: 1248310
uuacuaacaaugcuuuacc

SEQ ID NO: 1248312 - RNA, 19 nt, Artificial Sequence
  Description of Artificial Sequence: Synthetic oligonucleotide
  Sense strand starting at position 3796 of SEQ ID NO: 1241119
aaagcauuguuaguaaggu

SEQ ID NO: 1248313 - RNA, 19 nt, Artificial Sequence
  Description of Artificial Sequence: Synthetic oligonucleotide
  Antisense strand to SEQ ID NO: 1248312
accuuacuaacaaugcuuu

SEQ ID NO: 1248314 - RNA, 19 nt, Artificial Sequence
  Description of Artificial Sequence: Synthetic oligonucleotide
  Sense strand starting at position 3820 of SEQ ID NO: 1241119
gacagugguuucuuaacuu

SEQ ID NO: 1248315 - RNA, 19 nt, Artificial Sequence
  Description of Artificial Sequence: Synthetic oligonucleotide
  Antisense strand to SEQ ID NO: 1248314
aaguuaagaaaccacuguc

SEQ ID NO: 1248316 - RNA, 19 nt, Artificial Sequence
  Description of Artificial Sequence: Synthetic oligonucleotide
  Sense strand starting at position 3914 of SEQ ID NO: 1241119
ggauaagaggccugcauau

SEQ ID NO: 1248317 - RNA, 19 nt, Artificial Sequence
  Description of Artificial Sequence: Synthetic oligonucleotide
  Antisense strand to SEQ ID NO: 1248316
auaugcaggccucuuaucc

SEQ ID NO: 1248318 - RNA, 19 nt, Artificial Sequence
  Description of Artificial Sequence: Synthetic oligonucleotide
  Sense strand starting at position 3935 of SEQ ID NO: 1241119
uuuagaguucuacaaguga

SEQ ID NO: 1248319 - RNA, 19 nt, Artificial Sequence
  Description of Artificial Sequence: Synthetic oligonucleotide
  Antisense strand to SEQ ID NO: 1248318
ucacuuguagaacucuaaa

SEQ ID NO: 1248320 - RNA, 19 nt, Artificial Sequence
  Description of Artificial Sequence: Synthetic oligonucleotide
  Sense strand starting at position 21 of SEQ ID NO: 1241120
aguguugagaaaugugaca

SEQ ID NO: 1248321 - RNA, 19 nt, Artificial Sequence
  Description of Artificial Sequence: Synthetic oligonucleotide
  Antisense strand to SEQ ID NO: 1248320
ugucacauuucucaacacu

SEQ ID NO: 1248322 - RNA, 19 nt, Artificial Sequence
  Description of Artificial Sequence: Synthetic oligonucleotide
  Sense strand starting at position 23 of SEQ ID NO: 1241120
uguugagaaaugugacaaa

SEQ ID NO: 1248323 - RNA, 19 nt, Artificial Sequence
  Description of Artificial Sequence: Synthetic oligonucleotide
  Antisense strand to SEQ ID NO: 1248322
uuugucacauuucucaaca

SEQ ID NO: 1248324 - RNA, 19 nt, Artificial Sequence
  Description of Artificial Sequence: Synthetic oligonucleotide
  Sense strand starting at position 112 of SEQ ID NO: 1241120
aguaacaucgaagauguua

SEQ ID NO: 1248325 - RNA, 19 nt, Artificial Sequence
  Description of Artificial Sequence: Synthetic oligonucleotide
  Antisense strand to SEQ ID NO: 1248324
uaacaucuucgauguuacu

SEQ ID NO: 1248326 - RNA, 19 nt, Artificial Sequence
  Description of Artificial Sequence: Synthetic oligonucleotide
  Sense strand starting at position 133 of SEQ ID NO: 1241120
aguuaucugucagugggaa

SEQ ID NO: 1248327 - RNA, 19 nt, Artificial Sequence
  Description of Artificial Sequence: Synthetic oligonucleotide
  Antisense strand to SEQ ID NO: 1248326
uucccacugacagauaacu

SEQ ID NO: 1248328 - RNA, 19 nt, Artificial Sequence
  Description of Artificial Sequence: Synthetic oligonucleotide
  Sense strand starting at position 134 of SEQ ID NO: 1241120
guuaucugucagugggaag

SEQ ID NO: 1248329 - RNA, 19 nt, Artificial Sequence
  Description of Artificial Sequence: Synthetic oligonucleotide
  Antisense strand to SEQ ID NO: 1248328
cuucccacugacagauaac

SEQ ID NO: 1248330 - RNA, 19 nt, Artificial Sequence
  Description of Artificial Sequence: Synthetic oligonucleotide
  Sense strand starting at position 152 of SEQ ID NO: 1241120
gggaacggcaguuagaaau

SEQ ID NO: 1248331 - RNA, 19 nt, Artificial Sequence
  Description of Artificial Sequence: Synthetic oligonucleotide
  Antisense strand to SEQ ID NO: 1248330
auuucuaacugccguuccc

SEQ ID NO: 1248332 - RNA, 19 nt, Artificial Sequence
  Description of Artificial Sequence: Synthetic oligonucleotide
  Sense strand starting at position 199 of SEQ ID NO: 1241120
gagagauacuuuguacgga

SEQ ID NO: 1248333 - RNA, 19 nt, Artificial Sequence
  Description of Artificial Sequence: Synthetic oligonucleotide
  Antisense strand to SEQ ID NO: 1248332
uccguacaaaguaucucuc

SEQ ID NO: 1248334 - RNA, 19 nt, Artificial Sequence
  Description of Artificial Sequence: Synthetic oligonucleotide
  Sense strand starting at position 204 of SEQ ID NO: 1241120
auacuuuguacggacugau

SEQ ID NO: 1248335 - RNA, 19 nt, Artificial Sequence
  Description of Artificial Sequence: Synthetic oligonucleotide
  Antisense strand to SEQ ID NO: 1248334
aucaguccguacaaaguau

SEQ ID NO: 1248336 - RNA, 19 nt, Artificial Sequence
  Description of Artificial Sequence: Synthetic oligonucleotide
  Sense strand starting at position 295 of SEQ ID NO: 1241120
guuagugucagccagaaau

SEQ ID NO: 1248337 - RNA, 19 nt, Artificial Sequence
  Description of Artificial Sequence: Synthetic oligonucleotide
  Antisense strand to SEQ ID NO: 1248336
auuucuggcugacacuaac

SEQ ID NO: 1248338 - RNA, 19 nt, Artificial Sequence
  Description of Artificial Sequence: Synthetic oligonucleotide
  Sense strand starting at position 559 of SEQ ID NO: 1241120
cucgauugccaccaacauu

SEQ ID NO: 1248339 - RNA, 19 nt, Artificial Sequence
  Description of Artificial Sequence: Synthetic oligonucleotide
  Antisense strand to SEQ ID NO: 1248338
aauguugguggcaaucgag

SEQ ID NO: 1248340 - RNA, 19 nt, Artificial Sequence
  Description of Artificial Sequence: Synthetic oligonucleotide
  Sense strand starting at position 618 of SEQ ID NO: 1241120
uugauuacacagggcaaau

SEQ ID NO: 1248341 - RNA, 19 nt, Artificial Sequence
  Description of Artificial Sequence: Synthetic oligonucleotide
  Antisense strand to SEQ ID NO: 1248340
auuugcccuguguaaucaa

SEQ ID NO: 1248342 - RNA, 19 nt, Artificial Sequence
  Description of Artificial Sequence: Synthetic oligonucleotide
  Sense strand starting at position 1092 of SEQ ID NO: 1241120
ugauauaacuuagcaugga

SEQ ID NO: 1248343 - RNA, 19 nt, Artificial Sequence
  Description of Artificial Sequence: Synthetic oligonucleotide
  Antisense strand to SEQ ID NO: 1248342
uccaugcuaaguuauauca

SEQ ID NO: 1248344 - RNA, 19 nt, Artificial Sequence
  Description of Artificial Sequence: Synthetic oligonucleotide
  Sense strand starting at position 1177 of SEQ ID NO: 1241120
auguuuagugcucaguaaa

SEQ ID NO: 1248345 - RNA, 19 nt, Artificial Sequence
  Description of Artificial Sequence: Synthetic oligonucleotide
  Antisense strand to SEQ ID NO: 1248344
uuuacugagcacuaaacau

SEQ ID NO: 1248346 - RNA, 19 nt, Artificial Sequence
  Description of Artificial Sequence: Synthetic oligonucleotide
  Sense strand starting at position 1363 of SEQ ID NO: 1241120
gaaacagaggucuguuaac

SEQ ID NO: 1248347 - RNA, 19 nt, Artificial Sequence
  Description of Artificial Sequence: Synthetic oligonucleotide
  Antisense strand to SEQ ID NO: 1248346
guuaacagaccucuguuuc

SEQ ID NO: 1248348 - RNA, 19 nt, Artificial Sequence
  Description of Artificial Sequence: Synthetic oligonucleotide
  Sense strand starting at position 1455 of SEQ ID NO: 1241120
ucgaucuucugauccauca

SEQ ID NO: 1248349 - RNA, 19 nt, Artificial Sequence
  Description of Artificial Sequence: Synthetic oligonucleotide
  Antisense strand to SEQ ID NO: 1248348
ugauggaucagaagaucga

SEQ ID NO: 1248350 - RNA, 19 nt, Artificial Sequence
  Description of Artificial Sequence: Synthetic oligonucleotide
  Sense strand starting at position 1465 of SEQ ID NO: 1241120
gauccaucaucccugagga

SEQ ID NO: 1248351 - RNA, 19 nt, Artificial Sequence
  Description of Artificial Sequence: Synthetic oligonucleotide
  Antisense strand to SEQ ID NO: 1248350
uccucagggaugauggauc

SEQ ID NO: 1248352 - RNA, 19 nt, Artificial Sequence
  Description of Artificial Sequence: Synthetic oligonucleotide
  Sense strand starting at position 1466 of SEQ ID NO: 1241120
auccaucaucccugaggau

SEQ ID NO: 1248353 - RNA, 19 nt, Artificial Sequence
  Description of Artificial Sequence: Synthetic oligonucleotide
  Antisense strand to SEQ ID NO: 1248352
auccucagggaugauggau

SEQ ID NO: 1248354 - RNA, 19 nt, Artificial Sequence
  Description of Artificial Sequence: Synthetic oligonucleotide
  Sense strand starting at position 2545 of SEQ ID NO: 1241120
gggaaagucuggaagguuc

SEQ ID NO: 1248355 - RNA, 19 nt, Artificial Sequence
  Description of Artificial Sequence: Synthetic oligonucleotide
  Antisense strand to SEQ ID NO: 1248354
gaaccuuccagacuuuccc

SEQ ID NO: 1248356 - RNA, 19 nt, Artificial Sequence
  Description of Artificial Sequence: Synthetic oligonucleotide
  Sense strand starting at position 2572 of SEQ ID NO: 1241120
gaagaugucuacuccggau

SEQ ID NO: 1248357 - RNA, 19 nt, Artificial Sequence
  Description of Artificial Sequence: Synthetic oligonucleotide
  Antisense strand to SEQ ID NO: 1248356
auccggaguagacaucuuc

SEQ ID NO: 1248358 - RNA, 19 nt, Artificial Sequence
  Description of Artificial Sequence: Synthetic oligonucleotide
  Sense strand starting at position 2574 of SEQ ID NO: 1241120
agaugucuacuccggauga

SEQ ID NO: 1248359 - RNA, 19 nt, Artificial Sequence
  Description of Artificial Sequence: Synthetic oligonucleotide
  Antisense strand to SEQ ID NO: 1248358
ucauccggaguagacaucu

SEQ ID NO: 1248360 - RNA, 19 nt, Artificial Sequence
  Description of Artificial Sequence: Synthetic oligonucleotide
  Sense strand starting at position 2576 of SEQ ID NO: 1241120
augucuacuccggaugagu

SEQ ID NO: 1248361 - RNA, 19 nt, Artificial Sequence
  Description of Artificial Sequence: Synthetic oligonucleotide
  Antisense strand to SEQ ID NO: 1248360
acucauccggaguagacau

SEQ ID NO: 1248362 - RNA, 19 nt, Artificial Sequence
  Description of Artificial Sequence: Synthetic oligonucleotide
  Sense strand starting at position 2664 of SEQ ID NO: 1241120
ggguccucgcgggaauaau

SEQ ID NO: 1248363 - RNA, 19 nt, Artificial Sequence
  Description of Artificial Sequence: Synthetic oligonucleotide
  Antisense strand to SEQ ID NO: 1248362
auuauucccgcgaggaccc

SEQ ID NO: 1248364 - RNA, 19 nt, Artificial Sequence
  Description of Artificial Sequence: Synthetic oligonucleotide
  Sense strand starting at position 2778 of SEQ ID NO: 1241120
aguuuaaccugacauuuga

SEQ ID NO: 1248365 - RNA, 19 nt, Artificial Sequence
  Description of Artificial Sequence: Synthetic oligonucleotide
  Antisense strand to SEQ ID NO: 1248364
ucaaaugucagguuaaacu

SEQ ID NO: 1248366 - RNA, 19 nt, Artificial Sequence
  Description of Artificial Sequence: Synthetic oligonucleotide
  Sense strand starting at position 2843 of SEQ ID NO: 1241120
aucucuuucgacugaagag

SEQ ID NO: 1248367 - RNA, 19 nt, Artificial Sequence
  Description of Artificial Sequence: Synthetic oligonucleotide
  Antisense strand to SEQ ID NO: 1248366
cucuucagucgaaagagau

SEQ ID NO: 1248368 - RNA, 19 nt, Artificial Sequence
  Description of Artificial Sequence: Synthetic oligonucleotide
  Sense strand starting at position 2928 of SEQ ID NO: 1241120
cgaggcauuuacguguauu

SEQ ID NO: 1248369 - RNA, 19 nt, Artificial Sequence
  Description of Artificial Sequence: Synthetic oligonucleotide
  Antisense strand to SEQ ID NO: 1248368
aauacacguaaaugccucg

SEQ ID NO: 1248370 - RNA, 19 nt, Artificial Sequence
  Description of Artificial Sequence: Synthetic oligonucleotide
  Sense strand starting at position 2929 of SEQ ID NO: 1241120
gaggcauuuacguguauua

SEQ ID NO: 1248371 - RNA, 19 nt, Artificial Sequence
  Description of Artificial Sequence: Synthetic oligonucleotide
  Antisense strand to SEQ ID NO: 1248370
uaauacacguaaaugccuc

SEQ ID NO: 1248372 - RNA, 19 nt, Artificial Sequence
  Description of Artificial Sequence: Synthetic oligonucleotide
  Sense strand starting at position 3002 of SEQ ID NO: 1241120
gcaccuuaaguguauuaua

SEQ ID NO: 1248373 - RNA, 19 nt, Artificial Sequence
  Description of Artificial Sequence: Synthetic oligonucleotide
  Antisense strand to SEQ ID NO: 1248372
uauaauacacuuaaggugc

SEQ ID NO: 1248374 - RNA, 19 nt, Artificial Sequence
  Description of Artificial Sequence: Synthetic oligonucleotide
  Sense strand starting at position 3096 of SEQ ID NO: 1241120
gucuuuccucgagcguuua

SEQ ID NO: 1248375 - RNA, 19 nt, Artificial Sequence
  Description of Artificial Sequence: Synthetic oligonucleotide
  Antisense strand to SEQ ID NO: 1248374
uaaacgcucgaggaaagac

SEQ ID NO: 1248376 - RNA, 19 nt, Artificial Sequence
  Description of Artificial Sequence: Synthetic oligonucleotide
  Sense strand starting at position 3132 of SEQ ID NO: 1241120
aauuuaauuucgugaaguc

SEQ ID NO: 1248377 - RNA, 19 nt, Artificial Sequence
  Description of Artificial Sequence: Synthetic oligonucleotide
  Antisense strand to SEQ ID NO: 1248376
gacuucacgaaauuaaauu

SEQ ID NO: 1248378 - RNA, 19 nt, Artificial Sequence
  Description of Artificial Sequence: Synthetic oligonucleotide
  Sense strand starting at position 3217 of SEQ ID NO: 1241120
caaugacacguauaaagca

SEQ ID NO: 1248379 - RNA, 19 nt, Artificial Sequence
  Description of Artificial Sequence: Synthetic oligonucleotide
  Antisense strand to SEQ ID NO: 1248378
ugcuuuauacgugucauug

SEQ ID NO: 1248380 - RNA, 19 nt, Artificial Sequence
  Description of Artificial Sequence: Synthetic oligonucleotide
  Sense strand starting at position 3234 of SEQ ID NO: 1241120
caucuccuugugugaaaga

SEQ ID NO: 1248381 - RNA, 19 nt, Artificial Sequence
  Description of Artificial Sequence: Synthetic oligonucleotide
  Antisense strand to SEQ ID NO: 1248380
ucuuucacacaaggagaug

SEQ ID NO: 1248382 - RNA, 19 nt, Artificial Sequence
  Description of Artificial Sequence: Synthetic oligonucleotide
  Sense strand starting at position 3536 of SEQ ID NO: 1241120
ggaguaauauauguuauug

SEQ ID NO: 1248383 - RNA, 19 nt, Artificial Sequence
  Description of Artificial Sequence: Synthetic oligonucleotide
  Antisense strand to SEQ ID NO: 1248382
caauaacauauauuacucc

SEQ ID NO: 1248384 - RNA, 19 nt, Artificial Sequence
  Description of Artificial Sequence: Synthetic oligonucleotide
  Sense strand starting at position 3575 of SEQ ID NO: 1241120
acaguaauuugugaaugaa

SEQ ID NO: 1248385 - RNA, 19 nt, Artificial Sequence
  Description of Artificial Sequence: Synthetic oligonucleotide
  Antisense strand to SEQ ID NO: 1248384
uucauucacaaauuacugu

SEQ ID NO: 1248386 - RNA, 19 nt, Artificial Sequence
  Description of Artificial Sequence: Synthetic oligonucleotide
  Sense strand starting at position 3637 of SEQ ID NO: 1241120
cacuuaaguguugggagau

SEQ ID NO: 1248387 - RNA, 19 nt, Artificial Sequence
  Description of Artificial Sequence: Synthetic oligonucleotide
  Antisense strand to SEQ ID NO: 1248386
aucucccaacacuuaagug

SEQ ID NO: 1248388 - RNA, 19 nt, Artificial Sequence
  Description of Artificial Sequence: Synthetic oligonucleotide
  Sense strand starting at position 3643 of SEQ ID NO: 1241120
aguguugggagauaugcua

SEQ ID NO: 1248389 - RNA, 19 nt, Artificial Sequence
  Description of Artificial Sequence: Synthetic oligonucleotide
  Antisense strand to SEQ ID NO: 1248388
uagcauaucucccaacacu

SEQ ID NO: 1248390 - RNA, 19 nt, Artificial Sequence
  Description of Artificial Sequence: Synthetic oligonucleotide
  Sense strand starting at position 3816 of SEQ ID NO: 1241120
gaugaaguuguaugagauc

SEQ ID NO: 1248391 - RNA, 19 nt, Artificial Sequence
  Description of Artificial Sequence: Synthetic oligonucleotide
  Antisense strand to SEQ ID NO: 1248390
gaucucauacaacuucauc

SEQ ID NO: 1248392 - RNA, 19 nt, Artificial Sequence
  Description of Artificial Sequence: Synthetic oligonucleotide
  Sense strand starting at position 3828 of SEQ ID NO: 1241120
ugagaucuuuaauuaaggu

SEQ ID NO: 1248393 - RNA, 19 nt, Artificial Sequence
  Description of Artificial Sequence: Synthetic oligonucleotide
  Antisense strand to SEQ ID NO: 1248392
accuuaauuaaagaucuca

SEQ ID NO: 1248394 - RNA, 19 nt, Artificial Sequence
  Description of Artificial Sequence: Synthetic oligonucleotide
  Sense strand starting at position 3922 of SEQ ID NO: 1241120
aguuaauccugcuugacag

SEQ ID NO: 1248395 - RNA, 19 nt, Artificial Sequence
  Description of Artificial Sequence: Synthetic oligonucleotide
  Antisense strand to SEQ ID NO: 1248394
cugucaagcaggauuaacu

SEQ ID NO: 1248396 - RNA, 19 nt, Artificial Sequence
  Description of Artificial Sequence: Synthetic oligonucleotide
  Sense strand starting at position 3956 of SEQ ID NO: 1241120
ggaccaucuuauguauauu

SEQ ID NO: 1248397 - RNA, 19 nt, Artificial Sequence
  Description of Artificial Sequence: Synthetic oligonucleotide
  Antisense strand to SEQ ID NO: 1248396
aauauacauaagauggucc

SEQ ID NO: 1248398 - RNA, 19 nt, Artificial Sequence
  Description of Artificial Sequence: Synthetic oligonucleotide
  Sense strand starting at position 3980 of SEQ ID NO: 1241120
uuaaauguuugaccacaug

SEQ ID NO: 1248399 - RNA, 19 nt, Artificial Sequence
  Description of Artificial Sequence: Synthetic oligonucleotide
  Antisense strand to SEQ ID NO: 1248398
cauguggucaaacauuuaa

SEQ ID NO: 1248400 - RNA, 19 nt, Artificial Sequence
  Description of Artificial Sequence: Synthetic oligonucleotide
  Sense strand starting at position 131 of SEQ ID NO: 1241121
cuccucaucgccuauagaa

SEQ ID NO: 1248401 - RNA, 19 nt, Artificial Sequence
  Description of Artificial Sequence: Synthetic oligonucleotide
  Antisense strand to SEQ ID NO: 1248400
uucuauaggcgaugaggag

SEQ ID NO: 1248402 - RNA, 19 nt, Artificial Sequence
  Description of Artificial Sequence: Synthetic oligonucleotide
  Sense strand starting at position 133 of SEQ ID NO: 1241121
ccucaucgccuauagaaau

SEQ ID NO: 1248403 - RNA, 19 nt, Artificial Sequence
  Description of Artificial Sequence: Synthetic oligonucleotide
  Antisense strand to SEQ ID NO: 1248402
auuucuauaggcgaugagg

SEQ ID NO: 1248404 - RNA, 19 nt, Artificial Sequence
  Description of Artificial Sequence: Synthetic oligonucleotide
  Sense strand starting at position 257 of SEQ ID NO: 1241121
ucaauagggucucaccuau

SEQ ID NO: 1248405 - RNA, 19 nt, Artificial Sequence
  Description of Artificial Sequence: Synthetic oligonucleotide
  Antisense strand to SEQ ID NO: 1248404
auaggugagacccuauuga

SEQ ID NO: 1248406 - RNA, 19 nt, Artificial Sequence
  Description of Artificial Sequence: Synthetic oligonucleotide
  Sense strand starting at position 454 of SEQ ID NO: 1241121
uccuuuacccacuguaagu

SEQ ID NO: 1248407 - RNA, 19 nt, Artificial Sequence
  Description of Artificial Sequence: Synthetic oligonucleotide
  Antisense strand to SEQ ID NO: 1248406
acuuacaguggguaaagga

SEQ ID NO: 1248408 - RNA, 19 nt, Artificial Sequence
  Description of Artificial Sequence: Synthetic oligonucleotide
  Sense strand starting at position 540 of SEQ ID NO: 1241121
cauagauacgcacggguua

SEQ ID NO: 1248409 - RNA, 19 nt, Artificial Sequence
  Description of Artificial Sequence: Synthetic oligonucleotide
  Antisense strand to SEQ ID NO: 1248408
uaacccgugcguaucuaug

SEQ ID NO: 1248410 - RNA, 19 nt, Artificial Sequence
  Description of Artificial Sequence: Synthetic oligonucleotide
  Sense strand starting at position 541 of SEQ ID NO: 1241121
auagauacgcacggguuaa

SEQ ID NO: 1248411 - RNA, 19 nt, Artificial Sequence
  Description of Artificial Sequence: Synthetic oligonucleotide
  Antisense strand to SEQ ID NO: 1248410
uuaacccgugcguaucuau

SEQ ID NO: 1248412 - RNA, 19 nt, Artificial Sequence
  Description of Artificial Sequence: Synthetic oligonucleotide
  Sense strand starting at position 542 of SEQ ID NO: 1241121
uagauacgcacggguuaaa

SEQ ID NO: 1248413 - RNA, 19 nt, Artificial Sequence
  Description of Artificial Sequence: Synthetic oligonucleotide
  Antisense strand to SEQ ID NO: 1248412
uuuaacccgugcguaucua

SEQ ID NO: 1248414 - RNA, 19 nt, Artificial Sequence
  Description of Artificial Sequence: Synthetic oligonucleotide
  Sense strand starting at position 666 of SEQ ID NO: 1241121
augccaaggagauguguuu

SEQ ID NO: 1248415 - RNA, 19 nt, Artificial Sequence
  Description of Artificial Sequence: Synthetic oligonucleotide
  Antisense strand to SEQ ID NO: 1248414
aaacacaucuccuuggcau

SEQ ID NO: 1248416 - RNA, 19 nt, Artificial Sequence
  Description of Artificial Sequence: Synthetic oligonucleotide
  Sense strand starting at position 718 of SEQ ID NO: 1241121
uuaagcuaugguuaaugga

SEQ ID NO: 1248417 - RNA, 19 nt, Artificial Sequence
  Description of Artificial Sequence: Synthetic oligonucleotide
  Antisense strand to SEQ ID NO: 1248416
uccauuaaccauagcuuaa

SEQ ID NO: 1248418 - RNA, 19 nt, Artificial Sequence
  Description of Artificial Sequence: Synthetic oligonucleotide
  Sense strand starting at position 806 of SEQ ID NO: 1241121
uugcaacauucugggaaga

SEQ ID NO: 1248419 - RNA, 19 nt, Artificial Sequence
  Description of Artificial Sequence: Synthetic oligonucleotide
  Antisense strand to SEQ ID NO: 1248418
ucuucccagaauguugcaa

SEQ ID NO: 1248420 - RNA, 19 nt, Artificial Sequence
  Description of Artificial Sequence: Synthetic oligonucleotide
  Sense strand starting at position 808 of SEQ ID NO: 1241121
gcaacauucugggaagagg

SEQ ID NO: 1248421 - RNA, 19 nt, Artificial Sequence
  Description of Artificial Sequence: Synthetic oligonucleotide
  Antisense strand to SEQ ID NO: 1248420
ccucuucccagaauguugc

SEQ ID NO: 1248422 - RNA, 19 nt, Artificial Sequence
  Description of Artificial Sequence: Synthetic oligonucleotide
  Sense strand starting at position 1254 of SEQ ID NO: 1241121
gugguuuccaacugcgauc

SEQ ID NO: 1248423 - RNA, 19 nt, Artificial Sequence
  Description of Artificial Sequence: Synthetic oligonucleotide
  Antisense strand to SEQ ID NO: 1248422
gaucgcaguuggaaaccac

SEQ ID NO: 1248424 - RNA, 19 nt, Artificial Sequence
  Description of Artificial Sequence: Synthetic oligonucleotide
  Sense strand starting at position 1265 of SEQ ID NO: 1241121
cugcgauccggcguuaacu

SEQ ID NO: 1248425 - RNA, 19 nt, Artificial Sequence
  Description of Artificial Sequence: Synthetic oligonucleotide
  Antisense strand to SEQ ID NO: 1248424
aguuaacgccggaucgcag

SEQ ID NO: 1248426 - RNA, 19 nt, Artificial Sequence
  Description of Artificial Sequence: Synthetic oligonucleotide
  Sense strand starting at position 1266 of SEQ ID NO: 1241121
ugcgauccggcguuaacua

SEQ ID NO: 1248427 - RNA, 19 nt, Artificial Sequence
  Description of Artificial Sequence: Synthetic oligonucleotide
  Antisense strand to SEQ ID NO: 1248426
uaguuaacgccggaucgca

SEQ ID NO: 1248428 - RNA, 19 nt, Artificial Sequence
  Description of Artificial Sequence: Synthetic oligonucleotide
  Sense strand starting at position 1267 of SEQ ID NO: 1241121
gcgauccggcguuaacuau

SEQ ID NO: 1248429 - RNA, 19 nt, Artificial Sequence
  Description of Artificial Sequence: Synthetic oligonucleotide
  Antisense strand to SEQ ID NO: 1248428
auaguuaacgccggaucgc

SEQ ID NO: 1248430 - RNA, 19 nt, Artificial Sequence
  Description of Artificial Sequence: Synthetic oligonucleotide
  Sense strand starting at position 1984 of SEQ ID NO: 1241121
gcgugauuggucugucuga

SEQ ID NO: 1248431 - RNA, 19 nt, Artificial Sequence
  Description of Artificial Sequence: Synthetic oligonucleotide
  Antisense strand to SEQ ID NO: 1248430
ucagacagaccaaucacgc

SEQ ID NO: 1248432 - RNA, 19 nt, Artificial Sequence
  Description of Artificial Sequence: Synthetic oligonucleotide
  Sense strand starting at position 1985 of SEQ ID NO: 1241121
cgugauuggucugucugac

SEQ ID NO: 1248433 - RNA, 19 nt, Artificial Sequence
  Description of Artificial Sequence: Synthetic oligonucleotide
  Antisense strand to SEQ ID NO: 1248432
gucagacagaccaaucacg

SEQ ID NO: 1248434 - RNA, 19 nt, Artificial Sequence
  Description of Artificial Sequence: Synthetic oligonucleotide
  Sense strand starting at position 2084 of SEQ ID NO: 1241121
guuuaucguugugccagau

SEQ ID NO: 1248435 - RNA, 19 nt, Artificial Sequence
  Description of Artificial Sequence: Synthetic oligonucleotide
  Antisense strand to SEQ ID NO: 1248434
aucuggcacaacgauaaac

SEQ ID NO: 1248436 - RNA, 19 nt, Artificial Sequence
  Description of Artificial Sequence: Synthetic oligonucleotide
  Sense strand starting at position 2115 of SEQ ID NO: 1241121
gugugacacugacuuaaga

SEQ ID NO: 1248437 - RNA, 19 nt, Artificial Sequence
  Description of Artificial Sequence: Synthetic oligonucleotide
  Antisense strand to SEQ ID NO: 1248436
ucuuaagucagugucacac

SEQ ID NO: 1248438 - RNA, 19 nt, Artificial Sequence
  Description of Artificial Sequence: Synthetic oligonucleotide
  Sense strand starting at position 2128 of SEQ ID NO: 1241121
uuaagauucuaacuaugug

SEQ ID NO: 1248439 - RNA, 19 nt, Artificial Sequence
  Description of Artificial Sequence: Synthetic oligonucleotide
  Antisense strand to SEQ ID NO: 1248438
cacauaguuagaaucuuaa

SEQ ID NO: 1248440 - RNA, 19 nt, Artificial Sequence
  Description of Artificial Sequence: Synthetic oligonucleotide
  Sense strand starting at position 2131 of SEQ ID NO: 1241121
agauucuaacuaugugcaa

SEQ ID NO: 1248441 - RNA, 19 nt, Artificial Sequence
  Description of Artificial Sequence: Synthetic oligonucleotide
  Antisense strand to SEQ ID NO: 1248440
uugcacauaguuagaaucu

SEQ ID NO: 1248442 - RNA, 19 nt, Artificial Sequence
  Description of Artificial Sequence: Synthetic oligonucleotide
  Sense strand starting at position 2213 of SEQ ID NO: 1241121
gaauguaaggcacagaguu

SEQ ID NO: 1248443 - RNA, 19 nt, Artificial Sequence
  Description of Artificial Sequence: Synthetic oligonucleotide
  Antisense strand to SEQ ID NO: 1248442
aacucugugccuuacauuc

SEQ ID NO: 1248444 - RNA, 19 nt, Artificial Sequence
  Description of Artificial Sequence: Synthetic oligonucleotide
  Sense strand starting at position 2297 of SEQ ID NO: 1241121
gggaguuccgcggugucuu

SEQ ID NO: 1248445 - RNA, 19 nt, Artificial Sequence
  Description of Artificial Sequence: Synthetic oligonucleotide
  Antisense strand to SEQ ID NO: 1248444
aagacaccgcggaacuccc

SEQ ID NO: 1248446 - RNA, 19 nt, Artificial Sequence
  Description of Artificial Sequence: Synthetic oligonucleotide
  Sense strand starting at position 2309 of SEQ ID NO: 1241121
gugucuuucccagugcuau

SEQ ID NO: 1248447 - RNA, 19 nt, Artificial Sequence
  Description of Artificial Sequence: Synthetic oligonucleotide
  Antisense strand to SEQ ID NO: 1248446
auagcacugggaaagacac

SEQ ID NO: 1248448 - RNA, 19 nt, Artificial Sequence
  Description of Artificial Sequence: Synthetic oligonucleotide
  Sense strand starting at position 2310 of SEQ ID NO: 1241121
ugucuuucccagugcuauc

SEQ ID NO: 1248449 - RNA, 19 nt, Artificial Sequence
  Description of Artificial Sequence: Synthetic oligonucleotide
  Antisense strand to SEQ ID NO: 1248448
gauagcacugggaaagaca

SEQ ID NO: 1248450 - RNA, 19 nt, Artificial Sequence
  Description of Artificial Sequence: Synthetic oligonucleotide
  Sense strand starting at position 2646 of SEQ ID NO: 1241121
ugcagcuuucgauccgagu

SEQ ID NO: 1248451 - RNA, 19 nt, Artificial Sequence
  Description of Artificial Sequence: Synthetic oligonucleotide
  Antisense strand to SEQ ID NO: 1248450
acucggaucgaaagcugca

SEQ ID NO: 1248452 - RNA, 19 nt, Artificial Sequence
  Description of Artificial Sequence: Synthetic oligonucleotide
  Sense strand starting at position 2657 of SEQ ID NO: 1241121
auccgagucucauugaaau

SEQ ID NO: 1248453 - RNA, 19 nt, Artificial Sequence
  Description of Artificial Sequence: Synthetic oligonucleotide
  Antisense strand to SEQ ID NO: 1248452
auuucaaugagacucggau

SEQ ID NO: 1248454 - RNA, 19 nt, Artificial Sequence
  Description of Artificial Sequence: Synthetic oligonucleotide
  Sense strand starting at position 2711 of SEQ ID NO: 1241121
agaagaguuacaggcacuu

SEQ ID NO: 1248455 - RNA, 19 nt, Artificial Sequence
  Description of Artificial Sequence: Synthetic oligonucleotide
  Antisense strand to SEQ ID NO: 1248454
aagugccuguaacucuucu

SEQ ID NO: 1248456 - RNA, 19 nt, Artificial Sequence
  Description of Artificial Sequence: Synthetic oligonucleotide
  Sense strand starting at position 2730 of SEQ ID NO: 1241121
ggacguggaucugaugagu

SEQ ID NO: 1248457 - RNA, 19 nt, Artificial Sequence
  Description of Artificial Sequence: Synthetic oligonucleotide
  Antisense strand to SEQ ID NO: 1248456
acucaucagauccacgucc

SEQ ID NO: 1248458 - RNA, 19 nt, Artificial Sequence
  Description of Artificial Sequence: Synthetic oligonucleotide
  Sense strand starting at position 2733 of SEQ ID NO: 1241121
cguggaucugaugaguuca

SEQ ID NO: 1248459 - RNA, 19 nt, Artificial Sequence
  Description of Artificial Sequence: Synthetic oligonucleotide
  Antisense strand to SEQ ID NO: 1248458
ugaacucaucagauccacg

SEQ ID NO: 1248460 - RNA, 19 nt, Artificial Sequence
  Description of Artificial Sequence: Synthetic oligonucleotide
  Sense strand starting at position 2832 of SEQ ID NO: 1241121
agauguuuauacuacagca

SEQ ID NO: 1248461 - RNA, 19 nt, Artificial Sequence
  Description of Artificial Sequence: Synthetic oligonucleotide
  Antisense strand to SEQ ID NO: 1248460
ugcuguaguauaaacaucu

SEQ ID NO: 1248462 - RNA, 19 nt, Artificial Sequence
  Description of Artificial Sequence: Synthetic oligonucleotide
  Sense strand starting at position 2896 of SEQ ID NO: 1241121
aaacgcuuagcaggaguau

SEQ ID NO: 1248463 - RNA, 19 nt, Artificial Sequence
  Description of Artificial Sequence: Synthetic oligonucleotide
  Antisense strand to SEQ ID NO: 1248462
auacuccugcuaagcguuu

SEQ ID NO: 1248464 - RNA, 19 nt, Artificial Sequence
  Description of Artificial Sequence: Synthetic oligonucleotide
  Sense strand starting at position 2897 of SEQ ID NO: 1241121
aacgcuuagcaggaguaua

SEQ ID NO: 1248465 - RNA, 19 nt, Artificial Sequence
  Description of Artificial Sequence: Synthetic oligonucleotide
  Antisense strand to SEQ ID NO: 1248464
uauacuccugcuaagcguu

SEQ ID NO: 1248466 - RNA, 19 nt, Artificial Sequence
  Description of Artificial Sequence: Synthetic oligonucleotide
  Sense strand starting at position 2965 of SEQ ID NO: 1241121
uuugaaauauucuaggaug

SEQ ID NO: 1248467 - RNA, 19 nt, Artificial Sequence
  Description of Artificial Sequence: Synthetic oligonucleotide
  Antisense strand to SEQ ID NO: 1248466
cauccuagaauauuucaaa

SEQ ID NO: 1248468 - RNA, 19 nt, Artificial Sequence
  Description of Artificial Sequence: Synthetic oligonucleotide
  Sense strand starting at position 2968 of SEQ ID NO: 1241121
gaaauauucuaggaugagu

SEQ ID NO: 1248469 - RNA, 19 nt, Artificial Sequence
  Description of Artificial Sequence: Synthetic oligonucleotide
  Antisense strand to SEQ ID NO: 1248468
acucauccuagaauauuuc

SEQ ID NO: 1248470 - RNA, 19 nt, Artificial Sequence
  Description of Artificial Sequence: Synthetic oligonucleotide
  Sense strand starting at position 3014 of SEQ ID NO: 1241121
gcuuacaugucagacagaa

SEQ ID NO: 1248471 - RNA, 19 nt, Artificial Sequence
  Description of Artificial Sequence: Synthetic oligonucleotide
  Antisense strand to SEQ ID NO: 1248470
uucugucugacauguaagc

SEQ ID NO: 1248472 - RNA, 19 nt, Artificial Sequence
  Description of Artificial Sequence: Synthetic oligonucleotide
  Sense strand starting at position 3410 of SEQ ID NO: 1241121
ugggaauaauaccuguauc

SEQ ID NO: 1248473 - RNA, 19 nt, Artificial Sequence
  Description of Artificial Sequence: Synthetic oligonucleotide
  Antisense strand to SEQ ID NO: 1248472
gauacagguauuauuccca

SEQ ID NO: 1248474 - RNA, 19 nt, Artificial Sequence
  Description of Artificial Sequence: Synthetic oligonucleotide
  Sense strand starting at position 3426 of SEQ ID NO: 1241121
aucauuaggucuugaagau

SEQ ID NO: 1248475 - RNA, 19 nt, Artificial Sequence
  Description of Artificial Sequence: Synthetic oligonucleotide
  Antisense strand to SEQ ID NO: 1248474
aucuucaagaccuaaugau

SEQ ID NO: 1248476 - RNA, 19 nt, Artificial Sequence
  Description of Artificial Sequence: Synthetic oligonucleotide
  Sense strand starting at position 3435 of SEQ ID NO: 1241121
ucuugaagauuagaugaaa

SEQ ID NO: 1248477 - RNA, 19 nt, Artificial Sequence
  Description of Artificial Sequence: Synthetic oligonucleotide
  Antisense strand to SEQ ID NO: 1248476
uuucaucuaaucuucaaga

SEQ ID NO: 1248478 - RNA, 19 nt, Artificial Sequence
  Description of Artificial Sequence: Synthetic oligonucleotide
  Sense strand starting at position 3892 of SEQ ID NO: 1241121
aggugauguugugacagau

SEQ ID NO: 1248479 - RNA, 19 nt, Artificial Sequence
  Description of Artificial Sequence: Synthetic oligonucleotide
  Antisense strand to SEQ ID NO: 1248478
aucugucacaacaucaccu

SEQ ID NO: 1248480 - RNA, 19 nt, Artificial Sequence
  Description of Artificial Sequence: Synthetic oligonucleotide
  Sense strand starting at position 14 of SEQ ID NO: 1241122
agaggucucucaucuugag

SEQ ID NO: 1248481 - RNA, 19 nt, Artificial Sequence
  Description of Artificial Sequence: Synthetic oligonucleotide
  Antisense strand to SEQ ID NO: 1248480
cucaagaugagagaccucu

SEQ ID NO: 1248482 - RNA, 19 nt, Artificial Sequence
  Description of Artificial Sequence: Synthetic oligonucleotide
  Sense strand starting at position 18 of SEQ ID NO: 1241122
gucucucaucuugagaaca

SEQ ID NO: 1248483 - RNA, 19 nt, Artificial Sequence
  Description of Artificial Sequence: Synthetic oligonucleotide
  Antisense strand to SEQ ID NO: 1248482
uguucucaagaugagagac

SEQ ID NO: 1248484 - RNA, 19 nt, Artificial Sequence
  Description of Artificial Sequence: Synthetic oligonucleotide
  Sense strand starting at position 37 of SEQ ID NO: 1241122
gacccaugguaagauuuau

SEQ ID NO: 1248485 - RNA, 19 nt, Artificial Sequence
  Description of Artificial Sequence: Synthetic oligonucleotide
  Antisense strand to SEQ ID NO: 1248484
auaaaucuuaccauggguc

SEQ ID NO: 1248486 - RNA, 19 nt, Artificial Sequence
  Description of Artificial Sequence: Synthetic oligonucleotide
  Sense strand starting at position 430 of SEQ ID NO: 1241122
guuucuuuccagcacaagu

SEQ ID NO: 1248487 - RNA, 19 nt, Artificial Sequence
  Description of Artificial Sequence: Synthetic oligonucleotide
  Antisense strand to SEQ ID NO: 1248486
acuugugcuggaaagaaac

SEQ ID NO: 1248488 - RNA, 19 nt, Artificial Sequence
  Description of Artificial Sequence: Synthetic oligonucleotide
  Sense strand starting at position 483 of SEQ ID NO: 1241122
gggaaaugucuugguugau

SEQ ID NO: 1248489 - RNA, 19 nt, Artificial Sequence
  Description of Artificial Sequence: Synthetic oligonucleotide
  Antisense strand to SEQ ID NO: 1248488
aucaaccaagacauuuccc

SEQ ID NO: 1248490 - RNA, 19 nt, Artificial Sequence
  Description of Artificial Sequence: Synthetic oligonucleotide
  Sense strand starting at position 484 of SEQ ID NO: 1241122
ggaaaugucuugguugauu

SEQ ID NO: 1248491 - RNA, 19 nt, Artificial Sequence
  Description of Artificial Sequence: Synthetic oligonucleotide
  Antisense strand to SEQ ID NO: 1248490
aaucaaccaagacauuucc

SEQ ID NO: 1248492 - RNA, 19 nt, Artificial Sequence
  Description of Artificial Sequence: Synthetic oligonucleotide
  Sense strand starting at position 578 of SEQ ID NO: 1241122
uucuauguucuagggauag

SEQ ID NO: 1248493 - RNA, 19 nt, Artificial Sequence
  Description of Artificial Sequence: Synthetic oligonucleotide
  Antisense strand to SEQ ID NO: 1248492
cuaucccuagaacauagaa

SEQ ID NO: 1248494 - RNA, 19 nt, Artificial Sequence
  Description of Artificial Sequence: Synthetic oligonucleotide
  Sense strand starting at position 601 of SEQ ID NO: 1241122
caaggacuuggucacugua

SEQ ID NO: 1248495 - RNA, 19 nt, Artificial Sequence
  Description of Artificial Sequence: Synthetic oligonucleotide
  Antisense strand to SEQ ID NO: 1248494
uacagugaccaaguccuug

SEQ ID NO: 1248496 - RNA, 19 nt, Artificial Sequence
  Description of Artificial Sequence: Synthetic oligonucleotide
  Sense strand starting at position 604 of SEQ ID NO: 1241122
ggacuuggucacuguaaca

SEQ ID NO: 1248497 - RNA, 19 nt, Artificial Sequence
  Description of Artificial Sequence: Synthetic oligonucleotide
  Antisense strand to SEQ ID NO: 1248496
uguuacagugaccaagucc

SEQ ID NO: 1248498 - RNA, 19 nt, Artificial Sequence
  Description of Artificial Sequence: Synthetic oligonucleotide
  Sense strand starting at position 665 of SEQ ID NO: 1241122
ccugguaacuccuuguuua

SEQ ID NO: 1248499 - RNA, 19 nt, Artificial Sequence
  Description of Artificial Sequence: Synthetic oligonucleotide
  Antisense strand to SEQ ID NO: 1248498
uaaacaaggaguuaccagg

SEQ ID NO: 1248500 - RNA, 19 nt, Artificial Sequence
  Description of Artificial Sequence: Synthetic oligonucleotide
  Sense strand starting at position 666 of SEQ ID NO: 1241122
cugguaacuccuuguuuaa

SEQ ID NO: 1248501 - RNA, 19 nt, Artificial Sequence
  Description of Artificial Sequence: Synthetic oligonucleotide
  Antisense strand to SEQ ID NO: 1248500
uuaaacaaggaguuaccag

SEQ ID NO: 1248502 - RNA, 19 nt, Artificial Sequence
  Description of Artificial Sequence: Synthetic oligonucleotide
  Sense strand starting at position 668 of SEQ ID NO: 1241122
gguaacuccuuguuuaaau

SEQ ID NO: 1248503 - RNA, 19 nt, Artificial Sequence
  Description of Artificial Sequence: Synthetic oligonucleotide
  Antisense strand to SEQ ID NO: 1248502
auuuaaacaaggaguuacc

SEQ ID NO: 1248504 - RNA, 19 nt, Artificial Sequence
  Description of Artificial Sequence: Synthetic oligonucleotide
  Sense strand starting at position 669 of SEQ ID NO: 1241122
guaacuccuuguuuaaauu

SEQ ID NO: 1248505 - RNA, 19 nt, Artificial Sequence
  Description of Artificial Sequence: Synthetic oligonucleotide
  Antisense strand to SEQ ID NO: 1248504
aauuuaaacaaggaguuac

SEQ ID NO: 1248506 - RNA, 19 nt, Artificial Sequence
  Description of Artificial Sequence: Synthetic oligonucleotide
  Sense strand starting at position 1202 of SEQ ID NO: 1241122
auuccacaccguuagucaa

SEQ ID NO: 1248507 - RNA, 19 nt, Artificial Sequence
  Description of Artificial Sequence: Synthetic oligonucleotide
  Antisense strand to SEQ ID NO: 1248506
uugacuaacgguguggaau

SEQ ID NO: 1248508 - RNA, 19 nt, Artificial Sequence
  Description of Artificial Sequence: Synthetic oligonucleotide
  Sense strand starting at position 1324 of SEQ ID NO: 1241122
uacagacauucuuugcgga

SEQ ID NO: 1248509 - RNA, 19 nt, Artificial Sequence
  Description of Artificial Sequence: Synthetic oligonucleotide
  Antisense strand to SEQ ID NO: 1248508
uccgcaaagaaugucugua

SEQ ID NO: 1248510 - RNA, 19 nt, Artificial Sequence
  Description of Artificial Sequence: Synthetic oligonucleotide
  Sense strand starting at position 1325 of SEQ ID NO: 1241122
acagacauucuuugcggau

SEQ ID NO: 1248511 - RNA, 19 nt, Artificial Sequence
  Description of Artificial Sequence: Synthetic oligonucleotide
  Antisense strand to SEQ ID NO: 1248510
auccgcaaagaaugucugu

SEQ ID NO: 1248512 - RNA, 19 nt, Artificial Sequence
  Description of Artificial Sequence: Synthetic oligonucleotide
  Sense strand starting at position 1326 of SEQ ID NO: 1241122
cagacauucuuugcggauc

SEQ ID NO: 1248513 - RNA, 19 nt, Artificial Sequence
  Description of Artificial Sequence: Synthetic oligonucleotide
  Antisense strand to SEQ ID NO: 1248512
gauccgcaaagaaugucug

SEQ ID NO: 1248514 - RNA, 19 nt, Artificial Sequence
  Description of Artificial Sequence: Synthetic oligonucleotide
  Sense strand starting at position 1342 of SEQ ID NO: 1241122
aucuuuggccaguaacaug

SEQ ID NO: 1248515 - RNA, 19 nt, Artificial Sequence
  Description of Artificial Sequence: Synthetic oligonucleotide
  Antisense strand to SEQ ID NO: 1248514
cauguuacuggccaaagau

SEQ ID NO: 1248516 - RNA, 19 nt, Artificial Sequence
  Description of Artificial Sequence: Synthetic oligonucleotide
  Sense strand starting at position 1424 of SEQ ID NO: 1241122
gauaaagugcucgccgcuu

SEQ ID NO: 1248517 - RNA, 19 nt, Artificial Sequence
  Description of Artificial Sequence: Synthetic oligonucleotide
  Antisense strand to SEQ ID NO: 1248516
aagcggcgagcacuuuauc

SEQ ID NO: 1248518 - RNA, 19 nt, Artificial Sequence
  Description of Artificial Sequence: Synthetic oligonucleotide
  Sense strand starting at position 1429 of SEQ ID NO: 1241122
agugcucgccgcuugaaga

SEQ ID NO: 1248519 - RNA, 19 nt, Artificial Sequence
  Description of Artificial Sequence: Synthetic oligonucleotide
  Antisense strand to SEQ ID NO: 1248518
ucuucaagcggcgagcacu

SEQ ID NO: 1248520 - RNA, 19 nt, Artificial Sequence
  Description of Artificial Sequence: Synthetic oligonucleotide
  Sense strand starting at position 1538 of SEQ ID NO: 1241122
auaaucauucucgggaaca

SEQ ID NO: 1248521 - RNA, 19 nt, Artificial Sequence
  Description of Artificial Sequence: Synthetic oligonucleotide
  Antisense strand to SEQ ID NO: 1248520
uguucccgagaaugauuau

SEQ ID NO: 1248522 - RNA, 19 nt, Artificial Sequence
  Description of Artificial Sequence: Synthetic oligonucleotide
  Sense strand starting at position 1586 of SEQ ID NO: 1241122
cucuguuacgcuuaaaggu

SEQ ID NO: 1248523 - RNA, 19 nt, Artificial Sequence
  Description of Artificial Sequence: Synthetic oligonucleotide
  Antisense strand to SEQ ID NO: 1248522
accuuuaagcguaacagag

SEQ ID NO: 1248524 - RNA, 19 nt, Artificial Sequence
  Description of Artificial Sequence: Synthetic oligonucleotide
  Sense strand starting at position 1599 of SEQ ID NO: 1241122
aaagguucuggcugucaac

SEQ ID NO: 1248525 - RNA, 19 nt, Artificial Sequence
  Description of Artificial Sequence: Synthetic oligonucleotide
  Antisense strand to SEQ ID NO: 1248524
guugacagccagaaccuuu

SEQ ID NO: 1248526 - RNA, 19 nt, Artificial Sequence
  Description of Artificial Sequence: Synthetic oligonucleotide
  Sense strand starting at position 2781 of SEQ ID NO: 1241122
cccguaaagggcugaucuu

SEQ ID NO: 1248527 - RNA, 19 nt, Artificial Sequence
  Description of Artificial Sequence: Synthetic oligonucleotide
  Antisense strand to SEQ ID NO: 1248526
aagaucagcccuuuacggg

SEQ ID NO: 1248528 - RNA, 19 nt, Artificial Sequence
  Description of Artificial Sequence: Synthetic oligonucleotide
  Sense strand starting at position 2943 of SEQ ID NO: 1241122
gauagauuaugcguuucca

SEQ ID NO: 1248529 - RNA, 19 nt, Artificial Sequence
  Description of Artificial Sequence: Synthetic oligonucleotide
  Antisense strand to SEQ ID NO: 1248528
uggaaacgcauaaucuauc

SEQ ID NO: 1248530 - RNA, 19 nt, Artificial Sequence
  Description of Artificial Sequence: Synthetic oligonucleotide
  Sense strand starting at position 2979 of SEQ ID NO: 1241122
gcgagccguuugauagaaa

SEQ ID NO: 1248531 - RNA, 19 nt, Artificial Sequence
  Description of Artificial Sequence: Synthetic oligonucleotide
  Antisense strand to SEQ ID NO: 1248530
uuucuaucaaacggcucgc

SEQ ID NO: 1248532 - RNA, 19 nt, Artificial Sequence
  Description of Artificial Sequence: Synthetic oligonucleotide
  Sense strand starting at position 2982 of SEQ ID NO: 1241122
agccguuugauagaaacca

SEQ ID NO: 1248533 - RNA, 19 nt, Artificial Sequence
  Description of Artificial Sequence: Synthetic oligonucleotide
  Antisense strand to SEQ ID NO: 1248532
ugguuucuaucaaacggcu

SEQ ID NO: 1248534 - RNA, 19 nt, Artificial Sequence
  Description of Artificial Sequence: Synthetic oligonucleotide
  Sense strand starting at position 3044 of SEQ ID NO: 1241122
aggcgagugaaugaauuau

SEQ ID NO: 1248535 - RNA, 19 nt, Artificial Sequence
  Description of Artificial Sequence: Synthetic oligonucleotide
  Antisense strand to SEQ ID NO: 1248534
auaauucauucacucgccu

SEQ ID NO: 1248536 - RNA, 19 nt, Artificial Sequence
  Description of Artificial Sequence: Synthetic oligonucleotide
  Sense strand starting at position 3218 of SEQ ID NO: 1241122
gacuucugugagggaagau

SEQ ID NO: 1248537 - RNA, 19 nt, Artificial Sequence
  Description of Artificial Sequence: Synthetic oligonucleotide
  Antisense strand to SEQ ID NO: 1248536
aucuucccucacagaaguc

SEQ ID NO: 1248538 - RNA, 19 nt, Artificial Sequence
  Description of Artificial Sequence: Synthetic oligonucleotide
  Sense strand starting at position 3353 of SEQ ID NO: 1241122
ugcuuagaguuucuggaaa

SEQ ID NO: 1248539 - RNA, 19 nt, Artificial Sequence
  Description of Artificial Sequence: Synthetic oligonucleotide
  Antisense strand to SEQ ID NO: 1248538
uuuccagaaacucuaagca

SEQ ID NO: 1248540 - RNA, 19 nt, Artificial Sequence
  Description of Artificial Sequence: Synthetic oligonucleotide
  Sense strand starting at position 3406 of SEQ ID NO: 1241122
uaguguucggaagguuaca

SEQ ID NO: 1248541 - RNA, 19 nt, Artificial Sequence
  Description of Artificial Sequence: Synthetic oligonucleotide
  Antisense strand to SEQ ID NO: 1248540
uguaaccuuccgaacacua

SEQ ID NO: 1248542 - RNA, 19 nt, Artificial Sequence
  Description of Artificial Sequence: Synthetic oligonucleotide
  Sense strand starting at position 3418 of SEQ ID NO: 1241122
gguuacaagagcuacuguu

SEQ ID NO: 1248543 - RNA, 19 nt, Artificial Sequence
  Description of Artificial Sequence: Synthetic oligonucleotide
  Antisense strand to SEQ ID NO: 1248542
aacaguagcucuuguaacc

SEQ ID NO: 1248544 - RNA, 19 nt, Artificial Sequence
  Description of Artificial Sequence: Synthetic oligonucleotide
  Sense strand starting at position 3646 of SEQ ID NO: 1241122
ugggaugacugcucagaag

SEQ ID NO: 1248545 - RNA, 19 nt, Artificial Sequence
  Description of Artificial Sequence: Synthetic oligonucleotide
  Antisense strand to SEQ ID NO: 1248544
cuucugagcagucauccca

SEQ ID NO: 1248546 - RNA, 19 nt, Artificial Sequence
  Description of Artificial Sequence: Synthetic oligonucleotide
  Sense strand starting at position 3710 of SEQ ID NO: 1241122
uaguguucugcagaagccu

SEQ ID NO: 1248547 - RNA, 19 nt, Artificial Sequence
  Description of Artificial Sequence: Synthetic oligonucleotide
  Antisense strand to SEQ ID NO: 1248546
aggcuucugcagaacacua

SEQ ID NO: 1248548 - RNA, 19 nt, Artificial Sequence
  Description of Artificial Sequence: Synthetic oligonucleotide
  Sense strand starting at position 3726 of SEQ ID NO: 1241122
ccuugugcuguaguaaguu

SEQ ID NO: 1248549 - RNA, 19 nt, Artificial Sequence
  Description of Artificial Sequence: Synthetic oligonucleotide
  Antisense strand to SEQ ID NO: 1248548
aacuuacuacagcacaagg

SEQ ID NO: 1248550 - RNA, 19 nt, Artificial Sequence
  Description of Artificial Sequence: Synthetic oligonucleotide
  Sense strand starting at position 3732 of SEQ ID NO: 1241122
gcuguaguaaguuaucauu

SEQ ID NO: 1248551 - RNA, 19 nt, Artificial Sequence
  Description of Artificial Sequence: Synthetic oligonucleotide
  Antisense strand to SEQ ID NO: 1248550
aaugauaacuuacuacagc

SEQ ID NO: 1248552 - RNA, 19 nt, Artificial Sequence
  Description of Artificial Sequence: Synthetic oligonucleotide
  Sense strand starting at position 3734 of SEQ ID NO: 1241122
uguaguaaguuaucauucu

SEQ ID NO: 1248553 - RNA, 19 nt, Artificial Sequence
  Description of Artificial Sequence: Synthetic oligonucleotide
  Antisense strand to SEQ ID NO: 1248552
agaaugauaacuuacuaca

SEQ ID NO: 1248554 - RNA, 19 nt, Artificial Sequence
  Description of Artificial Sequence: Synthetic oligonucleotide
  Sense strand starting at position 3868 of SEQ ID NO: 1241122
gcaaguuaucggcuucagu

SEQ ID NO: 1248555 - RNA, 19 nt, Artificial Sequence
  Description of Artificial Sequence: Synthetic oligonucleotide
  Antisense strand to SEQ ID NO: 1248554
acugaagccgauaacuugc

SEQ ID NO: 1248556 - RNA, 19 nt, Artificial Sequence
  Description of Artificial Sequence: Synthetic oligonucleotide
  Sense strand starting at position 3886 of SEQ ID NO: 1241122
uggucugucagaugacaag

SEQ ID NO: 1248557 - RNA, 19 nt, Artificial Sequence
  Description of Artificial Sequence: Synthetic oligonucleotide
  Antisense strand to SEQ ID NO: 1248556
cuugucaucugacagacca

SEQ ID NO: 1248558 - RNA, 19 nt, Artificial Sequence
  Description of Artificial Sequence: Synthetic oligonucleotide
  Sense strand starting at position 3946 of SEQ ID NO: 1241122
ugaaauagacucuguagau

SEQ ID NO: 1248559 - RNA, 19 nt, Artificial Sequence
  Description of Artificial Sequence: Synthetic oligonucleotide
  Antisense strand to SEQ ID NO: 1248558
aucuacagagucuauuuca

SEQ ID NO: 1248560 - RNA, 19 nt, Artificial Sequence
  Description of Artificial Sequence: Synthetic oligonucleotide
  Sense strand starting at position 576 of SEQ ID NO: 1241123
gcauguuaacuaugaauaa

SEQ ID NO: 1248561 - RNA, 19 nt, Artificial Sequence
  Description of Artificial Sequence: Synthetic oligonucleotide
  Antisense strand to SEQ ID NO: 1248560
uuauucauaguuaacaugc

SEQ ID NO: 1248562 - RNA, 19 nt, Artificial Sequence
  Description of Artificial Sequence: Synthetic oligonucleotide
  Sense strand starting at position 735 of SEQ ID NO: 1241123
ucagucagacuccaaaguu

SEQ ID NO: 1248563 - RNA, 19 nt, Artificial Sequence
  Description of Artificial Sequence: Synthetic oligonucleotide
  Antisense strand to SEQ ID NO: 1248562
aacuuuggagucugacuga

SEQ ID NO: 1248564 - RNA, 19 nt, Artificial Sequence
  Description of Artificial Sequence: Synthetic oligonucleotide
  Sense strand starting at position 843 of SEQ ID NO: 1241123
cuaggauagcaucaugcaa

SEQ ID NO: 1248565 - RNA, 19 nt, Artificial Sequence
  Description of Artificial Sequence: Synthetic oligonucleotide
  Antisense strand to SEQ ID NO: 1248564
uugcaugaugcuauccuag

SEQ ID NO: 1248566 - RNA, 19 nt, Artificial Sequence
  Description of Artificial Sequence: Synthetic oligonucleotide
  Sense strand starting at position 901 of SEQ ID NO: 1241123
uugaucaguagcuggagaa

SEQ ID NO: 1248567 - RNA, 19 nt, Artificial Sequence
  Description of Artificial Sequence: Synthetic oligonucleotide
  Antisense strand to SEQ ID NO: 1248566
uucuccagcuacugaucaa

SEQ ID NO: 1248568 - RNA, 19 nt, Artificial Sequence
  Description of Artificial Sequence: Synthetic oligonucleotide
  Sense strand starting at position 902 of SEQ ID NO: 1241123
ugaucaguagcuggagaau

SEQ ID NO: 1248569 - RNA, 19 nt, Artificial Sequence
  Description of Artificial Sequence: Synthetic oligonucleotide
  Antisense strand to SEQ ID NO: 1248568
auucuccagcuacugauca

SEQ ID NO: 1248570 - RNA, 19 nt, Artificial Sequence
  Description of Artificial Sequence: Synthetic oligonucleotide
  Sense strand starting at position 1100 of SEQ ID NO: 1241123
uguuauugagaaggucaaa

SEQ ID NO: 1248571 - RNA, 19 nt, Artificial Sequence
  Description of Artificial Sequence: Synthetic oligonucleotide
  Antisense strand to SEQ ID NO: 1248570
uuugaccuucucaauaaca

SEQ ID NO: 1248572 - RNA, 19 nt, Artificial Sequence
  Description of Artificial Sequence: Synthetic oligonucleotide
  Sense strand starting at position 1225 of SEQ ID NO: 1241123
ucucauuaaguguauuaca

SEQ ID NO: 1248573 - RNA, 19 nt, Artificial Sequence
  Description of Artificial Sequence: Synthetic oligonucleotide
  Antisense strand to SEQ ID NO: 1248572
uguaauacacuuaaugaga

SEQ ID NO: 1248574 - RNA, 19 nt, Artificial Sequence
  Description of Artificial Sequence: Synthetic oligonucleotide
  Sense strand starting at position 1431 of SEQ ID NO: 1241123
acaauaaaugugcauugua

SEQ ID NO: 1248575 - RNA, 19 nt, Artificial Sequence
  Description of Artificial Sequence: Synthetic oligonucleotide
  Antisense strand to SEQ ID NO: 1248574
uacaaugcacauuuauugu

SEQ ID NO: 1248576 - RNA, 19 nt, Artificial Sequence
  Description of Artificial Sequence: Synthetic oligonucleotide
  Sense strand starting at position 1547 of SEQ ID NO: 1241123
ucucuucaccgagaggagu

SEQ ID NO: 1248577 - RNA, 19 nt, Artificial Sequence
  Description of Artificial Sequence: Synthetic oligonucleotide
  Antisense strand to SEQ ID NO: 1248576
acuccucucggugaagaga

SEQ ID NO: 1248578 - RNA, 19 nt, Artificial Sequence
  Description of Artificial Sequence: Synthetic oligonucleotide
  Sense strand starting at position 1558 of SEQ ID NO: 1241123
agaggaguacacgguauau

SEQ ID NO: 1248579 - RNA, 19 nt, Artificial Sequence
  Description of Artificial Sequence: Synthetic oligonucleotide
  Antisense strand to SEQ ID NO: 1248578
auauaccguguacuccucu

SEQ ID NO: 1248580 - RNA, 19 nt, Artificial Sequence
  Description of Artificial Sequence: Synthetic oligonucleotide
  Sense strand starting at position 1569 of SEQ ID NO: 1241123
cgguauauacucgagaaca

SEQ ID NO: 1248581 - RNA, 19 nt, Artificial Sequence
  Description of Artificial Sequence: Synthetic oligonucleotide
  Antisense strand to SEQ ID NO: 1248580
uguucucgaguauauaccg

SEQ ID NO: 1248582 - RNA, 19 nt, Artificial Sequence
  Description of Artificial Sequence: Synthetic oligonucleotide
  Sense strand starting at position 1611 of SEQ ID NO: 1241123
caccauaucggcuaggaaa

SEQ ID NO: 1248583 - RNA, 19 nt, Artificial Sequence
  Description of Artificial Sequence: Synthetic oligonucleotide
  Antisense strand to SEQ ID NO: 1248582
uuuccuagccgauauggug

SEQ ID NO: 1248584 - RNA, 19 nt, Artificial Sequence
  Description of Artificial Sequence: Synthetic oligonucleotide
  Sense strand starting at position 2020 of SEQ ID NO: 1241123
ggaagcaguaugugaauga

SEQ ID NO: 1248585 - RNA, 19 nt, Artificial Sequence
  Description of Artificial Sequence: Synthetic oligonucleotide
  Antisense strand to SEQ ID NO: 1248584
ucauucacauacugcuucc

SEQ ID NO: 1248586 - RNA, 19 nt, Artificial Sequence
  Description of Artificial Sequence: Synthetic oligonucleotide
  Sense strand starting at position 2029 of SEQ ID NO: 1241123
augugaaugacguagaagu

SEQ ID NO: 1248587 - RNA, 19 nt, Artificial Sequence
  Description of Artificial Sequence: Synthetic oligonucleotide
  Antisense strand to SEQ ID NO: 1248586
acuucuacgucauucacau

SEQ ID NO: 1248588 - RNA, 19 nt, Artificial Sequence
  Description of Artificial Sequence: Synthetic oligonucleotide
  Sense strand starting at position 2031 of SEQ ID NO: 1241123
gugaaugacguagaaguau

SEQ ID NO: 1248589 - RNA, 19 nt, Artificial Sequence
  Description of Artificial Sequence: Synthetic oligonucleotide
  Antisense strand to SEQ ID NO: 1248588
auacuucuacgucauucac

SEQ ID NO: 1248590 - RNA, 19 nt, Artificial Sequence
  Description of Artificial Sequence: Synthetic oligonucleotide
  Sense strand starting at position 2241 of SEQ ID NO: 1241123
acuguuaugcuuuacagag

SEQ ID NO: 1248591 - RNA, 19 nt, Artificial Sequence
  Description of Artificial Sequence: Synthetic oligonucleotide
  Antisense strand to SEQ ID NO: 1248590
cucuguaaagcauaacagu

SEQ ID NO: 1248592 - RNA, 19 nt, Artificial Sequence
  Description of Artificial Sequence: Synthetic oligonucleotide
  Sense strand starting at position 2463 of SEQ ID NO: 1241123
ucaacugcccagggauauu

SEQ ID NO: 1248593 - RNA, 19 nt, Artificial Sequence
  Description of Artificial Sequence: Synthetic oligonucleotide
  Antisense strand to SEQ ID NO: 1248592
aauaucccugggcaguuga

SEQ ID NO: 1248594 - RNA, 19 nt, Artificial Sequence
  Description of Artificial Sequence: Synthetic oligonucleotide
  Sense strand starting at position 2559 of SEQ ID NO: 1241123
agauuuauauagcaugaga

SEQ ID NO: 1248595 - RNA, 19 nt, Artificial Sequence
  Description of Artificial Sequence: Synthetic oligonucleotide
  Antisense strand to SEQ ID NO: 1248594
ucucaugcuauauaaaucu

SEQ ID NO: 1248596 - RNA, 19 nt, Artificial Sequence
  Description of Artificial Sequence: Synthetic oligonucleotide
  Sense strand starting at position 2591 of SEQ ID NO: 1241123
acaguaauuuagcugcuga

SEQ ID NO: 1248597 - RNA, 19 nt, Artificial Sequence
  Description of Artificial Sequence: Synthetic oligonucleotide
  Antisense strand to SEQ ID NO: 1248596
ucagcagcuaaauuacugu

SEQ ID NO: 1248598 - RNA, 19 nt, Artificial Sequence
  Description of Artificial Sequence: Synthetic oligonucleotide
  Sense strand starting at position 2596 of SEQ ID NO: 1241123
aauuuagcugcugagcgau

SEQ ID NO: 1248599 - RNA, 19 nt, Artificial Sequence
  Description of Artificial Sequence: Synthetic oligonucleotide
  Antisense strand to SEQ ID NO: 1248598
aucgcucagcagcuaaauu

SEQ ID NO: 1248600 - RNA, 19 nt, Artificial Sequence
  Description of Artificial Sequence: Synthetic oligonucleotide
  Sense strand starting at position 2608 of SEQ ID NO: 1241123
gagcgaucacacugggaaa

SEQ ID NO: 1248601 - RNA, 19 nt, Artificial Sequence
  Description of Artificial Sequence: Synthetic oligonucleotide
  Antisense strand to SEQ ID NO: 1248600
uuucccagugugaucgcuc

SEQ ID NO: 1248602 - RNA, 19 nt, Artificial Sequence
  Description of Artificial Sequence: Synthetic oligonucleotide
  Sense strand starting at position 2930 of SEQ ID NO: 1241123
uccaaaucacuguggaaga

SEQ ID NO: 1248603 - RNA, 19 nt, Artificial Sequence
  Description of Artificial Sequence: Synthetic oligonucleotide
  Antisense strand to SEQ ID NO: 1248602
ucuuccacagugauuugga

SEQ ID NO: 1248604 - RNA, 19 nt, Artificial Sequence
  Description of Artificial Sequence: Synthetic oligonucleotide
  Sense strand starting at position 2958 of SEQ ID NO: 1241123
agugaaauucccuaguaug

SEQ ID NO: 1248605 - RNA, 19 nt, Artificial Sequence
  Description of Artificial Sequence: Synthetic oligonucleotide
  Antisense strand to SEQ ID NO: 1248604
cauacuagggaauuucacu

SEQ ID NO: 1248606 - RNA, 19 nt, Artificial Sequence
  Description of Artificial Sequence: Synthetic oligonucleotide
  Sense strand starting at position 2997 of SEQ ID NO: 1241123
ccugcuuaaguguagaaua

SEQ ID NO: 1248607 - RNA, 19 nt, Artificial Sequence
  Description of Artificial Sequence: Synthetic oligonucleotide
  Antisense strand to SEQ ID NO: 1248606
uauucuacacuuaagcagg

SEQ ID NO: 1248608 - RNA, 19 nt, Artificial Sequence
  Description of Artificial Sequence: Synthetic oligonucleotide
  Sense strand starting at position 2999 of SEQ ID NO: 1241123
ugcuuaaguguagaauaag

SEQ ID NO: 1248609 - RNA, 19 nt, Artificial Sequence
  Description of Artificial Sequence: Synthetic oligonucleotide
  Antisense strand to SEQ ID NO: 1248608
cuuauucuacacuuaagca

SEQ ID NO: 1248610 - RNA, 19 nt, Artificial Sequence
  Description of Artificial Sequence: Synthetic oligonucleotide
  Sense strand starting at position 3002 of SEQ ID NO: 1241123
uuaaguguagaauaagcau

SEQ ID NO: 1248611 - RNA, 19 nt, Artificial Sequence
  Description of Artificial Sequence: Synthetic oligonucleotide
  Antisense strand to SEQ ID NO: 1248610
augcuuauucuacacuuaa

SEQ ID NO: 1248612 - RNA, 19 nt, Artificial Sequence
  Description of Artificial Sequence: Synthetic oligonucleotide
  Sense strand starting at position 3008 of SEQ ID NO: 1241123
guagaauaagcauagcuau

SEQ ID NO: 1248613 - RNA, 19 nt, Artificial Sequence
  Description of Artificial Sequence: Synthetic oligonucleotide
  Antisense strand to SEQ ID NO: 1248612
auagcuaugcuuauucuac

SEQ ID NO: 1248614 - RNA, 19 nt, Artificial Sequence
  Description of Artificial Sequence: Synthetic oligonucleotide
  Sense strand starting at position 3212 of SEQ ID NO: 1241123
auaagagaauagucguuaa

SEQ ID NO: 1248615 - RNA, 19 nt, Artificial Sequence
  Description of Artificial Sequence: Synthetic oligonucleotide
  Antisense strand to SEQ ID NO: 1248614
uuaacgacuauucucuuau

SEQ ID NO: 1248616 - RNA, 19 nt, Artificial Sequence
  Description of Artificial Sequence: Synthetic oligonucleotide
  Sense strand starting at position 3467 of SEQ ID NO: 1241123
ugauccuugaugugagaga

SEQ ID NO: 1248617 - RNA, 19 nt, Artificial Sequence
  Description of Artificial Sequence: Synthetic oligonucleotide
  Antisense strand to SEQ ID NO: 1248616
ucucucacaucaaggauca

SEQ ID NO: 1248618 - RNA, 19 nt, Artificial Sequence
  Description of Artificial Sequence: Synthetic oligonucleotide
  Sense strand starting at position 3554 of SEQ ID NO: 1241123
ggcauuacugguuaauucu

SEQ ID NO: 1248619 - RNA, 19 nt, Artificial Sequence
  Description of Artificial Sequence: Synthetic oligonucleotide
  Antisense strand to SEQ ID NO: 1248618
agaauuaaccaguaaugcc

SEQ ID NO: 1248620 - RNA, 19 nt, Artificial Sequence
  Description of Artificial Sequence: Synthetic oligonucleotide
  Sense strand starting at position 3613 of SEQ ID NO: 1241123
ucagaaagaguaugcugau

SEQ ID NO: 1248621 - RNA, 19 nt, Artificial Sequence
  Description of Artificial Sequence: Synthetic oligonucleotide
  Antisense strand to SEQ ID NO: 1248620
aucagcauacucuuucuga

SEQ ID NO: 1248622 - RNA, 19 nt, Artificial Sequence
  Description of Artificial Sequence: Synthetic oligonucleotide
  Sense strand starting at position 3614 of SEQ ID NO: 1241123
cagaaagaguaugcugaua

SEQ ID NO: 1248623 - RNA, 19 nt, Artificial Sequence
  Description of Artificial Sequence: Synthetic oligonucleotide
  Antisense strand to SEQ ID NO: 1248622
uaucagcauacucuuucug

SEQ ID NO: 1248624 - RNA, 19 nt, Artificial Sequence
  Description of Artificial Sequence: Synthetic oligonucleotide
  Sense strand starting at position 3829 of SEQ ID NO: 1241123
gaaagagaagugugaguaa

SEQ ID NO: 1248625 - RNA, 19 nt, Artificial Sequence
  Description of Artificial Sequence: Synthetic oligonucleotide
  Antisense strand to SEQ ID NO: 1248624
uuacucacacuucucuuuc

SEQ ID NO: 1248626 - RNA, 19 nt, Artificial Sequence
  Description of Artificial Sequence: Synthetic oligonucleotide
  Sense strand starting at position 3832 of SEQ ID NO: 1241123
agagaagugugaguaauca

SEQ ID NO: 1248627 - RNA, 19 nt, Artificial Sequence
  Description of Artificial Sequence: Synthetic oligonucleotide
  Antisense strand to SEQ ID NO: 1248626
ugauuacucacacuucucu

SEQ ID NO: 1248628 - RNA, 19 nt, Artificial Sequence
  Description of Artificial Sequence: Synthetic oligonucleotide
  Sense strand starting at position 3917 of SEQ ID NO: 1241123
gcuaacuuauuuguuagua

SEQ ID NO: 1248629 - RNA, 19 nt, Artificial Sequence
  Description of Artificial Sequence: Synthetic oligonucleotide
  Antisense strand to SEQ ID NO: 1248628
uacuaacaaauaaguuagc

SEQ ID NO: 1248630 - RNA, 19 nt, Artificial Sequence
  Description of Artificial Sequence: Synthetic oligonucleotide
  Sense strand starting at position 3933 of SEQ ID NO: 1241123
guaagucuagcacaacuau

SEQ ID NO: 1248631 - RNA, 19 nt, Artificial Sequence
  Description of Artificial Sequence: Synthetic oligonucleotide
  Antisense strand to SEQ ID NO: 1248630
auaguugugcuagacuuac

SEQ ID NO: 1248632 - RNA, 19 nt, Artificial Sequence
  Description of Artificial Sequence: Synthetic oligonucleotide
  Sense strand starting at position 3961 of SEQ ID NO: 1241123
agucauaucgaugagcaua

SEQ ID NO: 1248633 - RNA, 19 nt, Artificial Sequence
  Description of Artificial Sequence: Synthetic oligonucleotide
  Antisense strand to SEQ ID NO: 1248632
uaugcucaucgauaugacu

SEQ ID NO: 1248634 - RNA, 19 nt, Artificial Sequence
  Description of Artificial Sequence: Synthetic oligonucleotide
  Sense strand starting at position 3964 of SEQ ID NO: 1241123
cauaucgaugagcauauau

SEQ ID NO: 1248635 - RNA, 19 nt, Artificial Sequence
  Description of Artificial Sequence: Synthetic oligonucleotide
  Antisense strand to SEQ ID NO: 1248634
auauaugcucaucgauaug

SEQ ID NO: 1248636 - RNA, 19 nt, Artificial Sequence
  Description of Artificial Sequence: Synthetic oligonucleotide
  Sense strand starting at position 3966 of SEQ ID NO: 1241123
uaucgaugagcauauauca

SEQ ID NO: 1248637 - RNA, 19 nt, Artificial Sequence
  Description of Artificial Sequence: Synthetic oligonucleotide
  Antisense strand to SEQ ID NO: 1248636
ugauauaugcucaucgaua

SEQ ID NO: 1248638 - RNA, 19 nt, Artificial Sequence
  Description of Artificial Sequence: Synthetic oligonucleotide
  Sense strand starting at position 3983 of SEQ ID NO: 1241123
caauucuagugguuugaag

SEQ ID NO: 1248639 - RNA, 19 nt, Artificial Sequence
  Description of Artificial Sequence: Synthetic oligonucleotide
  Antisense strand to SEQ ID NO: 1248638
cuucaaaccacuagaauug

SEQ ID NO: 1248640 - RNA, 19 nt, Artificial Sequence
  Description of Artificial Sequence: Synthetic oligonucleotide
  Sense strand starting at position 1786 of SEQ ID NO: 1241124
gggaguuacugccagagcu

SEQ ID NO: 1248641 - RNA, 19 nt, Artificial Sequence
  Description of Artificial Sequence: Synthetic oligonucleotide
  Antisense strand to SEQ ID NO: 1248640
agcucuggcaguaacuccc

SEQ ID NO: 1248642 - RNA, 19 nt, Artificial Sequence
  Description of Artificial Sequence: Synthetic oligonucleotide
  Sense strand starting at position 1796 of SEQ ID NO: 1241124
gccagagcuccacaaagga

SEQ ID NO: 1248643 - RNA, 19 nt, Artificial Sequence
  Description of Artificial Sequence: Synthetic oligonucleotide
  Antisense strand to SEQ ID NO: 1248642
uccuuuguggagcucuggc

SEQ ID NO: 1248644 - RNA, 19 nt, Artificial Sequence
  Description of Artificial Sequence: Synthetic oligonucleotide
  Sense strand starting at position 2331 of SEQ ID NO: 1241124
gccagaugcucugcgaauu

SEQ ID NO: 1248645 - RNA, 19 nt, Artificial Sequence
  Description of Artificial Sequence: Synthetic oligonucleotide
  Antisense strand to SEQ ID NO: 1248644
aauucgcagagcaucuggc

SEQ ID NO: 1248646 - RNA, 19 nt, Artificial Sequence
  Description of Artificial Sequence: Synthetic oligonucleotide
  Sense strand starting at position 2332 of SEQ ID NO: 1241124
ccagaugcucugcgaauuc

SEQ ID NO: 1248647 - RNA, 19 nt, Artificial Sequence
  Description of Artificial Sequence: Synthetic oligonucleotide
  Antisense strand to SEQ ID NO: 1248646
gaauucgcagagcaucugg

SEQ ID NO: 1248648 - RNA, 19 nt, Artificial Sequence
  Description of Artificial Sequence: Synthetic oligonucleotide
  Sense strand starting at position 2480 of SEQ ID NO: 1241124
uuuguauguuuccugaaag

SEQ ID NO: 1248649 - RNA, 19 nt, Artificial Sequence
  Description of Artificial Sequence: Synthetic oligonucleotide
  Antisense strand to SEQ ID NO: 1248648
cuuucaggaaacauacaaa

SEQ ID NO: 1248650 - RNA, 19 nt, Artificial Sequence
  Description of Artificial Sequence: Synthetic oligonucleotide
  Sense strand starting at position 2481 of SEQ ID NO: 1241124
uuguauguuuccugaaaga

SEQ ID NO: 1248651 - RNA, 19 nt, Artificial Sequence
  Description of Artificial Sequence: Synthetic oligonucleotide
  Antisense strand to SEQ ID NO: 1248650
ucuuucaggaaacauacaa

SEQ ID NO: 1248652 - RNA, 19 nt, Artificial Sequence
  Description of Artificial Sequence: Synthetic oligonucleotide
  Sense strand starting at position 2510 of SEQ ID NO: 1241124
gccagugucucguguggaa

SEQ ID NO: 1248653 - RNA, 19 nt, Artificial Sequence
  Description of Artificial Sequence: Synthetic oligonucleotide
  Antisense strand to SEQ ID NO: 1248652
uuccacacgagacacuggc

SEQ ID NO: 1248654 - RNA, 19 nt, Artificial Sequence
  Description of Artificial Sequence: Synthetic oligonucleotide
  Sense strand starting at position 2512 of SEQ ID NO: 1241124
cagugucucguguggaauc

SEQ ID NO: 1248655 - RNA, 19 nt, Artificial Sequence
  Description of Artificial Sequence: Synthetic oligonucleotide
  Antisense strand to SEQ ID NO: 1248654
gauuccacacgagacacug

SEQ ID NO: 1248656 - RNA, 19 nt, Artificial Sequence
  Description of Artificial Sequence: Synthetic oligonucleotide
  Sense strand starting at position 2544 of SEQ ID NO: 1241124
agcgcuuucccggaguuga

SEQ ID NO: 1248657 - RNA, 19 nt, Artificial Sequence
  Description of Artificial Sequence: Synthetic oligonucleotide
  Antisense strand to SEQ ID NO: 1248656
ucaacuccgggaaagcgcu

SEQ ID NO: 1248658 - RNA, 19 nt, Artificial Sequence
  Description of Artificial Sequence: Synthetic oligonucleotide
  Sense strand starting at position 2545 of SEQ ID NO: 1241124
gcgcuuucccggaguugag

SEQ ID NO: 1248659 - RNA, 19 nt, Artificial Sequence
  Description of Artificial Sequence: Synthetic oligonucleotide
  Antisense strand to SEQ ID NO: 1248658
cucaacuccgggaaagcgc

SEQ ID NO: 1248660 - RNA, 19 nt, Artificial Sequence
  Description of Artificial Sequence: Synthetic oligonucleotide
  Sense strand starting at position 2559 of SEQ ID NO: 1241124
uugaguuuacucugcagcu

SEQ ID NO: 1248661 - RNA, 19 nt, Artificial Sequence
  Description of Artificial Sequence: Synthetic oligonucleotide
  Antisense strand to SEQ ID NO: 1248660
agcugcagaguaaacucaa

SEQ ID NO: 1248662 - RNA, 19 nt, Artificial Sequence
  Description of Artificial Sequence: Synthetic oligonucleotide
  Sense strand starting at position 2602 of SEQ ID NO: 1241124
gccuauaggucucgucaag

SEQ ID NO: 1248663 - RNA, 19 nt, Artificial Sequence
  Description of Artificial Sequence: Synthetic oligonucleotide
  Antisense strand to SEQ ID NO: 1248662
cuugacgagaccuauaggc

SEQ ID NO: 1248664 - RNA, 19 nt, Artificial Sequence
  Description of Artificial Sequence: Synthetic oligonucleotide
  Sense strand starting at position 2689 of SEQ ID NO: 1241124
uuuagaaugcgacaucugu

SEQ ID NO: 1248665 - RNA, 19 nt, Artificial Sequence
  Description of Artificial Sequence: Synthetic oligonucleotide
  Antisense strand to SEQ ID NO: 1248664
acagaugucgcauucuaaa

SEQ ID NO: 1248666 - RNA, 19 nt, Artificial Sequence
  Description of Artificial Sequence: Synthetic oligonucleotide
  Sense strand starting at position 2729 of SEQ ID NO: 1241124
aucucauacuguuaguagu

SEQ ID NO: 1248667 - RNA, 19 nt, Artificial Sequence
  Description of Artificial Sequence: Synthetic oligonucleotide
  Antisense strand to SEQ ID NO: 1248666
acuacuaacaguaugagau

SEQ ID NO: 1248668 - RNA, 19 nt, Artificial Sequence
  Description of Artificial Sequence: Synthetic oligonucleotide
  Sense strand starting at position 2742 of SEQ ID NO: 1241124
aguaguagcuucuuaacua

SEQ ID NO: 1248669 - RNA, 19 nt, Artificial Sequence
  Description of Artificial Sequence: Synthetic oligonucleotide
  Antisense strand to SEQ ID NO: 1248668
uaguuaagaagcuacuacu

SEQ ID NO: 1248670 - RNA, 19 nt, Artificial Sequence
  Description of Artificial Sequence: Synthetic oligonucleotide
  Sense strand starting at position 2743 of SEQ ID NO: 1241124
guaguagcuucuuaacuac

SEQ ID NO: 1248671 - RNA, 19 nt, Artificial Sequence
  Description of Artificial Sequence: Synthetic oligonucleotide
  Antisense strand to SEQ ID NO: 1248670
guaguuaagaagcuacuac

SEQ ID NO: 1248672 - RNA, 19 nt, Artificial Sequence
  Description of Artificial Sequence: Synthetic oligonucleotide
  Sense strand starting at position 2811 of SEQ ID NO: 1241124
gcuuguauggccuggaucu

SEQ ID NO: 1248673 - RNA, 19 nt, Artificial Sequence
  Description of Artificial Sequence: Synthetic oligonucleotide
  Antisense strand to SEQ ID NO: 1248672
agauccaggccauacaagc

SEQ ID NO: 1248674 - RNA, 19 nt, Artificial Sequence
  Description of Artificial Sequence: Synthetic oligonucleotide
  Sense strand starting at position 2821 of SEQ ID NO: 1241124
ccuggaucugggcacuuaa

SEQ ID NO: 1248675 - RNA, 19 nt, Artificial Sequence
  Description of Artificial Sequence: Synthetic oligonucleotide
  Antisense strand to SEQ ID NO: 1248674
uuaagugcccagauccagg

SEQ ID NO: 1248676 - RNA, 19 nt, Artificial Sequence
  Description of Artificial Sequence: Synthetic oligonucleotide
  Sense strand starting at position 2845 of SEQ ID NO: 1241124
cuaaguuuaucucguguaa

SEQ ID NO: 1248677 - RNA, 19 nt, Artificial Sequence
  Description of Artificial Sequence: Synthetic oligonucleotide
  Antisense strand to SEQ ID NO: 1248676
uuacacgagauaaacuuag

SEQ ID NO: 1248678 - RNA, 19 nt, Artificial Sequence
  Description of Artificial Sequence: Synthetic oligonucleotide
  Sense strand starting at position 2847 of SEQ ID NO: 1241124
aaguuuaucucguguaaac

SEQ ID NO: 1248679 - RNA, 19 nt, Artificial Sequence
  Description of Artificial Sequence: Synthetic oligonucleotide
  Antisense strand to SEQ ID NO: 1248678
guuuacacgagauaaacuu

SEQ ID NO: 1248680 - RNA, 19 nt, Artificial Sequence
  Description of Artificial Sequence: Synthetic oligonucleotide
  Sense strand starting at position 2849 of SEQ ID NO: 1241124
guuuaucucguguaaacug

SEQ ID NO: 1248681 - RNA, 19 nt, Artificial Sequence
  Description of Artificial Sequence: Synthetic oligonucleotide
  Antisense strand to SEQ ID NO: 1248680
caguuuacacgagauaaac

SEQ ID NO: 1248682 - RNA, 19 nt, Artificial Sequence
  Description of Artificial Sequence: Synthetic oligonucleotide
  Sense strand starting at position 2879 of SEQ ID NO: 1241124
ucacgugaggcuuaaauaa

SEQ ID NO: 1248683 - RNA, 19 nt, Artificial Sequence
  Description of Artificial Sequence: Synthetic oligonucleotide
  Antisense strand to SEQ ID NO: 1248682
uuauuuaagccucacguga

SEQ ID NO: 1248684 - RNA, 19 nt, Artificial Sequence
  Description of Artificial Sequence: Synthetic oligonucleotide
  Sense strand starting at position 3246 of SEQ ID NO: 1241124
uguaucaaaugguuaauga

SEQ ID NO: 1248685 - RNA, 19 nt, Artificial Sequence
  Description of Artificial Sequence: Synthetic oligonucleotide
  Antisense strand to SEQ ID NO: 1248684
ucauuaaccauuugauaca

SEQ ID NO: 1248686 - RNA, 19 nt, Artificial Sequence
  Description of Artificial Sequence: Synthetic oligonucleotide
  Sense strand starting at position 3319 of SEQ ID NO: 1241124
ggaaauggguaucuuuguu

SEQ ID NO: 1248687 - RNA, 19 nt, Artificial Sequence
  Description of Artificial Sequence: Synthetic oligonucleotide
  Antisense strand to SEQ ID NO: 1248686
aacaaagauacccauuucc

SEQ ID NO: 1248688 - RNA, 19 nt, Artificial Sequence
  Description of Artificial Sequence: Synthetic oligonucleotide
  Sense strand starting at position 3409 of SEQ ID NO: 1241124
aaugguagauagguuauau

SEQ ID NO: 1248689 - RNA, 19 nt, Artificial Sequence
  Description of Artificial Sequence: Synthetic oligonucleotide
  Antisense strand to SEQ ID NO: 1248688
auauaaccuaucuaccauu

SEQ ID NO: 1248690 - RNA, 19 nt, Artificial Sequence
  Description of Artificial Sequence: Synthetic oligonucleotide
  Sense strand starting at position 3413 of SEQ ID NO: 1241124
guagauagguuauaugaua

SEQ ID NO: 1248691 - RNA, 19 nt, Artificial Sequence
  Description of Artificial Sequence: Synthetic oligonucleotide
  Antisense strand to SEQ ID NO: 1248690
uaucauauaaccuaucuac

SEQ ID NO: 1248692 - RNA, 19 nt, Artificial Sequence
  Description of Artificial Sequence: Synthetic oligonucleotide
  Sense strand starting at position 3426 of SEQ ID NO: 1241124
augauaaccuuauaaacgu

SEQ ID NO: 1248693 - RNA, 19 nt, Artificial Sequence
  Description of Artificial Sequence: Synthetic oligonucleotide
  Antisense strand to SEQ ID NO: 1248692
acguuuauaagguuaucau

SEQ ID NO: 1248694 - RNA, 19 nt, Artificial Sequence
  Description of Artificial Sequence: Synthetic oligonucleotide
  Sense strand starting at position 3545 of SEQ ID NO: 1241124
agcuuaggagucugaagau

SEQ ID NO: 1248695 - RNA, 19 nt, Artificial Sequence
  Description of Artificial Sequence: Synthetic oligonucleotide
  Antisense strand to SEQ ID NO: 1248694
aucuucagacuccuaagcu

SEQ ID NO: 1248696 - RNA, 19 nt, Artificial Sequence
  Description of Artificial Sequence: Synthetic oligonucleotide
  Sense strand starting at position 3710 of SEQ ID NO: 1241124
accaguaucugggacuaaa

SEQ ID NO: 1248697 - RNA, 19 nt, Artificial Sequence
  Description of Artificial Sequence: Synthetic oligonucleotide
  Antisense strand to SEQ ID NO: 1248696
uuuagucccagauacuggu

SEQ ID NO: 1248698 - RNA, 19 nt, Artificial Sequence
  Description of Artificial Sequence: Synthetic oligonucleotide
  Sense strand starting at position 36 of SEQ ID NO: 1241125
accgcacccugcuuauaaa

SEQ ID NO: 1248699 - RNA, 19 nt, Artificial Sequence
  Description of Artificial Sequence: Synthetic oligonucleotide
  Antisense strand to SEQ ID NO: 1248698
uuuauaagcagggugcggu

SEQ ID NO: 1248700 - RNA, 19 nt, Artificial Sequence
  Description of Artificial Sequence: Synthetic oligonucleotide
  Sense strand starting at position 81 of SEQ ID NO: 1241125
agagaaggguucucccuua

SEQ ID NO: 1248701 - RNA, 19 nt, Artificial Sequence
  Description of Artificial Sequence: Synthetic oligonucleotide
  Antisense strand to SEQ ID NO: 1248700
uaagggagaacccuucucu

SEQ ID NO: 1248702 - RNA, 19 nt, Artificial Sequence
  Description of Artificial Sequence: Synthetic oligonucleotide
  Sense strand starting at position 86 of SEQ ID NO: 1241125
aggguucucccuuacuaug

SEQ ID NO: 1248703 - RNA, 19 nt, Artificial Sequence
  Description of Artificial Sequence: Synthetic oligonucleotide
  Antisense strand to SEQ ID NO: 1248702
cauaguaagggagaacccu

SEQ ID NO: 1248704 - RNA, 19 nt, Artificial Sequence
  Description of Artificial Sequence: Synthetic oligonucleotide
  Sense strand starting at position 111 of SEQ ID NO: 1241125
gcauuuauagcugggcaca

SEQ ID NO: 1248705 - RNA, 19 nt, Artificial Sequence
  Description of Artificial Sequence: Synthetic oligonucleotide
  Antisense strand to SEQ ID NO: 1248704
ugugcccagcuauaaaugc

SEQ ID NO: 1248706 - RNA, 19 nt, Artificial Sequence
  Description of Artificial Sequence: Synthetic oligonucleotide
  Sense strand starting at position 445 of SEQ ID NO: 1241125
auauaagaucagugagccu

SEQ ID NO: 1248707 - RNA, 19 nt, Artificial Sequence
  Description of Artificial Sequence: Synthetic oligonucleotide
  Antisense strand to SEQ ID NO: 1248706
aggcucacugaucuuauau

SEQ ID NO: 1248708 - RNA, 19 nt, Artificial Sequence
  Description of Artificial Sequence: Synthetic oligonucleotide
  Sense strand starting at position 448 of SEQ ID NO: 1241125
uaagaucagugagccuaua

SEQ ID NO: 1248709 - RNA, 19 nt, Artificial Sequence
  Description of Artificial Sequence: Synthetic oligonucleotide
  Antisense strand to SEQ ID NO: 1248708
uauaggcucacugaucuua

SEQ ID NO: 1248710 - RNA, 19 nt, Artificial Sequence
  Description of Artificial Sequence: Synthetic oligonucleotide
  Sense strand starting at position 471 of SEQ ID NO: 1241125
cuauauuacugcuuccagu

SEQ ID NO: 1248711 - RNA, 19 nt, Artificial Sequence
  Description of Artificial Sequence: Synthetic oligonucleotide
  Antisense strand to SEQ ID NO: 1248710
acuggaagcaguaauauag

SEQ ID NO: 1248712 - RNA, 19 nt, Artificial Sequence
  Description of Artificial Sequence: Synthetic oligonucleotide
  Sense strand starting at position 553 of SEQ ID NO: 1241125
ucauaagcaucucaagaug

SEQ ID NO: 1248713 - RNA, 19 nt, Artificial Sequence
  Description of Artificial Sequence: Synthetic oligonucleotide
  Antisense strand to SEQ ID NO: 1248712
caucuugagaugcuuauga

SEQ ID NO: 1248714 - RNA, 19 nt, Artificial Sequence
  Description of Artificial Sequence: Synthetic oligonucleotide
  Sense strand starting at position 559 of SEQ ID NO: 1241125
gcaucucaagauggaguua

SEQ ID NO: 1248715 - RNA, 19 nt, Artificial Sequence
  Description of Artificial Sequence: Synthetic oligonucleotide
  Antisense strand to SEQ ID NO: 1248714
uaacuccaucuugagaugc

SEQ ID NO: 1248716 - RNA, 19 nt, Artificial Sequence
  Description of Artificial Sequence: Synthetic oligonucleotide
  Sense strand starting at position 625 of SEQ ID NO: 1241125
gagcuaguguucuuagcau

SEQ ID NO: 1248717 - RNA, 19 nt, Artificial Sequence
  Description of Artificial Sequence: Synthetic oligonucleotide
  Antisense strand to SEQ ID NO: 1248716
augcuaagaacacuagcuc

SEQ ID NO: 1248718 - RNA, 19 nt, Artificial Sequence
  Description of Artificial Sequence: Synthetic oligonucleotide
  Sense strand starting at position 646 of SEQ ID NO: 1241125
cuugcauucccugacagcu

SEQ ID NO: 1248719 - RNA, 19 nt, Artificial Sequence
  Description of Artificial Sequence: Synthetic oligonucleotide
  Antisense strand to SEQ ID NO: 1248718
agcugucagggaaugcaag

SEQ ID NO: 1248720 - RNA, 19 nt, Artificial Sequence
  Description of Artificial Sequence: Synthetic oligonucleotide
  Sense strand starting at position 708 of SEQ ID NO: 1241125
ucuuuauugcaagaagacu

SEQ ID NO: 1248721 - RNA, 19 nt, Artificial Sequence
  Description of Artificial Sequence: Synthetic oligonucleotide
  Antisense strand to SEQ ID NO: 1248720
agucuucuugcaauaaaga

SEQ ID NO: 1248722 - RNA, 19 nt, Artificial Sequence
  Description of Artificial Sequence: Synthetic oligonucleotide
  Sense strand starting at position 730 of SEQ ID NO: 1241125
ccugaugacuccuugaucu

SEQ ID NO: 1248723 - RNA, 19 nt, Artificial Sequence
  Description of Artificial Sequence: Synthetic oligonucleotide
  Antisense strand to SEQ ID NO: 1248722
agaucaaggagucaucagg

SEQ ID NO: 1248724 - RNA, 19 nt, Artificial Sequence
  Description of Artificial Sequence: Synthetic oligonucleotide
  Sense strand starting at position 785 of SEQ ID NO: 1241125
guggcagacuguucccaaa

SEQ ID NO: 1248725 - RNA, 19 nt, Artificial Sequence
  Description of Artificial Sequence: Synthetic oligonucleotide
  Antisense strand to SEQ ID NO: 1248724
uuugggaacagucugccac

SEQ ID NO: 1248726 - RNA, 19 nt, Artificial Sequence
  Description of Artificial Sequence: Synthetic oligonucleotide
  Sense strand starting at position 787 of SEQ ID NO: 1241125
ggcagacuguucccaaaca

SEQ ID NO: 1248727 - RNA, 19 nt, Artificial Sequence
  Description of Artificial Sequence: Synthetic oligonucleotide
  Antisense strand to SEQ ID NO: 1248726
uguuugggaacagucugcc

SEQ ID NO: 1248728 - RNA, 19 nt, Artificial Sequence
  Description of Artificial Sequence: Synthetic oligonucleotide
  Sense strand starting at position 811 of SEQ ID NO: 1241125
cuguguagucccuggaugu

SEQ ID NO: 1248729 - RNA, 19 nt, Artificial Sequence
  Description of Artificial Sequence: Synthetic oligonucleotide
  Antisense strand to SEQ ID NO: 1248728
acauccagggacuacacag

SEQ ID NO: 1248730 - RNA, 19 nt, Artificial Sequence
  Description of Artificial Sequence: Synthetic oligonucleotide
  Sense strand starting at position 842 of SEQ ID NO: 1241125
ucugaaguggucuauuacu

SEQ ID NO: 1248731 - RNA, 19 nt, Artificial Sequence
  Description of Artificial Sequence: Synthetic oligonucleotide
  Antisense strand to SEQ ID NO: 1248730
aguaauagaccacuucaga

SEQ ID NO: 1248732 - RNA, 19 nt, Artificial Sequence
  Description of Artificial Sequence: Synthetic oligonucleotide
  Sense strand starting at position 851 of SEQ ID NO: 1241125
gucuauuacuaguccugca

SEQ ID NO: 1248733 - RNA, 19 nt, Artificial Sequence
  Description of Artificial Sequence: Synthetic oligonucleotide
  Antisense strand to SEQ ID NO: 1248732
ugcaggacuaguaauagac

SEQ ID NO: 1248734 - RNA, 19 nt, Artificial Sequence
  Description of Artificial Sequence: Synthetic oligonucleotide
  Sense strand starting at position 1103 of SEQ ID NO: 1241125
ccaacuccauuguuggaau

SEQ ID NO: 1248735 - RNA, 19 nt, Artificial Sequence
  Description of Artificial Sequence: Synthetic oligonucleotide
  Antisense strand to SEQ ID NO: 1248734
auuccaacaauggaguugg

SEQ ID NO: 1248736 - RNA, 19 nt, Artificial Sequence
  Description of Artificial Sequence: Synthetic oligonucleotide
  Sense strand starting at position 1220 of SEQ ID NO: 1241125
ugggcuucgagaugacuga

SEQ ID NO: 1248737 - RNA, 19 nt, Artificial Sequence
  Description of Artificial Sequence: Synthetic oligonucleotide
  Antisense strand to SEQ ID NO: 1248736
ucagucaucucgaagccca

SEQ ID NO: 1248738 - RNA, 19 nt, Artificial Sequence
  Description of Artificial Sequence: Synthetic oligonucleotide
  Sense strand starting at position 1331 of SEQ ID NO: 1241125
aguuaaugcucauucugag

SEQ ID NO: 1248739 - RNA, 19 nt, Artificial Sequence
  Description of Artificial Sequence: Synthetic oligonucleotide
  Antisense strand to SEQ ID NO: 1248738
cucagaaugagcauuaacu

SEQ ID NO: 1248740 - RNA, 19 nt, Artificial Sequence
  Description of Artificial Sequence: Synthetic oligonucleotide
  Sense strand starting at position 1337 of SEQ ID NO: 1241125
ugcucauucugagugaaug

SEQ ID NO: 1248741 - RNA, 19 nt, Artificial Sequence
  Description of Artificial Sequence: Synthetic oligonucleotide
  Antisense strand to SEQ ID NO: 1248740
cauucacucagaaugagca

SEQ ID NO: 1248742 - RNA, 19 nt, Artificial Sequence
  Description of Artificial Sequence: Synthetic oligonucleotide
  Sense strand starting at position 1588 of SEQ ID NO: 1241125
ccauucucugucggaggau

SEQ ID NO: 1248743 - RNA, 19 nt, Artificial Sequence
  Description of Artificial Sequence: Synthetic oligonucleotide
  Antisense strand to SEQ ID NO: 1248742
auccuccgacagagaaugg

SEQ ID NO: 1248744 - RNA, 19 nt, Artificial Sequence
  Description of Artificial Sequence: Synthetic oligonucleotide
  Sense strand starting at position 1591 of SEQ ID NO: 1241125
uucucugucggaggauauc

SEQ ID NO: 1248745 - RNA, 19 nt, Artificial Sequence
  Description of Artificial Sequence: Synthetic oligonucleotide
  Antisense strand to SEQ ID NO: 1248744
gauauccuccgacagagaa

SEQ ID NO: 1248746 - RNA, 19 nt, Artificial Sequence
  Description of Artificial Sequence: Synthetic oligonucleotide
  Sense strand starting at position 1770 of SEQ ID NO: 1241125
cucaccugcccuugugaga

SEQ ID NO: 1248747 - RNA, 19 nt, Artificial Sequence
  Description of Artificial Sequence: Synthetic oligonucleotide
  Antisense strand to SEQ ID NO: 1248746
ucucacaagggcaggugag

SEQ ID NO: 1248748 - RNA, 19 nt, Artificial Sequence
  Description of Artificial Sequence: Synthetic oligonucleotide
  Sense strand starting at position 2438 of SEQ ID NO: 1241125
aaauuuggauucggagaua

SEQ ID NO: 1248749 - RNA, 19 nt, Artificial Sequence
  Description of Artificial Sequence: Synthetic oligonucleotide
  Antisense strand to SEQ ID NO: 1248748
uaucuccgaauccaaauuu

SEQ ID NO: 1248750 - RNA, 19 nt, Artificial Sequence
  Description of Artificial Sequence: Synthetic oligonucleotide
  Sense strand starting at position 2499 of SEQ ID NO: 1241125
agccaucuaccuuagguau

SEQ ID NO: 1248751 - RNA, 19 nt, Artificial Sequence
  Description of Artificial Sequence: Synthetic oligonucleotide
  Antisense strand to SEQ ID NO: 1248750
auaccuaagguagauggcu

SEQ ID NO: 1248752 - RNA, 19 nt, Artificial Sequence
  Description of Artificial Sequence: Synthetic oligonucleotide
  Sense strand starting at position 2589 of SEQ ID NO: 1241125
gggagcgcugguuauuaaa

SEQ ID NO: 1248753 - RNA, 19 nt, Artificial Sequence
  Description of Artificial Sequence: Synthetic oligonucleotide
  Antisense strand to SEQ ID NO: 1248752
uuuaauaaccagcgcuccc

SEQ ID NO: 1248754 - RNA, 19 nt, Artificial Sequence
  Description of Artificial Sequence: Synthetic oligonucleotide
  Sense strand starting at position 2659 of SEQ ID NO: 1241125
gugcuaaguaacuagaguu

SEQ ID NO: 1248755 - RNA, 19 nt, Artificial Sequence
  Description of Artificial Sequence: Synthetic oligonucleotide
  Antisense strand to SEQ ID NO: 1248754
aacucuaguuacuuagcac

SEQ ID NO: 1248756 - RNA, 19 nt, Artificial Sequence
  Description of Artificial Sequence: Synthetic oligonucleotide
  Sense strand starting at position 2797 of SEQ ID NO: 1241125
agccacauagcuuguaagu

SEQ ID NO: 1248757 - RNA, 19 nt, Artificial Sequence
  Description of Artificial Sequence: Synthetic oligonucleotide
  Antisense strand to SEQ ID NO: 1248756
acuuacaagcuauguggcu

SEQ ID NO: 1248758 - RNA, 19 nt, Artificial Sequence
  Description of Artificial Sequence: Synthetic oligonucleotide
  Sense strand starting at position 3028 of SEQ ID NO: 1241125
uuuagaggcucuguuguau

SEQ ID NO: 1248759 - RNA, 19 nt, Artificial Sequence
  Description of Artificial Sequence: Synthetic oligonucleotide
  Antisense strand to SEQ ID NO: 1248758
auacaacagagccucuaaa

SEQ ID NO: 1248760 - RNA, 19 nt, Artificial Sequence
  Description of Artificial Sequence: Synthetic oligonucleotide
  Sense strand starting at position 3120 of SEQ ID NO: 1241125
cugaaaguguggucccaga

SEQ ID NO: 1248761 - RNA, 19 nt, Artificial Sequence
  Description of Artificial Sequence: Synthetic oligonucleotide
  Antisense strand to SEQ ID NO: 1248760
ucugggaccacacuuucag

SEQ ID NO: 1248762 - RNA, 19 nt, Artificial Sequence
  Description of Artificial Sequence: Synthetic oligonucleotide
  Sense strand starting at position 3148 of SEQ ID NO: 1241125
ucagcaucaccuggauaca

SEQ ID NO: 1248763 - RNA, 19 nt, Artificial Sequence
  Description of Artificial Sequence: Synthetic oligonucleotide
  Antisense strand to SEQ ID NO: 1248762
uguauccaggugaugcuga

SEQ ID NO: 1248764 - RNA, 19 nt, Artificial Sequence
  Description of Artificial Sequence: Synthetic oligonucleotide
  Sense strand starting at position 3282 of SEQ ID NO: 1241125
uagugagacgcugacucua

SEQ ID NO: 1248765 - RNA, 19 nt, Artificial Sequence
  Description of Artificial Sequence: Synthetic oligonucleotide
  Antisense strand to SEQ ID NO: 1248764
uagagucagcgucucacua

SEQ ID NO: 1248766 - RNA, 19 nt, Artificial Sequence
  Description of Artificial Sequence: Synthetic oligonucleotide
  Sense strand starting at position 3434 of SEQ ID NO: 1241125
ugcaucucagccugaguga

SEQ ID NO: 1248767 - RNA, 19 nt, Artificial Sequence
  Description of Artificial Sequence: Synthetic oligonucleotide
  Antisense strand to SEQ ID NO: 1248766
ucacucaggcugagaugca

SEQ ID NO: 1248768 - RNA, 19 nt, Artificial Sequence
  Description of Artificial Sequence: Synthetic oligonucleotide
  Sense strand starting at position 3520 of SEQ ID NO: 1241125
ccugcuaugggucaccaga

SEQ ID NO: 1248769 - RNA, 19 nt, Artificial Sequence
  Description of Artificial Sequence: Synthetic oligonucleotide
  Antisense strand to SEQ ID NO: 1248768
ucuggugacccauagcagg

SEQ ID NO: 1248770 - RNA, 19 nt, Artificial Sequence
  Description of Artificial Sequence: Synthetic oligonucleotide
  Sense strand starting at position 3522 of SEQ ID NO: 1241125
ugcuaugggucaccagaua

SEQ ID NO: 1248771 - RNA, 19 nt, Artificial Sequence
  Description of Artificial Sequence: Synthetic oligonucleotide
  Antisense strand to SEQ ID NO: 1248770
uaucuggugacccauagca

SEQ ID NO: 1248772 - RNA, 19 nt, Artificial Sequence
  Description of Artificial Sequence: Synthetic oligonucleotide
  Sense strand starting at position 3533 of SEQ ID NO: 1241125
accagauacuuguuagaag

SEQ ID NO: 1248773 - RNA, 19 nt, Artificial Sequence
  Description of Artificial Sequence: Synthetic oligonucleotide
  Antisense strand to SEQ ID NO: 1248772
cuucuaacaaguaucuggu

SEQ ID NO: 1248774 - RNA, 19 nt, Artificial Sequence
  Description of Artificial Sequence: Synthetic oligonucleotide
  Sense strand starting at position 3652 of SEQ ID NO: 1241125
gggcguggucagggauuca

SEQ ID NO: 1248775 - RNA, 19 nt, Artificial Sequence
  Description of Artificial Sequence: Synthetic oligonucleotide
  Antisense strand to SEQ ID NO: 1248774
ugaaucccugaccacgccc

SEQ ID NO: 1248776 - RNA, 19 nt, Artificial Sequence
  Description of Artificial Sequence: Synthetic oligonucleotide
  Sense strand starting at position 3724 of SEQ ID NO: 1241125
uuguauuucuugcccauca

SEQ ID NO: 1248777 - RNA, 19 nt, Artificial Sequence
  Description of Artificial Sequence: Synthetic oligonucleotide
  Antisense strand to SEQ ID NO: 1248776
ugaugggcaagaaauacaa

SEQ ID NO: 1248778 - RNA, 19 nt, Artificial Sequence
  Description of Artificial Sequence: Synthetic oligonucleotide
  Sense strand starting at position 25 of SEQ ID NO: 1241126
aagacauguugaucuaggu

SEQ ID NO: 1248779 - RNA, 19 nt, Artificial Sequence
  Description of Artificial Sequence: Synthetic oligonucleotide
  Antisense strand to SEQ ID NO: 1248778
accuagaucaacaugucuu

SEQ ID NO: 1248780 - RNA, 19 nt, Artificial Sequence
  Description of Artificial Sequence: Synthetic oligonucleotide
  Sense strand starting at position 29 of SEQ ID NO: 1241126
cauguugaucuagguuuaa

SEQ ID NO: 1248781 - RNA, 19 nt, Artificial Sequence
  Description of Artificial Sequence: Synthetic oligonucleotide
  Antisense strand to SEQ ID NO: 1248780
uuaaaccuagaucaacaug

SEQ ID NO: 1248782 - RNA, 19 nt, Artificial Sequence
  Description of Artificial Sequence: Synthetic oligonucleotide
  Sense strand starting at position 148 of SEQ ID NO: 1241126
aaguuacaagcauagguau

SEQ ID NO: 1248783 - RNA, 19 nt, Artificial Sequence
  Description of Artificial Sequence: Synthetic oligonucleotide
  Antisense strand to SEQ ID NO: 1248782
auaccuaugcuuguaacuu

SEQ ID NO: 1248784 - RNA, 19 nt, Artificial Sequence
  Description of Artificial Sequence: Synthetic oligonucleotide
  Sense strand starting at position 179 of SEQ ID NO: 1241126
acuccagugcguuuaguca

SEQ ID NO: 1248785 - RNA, 19 nt, Artificial Sequence
  Description of Artificial Sequence: Synthetic oligonucleotide
  Antisense strand to SEQ ID NO: 1248784
ugacuaaacgcacuggagu

SEQ ID NO: 1248786 - RNA, 19 nt, Artificial Sequence
  Description of Artificial Sequence: Synthetic oligonucleotide
  Sense strand starting at position 194 of SEQ ID NO: 1241126
gucauaaauugcuccagug

SEQ ID NO: 1248787 - RNA, 19 nt, Artificial Sequence
  Description of Artificial Sequence: Synthetic oligonucleotide
  Antisense strand to SEQ ID NO: 1248786
cacuggagcaauuuaugac

SEQ ID NO: 1248788 - RNA, 19 nt, Artificial Sequence
  Description of Artificial Sequence: Synthetic oligonucleotide
  Sense strand starting at position 203 of SEQ ID NO: 1241126
ugcuccagugucuuugcaa

SEQ ID NO: 1248789 - RNA, 19 nt, Artificial Sequence
  Description of Artificial Sequence: Synthetic oligonucleotide
  Antisense strand to SEQ ID NO: 1248788
uugcaaagacacuggagca

SEQ ID NO: 1248790 - RNA, 19 nt, Artificial Sequence
  Description of Artificial Sequence: Synthetic oligonucleotide
  Sense strand starting at position 272 of SEQ ID NO: 1241126
ggaggucaauuaguauaca

SEQ ID NO: 1248791 - RNA, 19 nt, Artificial Sequence
  Description of Artificial Sequence: Synthetic oligonucleotide
  Antisense strand to SEQ ID NO: 1248790
uguauacuaauugaccucc

SEQ ID NO: 1248792 - RNA, 19 nt, Artificial Sequence
  Description of Artificial Sequence: Synthetic oligonucleotide
  Sense strand starting at position 363 of SEQ ID NO: 1241126
guagguuaccuagacgguu

SEQ ID NO: 1248793 - RNA, 19 nt, Artificial Sequence
  Description of Artificial Sequence: Synthetic oligonucleotide
  Antisense strand to SEQ ID NO: 1248792
aaccgucuagguaaccuac

SEQ ID NO: 1248794 - RNA, 19 nt, Artificial Sequence
  Description of Artificial Sequence: Synthetic oligonucleotide
  Sense strand starting at position 369 of SEQ ID NO: 1241126
uaccuagacgguuaguaau

SEQ ID NO: 1248795 - RNA, 19 nt, Artificial Sequence
  Description of Artificial Sequence: Synthetic oligonucleotide
  Antisense strand to SEQ ID NO: 1248794
auuacuaaccgucuaggua

SEQ ID NO: 1248796 - RNA, 19 nt, Artificial Sequence
  Description of Artificial Sequence: Synthetic oligonucleotide
  Sense strand starting at position 423 of SEQ ID NO: 1241126
aucguauuacaguacaaau

SEQ ID NO: 1248797 - RNA, 19 nt, Artificial Sequence
  Description of Artificial Sequence: Synthetic oligonucleotide
  Antisense strand to SEQ ID NO: 1248796
auuuguacuguaauacgau

SEQ ID NO: 1248798 - RNA, 19 nt, Artificial Sequence
  Description of Artificial Sequence: Synthetic oligonucleotide
  Sense strand starting at position 425 of SEQ ID NO: 1241126
cguauuacaguacaaauaa

SEQ ID NO: 1248799 - RNA, 19 nt, Artificial Sequence
  Description of Artificial Sequence: Synthetic oligonucleotide
  Antisense strand to SEQ ID NO: 1248798
uuauuuguacuguaauacg

SEQ ID NO: 1248800 - RNA, 19 nt, Artificial Sequence
  Description of Artificial Sequence: Synthetic oligonucleotide
  Sense strand starting at position 566 of SEQ ID NO: 1241126
gcaagcucccaugaaguga

SEQ ID NO: 1248801 - RNA, 19 nt, Artificial Sequence
  Description of Artificial Sequence: Synthetic oligonucleotide
  Antisense strand to SEQ ID NO: 1248800
ucacuucaugggagcuugc

SEQ ID NO: 1248802 - RNA, 19 nt, Artificial Sequence
  Description of Artificial Sequence: Synthetic oligonucleotide
  Sense strand starting at position 708 of SEQ ID NO: 1241126
aguaaauacagcgaagcau

SEQ ID NO: 1248803 - RNA, 19 nt, Artificial Sequence
  Description of Artificial Sequence: Synthetic oligonucleotide
  Antisense strand to SEQ ID NO: 1248802
augcuucgcuguauuuacu

SEQ ID NO: 1248804 - RNA, 19 nt, Artificial Sequence
  Description of Artificial Sequence: Synthetic oligonucleotide
  Sense strand starting at position 882 of SEQ ID NO: 1241126
uuuauuaagcgauggccaa

SEQ ID NO: 1248805 - RNA, 19 nt, Artificial Sequence
  Description of Artificial Sequence: Synthetic oligonucleotide
  Antisense strand to SEQ ID NO: 1248804
uuggccaucgcuuaauaaa

SEQ ID NO: 1248806 - RNA, 19 nt, Artificial Sequence
  Description of Artificial Sequence: Synthetic oligonucleotide
  Sense strand starting at position 883 of SEQ ID NO: 1241126
uuauuaagcgauggccaaa

SEQ ID NO: 1248807 - RNA, 19 nt, Artificial Sequence
  Description of Artificial Sequence: Synthetic oligonucleotide
  Antisense strand to SEQ ID NO: 1248806
uuuggccaucgcuuaauaa

SEQ ID NO: 1248808 - RNA, 19 nt, Artificial Sequence
  Description of Artificial Sequence: Synthetic oligonucleotide
  Sense strand starting at position 908 of SEQ ID NO: 1241126
uuucuaucacaugguagaa

SEQ ID NO: 1248809 - RNA, 19 nt, Artificial Sequence
  Description of Artificial Sequence: Synthetic oligonucleotide
  Antisense strand to SEQ ID NO: 1248808
uucuaccaugugauagaaa

SEQ ID NO: 1248810 - RNA, 19 nt, Artificial Sequence
  Description of Artificial Sequence: Synthetic oligonucleotide
  Sense strand starting at position 1047 of SEQ ID NO: 1241126
uucuaauaacgcugaagag

SEQ ID NO: 1248811 - RNA, 19 nt, Artificial Sequence
  Description of Artificial Sequence: Synthetic oligonucleotide
  Antisense strand to SEQ ID NO: 1248810
cucuucagcguuauuagaa

SEQ ID NO: 1248812 - RNA, 19 nt, Artificial Sequence
  Description of Artificial Sequence: Synthetic oligonucleotide
  Sense strand starting at position 1364 of SEQ ID NO: 1241126
cuacaaggcguuuaaguuu

SEQ ID NO: 1248813 - RNA, 19 nt, Artificial Sequence
  Description of Artificial Sequence: Synthetic oligonucleotide
  Antisense strand to SEQ ID NO: 1248812
aaacuuaaacgccuuguag

SEQ ID NO: 1248814 - RNA, 19 nt, Artificial Sequence
  Description of Artificial Sequence: Synthetic oligonucleotide
  Sense strand starting at position 1424 of SEQ ID NO: 1241126
guacccuuuccagguggaa

SEQ ID NO: 1248815 - RNA, 19 nt, Artificial Sequence
  Description of Artificial Sequence: Synthetic oligonucleotide
  Antisense strand to SEQ ID NO: 1248814
uuccaccuggaaaggguac

SEQ ID NO: 1248816 - RNA, 19 nt, Artificial Sequence
  Description of Artificial Sequence: Synthetic oligonucleotide
  Sense strand starting at position 2645 of SEQ ID NO: 1241126
acccauuggcgugaguauu

SEQ ID NO: 1248817 - RNA, 19 nt, Artificial Sequence
  Description of Artificial Sequence: Synthetic oligonucleotide
  Antisense strand to SEQ ID NO: 1248816
aauacucacgccaaugggu

SEQ ID NO: 1248818 - RNA, 19 nt, Artificial Sequence
  Description of Artificial Sequence: Synthetic oligonucleotide
  Sense strand starting at position 2806 of SEQ ID NO: 1241126
gucguaacucaagagcaaa

SEQ ID NO: 1248819 - RNA, 19 nt, Artificial Sequence
  Description of Artificial Sequence: Synthetic oligonucleotide
  Antisense strand to SEQ ID NO: 1248818
uuugcucuugaguuacgac

SEQ ID NO: 1248820 - RNA, 19 nt, Artificial Sequence
  Description of Artificial Sequence: Synthetic oligonucleotide
  Sense strand starting at position 2851 of SEQ ID NO: 1241126
uugugcucgcgguuccaaa

SEQ ID NO: 1248821 - RNA, 19 nt, Artificial Sequence
  Description of Artificial Sequence: Synthetic oligonucleotide
  Antisense strand to SEQ ID NO: 1248820
uuuggaaccgcgagcacaa

SEQ ID NO: 1248822 - RNA, 19 nt, Artificial Sequence
  Description of Artificial Sequence: Synthetic oligonucleotide
  Sense strand starting at position 2882 of SEQ ID NO: 1241126
accgaaugcuucucgauaa

SEQ ID NO: 1248823 - RNA, 19 nt, Artificial Sequence
  Description of Artificial Sequence: Synthetic oligonucleotide
  Antisense strand to SEQ ID NO: 1248822
uuaucgagaagcauucggu

SEQ ID NO: 1248824 - RNA, 19 nt, Artificial Sequence
  Description of Artificial Sequence: Synthetic oligonucleotide
  Sense strand starting at position 2904 of SEQ ID NO: 1241126
cccuuauggucucugagca

SEQ ID NO: 1248825 - RNA, 19 nt, Artificial Sequence
  Description of Artificial Sequence: Synthetic oligonucleotide
  Antisense strand to SEQ ID NO: 1248824
ugcucagagaccauaaggg

SEQ ID NO: 1248826 - RNA, 19 nt, Artificial Sequence
  Description of Artificial Sequence: Synthetic oligonucleotide
  Sense strand starting at position 2905 of SEQ ID NO: 1241126
ccuuauggucucugagcau

SEQ ID NO: 1248827 - RNA, 19 nt, Artificial Sequence
  Description of Artificial Sequence: Synthetic oligonucleotide
  Antisense strand to SEQ ID NO: 1248826
augcucagagaccauaagg

SEQ ID NO: 1248828 - RNA, 19 nt, Artificial Sequence
  Description of Artificial Sequence: Synthetic oligonucleotide
  Sense strand starting at position 2908 of SEQ ID NO: 1241126
uauggucucugagcauuaa

SEQ ID NO: 1248829 - RNA, 19 nt, Artificial Sequence
  Description of Artificial Sequence: Synthetic oligonucleotide
  Antisense strand to SEQ ID NO: 1248828
uuaaugcucagagaccaua

SEQ ID NO: 1248830 - RNA, 19 nt, Artificial Sequence
  Description of Artificial Sequence: Synthetic oligonucleotide
  Sense strand starting at position 2909 of SEQ ID NO: 1241126
auggucucugagcauuaaa

SEQ ID NO: 1248831 - RNA, 19 nt, Artificial Sequence
  Description of Artificial Sequence: Synthetic oligonucleotide
  Antisense strand to SEQ ID NO: 1248830
uuuaaugcucagagaccau

SEQ ID NO: 1248832 - RNA, 19 nt, Artificial Sequence
  Description of Artificial Sequence: Synthetic oligonucleotide
  Sense strand starting at position 2912 of SEQ ID NO: 1241126
gucucugagcauuaaagaa

SEQ ID NO: 1248833 - RNA, 19 nt, Artificial Sequence
  Description of Artificial Sequence: Synthetic oligonucleotide
  Antisense strand to SEQ ID NO: 1248832
uucuuuaaugcucagagac

SEQ ID NO: 1248834 - RNA, 19 nt, Artificial Sequence
  Description of Artificial Sequence: Synthetic oligonucleotide
  Sense strand starting at position 3157 of SEQ ID NO: 1241126
ucaguacguucugugaaag

SEQ ID NO: 1248835 - RNA, 19 nt, Artificial Sequence
  Description of Artificial Sequence: Synthetic oligonucleotide
  Antisense strand to SEQ ID NO: 1248834
cuuucacagaacguacuga

SEQ ID NO: 1248836 - RNA, 19 nt, Artificial Sequence
  Description of Artificial Sequence: Synthetic oligonucleotide
  Sense strand starting at position 3380 of SEQ ID NO: 1241126
uguguuucucaugagggca

SEQ ID NO: 1248837 - RNA, 19 nt, Artificial Sequence
  Description of Artificial Sequence: Synthetic oligonucleotide
  Antisense strand to SEQ ID NO: 1248836
ugcccucaugagaaacaca

SEQ ID NO: 1248838 - RNA, 19 nt, Artificial Sequence
  Description of Artificial Sequence: Synthetic oligonucleotide
  Sense strand starting at position 3429 of SEQ ID NO: 1241126
gguagaaaccacugccuuu

SEQ ID NO: 1248839 - RNA, 19 nt, Artificial Sequence
  Description of Artificial Sequence: Synthetic oligonucleotide
  Antisense strand to SEQ ID NO: 1248838
aaaggcagugguuucuacc

SEQ ID NO: 1248840 - RNA, 19 nt, Artificial Sequence
  Description of Artificial Sequence: Synthetic oligonucleotide
  Sense strand starting at position 3476 of SEQ ID NO: 1241126
ugugacuuucccgagguca

SEQ ID NO: 1248841 - RNA, 19 nt, Artificial Sequence
  Description of Artificial Sequence: Synthetic oligonucleotide
  Antisense strand to SEQ ID NO: 1248840
ugaccucgggaaagucaca

SEQ ID NO: 1248842 - RNA, 19 nt, Artificial Sequence
  Description of Artificial Sequence: Synthetic oligonucleotide
  Sense strand starting at position 3478 of SEQ ID NO: 1241126
ugacuuucccgaggucauc

SEQ ID NO: 1248843 - RNA, 19 nt, Artificial Sequence
  Description of Artificial Sequence: Synthetic oligonucleotide
  Antisense strand to SEQ ID NO: 1248842
gaugaccucgggaaaguca

SEQ ID NO: 1248844 - RNA, 19 nt, Artificial Sequence
  Description of Artificial Sequence: Synthetic oligonucleotide
  Sense strand starting at position 3524 of SEQ ID NO: 1241126
aauaguugccagcagauaa

SEQ ID NO: 1248845 - RNA, 19 nt, Artificial Sequence
  Description of Artificial Sequence: Synthetic oligonucleotide
  Antisense strand to SEQ ID NO: 1248844
uuaucugcuggcaacuauu

SEQ ID NO: 1248846 - RNA, 19 nt, Artificial Sequence
  Description of Artificial Sequence: Synthetic oligonucleotide
  Sense strand starting at position 3779 of SEQ ID NO: 1241126
acauuuacggucugucagu

SEQ ID NO: 1248847 - RNA, 19 nt, Artificial Sequence
  Description of Artificial Sequence: Synthetic oligonucleotide
  Antisense strand to SEQ ID NO: 1248846
acugacagaccguaaaugu

SEQ ID NO: 1248848 - RNA, 19 nt, Artificial Sequence
  Description of Artificial Sequence: Synthetic oligonucleotide
  Sense strand starting at position 3780 of SEQ ID NO: 1241126
cauuuacggucugucagua

SEQ ID NO: 1248849 - RNA, 19 nt, Artificial Sequence
  Description of Artificial Sequence: Synthetic oligonucleotide
  Antisense strand to SEQ ID NO: 1248848
uacugacagaccguaaaug

SEQ ID NO: 1248850 - RNA, 19 nt, Artificial Sequence
  Description of Artificial Sequence: Synthetic oligonucleotide
  Sense strand starting at position 3784 of SEQ ID NO: 1241126
uacggucugucaguaaaga

SEQ ID NO: 1248851 - RNA, 19 nt, Artificial Sequence
  Description of Artificial Sequence: Synthetic oligonucleotide
  Antisense strand to SEQ ID NO: 1248850
ucuuuacugacagaccgua

SEQ ID NO: 1248852 - RNA, 19 nt, Artificial Sequence
  Description of Artificial Sequence: Synthetic oligonucleotide
  Sense strand starting at position 3785 of SEQ ID NO: 1241126
acggucugucaguaaagaa

SEQ ID NO: 1248853 - RNA, 19 nt, Artificial Sequence
  Description of Artificial Sequence: Synthetic oligonucleotide
  Antisense strand to SEQ ID NO: 1248852
uucuuuacugacagaccgu

SEQ ID NO: 1248854 - RNA, 19 nt, Artificial Sequence
  Description of Artificial Sequence: Synthetic oligonucleotide
  Sense strand starting at position 3861 of SEQ ID NO: 1241126
acaauauuccagcagaagu

SEQ ID NO: 1248855 - RNA, 19 nt, Artificial Sequence
  Description of Artificial Sequence: Synthetic oligonucleotide
  Antisense strand to SEQ ID NO: 1248854
acuucugcuggaauauugu

SEQ ID NO: 1248856 - RNA, 19 nt, Artificial Sequence
  Description of Artificial Sequence: Synthetic oligonucleotide
  Sense strand starting at position 3872 of SEQ ID NO: 1241126
gcagaaguucuguucguuu

SEQ ID NO: 1248857 - RNA, 19 nt, Artificial Sequence
  Description of Artificial Sequence: Synthetic oligonucleotide
  Antisense strand to SEQ ID NO: 1248856
aaacgaacagaacuucugc

SEQ ID NO: 1248858 - RNA, 19 nt, Artificial Sequence
  Description of Artificial Sequence: Synthetic oligonucleotide
  Sense strand starting at position 78 of SEQ ID NO: 1241127
gagucaaugagacgucuuu

SEQ ID NO: 1248859 - RNA, 19 nt, Artificial Sequence
  Description of Artificial Sequence: Synthetic oligonucleotide
  Antisense strand to SEQ ID NO: 1248858
aaagacgucucauugacuc

SEQ ID NO: 1248860 - RNA, 19 nt, Artificial Sequence
  Description of Artificial Sequence: Synthetic oligonucleotide
  Sense strand starting at position 126 of SEQ ID NO: 1241127
uugggcuauuccuuugcaa

SEQ ID NO: 1248861 - RNA, 19 nt, Artificial Sequence
  Description of Artificial Sequence: Synthetic oligonucleotide
  Antisense strand to SEQ ID NO: 1248860
uugcaaaggaauagcccaa

SEQ ID NO: 1248862 - RNA, 19 nt, Artificial Sequence
  Description of Artificial Sequence: Synthetic oligonucleotide
  Sense strand starting at position 128 of SEQ ID NO: 1241127
gggcuauuccuuugcaaac

SEQ ID NO: 1248863 - RNA, 19 nt, Artificial Sequence
  Description of Artificial Sequence: Synthetic oligonucleotide
  Antisense strand to SEQ ID NO: 1248862
guuugcaaaggaauagccc

SEQ ID NO: 1248864 - RNA, 19 nt, Artificial Sequence
  Description of Artificial Sequence: Synthetic oligonucleotide
  Sense strand starting at position 129 of SEQ ID NO: 1241127
ggcuauuccuuugcaaacu

SEQ ID NO: 1248865 - RNA, 19 nt, Artificial Sequence
  Description of Artificial Sequence: Synthetic oligonucleotide
  Antisense strand to SEQ ID NO: 1248864
aguuugcaaaggaauagcc

SEQ ID NO: 1248866 - RNA, 19 nt, Artificial Sequence
  Description of Artificial Sequence: Synthetic oligonucleotide
  Sense strand starting at position 154 of SEQ ID NO: 1241127
ucaagacagucuuugaagu

SEQ ID NO: 1248867 - RNA, 19 nt, Artificial Sequence
  Description of Artificial Sequence: Synthetic oligonucleotide
  Antisense strand to SEQ ID NO: 1248866
acuucaaagacugucuuga

SEQ ID NO: 1248868 - RNA, 19 nt, Artificial Sequence
  Description of Artificial Sequence: Synthetic oligonucleotide
  Sense strand starting at position 234 of SEQ ID NO: 1241127
gccuuuaccuuggucucua

SEQ ID NO: 1248869 - RNA, 19 nt, Artificial Sequence
  Description of Artificial Sequence: Synthetic oligonucleotide
  Antisense strand to SEQ ID NO: 1248868
uagagaccaagguaaaggc

SEQ ID NO: 1248870 - RNA, 19 nt, Artificial Sequence
  Description of Artificial Sequence: Synthetic oligonucleotide
  Sense strand starting at position 320 of SEQ ID NO: 1241127
cagaguugcccguuugucu

SEQ ID NO: 1248871 - RNA, 19 nt, Artificial Sequence
  Description of Artificial Sequence: Synthetic oligonucleotide
  Antisense strand to SEQ ID NO: 1248870
agacaaacgggcaacucug

SEQ ID NO: 1248872 - RNA, 19 nt, Artificial Sequence
  Description of Artificial Sequence: Synthetic oligonucleotide
  Sense strand starting at position 321 of SEQ ID NO: 1241127
agaguugcccguuugucuu

SEQ ID NO: 1248873 - RNA, 19 nt, Artificial Sequence
  Description of Artificial Sequence: Synthetic oligonucleotide
  Antisense strand to SEQ ID NO: 1248872
aagacaaacgggcaacucu

SEQ ID NO: 1248874 - RNA, 19 nt, Artificial Sequence
  Description of Artificial Sequence: Synthetic oligonucleotide
  Sense strand starting at position 983 of SEQ ID NO: 1241127
cagaguacucugcagugaa

SEQ ID NO: 1248875 - RNA, 19 nt, Artificial Sequence
  Description of Artificial Sequence: Synthetic oligonucleotide
  Antisense strand to SEQ ID NO: 1248874
uucacugcagaguacucug

SEQ ID NO: 1248876 - RNA, 19 nt, Artificial Sequence
  Description of Artificial Sequence: Synthetic oligonucleotide
  Sense strand starting at position 986 of SEQ ID NO: 1241127
aguacucugcagugaaagu

SEQ ID NO: 1248877 - RNA, 19 nt, Artificial Sequence
  Description of Artificial Sequence: Synthetic oligonucleotide
  Antisense strand to SEQ ID NO: 1248876
acuuucacugcagaguacu

SEQ ID NO: 1248878 - RNA, 19 nt, Artificial Sequence
  Description of Artificial Sequence: Synthetic oligonucleotide
  Sense strand starting at position 987 of SEQ ID NO: 1241127
guacucugcagugaaaguu

SEQ ID NO: 1248879 - RNA, 19 nt, Artificial Sequence
  Description of Artificial Sequence: Synthetic oligonucleotide
  Antisense strand to SEQ ID NO: 1248878
aacuuucacugcagaguac

SEQ ID NO: 1248880 - RNA, 19 nt, Artificial Sequence
  Description of Artificial Sequence: Synthetic oligonucleotide
  Sense strand starting at position 996 of SEQ ID NO: 1241127
agugaaaguucccagggca

SEQ ID NO: 1248881 - RNA, 19 nt, Artificial Sequence
  Description of Artificial Sequence: Synthetic oligonucleotide
  Antisense strand to SEQ ID NO: 1248880
ugcccugggaacuuucacu

SEQ ID NO: 1248882 - RNA, 19 nt, Artificial Sequence
  Description of Artificial Sequence: Synthetic oligonucleotide
  Sense strand starting at position 1034 of SEQ ID NO: 1241127
ugggcuucuccuuagcgua

SEQ ID NO: 1248883 - RNA, 19 nt, Artificial Sequence
  Description of Artificial Sequence: Synthetic oligonucleotide
  Antisense strand to SEQ ID NO: 1248882
uacgcuaaggagaagccca

SEQ ID NO: 1248884 - RNA, 19 nt, Artificial Sequence
  Description of Artificial Sequence: Synthetic oligonucleotide
  Sense strand starting at position 1192 of SEQ ID NO: 1241127
gcacuuuccuccuccgcaa

SEQ ID NO: 1248885 - RNA, 19 nt, Artificial Sequence
  Description of Artificial Sequence: Synthetic oligonucleotide
  Antisense strand to SEQ ID NO: 1248884
uugcggaggaggaaagugc

SEQ ID NO: 1248886 - RNA, 19 nt, Artificial Sequence
  Description of Artificial Sequence: Synthetic oligonucleotide
  Sense strand starting at position 1302 of SEQ ID NO: 1241127
gcgggaauuucccucuuug

SEQ ID NO: 1248887 - RNA, 19 nt, Artificial Sequence
  Description of Artificial Sequence: Synthetic oligonucleotide
  Antisense strand to SEQ ID NO: 1248886
caaagagggaaauucccgc

SEQ ID NO: 1248888 - RNA, 19 nt, Artificial Sequence
  Description of Artificial Sequence: Synthetic oligonucleotide
  Sense strand starting at position 1434 of SEQ ID NO: 1241127
gucaguucucaugacccga

SEQ ID NO: 1248889 - RNA, 19 nt, Artificial Sequence
  Description of Artificial Sequence: Synthetic oligonucleotide
  Antisense strand to SEQ ID NO: 1248888
ucgggucaugagaacugac

SEQ ID NO: 1248890 - RNA, 19 nt, Artificial Sequence
  Description of Artificial Sequence: Synthetic oligonucleotide
  Sense strand starting at position 2411 of SEQ ID NO: 1241127
ccgggauccucuucucuca

SEQ ID NO: 1248891 - RNA, 19 nt, Artificial Sequence
  Description of Artificial Sequence: Synthetic oligonucleotide
  Antisense strand to SEQ ID NO: 1248890
ugagagaagaggaucccgg

SEQ ID NO: 1248892 - RNA, 19 nt, Artificial Sequence
  Description of Artificial Sequence: Synthetic oligonucleotide
  Sense strand starting at position 2581 of SEQ ID NO: 1241127
gaaucucugggcugacaau

SEQ ID NO: 1248893 - RNA, 19 nt, Artificial Sequence
  Description of Artificial Sequence: Synthetic oligonucleotide
  Antisense strand to SEQ ID NO: 1248892
auugucagcccagagauuc

SEQ ID NO: 1248894 - RNA, 19 nt, Artificial Sequence
  Description of Artificial Sequence: Synthetic oligonucleotide
  Sense strand starting at position 2702 of SEQ ID NO: 1241127
cccggaucgggaugcuuau

SEQ ID NO: 1248895 - RNA, 19 nt, Artificial Sequence
  Description of Artificial Sequence: Synthetic oligonucleotide
  Antisense strand to SEQ ID NO: 1248894
auaagcaucccgauccggg

SEQ ID NO: 1248896 - RNA, 19 nt, Artificial Sequence
  Description of Artificial Sequence: Synthetic oligonucleotide
  Sense strand starting at position 2727 of SEQ ID NO: 1241127
gcgugcauuucgccggaca

SEQ ID NO: 1248897 - RNA, 19 nt, Artificial Sequence
  Description of Artificial Sequence: Synthetic oligonucleotide
  Antisense strand to SEQ ID NO: 1248896
uguccggcgaaaugcacgc

SEQ ID NO: 1248898 - RNA, 19 nt, Artificial Sequence
  Description of Artificial Sequence: Synthetic oligonucleotide
  Sense strand starting at position 2728 of SEQ ID NO: 1241127
cgugcauuucgccggacau

SEQ ID NO: 1248899 - RNA, 19 nt, Artificial Sequence
  Description of Artificial Sequence: Synthetic oligonucleotide
  Antisense strand to SEQ ID NO: 1248898
auguccggcgaaaugcacg

SEQ ID NO: 1248900 - RNA, 19 nt, Artificial Sequence
  Description of Artificial Sequence: Synthetic oligonucleotide
  Sense strand starting at position 2729 of SEQ ID NO: 1241127
gugcauuucgccggacauu

SEQ ID NO: 1248901 - RNA, 19 nt, Artificial Sequence
  Description of Artificial Sequence: Synthetic oligonucleotide
  Antisense strand to SEQ ID NO: 1248900
aauguccggcgaaaugcac

SEQ ID NO: 1248902 - RNA, 19 nt, Artificial Sequence
  Description of Artificial Sequence: Synthetic oligonucleotide
  Sense strand starting at position 2791 of SEQ ID NO: 1241127
ccucucuauucggcuagaa

SEQ ID NO: 1248903 - RNA, 19 nt, Artificial Sequence
  Description of Artificial Sequence: Synthetic oligonucleotide
  Antisense strand to SEQ ID NO: 1248902
uucuagccgaauagagagg

SEQ ID NO: 1248904 - RNA, 19 nt, Artificial Sequence
  Description of Artificial Sequence: Synthetic oligonucleotide
  Sense strand starting at position 2793 of SEQ ID NO: 1241127
ucucuauucggcuagaaga

SEQ ID NO: 1248905 - RNA, 19 nt, Artificial Sequence
  Description of Artificial Sequence: Synthetic oligonucleotide
  Antisense strand to SEQ ID NO: 1248904
ucuucuagccgaauagaga

SEQ ID NO: 1248906 - RNA, 19 nt, Artificial Sequence
  Description of Artificial Sequence: Synthetic oligonucleotide
  Sense strand starting at position 3011 of SEQ ID NO: 1241127
cccgacagugucugaauga

SEQ ID NO: 1248907 - RNA, 19 nt, Artificial Sequence
  Description of Artificial Sequence: Synthetic oligonucleotide
  Antisense strand to SEQ ID NO: 1248906
ucauucagacacugucggg

SEQ ID NO: 1248908 - RNA, 19 nt, Artificial Sequence
  Description of Artificial Sequence: Synthetic oligonucleotide
  Sense strand starting at position 3018 of SEQ ID NO: 1241127
gugucugaaugagaaagga

SEQ ID NO: 1248909 - RNA, 19 nt, Artificial Sequence
  Description of Artificial Sequence: Synthetic oligonucleotide
  Antisense strand to SEQ ID NO: 1248908
uccuuucucauucagacac

SEQ ID NO: 1248910 - RNA, 19 nt, Artificial Sequence
  Description of Artificial Sequence: Synthetic oligonucleotide
  Sense strand starting at position 3343 of SEQ ID NO: 1241127
gugacuugcucuucucuca

SEQ ID NO: 1248911 - RNA, 19 nt, Artificial Sequence
  Description of Artificial Sequence: Synthetic oligonucleotide
  Antisense strand to SEQ ID NO: 1248910
ugagagaagagcaagucac

SEQ ID NO: 1248912 - RNA, 19 nt, Artificial Sequence
  Description of Artificial Sequence: Synthetic oligonucleotide
  Sense strand starting at position 3431 of SEQ ID NO: 1241127
ucauccuucuuagaggcaa

SEQ ID NO: 1248913 - RNA, 19 nt, Artificial Sequence
  Description of Artificial Sequence: Synthetic oligonucleotide
  Antisense strand to SEQ ID NO: 1248912
uugccucuaagaaggauga

SEQ ID NO: 1248914 - RNA, 19 nt, Artificial Sequence
  Description of Artificial Sequence: Synthetic oligonucleotide
  Sense strand starting at position 3520 of SEQ ID NO: 1241127
caguuagagccguggaguu

SEQ ID NO: 1248915 - RNA, 19 nt, Artificial Sequence
  Description of Artificial Sequence: Synthetic oligonucleotide
  Antisense strand to SEQ ID NO: 1248914
aacuccacggcucuaacug

SEQ ID NO: 1248916 - RNA, 19 nt, Artificial Sequence
  Description of Artificial Sequence: Synthetic oligonucleotide
  Sense strand starting at position 3585 of SEQ ID NO: 1241127
cucuccagguucucuauua

SEQ ID NO: 1248917 - RNA, 19 nt, Artificial Sequence
  Description of Artificial Sequence: Synthetic oligonucleotide
  Antisense strand to SEQ ID NO: 1248916
uaauagagaaccuggagag

SEQ ID NO: 1248918 - RNA, 19 nt, Artificial Sequence
  Description of Artificial Sequence: Synthetic oligonucleotide
  Sense strand starting at position 3615 of SEQ ID NO: 1241127
gagcuaggagagugagauu

SEQ ID NO: 1248919 - RNA, 19 nt, Artificial Sequence
  Description of Artificial Sequence: Synthetic oligonucleotide
  Antisense strand to SEQ ID NO: 1248918
aaucucacucuccuagcuc

SEQ ID NO: 1248920 - RNA, 19 nt, Artificial Sequence
  Description of Artificial Sequence: Synthetic oligonucleotide
  Sense strand starting at position 3646 of SEQ ID NO: 1241127
gguguccauuccguaaaua

SEQ ID NO: 1248921 - RNA, 19 nt, Artificial Sequence
  Description of Artificial Sequence: Synthetic oligonucleotide
  Antisense strand to SEQ ID NO: 1248920
uauuuacggaauggacacc

SEQ ID NO: 1248922 - RNA, 19 nt, Artificial Sequence
  Description of Artificial Sequence: Synthetic oligonucleotide
  Sense strand starting at position 3647 of SEQ ID NO: 1241127
guguccauuccguaaauac

SEQ ID NO: 1248923 - RNA, 19 nt, Artificial Sequence
  Description of Artificial Sequence: Synthetic oligonucleotide
  Antisense strand to SEQ ID NO: 1248922
guauuuacggaauggacac

SEQ ID NO: 1248924 - RNA, 19 nt, Artificial Sequence
  Description of Artificial Sequence: Synthetic oligonucleotide
  Sense strand starting at position 3731 of SEQ ID NO: 1241127
caucuauucucgguguuga

SEQ ID NO: 1248925 - RNA, 19 nt, Artificial Sequence
  Description of Artificial Sequence: Synthetic oligonucleotide
  Antisense strand to SEQ ID NO: 1248924
ucaacaccgagaauagaug

SEQ ID NO: 1248926 - RNA, 19 nt, Artificial Sequence
  Description of Artificial Sequence: Synthetic oligonucleotide
  Sense strand starting at position 3732 of SEQ ID NO: 1241127
aucuauucucgguguugag

SEQ ID NO: 1248927 - RNA, 19 nt, Artificial Sequence
  Description of Artificial Sequence: Synthetic oligonucleotide
  Antisense strand to SEQ ID NO: 1248926
cucaacaccgagaauagau

SEQ ID NO: 1248928 - RNA, 19 nt, Artificial Sequence
  Description of Artificial Sequence: Synthetic oligonucleotide
  Sense strand starting at position 3741 of SEQ ID NO: 1241127
cgguguugagagugucuga

SEQ ID NO: 1248929 - RNA, 19 nt, Artificial Sequence
  Description of Artificial Sequence: Synthetic oligonucleotide
  Antisense strand to SEQ ID NO: 1248928
ucagacacucucaacaccg

SEQ ID NO: 1248930 - RNA, 19 nt, Artificial Sequence
  Description of Artificial Sequence: Synthetic oligonucleotide
  Sense strand starting at position 3746 of SEQ ID NO: 1241127
uugagagugucugaaccuu

SEQ ID NO: 1248931 - RNA, 19 nt, Artificial Sequence
  Description of Artificial Sequence: Synthetic oligonucleotide
  Antisense strand to SEQ ID NO: 1248930
aagguucagacacucucaa

SEQ ID NO: 1248932 - RNA, 19 nt, Artificial Sequence
  Description of Artificial Sequence: Synthetic oligonucleotide
  Sense strand starting at position 3797 of SEQ ID NO: 1241127
gcaaauuguuuagggaaca

SEQ ID NO: 1248933 - RNA, 19 nt, Artificial Sequence
  Description of Artificial Sequence: Synthetic oligonucleotide
  Antisense strand to SEQ ID NO: 1248932
uguucccuaaacaauuugc

SEQ ID NO: 1248934 - RNA, 19 nt, Artificial Sequence
  Description of Artificial Sequence: Synthetic oligonucleotide
  Sense strand starting at position 3860 of SEQ ID NO: 1241127
cucuuagguaguggaauau

SEQ ID NO: 1248935 - RNA, 19 nt, Artificial Sequence
  Description of Artificial Sequence: Synthetic oligonucleotide
  Antisense strand to SEQ ID NO: 1248934
auauuccacuaccuaagag

SEQ ID NO: 1248936 - RNA, 19 nt, Artificial Sequence
  Description of Artificial Sequence: Synthetic oligonucleotide
  Sense strand starting at position 3877 of SEQ ID NO: 1241127
auaaauuaaucuggcuaug

SEQ ID NO: 1248937 - RNA, 19 nt, Artificial Sequence
  Description of Artificial Sequence: Synthetic oligonucleotide
  Antisense strand to SEQ ID NO: 1248936
cauagccagauuaauuuau

SEQ ID NO: 1248938 - RNA, 19 nt, Artificial Sequence
  Description of Artificial Sequence: Synthetic oligonucleotide
  Sense strand starting at position 99 of SEQ ID NO: 1241128
ugcagucauccucaguaga

SEQ ID NO: 1248939 - RNA, 19 nt, Artificial Sequence
  Description of Artificial Sequence: Synthetic oligonucleotide
  Antisense strand to SEQ ID NO: 1248938
ucuacugaggaugacugca

SEQ ID NO: 1248940 - RNA, 19 nt, Artificial Sequence
  Description of Artificial Sequence: Synthetic oligonucleotide
  Sense strand starting at position 102 of SEQ ID NO: 1241128
agucauccucaguagaaua

SEQ ID NO: 1248941 - RNA, 19 nt, Artificial Sequence
  Description of Artificial Sequence: Synthetic oligonucleotide
  Antisense strand to SEQ ID NO: 1248940
uauucuacugaggaugacu

SEQ ID NO: 1248942 - RNA, 19 nt, Artificial Sequence
  Description of Artificial Sequence: Synthetic oligonucleotide
  Sense strand starting at position 107 of SEQ ID NO: 1241128
uccucaguagaauauguau

SEQ ID NO: 1248943 - RNA, 19 nt, Artificial Sequence
  Description of Artificial Sequence: Synthetic oligonucleotide
  Antisense strand to SEQ ID NO: 1248942
auacauauucuacugagga

SEQ ID NO: 1248944 - RNA, 19 nt, Artificial Sequence
  Description of Artificial Sequence: Synthetic oligonucleotide
  Sense strand starting at position 110 of SEQ ID NO: 1241128
ucaguagaauauguaucuu

SEQ ID NO: 1248945 - RNA, 19 nt, Artificial Sequence
  Description of Artificial Sequence: Synthetic oligonucleotide
  Antisense strand to SEQ ID NO: 1248944
aagauacauauucuacuga

SEQ ID NO: 1248946 - RNA, 19 nt, Artificial Sequence
  Description of Artificial Sequence: Synthetic oligonucleotide
  Sense strand starting at position 459 of SEQ ID NO: 1241128
ggccuaaacuccgcauuua

SEQ ID NO: 1248947 - RNA, 19 nt, Artificial Sequence
  Description of Artificial Sequence: Synthetic oligonucleotide
  Antisense strand to SEQ ID NO: 1248946
uaaaugcggaguuuaggcc

SEQ ID NO: 1248948 - RNA, 19 nt, Artificial Sequence
  Description of Artificial Sequence: Synthetic oligonucleotide
  Sense strand starting at position 528 of SEQ ID NO: 1241128
ugcugaucaguaggaacau

SEQ ID NO: 1248949 - RNA, 19 nt, Artificial Sequence
  Description of Artificial Sequence: Synthetic oligonucleotide
  Antisense strand to SEQ ID NO: 1248948
auguuccuacugaucagca

SEQ ID NO: 1248950 - RNA, 19 nt, Artificial Sequence
  Description of Artificial Sequence: Synthetic oligonucleotide
  Sense strand starting at position 579 of SEQ ID NO: 1241128
cggcacuagccuuaggauu

SEQ ID NO: 1248951 - RNA, 19 nt, Artificial Sequence
  Description of Artificial Sequence: Synthetic oligonucleotide
  Antisense strand to SEQ ID NO: 1248950
aauccuaaggcuagugccg

SEQ ID NO: 1248952 - RNA, 19 nt, Artificial Sequence
  Description of Artificial Sequence: Synthetic oligonucleotide
  Sense strand starting at position 2055 of SEQ ID NO: 1241128
auuggauguagcugugaaa

SEQ ID NO: 1248953 - RNA, 19 nt, Artificial Sequence
  Description of Artificial Sequence: Synthetic oligonucleotide
  Antisense strand to SEQ ID NO: 1248952
uuucacagcuacauccaau

SEQ ID NO: 1248954 - RNA, 19 nt, Artificial Sequence
  Description of Artificial Sequence: Synthetic oligonucleotide
  Sense strand starting at position 2074 of SEQ ID NO: 1241128
cuucauggauuggugagaa

SEQ ID NO: 1248955 - RNA, 19 nt, Artificial Sequence
  Description of Artificial Sequence: Synthetic oligonucleotide
  Antisense strand to SEQ ID NO: 1248954
uucucaccaauccaugaag

SEQ ID NO: 1248956 - RNA, 19 nt, Artificial Sequence
  Description of Artificial Sequence: Synthetic oligonucleotide
  Sense strand starting at position 2153 of SEQ ID NO: 1241128
gagaguugguuauugagua

SEQ ID NO: 1248957 - RNA, 19 nt, Artificial Sequence
  Description of Artificial Sequence: Synthetic oligonucleotide
  Antisense strand to SEQ ID NO: 1248956
uacucaauaaccaacucuc

SEQ ID NO: 1248958 - RNA, 19 nt, Artificial Sequence
  Description of Artificial Sequence: Synthetic oligonucleotide
  Sense strand starting at position 2158 of SEQ ID NO: 1241128
uugguuauugaguaagcaa

SEQ ID NO: 1248959 - RNA, 19 nt, Artificial Sequence
  Description of Artificial Sequence: Synthetic oligonucleotide
  Antisense strand to SEQ ID NO: 1248958
uugcuuacucaauaaccaa

SEQ ID NO: 1248960 - RNA, 19 nt, Artificial Sequence
  Description of Artificial Sequence: Synthetic oligonucleotide
  Sense strand starting at position 2221 of SEQ ID NO: 1241128
ugggcacugauuggugaau

SEQ ID NO: 1248961 - RNA, 19 nt, Artificial Sequence
  Description of Artificial Sequence: Synthetic oligonucleotide
  Antisense strand to SEQ ID NO: 1248960
auucaccaaucagugccca

SEQ ID NO: 1248962 - RNA, 19 nt, Artificial Sequence
  Description of Artificial Sequence: Synthetic oligonucleotide
  Sense strand starting at position 2222 of SEQ ID NO: 1241128
gggcacugauuggugaauu

SEQ ID NO: 1248963 - RNA, 19 nt, Artificial Sequence
  Description of Artificial Sequence: Synthetic oligonucleotide
  Antisense strand to SEQ ID NO: 1248962
aauucaccaaucagugccc

SEQ ID NO: 1248964 - RNA, 19 nt, Artificial Sequence
  Description of Artificial Sequence: Synthetic oligonucleotide
  Sense strand starting at position 2256 of SEQ ID NO: 1241128
gcaguucgacacgaggauu

SEQ ID NO: 1248965 - RNA, 19 nt, Artificial Sequence
  Description of Artificial Sequence: Synthetic oligonucleotide
  Antisense strand to SEQ ID NO: 1248964
aauccucgugucgaacugc

SEQ ID NO: 1248966 - RNA, 19 nt, Artificial Sequence
  Description of Artificial Sequence: Synthetic oligonucleotide
  Sense strand starting at position 2280 of SEQ ID NO: 1241128
cggagugucccauggaaac

SEQ ID NO: 1248967 - RNA, 19 nt, Artificial Sequence
  Description of Artificial Sequence: Synthetic oligonucleotide
  Antisense strand to SEQ ID NO: 1248966
guuuccaugggacacuccg

SEQ ID NO: 1248968 - RNA, 19 nt, Artificial Sequence
  Description of Artificial Sequence: Synthetic oligonucleotide
  Sense strand starting at position 2405 of SEQ ID NO: 1241128
gccguagcuccaucgcauu

SEQ ID NO: 1248969 - RNA, 19 nt, Artificial Sequence
  Description of Artificial Sequence: Synthetic oligonucleotide
  Antisense strand to SEQ ID NO: 1248968
aaugcgauggagcuacggc

SEQ ID NO: 1248970 - RNA, 19 nt, Artificial Sequence
  Description of Artificial Sequence: Synthetic oligonucleotide
  Sense strand starting at position 2490 of SEQ ID NO: 1241128
caccguuuccuccaggaca

SEQ ID NO: 1248971 - RNA, 19 nt, Artificial Sequence
  Description of Artificial Sequence: Synthetic oligonucleotide
  Antisense strand to SEQ ID NO: 1248970
uguccuggaggaaacggug

SEQ ID NO: 1248972 - RNA, 19 nt, Artificial Sequence
  Description of Artificial Sequence: Synthetic oligonucleotide
  Sense strand starting at position 2772 of SEQ ID NO: 1241128
ucgagaaugugagagauuu

SEQ ID NO: 1248973 - RNA, 19 nt, Artificial Sequence
  Description of Artificial Sequence: Synthetic oligonucleotide
  Antisense strand to SEQ ID NO: 1248972
aaaucucucacauucucga

SEQ ID NO: 1248974 - RNA, 19 nt, Artificial Sequence
  Description of Artificial Sequence: Synthetic oligonucleotide
  Sense strand starting at position 2881 of SEQ ID NO: 1241128
ggagccuucuuaguuaaga

SEQ ID NO: 1248975 - RNA, 19 nt, Artificial Sequence
  Description of Artificial Sequence: Synthetic oligonucleotide
  Antisense strand to SEQ ID NO: 1248974
ucuuaacuaagaaggcucc

SEQ ID NO: 1248976 - RNA, 19 nt, Artificial Sequence
  Description of Artificial Sequence: Synthetic oligonucleotide
  Sense strand starting at position 2882 of SEQ ID NO: 1241128
gagccuucuuaguuaagac

SEQ ID NO: 1248977 - RNA, 19 nt, Artificial Sequence
  Description of Artificial Sequence: Synthetic oligonucleotide
  Antisense strand to SEQ ID NO: 1248976
gucuuaacuaagaaggcuc

SEQ ID NO: 1248978 - RNA, 19 nt, Artificial Sequence
  Description of Artificial Sequence: Synthetic oligonucleotide
  Sense strand starting at position 3036 of SEQ ID NO: 1241128
cuucuucugugaccuuaga

SEQ ID NO: 1248979 - RNA, 19 nt, Artificial Sequence
  Description of Artificial Sequence: Synthetic oligonucleotide
  Antisense strand to SEQ ID NO: 1248978
ucuaaggucacagaagaag

SEQ ID NO: 1248980 - RNA, 19 nt, Artificial Sequence
  Description of Artificial Sequence: Synthetic oligonucleotide
  Sense strand starting at position 3151 of SEQ ID NO: 1241128
cgauaagauagacguugau

SEQ ID NO: 1248981 - RNA, 19 nt, Artificial Sequence
  Description of Artificial Sequence: Synthetic oligonucleotide
  Antisense strand to SEQ ID NO: 1248980
aucaacgucuaucuuaucg

SEQ ID NO: 1248982 - RNA, 19 nt, Artificial Sequence
  Description of Artificial Sequence: Synthetic oligonucleotide
  Sense strand starting at position 3154 of SEQ ID NO: 1241128
uaagauagacguugaucuu

SEQ ID NO: 1248983 - RNA, 19 nt, Artificial Sequence
  Description of Artificial Sequence: Synthetic oligonucleotide
  Antisense strand to SEQ ID NO: 1248982
aagaucaacgucuaucuua

SEQ ID NO: 1248984 - RNA, 19 nt, Artificial Sequence
  Description of Artificial Sequence: Synthetic oligonucleotide
  Sense strand starting at position 3155 of SEQ ID NO: 1241128
aagauagacguugaucuuu

SEQ ID NO: 1248985 - RNA, 19 nt, Artificial Sequence
  Description of Artificial Sequence: Synthetic oligonucleotide
  Antisense strand to SEQ ID NO: 1248984
aaagaucaacgucuaucuu

SEQ ID NO: 1248986 - RNA, 19 nt, Artificial Sequence
  Description of Artificial Sequence: Synthetic oligonucleotide
  Sense strand starting at position 3278 of SEQ ID NO: 1241128
gugacauaucgucaguaau

SEQ ID NO: 1248987 - RNA, 19 nt, Artificial Sequence
  Description of Artificial Sequence: Synthetic oligonucleotide
  Antisense strand to SEQ ID NO: 1248986
auuacugacgauaugucac

SEQ ID NO: 1248988 - RNA, 19 nt, Artificial Sequence
  Description of Artificial Sequence: Synthetic oligonucleotide
  Sense strand starting at position 3281 of SEQ ID NO: 1241128
acauaucgucaguaaucca

SEQ ID NO: 1248989 - RNA, 19 nt, Artificial Sequence
  Description of Artificial Sequence: Synthetic oligonucleotide
  Antisense strand to SEQ ID NO: 1248988
uggauuacugacgauaugu

SEQ ID NO: 1248990 - RNA, 19 nt, Artificial Sequence
  Description of Artificial Sequence: Synthetic oligonucleotide
  Sense strand starting at position 3291 of SEQ ID NO: 1241128
aguaauccacguggacuaa

SEQ ID NO: 1248991 - RNA, 19 nt, Artificial Sequence
  Description of Artificial Sequence: Synthetic oligonucleotide
  Antisense strand to SEQ ID NO: 1248990
uuaguccacguggauuacu

SEQ ID NO: 1248992 - RNA, 19 nt, Artificial Sequence
  Description of Artificial Sequence: Synthetic oligonucleotide
  Sense strand starting at position 3292 of SEQ ID NO: 1241128
guaauccacguggacuaaa

SEQ ID NO: 1248993 - RNA, 19 nt, Artificial Sequence
  Description of Artificial Sequence: Synthetic oligonucleotide
  Antisense strand to SEQ ID NO: 1248992
uuuaguccacguggauuac

SEQ ID NO: 1248994 - RNA, 19 nt, Artificial Sequence
  Description of Artificial Sequence: Synthetic oligonucleotide
  Sense strand starting at position 3512 of SEQ ID NO: 1241128
augauugugugacuuaaca

SEQ ID NO: 1248995 - RNA, 19 nt, Artificial Sequence
  Description of Artificial Sequence: Synthetic oligonucleotide
  Antisense strand to SEQ ID NO: 1248994
uguuaagucacacaaucau

SEQ ID NO: 1248996 - RNA, 19 nt, Artificial Sequence
  Description of Artificial Sequence: Synthetic oligonucleotide
  Sense strand starting at position 3546 of SEQ ID NO: 1241128
ggcaguugugcugaagaaa

SEQ ID NO: 1248997 - RNA, 19 nt, Artificial Sequence
  Description of Artificial Sequence: Synthetic oligonucleotide
  Antisense strand to SEQ ID NO: 1248996
uuucuucagcacaacugcc

SEQ ID NO: 1248998 - RNA, 19 nt, Artificial Sequence
  Description of Artificial Sequence: Synthetic oligonucleotide
  Sense strand starting at position 3567 of SEQ ID NO: 1241128
agaacaucucagugauuac

SEQ ID NO: 1248999 - RNA, 19 nt, Artificial Sequence
  Description of Artificial Sequence: Synthetic oligonucleotide
  Antisense strand to SEQ ID NO: 1248998
guaaucacugagauguucu

SEQ ID NO: 1249000 - RNA, 19 nt, Artificial Sequence
  Description of Artificial Sequence: Synthetic oligonucleotide
  Sense strand starting at position 3570 of SEQ ID NO: 1241128
acaucucagugauuacuga

SEQ ID NO: 1249001 - RNA, 19 nt, Artificial Sequence
  Description of Artificial Sequence: Synthetic oligonucleotide
  Antisense strand to SEQ ID NO: 1249000
ucaguaaucacugagaugu

SEQ ID NO: 1249002 - RNA, 19 nt, Artificial Sequence
  Description of Artificial Sequence: Synthetic oligonucleotide
  Sense strand starting at position 3579 of SEQ ID NO: 1241128
ugauuacugaggugaguca

SEQ ID NO: 1249003 - RNA, 19 nt, Artificial Sequence
  Description of Artificial Sequence: Synthetic oligonucleotide
  Antisense strand to SEQ ID NO: 1249002
ugacucaccucaguaauca

SEQ ID NO: 1249004 - RNA, 19 nt, Artificial Sequence
  Description of Artificial Sequence: Synthetic oligonucleotide
  Sense strand starting at position 3645 of SEQ ID NO: 1241128
uucuauggauuaguaaaga

SEQ ID NO: 1249005 - RNA, 19 nt, Artificial Sequence
  Description of Artificial Sequence: Synthetic oligonucleotide
  Antisense strand to SEQ ID NO: 1249004
ucuuuacuaauccauagaa

SEQ ID NO: 1249006 - RNA, 19 nt, Artificial Sequence
  Description of Artificial Sequence: Synthetic oligonucleotide
  Sense strand starting at position 3715 of SEQ ID NO: 1241128
ucaaaugagucuguauaau

SEQ ID NO: 1249007 - RNA, 19 nt, Artificial Sequence
  Description of Artificial Sequence: Synthetic oligonucleotide
  Antisense strand to SEQ ID NO: 1249006
auuauacagacucauuuga

SEQ ID NO: 1249008 - RNA, 19 nt, Artificial Sequence
  Description of Artificial Sequence: Synthetic oligonucleotide
  Sense strand starting at position 3735 of SEQ ID NO: 1241128
agcuuucuaguguaauauu

SEQ ID NO: 1249009 - RNA, 19 nt, Artificial Sequence
  Description of Artificial Sequence: Synthetic oligonucleotide
  Antisense strand to SEQ ID NO: 1249008
aauauuacacuagaaagcu

SEQ ID NO: 1249010 - RNA, 19 nt, Artificial Sequence
  Description of Artificial Sequence: Synthetic oligonucleotide
  Sense strand starting at position 3800 of SEQ ID NO: 1241128
ccauuuacgugguucucau

SEQ ID NO: 1249011 - RNA, 19 nt, Artificial Sequence
  Description of Artificial Sequence: Synthetic oligonucleotide
  Antisense strand to SEQ ID NO: 1249010
augagaaccacguaaaugg

SEQ ID NO: 1249012 - RNA, 19 nt, Artificial Sequence
  Description of Artificial Sequence: Synthetic oligonucleotide
  Sense strand starting at position 3827 of SEQ ID NO: 1241128
uuugauauaccucauguuu

SEQ ID NO: 1249013 - RNA, 19 nt, Artificial Sequence
  Description of Artificial Sequence: Synthetic oligonucleotide
  Antisense strand to SEQ ID NO: 1249012
aaacaugagguauaucaaa

SEQ ID NO: 1249014 - RNA, 19 nt, Artificial Sequence
  Description of Artificial Sequence: Synthetic oligonucleotide
  Sense strand starting at position 3922 of SEQ ID NO: 1241128
agaucuuguaaaugggagu

SEQ ID NO: 1249015 - RNA, 19 nt, Artificial Sequence
  Description of Artificial Sequence: Synthetic oligonucleotide
  Antisense strand to SEQ ID NO: 1249014
acucccauuuacaagaucu

SEQ ID NO: 1249016 - RNA, 19 nt, Artificial Sequence
  Description of Artificial Sequence: Synthetic oligonucleotide
  Sense strand starting at position 3928 of SEQ ID NO: 1241128
uguaaaugggaguguuuag

SEQ ID NO: 1249017 - RNA, 19 nt, Artificial Sequence
  Description of Artificial Sequence: Synthetic oligonucleotide
  Antisense strand to SEQ ID NO: 1249016
cuaaacacucccauuuaca

SEQ ID NO: 1249018 - RNA, 19 nt, Artificial Sequence
  Description of Artificial Sequence: Synthetic oligonucleotide
  Sense strand starting at position 25 of SEQ ID NO: 1241129
gaguaacgaucaccuguaa

SEQ ID NO: 1249019 - RNA, 19 nt, Artificial Sequence
  Description of Artificial Sequence: Synthetic oligonucleotide
  Antisense strand to SEQ ID NO: 1249018
uuacaggugaucguuacuc

SEQ ID NO: 1249020 - RNA, 19 nt, Artificial Sequence
  Description of Artificial Sequence: Synthetic oligonucleotide
  Sense strand starting at position 58 of SEQ ID NO: 1241129
gaccgaagucagugagaga

SEQ ID NO: 1249021 - RNA, 19 nt, Artificial Sequence
  Description of Artificial Sequence: Synthetic oligonucleotide
  Antisense strand to SEQ ID NO: 1249020
ucucucacugacuucgguc

SEQ ID NO: 1249022 - RNA, 19 nt, Artificial Sequence
  Description of Artificial Sequence: Synthetic oligonucleotide
  Sense strand starting at position 93 of SEQ ID NO: 1241129
ugggccagugcucaacaaa

SEQ ID NO: 1249023 - RNA, 19 nt, Artificial Sequence
  Description of Artificial Sequence: Synthetic oligonucleotide
  Antisense strand to SEQ ID NO: 1249022
uuuguugagcacuggccca

SEQ ID NO: 1249024 - RNA, 19 nt, Artificial Sequence
  Description of Artificial Sequence: Synthetic oligonucleotide
  Sense strand starting at position 214 of SEQ ID NO: 1241129
cuguuugugcaagaacaga

SEQ ID NO: 1249025 - RNA, 19 nt, Artificial Sequence
  Description of Artificial Sequence: Synthetic oligonucleotide
  Antisense strand to SEQ ID NO: 1249024
ucuguucuugcacaaacag

SEQ ID NO: 1249026 - RNA, 19 nt, Artificial Sequence
  Description of Artificial Sequence: Synthetic oligonucleotide
  Sense strand starting at position 848 of SEQ ID NO: 1241129
cucagaaaguguuccaacu

SEQ ID NO: 1249027 - RNA, 19 nt, Artificial Sequence
  Description of Artificial Sequence: Synthetic oligonucleotide
  Antisense strand to SEQ ID NO: 1249026
aguuggaacacuuucugag

SEQ ID NO: 1249028 - RNA, 19 nt, Artificial Sequence
  Description of Artificial Sequence: Synthetic oligonucleotide
  Sense strand starting at position 869 of SEQ ID NO: 1241129
uugcuuggccuggaaggau

SEQ ID NO: 1249029 - RNA, 19 nt, Artificial Sequence
  Description of Artificial Sequence: Synthetic oligonucleotide
  Antisense strand to SEQ ID NO: 1249028
auccuuccaggccaagcaa

SEQ ID NO: 1249030 - RNA, 19 nt, Artificial Sequence
  Description of Artificial Sequence: Synthetic oligonucleotide
  Sense strand starting at position 937 of SEQ ID NO: 1241129
ugcagaacccuuugccaga

SEQ ID NO: 1249031 - RNA, 19 nt, Artificial Sequence
  Description of Artificial Sequence: Synthetic oligonucleotide
  Antisense strand to SEQ ID NO: 1249030
ucuggcaaaggguucugca

SEQ ID NO: 1249032 - RNA, 19 nt, Artificial Sequence
  Description of Artificial Sequence: Synthetic oligonucleotide
  Sense strand starting at position 1240 of SEQ ID NO: 1241129
cugcuauggucucccacaa

SEQ ID NO: 1249033 - RNA, 19 nt, Artificial Sequence
  Description of Artificial Sequence: Synthetic oligonucleotide
  Antisense strand to SEQ ID NO: 1249032
uugugggagaccauagcag

SEQ ID NO: 1249034 - RNA, 19 nt, Artificial Sequence
  Description of Artificial Sequence: Synthetic oligonucleotide
  Sense strand starting at position 1341 of SEQ ID NO: 1241129
gaaagcauuucugaaaguc

SEQ ID NO: 1249035 - RNA, 19 nt, Artificial Sequence
  Description of Artificial Sequence: Synthetic oligonucleotide
  Antisense strand to SEQ ID NO: 1249034
gacuuucagaaaugcuuuc

SEQ ID NO: 1249036 - RNA, 19 nt, Artificial Sequence
  Description of Artificial Sequence: Synthetic oligonucleotide
  Sense strand starting at position 1349 of SEQ ID NO: 1241129
uucugaaagucacuugucu

SEQ ID NO: 1249037 - RNA, 19 nt, Artificial Sequence
  Description of Artificial Sequence: Synthetic oligonucleotide
  Antisense strand to SEQ ID NO: 1249036
agacaagugacuuucagaa

SEQ ID NO: 1249038 - RNA, 19 nt, Artificial Sequence
  Description of Artificial Sequence: Synthetic oligonucleotide
  Sense strand starting at position 1353 of SEQ ID NO: 1241129
gaaagucacuugucugaca

SEQ ID NO: 1249039 - RNA, 19 nt, Artificial Sequence
  Description of Artificial Sequence: Synthetic oligonucleotide
  Antisense strand to SEQ ID NO: 1249038
ugucagacaagugacuuuc

SEQ ID NO: 1249040 - RNA, 19 nt, Artificial Sequence
  Description of Artificial Sequence: Synthetic oligonucleotide
  Sense strand starting at position 1446 of SEQ ID NO: 1241129
ugcacagcagagugauauu

SEQ ID NO: 1249041 - RNA, 19 nt, Artificial Sequence
  Description of Artificial Sequence: Synthetic oligonucleotide
  Antisense strand to SEQ ID NO: 1249040
aauaucacucugcugugca

SEQ ID NO: 1249042 - RNA, 19 nt, Artificial Sequence
  Description of Artificial Sequence: Synthetic oligonucleotide
  Sense strand starting at position 1457 of SEQ ID NO: 1241129
gugauauucugagccagag

SEQ ID NO: 1249043 - RNA, 19 nt, Artificial Sequence
  Description of Artificial Sequence: Synthetic oligonucleotide
  Antisense strand to SEQ ID NO: 1249042
cucuggcucagaauaucac

SEQ ID NO: 1249044 - RNA, 19 nt, Artificial Sequence
  Description of Artificial Sequence: Synthetic oligonucleotide
  Sense strand starting at position 1467 of SEQ ID NO: 1241129
gagccagaguccuccagaa

SEQ ID NO: 1249045 - RNA, 19 nt, Artificial Sequence
  Description of Artificial Sequence: Synthetic oligonucleotide
  Antisense strand to SEQ ID NO: 1249044
uucuggaggacucuggcuc

SEQ ID NO: 1249046 - RNA, 19 nt, Artificial Sequence
  Description of Artificial Sequence: Synthetic oligonucleotide
  Sense strand starting at position 1469 of SEQ ID NO: 1241129
gccagaguccuccagaaga

SEQ ID NO: 1249047 - RNA, 19 nt, Artificial Sequence
  Description of Artificial Sequence: Synthetic oligonucleotide
  Antisense strand to SEQ ID NO: 1249046
ucuucuggaggacucuggc

SEQ ID NO: 1249048 - RNA, 19 nt, Artificial Sequence
  Description of Artificial Sequence: Synthetic oligonucleotide
  Sense strand starting at position 1489 of SEQ ID NO: 1241129
uggguaaguacaugcaaau

SEQ ID NO: 1249049 - RNA, 19 nt, Artificial Sequence
  Description of Artificial Sequence: Synthetic oligonucleotide
  Antisense strand to SEQ ID NO: 1249048
auuugcauguacuuaccca

SEQ ID NO: 1249050 - RNA, 19 nt, Artificial Sequence
  Description of Artificial Sequence: Synthetic oligonucleotide
  Sense strand starting at position 1612 of SEQ ID NO: 1241129
agcgguuuccaguaaguac

SEQ ID NO: 1249051 - RNA, 19 nt, Artificial Sequence
  Description of Artificial Sequence: Synthetic oligonucleotide
  Antisense strand to SEQ ID NO: 1249050
guacuuacuggaaaccgcu

SEQ ID NO: 1249052 - RNA, 19 nt, Artificial Sequence
  Description of Artificial Sequence: Synthetic oligonucleotide
  Sense strand starting at position 1664 of SEQ ID NO: 1241129
uuugcaagaucuguauaag

SEQ ID NO: 1249053 - RNA, 19 nt, Artificial Sequence
  Description of Artificial Sequence: Synthetic oligonucleotide
  Antisense strand to SEQ ID NO: 1249052
cuuauacagaucuugcaaa

SEQ ID NO: 1249054 - RNA, 19 nt, Artificial Sequence
  Description of Artificial Sequence: Synthetic oligonucleotide
  Sense strand starting at position 1665 of SEQ ID NO: 1241129
uugcaagaucuguauaaga

SEQ ID NO: 1249055 - RNA, 19 nt, Artificial Sequence
  Description of Artificial Sequence: Synthetic oligonucleotide
  Antisense strand to SEQ ID NO: 1249054
ucuuauacagaucuugcaa

SEQ ID NO: 1249056 - RNA, 19 nt, Artificial Sequence
  Description of Artificial Sequence: Synthetic oligonucleotide
  Sense strand starting at position 1703 of SEQ ID NO: 1241129
ccuguuaggcucugaaaca

SEQ ID NO: 1249057 - RNA, 19 nt, Artificial Sequence
  Description of Artificial Sequence: Synthetic oligonucleotide
  Antisense strand to SEQ ID NO: 1249056
uguuucagagccuaacagg

SEQ ID NO: 1249058 - RNA, 19 nt, Artificial Sequence
  Description of Artificial Sequence: Synthetic oligonucleotide
  Sense strand starting at position 1754 of SEQ ID NO: 1241129
ucuugaaagugucuuaauu

SEQ ID NO: 1249059 - RNA, 19 nt, Artificial Sequence
  Description of Artificial Sequence: Synthetic oligonucleotide
  Antisense strand to SEQ ID NO: 1249058
aauuaagacacuuucaaga

SEQ ID NO: 1249060 - RNA, 19 nt, Artificial Sequence
  Description of Artificial Sequence: Synthetic oligonucleotide
  Sense strand starting at position 1853 of SEQ ID NO: 1241129
cuuugaagcagggaguuua

SEQ ID NO: 1249061 - RNA, 19 nt, Artificial Sequence
  Description of Artificial Sequence: Synthetic oligonucleotide
  Antisense strand to SEQ ID NO: 1249060
uaaacucccugcuucaaag

SEQ ID NO: 1249062 - RNA, 19 nt, Artificial Sequence
  Description of Artificial Sequence: Synthetic oligonucleotide
  Sense strand starting at position 1918 of SEQ ID NO: 1241129
uguuauacaucucagauuu

SEQ ID NO: 1249063 - RNA, 19 nt, Artificial Sequence
  Description of Artificial Sequence: Synthetic oligonucleotide
  Antisense strand to SEQ ID NO: 1249062
aaaucugagauguauaaca

SEQ ID NO: 1249064 - RNA, 19 nt, Artificial Sequence
  Description of Artificial Sequence: Synthetic oligonucleotide
  Sense strand starting at position 2077 of SEQ ID NO: 1241129
ggccauauauggguauguu

SEQ ID NO: 1249065 - RNA, 19 nt, Artificial Sequence
  Description of Artificial Sequence: Synthetic oligonucleotide
  Antisense strand to SEQ ID NO: 1249064
aacauacccauauauggcc

SEQ ID NO: 1249066 - RNA, 19 nt, Artificial Sequence
  Description of Artificial Sequence: Synthetic oligonucleotide
  Sense strand starting at position 2078 of SEQ ID NO: 1241129
gccauauauggguauguuu

SEQ ID NO: 1249067 - RNA, 19 nt, Artificial Sequence
  Description of Artificial Sequence: Synthetic oligonucleotide
  Antisense strand to SEQ ID NO: 1249066
aaacauacccauauauggc

SEQ ID NO: 1249068 - RNA, 19 nt, Artificial Sequence
  Description of Artificial Sequence: Synthetic oligonucleotide
  Sense strand starting at position 2319 of SEQ ID NO: 1241129
agaugaaggaguugacgua

SEQ ID NO: 1249069 - RNA, 19 nt, Artificial Sequence
  Description of Artificial Sequence: Synthetic oligonucleotide
  Antisense strand to SEQ ID NO: 1249068
uacgucaacuccuucaucu

SEQ ID NO: 1249070 - RNA, 19 nt, Artificial Sequence
  Description of Artificial Sequence: Synthetic oligonucleotide
  Sense strand starting at position 2529 of SEQ ID NO: 1241129
ccuccuggucuagggaaga

SEQ ID NO: 1249071 - RNA, 19 nt, Artificial Sequence
  Description of Artificial Sequence: Synthetic oligonucleotide
  Antisense strand to SEQ ID NO: 1249070
ucuucccuagaccaggagg

SEQ ID NO: 1249072 - RNA, 19 nt, Artificial Sequence
  Description of Artificial Sequence: Synthetic oligonucleotide
  Sense strand starting at position 2542 of SEQ ID NO: 1241129
ggaagaacgucccauuucu

SEQ ID NO: 1249073 - RNA, 19 nt, Artificial Sequence
  Description of Artificial Sequence: Synthetic oligonucleotide
  Antisense strand to SEQ ID NO: 1249072
agaaaugggacguucuucc

SEQ ID NO: 1249074 - RNA, 19 nt, Artificial Sequence
  Description of Artificial Sequence: Synthetic oligonucleotide
  Sense strand starting at position 2694 of SEQ ID NO: 1241129
gaaacaugacuuggucugu

SEQ ID NO: 1249075 - RNA, 19 nt, Artificial Sequence
  Description of Artificial Sequence: Synthetic oligonucleotide
  Antisense strand to SEQ ID NO: 1249074
acagaccaagucauguuuc

SEQ ID NO: 1249076 - RNA, 19 nt, Artificial Sequence
  Description of Artificial Sequence: Synthetic oligonucleotide
  Sense strand starting at position 2897 of SEQ ID NO: 1241129
caagguucuggaggucuga

SEQ ID NO: 1249077 - RNA, 19 nt, Artificial Sequence
  Description of Artificial Sequence: Synthetic oligonucleotide
  Antisense strand to SEQ ID NO: 1249076
ucagaccuccagaaccuug

SEQ ID NO: 1249078 - RNA, 19 nt, Artificial Sequence
  Description of Artificial Sequence: Synthetic oligonucleotide
  Sense strand starting at position 2906 of SEQ ID NO: 1241129
ggaggucugacuggugcua

SEQ ID NO: 1249079 - RNA, 19 nt, Artificial Sequence
  Description of Artificial Sequence: Synthetic oligonucleotide
  Antisense strand to SEQ ID NO: 1249078
uagcaccagucagaccucc

SEQ ID NO: 1249080 - RNA, 19 nt, Artificial Sequence
  Description of Artificial Sequence: Synthetic oligonucleotide
  Sense strand starting at position 3030 of SEQ ID NO: 1241129
cuggguggcccucaaaguu

SEQ ID NO: 1249081 - RNA, 19 nt, Artificial Sequence
  Description of Artificial Sequence: Synthetic oligonucleotide
  Antisense strand to SEQ ID NO: 1249080
aacuuugagggccacccag

SEQ ID NO: 1249082 - RNA, 19 nt, Artificial Sequence
  Description of Artificial Sequence: Synthetic oligonucleotide
  Sense strand starting at position 3039 of SEQ ID NO: 1241129
ccucaaaguuagcucaagu

SEQ ID NO: 1249083 - RNA, 19 nt, Artificial Sequence
  Description of Artificial Sequence: Synthetic oligonucleotide
  Antisense strand to SEQ ID NO: 1249082
acuugagcuaacuuugagg

SEQ ID NO: 1249084 - RNA, 19 nt, Artificial Sequence
  Description of Artificial Sequence: Synthetic oligonucleotide
  Sense strand starting at position 3171 of SEQ ID NO: 1241129
gagagacgucucuguggga

SEQ ID NO: 1249085 - RNA, 19 nt, Artificial Sequence
  Description of Artificial Sequence: Synthetic oligonucleotide
  Antisense strand to SEQ ID NO: 1249084
ucccacagagacgucucuc

SEQ ID NO: 1249086 - RNA, 19 nt, Artificial Sequence
  Description of Artificial Sequence: Synthetic oligonucleotide
  Sense strand starting at position 3396 of SEQ ID NO: 1241129
ccaagaugugucuauuccu

SEQ ID NO: 1249087 - RNA, 19 nt, Artificial Sequence
  Description of Artificial Sequence: Synthetic oligonucleotide
  Antisense strand to SEQ ID NO: 1249086
aggaauagacacaucuugg

SEQ ID NO: 1249088 - RNA, 19 nt, Artificial Sequence
  Description of Artificial Sequence: Synthetic oligonucleotide
  Sense strand starting at position 3436 of SEQ ID NO: 1241129
uggccuagugauggacuua

SEQ ID NO: 1249089 - RNA, 19 nt, Artificial Sequence
  Description of Artificial Sequence: Synthetic oligonucleotide
  Antisense strand to SEQ ID NO: 1249088
uaaguccaucacuaggcca

SEQ ID NO: 1249090 - RNA, 19 nt, Artificial Sequence
  Description of Artificial Sequence: Synthetic oligonucleotide
  Sense strand starting at position 3437 of SEQ ID NO: 1241129
ggccuagugauggacuuaa

SEQ ID NO: 1249091 - RNA, 19 nt, Artificial Sequence
  Description of Artificial Sequence: Synthetic oligonucleotide
  Antisense strand to SEQ ID NO: 1249090
uuaaguccaucacuaggcc

SEQ ID NO: 1249092 - RNA, 19 nt, Artificial Sequence
  Description of Artificial Sequence: Synthetic oligonucleotide
  Sense strand starting at position 3736 of SEQ ID NO: 1241129
gguaguuugauauguagua

SEQ ID NO: 1249093 - RNA, 19 nt, Artificial Sequence
  Description of Artificial Sequence: Synthetic oligonucleotide
  Antisense strand to SEQ ID NO: 1249092
uacuacauaucaaacuacc

SEQ ID NO: 1249094 - RNA, 19 nt, Artificial Sequence
  Description of Artificial Sequence: Synthetic oligonucleotide
  Sense strand starting at position 3737 of SEQ ID NO: 1241129
guaguuugauauguaguaa

SEQ ID NO: 1249095 - RNA, 19 nt, Artificial Sequence
  Description of Artificial Sequence: Synthetic oligonucleotide
  Antisense strand to SEQ ID NO: 1249094
uuacuacauaucaaacuac

SEQ ID NO: 1249096 - RNA, 19 nt, Artificial Sequence
  Description of Artificial Sequence: Synthetic oligonucleotide
  Sense strand starting at position 3950 of SEQ ID NO: 1241129
aguucuuggguuuaucaga

SEQ ID NO: 1249097 - RNA, 19 nt, Artificial Sequence
  Description of Artificial Sequence: Synthetic oligonucleotide
  Antisense strand to SEQ ID NO: 1249096
ucugauaaacccaagaacu

SEQ ID NO: 1249098 - RNA, 19 nt, Artificial Sequence
  Description of Artificial Sequence: Synthetic oligonucleotide
  Sense strand starting at position 51 of SEQ ID NO: 1241130
acgaguuccacuuaggaac

SEQ ID NO: 1249099 - RNA, 19 nt, Artificial Sequence
  Description of Artificial Sequence: Synthetic oligonucleotide
  Antisense strand to SEQ ID NO: 1249098
guuccuaaguggaacucgu

SEQ ID NO: 1249100 - RNA, 19 nt, Artificial Sequence
  Description of Artificial Sequence: Synthetic oligonucleotide
  Sense strand starting at position 82 of SEQ ID NO: 1241130
cccugucagcaucaggaaa

SEQ ID NO: 1249101 - RNA, 19 nt, Artificial Sequence
  Description of Artificial Sequence: Synthetic oligonucleotide
  Antisense strand to SEQ ID NO: 1249100
uuuccugaugcugacaggg

SEQ ID NO: 1249102 - RNA, 19 nt, Artificial Sequence
  Description of Artificial Sequence: Synthetic oligonucleotide
  Sense strand starting at position 368 of SEQ ID NO: 1241130
gugucaggccaucagagua

SEQ ID NO: 1249103 - RNA, 19 nt, Artificial Sequence
  Description of Artificial Sequence: Synthetic oligonucleotide
  Antisense strand to SEQ ID NO: 1249102
uacucugauggccugacac

SEQ ID NO: 1249104 - RNA, 19 nt, Artificial Sequence
  Description of Artificial Sequence: Synthetic oligonucleotide
  Sense strand starting at position 373 of SEQ ID NO: 1241130
aggccaucagaguaguaag

SEQ ID NO: 1249105 - RNA, 19 nt, Artificial Sequence
  Description of Artificial Sequence: Synthetic oligonucleotide
  Antisense strand to SEQ ID NO: 1249104
cuuacuacucugauggccu

SEQ ID NO: 1249106 - RNA, 19 nt, Artificial Sequence
  Description of Artificial Sequence: Synthetic oligonucleotide
  Sense strand starting at position 645 of SEQ ID NO: 1241130
aacguaacugagugaggaa

SEQ ID NO: 1249107 - RNA, 19 nt, Artificial Sequence
  Description of Artificial Sequence: Synthetic oligonucleotide
  Antisense strand to SEQ ID NO: 1249106
uuccucacucaguuacguu

SEQ ID NO: 1249108 - RNA, 19 nt, Artificial Sequence
  Description of Artificial Sequence: Synthetic oligonucleotide
  Sense strand starting at position 955 of SEQ ID NO: 1241130
gcagccaacucaucaaguu

SEQ ID NO: 1249109 - RNA, 19 nt, Artificial Sequence
  Description of Artificial Sequence: Synthetic oligonucleotide
  Antisense strand to SEQ ID NO: 1249108
aacuugaugaguuggcugc

SEQ ID NO: 1249110 - RNA, 19 nt, Artificial Sequence
  Description of Artificial Sequence: Synthetic oligonucleotide
  Sense strand starting at position 1125 of SEQ ID NO: 1241130
gcuggaaguuccuugagga

SEQ ID NO: 1249111 - RNA, 19 nt, Artificial Sequence
  Description of Artificial Sequence: Synthetic oligonucleotide
  Antisense strand to SEQ ID NO: 1249110
uccucaaggaacuuccagc

SEQ ID NO: 1249112 - RNA, 19 nt, Artificial Sequence
  Description of Artificial Sequence: Synthetic oligonucleotide
  Sense strand starting at position 1126 of SEQ ID NO: 1241130
cuggaaguuccuugaggac

SEQ ID NO: 1249113 - RNA, 19 nt, Artificial Sequence
  Description of Artificial Sequence: Synthetic oligonucleotide
  Antisense strand to SEQ ID NO: 1249112
guccucaaggaacuuccag

SEQ ID NO: 1249114 - RNA, 19 nt, Artificial Sequence
  Description of Artificial Sequence: Synthetic oligonucleotide
  Sense strand starting at position 1129 of SEQ ID NO: 1241130
gaaguuccuugaggacuga

SEQ ID NO: 1249115 - RNA, 19 nt, Artificial Sequence
  Description of Artificial Sequence: Synthetic oligonucleotide
  Antisense strand to SEQ ID NO: 1249114
ucaguccucaaggaacuuc

SEQ ID NO: 1249116 - RNA, 19 nt, Artificial Sequence
  Description of Artificial Sequence: Synthetic oligonucleotide
  Sense strand starting at position 1293 of SEQ ID NO: 1241130
caguuagcggagugaacuu

SEQ ID NO: 1249117 - RNA, 19 nt, Artificial Sequence
  Description of Artificial Sequence: Synthetic oligonucleotide
  Antisense strand to SEQ ID NO: 1249116
aaguucacuccgcuaacug

SEQ ID NO: 1249118 - RNA, 19 nt, Artificial Sequence
  Description of Artificial Sequence: Synthetic oligonucleotide
  Sense strand starting at position 1652 of SEQ ID NO: 1241130
gaggaagcccugggagauu

SEQ ID NO: 1249119 - RNA, 19 nt, Artificial Sequence
  Description of Artificial Sequence: Synthetic oligonucleotide
  Antisense strand to SEQ ID NO: 1249118
aaucucccagggcuuccuc

SEQ ID NO: 1249120 - RNA, 19 nt, Artificial Sequence
  Description of Artificial Sequence: Synthetic oligonucleotide
  Sense strand starting at position 2005 of SEQ ID NO: 1241130
aguguuauuauaggaugca

SEQ ID NO: 1249121 - RNA, 19 nt, Artificial Sequence
  Description of Artificial Sequence: Synthetic oligonucleotide
  Antisense strand to SEQ ID NO: 1249120
ugcauccuauaauaacacu

SEQ ID NO: 1249122 - RNA, 19 nt, Artificial Sequence
  Description of Artificial Sequence: Synthetic oligonucleotide
  Sense strand starting at position 2008 of SEQ ID NO: 1241130
guuauuauaggaugcauga

SEQ ID NO: 1249123 - RNA, 19 nt, Artificial Sequence
  Description of Artificial Sequence: Synthetic oligonucleotide
  Antisense strand to SEQ ID NO: 1249122
ucaugcauccuauaauaac

SEQ ID NO: 1249124 - RNA, 19 nt, Artificial Sequence
  Description of Artificial Sequence: Synthetic oligonucleotide
  Sense strand starting at position 2095 of SEQ ID NO: 1241130
ggcugugugacgugagaca

SEQ ID NO: 1249125 - RNA, 19 nt, Artificial Sequence
  Description of Artificial Sequence: Synthetic oligonucleotide
  Antisense strand to SEQ ID NO: 1249124
ugucucacgucacacagcc

SEQ ID NO: 1249126 - RNA, 19 nt, Artificial Sequence
  Description of Artificial Sequence: Synthetic oligonucleotide
  Sense strand starting at position 2181 of SEQ ID NO: 1241130
gccggugaggccugaguaa

SEQ ID NO: 1249127 - RNA, 19 nt, Artificial Sequence
  Description of Artificial Sequence: Synthetic oligonucleotide
  Antisense strand to SEQ ID NO: 1249126
uuacucaggccucaccggc

SEQ ID NO: 1249128 - RNA, 19 nt, Artificial Sequence
  Description of Artificial Sequence: Synthetic oligonucleotide
  Sense strand starting at position 2183 of SEQ ID NO: 1241130
cggugaggccugaguaagu

SEQ ID NO: 1249129 - RNA, 19 nt, Artificial Sequence
  Description of Artificial Sequence: Synthetic oligonucleotide
  Antisense strand to SEQ ID NO: 1249128
acuuacucaggccucaccg

SEQ ID NO: 1249130 - RNA, 19 nt, Artificial Sequence
  Description of Artificial Sequence: Synthetic oligonucleotide
  Sense strand starting at position 2213 of SEQ ID NO: 1241130
ggagcuuaguggaguguga

SEQ ID NO: 1249131 - RNA, 19 nt, Artificial Sequence
  Description of Artificial Sequence: Synthetic oligonucleotide
  Antisense strand to SEQ ID NO: 1249130
ucacacuccacuaagcucc

SEQ ID NO: 1249132 - RNA, 19 nt, Artificial Sequence
  Description of Artificial Sequence: Synthetic oligonucleotide
  Sense strand starting at position 2234 of SEQ ID NO: 1241130
cacagaggguguuccacau

SEQ ID NO: 1249133 - RNA, 19 nt, Artificial Sequence
  Description of Artificial Sequence: Synthetic oligonucleotide
  Antisense strand to SEQ ID NO: 1249132
auguggaacacccucugug

SEQ ID NO: 1249134 - RNA, 19 nt, Artificial Sequence
  Description of Artificial Sequence: Synthetic oligonucleotide
  Sense strand starting at position 2238 of SEQ ID NO: 1241130
gaggguguuccacauguac

SEQ ID NO: 1249135 - RNA, 19 nt, Artificial Sequence
  Description of Artificial Sequence: Synthetic oligonucleotide
  Antisense strand to SEQ ID NO: 1249134
guacauguggaacacccuc

SEQ ID NO: 1249136 - RNA, 19 nt, Artificial Sequence
  Description of Artificial Sequence: Synthetic oligonucleotide
  Sense strand starting at position 2240 of SEQ ID NO: 1241130
ggguguuccacauguacuc

SEQ ID NO: 1249137 - RNA, 19 nt, Artificial Sequence
  Description of Artificial Sequence: Synthetic oligonucleotide
  Antisense strand to SEQ ID NO: 1249136
gaguacauguggaacaccc

SEQ ID NO: 1249138 - RNA, 19 nt, Artificial Sequence
  Description of Artificial Sequence: Synthetic oligonucleotide
  Sense strand starting at position 2388 of SEQ ID NO: 1241130
ucgugagaacaggguauau

SEQ ID NO: 1249139 - RNA, 19 nt, Artificial Sequence
  Description of Artificial Sequence: Synthetic oligonucleotide
  Antisense strand to SEQ ID NO: 1249138
auauacccuguucucacga

SEQ ID NO: 1249140 - RNA, 19 nt, Artificial Sequence
  Description of Artificial Sequence: Synthetic oligonucleotide
  Sense strand starting at position 2543 of SEQ ID NO: 1241130
ggguaauuaugacccugag

SEQ ID NO: 1249141 - RNA, 19 nt, Artificial Sequence
  Description of Artificial Sequence: Synthetic oligonucleotide
  Antisense strand to SEQ ID NO: 1249140
cucagggucauaauuaccc

SEQ ID NO: 1249142 - RNA, 19 nt, Artificial Sequence
  Description of Artificial Sequence: Synthetic oligonucleotide
  Sense strand starting at position 2594 of SEQ ID NO: 1241130
ccuacagauucugugggua

SEQ ID NO: 1249143 - RNA, 19 nt, Artificial Sequence
  Description of Artificial Sequence: Synthetic oligonucleotide
  Antisense strand to SEQ ID NO: 1249142
uacccacagaaucuguagg

SEQ ID NO: 1249144 - RNA, 19 nt, Artificial Sequence
  Description of Artificial Sequence: Synthetic oligonucleotide
  Sense strand starting at position 2819 of SEQ ID NO: 1241130
gccugcauguguccucauu

SEQ ID NO: 1249145 - RNA, 19 nt, Artificial Sequence
  Description of Artificial Sequence: Synthetic oligonucleotide
  Antisense strand to SEQ ID NO: 1249144
aaugaggacacaugcaggc

SEQ ID NO: 1249146 - RNA, 19 nt, Artificial Sequence
  Description of Artificial Sequence: Synthetic oligonucleotide
  Sense strand starting at position 2821 of SEQ ID NO: 1241130
cugcauguguccucauuua

SEQ ID NO: 1249147 - RNA, 19 nt, Artificial Sequence
  Description of Artificial Sequence: Synthetic oligonucleotide
  Antisense strand to SEQ ID NO: 1249146
uaaaugaggacacaugcag

SEQ ID NO: 1249148 - RNA, 19 nt, Artificial Sequence
  Description of Artificial Sequence: Synthetic oligonucleotide
  Sense strand starting at position 3170 of SEQ ID NO: 1241130
ucuguagcuguggagagau

SEQ ID NO: 1249149 - RNA, 19 nt, Artificial Sequence
  Description of Artificial Sequence: Synthetic oligonucleotide
  Antisense strand to SEQ ID NO: 1249148
aucucuccacagcuacaga

SEQ ID NO: 1249150 - RNA, 19 nt, Artificial Sequence
  Description of Artificial Sequence: Synthetic oligonucleotide
  Sense strand starting at position 3180 of SEQ ID NO: 1241130
uggagagauucagugucca

SEQ ID NO: 1249151 - RNA, 19 nt, Artificial Sequence
  Description of Artificial Sequence: Synthetic oligonucleotide
  Antisense strand to SEQ ID NO: 1249150
uggacacugaaucucucca

SEQ ID NO: 1249152 - RNA, 19 nt, Artificial Sequence
  Description of Artificial Sequence: Synthetic oligonucleotide
  Sense strand starting at position 3430 of SEQ ID NO: 1241130
guuaccugccauuguuaga

SEQ ID NO: 1249153 - RNA, 19 nt, Artificial Sequence
  Description of Artificial Sequence: Synthetic oligonucleotide
  Antisense strand to SEQ ID NO: 1249152
ucuaacaauggcagguaac

SEQ ID NO: 1249154 - RNA, 19 nt, Artificial Sequence
  Description of Artificial Sequence: Synthetic oligonucleotide
  Sense strand starting at position 3504 of SEQ ID NO: 1241130
gaggaccugucucugcaua

SEQ ID NO: 1249155 - RNA, 19 nt, Artificial Sequence
  Description of Artificial Sequence: Synthetic oligonucleotide
  Antisense strand to SEQ ID NO: 1249154
uaugcagagacagguccuc

SEQ ID NO: 1249156 - RNA, 19 nt, Artificial Sequence
  Description of Artificial Sequence: Synthetic oligonucleotide
  Sense strand starting at position 3506 of SEQ ID NO: 1241130
ggaccugucucugcauagu

SEQ ID NO: 1249157 - RNA, 19 nt, Artificial Sequence
  Description of Artificial Sequence: Synthetic oligonucleotide
  Antisense strand to SEQ ID NO: 1249156
acuaugcagagacaggucc

SEQ ID NO: 1249158 - RNA, 19 nt, Artificial Sequence
  Description of Artificial Sequence: Synthetic oligonucleotide
  Sense strand starting at position 3509 of SEQ ID NO: 1241130
ccugucucugcauaguaau

SEQ ID NO: 1249159 - RNA, 19 nt, Artificial Sequence
  Description of Artificial Sequence: Synthetic oligonucleotide
  Antisense strand to SEQ ID NO: 1249158
auuacuaugcagagacagg

SEQ ID NO: 1249160 - RNA, 19 nt, Artificial Sequence
  Description of Artificial Sequence: Synthetic oligonucleotide
  Sense strand starting at position 3521 of SEQ ID NO: 1241130
uaguaauggcagcagcaau

SEQ ID NO: 1249161 - RNA, 19 nt, Artificial Sequence
  Description of Artificial Sequence: Synthetic oligonucleotide
  Antisense strand to SEQ ID NO: 1249160
auugcugcugccauuacua

SEQ ID NO: 1249162 - RNA, 19 nt, Artificial Sequence
  Description of Artificial Sequence: Synthetic oligonucleotide
  Sense strand starting at position 3548 of SEQ ID NO: 1241130
ggauguugagguugaugga

SEQ ID NO: 1249163 - RNA, 19 nt, Artificial Sequence
  Description of Artificial Sequence: Synthetic oligonucleotide
  Antisense strand to SEQ ID NO: 1249162
uccaucaaccucaacaucc

SEQ ID NO: 1249164 - RNA, 19 nt, Artificial Sequence
  Description of Artificial Sequence: Synthetic oligonucleotide
  Sense strand starting at position 3570 of SEQ ID NO: 1241130
ggagggagcuggugaugau

SEQ ID NO: 1249165 - RNA, 19 nt, Artificial Sequence
  Description of Artificial Sequence: Synthetic oligonucleotide
  Antisense strand to SEQ ID NO: 1249164
aucaucaccagcucccucc

SEQ ID NO: 1249166 - RNA, 19 nt, Artificial Sequence
  Description of Artificial Sequence: Synthetic oligonucleotide
  Sense strand starting at position 3585 of SEQ ID NO: 1241130
ugaugacaguuucuaacaa

SEQ ID NO: 1249167 - RNA, 19 nt, Artificial Sequence
  Description of Artificial Sequence: Synthetic oligonucleotide
  Antisense strand to SEQ ID NO: 1249166
uuguuagaaacugucauca

SEQ ID NO: 1249168 - RNA, 19 nt, Artificial Sequence
  Description of Artificial Sequence: Synthetic oligonucleotide
  Sense strand starting at position 3783 of SEQ ID NO: 1241130
ggugaugcagcucauuaaa

SEQ ID NO: 1249169 - RNA, 19 nt, Artificial Sequence
  Description of Artificial Sequence: Synthetic oligonucleotide
  Antisense strand to SEQ ID NO: 1249168
uuuaaugagcugcaucacc

SEQ ID NO: 1249170 - RNA, 19 nt, Artificial Sequence
  Description of Artificial Sequence: Synthetic oligonucleotide
  Sense strand starting at position 3813 of SEQ ID NO: 1241130
uguggauccugaggauauu

SEQ ID NO: 1249171 - RNA, 19 nt, Artificial Sequence
  Description of Artificial Sequence: Synthetic oligonucleotide
  Antisense strand to SEQ ID NO: 1249170
aauauccucaggauccaca

SEQ ID NO: 1249172 - RNA, 19 nt, Artificial Sequence
  Description of Artificial Sequence: Synthetic oligonucleotide
  Sense strand starting at position 3822 of SEQ ID NO: 1241130
ugaggauauuuggaaguca

SEQ ID NO: 1249173 - RNA, 19 nt, Artificial Sequence
  Description of Artificial Sequence: Synthetic oligonucleotide
  Antisense strand to SEQ ID NO: 1249172
ugacuuccaaauauccuca

SEQ ID NO: 1249174 - RNA, 19 nt, Artificial Sequence
  Description of Artificial Sequence: Synthetic oligonucleotide
  Sense strand starting at position 3972 of SEQ ID NO: 1241130
aggcgaccgcucagaguua

SEQ ID NO: 1249175 - RNA, 19 nt, Artificial Sequence
  Description of Artificial Sequence: Synthetic oligonucleotide
  Antisense strand to SEQ ID NO: 1249174
uaacucugagcggucgccu

SEQ ID NO: 1249176 - RNA, 19 nt, Artificial Sequence
  Description of Artificial Sequence: Synthetic oligonucleotide
  Sense strand starting at position 3983 of SEQ ID NO: 1241130
cagaguuacugagucguga

SEQ ID NO: 1249177 - RNA, 19 nt, Artificial Sequence
  Description of Artificial Sequence: Synthetic oligonucleotide
  Antisense strand to SEQ ID NO: 1249176
ucacgacucaguaacucug

SEQ ID NO: 1249178 - RNA, 19 nt, Artificial Sequence
  Description of Artificial Sequence: Synthetic oligonucleotide
  Sense strand starting at position 179 of SEQ ID NO: 1241131
ggccuuguguccucagaga

SEQ ID NO: 1249179 - RNA, 19 nt, Artificial Sequence
  Description of Artificial Sequence: Synthetic oligonucleotide
  Antisense strand to SEQ ID NO: 1249178
ucucugaggacacaaggcc

SEQ ID NO: 1249180 - RNA, 19 nt, Artificial Sequence
  Description of Artificial Sequence: Synthetic oligonucleotide
  Sense strand starting at position 302 of SEQ ID NO: 1241131
ggacuagcuccuuaaugca

SEQ ID NO: 1249181 - RNA, 19 nt, Artificial Sequence
  Description of Artificial Sequence: Synthetic oligonucleotide
  Antisense strand to SEQ ID NO: 1249180
ugcauuaaggagcuagucc

SEQ ID NO: 1249182 - RNA, 19 nt, Artificial Sequence
  Description of Artificial Sequence: Synthetic oligonucleotide
  Sense strand starting at position 412 of SEQ ID NO: 1241131
ggcguuugccaagcuguga

SEQ ID NO: 1249183 - RNA, 19 nt, Artificial Sequence
  Description of Artificial Sequence: Synthetic oligonucleotide
  Antisense strand to SEQ ID NO: 1249182
ucacagcuuggcaaacgcc

SEQ ID NO: 1249184 - RNA, 19 nt, Artificial Sequence
  Description of Artificial Sequence: Synthetic oligonucleotide
  Sense strand starting at position 413 of SEQ ID NO: 1241131
gcguuugccaagcugugaa

SEQ ID NO: 1249185 - RNA, 19 nt, Artificial Sequence
  Description of Artificial Sequence: Synthetic oligonucleotide
  Antisense strand to SEQ ID NO: 1249184
uucacagcuuggcaaacgc

SEQ ID NO: 1249186 - RNA, 19 nt, Artificial Sequence
  Description of Artificial Sequence: Synthetic oligonucleotide
  Sense strand starting at position 416 of SEQ ID NO: 1241131
uuugccaagcugugaauga

SEQ ID NO: 1249187 - RNA, 19 nt, Artificial Sequence
  Description of Artificial Sequence: Synthetic oligonucleotide
  Antisense strand to SEQ ID NO: 1249186
ucauucacagcuuggcaaa

SEQ ID NO: 1249188 - RNA, 19 nt, Artificial Sequence
  Description of Artificial Sequence: Synthetic oligonucleotide
  Sense strand starting at position 420 of SEQ ID NO: 1241131
ccaagcugugaaugacuuu

SEQ ID NO: 1249189 - RNA, 19 nt, Artificial Sequence
  Description of Artificial Sequence: Synthetic oligonucleotide
  Antisense strand to SEQ ID NO: 1249188
aaagucauucacagcuugg

SEQ ID NO: 1249190 - RNA, 19 nt, Artificial Sequence
  Description of Artificial Sequence: Synthetic oligonucleotide
  Sense strand starting at position 427 of SEQ ID NO: 1241131
gugaaugacuuuguuccau

SEQ ID NO: 1249191 - RNA, 19 nt, Artificial Sequence
  Description of Artificial Sequence: Synthetic oligonucleotide
  Antisense strand to SEQ ID NO: 1249190
auggaacaaagucauucac

SEQ ID NO: 1249192 - RNA, 19 nt, Artificial Sequence
  Description of Artificial Sequence: Synthetic oligonucleotide
  Sense strand starting at position 765 of SEQ ID NO: 1241131
gaauguucuggucaugcca

SEQ ID NO: 1249193 - RNA, 19 nt, Artificial Sequence
  Description of Artificial Sequence: Synthetic oligonucleotide
  Antisense strand to SEQ ID NO: 1249192
uggcaugaccagaacauuc

SEQ ID NO: 1249194 - RNA, 19 nt, Artificial Sequence
  Description of Artificial Sequence: Synthetic oligonucleotide
  Sense strand starting at position 1250 of SEQ ID NO: 1241131
gcuggucucuggucaacca

SEQ ID NO: 1249195 - RNA, 19 nt, Artificial Sequence
  Description of Artificial Sequence: Synthetic oligonucleotide
  Antisense strand to SEQ ID NO: 1249194
ugguugaccagagaccagc

SEQ ID NO: 1249196 - RNA, 19 nt, Artificial Sequence
  Description of Artificial Sequence: Synthetic oligonucleotide
  Sense strand starting at position 2289 of SEQ ID NO: 1241131
uuggaaacguguaggaaga

SEQ ID NO: 1249197 - RNA, 19 nt, Artificial Sequence
  Description of Artificial Sequence: Synthetic oligonucleotide
  Antisense strand to SEQ ID NO: 1249196
ucuuccuacacguuuccaa

SEQ ID NO: 1249198 - RNA, 19 nt, Artificial Sequence
  Description of Artificial Sequence: Synthetic oligonucleotide
  Sense strand starting at position 2476 of SEQ ID NO: 1241131
ggcccuggguguuugagua

SEQ ID NO: 1249199 - RNA, 19 nt, Artificial Sequence
  Description of Artificial Sequence: Synthetic oligonucleotide
  Antisense strand to SEQ ID NO: 1249198
uacucaaacacccagggcc

SEQ ID NO: 1249200 - RNA, 19 nt, Artificial Sequence
  Description of Artificial Sequence: Synthetic oligonucleotide
  Sense strand starting at position 2501 of SEQ ID NO: 1241131
acauguggugccuggcaga

SEQ ID NO: 1249201 - RNA, 19 nt, Artificial Sequence
  Description of Artificial Sequence: Synthetic oligonucleotide
  Antisense strand to SEQ ID NO: 1249200
ucugccaggcaccacaugu

SEQ ID NO: 1249202 - RNA, 19 nt, Artificial Sequence
  Description of Artificial Sequence: Synthetic oligonucleotide
  Sense strand starting at position 2562 of SEQ ID NO: 1241131
cuccguguccugucaagca

SEQ ID NO: 1249203 - RNA, 19 nt, Artificial Sequence
  Description of Artificial Sequence: Synthetic oligonucleotide
  Antisense strand to SEQ ID NO: 1249202
ugcuugacaggacacggag

SEQ ID NO: 1249204 - RNA, 19 nt, Artificial Sequence
  Description of Artificial Sequence: Synthetic oligonucleotide
  Sense strand starting at position 2750 of SEQ ID NO: 1241131
gcaggaguauggccuucuu

SEQ ID NO: 1249205 - RNA, 19 nt, Artificial Sequence
  Description of Artificial Sequence: Synthetic oligonucleotide
  Antisense strand to SEQ ID NO: 1249204
aagaaggccauacuccugc

SEQ ID NO: 1249206 - RNA, 19 nt, Artificial Sequence
  Description of Artificial Sequence: Synthetic oligonucleotide
  Sense strand starting at position 2786 of SEQ ID NO: 1241131
uuagguucccuuugauuaa

SEQ ID NO: 1249207 - RNA, 19 nt, Artificial Sequence
  Description of Artificial Sequence: Synthetic oligonucleotide
  Antisense strand to SEQ ID NO: 1249206
uuaaucaaagggaaccuaa

SEQ ID NO: 1249208 - RNA, 19 nt, Artificial Sequence
  Description of Artificial Sequence: Synthetic oligonucleotide
  Sense strand starting at position 2893 of SEQ ID NO: 1241131
acaugccaaccucgagaua

SEQ ID NO: 1249209 - RNA, 19 nt, Artificial Sequence
  Description of Artificial Sequence: Synthetic oligonucleotide
  Antisense strand to SEQ ID NO: 1249208
uaucucgagguuggcaugu

SEQ ID NO: 1249210 - RNA, 19 nt, Artificial Sequence
  Description of Artificial Sequence: Synthetic oligonucleotide
  Sense strand starting at position 3008 of SEQ ID NO: 1241131
cuuaaagauccuuagucug

SEQ ID NO: 1249211 - RNA, 19 nt, Artificial Sequence
  Description of Artificial Sequence: Synthetic oligonucleotide
  Antisense strand to SEQ ID NO: 1249210
cagacuaaggaucuuuaag

SEQ ID NO: 1249212 - RNA, 19 nt, Artificial Sequence
  Description of Artificial Sequence: Synthetic oligonucleotide
  Sense strand starting at position 3013 of SEQ ID NO: 1241131
agauccuuagucuguagga

SEQ ID NO: 1249213 - RNA, 19 nt, Artificial Sequence
  Description of Artificial Sequence: Synthetic oligonucleotide
  Antisense strand to SEQ ID NO: 1249212
uccuacagacuaaggaucu

SEQ ID NO: 1249214 - RNA, 19 nt, Artificial Sequence
  Description of Artificial Sequence: Synthetic oligonucleotide
  Sense strand starting at position 3015 of SEQ ID NO: 1241131
auccuuagucuguaggaga

SEQ ID NO: 1249215 - RNA, 19 nt, Artificial Sequence
  Description of Artificial Sequence: Synthetic oligonucleotide
  Antisense strand to SEQ ID NO: 1249214
ucuccuacagacuaaggau

SEQ ID NO: 1249216 - RNA, 19 nt, Artificial Sequence
  Description of Artificial Sequence: Synthetic oligonucleotide
  Sense strand starting at position 3018 of SEQ ID NO: 1241131
cuuagucuguaggagagau

SEQ ID NO: 1249217 - RNA, 19 nt, Artificial Sequence
  Description of Artificial Sequence: Synthetic oligonucleotide
  Antisense strand to SEQ ID NO: 1249216
aucucuccuacagacuaag

SEQ ID NO: 1249218 - RNA, 19 nt, Artificial Sequence
  Description of Artificial Sequence: Synthetic oligonucleotide
  Sense strand starting at position 3031 of SEQ ID NO: 1241131
agagauggcuccugaccaa

SEQ ID NO: 1249219 - RNA, 19 nt, Artificial Sequence
  Description of Artificial Sequence: Synthetic oligonucleotide
  Antisense strand to SEQ ID NO: 1249218
uuggucaggagccaucucu

SEQ ID NO: 1249220 - RNA, 19 nt, Artificial Sequence
  Description of Artificial Sequence: Synthetic oligonucleotide
  Sense strand starting at position 3301 of SEQ ID NO: 1241131
gaugcacuuuggugggaaa

SEQ ID NO: 1249221 - RNA, 19 nt, Artificial Sequence
  Description of Artificial Sequence: Synthetic oligonucleotide
  Antisense strand to SEQ ID NO: 1249220
uuucccaccaaagugcauc

SEQ ID NO: 1249222 - RNA, 19 nt, Artificial Sequence
  Description of Artificial Sequence: Synthetic oligonucleotide
  Sense strand starting at position 3303 of SEQ ID NO: 1241131
ugcacuuuggugggaaacu

SEQ ID NO: 1249223 - RNA, 19 nt, Artificial Sequence
  Description of Artificial Sequence: Synthetic oligonucleotide
  Antisense strand to SEQ ID NO: 1249222
aguuucccaccaaagugca

SEQ ID NO: 1249224 - RNA, 19 nt, Artificial Sequence
  Description of Artificial Sequence: Synthetic oligonucleotide
  Sense strand starting at position 3679 of SEQ ID NO: 1241131
ugauaacaacagugcaaua

SEQ ID NO: 1249225 - RNA, 19 nt, Artificial Sequence
  Description of Artificial Sequence: Synthetic oligonucleotide
  Antisense strand to SEQ ID NO: 1249224
uauugcacuguuguuauca

SEQ ID NO: 1249226 - RNA, 19 nt, Artificial Sequence
  Description of Artificial Sequence: Synthetic oligonucleotide
  Sense strand starting at position 3705 of SEQ ID NO: 1241131
aguaaucuugucugcagag

SEQ ID NO: 1249227 - RNA, 19 nt, Artificial Sequence
  Description of Artificial Sequence: Synthetic oligonucleotide
  Antisense strand to SEQ ID NO: 1249226
cucugcagacaagauuacu

SEQ ID NO: 1249228 - RNA, 19 nt, Artificial Sequence
  Description of Artificial Sequence: Synthetic oligonucleotide
  Sense strand starting at position 3706 of SEQ ID NO: 1241131
guaaucuugucugcagaga

SEQ ID NO: 1249229 - RNA, 19 nt, Artificial Sequence
  Description of Artificial Sequence: Synthetic oligonucleotide
  Antisense strand to SEQ ID NO: 1249228
ucucugcagacaagauuac

SEQ ID NO: 1249230 - RNA, 19 nt, Artificial Sequence
  Description of Artificial Sequence: Synthetic oligonucleotide
  Sense strand starting at position 3707 of SEQ ID NO: 1241131
uaaucuugucugcagagaa

SEQ ID NO: 1249231 - RNA, 19 nt, Artificial Sequence
  Description of Artificial Sequence: Synthetic oligonucleotide
  Antisense strand to SEQ ID NO: 1249230
uucucugcagacaagauua

SEQ ID NO: 1249232 - RNA, 19 nt, Artificial Sequence
  Description of Artificial Sequence: Synthetic oligonucleotide
  Sense strand starting at position 3730 of SEQ ID NO: 1241131
aggcauucugcccagcaaa

SEQ ID NO: 1249233 - RNA, 19 nt, Artificial Sequence
  Description of Artificial Sequence: Synthetic oligonucleotide
  Antisense strand to SEQ ID NO: 1249232
uuugcugggcagaaugccu

SEQ ID NO: 1249234 - RNA, 19 nt, Artificial Sequence
  Description of Artificial Sequence: Synthetic oligonucleotide
  Sense strand starting at position 3741 of SEQ ID NO: 1241131
ccagcaaaggucuguguua

SEQ ID NO: 1249235 - RNA, 19 nt, Artificial Sequence
  Description of Artificial Sequence: Synthetic oligonucleotide
  Antisense strand to SEQ ID NO: 1249234
uaacacagaccuuugcugg

SEQ ID NO: 1249236 - RNA, 19 nt, Artificial Sequence
  Description of Artificial Sequence: Synthetic oligonucleotide
  Sense strand starting at position 3743 of SEQ ID NO: 1241131
agcaaaggucuguguuagu

SEQ ID NO: 1249237 - RNA, 19 nt, Artificial Sequence
  Description of Artificial Sequence: Synthetic oligonucleotide
  Antisense strand to SEQ ID NO: 1249236
acuaacacagaccuuugcu

SEQ ID NO: 1249238 - RNA, 19 nt, Artificial Sequence
  Description of Artificial Sequence: Synthetic oligonucleotide
  Sense strand starting at position 3784 of SEQ ID NO: 1241131
acgagugauuuacagugca

SEQ ID NO: 1249239 - RNA, 19 nt, Artificial Sequence
  Description of Artificial Sequence: Synthetic oligonucleotide
  Antisense strand to SEQ ID NO: 1249238
ugcacuguaaaucacucgu

SEQ ID NO: 1249240 - RNA, 19 nt, Artificial Sequence
  Description of Artificial Sequence: Synthetic oligonucleotide
  Sense strand starting at position 3860 of SEQ ID NO: 1241131
guuggugucuccugggcaa

SEQ ID NO: 1249241 - RNA, 19 nt, Artificial Sequence
  Description of Artificial Sequence: Synthetic oligonucleotide
  Antisense strand to SEQ ID NO: 1249240
uugcccaggagacaccaac

SEQ ID NO: 1249242 - RNA, 19 nt, Artificial Sequence
  Description of Artificial Sequence: Synthetic oligonucleotide
  Sense strand starting at position 3909 of SEQ ID NO: 1241131
gggucuuuccucugagcag

SEQ ID NO: 1249243 - RNA, 19 nt, Artificial Sequence
  Description of Artificial Sequence: Synthetic oligonucleotide
  Antisense strand to SEQ ID NO: 1249242
cugcucagaggaaagaccc

SEQ ID NO: 1249244 - RNA, 19 nt, Artificial Sequence
  Description of Artificial Sequence: Synthetic oligonucleotide
  Sense strand starting at position 3910 of SEQ ID NO: 1241131
ggucuuuccucugagcagu

SEQ ID NO: 1249245 - RNA, 19 nt, Artificial Sequence
  Description of Artificial Sequence: Synthetic oligonucleotide
  Antisense strand to SEQ ID NO: 1249244
acugcucagaggaaagacc

SEQ ID NO: 1249246 - RNA, 19 nt, Artificial Sequence
  Description of Artificial Sequence: Synthetic oligonucleotide
  Sense strand starting at position 3928 of SEQ ID NO: 1241131
ucacgcaucccugauguau

SEQ ID NO: 1249247 - RNA, 19 nt, Artificial Sequence
  Description of Artificial Sequence: Synthetic oligonucleotide
  Antisense strand to SEQ ID NO: 1249246
auacaucagggaugcguga

SEQ ID NO: 1249248 - RNA, 19 nt, Artificial Sequence
  Description of Artificial Sequence: Synthetic oligonucleotide
  Sense strand starting at position 3930 of SEQ ID NO: 1241131
acgcaucccugauguaucu

SEQ ID NO: 1249249 - RNA, 19 nt, Artificial Sequence
  Description of Artificial Sequence: Synthetic oligonucleotide
  Antisense strand to SEQ ID NO: 1249248
agauacaucagggaugcgu

SEQ ID NO: 1249250 - RNA, 19 nt, Artificial Sequence
  Description of Artificial Sequence: Synthetic oligonucleotide
  Sense strand starting at position 3937 of SEQ ID NO: 1241131
ccugauguaucuccagaug

SEQ ID NO: 1249251 - RNA, 19 nt, Artificial Sequence
  Description of Artificial Sequence: Synthetic oligonucleotide
  Antisense strand to SEQ ID NO: 1249250
caucuggagauacaucagg

SEQ ID NO: 1249252 - RNA, 19 nt, Artificial Sequence
  Description of Artificial Sequence: Synthetic oligonucleotide
  Sense strand starting at position 3978 of SEQ ID NO: 1241131
acauaccagucagauugaa

SEQ ID NO: 1249253 - RNA, 19 nt, Artificial Sequence
  Description of Artificial Sequence: Synthetic oligonucleotide
  Antisense strand to SEQ ID NO: 1249252
uucaaucugacugguaugu

SEQ ID NO: 1249254 - RNA, 19 nt, Artificial Sequence
  Description of Artificial Sequence: Synthetic oligonucleotide
  Sense strand starting at position 79 of SEQ ID NO: 1241132
aggugauggugaaagggua

SEQ ID NO: 1249255 - RNA, 19 nt, Artificial Sequence
  Description of Artificial Sequence: Synthetic oligonucleotide
  Antisense strand to SEQ ID NO: 1249254
uacccuuucaccaucaccu

SEQ ID NO: 1249256 - RNA, 19 nt, Artificial Sequence
  Description of Artificial Sequence: Synthetic oligonucleotide
  Sense strand starting at position 87 of SEQ ID NO: 1241132
gugaaaggguaagauuuaa

SEQ ID NO: 1249257 - RNA, 19 nt, Artificial Sequence
  Description of Artificial Sequence: Synthetic oligonucleotide
  Antisense strand to SEQ ID NO: 1249256
uuaaaucuuacccuuucac

SEQ ID NO: 1249258 - RNA, 19 nt, Artificial Sequence
  Description of Artificial Sequence: Synthetic oligonucleotide
  Sense strand starting at position 165 of SEQ ID NO: 1241132
auuuguugaugggacuaaa

SEQ ID NO: 1249259 - RNA, 19 nt, Artificial Sequence
  Description of Artificial Sequence: Synthetic oligonucleotide
  Antisense strand to SEQ ID NO: 1249258
uuuagucccaucaacaaau

SEQ ID NO: 1249260 - RNA, 19 nt, Artificial Sequence
  Description of Artificial Sequence: Synthetic oligonucleotide
  Sense strand starting at position 178 of SEQ ID NO: 1241132
acuaaacagaguuggguua

SEQ ID NO: 1249261 - RNA, 19 nt, Artificial Sequence
  Description of Artificial Sequence: Synthetic oligonucleotide
  Antisense strand to SEQ ID NO: 1249260
uaacccaacucuguuuagu

SEQ ID NO: 1249262 - RNA, 19 nt, Artificial Sequence
  Description of Artificial Sequence: Synthetic oligonucleotide
  Sense strand starting at position 427 of SEQ ID NO: 1241132
ggcagucuuaagcauauag

SEQ ID NO: 1249263 - RNA, 19 nt, Artificial Sequence
  Description of Artificial Sequence: Synthetic oligonucleotide
  Antisense strand to SEQ ID NO: 1249262
cuauaugcuuaagacugcc

SEQ ID NO: 1249264 - RNA, 19 nt, Artificial Sequence
  Description of Artificial Sequence: Synthetic oligonucleotide
  Sense strand starting at position 754 of SEQ ID NO: 1241132
ggauauaaagucuaguggu

SEQ ID NO: 1249265 - RNA, 19 nt, Artificial Sequence
  Description of Artificial Sequence: Synthetic oligonucleotide
  Antisense strand to SEQ ID NO: 1249264
accacuagacuuuauaucc

SEQ ID NO: 1249266 - RNA, 19 nt, Artificial Sequence
  Description of Artificial Sequence: Synthetic oligonucleotide
  Sense strand starting at position 790 of SEQ ID NO: 1241132
guccaagcugucugaauuu

SEQ ID NO: 1249267 - RNA, 19 nt, Artificial Sequence
  Description of Artificial Sequence: Synthetic oligonucleotide
  Antisense strand to SEQ ID NO: 1249266
aaauucagacagcuuggac

SEQ ID NO: 1249268 - RNA, 19 nt, Artificial Sequence
  Description of Artificial Sequence: Synthetic oligonucleotide
  Sense strand starting at position 986 of SEQ ID NO: 1241132
ugaaacauaaguugagagu

SEQ ID NO: 1249269 - RNA, 19 nt, Artificial Sequence
  Description of Artificial Sequence: Synthetic oligonucleotide
  Antisense strand to SEQ ID NO: 1249268
acucucaacuuauguuuca

SEQ ID NO: 1249270 - RNA, 19 nt, Artificial Sequence
  Description of Artificial Sequence: Synthetic oligonucleotide
  Sense strand starting at position 1252 of SEQ ID NO: 1241132
gaguaagcaugucugauaa

SEQ ID NO: 1249271 - RNA, 19 nt, Artificial Sequence
  Description of Artificial Sequence: Synthetic oligonucleotide
  Antisense strand to SEQ ID NO: 1249270
uuaucagacaugcuuacuc

SEQ ID NO: 1249272 - RNA, 19 nt, Artificial Sequence
  Description of Artificial Sequence: Synthetic oligonucleotide
  Sense strand starting at position 1272 of SEQ ID NO: 1241132
aaaguccaucugugacaga

SEQ ID NO: 1249273 - RNA, 19 nt, Artificial Sequence
  Description of Artificial Sequence: Synthetic oligonucleotide
  Antisense strand to SEQ ID NO: 1249272
ucugucacagauggacuuu

SEQ ID NO: 1249274 - RNA, 19 nt, Artificial Sequence
  Description of Artificial Sequence: Synthetic oligonucleotide
  Sense strand starting at position 1315 of SEQ ID NO: 1241132
gcaguuauuugauucucuu

SEQ ID NO: 1249275 - RNA, 19 nt, Artificial Sequence
  Description of Artificial Sequence: Synthetic oligonucleotide
  Antisense strand to SEQ ID NO: 1249274
aagagaaucaaauaacugc

SEQ ID NO: 1249276 - RNA, 19 nt, Artificial Sequence
  Description of Artificial Sequence: Synthetic oligonucleotide
  Sense strand starting at position 1342 of SEQ ID NO: 1241132
uccucuagagaaugaguau

SEQ ID NO: 1249277 - RNA, 19 nt, Artificial Sequence
  Description of Artificial Sequence: Synthetic oligonucleotide
  Antisense strand to SEQ ID NO: 1249276
auacucauucucuagagga

SEQ ID NO: 1249278 - RNA, 19 nt, Artificial Sequence
  Description of Artificial Sequence: Synthetic oligonucleotide
  Sense strand starting at position 1458 of SEQ ID NO: 1241132
uccagagagucaccacuua

SEQ ID NO: 1249279 - RNA, 19 nt, Artificial Sequence
  Description of Artificial Sequence: Synthetic oligonucleotide
  Antisense strand to SEQ ID NO: 1249278
uaaguggugacucucugga

SEQ ID NO: 1249280 - RNA, 19 nt, Artificial Sequence
  Description of Artificial Sequence: Synthetic oligonucleotide
  Sense strand starting at position 1571 of SEQ ID NO: 1241132
cgcuguccucugguagcaa

SEQ ID NO: 1249281 - RNA, 19 nt, Artificial Sequence
  Description of Artificial Sequence: Synthetic oligonucleotide
  Antisense strand to SEQ ID NO: 1249280
uugcuaccagaggacagcg

SEQ ID NO: 1249282 - RNA, 19 nt, Artificial Sequence
  Description of Artificial Sequence: Synthetic oligonucleotide
  Sense strand starting at position 2233 of SEQ ID NO: 1241132
ccucaaacuugugcagaaa

SEQ ID NO: 1249283 - RNA, 19 nt, Artificial Sequence
  Description of Artificial Sequence: Synthetic oligonucleotide
  Antisense strand to SEQ ID NO: 1249282
uuucugcacaaguuugagg

SEQ ID NO: 1249284 - RNA, 19 nt, Artificial Sequence
  Description of Artificial Sequence: Synthetic oligonucleotide
  Sense strand starting at position 2459 of SEQ ID NO: 1241132
gccuguucucucguguuaa

SEQ ID NO: 1249285 - RNA, 19 nt, Artificial Sequence
  Description of Artificial Sequence: Synthetic oligonucleotide
  Antisense strand to SEQ ID NO: 1249284
uuaacacgagagaacaggc

SEQ ID NO: 1249286 - RNA, 19 nt, Artificial Sequence
  Description of Artificial Sequence: Synthetic oligonucleotide
  Sense strand starting at position 2469 of SEQ ID NO: 1241132
ucguguuaaauggauagaa

SEQ ID NO: 1249287 - RNA, 19 nt, Artificial Sequence
  Description of Artificial Sequence: Synthetic oligonucleotide
  Antisense strand to SEQ ID NO: 1249286
uucuauccauuuaacacga

SEQ ID NO: 1249288 - RNA, 19 nt, Artificial Sequence
  Description of Artificial Sequence: Synthetic oligonucleotide
  Sense strand starting at position 2499 of SEQ ID NO: 1241132
aucuaaugccgugaggauu

SEQ ID NO: 1249289 - RNA, 19 nt, Artificial Sequence
  Description of Artificial Sequence: Synthetic oligonucleotide
  Antisense strand to SEQ ID NO: 1249288
aauccucacggcauuagau

SEQ ID NO: 1249290 - RNA, 19 nt, Artificial Sequence
  Description of Artificial Sequence: Synthetic oligonucleotide
  Sense strand starting at position 2502 of SEQ ID NO: 1241132
uaaugccgugaggauuaau

SEQ ID NO: 1249291 - RNA, 19 nt, Artificial Sequence
  Description of Artificial Sequence: Synthetic oligonucleotide
  Antisense strand to SEQ ID NO: 1249290
auuaauccucacggcauua

SEQ ID NO: 1249292 - RNA, 19 nt, Artificial Sequence
  Description of Artificial Sequence: Synthetic oligonucleotide
  Sense strand starting at position 2505 of SEQ ID NO: 1241132
ugccgugaggauuaauaug

SEQ ID NO: 1249293 - RNA, 19 nt, Artificial Sequence
  Description of Artificial Sequence: Synthetic oligonucleotide
  Antisense strand to SEQ ID NO: 1249292
cauauuaauccucacggca

SEQ ID NO: 1249294 - RNA, 19 nt, Artificial Sequence
  Description of Artificial Sequence: Synthetic oligonucleotide
  Sense strand starting at position 2581 of SEQ ID NO: 1241132
agaauuguauccuucugaa

SEQ ID NO: 1249295 - RNA, 19 nt, Artificial Sequence
  Description of Artificial Sequence: Synthetic oligonucleotide
  Antisense strand to SEQ ID NO: 1249294
uucagaaggauacaauucu

SEQ ID NO: 1249296 - RNA, 19 nt, Artificial Sequence
  Description of Artificial Sequence: Synthetic oligonucleotide
  Sense strand starting at position 2635 of SEQ ID NO: 1241132
ugggccaugcucuaagaga

SEQ ID NO: 1249297 - RNA, 19 nt, Artificial Sequence
  Description of Artificial Sequence: Synthetic oligonucleotide
  Antisense strand to SEQ ID NO: 1249296
ucucuuagagcauggccca

SEQ ID NO: 1249298 - RNA, 19 nt, Artificial Sequence
  Description of Artificial Sequence: Synthetic oligonucleotide
  Sense strand starting at position 2709 of SEQ ID NO: 1241132
ggauauauaaggugaugug

SEQ ID NO: 1249299 - RNA, 19 nt, Artificial Sequence
  Description of Artificial Sequence: Synthetic oligonucleotide
  Antisense strand to SEQ ID NO: 1249298
cacaucaccuuauauaucc

SEQ ID NO: 1249300 - RNA, 19 nt, Artificial Sequence
  Description of Artificial Sequence: Synthetic oligonucleotide
  Sense strand starting at position 2710 of SEQ ID NO: 1241132
gauauauaaggugaugugu

SEQ ID NO: 1249301 - RNA, 19 nt, Artificial Sequence
  Description of Artificial Sequence: Synthetic oligonucleotide
  Antisense strand to SEQ ID NO: 1249300
acacaucaccuuauauauc

SEQ ID NO: 1249302 - RNA, 19 nt, Artificial Sequence
  Description of Artificial Sequence: Synthetic oligonucleotide
  Sense strand starting at position 2718 of SEQ ID NO: 1241132
aggugauguguugggagga

SEQ ID NO: 1249303 - RNA, 19 nt, Artificial Sequence
  Description of Artificial Sequence: Synthetic oligonucleotide
  Antisense strand to SEQ ID NO: 1249302
uccucccaacacaucaccu

SEQ ID NO: 1249304 - RNA, 19 nt, Artificial Sequence
  Description of Artificial Sequence: Synthetic oligonucleotide
  Sense strand starting at position 2739 of SEQ ID NO: 1241132
auaucagaguaauuagugu

SEQ ID NO: 1249305 - RNA, 19 nt, Artificial Sequence
  Description of Artificial Sequence: Synthetic oligonucleotide
  Antisense strand to SEQ ID NO: 1249304
acacuaauuacucugauau

SEQ ID NO: 1249306 - RNA, 19 nt, Artificial Sequence
  Description of Artificial Sequence: Synthetic oligonucleotide
  Sense strand starting at position 2787 of SEQ ID NO: 1241132
gugaguuuauaggugagau

SEQ ID NO: 1249307 - RNA, 19 nt, Artificial Sequence
  Description of Artificial Sequence: Synthetic oligonucleotide
  Antisense strand to SEQ ID NO: 1249306
aucucaccuauaaacucac

SEQ ID NO: 1249308 - RNA, 19 nt, Artificial Sequence
  Description of Artificial Sequence: Synthetic oligonucleotide
  Sense strand starting at position 2788 of SEQ ID NO: 1241132
ugaguuuauaggugagauu

SEQ ID NO: 1249309 - RNA, 19 nt, Artificial Sequence
  Description of Artificial Sequence: Synthetic oligonucleotide
  Antisense strand to SEQ ID NO: 1249308
aaucucaccuauaaacuca

SEQ ID NO: 1249310 - RNA, 19 nt, Artificial Sequence
  Description of Artificial Sequence: Synthetic oligonucleotide
  Sense strand starting at position 2851 of SEQ ID NO: 1241132
cugauaaacugcccugaau

SEQ ID NO: 1249311 - RNA, 19 nt, Artificial Sequence
  Description of Artificial Sequence: Synthetic oligonucleotide
  Antisense strand to SEQ ID NO: 1249310
auucagggcaguuuaucag

SEQ ID NO: 1249312 - RNA, 19 nt, Artificial Sequence
  Description of Artificial Sequence: Synthetic oligonucleotide
  Sense strand starting at position 2883 of SEQ ID NO: 1241132
aggauuccuuucucaaguu

SEQ ID NO: 1249313 - RNA, 19 nt, Artificial Sequence
  Description of Artificial Sequence: Synthetic oligonucleotide
  Antisense strand to SEQ ID NO: 1249312
aacuugagaaaggaauccu

SEQ ID NO: 1249314 - RNA, 19 nt, Artificial Sequence
  Description of Artificial Sequence: Synthetic oligonucleotide
  Sense strand starting at position 2929 of SEQ ID NO: 1241132
cuagguaucaggugacauu

SEQ ID NO: 1249315 - RNA, 19 nt, Artificial Sequence
  Description of Artificial Sequence: Synthetic oligonucleotide
  Antisense strand to SEQ ID NO: 1249314
aaugucaccugauaccuag

SEQ ID NO: 1249316 - RNA, 19 nt, Artificial Sequence
  Description of Artificial Sequence: Synthetic oligonucleotide
  Sense strand starting at position 2962 of SEQ ID NO: 1241132
acucaaaguguuggaaacu

SEQ ID NO: 1249317 - RNA, 19 nt, Artificial Sequence
  Description of Artificial Sequence: Synthetic oligonucleotide
  Antisense strand to SEQ ID NO: 1249316
aguuuccaacacuuugagu

SEQ ID NO: 1249318 - RNA, 19 nt, Artificial Sequence
  Description of Artificial Sequence: Synthetic oligonucleotide
  Sense strand starting at position 3023 of SEQ ID NO: 1241132
ggacguaaucacugaugau

SEQ ID NO: 1249319 - RNA, 19 nt, Artificial Sequence
  Description of Artificial Sequence: Synthetic oligonucleotide
  Antisense strand to SEQ ID NO: 1249318
aucaucagugauuacgucc

SEQ ID NO: 1249320 - RNA, 19 nt, Artificial Sequence
  Description of Artificial Sequence: Synthetic oligonucleotide
  Sense strand starting at position 3262 of SEQ ID NO: 1241132
aaacuugaaugguuccuga

SEQ ID NO: 1249321 - RNA, 19 nt, Artificial Sequence
  Description of Artificial Sequence: Synthetic oligonucleotide
  Antisense strand to SEQ ID NO: 1249320
ucaggaaccauucaaguuu

SEQ ID NO: 1249322 - RNA, 19 nt, Artificial Sequence
  Description of Artificial Sequence: Synthetic oligonucleotide
  Sense strand starting at position 3265 of SEQ ID NO: 1241132
cuugaaugguuccugaaag

SEQ ID NO: 1249323 - RNA, 19 nt, Artificial Sequence
  Description of Artificial Sequence: Synthetic oligonucleotide
  Antisense strand to SEQ ID NO: 1249322
cuuucaggaaccauucaag

SEQ ID NO: 1249324 - RNA, 19 nt, Artificial Sequence
  Description of Artificial Sequence: Synthetic oligonucleotide
  Sense strand starting at position 3303 of SEQ ID NO: 1241132
ugagaagucuuucucucug

SEQ ID NO: 1249325 - RNA, 19 nt, Artificial Sequence
  Description of Artificial Sequence: Synthetic oligonucleotide
  Antisense strand to SEQ ID NO: 1249324
cagagagaaagacuucuca

SEQ ID NO: 1249326 - RNA, 19 nt, Artificial Sequence
  Description of Artificial Sequence: Synthetic oligonucleotide
  Sense strand starting at position 3305 of SEQ ID NO: 1241132
agaagucuuucucucugau

SEQ ID NO: 1249327 - RNA, 19 nt, Artificial Sequence
  Description of Artificial Sequence: Synthetic oligonucleotide
  Antisense strand to SEQ ID NO: 1249326
aucagagagaaagacuucu

SEQ ID NO: 1249328 - RNA, 19 nt, Artificial Sequence
  Description of Artificial Sequence: Synthetic oligonucleotide
  Sense strand starting at position 3397 of SEQ ID NO: 1241132
agugcuuaauaccuaauga

SEQ ID NO: 1249329 - RNA, 19 nt, Artificial Sequence
  Description of Artificial Sequence: Synthetic oligonucleotide
  Antisense strand to SEQ ID NO: 1249328
ucauuagguauuaagcacu

SEQ ID NO: 1249330 - RNA, 19 nt, Artificial Sequence
  Description of Artificial Sequence: Synthetic oligonucleotide
  Sense strand starting at position 3465 of SEQ ID NO: 1241132
ccuaucgugcuagaugaua

SEQ ID NO: 1249331 - RNA, 19 nt, Artificial Sequence
  Description of Artificial Sequence: Synthetic oligonucleotide
  Antisense strand to SEQ ID NO: 1249330
uaucaucuagcacgauagg

SEQ ID NO: 1249332 - RNA, 19 nt, Artificial Sequence
  Description of Artificial Sequence: Synthetic oligonucleotide
  Sense strand starting at position 3514 of SEQ ID NO: 1241132
uugaaacuccuauauguug

SEQ ID NO: 1249333 - RNA, 19 nt, Artificial Sequence
  Description of Artificial Sequence: Synthetic oligonucleotide
  Antisense strand to SEQ ID NO: 1249332
caacauauaggaguuucaa

SEQ ID NO: 1249334 - RNA, 19 nt, Artificial Sequence
  Description of Artificial Sequence: Synthetic oligonucleotide
  Sense strand starting at position 67 of SEQ ID NO: 1241133
accuuauaggguuaaaguc

SEQ ID NO: 1249335 - RNA, 19 nt, Artificial Sequence
  Description of Artificial Sequence: Synthetic oligonucleotide
  Antisense strand to SEQ ID NO: 1249334
gacuuuaacccuauaaggu

SEQ ID NO: 1249336 - RNA, 19 nt, Artificial Sequence
  Description of Artificial Sequence: Synthetic oligonucleotide
  Sense strand starting at position 75 of SEQ ID NO: 1241133
ggguuaaagucauuaaagg

SEQ ID NO: 1249337 - RNA, 19 nt, Artificial Sequence
  Description of Artificial Sequence: Synthetic oligonucleotide
  Antisense strand to SEQ ID NO: 1249336
ccuuuaaugacuuuaaccc

SEQ ID NO: 1249338 - RNA, 19 nt, Artificial Sequence
  Description of Artificial Sequence: Synthetic oligonucleotide
  Sense strand starting at position 190 of SEQ ID NO: 1241133
agaaucauggguuguugaa

SEQ ID NO: 1249339 - RNA, 19 nt, Artificial Sequence
  Description of Artificial Sequence: Synthetic oligonucleotide
  Antisense strand to SEQ ID NO: 1249338
uucaacaacccaugauucu

SEQ ID NO: 1249340 - RNA, 19 nt, Artificial Sequence
  Description of Artificial Sequence: Synthetic oligonucleotide
  Sense strand starting at position 192 of SEQ ID NO: 1241133
aaucauggguuguugaauu

SEQ ID NO: 1249341 - RNA, 19 nt, Artificial Sequence
  Description of Artificial Sequence: Synthetic oligonucleotide
  Antisense strand to SEQ ID NO: 1249340
aauucaacaacccaugauu

SEQ ID NO: 1249342 - RNA, 19 nt, Artificial Sequence
  Description of Artificial Sequence: Synthetic oligonucleotide
  Sense strand starting at position 253 of SEQ ID NO: 1241133
ggaauacaauaccauaaga

SEQ ID NO: 1249343 - RNA, 19 nt, Artificial Sequence
  Description of Artificial Sequence: Synthetic oligonucleotide
  Antisense strand to SEQ ID NO: 1249342
ucuuaugguauuguauucc

SEQ ID NO: 1249344 - RNA, 19 nt, Artificial Sequence
  Description of Artificial Sequence: Synthetic oligonucleotide
  Sense strand starting at position 291 of SEQ ID NO: 1241133
gugugugcuccauuagugu

SEQ ID NO: 1249345 - RNA, 19 nt, Artificial Sequence
  Description of Artificial Sequence: Synthetic oligonucleotide
  Antisense strand to SEQ ID NO: 1249344
acacuaauggagcacacac

SEQ ID NO: 1249346 - RNA, 19 nt, Artificial Sequence
  Description of Artificial Sequence: Synthetic oligonucleotide
  Sense strand starting at position 299 of SEQ ID NO: 1241133
uccauuaguguuuacugaa

SEQ ID NO: 1249347 - RNA, 19 nt, Artificial Sequence
  Description of Artificial Sequence: Synthetic oligonucleotide
  Antisense strand to SEQ ID NO: 1249346
uucaguaaacacuaaugga

SEQ ID NO: 1249348 - RNA, 19 nt, Artificial Sequence
  Description of Artificial Sequence: Synthetic oligonucleotide
  Sense strand starting at position 312 of SEQ ID NO: 1241133
acugaacucaggugaauug

SEQ ID NO: 1249349 - RNA, 19 nt, Artificial Sequence
  Description of Artificial Sequence: Synthetic oligonucleotide
  Antisense strand to SEQ ID NO: 1249348
caauucaccugaguucagu

SEQ ID NO: 1249350 - RNA, 19 nt, Artificial Sequence
  Description of Artificial Sequence: Synthetic oligonucleotide
  Sense strand starting at position 468 of SEQ ID NO: 1241133
guuuaugucagguacauac

SEQ ID NO: 1249351 - RNA, 19 nt, Artificial Sequence
  Description of Artificial Sequence: Synthetic oligonucleotide
  Antisense strand to SEQ ID NO: 1249350
guauguaccugacauaaac

SEQ ID NO: 1249352 - RNA, 19 nt, Artificial Sequence
  Description of Artificial Sequence: Synthetic oligonucleotide
  Sense strand starting at position 520 of SEQ ID NO: 1241133
cacaaauucgcuuaagggu

SEQ ID NO: 1249353 - RNA, 19 nt, Artificial Sequence
  Description of Artificial Sequence: Synthetic oligonucleotide
  Antisense strand to SEQ ID NO: 1249352
acccuuaagcgaauuugug

SEQ ID NO: 1249354 - RNA, 19 nt, Artificial Sequence
  Description of Artificial Sequence: Synthetic oligonucleotide
  Sense strand starting at position 527 of SEQ ID NO: 1241133
ucgcuuaagggucauaaua

SEQ ID NO: 1249355 - RNA, 19 nt, Artificial Sequence
  Description of Artificial Sequence: Synthetic oligonucleotide
  Antisense strand to SEQ ID NO: 1249354
uauuaugacccuuaagcga

SEQ ID NO: 1249356 - RNA, 19 nt, Artificial Sequence
  Description of Artificial Sequence: Synthetic oligonucleotide
  Sense strand starting at position 581 of SEQ ID NO: 1241133
ggaaguaaggguugggcaa

SEQ ID NO: 1249357 - RNA, 19 nt, Artificial Sequence
  Description of Artificial Sequence: Synthetic oligonucleotide
  Antisense strand to SEQ ID NO: 1249356
uugcccaacccuuacuucc

SEQ ID NO: 1249358 - RNA, 19 nt, Artificial Sequence
  Description of Artificial Sequence: Synthetic oligonucleotide
  Sense strand starting at position 582 of SEQ ID NO: 1241133
gaaguaaggguugggcaaa

SEQ ID NO: 1249359 - RNA, 19 nt, Artificial Sequence
  Description of Artificial Sequence: Synthetic oligonucleotide
  Antisense strand to SEQ ID NO: 1249358
uuugcccaacccuuacuuc

SEQ ID NO: 1249360 - RNA, 19 nt, Artificial Sequence
  Description of Artificial Sequence: Synthetic oligonucleotide
  Sense strand starting at position 690 of SEQ ID NO: 1241133
cugcauguggugagucgaa

SEQ ID NO: 1249361 - RNA, 19 nt, Artificial Sequence
  Description of Artificial Sequence: Synthetic oligonucleotide
  Antisense strand to SEQ ID NO: 1249360
uucgacucaccacaugcag

SEQ ID NO: 1249362 - RNA, 19 nt, Artificial Sequence
  Description of Artificial Sequence: Synthetic oligonucleotide
  Sense strand starting at position 717 of SEQ ID NO: 1241133
gaagcaccuguauagcaau

SEQ ID NO: 1249363 - RNA, 19 nt, Artificial Sequence
  Description of Artificial Sequence: Synthetic oligonucleotide
  Antisense strand to SEQ ID NO: 1249362
auugcuauacaggugcuuc

SEQ ID NO: 1249364 - RNA, 19 nt, Artificial Sequence
  Description of Artificial Sequence: Synthetic oligonucleotide
  Sense strand starting at position 723 of SEQ ID NO: 1241133
ccuguauagcaaugaguga

SEQ ID NO: 1249365 - RNA, 19 nt, Artificial Sequence
  Description of Artificial Sequence: Synthetic oligonucleotide
  Antisense strand to SEQ ID NO: 1249364
ucacucauugcuauacagg

SEQ ID NO: 1249366 - RNA, 19 nt, Artificial Sequence
  Description of Artificial Sequence: Synthetic oligonucleotide
  Sense strand starting at position 724 of SEQ ID NO: 1241133
cuguauagcaaugagugaa

SEQ ID NO: 1249367 - RNA, 19 nt, Artificial Sequence
  Description of Artificial Sequence: Synthetic oligonucleotide
  Antisense strand to SEQ ID NO: 1249366
uucacucauugcuauacag

SEQ ID NO: 1249368 - RNA, 19 nt, Artificial Sequence
  Description of Artificial Sequence: Synthetic oligonucleotide
  Sense strand starting at position 831 of SEQ ID NO: 1241133
aucugucacguggagcaaa

SEQ ID NO: 1249369 - RNA, 19 nt, Artificial Sequence
  Description of Artificial Sequence: Synthetic oligonucleotide
  Antisense strand to SEQ ID NO: 1249368
uuugcuccacgugacagau

SEQ ID NO: 1249370 - RNA, 19 nt, Artificial Sequence
  Description of Artificial Sequence: Synthetic oligonucleotide
  Sense strand starting at position 1245 of SEQ ID NO: 1241133
uguagauuccauuacaucu

SEQ ID NO: 1249371 - RNA, 19 nt, Artificial Sequence
  Description of Artificial Sequence: Synthetic oligonucleotide
  Antisense strand to SEQ ID NO: 1249370
agauguaauggaaucuaca

SEQ ID NO: 1249372 - RNA, 19 nt, Artificial Sequence
  Description of Artificial Sequence: Synthetic oligonucleotide
  Sense strand starting at position 1293 of SEQ ID NO: 1241133
agagcaaacuuguuagaaa

SEQ ID NO: 1249373 - RNA, 19 nt, Artificial Sequence
  Description of Artificial Sequence: Synthetic oligonucleotide
  Antisense strand to SEQ ID NO: 1249372
uuucuaacaaguuugcucu

SEQ ID NO: 1249374 - RNA, 19 nt, Artificial Sequence
  Description of Artificial Sequence: Synthetic oligonucleotide
  Sense strand starting at position 2644 of SEQ ID NO: 1241133
ucgcauacgcucgcuuaau

SEQ ID NO: 1249375 - RNA, 19 nt, Artificial Sequence
  Description of Artificial Sequence: Synthetic oligonucleotide
  Antisense strand to SEQ ID NO: 1249374
auuaagcgagcguaugcga

SEQ ID NO: 1249376 - RNA, 19 nt, Artificial Sequence
  Description of Artificial Sequence: Synthetic oligonucleotide
  Sense strand starting at position 2793 of SEQ ID NO: 1241133
ggcagucugcgcaaucgua

SEQ ID NO: 1249377 - RNA, 19 nt, Artificial Sequence
  Description of Artificial Sequence: Synthetic oligonucleotide
  Antisense strand to SEQ ID NO: 1249376
uacgauugcgcagacugcc

SEQ ID NO: 1249378 - RNA, 19 nt, Artificial Sequence
  Description of Artificial Sequence: Synthetic oligonucleotide
  Sense strand starting at position 2795 of SEQ ID NO: 1241133
cagucugcgcaaucguauu

SEQ ID NO: 1249379 - RNA, 19 nt, Artificial Sequence
  Description of Artificial Sequence: Synthetic oligonucleotide
  Antisense strand to SEQ ID NO: 1249378
aauacgauugcgcagacug

SEQ ID NO: 1249380 - RNA, 19 nt, Artificial Sequence
  Description of Artificial Sequence: Synthetic oligonucleotide
  Sense strand starting at position 2914 of SEQ ID NO: 1241133
gauguccuucguuagaauc

SEQ ID NO: 1249381 - RNA, 19 nt, Artificial Sequence
  Description of Artificial Sequence: Synthetic oligonucleotide
  Antisense strand to SEQ ID NO: 1249380
gauucuaacgaaggacauc

SEQ ID NO: 1249382 - RNA, 19 nt, Artificial Sequence
  Description of Artificial Sequence: Synthetic oligonucleotide
  Sense strand starting at position 3010 of SEQ ID NO: 1241133
cgagugugagcggauuaaa

SEQ ID NO: 1249383 - RNA, 19 nt, Artificial Sequence
  Description of Artificial Sequence: Synthetic oligonucleotide
  Antisense strand to SEQ ID NO: 1249382
uuuaauccgcucacacucg

SEQ ID NO: 1249384 - RNA, 19 nt, Artificial Sequence
  Description of Artificial Sequence: Synthetic oligonucleotide
  Sense strand starting at position 3027 of SEQ ID NO: 1241133
aaaucuuaugugcauggau

SEQ ID NO: 1249385 - RNA, 19 nt, Artificial Sequence
  Description of Artificial Sequence: Synthetic oligonucleotide
  Antisense strand to SEQ ID NO: 1249384
auccaugcacauaagauuu

SEQ ID NO: 1249386 - RNA, 19 nt, Artificial Sequence
  Description of Artificial Sequence: Synthetic oligonucleotide
  Sense strand starting at position 3040 of SEQ ID NO: 1241133
auggauuuguugggaagau

SEQ ID NO: 1249387 - RNA, 19 nt, Artificial Sequence
  Description of Artificial Sequence: Synthetic oligonucleotide
  Antisense strand to SEQ ID NO: 1249386
aucuucccaacaaauccau

SEQ ID NO: 1249388 - RNA, 19 nt, Artificial Sequence
  Description of Artificial Sequence: Synthetic oligonucleotide
  Sense strand starting at position 3041 of SEQ ID NO: 1241133
uggauuuguugggaagauu

SEQ ID NO: 1249389 - RNA, 19 nt, Artificial Sequence
  Description of Artificial Sequence: Synthetic oligonucleotide
  Antisense strand to SEQ ID NO: 1249388
aaucuucccaacaaaucca

SEQ ID NO: 1249390 - RNA, 19 nt, Artificial Sequence
  Description of Artificial Sequence: Synthetic oligonucleotide
  Sense strand starting at position 3111 of SEQ ID NO: 1241133
guuuaaucacagugaauua

SEQ ID NO: 1249391 - RNA, 19 nt, Artificial Sequence
  Description of Artificial Sequence: Synthetic oligonucleotide
  Antisense strand to SEQ ID NO: 1249390
uaauucacugugauuaaac

SEQ ID NO: 1249392 - RNA, 19 nt, Artificial Sequence
  Description of Artificial Sequence: Synthetic oligonucleotide
  Sense strand starting at position 3122 of SEQ ID NO: 1241133
gugaauuaagacgaccagu

SEQ ID NO: 1249393 - RNA, 19 nt, Artificial Sequence
  Description of Artificial Sequence: Synthetic oligonucleotide
  Antisense strand to SEQ ID NO: 1249392
acuggucgucuuaauucac

SEQ ID NO: 1249394 - RNA, 19 nt, Artificial Sequence
  Description of Artificial Sequence: Synthetic oligonucleotide
  Sense strand starting at position 3137 of SEQ ID NO: 1241133
caguuuaaggagugaaaug

SEQ ID NO: 1249395 - RNA, 19 nt, Artificial Sequence
  Description of Artificial Sequence: Synthetic oligonucleotide
  Antisense strand to SEQ ID NO: 1249394
cauuucacuccuuaaacug

SEQ ID NO: 1249396 - RNA, 19 nt, Artificial Sequence
  Description of Artificial Sequence: Synthetic oligonucleotide
  Sense strand starting at position 3138 of SEQ ID NO: 1241133
aguuuaaggagugaaaugu

SEQ ID NO: 1249397 - RNA, 19 nt, Artificial Sequence
  Description of Artificial Sequence: Synthetic oligonucleotide
  Antisense strand to SEQ ID NO: 1249396
acauuucacuccuuaaacu

SEQ ID NO: 1249398 - RNA, 19 nt, Artificial Sequence
  Description of Artificial Sequence: Synthetic oligonucleotide
  Sense strand starting at position 3146 of SEQ ID NO: 1241133
gagugaaauguuuacuguc

SEQ ID NO: 1249399 - RNA, 19 nt, Artificial Sequence
  Description of Artificial Sequence: Synthetic oligonucleotide
  Antisense strand to SEQ ID NO: 1249398
gacaguaaacauuucacuc

SEQ ID NO: 1249400 - RNA, 19 nt, Artificial Sequence
  Description of Artificial Sequence: Synthetic oligonucleotide
  Sense strand starting at position 3175 of SEQ ID NO: 1241133
ucaugaaugccuuggaaau

SEQ ID NO: 1249401 - RNA, 19 nt, Artificial Sequence
  Description of Artificial Sequence: Synthetic oligonucleotide
  Antisense strand to SEQ ID NO: 1249400
auuuccaaggcauucauga

SEQ ID NO: 1249402 - RNA, 19 nt, Artificial Sequence
  Description of Artificial Sequence: Synthetic oligonucleotide
  Sense strand starting at position 3301 of SEQ ID NO: 1241133
uucccucauucuuuguaga

SEQ ID NO: 1249403 - RNA, 19 nt, Artificial Sequence
  Description of Artificial Sequence: Synthetic oligonucleotide
  Antisense strand to SEQ ID NO: 1249402
ucuacaaagaaugagggaa

SEQ ID NO: 1249404 - RNA, 19 nt, Artificial Sequence
  Description of Artificial Sequence: Synthetic oligonucleotide
  Sense strand starting at position 3303 of SEQ ID NO: 1241133
cccucauucuuuguagacu

SEQ ID NO: 1249405 - RNA, 19 nt, Artificial Sequence
  Description of Artificial Sequence: Synthetic oligonucleotide
  Antisense strand to SEQ ID NO: 1249404
agucuacaaagaaugaggg

SEQ ID NO: 1249406 - RNA, 19 nt, Artificial Sequence
  Description of Artificial Sequence: Synthetic oligonucleotide
  Sense strand starting at position 3306 of SEQ ID NO: 1241133
ucauucuuuguagacucau

SEQ ID NO: 1249407 - RNA, 19 nt, Artificial Sequence
  Description of Artificial Sequence: Synthetic oligonucleotide
  Antisense strand to SEQ ID NO: 1249406
augagucuacaaagaauga

SEQ ID NO: 1249408 - RNA, 19 nt, Artificial Sequence
  Description of Artificial Sequence: Synthetic oligonucleotide
  Sense strand starting at position 3312 of SEQ ID NO: 1241133
uuuguagacucaucucaag

SEQ ID NO: 1249409 - RNA, 19 nt, Artificial Sequence
  Description of Artificial Sequence: Synthetic oligonucleotide
  Antisense strand to SEQ ID NO: 1249408
cuugagaugagucuacaaa

SEQ ID NO: 1249410 - RNA, 19 nt, Artificial Sequence
  Description of Artificial Sequence: Synthetic oligonucleotide
  Sense strand starting at position 3324 of SEQ ID NO: 1241133
ucucaaguauucucaguaa

SEQ ID NO: 1249411 - RNA, 19 nt, Artificial Sequence
  Description of Artificial Sequence: Synthetic oligonucleotide
  Antisense strand to SEQ ID NO: 1249410
uuacugagaauacuugaga

SEQ ID NO: 1249412 - RNA, 19 nt, Artificial Sequence
  Description of Artificial Sequence: Synthetic oligonucleotide
  Sense strand starting at position 3367 of SEQ ID NO: 1241133
agaaauauuuguuaagguc

SEQ ID NO: 1249413 - RNA, 19 nt, Artificial Sequence
  Description of Artificial Sequence: Synthetic oligonucleotide
  Antisense strand to SEQ ID NO: 1249412
gaccuuaacaaauauuucu

SEQ ID NO: 1249414 - RNA, 19 nt, Artificial Sequence
  Description of Artificial Sequence: Synthetic oligonucleotide
  Sense strand starting at position 52 of SEQ ID NO: 1241134
uuccauaccuugucauaug

SEQ ID NO: 1249415 - RNA, 19 nt, Artificial Sequence
  Description of Artificial Sequence: Synthetic oligonucleotide
  Antisense strand to SEQ ID NO: 1249414
cauaugacaagguauggaa

SEQ ID NO: 1249416 - RNA, 19 nt, Artificial Sequence
  Description of Artificial Sequence: Synthetic oligonucleotide
  Sense strand starting at position 66 of SEQ ID NO: 1241134
auaugaaacugggugguuu

SEQ ID NO: 1249417 - RNA, 19 nt, Artificial Sequence
  Description of Artificial Sequence: Synthetic oligonucleotide
  Antisense strand to SEQ ID NO: 1249416
aaaccacccaguuucauau

SEQ ID NO: 1249418 - RNA, 19 nt, Artificial Sequence
  Description of Artificial Sequence: Synthetic oligonucleotide
  Sense strand starting at position 70 of SEQ ID NO: 1241134
gaaacugggugguuuguaa

SEQ ID NO: 1249419 - RNA, 19 nt, Artificial Sequence
  Description of Artificial Sequence: Synthetic oligonucleotide
  Antisense strand to SEQ ID NO: 1249418
uuacaaaccacccaguuuc

SEQ ID NO: 1249420 - RNA, 19 nt, Artificial Sequence
  Description of Artificial Sequence: Synthetic oligonucleotide
  Sense strand starting at position 85 of SEQ ID NO: 1241134
guaagaaacucucugguca

SEQ ID NO: 1249421 - RNA, 19 nt, Artificial Sequence
  Description of Artificial Sequence: Synthetic oligonucleotide
  Antisense strand to SEQ ID NO: 1249420
ugaccagagaguuucuuac

SEQ ID NO: 1249422 - RNA, 19 nt, Artificial Sequence
  Description of Artificial Sequence: Synthetic oligonucleotide
  Sense strand starting at position 89 of SEQ ID NO: 1241134
gaaacucucuggucaguua

SEQ ID NO: 1249423 - RNA, 19 nt, Artificial Sequence
  Description of Artificial Sequence: Synthetic oligonucleotide
  Antisense strand to SEQ ID NO: 1249422
uaacugaccagagaguuuc

SEQ ID NO: 1249424 - RNA, 19 nt, Artificial Sequence
  Description of Artificial Sequence: Synthetic oligonucleotide
  Sense strand starting at position 100 of SEQ ID NO: 1241134
gucaguuaccaugacauaa

SEQ ID NO: 1249425 - RNA, 19 nt, Artificial Sequence
  Description of Artificial Sequence: Synthetic oligonucleotide
  Antisense strand to SEQ ID NO: 1249424
uuaugucaugguaacugac

SEQ ID NO: 1249426 - RNA, 19 nt, Artificial Sequence
  Description of Artificial Sequence: Synthetic oligonucleotide
  Sense strand starting at position 149 of SEQ ID NO: 1241134
gaaauuguuugcuuaauug

SEQ ID NO: 1249427 - RNA, 19 nt, Artificial Sequence
  Description of Artificial Sequence: Synthetic oligonucleotide
  Antisense strand to SEQ ID NO: 1249426
caauuaagcaaacaauuuc

SEQ ID NO: 1249428 - RNA, 19 nt, Artificial Sequence
  Description of Artificial Sequence: Synthetic oligonucleotide
  Sense strand starting at position 158 of SEQ ID NO: 1241134
ugcuuaauugucuaggaug

SEQ ID NO: 1249429 - RNA, 19 nt, Artificial Sequence
  Description of Artificial Sequence: Synthetic oligonucleotide
  Antisense strand to SEQ ID NO: 1249428
cauccuagacaauuaagca

SEQ ID NO: 1249430 - RNA, 19 nt, Artificial Sequence
  Description of Artificial Sequence: Synthetic oligonucleotide
  Sense strand starting at position 160 of SEQ ID NO: 1241134
cuuaauugucuaggaugua

SEQ ID NO: 1249431 - RNA, 19 nt, Artificial Sequence
  Description of Artificial Sequence: Synthetic oligonucleotide
  Antisense strand to SEQ ID NO: 1249430
uacauccuagacaauuaag

SEQ ID NO: 1249432 - RNA, 19 nt, Artificial Sequence
  Description of Artificial Sequence: Synthetic oligonucleotide
  Sense strand starting at position 336 of SEQ ID NO: 1241134
caugaauugcaguacaagu

SEQ ID NO: 1249433 - RNA, 19 nt, Artificial Sequence
  Description of Artificial Sequence: Synthetic oligonucleotide
  Antisense strand to SEQ ID NO: 1249432
acuuguacugcaauucaug

SEQ ID NO: 1249434 - RNA, 19 nt, Artificial Sequence
  Description of Artificial Sequence: Synthetic oligonucleotide
  Sense strand starting at position 338 of SEQ ID NO: 1241134
ugaauugcaguacaaguaa

SEQ ID NO: 1249435 - RNA, 19 nt, Artificial Sequence
  Description of Artificial Sequence: Synthetic oligonucleotide
  Antisense strand to SEQ ID NO: 1249434
uuacuuguacugcaauuca

SEQ ID NO: 1249436 - RNA, 19 nt, Artificial Sequence
  Description of Artificial Sequence: Synthetic oligonucleotide
  Sense strand starting at position 448 of SEQ ID NO: 1241134
ggucaaagcauauggaucu

SEQ ID NO: 1249437 - RNA, 19 nt, Artificial Sequence
  Description of Artificial Sequence: Synthetic oligonucleotide
  Antisense strand to SEQ ID NO: 1249436
agauccauaugcuuugacc

SEQ ID NO: 1249438 - RNA, 19 nt, Artificial Sequence
  Description of Artificial Sequence: Synthetic oligonucleotide
  Sense strand starting at position 578 of SEQ ID NO: 1241134
cuuaaaggauugucaggau

SEQ ID NO: 1249439 - RNA, 19 nt, Artificial Sequence
  Description of Artificial Sequence: Synthetic oligonucleotide
  Antisense strand to SEQ ID NO: 1249438
auccugacaauccuuuaag

SEQ ID NO: 1249440 - RNA, 19 nt, Artificial Sequence
  Description of Artificial Sequence: Synthetic oligonucleotide
  Sense strand starting at position 590 of SEQ ID NO: 1241134
ucaggauauuuguccucgu

SEQ ID NO: 1249441 - RNA, 19 nt, Artificial Sequence
  Description of Artificial Sequence: Synthetic oligonucleotide
  Antisense strand to SEQ ID NO: 1249440
acgaggacaaauauccuga

SEQ ID NO: 1249442 - RNA, 19 nt, Artificial Sequence
  Description of Artificial Sequence: Synthetic oligonucleotide
  Sense strand starting at position 593 of SEQ ID NO: 1241134
ggauauuuguccucgucuc

SEQ ID NO: 1249443 - RNA, 19 nt, Artificial Sequence
  Description of Artificial Sequence: Synthetic oligonucleotide
  Antisense strand to SEQ ID NO: 1249442
gagacgaggacaaauaucc

SEQ ID NO: 1249444 - RNA, 19 nt, Artificial Sequence
  Description of Artificial Sequence: Synthetic oligonucleotide
  Sense strand starting at position 594 of SEQ ID NO: 1241134
gauauuuguccucgucuca

SEQ ID NO: 1249445 - RNA, 19 nt, Artificial Sequence
  Description of Artificial Sequence: Synthetic oligonucleotide
  Antisense strand to SEQ ID NO: 1249444
ugagacgaggacaaauauc

SEQ ID NO: 1249446 - RNA, 19 nt, Artificial Sequence
  Description of Artificial Sequence: Synthetic oligonucleotide
  Sense strand starting at position 668 of SEQ ID NO: 1241134
aagucuuugcauuaggaaa

SEQ ID NO: 1249447 - RNA, 19 nt, Artificial Sequence
  Description of Artificial Sequence: Synthetic oligonucleotide
  Antisense strand to SEQ ID NO: 1249446
uuuccuaaugcaaagacuu

SEQ ID NO: 1249448 - RNA, 19 nt, Artificial Sequence
  Description of Artificial Sequence: Synthetic oligonucleotide
  Sense strand starting at position 702 of SEQ ID NO: 1241134
ugaucaauugguuacucuu

SEQ ID NO: 1249449 - RNA, 19 nt, Artificial Sequence
  Description of Artificial Sequence: Synthetic oligonucleotide
  Antisense strand to SEQ ID NO: 1249448
aagaguaaccaauugauca

SEQ ID NO: 1249450 - RNA, 19 nt, Artificial Sequence
  Description of Artificial Sequence: Synthetic oligonucleotide
  Sense strand starting at position 705 of SEQ ID NO: 1241134
ucaauugguuacucuugau

SEQ ID NO: 1249451 - RNA, 19 nt, Artificial Sequence
  Description of Artificial Sequence: Synthetic oligonucleotide
  Antisense strand to SEQ ID NO: 1249450
aucaagaguaaccaauuga

SEQ ID NO: 1249452 - RNA, 19 nt, Artificial Sequence
  Description of Artificial Sequence: Synthetic oligonucleotide
  Sense strand starting at position 709 of SEQ ID NO: 1241134
uugguuacucuugaucuca

SEQ ID NO: 1249453 - RNA, 19 nt, Artificial Sequence
  Description of Artificial Sequence: Synthetic oligonucleotide
  Antisense strand to SEQ ID NO: 1249452
ugagaucaagaguaaccaa

SEQ ID NO: 1249454 - RNA, 19 nt, Artificial Sequence
  Description of Artificial Sequence: Synthetic oligonucleotide
  Sense strand starting at position 711 of SEQ ID NO: 1241134
gguuacucuugaucucaaa

SEQ ID NO: 1249455 - RNA, 19 nt, Artificial Sequence
  Description of Artificial Sequence: Synthetic oligonucleotide
  Antisense strand to SEQ ID NO: 1249454
uuugagaucaagaguaacc

SEQ ID NO: 1249456 - RNA, 19 nt, Artificial Sequence
  Description of Artificial Sequence: Synthetic oligonucleotide
  Sense strand starting at position 860 of SEQ ID NO: 1241134
gccugaaauucccuggagu

SEQ ID NO: 1249457 - RNA, 19 nt, Artificial Sequence
  Description of Artificial Sequence: Synthetic oligonucleotide
  Antisense strand to SEQ ID NO: 1249456
acuccagggaauuucaggc

SEQ ID NO: 1249458 - RNA, 19 nt, Artificial Sequence
  Description of Artificial Sequence: Synthetic oligonucleotide
  Sense strand starting at position 861 of SEQ ID NO: 1241134
ccugaaauucccuggagua

SEQ ID NO: 1249459 - RNA, 19 nt, Artificial Sequence
  Description of Artificial Sequence: Synthetic oligonucleotide
  Antisense strand to SEQ ID NO: 1249458
uacuccagggaauuucagg

SEQ ID NO: 1249460 - RNA, 19 nt, Artificial Sequence
  Description of Artificial Sequence: Synthetic oligonucleotide
  Sense strand starting at position 862 of SEQ ID NO: 1241134
cugaaauucccuggaguaa

SEQ ID NO: 1249461 - RNA, 19 nt, Artificial Sequence
  Description of Artificial Sequence: Synthetic oligonucleotide
  Antisense strand to SEQ ID NO: 1249460
uuacuccagggaauuucag

SEQ ID NO: 1249462 - RNA, 19 nt, Artificial Sequence
  Description of Artificial Sequence: Synthetic oligonucleotide
  Sense strand starting at position 921 of SEQ ID NO: 1241134
gauaaaggaucagugcuua

SEQ ID NO: 1249463 - RNA, 19 nt, Artificial Sequence
  Description of Artificial Sequence: Synthetic oligonucleotide
  Antisense strand to SEQ ID NO: 1249462
uaagcacugauccuuuauc

SEQ ID NO: 1249464 - RNA, 19 nt, Artificial Sequence
  Description of Artificial Sequence: Synthetic oligonucleotide
  Sense strand starting at position 925 of SEQ ID NO: 1241134
aaggaucagugcuuauaug

SEQ ID NO: 1249465 - RNA, 19 nt, Artificial Sequence
  Description of Artificial Sequence: Synthetic oligonucleotide
  Antisense strand to SEQ ID NO: 1249464
cauauaagcacugauccuu

SEQ ID NO: 1249466 - RNA, 19 nt, Artificial Sequence
  Description of Artificial Sequence: Synthetic oligonucleotide
  Sense strand starting at position 934 of SEQ ID NO: 1241134
ugcuuauauggccagagga

SEQ ID NO: 1249467 - RNA, 19 nt, Artificial Sequence
  Description of Artificial Sequence: Synthetic oligonucleotide
  Antisense strand to SEQ ID NO: 1249466
uccucuggccauauaagca

SEQ ID NO: 1249468 - RNA, 19 nt, Artificial Sequence
  Description of Artificial Sequence: Synthetic oligonucleotide
  Sense strand starting at position 1062 of SEQ ID NO: 1241134
ugccaagaaucuuugaaag

SEQ ID NO: 1249469 - RNA, 19 nt, Artificial Sequence
  Description of Artificial Sequence: Synthetic oligonucleotide
  Antisense strand to SEQ ID NO: 1249468
cuuucaaagauucuuggca

SEQ ID NO: 1249470 - RNA, 19 nt, Artificial Sequence
  Description of Artificial Sequence: Synthetic oligonucleotide
  Sense strand starting at position 1145 of SEQ ID NO: 1241134
uaagucugggcuuacuuau

SEQ ID NO: 1249471 - RNA, 19 nt, Artificial Sequence
  Description of Artificial Sequence: Synthetic oligonucleotide
  Antisense strand to SEQ ID NO: 1249470
auaaguaagcccagacuua

SEQ ID NO: 1249472 - RNA, 19 nt, Artificial Sequence
  Description of Artificial Sequence: Synthetic oligonucleotide
  Sense strand starting at position 1222 of SEQ ID NO: 1241134
ccuguuaaggugcgaauuu

SEQ ID NO: 1249473 - RNA, 19 nt, Artificial Sequence
  Description of Artificial Sequence: Synthetic oligonucleotide
  Antisense strand to SEQ ID NO: 1249472
aaauucgcaccuuaacagg

SEQ ID NO: 1249474 - RNA, 19 nt, Artificial Sequence
  Description of Artificial Sequence: Synthetic oligonucleotide
  Sense strand starting at position 1269 of SEQ ID NO: 1241134
uaaggaguauugucaauua

SEQ ID NO: 1249475 - RNA, 19 nt, Artificial Sequence
  Description of Artificial Sequence: Synthetic oligonucleotide
  Antisense strand to SEQ ID NO: 1249474
uaauugacaauacuccuua

SEQ ID NO: 1249476 - RNA, 19 nt, Artificial Sequence
  Description of Artificial Sequence: Synthetic oligonucleotide
  Sense strand starting at position 1454 of SEQ ID NO: 1241134
ucaaauucucuaugaggcu

SEQ ID NO: 1249477 - RNA, 19 nt, Artificial Sequence
  Description of Artificial Sequence: Synthetic oligonucleotide
  Antisense strand to SEQ ID NO: 1249476
agccucauagagaauuuga

SEQ ID NO: 1249478 - RNA, 19 nt, Artificial Sequence
  Description of Artificial Sequence: Synthetic oligonucleotide
  Sense strand starting at position 1475 of SEQ ID NO: 1241134
agaaauaacuuagccagua

SEQ ID NO: 1249479 - RNA, 19 nt, Artificial Sequence
  Description of Artificial Sequence: Synthetic oligonucleotide
  Antisense strand to SEQ ID NO: 1249478
uacuggcuaaguuauuucu

SEQ ID NO: 1249480 - RNA, 19 nt, Artificial Sequence
  Description of Artificial Sequence: Synthetic oligonucleotide
  Sense strand starting at position 1561 of SEQ ID NO: 1241134
ugugaaauaucagccaaau

SEQ ID NO: 1249481 - RNA, 19 nt, Artificial Sequence
  Description of Artificial Sequence: Synthetic oligonucleotide
  Antisense strand to SEQ ID NO: 1249480
auuuggcugauauuucaca

SEQ ID NO: 1249482 - RNA, 19 nt, Artificial Sequence
  Description of Artificial Sequence: Synthetic oligonucleotide
  Sense strand starting at position 2261 of SEQ ID NO: 1241134
aggcgugugccuuauuucu

SEQ ID NO: 1249483 - RNA, 19 nt, Artificial Sequence
  Description of Artificial Sequence: Synthetic oligonucleotide
  Antisense strand to SEQ ID NO: 1249482
agaaauaaggcacacgccu

SEQ ID NO: 1249484 - RNA, 19 nt, Artificial Sequence
  Description of Artificial Sequence: Synthetic oligonucleotide
  Sense strand starting at position 2353 of SEQ ID NO: 1241134
ggguguuguguucucagca

SEQ ID NO: 1249485 - RNA, 19 nt, Artificial Sequence
  Description of Artificial Sequence: Synthetic oligonucleotide
  Antisense strand to SEQ ID NO: 1249484
ugcugagaacacaacaccc

SEQ ID NO: 1249486 - RNA, 19 nt, Artificial Sequence
  Description of Artificial Sequence: Synthetic oligonucleotide
  Sense strand starting at position 3131 of SEQ ID NO: 1241134
acgucuauaagguaaguga

SEQ ID NO: 1249487 - RNA, 19 nt, Artificial Sequence
  Description of Artificial Sequence: Synthetic oligonucleotide
  Antisense strand to SEQ ID NO: 1249486
ucacuuaccuuauagacgu

SEQ ID NO: 1249488 - RNA, 19 nt, Artificial Sequence
  Description of Artificial Sequence: Synthetic oligonucleotide
  Sense strand starting at position 3437 of SEQ ID NO: 1241134
guggaauuacaccgaagga

SEQ ID NO: 1249489 - RNA, 19 nt, Artificial Sequence
  Description of Artificial Sequence: Synthetic oligonucleotide
  Antisense strand to SEQ ID NO: 1249488
uccuucgguguaauuccac

SEQ ID NO: 1249490 - RNA, 19 nt, Artificial Sequence
  Description of Artificial Sequence: Synthetic oligonucleotide
  Sense strand starting at position 3758 of SEQ ID NO: 1241134
agggauuuauaacauccua

SEQ ID NO: 1249491 - RNA, 19 nt, Artificial Sequence
  Description of Artificial Sequence: Synthetic oligonucleotide
  Antisense strand to SEQ ID NO: 1249490
uaggauguuauaaaucccu

SEQ ID NO: 1249492 - RNA, 19 nt, Artificial Sequence
  Description of Artificial Sequence: Synthetic oligonucleotide
  Sense strand starting at position 3919 of SEQ ID NO: 1241134
guucuugaaugguucagag

SEQ ID NO: 1249493 - RNA, 19 nt, Artificial Sequence
  Description of Artificial Sequence: Synthetic oligonucleotide
  Antisense strand to SEQ ID NO: 1249492
cucugaaccauucaagaac

SEQ ID NO: 1249494 - RNA, 19 nt, Artificial Sequence
  Description of Artificial Sequence: Synthetic oligonucleotide
  Sense strand starting at position 316 of SEQ ID NO: 1241135
cagcuaagucaugacagac

SEQ ID NO: 1249495 - RNA, 19 nt, Artificial Sequence
  Description of Artificial Sequence: Synthetic oligonucleotide
  Antisense strand to SEQ ID NO: 1249494
gucugucaugacuuagcug

SEQ ID NO: 1249496 - RNA, 19 nt, Artificial Sequence
  Description of Artificial Sequence: Synthetic oligonucleotide
  Sense strand starting at position 404 of SEQ ID NO: 1241135
guauccugugaccauuaga

SEQ ID NO: 1249497 - RNA, 19 nt, Artificial Sequence
  Description of Artificial Sequence: Synthetic oligonucleotide
  Antisense strand to SEQ ID NO: 1249496
ucuaauggucacaggauac

SEQ ID NO: 1249498 - RNA, 19 nt, Artificial Sequence
  Description of Artificial Sequence: Synthetic oligonucleotide
  Sense strand starting at position 524 of SEQ ID NO: 1241135
aagagcucucacugagaug

SEQ ID NO: 1249499 - RNA, 19 nt, Artificial Sequence
  Description of Artificial Sequence: Synthetic oligonucleotide
  Antisense strand to SEQ ID NO: 1249498
caucucagugagagcucuu

SEQ ID NO: 1249500 - RNA, 19 nt, Artificial Sequence
  Description of Artificial Sequence: Synthetic oligonucleotide
  Sense strand starting at position 525 of SEQ ID NO: 1241135
agagcucucacugagaugu

SEQ ID NO: 1249501 - RNA, 19 nt, Artificial Sequence
  Description of Artificial Sequence: Synthetic oligonucleotide
  Antisense strand to SEQ ID NO: 1249500
acaucucagugagagcucu

SEQ ID NO: 1249502 - RNA, 19 nt, Artificial Sequence
  Description of Artificial Sequence: Synthetic oligonucleotide
  Sense strand starting at position 529 of SEQ ID NO: 1241135
cucucacugagauguggaa

SEQ ID NO: 1249503 - RNA, 19 nt, Artificial Sequence
  Description of Artificial Sequence: Synthetic oligonucleotide
  Antisense strand to SEQ ID NO: 1249502
uuccacaucucagugagag

SEQ ID NO: 1249504 - RNA, 19 nt, Artificial Sequence
  Description of Artificial Sequence: Synthetic oligonucleotide
  Sense strand starting at position 663 of SEQ ID NO: 1241135
cugagacauucucugguuc

SEQ ID NO: 1249505 - RNA, 19 nt, Artificial Sequence
  Description of Artificial Sequence: Synthetic oligonucleotide
  Antisense strand to SEQ ID NO: 1249504
gaaccagagaaugucucag

SEQ ID NO: 1249506 - RNA, 19 nt, Artificial Sequence
  Description of Artificial Sequence: Synthetic oligonucleotide
  Sense strand starting at position 719 of SEQ ID NO: 1241135
uaagaugcuggugaguuua

SEQ ID NO: 1249507 - RNA, 19 nt, Artificial Sequence
  Description of Artificial Sequence: Synthetic oligonucleotide
  Antisense strand to SEQ ID NO: 1249506
uaaacucaccagcaucuua

SEQ ID NO: 1249508 - RNA, 19 nt, Artificial Sequence
  Description of Artificial Sequence: Synthetic oligonucleotide
  Sense strand starting at position 793 of SEQ ID NO: 1241135
acacuaaccguccagaacu

SEQ ID NO: 1249509 - RNA, 19 nt, Artificial Sequence
  Description of Artificial Sequence: Synthetic oligonucleotide
  Antisense strand to SEQ ID NO: 1249508
aguucuggacgguuagugu

SEQ ID NO: 1249510 - RNA, 19 nt, Artificial Sequence
  Description of Artificial Sequence: Synthetic oligonucleotide
  Sense strand starting at position 957 of SEQ ID NO: 1241135
gcugaaucaugagcccaau

SEQ ID NO: 1249511 - RNA, 19 nt, Artificial Sequence
  Description of Artificial Sequence: Synthetic oligonucleotide
  Antisense strand to SEQ ID NO: 1249510
auugggcucaugauucagc

SEQ ID NO: 1249512 - RNA, 19 nt, Artificial Sequence
  Description of Artificial Sequence: Synthetic oligonucleotide
  Sense strand starting at position 1124 of SEQ ID NO: 1241135
uacugcagugcucaggaau

SEQ ID NO: 1249513 - RNA, 19 nt, Artificial Sequence
  Description of Artificial Sequence: Synthetic oligonucleotide
  Antisense strand to SEQ ID NO: 1249512
auuccugagcacugcagua

SEQ ID NO: 1249514 - RNA, 19 nt, Artificial Sequence
  Description of Artificial Sequence: Synthetic oligonucleotide
  Sense strand starting at position 2021 of SEQ ID NO: 1241135
ccgugaagacagugauaga

SEQ ID NO: 1249515 - RNA, 19 nt, Artificial Sequence
  Description of Artificial Sequence: Synthetic oligonucleotide
  Antisense strand to SEQ ID NO: 1249514
ucuaucacugucuucacgg

SEQ ID NO: 1249516 - RNA, 19 nt, Artificial Sequence
  Description of Artificial Sequence: Synthetic oligonucleotide
  Sense strand starting at position 2115 of SEQ ID NO: 1241135
uuaacagcguuaucagaaa

SEQ ID NO: 1249517 - RNA, 19 nt, Artificial Sequence
  Description of Artificial Sequence: Synthetic oligonucleotide
  Antisense strand to SEQ ID NO: 1249516
uuucugauaacgcuguuaa

SEQ ID NO: 1249518 - RNA, 19 nt, Artificial Sequence
  Description of Artificial Sequence: Synthetic oligonucleotide
  Sense strand starting at position 2141 of SEQ ID NO: 1241135
accgauauacugcaugauu

SEQ ID NO: 1249519 - RNA, 19 nt, Artificial Sequence
  Description of Artificial Sequence: Synthetic oligonucleotide
  Antisense strand to SEQ ID NO: 1249518
aaucaugcaguauaucggu

SEQ ID NO: 1249520 - RNA, 19 nt, Artificial Sequence
  Description of Artificial Sequence: Synthetic oligonucleotide
  Sense strand starting at position 2187 of SEQ ID NO: 1241135
acgguuauacauuaguaca

SEQ ID NO: 1249521 - RNA, 19 nt, Artificial Sequence
  Description of Artificial Sequence: Synthetic oligonucleotide
  Antisense strand to SEQ ID NO: 1249520
uguacuaauguauaaccgu

SEQ ID NO: 1249522 - RNA, 19 nt, Artificial Sequence
  Description of Artificial Sequence: Synthetic oligonucleotide
  Sense strand starting at position 2189 of SEQ ID NO: 1241135
gguuauacauuaguacaaa

SEQ ID NO: 1249523 - RNA, 19 nt, Artificial Sequence
  Description of Artificial Sequence: Synthetic oligonucleotide
  Antisense strand to SEQ ID NO: 1249522
uuuguacuaauguauaacc

SEQ ID NO: 1249524 - RNA, 19 nt, Artificial Sequence
  Description of Artificial Sequence: Synthetic oligonucleotide
  Sense strand starting at position 2250 of SEQ ID NO: 1241135
ugcauuuaucuacgaggca

SEQ ID NO: 1249525 - RNA, 19 nt, Artificial Sequence
  Description of Artificial Sequence: Synthetic oligonucleotide
  Antisense strand to SEQ ID NO: 1249524
ugccucguagauaaaugca

SEQ ID NO: 1249526 - RNA, 19 nt, Artificial Sequence
  Description of Artificial Sequence: Synthetic oligonucleotide
  Sense strand starting at position 2295 of SEQ ID NO: 1241135
aaggucauguuaguaaaga

SEQ ID NO: 1249527 - RNA, 19 nt, Artificial Sequence
  Description of Artificial Sequence: Synthetic oligonucleotide
  Antisense strand to SEQ ID NO: 1249526
ucuuuacuaacaugaccuu

SEQ ID NO: 1249528 - RNA, 19 nt, Artificial Sequence
  Description of Artificial Sequence: Synthetic oligonucleotide
  Sense strand starting at position 2303 of SEQ ID NO: 1241135
guuaguaaagaggguauca

SEQ ID NO: 1249529 - RNA, 19 nt, Artificial Sequence
  Description of Artificial Sequence: Synthetic oligonucleotide
  Antisense strand to SEQ ID NO: 1249528
ugauacccucuuuacuaac

SEQ ID NO: 1249530 - RNA, 19 nt, Artificial Sequence
  Description of Artificial Sequence: Synthetic oligonucleotide
  Sense strand starting at position 2431 of SEQ ID NO: 1241135
cucaauauccacuggguaa

SEQ ID NO: 1249531 - RNA, 19 nt, Artificial Sequence
  Description of Artificial Sequence: Synthetic oligonucleotide
  Antisense strand to SEQ ID NO: 1249530
uuacccaguggauauugag

SEQ ID NO: 1249532 - RNA, 19 nt, Artificial Sequence
  Description of Artificial Sequence: Synthetic oligonucleotide
  Sense strand starting at position 2456 of SEQ ID NO: 1241135
ccacuagauuugcaaagau

SEQ ID NO: 1249533 - RNA, 19 nt, Artificial Sequence
  Description of Artificial Sequence: Synthetic oligonucleotide
  Antisense strand to SEQ ID NO: 1249532
aucuuugcaaaucuagugg

SEQ ID NO: 1249534 - RNA, 19 nt, Artificial Sequence
  Description of Artificial Sequence: Synthetic oligonucleotide
  Sense strand starting at position 2736 of SEQ ID NO: 1241135
cugccauuugguuguuacu

SEQ ID NO: 1249535 - RNA, 19 nt, Artificial Sequence
  Description of Artificial Sequence: Synthetic oligonucleotide
  Antisense strand to SEQ ID NO: 1249534
aguaacaaccaaauggcag

SEQ ID NO: 1249536 - RNA, 19 nt, Artificial Sequence
  Description of Artificial Sequence: Synthetic oligonucleotide
  Sense strand starting at position 2738 of SEQ ID NO: 1241135
gccauuugguuguuacuca

SEQ ID NO: 1249537 - RNA, 19 nt, Artificial Sequence
  Description of Artificial Sequence: Synthetic oligonucleotide
  Antisense strand to SEQ ID NO: 1249536
ugaguaacaaccaaauggc

SEQ ID NO: 1249538 - RNA, 19 nt, Artificial Sequence
  Description of Artificial Sequence: Synthetic oligonucleotide
  Sense strand starting at position 2771 of SEQ ID NO: 1241135
cgguucuuaggagaucacu

SEQ ID NO: 1249539 - RNA, 19 nt, Artificial Sequence
  Description of Artificial Sequence: Synthetic oligonucleotide
  Antisense strand to SEQ ID NO: 1249538
agugaucuccuaagaaccg

SEQ ID NO: 1249540 - RNA, 19 nt, Artificial Sequence
  Description of Artificial Sequence: Synthetic oligonucleotide
  Sense strand starting at position 2821 of SEQ ID NO: 1241135
cugcuaauuccucauggua

SEQ ID NO: 1249541 - RNA, 19 nt, Artificial Sequence
  Description of Artificial Sequence: Synthetic oligonucleotide
  Antisense strand to SEQ ID NO: 1249540
uaccaugaggaauuagcag

SEQ ID NO: 1249542 - RNA, 19 nt, Artificial Sequence
  Description of Artificial Sequence: Synthetic oligonucleotide
  Sense strand starting at position 2916 of SEQ ID NO: 1241135
ccaaaucuauacuuguagu

SEQ ID NO: 1249543 - RNA, 19 nt, Artificial Sequence
  Description of Artificial Sequence: Synthetic oligonucleotide
  Antisense strand to SEQ ID NO: 1249542
acuacaaguauagauuugg

SEQ ID NO: 1249544 - RNA, 19 nt, Artificial Sequence
  Description of Artificial Sequence: Synthetic oligonucleotide
  Sense strand starting at position 2934 of SEQ ID NO: 1241135
ucuucugcccucuagaaga

SEQ ID NO: 1249545 - RNA, 19 nt, Artificial Sequence
  Description of Artificial Sequence: Synthetic oligonucleotide
  Antisense strand to SEQ ID NO: 1249544
ucuucuagagggcagaaga

SEQ ID NO: 1249546 - RNA, 19 nt, Artificial Sequence
  Description of Artificial Sequence: Synthetic oligonucleotide
  Sense strand starting at position 3107 of SEQ ID NO: 1241135
cagagucgugaacacugua

SEQ ID NO: 1249547 - RNA, 19 nt, Artificial Sequence
  Description of Artificial Sequence: Synthetic oligonucleotide
  Antisense strand to SEQ ID NO: 1249546
uacaguguucacgacucug

SEQ ID NO: 1249548 - RNA, 19 nt, Artificial Sequence
  Description of Artificial Sequence: Synthetic oligonucleotide
  Sense strand starting at position 3112 of SEQ ID NO: 1241135
ucgugaacacuguaaccaa

SEQ ID NO: 1249549 - RNA, 19 nt, Artificial Sequence
  Description of Artificial Sequence: Synthetic oligonucleotide
  Antisense strand to SEQ ID NO: 1249548
uugguuacaguguucacga

SEQ ID NO: 1249550 - RNA, 19 nt, Artificial Sequence
  Description of Artificial Sequence: Synthetic oligonucleotide
  Sense strand starting at position 3148 of SEQ ID NO: 1241135
aaagaagucugugcucaac

SEQ ID NO: 1249551 - RNA, 19 nt, Artificial Sequence
  Description of Artificial Sequence: Synthetic oligonucleotide
  Antisense strand to SEQ ID NO: 1249550
guugagcacagacuucuuu

SEQ ID NO: 1249552 - RNA, 19 nt, Artificial Sequence
  Description of Artificial Sequence: Synthetic oligonucleotide
  Sense strand starting at position 3151 of SEQ ID NO: 1241135
gaagucugugcucaacaga

SEQ ID NO: 1249553 - RNA, 19 nt, Artificial Sequence
  Description of Artificial Sequence: Synthetic oligonucleotide
  Antisense strand to SEQ ID NO: 1249552
ucuguugagcacagacuuc

SEQ ID NO: 1249554 - RNA, 19 nt, Artificial Sequence
  Description of Artificial Sequence: Synthetic oligonucleotide
  Sense strand starting at position 3160 of SEQ ID NO: 1241135
gcucaacagaguugaaaug

SEQ ID NO: 1249555 - RNA, 19 nt, Artificial Sequence
  Description of Artificial Sequence: Synthetic oligonucleotide
  Antisense strand to SEQ ID NO: 1249554
cauuucaacucuguugagc

SEQ ID NO: 1249556 - RNA, 19 nt, Artificial Sequence
  Description of Artificial Sequence: Synthetic oligonucleotide
  Sense strand starting at position 3456 of SEQ ID NO: 1241135
guaaguaaucugcagguga

SEQ ID NO: 1249557 - RNA, 19 nt, Artificial Sequence
  Description of Artificial Sequence: Synthetic oligonucleotide
  Antisense strand to SEQ ID NO: 1249556
ucaccugcagauuacuuac

SEQ ID NO: 1249558 - RNA, 19 nt, Artificial Sequence
  Description of Artificial Sequence: Synthetic oligonucleotide
  Sense strand starting at position 3458 of SEQ ID NO: 1241135
aaguaaucugcaggugaau

SEQ ID NO: 1249559 - RNA, 19 nt, Artificial Sequence
  Description of Artificial Sequence: Synthetic oligonucleotide
  Antisense strand to SEQ ID NO: 1249558
auucaccugcagauuacuu

SEQ ID NO: 1249560 - RNA, 19 nt, Artificial Sequence
  Description of Artificial Sequence: Synthetic oligonucleotide
  Sense strand starting at position 3467 of SEQ ID NO: 1241135
gcaggugaauacuuugaga

SEQ ID NO: 1249561 - RNA, 19 nt, Artificial Sequence
  Description of Artificial Sequence: Synthetic oligonucleotide
  Antisense strand to SEQ ID NO: 1249560
ucucaaaguauucaccugc

SEQ ID NO: 1249562 - RNA, 19 nt, Artificial Sequence
  Description of Artificial Sequence: Synthetic oligonucleotide
  Sense strand starting at position 3469 of SEQ ID NO: 1241135
aggugaauacuuugagacu

SEQ ID NO: 1249563 - RNA, 19 nt, Artificial Sequence
  Description of Artificial Sequence: Synthetic oligonucleotide
  Antisense strand to SEQ ID NO: 1249562
agucucaaaguauucaccu

SEQ ID NO: 1249564 - RNA, 19 nt, Artificial Sequence
  Description of Artificial Sequence: Synthetic oligonucleotide
  Sense strand starting at position 3478 of SEQ ID NO: 1241135
cuuugagacugugugaauc

SEQ ID NO: 1249565 - RNA, 19 nt, Artificial Sequence
  Description of Artificial Sequence: Synthetic oligonucleotide
  Antisense strand to SEQ ID NO: 1249564
gauucacacagucucaaag

SEQ ID NO: 1249566 - RNA, 19 nt, Artificial Sequence
  Description of Artificial Sequence: Synthetic oligonucleotide
  Sense strand starting at position 3513 of SEQ ID NO: 1241135
auaaauagcucucuguaug

SEQ ID NO: 1249567 - RNA, 19 nt, Artificial Sequence
  Description of Artificial Sequence: Synthetic oligonucleotide
  Antisense strand to SEQ ID NO: 1249566
cauacagagagcuauuuau

SEQ ID NO: 1249568 - RNA, 19 nt, Artificial Sequence
  Description of Artificial Sequence: Synthetic oligonucleotide
  Sense strand starting at position 3516 of SEQ ID NO: 1241135
aauagcucucuguauguga

SEQ ID NO: 1249569 - RNA, 19 nt, Artificial Sequence
  Description of Artificial Sequence: Synthetic oligonucleotide
  Antisense strand to SEQ ID NO: 1249568
ucacauacagagagcuauu

SEQ ID NO: 1249570 - RNA, 19 nt, Artificial Sequence
  Description of Artificial Sequence: Synthetic oligonucleotide
  Sense strand starting at position 3539 of SEQ ID NO: 1241135
uuguacuauuggccaauaa

SEQ ID NO: 1249571 - RNA, 19 nt, Artificial Sequence
  Description of Artificial Sequence: Synthetic oligonucleotide
  Antisense strand to SEQ ID NO: 1249570
uuauuggccaauaguacaa

SEQ ID NO: 1249572 - RNA, 19 nt, Artificial Sequence
  Description of Artificial Sequence: Synthetic oligonucleotide
  Sense strand starting at position 3540 of SEQ ID NO: 1241135
uguacuauuggccaauaac

SEQ ID NO: 1249573 - RNA, 19 nt, Artificial Sequence
  Description of Artificial Sequence: Synthetic oligonucleotide
  Antisense strand to SEQ ID NO: 1249572
guuauuggccaauaguaca

SEQ ID NO: 1249574 - RNA, 19 nt, Artificial Sequence
  Description of Artificial Sequence: Synthetic oligonucleotide
  Sense strand starting at position 111 of SEQ ID NO: 1241136
aggaccugccuccauaauu

SEQ ID NO: 1249575 - RNA, 19 nt, Artificial Sequence
  Description of Artificial Sequence: Synthetic oligonucleotide
  Antisense strand to SEQ ID NO: 1249574
aauuauggaggcagguccu

SEQ ID NO: 1249576 - RNA, 19 nt, Artificial Sequence
  Description of Artificial Sequence: Synthetic oligonucleotide
  Sense strand starting at position 164 of SEQ ID NO: 1241136
ugggaauggugaguuacaa

SEQ ID NO: 1249577 - RNA, 19 nt, Artificial Sequence
  Description of Artificial Sequence: Synthetic oligonucleotide
  Antisense strand to SEQ ID NO: 1249576
uuguaacucaccauuccca

SEQ ID NO: 1249578 - RNA, 19 nt, Artificial Sequence
  Description of Artificial Sequence: Synthetic oligonucleotide
  Sense strand starting at position 230 of SEQ ID NO: 1241136
guaguacaucuacauuaug

SEQ ID NO: 1249579 - RNA, 19 nt, Artificial Sequence
  Description of Artificial Sequence: Synthetic oligonucleotide
  Antisense strand to SEQ ID NO: 1249578
cauaauguagauguacuac

SEQ ID NO: 1249580 - RNA, 19 nt, Artificial Sequence
  Description of Artificial Sequence: Synthetic oligonucleotide
  Sense strand starting at position 603 of SEQ ID NO: 1241136
agaucaauggauuguguga

SEQ ID NO: 1249581 - RNA, 19 nt, Artificial Sequence
  Description of Artificial Sequence: Synthetic oligonucleotide
  Antisense strand to SEQ ID NO: 1249580
ucacacaauccauugaucu

SEQ ID NO: 1249582 - RNA, 19 nt, Artificial Sequence
  Description of Artificial Sequence: Synthetic oligonucleotide
  Sense strand starting at position 622 of SEQ ID NO: 1241136
augucaauuaccugguugu

SEQ ID NO: 1249583 - RNA, 19 nt, Artificial Sequence
  Description of Artificial Sequence: Synthetic oligonucleotide
  Antisense strand to SEQ ID NO: 1249582
acaaccagguaauugacau

SEQ ID NO: 1249584 - RNA, 19 nt, Artificial Sequence
  Description of Artificial Sequence: Synthetic oligonucleotide
  Sense strand starting at position 625 of SEQ ID NO: 1241136
ucaauuaccugguugugau

SEQ ID NO: 1249585 - RNA, 19 nt, Artificial Sequence
  Description of Artificial Sequence: Synthetic oligonucleotide
  Antisense strand to SEQ ID NO: 1249584
aucacaaccagguaauuga

SEQ ID NO: 1249586 - RNA, 19 nt, Artificial Sequence
  Description of Artificial Sequence: Synthetic oligonucleotide
  Sense strand starting at position 626 of SEQ ID NO: 1241136
caauuaccugguugugaua

SEQ ID NO: 1249587 - RNA, 19 nt, Artificial Sequence
  Description of Artificial Sequence: Synthetic oligonucleotide
  Antisense strand to SEQ ID NO: 1249586
uaucacaaccagguaauug

SEQ ID NO: 1249588 - RNA, 19 nt, Artificial Sequence
  Description of Artificial Sequence: Synthetic oligonucleotide
  Sense strand starting at position 633 of SEQ ID NO: 1241136
cugguugugauaugguacu

SEQ ID NO: 1249589 - RNA, 19 nt, Artificial Sequence
  Description of Artificial Sequence: Synthetic oligonucleotide
  Antisense strand to SEQ ID NO: 1249588
aguaccauaucacaaccag

SEQ ID NO: 1249590 - RNA, 19 nt, Artificial Sequence
  Description of Artificial Sequence: Synthetic oligonucleotide
  Sense strand starting at position 711 of SEQ ID NO: 1241136
uuacaauugcauggaaauc

SEQ ID NO: 1249591 - RNA, 19 nt, Artificial Sequence
  Description of Artificial Sequence: Synthetic oligonucleotide
  Antisense strand to SEQ ID NO: 1249590
gauuuccaugcaauuguaa

SEQ ID NO: 1249592 - RNA, 19 nt, Artificial Sequence
  Description of Artificial Sequence: Synthetic oligonucleotide
  Sense strand starting at position 790 of SEQ ID NO: 1241136
ggcaauauucuacauuguu

SEQ ID NO: 1249593 - RNA, 19 nt, Artificial Sequence
  Description of Artificial Sequence: Synthetic oligonucleotide
  Antisense strand to SEQ ID NO: 1249592
aacaauguagaauauugcc

SEQ ID NO: 1249594 - RNA, 19 nt, Artificial Sequence
  Description of Artificial Sequence: Synthetic oligonucleotide
  Sense strand starting at position 865 of SEQ ID NO: 1241136
aauaaaugucaucacguag

SEQ ID NO: 1249595 - RNA, 19 nt, Artificial Sequence
  Description of Artificial Sequence: Synthetic oligonucleotide
  Antisense strand to SEQ ID NO: 1249594
cuacgugaugacauuuauu

SEQ ID NO: 1249596 - RNA, 19 nt, Artificial Sequence
  Description of Artificial Sequence: Synthetic oligonucleotide
  Sense strand starting at position 1020 of SEQ ID NO: 1241136
ggagcuaccugaccaaaga

SEQ ID NO: 1249597 - RNA, 19 nt, Artificial Sequence
  Description of Artificial Sequence: Synthetic oligonucleotide
  Antisense strand to SEQ ID NO: 1249596
ucuuuggucagguagcucc

SEQ ID NO: 1249598 - RNA, 19 nt, Artificial Sequence
  Description of Artificial Sequence: Synthetic oligonucleotide
  Sense strand starting at position 1140 of SEQ ID NO: 1241136
ugccaucaagcauacagaa

SEQ ID NO: 1249599 - RNA, 19 nt, Artificial Sequence
  Description of Artificial Sequence: Synthetic oligonucleotide
  Antisense strand to SEQ ID NO: 1249598
uucuguaugcuugauggca

SEQ ID NO: 1249600 - RNA, 19 nt, Artificial Sequence
  Description of Artificial Sequence: Synthetic oligonucleotide
  Sense strand starting at position 1156 of SEQ ID NO: 1241136
gaaugaguguuagcaacac

SEQ ID NO: 1249601 - RNA, 19 nt, Artificial Sequence
  Description of Artificial Sequence: Synthetic oligonucleotide
  Antisense strand to SEQ ID NO: 1249600
guguugcuaacacucauuc

SEQ ID NO: 1249602 - RNA, 19 nt, Artificial Sequence
  Description of Artificial Sequence: Synthetic oligonucleotide
  Sense strand starting at position 1198 of SEQ ID NO: 1241136
guuagaagguccuuuagag

SEQ ID NO: 1249603 - RNA, 19 nt, Artificial Sequence
  Description of Artificial Sequence: Synthetic oligonucleotide
  Antisense strand to SEQ ID NO: 1249602
cucuaaaggaccuucuaac

SEQ ID NO: 1249604 - RNA, 19 nt, Artificial Sequence
  Description of Artificial Sequence: Synthetic oligonucleotide
  Sense strand starting at position 2480 of SEQ ID NO: 1241136
agguucauucguuguauuu

SEQ ID NO: 1249605 - RNA, 19 nt, Artificial Sequence
  Description of Artificial Sequence: Synthetic oligonucleotide
  Antisense strand to SEQ ID NO: 1249604
aaauacaacgaaugaaccu

SEQ ID NO: 1249606 - RNA, 19 nt, Artificial Sequence
  Description of Artificial Sequence: Synthetic oligonucleotide
  Sense strand starting at position 2490 of SEQ ID NO: 1241136
guuguauuuacgggccgga

SEQ ID NO: 1249607 - RNA, 19 nt, Artificial Sequence
  Description of Artificial Sequence: Synthetic oligonucleotide
  Antisense strand to SEQ ID NO: 1249606
uccggcccguaaauacaac

SEQ ID NO: 1249608 - RNA, 19 nt, Artificial Sequence
  Description of Artificial Sequence: Synthetic oligonucleotide
  Sense strand starting at position 2603 of SEQ ID NO: 1241136
cuuaaaggcucaguuguga

SEQ ID NO: 1249609 - RNA, 19 nt, Artificial Sequence
  Description of Artificial Sequence: Synthetic oligonucleotide
  Antisense strand to SEQ ID NO: 1249608
ucacaacugagccuuuaag

SEQ ID NO: 1249610 - RNA, 19 nt, Artificial Sequence
  Description of Artificial Sequence: Synthetic oligonucleotide
  Sense strand starting at position 2701 of SEQ ID NO: 1241136
ucuuuauaagcuggagucu

SEQ ID NO: 1249611 - RNA, 19 nt, Artificial Sequence
  Description of Artificial Sequence: Synthetic oligonucleotide
  Antisense strand to SEQ ID NO: 1249610
agacuccagcuuauaaaga

SEQ ID NO: 1249612 - RNA, 19 nt, Artificial Sequence
  Description of Artificial Sequence: Synthetic oligonucleotide
  Sense strand starting at position 2702 of SEQ ID NO: 1241136
cuuuauaagcuggagucuu

SEQ ID NO: 1249613 - RNA, 19 nt, Artificial Sequence
  Description of Artificial Sequence: Synthetic oligonucleotide
  Antisense strand to SEQ ID NO: 1249612
aagacuccagcuuauaaag

SEQ ID NO: 1249614 - RNA, 19 nt, Artificial Sequence
  Description of Artificial Sequence: Synthetic oligonucleotide
  Sense strand starting at position 2729 of SEQ ID NO: 1241136
cuuggaagaucugaauaca

SEQ ID NO: 1249615 - RNA, 19 nt, Artificial Sequence
  Description of Artificial Sequence: Synthetic oligonucleotide
  Antisense strand to SEQ ID NO: 1249614
uguauucagaucuuccaag

SEQ ID NO: 1249616 - RNA, 19 nt, Artificial Sequence
  Description of Artificial Sequence: Synthetic oligonucleotide
  Sense strand starting at position 2812 of SEQ ID NO: 1241136
aaugaaagcccgcagaauu

SEQ ID NO: 1249617 - RNA, 19 nt, Artificial Sequence
  Description of Artificial Sequence: Synthetic oligonucleotide
  Antisense strand to SEQ ID NO: 1249616
aauucugcgggcuuucauu

SEQ ID NO: 1249618 - RNA, 19 nt, Artificial Sequence
  Description of Artificial Sequence: Synthetic oligonucleotide
  Sense strand starting at position 2841 of SEQ ID NO: 1241136
ugauuuauaguuuggacgu

SEQ ID NO: 1249619 - RNA, 19 nt, Artificial Sequence
  Description of Artificial Sequence: Synthetic oligonucleotide
  Antisense strand to SEQ ID NO: 1249618
acguccaaacuauaaauca

SEQ ID NO: 1249620 - RNA, 19 nt, Artificial Sequence
  Description of Artificial Sequence: Synthetic oligonucleotide
  Sense strand starting at position 2863 of SEQ ID NO: 1241136
auucgaaaccauugucuuu

SEQ ID NO: 1249621 - RNA, 19 nt, Artificial Sequence
  Description of Artificial Sequence: Synthetic oligonucleotide
  Antisense strand to SEQ ID NO: 1249620
aaagacaaugguuucgaau

SEQ ID NO: 1249622 - RNA, 19 nt, Artificial Sequence
  Description of Artificial Sequence: Synthetic oligonucleotide
  Sense strand starting at position 2880 of SEQ ID NO: 1241136
uucucuguccucuguagaa

SEQ ID NO: 1249623 - RNA, 19 nt, Artificial Sequence
  Description of Artificial Sequence: Synthetic oligonucleotide
  Antisense strand to SEQ ID NO: 1249622
uucuacagaggacagagaa

SEQ ID NO: 1249624 - RNA, 19 nt, Artificial Sequence
  Description of Artificial Sequence: Synthetic oligonucleotide
  Sense strand starting at position 2882 of SEQ ID NO: 1241136
cucuguccucuguagaaga

SEQ ID NO: 1249625 - RNA, 19 nt, Artificial Sequence
  Description of Artificial Sequence: Synthetic oligonucleotide
  Antisense strand to SEQ ID NO: 1249624
ucuucuacagaggacagag

SEQ ID NO: 1249626 - RNA, 19 nt, Artificial Sequence
  Description of Artificial Sequence: Synthetic oligonucleotide
  Sense strand starting at position 2884 of SEQ ID NO: 1241136
cuguccucuguagaagaaa

SEQ ID NO: 1249627 - RNA, 19 nt, Artificial Sequence
  Description of Artificial Sequence: Synthetic oligonucleotide
  Antisense strand to SEQ ID NO: 1249626
uuucuucuacagaggacag

SEQ ID NO: 1249628 - RNA, 19 nt, Artificial Sequence
  Description of Artificial Sequence: Synthetic oligonucleotide
  Sense strand starting at position 2896 of SEQ ID NO: 1241136
gaagaaacaguuuguguga

SEQ ID NO: 1249629 - RNA, 19 nt, Artificial Sequence
  Description of Artificial Sequence: Synthetic oligonucleotide
  Antisense strand to SEQ ID NO: 1249628
ucacacaaacuguuucuuc

SEQ ID NO: 1249630 - RNA, 19 nt, Artificial Sequence
  Description of Artificial Sequence: Synthetic oligonucleotide
  Sense strand starting at position 2897 of SEQ ID NO: 1241136
aagaaacaguuugugugaa

SEQ ID NO: 1249631 - RNA, 19 nt, Artificial Sequence
  Description of Artificial Sequence: Synthetic oligonucleotide
  Antisense strand to SEQ ID NO: 1249630
uucacacaaacuguuucuu

SEQ ID NO: 1249632 - RNA, 19 nt, Artificial Sequence
  Description of Artificial Sequence: Synthetic oligonucleotide
  Sense strand starting at position 2957 of SEQ ID NO: 1241136
gaaggugggccauaugagu

SEQ ID NO: 1249633 - RNA, 19 nt, Artificial Sequence
  Description of Artificial Sequence: Synthetic oligonucleotide
  Antisense strand to SEQ ID NO: 1249632
acucauauggcccaccuuc

SEQ ID NO: 1249634 - RNA, 19 nt, Artificial Sequence
  Description of Artificial Sequence: Synthetic oligonucleotide
  Sense strand starting at position 2963 of SEQ ID NO: 1241136
gggccauaugagugugacu

SEQ ID NO: 1249635 - RNA, 19 nt, Artificial Sequence
  Description of Artificial Sequence: Synthetic oligonucleotide
  Antisense strand to SEQ ID NO: 1249634
agucacacucauauggccc

SEQ ID NO: 1249636 - RNA, 19 nt, Artificial Sequence
  Description of Artificial Sequence: Synthetic oligonucleotide
  Sense strand starting at position 2965 of SEQ ID NO: 1241136
gccauaugagugugacuga

SEQ ID NO: 1249637 - RNA, 19 nt, Artificial Sequence
  Description of Artificial Sequence: Synthetic oligonucleotide
  Antisense strand to SEQ ID NO: 1249636
ucagucacacucauauggc

SEQ ID NO: 1249638 - RNA, 19 nt, Artificial Sequence
  Description of Artificial Sequence: Synthetic oligonucleotide
  Sense strand starting at position 2968 of SEQ ID NO: 1241136
auaugagugugacugaagu

SEQ ID NO: 1249639 - RNA, 19 nt, Artificial Sequence
  Description of Artificial Sequence: Synthetic oligonucleotide
  Antisense strand to SEQ ID NO: 1249638
acuucagucacacucauau

SEQ ID NO: 1249640 - RNA, 19 nt, Artificial Sequence
  Description of Artificial Sequence: Synthetic oligonucleotide
  Sense strand starting at position 2970 of SEQ ID NO: 1241136
augagugugacugaaguuu

SEQ ID NO: 1249641 - RNA, 19 nt, Artificial Sequence
  Description of Artificial Sequence: Synthetic oligonucleotide
  Antisense strand to SEQ ID NO: 1249640
aaacuucagucacacucau

SEQ ID NO: 1249642 - RNA, 19 nt, Artificial Sequence
  Description of Artificial Sequence: Synthetic oligonucleotide
  Sense strand starting at position 2995 of SEQ ID NO: 1241136
agacauaugguguggaaug

SEQ ID NO: 1249643 - RNA, 19 nt, Artificial Sequence
  Description of Artificial Sequence: Synthetic oligonucleotide
  Antisense strand to SEQ ID NO: 1249642
cauuccacaccauaugucu

SEQ ID NO: 1249644 - RNA, 19 nt, Artificial Sequence
  Description of Artificial Sequence: Synthetic oligonucleotide
  Sense strand starting at position 3411 of SEQ ID NO: 1241136
agaagaggcuaauaauuaa

SEQ ID NO: 1249645 - RNA, 19 nt, Artificial Sequence
  Description of Artificial Sequence: Synthetic oligonucleotide
  Antisense strand to SEQ ID NO: 1249644
uuaauuauuagccucuucu

SEQ ID NO: 1249646 - RNA, 19 nt, Artificial Sequence
  Description of Artificial Sequence: Synthetic oligonucleotide
  Sense strand starting at position 3489 of SEQ ID NO: 1241136
gugggauaccaguaauagc

SEQ ID NO: 1249647 - RNA, 19 nt, Artificial Sequence
  Description of Artificial Sequence: Synthetic oligonucleotide
  Antisense strand to SEQ ID NO: 1249646
gcuauuacugguaucccac

SEQ ID NO: 1249648 - RNA, 19 nt, Artificial Sequence
  Description of Artificial Sequence: Synthetic oligonucleotide
  Sense strand starting at position 3499 of SEQ ID NO: 1241136
aguaauagcgauugugauu

SEQ ID NO: 1249649 - RNA, 19 nt, Artificial Sequence
  Description of Artificial Sequence: Synthetic oligonucleotide
  Antisense strand to SEQ ID NO: 1249648
aaucacaaucgcuauuacu

SEQ ID NO: 1249650 - RNA, 19 nt, Artificial Sequence
  Description of Artificial Sequence: Synthetic oligonucleotide
  Sense strand starting at position 3504 of SEQ ID NO: 1241136
uagcgauugugauuuguua

SEQ ID NO: 1249651 - RNA, 19 nt, Artificial Sequence
  Description of Artificial Sequence: Synthetic oligonucleotide
  Antisense strand to SEQ ID NO: 1249650
uaacaaaucacaaucgcua

SEQ ID NO: 1249652 - RNA, 19 nt, Artificial Sequence
  Description of Artificial Sequence: Synthetic oligonucleotide
  Sense strand starting at position 3506 of SEQ ID NO: 1241136
gcgauugugauuuguuaug

SEQ ID NO: 1249653 - RNA, 19 nt, Artificial Sequence
  Description of Artificial Sequence: Synthetic oligonucleotide
  Antisense strand to SEQ ID NO: 1249652
cauaacaaaucacaaucgc

SEQ ID NO: 1249654 - RNA, 19 nt, Artificial Sequence
  Description of Artificial Sequence: Synthetic oligonucleotide
  Sense strand starting at position 11 of SEQ ID NO: 1241137
gggucuaucaauuaggugu

SEQ ID NO: 1249655 - RNA, 19 nt, Artificial Sequence
  Description of Artificial Sequence: Synthetic oligonucleotide
  Antisense strand to SEQ ID NO: 1249654
acaccuaauugauagaccc

SEQ ID NO: 1249656 - RNA, 19 nt, Artificial Sequence
  Description of Artificial Sequence: Synthetic oligonucleotide
  Sense strand starting at position 234 of SEQ ID NO: 1241137
cgggauaguccucaucuuu

SEQ ID NO: 1249657 - RNA, 19 nt, Artificial Sequence
  Description of Artificial Sequence: Synthetic oligonucleotide
  Antisense strand to SEQ ID NO: 1249656
aaagaugaggacuaucccg

SEQ ID NO: 1249658 - RNA, 19 nt, Artificial Sequence
  Description of Artificial Sequence: Synthetic oligonucleotide
  Sense strand starting at position 493 of SEQ ID NO: 1241137
ucuaaaugucagggucaaa

SEQ ID NO: 1249659 - RNA, 19 nt, Artificial Sequence
  Description of Artificial Sequence: Synthetic oligonucleotide
  Antisense strand to SEQ ID NO: 1249658
uuugacccugacauuuaga

SEQ ID NO: 1249660 - RNA, 19 nt, Artificial Sequence
  Description of Artificial Sequence: Synthetic oligonucleotide
  Sense strand starting at position 915 of SEQ ID NO: 1241137
guggaccuucuauggauua

SEQ ID NO: 1249661 - RNA, 19 nt, Artificial Sequence
  Description of Artificial Sequence: Synthetic oligonucleotide
  Antisense strand to SEQ ID NO: 1249660
uaauccauagaagguccac

SEQ ID NO: 1249662 - RNA, 19 nt, Artificial Sequence
  Description of Artificial Sequence: Synthetic oligonucleotide
  Sense strand starting at position 1020 of SEQ ID NO: 1241137
gguauuaacacaggucuga

SEQ ID NO: 1249663 - RNA, 19 nt, Artificial Sequence
  Description of Artificial Sequence: Synthetic oligonucleotide
  Antisense strand to SEQ ID NO: 1249662
ucagaccuguguuaauacc

SEQ ID NO: 1249664 - RNA, 19 nt, Artificial Sequence
  Description of Artificial Sequence: Synthetic oligonucleotide
  Sense strand starting at position 1105 of SEQ ID NO: 1241137
gugacauuuggcgggaucu

SEQ ID NO: 1249665 - RNA, 19 nt, Artificial Sequence
  Description of Artificial Sequence: Synthetic oligonucleotide
  Antisense strand to SEQ ID NO: 1249664
agaucccgccaaaugucac

SEQ ID NO: 1249666 - RNA, 19 nt, Artificial Sequence
  Description of Artificial Sequence: Synthetic oligonucleotide
  Sense strand starting at position 1261 of SEQ ID NO: 1241137
uuggccuuuccagacgaau

SEQ ID NO: 1249667 - RNA, 19 nt, Artificial Sequence
  Description of Artificial Sequence: Synthetic oligonucleotide
  Antisense strand to SEQ ID NO: 1249666
auucgucuggaaaggccaa

SEQ ID NO: 1249668 - RNA, 19 nt, Artificial Sequence
  Description of Artificial Sequence: Synthetic oligonucleotide
  Sense strand starting at position 1354 of SEQ ID NO: 1241137
ucaauaaggguauguggaa

SEQ ID NO: 1249669 - RNA, 19 nt, Artificial Sequence
  Description of Artificial Sequence: Synthetic oligonucleotide
  Antisense strand to SEQ ID NO: 1249668
uuccacauacccuuauuga

SEQ ID NO: 1249670 - RNA, 19 nt, Artificial Sequence
  Description of Artificial Sequence: Synthetic oligonucleotide
  Sense strand starting at position 1355 of SEQ ID NO: 1241137
caauaaggguauguggaau

SEQ ID NO: 1249671 - RNA, 19 nt, Artificial Sequence
  Description of Artificial Sequence: Synthetic oligonucleotide
  Antisense strand to SEQ ID NO: 1249670
auuccacauacccuuauug

SEQ ID NO: 1249672 - RNA, 19 nt, Artificial Sequence
  Description of Artificial Sequence: Synthetic oligonucleotide
  Sense strand starting at position 1361 of SEQ ID NO: 1241137
ggguauguggaauggauga

SEQ ID NO: 1249673 - RNA, 19 nt, Artificial Sequence
  Description of Artificial Sequence: Synthetic oligonucleotide
  Antisense strand to SEQ ID NO: 1249672
ucauccauuccacauaccc

SEQ ID NO: 1249674 - RNA, 19 nt, Artificial Sequence
  Description of Artificial Sequence: Synthetic oligonucleotide
  Sense strand starting at position 1649 of SEQ ID NO: 1241137
acuuacauucgcgagggaa

SEQ ID NO: 1249675 - RNA, 19 nt, Artificial Sequence
  Description of Artificial Sequence: Synthetic oligonucleotide
  Antisense strand to SEQ ID NO: 1249674
uucccucgcgaauguaagu

SEQ ID NO: 1249676 - RNA, 19 nt, Artificial Sequence
  Description of Artificial Sequence: Synthetic oligonucleotide
  Sense strand starting at position 1690 of SEQ ID NO: 1241137
cgacauucugacgauaacu

SEQ ID NO: 1249677 - RNA, 19 nt, Artificial Sequence
  Description of Artificial Sequence: Synthetic oligonucleotide
  Antisense strand to SEQ ID NO: 1249676
aguuaucgucagaaugucg

SEQ ID NO: 1249678 - RNA, 19 nt, Artificial Sequence
  Description of Artificial Sequence: Synthetic oligonucleotide
  Sense strand starting at position 1742 of SEQ ID NO: 1241137
cugcaauagcuccagaacu

SEQ ID NO: 1249679 - RNA, 19 nt, Artificial Sequence
  Description of Artificial Sequence: Synthetic oligonucleotide
  Antisense strand to SEQ ID NO: 1249678
aguucuggagcuauugcag

SEQ ID NO: 1249680 - RNA, 19 nt, Artificial Sequence
  Description of Artificial Sequence: Synthetic oligonucleotide
  Sense strand starting at position 2084 of SEQ ID NO: 1241137
aucucaugguuagcugaaa

SEQ ID NO: 1249681 - RNA, 19 nt, Artificial Sequence
  Description of Artificial Sequence: Synthetic oligonucleotide
  Antisense strand to SEQ ID NO: 1249680
uuucagcuaaccaugagau

SEQ ID NO: 1249682 - RNA, 19 nt, Artificial Sequence
  Description of Artificial Sequence: Synthetic oligonucleotide
  Sense strand starting at position 2150 of SEQ ID NO: 1241137
gucuuucucgcgccuugaa

SEQ ID NO: 1249683 - RNA, 19 nt, Artificial Sequence
  Description of Artificial Sequence: Synthetic oligonucleotide
  Antisense strand to SEQ ID NO: 1249682
uucaaggcgcgagaaagac

SEQ ID NO: 1249684 - RNA, 19 nt, Artificial Sequence
  Description of Artificial Sequence: Synthetic oligonucleotide
  Sense strand starting at position 2166 of SEQ ID NO: 1241137
gaagguuacuuagcuaaag

SEQ ID NO: 1249685 - RNA, 19 nt, Artificial Sequence
  Description of Artificial Sequence: Synthetic oligonucleotide
  Antisense strand to SEQ ID NO: 1249684
cuuuagcuaaguaaccuuc

SEQ ID NO: 1249686 - RNA, 19 nt, Artificial Sequence
  Description of Artificial Sequence: Synthetic oligonucleotide
  Sense strand starting at position 2255 of SEQ ID NO: 1241137
cagacucuaugguuaauga

SEQ ID NO: 1249687 - RNA, 19 nt, Artificial Sequence
  Description of Artificial Sequence: Synthetic oligonucleotide
  Antisense strand to SEQ ID NO: 1249686
ucauuaaccauagagucug

SEQ ID NO: 1249688 - RNA, 19 nt, Artificial Sequence
  Description of Artificial Sequence: Synthetic oligonucleotide
  Sense strand starting at position 2471 of SEQ ID NO: 1241137
cgguuucuccaggaacuca

SEQ ID NO: 1249689 - RNA, 19 nt, Artificial Sequence
  Description of Artificial Sequence: Synthetic oligonucleotide
  Antisense strand to SEQ ID NO: 1249688
ugaguuccuggagaaaccg

SEQ ID NO: 1249690 - RNA, 19 nt, Artificial Sequence
  Description of Artificial Sequence: Synthetic oligonucleotide
  Sense strand starting at position 2674 of SEQ ID NO: 1241137
gaaucucgugaaggaaagu

SEQ ID NO: 1249691 - RNA, 19 nt, Artificial Sequence
  Description of Artificial Sequence: Synthetic oligonucleotide
  Antisense strand to SEQ ID NO: 1249690
acuuuccuucacgagauuc

SEQ ID NO: 1249692 - RNA, 19 nt, Artificial Sequence
  Description of Artificial Sequence: Synthetic oligonucleotide
  Sense strand starting at position 2904 of SEQ ID NO: 1241137
cuggccucuuaccugagaa

SEQ ID NO: 1249693 - RNA, 19 nt, Artificial Sequence
  Description of Artificial Sequence: Synthetic oligonucleotide
  Antisense strand to SEQ ID NO: 1249692
uucucagguaagaggccag

SEQ ID NO: 1249694 - RNA, 19 nt, Artificial Sequence
  Description of Artificial Sequence: Synthetic oligonucleotide
  Sense strand starting at position 2906 of SEQ ID NO: 1241137
ggccucuuaccugagaaac

SEQ ID NO: 1249695 - RNA, 19 nt, Artificial Sequence
  Description of Artificial Sequence: Synthetic oligonucleotide
  Antisense strand to SEQ ID NO: 1249694
guuucucagguaagaggcc

SEQ ID NO: 1249696 - RNA, 19 nt, Artificial Sequence
  Description of Artificial Sequence: Synthetic oligonucleotide
  Sense strand starting at position 2976 of SEQ ID NO: 1241137
cugauaauugaaugaguca

SEQ ID NO: 1249697 - RNA, 19 nt, Artificial Sequence
  Description of Artificial Sequence: Synthetic oligonucleotide
  Antisense strand to SEQ ID NO: 1249696
ugacucauucaauuaucag

SEQ ID NO: 1249698 - RNA, 19 nt, Artificial Sequence
  Description of Artificial Sequence: Synthetic oligonucleotide
  Sense strand starting at position 3067 of SEQ ID NO: 1241137
ugagaauagaacuguguua

SEQ ID NO: 1249699 - RNA, 19 nt, Artificial Sequence
  Description of Artificial Sequence: Synthetic oligonucleotide
  Antisense strand to SEQ ID NO: 1249698
uaacacaguucuauucuca

SEQ ID NO: 1249700 - RNA, 19 nt, Artificial Sequence
  Description of Artificial Sequence: Synthetic oligonucleotide
  Sense strand starting at position 3069 of SEQ ID NO: 1241137
agaauagaacuguguuaag

SEQ ID NO: 1249701 - RNA, 19 nt, Artificial Sequence
  Description of Artificial Sequence: Synthetic oligonucleotide
  Antisense strand to SEQ ID NO: 1249700
cuuaacacaguucuauucu

SEQ ID NO: 1249702 - RNA, 19 nt, Artificial Sequence
  Description of Artificial Sequence: Synthetic oligonucleotide
  Sense strand starting at position 3107 of SEQ ID NO: 1241137
guuaguuaagcauaacuaa

SEQ ID NO: 1249703 - RNA, 19 nt, Artificial Sequence
  Description of Artificial Sequence: Synthetic oligonucleotide
  Antisense strand to SEQ ID NO: 1249702
uuaguuaugcuuaacuaac

SEQ ID NO: 1249704 - RNA, 19 nt, Artificial Sequence
  Description of Artificial Sequence: Synthetic oligonucleotide
  Sense strand starting at position 3223 of SEQ ID NO: 1241137
aaacaugguuucuucgaga

SEQ ID NO: 1249705 - RNA, 19 nt, Artificial Sequence
  Description of Artificial Sequence: Synthetic oligonucleotide
  Antisense strand to SEQ ID NO: 1249704
ucucgaagaaaccauguuu

SEQ ID NO: 1249706 - RNA, 19 nt, Artificial Sequence
  Description of Artificial Sequence: Synthetic oligonucleotide
  Sense strand starting at position 3292 of SEQ ID NO: 1241137
aggaacaaucucugucaau

SEQ ID NO: 1249707 - RNA, 19 nt, Artificial Sequence
  Description of Artificial Sequence: Synthetic oligonucleotide
  Antisense strand to SEQ ID NO: 1249706
auugacagagauuguuccu

SEQ ID NO: 1249708 - RNA, 19 nt, Artificial Sequence
  Description of Artificial Sequence: Synthetic oligonucleotide
  Sense strand starting at position 3293 of SEQ ID NO: 1241137
ggaacaaucucugucaaua

SEQ ID NO: 1249709 - RNA, 19 nt, Artificial Sequence
  Description of Artificial Sequence: Synthetic oligonucleotide
  Antisense strand to SEQ ID NO: 1249708
uauugacagagauuguucc

SEQ ID NO: 1249710 - RNA, 19 nt, Artificial Sequence
  Description of Artificial Sequence: Synthetic oligonucleotide
  Sense strand starting at position 3318 of SEQ ID NO: 1241137
gggugacuuguacagaacu

SEQ ID NO: 1249711 - RNA, 19 nt, Artificial Sequence
  Description of Artificial Sequence: Synthetic oligonucleotide
  Antisense strand to SEQ ID NO: 1249710
aguucuguacaagucaccc

SEQ ID NO: 1249712 - RNA, 19 nt, Artificial Sequence
  Description of Artificial Sequence: Synthetic oligonucleotide
  Sense strand starting at position 3389 of SEQ ID NO: 1241137
acaguaauguuuguagaga

SEQ ID NO: 1249713 - RNA, 19 nt, Artificial Sequence
  Description of Artificial Sequence: Synthetic oligonucleotide
  Antisense strand to SEQ ID NO: 1249712
ucucuacaaacauuacugu

SEQ ID NO: 1249714 - RNA, 19 nt, Artificial Sequence
  Description of Artificial Sequence: Synthetic oligonucleotide
  Sense strand starting at position 3400 of SEQ ID NO: 1241137
uguagagauucggugauaa

SEQ ID NO: 1249715 - RNA, 19 nt, Artificial Sequence
  Description of Artificial Sequence: Synthetic oligonucleotide
  Antisense strand to SEQ ID NO: 1249714
uuaucaccgaaucucuaca

SEQ ID NO: 1249716 - RNA, 19 nt, Artificial Sequence
  Description of Artificial Sequence: Synthetic oligonucleotide
  Sense strand starting at position 3527 of SEQ ID NO: 1241137
gaauuaucacgagaguugu

SEQ ID NO: 1249717 - RNA, 19 nt, Artificial Sequence
  Description of Artificial Sequence: Synthetic oligonucleotide
  Antisense strand to SEQ ID NO: 1249716
acaacucucgugauaauuc

SEQ ID NO: 1249718 - RNA, 19 nt, Artificial Sequence
  Description of Artificial Sequence: Synthetic oligonucleotide
  Sense strand starting at position 3680 of SEQ ID NO: 1241137
gaaauuagccuggaguuug

SEQ ID NO: 1249719 - RNA, 19 nt, Artificial Sequence
  Description of Artificial Sequence: Synthetic oligonucleotide
  Antisense strand to SEQ ID NO: 1249718
caaacuccaggcuaauuuc

SEQ ID NO: 1249720 - RNA, 19 nt, Artificial Sequence
  Description of Artificial Sequence: Synthetic oligonucleotide
  Sense strand starting at position 3690 of SEQ ID NO: 1241137
uggaguuugguugauauau

SEQ ID NO: 1249721 - RNA, 19 nt, Artificial Sequence
  Description of Artificial Sequence: Synthetic oligonucleotide
  Antisense strand to SEQ ID NO: 1249720
auauaucaaccaaacucca

SEQ ID NO: 1249722 - RNA, 19 nt, Artificial Sequence
  Description of Artificial Sequence: Synthetic oligonucleotide
  Sense strand starting at position 3710 of SEQ ID NO: 1241137
uugaaagguggcugauacu

SEQ ID NO: 1249723 - RNA, 19 nt, Artificial Sequence
  Description of Artificial Sequence: Synthetic oligonucleotide
  Antisense strand to SEQ ID NO: 1249722
aguaucagccaccuuucaa

SEQ ID NO: 1249724 - RNA, 19 nt, Artificial Sequence
  Description of Artificial Sequence: Synthetic oligonucleotide
  Sense strand starting at position 3776 of SEQ ID NO: 1241137
gguucuguggguuaaagac

SEQ ID NO: 1249725 - RNA, 19 nt, Artificial Sequence
  Description of Artificial Sequence: Synthetic oligonucleotide
  Antisense strand to SEQ ID NO: 1249724
gucuuuaacccacagaacc

SEQ ID NO: 1249726 - RNA, 19 nt, Artificial Sequence
  Description of Artificial Sequence: Synthetic oligonucleotide
  Sense strand starting at position 3809 of SEQ ID NO: 1241137
gucggauuacuugaguuua

SEQ ID NO: 1249727 - RNA, 19 nt, Artificial Sequence
  Description of Artificial Sequence: Synthetic oligonucleotide
  Antisense strand to SEQ ID NO: 1249726
uaaacucaaguaauccgac

SEQ ID NO: 1249728 - RNA, 19 nt, Artificial Sequence
  Description of Artificial Sequence: Synthetic oligonucleotide
  Sense strand starting at position 3943 of SEQ ID NO: 1241137
uguaauuauuugcuugcua

SEQ ID NO: 1249729 - RNA, 19 nt, Artificial Sequence
  Description of Artificial Sequence: Synthetic oligonucleotide
  Antisense strand to SEQ ID NO: 1249728
uagcaagcaaauaauuaca

SEQ ID NO: 1249730 - RNA, 19 nt, Artificial Sequence
  Description of Artificial Sequence: Synthetic oligonucleotide
  Sense strand starting at position 3944 of SEQ ID NO: 1241137
guaauuauuugcuugcuag

SEQ ID NO: 1249731 - RNA, 19 nt, Artificial Sequence
  Description of Artificial Sequence: Synthetic oligonucleotide
  Antisense strand to SEQ ID NO: 1249730
cuagcaagcaaauaauuac

SEQ ID NO: 1249732 - RNA, 19 nt, Artificial Sequence
  Description of Artificial Sequence: Synthetic oligonucleotide
  Sense strand starting at position 3947 of SEQ ID NO: 1241137
auuauuugcuugcuaguuu

SEQ ID NO: 1249733 - RNA, 19 nt, Artificial Sequence
  Description of Artificial Sequence: Synthetic oligonucleotide
  Antisense strand to SEQ ID NO: 1249732
aaacuagcaagcaaauaau

SEQ ID NO: 1249734 - RNA, 19 nt, Artificial Sequence
  Description of Artificial Sequence: Synthetic oligonucleotide
  Sense strand starting at position 364 of SEQ ID NO: 1241138
aucucuauugucuaugauu

SEQ ID NO: 1249735 - RNA, 19 nt, Artificial Sequence
  Description of Artificial Sequence: Synthetic oligonucleotide
  Antisense strand to SEQ ID NO: 1249734
aaucauagacaauagagau

SEQ ID NO: 1249736 - RNA, 19 nt, Artificial Sequence
  Description of Artificial Sequence: Synthetic oligonucleotide
  Sense strand starting at position 367 of SEQ ID NO: 1241138
ucuauugucuaugauuuac

SEQ ID NO: 1249737 - RNA, 19 nt, Artificial Sequence
  Description of Artificial Sequence: Synthetic oligonucleotide
  Antisense strand to SEQ ID NO: 1249736
guaaaucauagacaauaga

SEQ ID NO: 1249738 - RNA, 19 nt, Artificial Sequence
  Description of Artificial Sequence: Synthetic oligonucleotide
  Sense strand starting at position 414 of SEQ ID NO: 1241138
gugacaacuauacgacuga

SEQ ID NO: 1249739 - RNA, 19 nt, Artificial Sequence
  Description of Artificial Sequence: Synthetic oligonucleotide
  Antisense strand to SEQ ID NO: 1249738
ucagucguauaguugucac

SEQ ID NO: 1249740 - RNA, 19 nt, Artificial Sequence
  Description of Artificial Sequence: Synthetic oligonucleotide
  Sense strand starting at position 887 of SEQ ID NO: 1241138
uuuaaaugucugggauaaa

SEQ ID NO: 1249741 - RNA, 19 nt, Artificial Sequence
  Description of Artificial Sequence: Synthetic oligonucleotide
  Antisense strand to SEQ ID NO: 1249740
uuuaucccagacauuuaaa

SEQ ID NO: 1249742 - RNA, 19 nt, Artificial Sequence
  Description of Artificial Sequence: Synthetic oligonucleotide
  Sense strand starting at position 888 of SEQ ID NO: 1241138
uuaaaugucugggauaaau

SEQ ID NO: 1249743 - RNA, 19 nt, Artificial Sequence
  Description of Artificial Sequence: Synthetic oligonucleotide
  Antisense strand to SEQ ID NO: 1249742
auuuaucccagacauuuaa

SEQ ID NO: 1249744 - RNA, 19 nt, Artificial Sequence
  Description of Artificial Sequence: Synthetic oligonucleotide
  Sense strand starting at position 987 of SEQ ID NO: 1241138
acacgaaacuauuaugaaa

SEQ ID NO: 1249745 - RNA, 19 nt, Artificial Sequence
  Description of Artificial Sequence: Synthetic oligonucleotide
  Antisense strand to SEQ ID NO: 1249744
uuucauaauaguuucgugu

SEQ ID NO: 1249746 - RNA, 19 nt, Artificial Sequence
  Description of Artificial Sequence: Synthetic oligonucleotide
  Sense strand starting at position 990 of SEQ ID NO: 1241138
cgaaacuauuaugaaacau

SEQ ID NO: 1249747 - RNA, 19 nt, Artificial Sequence
  Description of Artificial Sequence: Synthetic oligonucleotide
  Antisense strand to SEQ ID NO: 1249746
auguuucauaauaguuucg

SEQ ID NO: 1249748 - RNA, 19 nt, Artificial Sequence
  Description of Artificial Sequence: Synthetic oligonucleotide
  Sense strand starting at position 1051 of SEQ ID NO: 1241138
acacaaauggcuggauaau

SEQ ID NO: 1249749 - RNA, 19 nt, Artificial Sequence
  Description of Artificial Sequence: Synthetic oligonucleotide
  Antisense strand to SEQ ID NO: 1249748
auuauccagccauuugugu

SEQ ID NO: 1249750 - RNA, 19 nt, Artificial Sequence
  Description of Artificial Sequence: Synthetic oligonucleotide
  Sense strand starting at position 1063 of SEQ ID NO: 1241138
ggauaauaguaugagagaa

SEQ ID NO: 1249751 - RNA, 19 nt, Artificial Sequence
  Description of Artificial Sequence: Synthetic oligonucleotide
  Antisense strand to SEQ ID NO: 1249750
uucucucauacuauuaucc

SEQ ID NO: 1249752 - RNA, 19 nt, Artificial Sequence
  Description of Artificial Sequence: Synthetic oligonucleotide
  Sense strand starting at position 1065 of SEQ ID NO: 1241138
auaauaguaugagagaaac

SEQ ID NO: 1249753 - RNA, 19 nt, Artificial Sequence
  Description of Artificial Sequence: Synthetic oligonucleotide
  Antisense strand to SEQ ID NO: 1249752
guuucucucauacuauuau

SEQ ID NO: 1249754 - RNA, 19 nt, Artificial Sequence
  Description of Artificial Sequence: Synthetic oligonucleotide
  Sense strand starting at position 1083 of SEQ ID NO: 1241138
cgaggaguuucuuuacaua

SEQ ID NO: 1249755 - RNA, 19 nt, Artificial Sequence
  Description of Artificial Sequence: Synthetic oligonucleotide
  Antisense strand to SEQ ID NO: 1249754
uauguaaagaaacuccucg

SEQ ID NO: 1249756 - RNA, 19 nt, Artificial Sequence
  Description of Artificial Sequence: Synthetic oligonucleotide
  Sense strand starting at position 1215 of SEQ ID NO: 1241138
ccgccugcuccggaaagau

SEQ ID NO: 1249757 - RNA, 19 nt, Artificial Sequence
  Description of Artificial Sequence: Synthetic oligonucleotide
  Antisense strand to SEQ ID NO: 1249756
aucuuuccggagcaggcgg

SEQ ID NO: 1249758 - RNA, 19 nt, Artificial Sequence
  Description of Artificial Sequence: Synthetic oligonucleotide
  Sense strand starting at position 1284 of SEQ ID NO: 1241138
ugacgacuucccuguuuag

SEQ ID NO: 1249759 - RNA, 19 nt, Artificial Sequence
  Description of Artificial Sequence: Synthetic oligonucleotide
  Antisense strand to SEQ ID NO: 1249758
cuaaacagggaagucguca

SEQ ID NO: 1249760 - RNA, 19 nt, Artificial Sequence
  Description of Artificial Sequence: Synthetic oligonucleotide
  Sense strand starting at position 1424 of SEQ ID NO: 1241138
aagaucuacguguagggaa

SEQ ID NO: 1249761 - RNA, 19 nt, Artificial Sequence
  Description of Artificial Sequence: Synthetic oligonucleotide
  Antisense strand to SEQ ID NO: 1249760
uucccuacacguagaucuu

SEQ ID NO: 1249762 - RNA, 19 nt, Artificial Sequence
  Description of Artificial Sequence: Synthetic oligonucleotide
  Sense strand starting at position 1478 of SEQ ID NO: 1241138
aaaguuaauucugccagga

SEQ ID NO: 1249763 - RNA, 19 nt, Artificial Sequence
  Description of Artificial Sequence: Synthetic oligonucleotide
  Antisense strand to SEQ ID NO: 1249762
uccuggcagaauuaacuuu

SEQ ID NO: 1249764 - RNA, 19 nt, Artificial Sequence
  Description of Artificial Sequence: Synthetic oligonucleotide
  Sense strand starting at position 1482 of SEQ ID NO: 1241138
uuaauucugccaggauuag

SEQ ID NO: 1249765 - RNA, 19 nt, Artificial Sequence
  Description of Artificial Sequence: Synthetic oligonucleotide
  Antisense strand to SEQ ID NO: 1249764
cuaauccuggcagaauuaa

SEQ ID NO: 1249766 - RNA, 19 nt, Artificial Sequence
  Description of Artificial Sequence: Synthetic oligonucleotide
  Sense strand starting at position 1519 of SEQ ID NO: 1241138
aggugucccagagaugacu

SEQ ID NO: 1249767 - RNA, 19 nt, Artificial Sequence
  Description of Artificial Sequence: Synthetic oligonucleotide
  Antisense strand to SEQ ID NO: 1249766
agucaucucugggacaccu

SEQ ID NO: 1249768 - RNA, 19 nt, Artificial Sequence
  Description of Artificial Sequence: Synthetic oligonucleotide
  Sense strand starting at position 1904 of SEQ ID NO: 1241138
ucacuuucucguggaagau

SEQ ID NO: 1249769 - RNA, 19 nt, Artificial Sequence
  Description of Artificial Sequence: Synthetic oligonucleotide
  Antisense strand to SEQ ID NO: 1249768
aucuuccacgagaaaguga

SEQ ID NO: 1249770 - RNA, 19 nt, Artificial Sequence
  Description of Artificial Sequence: Synthetic oligonucleotide
  Sense strand starting at position 2061 of SEQ ID NO: 1241138
accaaucacccgugaggau

SEQ ID NO: 1249771 - RNA, 19 nt, Artificial Sequence
  Description of Artificial Sequence: Synthetic oligonucleotide
  Antisense strand to SEQ ID NO: 1249770
auccucacgggugauuggu

SEQ ID NO: 1249772 - RNA, 19 nt, Artificial Sequence
  Description of Artificial Sequence: Synthetic oligonucleotide
  Sense strand starting at position 2080 of SEQ ID NO: 1241138
gcgagugucgugaagcgaa

SEQ ID NO: 1249773 - RNA, 19 nt, Artificial Sequence
  Description of Artificial Sequence: Synthetic oligonucleotide
  Antisense strand to SEQ ID NO: 1249772
uucgcuucacgacacucgc

SEQ ID NO: 1249774 - RNA, 19 nt, Artificial Sequence
  Description of Artificial Sequence: Synthetic oligonucleotide
  Sense strand starting at position 2822 of SEQ ID NO: 1241138
gauguagguguugauguua

SEQ ID NO: 1249775 - RNA, 19 nt, Artificial Sequence
  Description of Artificial Sequence: Synthetic oligonucleotide
  Antisense strand to SEQ ID NO: 1249774
uaacaucaacaccuacauc

SEQ ID NO: 1249776 - RNA, 19 nt, Artificial Sequence
  Description of Artificial Sequence: Synthetic oligonucleotide
  Sense strand starting at position 2885 of SEQ ID NO: 1241138
cacaauguccaaggucaga

SEQ ID NO: 1249777 - RNA, 19 nt, Artificial Sequence
  Description of Artificial Sequence: Synthetic oligonucleotide
  Antisense strand to SEQ ID NO: 1249776
ucugaccuuggacauugug

SEQ ID NO: 1249778 - RNA, 19 nt, Artificial Sequence
  Description of Artificial Sequence: Synthetic oligonucleotide
  Sense strand starting at position 2898 of SEQ ID NO: 1241138
gucagauaguaaguugucu

SEQ ID NO: 1249779 - RNA, 19 nt, Artificial Sequence
  Description of Artificial Sequence: Synthetic oligonucleotide
  Antisense strand to SEQ ID NO: 1249778
agacaacuuacuaucugac

SEQ ID NO: 1249780 - RNA, 19 nt, Artificial Sequence
  Description of Artificial Sequence: Synthetic oligonucleotide
  Sense strand starting at position 2903 of SEQ ID NO: 1241138
auaguaaguugucuugcca

SEQ ID NO: 1249781 - RNA, 19 nt, Artificial Sequence
  Description of Artificial Sequence: Synthetic oligonucleotide
  Antisense strand to SEQ ID NO: 1249780
uggcaagacaacuuacuau

SEQ ID NO: 1249782 - RNA, 19 nt, Artificial Sequence
  Description of Artificial Sequence: Synthetic oligonucleotide
  Sense strand starting at position 2907 of SEQ ID NO: 1241138
uaaguugucuugccaggau

SEQ ID NO: 1249783 - RNA, 19 nt, Artificial Sequence
  Description of Artificial Sequence: Synthetic oligonucleotide
  Antisense strand to SEQ ID NO: 1249782
auccuggcaagacaacuua

SEQ ID NO: 1249784 - RNA, 19 nt, Artificial Sequence
  Description of Artificial Sequence: Synthetic oligonucleotide
  Sense strand starting at position 2989 of SEQ ID NO: 1241138
ccauaaauugugugggaga

SEQ ID NO: 1249785 - RNA, 19 nt, Artificial Sequence
  Description of Artificial Sequence: Synthetic oligonucleotide
  Antisense strand to SEQ ID NO: 1249784
ucucccacacaauuuaugg

SEQ ID NO: 1249786 - RNA, 19 nt, Artificial Sequence
  Description of Artificial Sequence: Synthetic oligonucleotide
  Sense strand starting at position 3439 of SEQ ID NO: 1241138
gaagacauguggucauguu

SEQ ID NO: 1249787 - RNA, 19 nt, Artificial Sequence
  Description of Artificial Sequence: Synthetic oligonucleotide
  Antisense strand to SEQ ID NO: 1249786
aacaugaccacaugucuuc

SEQ ID NO: 1249788 - RNA, 19 nt, Artificial Sequence
  Description of Artificial Sequence: Synthetic oligonucleotide
  Sense strand starting at position 3440 of SEQ ID NO: 1241138
aagacauguggucauguuu

SEQ ID NO: 1249789 - RNA, 19 nt, Artificial Sequence
  Description of Artificial Sequence: Synthetic oligonucleotide
  Antisense strand to SEQ ID NO: 1249788
aaacaugaccacaugucuu

SEQ ID NO: 1249790 - RNA, 19 nt, Artificial Sequence
  Description of Artificial Sequence: Synthetic oligonucleotide
  Sense strand starting at position 3492 of SEQ ID NO: 1241138
gcaguugcuguugaaggaa

SEQ ID NO: 1249791 - RNA, 19 nt, Artificial Sequence
  Description of Artificial Sequence: Synthetic oligonucleotide
  Antisense strand to SEQ ID NO: 1249790
uuccuucaacagcaacugc

SEQ ID NO: 1249792 - RNA, 19 nt, Artificial Sequence
  Description of Artificial Sequence: Synthetic oligonucleotide
  Sense strand starting at position 3504 of SEQ ID NO: 1241138
gaaggaaucuugggagaga

SEQ ID NO: 1249793 - RNA, 19 nt, Artificial Sequence
  Description of Artificial Sequence: Synthetic oligonucleotide
  Antisense strand to SEQ ID NO: 1249792
ucucucccaagauuccuuc

SEQ ID NO: 1249794 - RNA, 19 nt, Artificial Sequence
  Description of Artificial Sequence: Synthetic oligonucleotide
  Sense strand starting at position 3520 of SEQ ID NO: 1241138
agacgauggugguuuaaga

SEQ ID NO: 1249795 - RNA, 19 nt, Artificial Sequence
  Description of Artificial Sequence: Synthetic oligonucleotide
  Antisense strand to SEQ ID NO: 1249794
ucuuaaaccaccaucgucu

SEQ ID NO: 1249796 - RNA, 19 nt, Artificial Sequence
  Description of Artificial Sequence: Synthetic oligonucleotide
  Sense strand starting at position 3530 of SEQ ID NO: 1241138
gguuuaagagagugucuua

SEQ ID NO: 1249797 - RNA, 19 nt, Artificial Sequence
  Description of Artificial Sequence: Synthetic oligonucleotide
  Antisense strand to SEQ ID NO: 1249796
uaagacacucucuuaaacc

SEQ ID NO: 1249798 - RNA, 19 nt, Artificial Sequence
  Description of Artificial Sequence: Synthetic oligonucleotide
  Sense strand starting at position 3541 of SEQ ID NO: 1241138
gugucuuaaagauggaaau

SEQ ID NO: 1249799 - RNA, 19 nt, Artificial Sequence
  Description of Artificial Sequence: Synthetic oligonucleotide
  Antisense strand to SEQ ID NO: 1249798
auuuccaucuuuaagacac

SEQ ID NO: 1249800 - RNA, 19 nt, Artificial Sequence
  Description of Artificial Sequence: Synthetic oligonucleotide
  Sense strand starting at position 3573 of SEQ ID NO: 1241138
agauucuuuggacguaaag

SEQ ID NO: 1249801 - RNA, 19 nt, Artificial Sequence
  Description of Artificial Sequence: Synthetic oligonucleotide
  Antisense strand to SEQ ID NO: 1249800
cuuuacguccaaagaaucu

SEQ ID NO: 1249802 - RNA, 19 nt, Artificial Sequence
  Description of Artificial Sequence: Synthetic oligonucleotide
  Sense strand starting at position 3608 of SEQ ID NO: 1241138
ggugaugauaccgagugga

SEQ ID NO: 1249803 - RNA, 19 nt, Artificial Sequence
  Description of Artificial Sequence: Synthetic oligonucleotide
  Antisense strand to SEQ ID NO: 1249802
uccacucgguaucaucacc

SEQ ID NO: 1249804 - RNA, 19 nt, Artificial Sequence
  Description of Artificial Sequence: Synthetic oligonucleotide
  Sense strand starting at position 3611 of SEQ ID NO: 1241138
gaugauaccgaguggagga

SEQ ID NO: 1249805 - RNA, 19 nt, Artificial Sequence
  Description of Artificial Sequence: Synthetic oligonucleotide
  Antisense strand to SEQ ID NO: 1249804
uccuccacucgguaucauc

SEQ ID NO: 1249806 - RNA, 19 nt, Artificial Sequence
  Description of Artificial Sequence: Synthetic oligonucleotide
  Sense strand starting at position 3642 of SEQ ID NO: 1241138
uucgucuugagucgaauua

SEQ ID NO: 1249807 - RNA, 19 nt, Artificial Sequence
  Description of Artificial Sequence: Synthetic oligonucleotide
  Antisense strand to SEQ ID NO: 1249806
uaauucgacucaagacgaa

SEQ ID NO: 1249808 - RNA, 19 nt, Artificial Sequence
  Description of Artificial Sequence: Synthetic oligonucleotide
  Sense strand starting at position 3674 of SEQ ID NO: 1241138
ggacaaacguggagugguu

SEQ ID NO: 1249809 - RNA, 19 nt, Artificial Sequence
  Description of Artificial Sequence: Synthetic oligonucleotide
  Antisense strand to SEQ ID NO: 1249808
aaccacuccacguuugucc

SEQ ID NO: 1249810 - RNA, 19 nt, Artificial Sequence
  Description of Artificial Sequence: Synthetic oligonucleotide
  Sense strand starting at position 3801 of SEQ ID NO: 1241138
ccagagugcgugggagaua

SEQ ID NO: 1249811 - RNA, 19 nt, Artificial Sequence
  Description of Artificial Sequence: Synthetic oligonucleotide
  Antisense strand to SEQ ID NO: 1249810
uaucucccacgcacucugg

SEQ ID NO: 1249812 - RNA, 19 nt, Artificial Sequence
  Description of Artificial Sequence: Synthetic oligonucleotide
  Sense strand starting at position 3813 of SEQ ID NO: 1241138
ggagauaccagccaguuau

SEQ ID NO: 1249813 - RNA, 19 nt, Artificial Sequence
  Description of Artificial Sequence: Synthetic oligonucleotide
  Antisense strand to SEQ ID NO: 1249812
auaacuggcugguaucucc

SEQ ID NO: 1249814 - RNA, 19 nt, Artificial Sequence
  Description of Artificial Sequence: Synthetic oligonucleotide
  Sense strand starting at position 100 of SEQ ID NO: 1241139
ugcuccaacucuuugagaa

SEQ ID NO: 1249815 - RNA, 19 nt, Artificial Sequence
  Description of Artificial Sequence: Synthetic oligonucleotide
  Antisense strand to SEQ ID NO: 1249814
uucucaaagaguuggagca

SEQ ID NO: 1249816 - RNA, 19 nt, Artificial Sequence
  Description of Artificial Sequence: Synthetic oligonucleotide
  Sense strand starting at position 101 of SEQ ID NO: 1241139
gcuccaacucuuugagaag

SEQ ID NO: 1249817 - RNA, 19 nt, Artificial Sequence
  Description of Artificial Sequence: Synthetic oligonucleotide
  Antisense strand to SEQ ID NO: 1249816
cuucucaaagaguuggagc

SEQ ID NO: 1249818 - RNA, 19 nt, Artificial Sequence
  Description of Artificial Sequence: Synthetic oligonucleotide
  Sense strand starting at position 144 of SEQ ID NO: 1241139
cuuccuagcuugcugaaua

SEQ ID NO: 1249819 - RNA, 19 nt, Artificial Sequence
  Description of Artificial Sequence: Synthetic oligonucleotide
  Antisense strand to SEQ ID NO: 1249818
uauucagcaagcuaggaag

SEQ ID NO: 1249820 - RNA, 19 nt, Artificial Sequence
  Description of Artificial Sequence: Synthetic oligonucleotide
  Sense strand starting at position 232 of SEQ ID NO: 1241139
uuguaauucuugucaucug

SEQ ID NO: 1249821 - RNA, 19 nt, Artificial Sequence
  Description of Artificial Sequence: Synthetic oligonucleotide
  Antisense strand to SEQ ID NO: 1249820
cagaugacaagaauuacaa

SEQ ID NO: 1249822 - RNA, 19 nt, Artificial Sequence
  Description of Artificial Sequence: Synthetic oligonucleotide
  Sense strand starting at position 316 of SEQ ID NO: 1241139
cuacuaauagaaggauguu

SEQ ID NO: 1249823 - RNA, 19 nt, Artificial Sequence
  Description of Artificial Sequence: Synthetic oligonucleotide
  Antisense strand to SEQ ID NO: 1249822
aacauccuucuauuaguag

SEQ ID NO: 1249824 - RNA, 19 nt, Artificial Sequence
  Description of Artificial Sequence: Synthetic oligonucleotide
  Sense strand starting at position 325 of SEQ ID NO: 1241139
gaaggauguugguuuccca

SEQ ID NO: 1249825 - RNA, 19 nt, Artificial Sequence
  Description of Artificial Sequence: Synthetic oligonucleotide
  Antisense strand to SEQ ID NO: 1249824
ugggaaaccaacauccuuc

SEQ ID NO: 1249826 - RNA, 19 nt, Artificial Sequence
  Description of Artificial Sequence: Synthetic oligonucleotide
  Sense strand starting at position 328 of SEQ ID NO: 1241139
ggauguugguuucccauau

SEQ ID NO: 1249827 - RNA, 19 nt, Artificial Sequence
  Description of Artificial Sequence: Synthetic oligonucleotide
  Antisense strand to SEQ ID NO: 1249826
auaugggaaaccaacaucc

SEQ ID NO: 1249828 - RNA, 19 nt, Artificial Sequence
  Description of Artificial Sequence: Synthetic oligonucleotide
  Sense strand starting at position 329 of SEQ ID NO: 1241139
gauguugguuucccauauc

SEQ ID NO: 1249829 - RNA, 19 nt, Artificial Sequence
  Description of Artificial Sequence: Synthetic oligonucleotide
  Antisense strand to SEQ ID NO: 1249828
gauaugggaaaccaacauc

SEQ ID NO: 1249830 - RNA, 19 nt, Artificial Sequence
  Description of Artificial Sequence: Synthetic oligonucleotide
  Sense strand starting at position 332 of SEQ ID NO: 1241139
guugguuucccauauccau

SEQ ID NO: 1249831 - RNA, 19 nt, Artificial Sequence
  Description of Artificial Sequence: Synthetic oligonucleotide
  Antisense strand to SEQ ID NO: 1249830
auggauaugggaaaccaac

SEQ ID NO: 1249832 - RNA, 19 nt, Artificial Sequence
  Description of Artificial Sequence: Synthetic oligonucleotide
  Sense strand starting at position 387 of SEQ ID NO: 1241139
cgacaagaaugauaacuua

SEQ ID NO: 1249833 - RNA, 19 nt, Artificial Sequence
  Description of Artificial Sequence: Synthetic oligonucleotide
  Antisense strand to SEQ ID NO: 1249832
uaaguuaucauucuugucg

SEQ ID NO: 1249834 - RNA, 19 nt, Artificial Sequence
  Description of Artificial Sequence: Synthetic oligonucleotide
  Sense strand starting at position 475 of SEQ ID NO: 1241139
guauacuucugagcaguca

SEQ ID NO: 1249835 - RNA, 19 nt, Artificial Sequence
  Description of Artificial Sequence: Synthetic oligonucleotide
  Antisense strand to SEQ ID NO: 1249834
ugacugcucagaaguauac

SEQ ID NO: 1249836 - RNA, 19 nt, Artificial Sequence
  Description of Artificial Sequence: Synthetic oligonucleotide
  Sense strand starting at position 641 of SEQ ID NO: 1241139
uaaggugugagucaccgua

SEQ ID NO: 1249837 - RNA, 19 nt, Artificial Sequence
  Description of Artificial Sequence: Synthetic oligonucleotide
  Antisense strand to SEQ ID NO: 1249836
uacggugacucacaccuua

SEQ ID NO: 1249838 - RNA, 19 nt, Artificial Sequence
  Description of Artificial Sequence: Synthetic oligonucleotide
  Sense strand starting at position 918 of SEQ ID NO: 1241139
acagaagucucccugaaga

SEQ ID NO: 1249839 - RNA, 19 nt, Artificial Sequence
  Description of Artificial Sequence: Synthetic oligonucleotide
  Antisense strand to SEQ ID NO: 1249838
ucuucagggagacuucugu

SEQ ID NO: 1249840 - RNA, 19 nt, Artificial Sequence
  Description of Artificial Sequence: Synthetic oligonucleotide
  Sense strand starting at position 1138 of SEQ ID NO: 1241139
agcucuugguuucuaucaa

SEQ ID NO: 1249841 - RNA, 19 nt, Artificial Sequence
  Description of Artificial Sequence: Synthetic oligonucleotide
  Antisense strand to SEQ ID NO: 1249840
uugauagaaaccaagagcu

SEQ ID NO: 1249842 - RNA, 19 nt, Artificial Sequence
  Description of Artificial Sequence: Synthetic oligonucleotide
  Sense strand starting at position 1171 of SEQ ID NO: 1241139
guggguaaccaauggaaac

SEQ ID NO: 1249843 - RNA, 19 nt, Artificial Sequence
  Description of Artificial Sequence: Synthetic oligonucleotide
  Antisense strand to SEQ ID NO: 1249842
guuuccauugguuacccac

SEQ ID NO: 1249844 - RNA, 19 nt, Artificial Sequence
  Description of Artificial Sequence: Synthetic oligonucleotide
  Sense strand starting at position 2570 of SEQ ID NO: 1241139
guuuguaccuaccuuauuu

SEQ ID NO: 1249845 - RNA, 19 nt, Artificial Sequence
  Description of Artificial Sequence: Synthetic oligonucleotide
  Antisense strand to SEQ ID NO: 1249844
aaauaagguagguacaaac

SEQ ID NO: 1249846 - RNA, 19 nt, Artificial Sequence
  Description of Artificial Sequence: Synthetic oligonucleotide
  Sense strand starting at position 2588 of SEQ ID NO: 1241139
uguucccgagaaugauuau

SEQ ID NO: 1249847 - RNA, 19 nt, Artificial Sequence
  Description of Artificial Sequence: Synthetic oligonucleotide
  Antisense strand to SEQ ID NO: 1249846
auaaucauucucgggaaca

SEQ ID NO: 1249848 - RNA, 19 nt, Artificial Sequence
  Description of Artificial Sequence: Synthetic oligonucleotide
  Sense strand starting at position 2589 of SEQ ID NO: 1241139
guucccgagaaugauuauu

SEQ ID NO: 1249849 - RNA, 19 nt, Artificial Sequence
  Description of Artificial Sequence: Synthetic oligonucleotide
  Antisense strand to SEQ ID NO: 1249848
aauaaucauucucgggaac

SEQ ID NO: 1249850 - RNA, 19 nt, Artificial Sequence
  Description of Artificial Sequence: Synthetic oligonucleotide
  Sense strand starting at position 2741 of SEQ ID NO: 1241139
cacguugaauaguuguuau

SEQ ID NO: 1249851 - RNA, 19 nt, Artificial Sequence
  Description of Artificial Sequence: Synthetic oligonucleotide
  Antisense strand to SEQ ID NO: 1249850
auaacaacuauucaacgug

SEQ ID NO: 1249852 - RNA, 19 nt, Artificial Sequence
  Description of Artificial Sequence: Synthetic oligonucleotide
  Sense strand starting at position 2762 of SEQ ID NO: 1241139
gcaaacuauguguggguau

SEQ ID NO: 1249853 - RNA, 19 nt, Artificial Sequence
  Description of Artificial Sequence: Synthetic oligonucleotide
  Antisense strand to SEQ ID NO: 1249852
auacccacacauaguuugc

SEQ ID NO: 1249854 - RNA, 19 nt, Artificial Sequence
  Description of Artificial Sequence: Synthetic oligonucleotide
  Sense strand starting at position 2764 of SEQ ID NO: 1241139
aaacuauguguggguauau

SEQ ID NO: 1249855 - RNA, 19 nt, Artificial Sequence
  Description of Artificial Sequence: Synthetic oligonucleotide
  Antisense strand to SEQ ID NO: 1249854
auauacccacacauaguuu

SEQ ID NO: 1249856 - RNA, 19 nt, Artificial Sequence
  Description of Artificial Sequence: Synthetic oligonucleotide
  Sense strand starting at position 2774 of SEQ ID NO: 1241139
uggguauaugcauguuacu

SEQ ID NO: 1249857 - RNA, 19 nt, Artificial Sequence
  Description of Artificial Sequence: Synthetic oligonucleotide
  Antisense strand to SEQ ID NO: 1249856
aguaacaugcauauaccca

SEQ ID NO: 1249858 - RNA, 19 nt, Artificial Sequence
  Description of Artificial Sequence: Synthetic oligonucleotide
  Sense strand starting at position 2783 of SEQ ID NO: 1241139
gcauguuacuggccaaaga

SEQ ID NO: 1249859 - RNA, 19 nt, Artificial Sequence
  Description of Artificial Sequence: Synthetic oligonucleotide
  Antisense strand to SEQ ID NO: 1249858
ucuuuggccaguaacaugc

SEQ ID NO: 1249860 - RNA, 19 nt, Artificial Sequence
  Description of Artificial Sequence: Synthetic oligonucleotide
  Sense strand starting at position 2784 of SEQ ID NO: 1241139
cauguuacuggccaaagau

SEQ ID NO: 1249861 - RNA, 19 nt, Artificial Sequence
  Description of Artificial Sequence: Synthetic oligonucleotide
  Antisense strand to SEQ ID NO: 1249860
aucuuuggccaguaacaug

SEQ ID NO: 1249862 - RNA, 19 nt, Artificial Sequence
  Description of Artificial Sequence: Synthetic oligonucleotide
  Sense strand starting at position 2793 of SEQ ID NO: 1241139
ggccaaagauccgcaaaga

SEQ ID NO: 1249863 - RNA, 19 nt, Artificial Sequence
  Description of Artificial Sequence: Synthetic oligonucleotide
  Antisense strand to SEQ ID NO: 1249862
ucuuugcggaucuuuggcc

SEQ ID NO: 1249864 - RNA, 19 nt, Artificial Sequence
  Description of Artificial Sequence: Synthetic oligonucleotide
  Sense strand starting at position 2794 of SEQ ID NO: 1241139
gccaaagauccgcaaagaa

SEQ ID NO: 1249865 - RNA, 19 nt, Artificial Sequence
  Description of Artificial Sequence: Synthetic oligonucleotide
  Antisense strand to SEQ ID NO: 1249864
uucuuugcggaucuuuggc

SEQ ID NO: 1249866 - RNA, 19 nt, Artificial Sequence
  Description of Artificial Sequence: Synthetic oligonucleotide
  Sense strand starting at position 2806 of SEQ ID NO: 1241139
caaagaaugucuguagcaa

SEQ ID NO: 1249867 - RNA, 19 nt, Artificial Sequence
  Description of Artificial Sequence: Synthetic oligonucleotide
  Antisense strand to SEQ ID NO: 1249866
uugcuacagacauucuuug

SEQ ID NO: 1249868 - RNA, 19 nt, Artificial Sequence
  Description of Artificial Sequence: Synthetic oligonucleotide
  Sense strand starting at position 2807 of SEQ ID NO: 1241139
aaagaaugucuguagcaag

SEQ ID NO: 1249869 - RNA, 19 nt, Artificial Sequence
  Description of Artificial Sequence: Synthetic oligonucleotide
  Antisense strand to SEQ ID NO: 1249868
cuugcuacagacauucuuu

SEQ ID NO: 1249870 - RNA, 19 nt, Artificial Sequence
  Description of Artificial Sequence: Synthetic oligonucleotide
  Sense strand starting at position 2821 of SEQ ID NO: 1241139
gcaagaaugucuguggcaa

SEQ ID NO: 1249871 - RNA, 19 nt, Artificial Sequence
  Description of Artificial Sequence: Synthetic oligonucleotide
  Antisense strand to SEQ ID NO: 1249870
uugccacagacauucuugc

SEQ ID NO: 1249872 - RNA, 19 nt, Artificial Sequence
  Description of Artificial Sequence: Synthetic oligonucleotide
  Sense strand starting at position 2822 of SEQ ID NO: 1241139
caagaaugucuguggcaag

SEQ ID NO: 1249873 - RNA, 19 nt, Artificial Sequence
  Description of Artificial Sequence: Synthetic oligonucleotide
  Antisense strand to SEQ ID NO: 1249872
cuugccacagacauucuug

SEQ ID NO: 1249874 - RNA, 19 nt, Artificial Sequence
  Description of Artificial Sequence: Synthetic oligonucleotide
  Sense strand starting at position 2923 of SEQ ID NO: 1241139
guugacuaacgguguggaa

SEQ ID NO: 1249875 - RNA, 19 nt, Artificial Sequence
  Description of Artificial Sequence: Synthetic oligonucleotide
  Antisense strand to SEQ ID NO: 1249874
uuccacaccguuagucaac

SEQ ID NO: 1249876 - RNA, 19 nt, Artificial Sequence
  Description of Artificial Sequence: Synthetic oligonucleotide
  Sense strand starting at position 2935 of SEQ ID NO: 1241139
uguggaaugggcuggagau

SEQ ID NO: 1249877 - RNA, 19 nt, Artificial Sequence
  Description of Artificial Sequence: Synthetic oligonucleotide
  Antisense strand to SEQ ID NO: 1249876
aucuccagcccauuccaca

SEQ ID NO: 1249878 - RNA, 19 nt, Artificial Sequence
  Description of Artificial Sequence: Synthetic oligonucleotide
  Sense strand starting at position 2936 of SEQ ID NO: 1241139
guggaaugggcuggagaua

SEQ ID NO: 1249879 - RNA, 19 nt, Artificial Sequence
  Description of Artificial Sequence: Synthetic oligonucleotide
  Antisense strand to SEQ ID NO: 1249878
uaucuccagcccauuccac

SEQ ID NO: 1249880 - RNA, 19 nt, Artificial Sequence
  Description of Artificial Sequence: Synthetic oligonucleotide
  Sense strand starting at position 3422 of SEQ ID NO: 1241139
ucauaauuguagcuuugaa

SEQ ID NO: 1249881 - RNA, 19 nt, Artificial Sequence
  Description of Artificial Sequence: Synthetic oligonucleotide
  Antisense strand to SEQ ID NO: 1249880
uucaaagcuacaauuauga

SEQ ID NO: 1249882 - RNA, 19 nt, Artificial Sequence
  Description of Artificial Sequence: Synthetic oligonucleotide
  Sense strand starting at position 3440 of SEQ ID NO: 1241139
aggucuaucuaguuuacaa

SEQ ID NO: 1249883 - RNA, 19 nt, Artificial Sequence
  Description of Artificial Sequence: Synthetic oligonucleotide
  Antisense strand to SEQ ID NO: 1249882
uuguaaacuagauagaccu

SEQ ID NO: 1249884 - RNA, 19 nt, Artificial Sequence
  Description of Artificial Sequence: Synthetic oligonucleotide
  Sense strand starting at position 3442 of SEQ ID NO: 1241139
gucuaucuaguuuacaauu

SEQ ID NO: 1249885 - RNA, 19 nt, Artificial Sequence
  Description of Artificial Sequence: Synthetic oligonucleotide
  Antisense strand to SEQ ID NO: 1249884
aauuguaaacuagauagac

SEQ ID NO: 1249886 - RNA, 19 nt, Artificial Sequence
  Description of Artificial Sequence: Synthetic oligonucleotide
  Sense strand starting at position 3467 of SEQ ID NO: 1241139
aggaguuaccagggcaacu

SEQ ID NO: 1249887 - RNA, 19 nt, Artificial Sequence
  Description of Artificial Sequence: Synthetic oligonucleotide
  Antisense strand to SEQ ID NO: 1249886
aguugcccugguaacuccu

SEQ ID NO: 1249888 - RNA, 19 nt, Artificial Sequence
  Description of Artificial Sequence: Synthetic oligonucleotide
  Sense strand starting at position 3580 of SEQ ID NO: 1241139
cucuaucuuugggcagaaa

SEQ ID NO: 1249889 - RNA, 19 nt, Artificial Sequence
  Description of Artificial Sequence: Synthetic oligonucleotide
  Antisense strand to SEQ ID NO: 1249888
uuucugcccaaagauagag

SEQ ID NO: 1249890 - RNA, 19 nt, Artificial Sequence
  Description of Artificial Sequence: Synthetic oligonucleotide
  Sense strand starting at position 3690 of SEQ ID NO: 1241139
uugugaacuugugcuggaa

SEQ ID NO: 1249891 - RNA, 19 nt, Artificial Sequence
  Description of Artificial Sequence: Synthetic oligonucleotide
  Antisense strand to SEQ ID NO: 1249890
uuccagcacaaguucacaa

SEQ ID NO: 1249892 - RNA, 19 nt, Artificial Sequence
  Description of Artificial Sequence: Synthetic oligonucleotide
  Sense strand starting at position 3693 of SEQ ID NO: 1241139
ugaacuugugcuggaaaga

SEQ ID NO: 1249893 - RNA, 19 nt, Artificial Sequence
  Description of Artificial Sequence: Synthetic oligonucleotide
  Antisense strand to SEQ ID NO: 1249892
ucuuuccagcacaaguuca

SEQ ID NO: 1249894 - RNA, 19 nt, Artificial Sequence
  Description of Artificial Sequence: Synthetic oligonucleotide
  Sense strand starting at position 23 of SEQ ID NO: 1241140
gaaugauucugucucaggu

SEQ ID NO: 1249895 - RNA, 19 nt, Artificial Sequence
  Description of Artificial Sequence: Synthetic oligonucleotide
  Antisense strand to SEQ ID NO: 1249894
accugagacagaaucauuc

SEQ ID NO: 1249896 - RNA, 19 nt, Artificial Sequence
  Description of Artificial Sequence: Synthetic oligonucleotide
  Sense strand starting at position 37 of SEQ ID NO: 1241140
caggucaaaugcuuuaguu

SEQ ID NO: 1249897 - RNA, 19 nt, Artificial Sequence
  Description of Artificial Sequence: Synthetic oligonucleotide
  Antisense strand to SEQ ID NO: 1249896
aacuaaagcauuugaccug

SEQ ID NO: 1249898 - RNA, 19 nt, Artificial Sequence
  Description of Artificial Sequence: Synthetic oligonucleotide
  Sense strand starting at position 39 of SEQ ID NO: 1241140
ggucaaaugcuuuaguugu

SEQ ID NO: 1249899 - RNA, 19 nt, Artificial Sequence
  Description of Artificial Sequence: Synthetic oligonucleotide
  Antisense strand to SEQ ID NO: 1249898
acaacuaaagcauuugacc

SEQ ID NO: 1249900 - RNA, 19 nt, Artificial Sequence
  Description of Artificial Sequence: Synthetic oligonucleotide
  Sense strand starting at position 47 of SEQ ID NO: 1241140
gcuuuaguugugucugcuu

SEQ ID NO: 1249901 - RNA, 19 nt, Artificial Sequence
  Description of Artificial Sequence: Synthetic oligonucleotide
  Antisense strand to SEQ ID NO: 1249900
aagcagacacaacuaaagc

SEQ ID NO: 1249902 - RNA, 19 nt, Artificial Sequence
  Description of Artificial Sequence: Synthetic oligonucleotide
  Sense strand starting at position 120 of SEQ ID NO: 1241140
uccgauaauuucugauuuc

SEQ ID NO: 1249903 - RNA, 19 nt, Artificial Sequence
  Description of Artificial Sequence: Synthetic oligonucleotide
  Antisense strand to SEQ ID NO: 1249902
gaaaucagaaauuaucgga

SEQ ID NO: 1249904 - RNA, 19 nt, Artificial Sequence
  Description of Artificial Sequence: Synthetic oligonucleotide
  Sense strand starting at position 121 of SEQ ID NO: 1241140
ccgauaauuucugauuucu

SEQ ID NO: 1249905 - RNA, 19 nt, Artificial Sequence
  Description of Artificial Sequence: Synthetic oligonucleotide
  Antisense strand to SEQ ID NO: 1249904
agaaaucagaaauuaucgg

SEQ ID NO: 1249906 - RNA, 19 nt, Artificial Sequence
  Description of Artificial Sequence: Synthetic oligonucleotide
  Sense strand starting at position 305 of SEQ ID NO: 1241140
ggaugugcauccucggaaa

SEQ ID NO: 1249907 - RNA, 19 nt, Artificial Sequence
  Description of Artificial Sequence: Synthetic oligonucleotide
  Antisense strand to SEQ ID NO: 1249906
uuuccgaggaugcacaucc

SEQ ID NO: 1249908 - RNA, 19 nt, Artificial Sequence
  Description of Artificial Sequence: Synthetic oligonucleotide
  Sense strand starting at position 349 of SEQ ID NO: 1241140
gcagucuucgauuaucucu

SEQ ID NO: 1249909 - RNA, 19 nt, Artificial Sequence
  Description of Artificial Sequence: Synthetic oligonucleotide
  Antisense strand to SEQ ID NO: 1249908
agagauaaucgaagacugc

SEQ ID NO: 1249910 - RNA, 19 nt, Artificial Sequence
  Description of Artificial Sequence: Synthetic oligonucleotide
  Sense strand starting at position 439 of SEQ ID NO: 1241140
augugucagccucagaaug

SEQ ID NO: 1249911 - RNA, 19 nt, Artificial Sequence
  Description of Artificial Sequence: Synthetic oligonucleotide
  Antisense strand to SEQ ID NO: 1249910
cauucugaggcugacacau

SEQ ID NO: 1249912 - RNA, 19 nt, Artificial Sequence
  Description of Artificial Sequence: Synthetic oligonucleotide
  Sense strand starting at position 596 of SEQ ID NO: 1241140
ugcuccaacucuuugagaa

SEQ ID NO: 1249913 - RNA, 19 nt, Artificial Sequence
  Description of Artificial Sequence: Synthetic oligonucleotide
  Antisense strand to SEQ ID NO: 1249912
uucucaaagaguuggagca

SEQ ID NO: 1249914 - RNA, 19 nt, Artificial Sequence
  Description of Artificial Sequence: Synthetic oligonucleotide
  Sense strand starting at position 597 of SEQ ID NO: 1241140
gcuccaacucuuugagaag

SEQ ID NO: 1249915 - RNA, 19 nt, Artificial Sequence
  Description of Artificial Sequence: Synthetic oligonucleotide
  Antisense strand to SEQ ID NO: 1249914
cuucucaaagaguuggagc

SEQ ID NO: 1249916 - RNA, 19 nt, Artificial Sequence
  Description of Artificial Sequence: Synthetic oligonucleotide
  Sense strand starting at position 728 of SEQ ID NO: 1241140
uuguaauucuugucaucug

SEQ ID NO: 1249917 - RNA, 19 nt, Artificial Sequence
  Description of Artificial Sequence: Synthetic oligonucleotide
  Antisense strand to SEQ ID NO: 1249916
cagaugacaagaauuacaa

SEQ ID NO: 1249918 - RNA, 19 nt, Artificial Sequence
  Description of Artificial Sequence: Synthetic oligonucleotide
  Sense strand starting at position 812 of SEQ ID NO: 1241140
cuacuaauagaaggauguu

SEQ ID NO: 1249919 - RNA, 19 nt, Artificial Sequence
  Description of Artificial Sequence: Synthetic oligonucleotide
  Antisense strand to SEQ ID NO: 1249918
aacauccuucuauuaguag

SEQ ID NO: 1249920 - RNA, 19 nt, Artificial Sequence
  Description of Artificial Sequence: Synthetic oligonucleotide
  Sense strand starting at position 821 of SEQ ID NO: 1241140
gaaggauguugguuuccca

SEQ ID NO: 1249921 - RNA, 19 nt, Artificial Sequence
  Description of Artificial Sequence: Synthetic oligonucleotide
  Antisense strand to SEQ ID NO: 1249920
ugggaaaccaacauccuuc

SEQ ID NO: 1249922 - RNA, 19 nt, Artificial Sequence
  Description of Artificial Sequence: Synthetic oligonucleotide
  Sense strand starting at position 824 of SEQ ID NO: 1241140
ggauguugguuucccauau

SEQ ID NO: 1249923 - RNA, 19 nt, Artificial Sequence
  Description of Artificial Sequence: Synthetic oligonucleotide
  Antisense strand to SEQ ID NO: 1249922
auaugggaaaccaacaucc

SEQ ID NO: 1249924 - RNA, 19 nt, Artificial Sequence
  Description of Artificial Sequence: Synthetic oligonucleotide
  Sense strand starting at position 825 of SEQ ID NO: 1241140
gauguugguuucccauauc

SEQ ID NO: 1249925 - RNA, 19 nt, Artificial Sequence
  Description of Artificial Sequence: Synthetic oligonucleotide
  Antisense strand to SEQ ID NO: 1249924
gauaugggaaaccaacauc

SEQ ID NO: 1249926 - RNA, 19 nt, Artificial Sequence
  Description of Artificial Sequence: Synthetic oligonucleotide
  Sense strand starting at position 828 of SEQ ID NO: 1241140
guugguuucccauauccau

SEQ ID NO: 1249927 - RNA, 19 nt, Artificial Sequence
  Description of Artificial Sequence: Synthetic oligonucleotide
  Antisense strand to SEQ ID NO: 1249926
auggauaugggaaaccaac

SEQ ID NO: 1249928 - RNA, 19 nt, Artificial Sequence
  Description of Artificial Sequence: Synthetic oligonucleotide
  Sense strand starting at position 971 of SEQ ID NO: 1241140
guauacuucugagcaguca

SEQ ID NO: 1249929 - RNA, 19 nt, Artificial Sequence
  Description of Artificial Sequence: Synthetic oligonucleotide
  Antisense strand to SEQ ID NO: 1249928
ugacugcucagaaguauac

SEQ ID NO: 1249930 - RNA, 19 nt, Artificial Sequence
  Description of Artificial Sequence: Synthetic oligonucleotide
  Sense strand starting at position 1137 of SEQ ID NO: 1241140
uaaggugugagucaccgua

SEQ ID NO: 1249931 - RNA, 19 nt, Artificial Sequence
  Description of Artificial Sequence: Synthetic oligonucleotide
  Antisense strand to SEQ ID NO: 1249930
uacggugacucacaccuua

SEQ ID NO: 1249932 - RNA, 19 nt, Artificial Sequence
  Description of Artificial Sequence: Synthetic oligonucleotide
  Sense strand starting at position 1414 of SEQ ID NO: 1241140
acagaagucucccugaaga

SEQ ID NO: 1249933 - RNA, 19 nt, Artificial Sequence
  Description of Artificial Sequence: Synthetic oligonucleotide
  Antisense strand to SEQ ID NO: 1249932
ucuucagggagacuucugu

SEQ ID NO: 1249934 - RNA, 19 nt, Artificial Sequence
  Description of Artificial Sequence: Synthetic oligonucleotide
  Sense strand starting at position 1634 of SEQ ID NO: 1241140
agcucuugguuucuaucaa

SEQ ID NO: 1249935 - RNA, 19 nt, Artificial Sequence
  Description of Artificial Sequence: Synthetic oligonucleotide
  Antisense strand to SEQ ID NO: 1249934
uugauagaaaccaagagcu

SEQ ID NO: 1249936 - RNA, 19 nt, Artificial Sequence
  Description of Artificial Sequence: Synthetic oligonucleotide
  Sense strand starting at position 1667 of SEQ ID NO: 1241140
guggguaaccaauggaaac

SEQ ID NO: 1249937 - RNA, 19 nt, Artificial Sequence
  Description of Artificial Sequence: Synthetic oligonucleotide
  Antisense strand to SEQ ID NO: 1249936
guuuccauugguuacccac

SEQ ID NO: 1249938 - RNA, 19 nt, Artificial Sequence
  Description of Artificial Sequence: Synthetic oligonucleotide
  Sense strand starting at position 3066 of SEQ ID NO: 1241140
guuuguaccuaccuuauuu

SEQ ID NO: 1249939 - RNA, 19 nt, Artificial Sequence
  Description of Artificial Sequence: Synthetic oligonucleotide
  Antisense strand to SEQ ID NO: 1249938
aaauaagguagguacaaac

SEQ ID NO: 1249940 - RNA, 19 nt, Artificial Sequence
  Description of Artificial Sequence: Synthetic oligonucleotide
  Sense strand starting at position 3084 of SEQ ID NO: 1241140
uguucccgagaaugauuau

SEQ ID NO: 1249941 - RNA, 19 nt, Artificial Sequence
  Description of Artificial Sequence: Synthetic oligonucleotide
  Antisense strand to SEQ ID NO: 1249940
auaaucauucucgggaaca

SEQ ID NO: 1249942 - RNA, 19 nt, Artificial Sequence
  Description of Artificial Sequence: Synthetic oligonucleotide
  Sense strand starting at position 3085 of SEQ ID NO: 1241140
guucccgagaaugauuauu

SEQ ID NO: 1249943 - RNA, 19 nt, Artificial Sequence
  Description of Artificial Sequence: Synthetic oligonucleotide
  Antisense strand to SEQ ID NO: 1249942
aauaaucauucucgggaac

SEQ ID NO: 1249944 - RNA, 19 nt, Artificial Sequence
  Description of Artificial Sequence: Synthetic oligonucleotide
  Sense strand starting at position 3260 of SEQ ID NO: 1241140
aaacuauguguggguauau

SEQ ID NO: 1249945 - RNA, 19 nt, Artificial Sequence
  Description of Artificial Sequence: Synthetic oligonucleotide
  Antisense strand to SEQ ID NO: 1249944
auauacccacacauaguuu

SEQ ID NO: 1249946 - RNA, 19 nt, Artificial Sequence
  Description of Artificial Sequence: Synthetic oligonucleotide
  Sense strand starting at position 3279 of SEQ ID NO: 1241140
gcauguuacuggccaaaga

SEQ ID NO: 1249947 - RNA, 19 nt, Artificial Sequence
  Description of Artificial Sequence: Synthetic oligonucleotide
  Antisense strand to SEQ ID NO: 1249946
ucuuuggccaguaacaugc

SEQ ID NO: 1249948 - RNA, 19 nt, Artificial Sequence
  Description of Artificial Sequence: Synthetic oligonucleotide
  Sense strand starting at position 3280 of SEQ ID NO: 1241140
cauguuacuggccaaagau

SEQ ID NO: 1249949 - RNA, 19 nt, Artificial Sequence
  Description of Artificial Sequence: Synthetic oligonucleotide
  Antisense strand to SEQ ID NO: 1249948
aucuuuggccaguaacaug

SEQ ID NO: 1249950 - RNA, 19 nt, Artificial Sequence
  Description of Artificial Sequence: Synthetic oligonucleotide
  Sense strand starting at position 3289 of SEQ ID NO: 1241140
ggccaaagauccgcaaaga

SEQ ID NO: 1249951 - RNA, 19 nt, Artificial Sequence
  Description of Artificial Sequence: Synthetic oligonucleotide
  Antisense strand to SEQ ID NO: 1249950
ucuuugcggaucuuuggcc

SEQ ID NO: 1249952 - RNA, 19 nt, Artificial Sequence
  Description of Artificial Sequence: Synthetic oligonucleotide
  Sense strand starting at position 3290 of SEQ ID NO: 1241140
gccaaagauccgcaaagaa

SEQ ID NO: 1249953 - RNA, 19 nt, Artificial Sequence
  Description of Artificial Sequence: Synthetic oligonucleotide
  Antisense strand to SEQ ID NO: 1249952
uucuuugcggaucuuuggc

SEQ ID NO: 1249954 - RNA, 19 nt, Artificial Sequence
  Description of Artificial Sequence: Synthetic oligonucleotide
  Sense strand starting at position 3302 of SEQ ID NO: 1241140
caaagaaugucuguagcaa

SEQ ID NO: 1249955 - RNA, 19 nt, Artificial Sequence
  Description of Artificial Sequence: Synthetic oligonucleotide
  Antisense strand to SEQ ID NO: 1249954
uugcuacagacauucuuug

SEQ ID NO: 1249956 - RNA, 19 nt, Artificial Sequence
  Description of Artificial Sequence: Synthetic oligonucleotide
  Sense strand starting at position 3303 of SEQ ID NO: 1241140
aaagaaugucuguagcaag

SEQ ID NO: 1249957 - RNA, 19 nt, Artificial Sequence
  Description of Artificial Sequence: Synthetic oligonucleotide
  Antisense strand to SEQ ID NO: 1249956
cuugcuacagacauucuuu

SEQ ID NO: 1249958 - RNA, 19 nt, Artificial Sequence
  Description of Artificial Sequence: Synthetic oligonucleotide
  Sense strand starting at position 3318 of SEQ ID NO: 1241140
caagaaugucuguggcaag

SEQ ID NO: 1249959 - RNA, 19 nt, Artificial Sequence
  Description of Artificial Sequence: Synthetic oligonucleotide
  Antisense strand to SEQ ID NO: 1249958
cuugccacagacauucuug

SEQ ID NO: 1249960 - RNA, 19 nt, Artificial Sequence
  Description of Artificial Sequence: Synthetic oligonucleotide
  Sense strand starting at position 3419 of SEQ ID NO: 1241140
guugacuaacgguguggaa

SEQ ID NO: 1249961 - RNA, 19 nt, Artificial Sequence
  Description of Artificial Sequence: Synthetic oligonucleotide
  Antisense strand to SEQ ID NO: 1249960
uuccacaccguuagucaac

SEQ ID NO: 1249962 - RNA, 19 nt, Artificial Sequence
  Description of Artificial Sequence: Synthetic oligonucleotide
  Sense strand starting at position 3431 of SEQ ID NO: 1241140
uguggaaugggcuggagau

SEQ ID NO: 1249963 - RNA, 19 nt, Artificial Sequence
  Description of Artificial Sequence: Synthetic oligonucleotide
  Antisense strand to SEQ ID NO: 1249962
aucuccagcccauuccaca

SEQ ID NO: 1249964 - RNA, 19 nt, Artificial Sequence
  Description of Artificial Sequence: Synthetic oligonucleotide
  Sense strand starting at position 3432 of SEQ ID NO: 1241140
guggaaugggcuggagaua

SEQ ID NO: 1249965 - RNA, 19 nt, Artificial Sequence
  Description of Artificial Sequence: Synthetic oligonucleotide
  Antisense strand to SEQ ID NO: 1249964
uaucuccagcccauuccac

SEQ ID NO: 1249966 - RNA, 19 nt, Artificial Sequence
  Description of Artificial Sequence: Synthetic oligonucleotide
  Sense strand starting at position 3918 of SEQ ID NO: 1241140
ucauaauuguagcuuugaa

SEQ ID NO: 1249967 - RNA, 19 nt, Artificial Sequence
  Description of Artificial Sequence: Synthetic oligonucleotide
  Antisense strand to SEQ ID NO: 1249966
uucaaagcuacaauuauga

SEQ ID NO: 1249968 - RNA, 19 nt, Artificial Sequence
  Description of Artificial Sequence: Synthetic oligonucleotide
  Sense strand starting at position 3936 of SEQ ID NO: 1241140
aggucuaucuaguuuacaa

SEQ ID NO: 1249969 - RNA, 19 nt, Artificial Sequence
  Description of Artificial Sequence: Synthetic oligonucleotide
  Antisense strand to SEQ ID NO: 1249968
uuguaaacuagauagaccu

SEQ ID NO: 1249970 - RNA, 19 nt, Artificial Sequence
  Description of Artificial Sequence: Synthetic oligonucleotide
  Sense strand starting at position 3938 of SEQ ID NO: 1241140
gucuaucuaguuuacaauu

SEQ ID NO: 1249971 - RNA, 19 nt, Artificial Sequence
  Description of Artificial Sequence: Synthetic oligonucleotide
  Antisense strand to SEQ ID NO: 1249970
aauuguaaacuagauagac

SEQ ID NO: 1249972 - RNA, 19 nt, Artificial Sequence
  Description of Artificial Sequence: Synthetic oligonucleotide
  Sense strand starting at position 3963 of SEQ ID NO: 1241140
aggaguuaccagggcaacu

SEQ ID NO: 1249973 - RNA, 19 nt, Artificial Sequence
  Description of Artificial Sequence: Synthetic oligonucleotide
  Antisense strand to SEQ ID NO: 1249972
aguugcccugguaacuccu

SEQ ID NO: 1249974 - RNA, 19 nt, Artificial Sequence
  Description of Artificial Sequence: Synthetic oligonucleotide
  Sense strand starting at position 199 of SEQ ID NO: 1241141
uuggguguucucuaauuac

SEQ ID NO: 1249975 - RNA, 19 nt, Artificial Sequence
  Description of Artificial Sequence: Synthetic oligonucleotide
  Antisense strand to SEQ ID NO: 1249974
guaauuagagaacacccaa

SEQ ID NO: 1249976 - RNA, 19 nt, Artificial Sequence
  Description of Artificial Sequence: Synthetic oligonucleotide
  Sense strand starting at position 251 of SEQ ID NO: 1241141
agagguuagcuccaguucu

SEQ ID NO: 1249977 - RNA, 19 nt, Artificial Sequence
  Description of Artificial Sequence: Synthetic oligonucleotide
  Antisense strand to SEQ ID NO: 1249976
agaacuggagcuaaccucu

SEQ ID NO: 1249978 - RNA, 19 nt, Artificial Sequence
  Description of Artificial Sequence: Synthetic oligonucleotide
  Sense strand starting at position 429 of SEQ ID NO: 1241141
guaggaggucauuggcaua

SEQ ID NO: 1249979 - RNA, 19 nt, Artificial Sequence
  Description of Artificial Sequence: Synthetic oligonucleotide
  Antisense strand to SEQ ID NO: 1249978
uaugccaaugaccuccuac

SEQ ID NO: 1249980 - RNA, 19 nt, Artificial Sequence
  Description of Artificial Sequence: Synthetic oligonucleotide
  Sense strand starting at position 718 of SEQ ID NO: 1241141
guggauaucugugcuaagg

SEQ ID NO: 1249981 - RNA, 19 nt, Artificial Sequence
  Description of Artificial Sequence: Synthetic oligonucleotide
  Antisense strand to SEQ ID NO: 1249980
ccuuagcacagauauccac

SEQ ID NO: 1249982 - RNA, 19 nt, Artificial Sequence
  Description of Artificial Sequence: Synthetic oligonucleotide
  Sense strand starting at position 787 of SEQ ID NO: 1241141
auacaugucggaugagaaa

SEQ ID NO: 1249983 - RNA, 19 nt, Artificial Sequence
  Description of Artificial Sequence: Synthetic oligonucleotide
  Antisense strand to SEQ ID NO: 1249982
uuucucauccgacauguau

SEQ ID NO: 1249984 - RNA, 19 nt, Artificial Sequence
  Description of Artificial Sequence: Synthetic oligonucleotide
  Sense strand starting at position 835 of SEQ ID NO: 1241141
aagaguguggugcagaaca

SEQ ID NO: 1249985 - RNA, 19 nt, Artificial Sequence
  Description of Artificial Sequence: Synthetic oligonucleotide
  Antisense strand to SEQ ID NO: 1249984
uguucugcaccacacucuu

SEQ ID NO: 1249986 - RNA, 19 nt, Artificial Sequence
  Description of Artificial Sequence: Synthetic oligonucleotide
  Sense strand starting at position 837 of SEQ ID NO: 1241141
gaguguggugcagaacaaa

SEQ ID NO: 1249987 - RNA, 19 nt, Artificial Sequence
  Description of Artificial Sequence: Synthetic oligonucleotide
  Antisense strand to SEQ ID NO: 1249986
uuuguucugcaccacacuc

SEQ ID NO: 1249988 - RNA, 19 nt, Artificial Sequence
  Description of Artificial Sequence: Synthetic oligonucleotide
  Sense strand starting at position 892 of SEQ ID NO: 1241141
uuugguaauccucaagcua

SEQ ID NO: 1249989 - RNA, 19 nt, Artificial Sequence
  Description of Artificial Sequence: Synthetic oligonucleotide
  Antisense strand to SEQ ID NO: 1249988
uagcuugaggauuaccaaa

SEQ ID NO: 1249990 - RNA, 19 nt, Artificial Sequence
  Description of Artificial Sequence: Synthetic oligonucleotide
  Sense strand starting at position 1083 of SEQ ID NO: 1241141
agagauauuggcuggaccu

SEQ ID NO: 1249991 - RNA, 19 nt, Artificial Sequence
  Description of Artificial Sequence: Synthetic oligonucleotide
  Antisense strand to SEQ ID NO: 1249990
agguccagccaauaucucu

SEQ ID NO: 1249992 - RNA, 19 nt, Artificial Sequence
  Description of Artificial Sequence: Synthetic oligonucleotide
  Sense strand starting at position 1084 of SEQ ID NO: 1241141
gagauauuggcuggaccuc

SEQ ID NO: 1249993 - RNA, 19 nt, Artificial Sequence
  Description of Artificial Sequence: Synthetic oligonucleotide
  Antisense strand to SEQ ID NO: 1249992
gagguccagccaauaucuc

SEQ ID NO: 1249994 - RNA, 19 nt, Artificial Sequence
  Description of Artificial Sequence: Synthetic oligonucleotide
  Sense strand starting at position 1270 of SEQ ID NO: 1241141
ggcugucuccugggaaacu

SEQ ID NO: 1249995 - RNA, 19 nt, Artificial Sequence
  Description of Artificial Sequence: Synthetic oligonucleotide
  Antisense strand to SEQ ID NO: 1249994
aguuucccaggagacagcc

SEQ ID NO: 1249996 - RNA, 19 nt, Artificial Sequence
  Description of Artificial Sequence: Synthetic oligonucleotide
  Sense strand starting at position 1287 of SEQ ID NO: 1241141
cugcauaucuaggauuuga

SEQ ID NO: 1249997 - RNA, 19 nt, Artificial Sequence
  Description of Artificial Sequence: Synthetic oligonucleotide
  Antisense strand to SEQ ID NO: 1249996
ucaaauccuagauaugcag

SEQ ID NO: 1249998 - RNA, 19 nt, Artificial Sequence
  Description of Artificial Sequence: Synthetic oligonucleotide
  Sense strand starting at position 1407 of SEQ ID NO: 1241141
cuuugcuuccuagaaagcu

SEQ ID NO: 1249999 - RNA, 19 nt, Artificial Sequence
  Description of Artificial Sequence: Synthetic oligonucleotide
  Antisense strand to SEQ ID NO: 1249998
agcuuucuaggaagcaaag

SEQ ID NO: 1250000 - RNA, 19 nt, Artificial Sequence
  Description of Artificial Sequence: Synthetic oligonucleotide
  Sense strand starting at position 1513 of SEQ ID NO: 1241141
ggaugaggaucucugccaa

SEQ ID NO: 1250001 - RNA, 19 nt, Artificial Sequence
  Description of Artificial Sequence: Synthetic oligonucleotide
  Antisense strand to SEQ ID NO: 1250000
uuggcagagauccucaucc

SEQ ID NO: 1250002 - RNA, 19 nt, Artificial Sequence
  Description of Artificial Sequence: Synthetic oligonucleotide
  Sense strand starting at position 1557 of SEQ ID NO: 1241141
auguccuaagucuaacaga

SEQ ID NO: 1250003 - RNA, 19 nt, Artificial Sequence
  Description of Artificial Sequence: Synthetic oligonucleotide
  Antisense strand to SEQ ID NO: 1250002
ucuguuagacuuaggacau

SEQ ID NO: 1250004 - RNA, 19 nt, Artificial Sequence
  Description of Artificial Sequence: Synthetic oligonucleotide
  Sense strand starting at position 2555 of SEQ ID NO: 1241141
gcucacacucuuuagagaa

SEQ ID NO: 1250005 - RNA, 19 nt, Artificial Sequence
  Description of Artificial Sequence: Synthetic oligonucleotide
  Antisense strand to SEQ ID NO: 1250004
uucucuaaagagugugagc

SEQ ID NO: 1250006 - RNA, 19 nt, Artificial Sequence
  Description of Artificial Sequence: Synthetic oligonucleotide
  Sense strand starting at position 2606 of SEQ ID NO: 1241141
ggcccugaaucuuuaugau

SEQ ID NO: 1250007 - RNA, 19 nt, Artificial Sequence
  Description of Artificial Sequence: Synthetic oligonucleotide
  Antisense strand to SEQ ID NO: 1250006
aucauaaagauucagggcc

SEQ ID NO: 1250008 - RNA, 19 nt, Artificial Sequence
  Description of Artificial Sequence: Synthetic oligonucleotide
  Sense strand starting at position 2779 of SEQ ID NO: 1241141
gguagcucacuugagcuau

SEQ ID NO: 1250009 - RNA, 19 nt, Artificial Sequence
  Description of Artificial Sequence: Synthetic oligonucleotide
  Antisense strand to SEQ ID NO: 1250008
auagcucaagugagcuacc

SEQ ID NO: 1250010 - RNA, 19 nt, Artificial Sequence
  Description of Artificial Sequence: Synthetic oligonucleotide
  Sense strand starting at position 2783 of SEQ ID NO: 1241141
gcucacuugagcuauguga

SEQ ID NO: 1250011 - RNA, 19 nt, Artificial Sequence
  Description of Artificial Sequence: Synthetic oligonucleotide
  Antisense strand to SEQ ID NO: 1250010
ucacauagcucaagugagc

SEQ ID NO: 1250012 - RNA, 19 nt, Artificial Sequence
  Description of Artificial Sequence: Synthetic oligonucleotide
  Sense strand starting at position 2929 of SEQ ID NO: 1241141
aggguaaguguaggguauu

SEQ ID NO: 1250013 - RNA, 19 nt, Artificial Sequence
  Description of Artificial Sequence: Synthetic oligonucleotide
  Antisense strand to SEQ ID NO: 1250012
aauacccuacacuuacccu

SEQ ID NO: 1250014 - RNA, 19 nt, Artificial Sequence
  Description of Artificial Sequence: Synthetic oligonucleotide
  Sense strand starting at position 2973 of SEQ ID NO: 1241141
uaggguucucagugaucaa

SEQ ID NO: 1250015 - RNA, 19 nt, Artificial Sequence
  Description of Artificial Sequence: Synthetic oligonucleotide
  Antisense strand to SEQ ID NO: 1250014
uugaucacugagaacccua

SEQ ID NO: 1250016 - RNA, 19 nt, Artificial Sequence
  Description of Artificial Sequence: Synthetic oligonucleotide
  Sense strand starting at position 2974 of SEQ ID NO: 1241141
aggguucucagugaucaau

SEQ ID NO: 1250017 - RNA, 19 nt, Artificial Sequence
  Description of Artificial Sequence: Synthetic oligonucleotide
  Antisense strand to SEQ ID NO: 1250016
auugaucacugagaacccu

SEQ ID NO: 1250018 - RNA, 19 nt, Artificial Sequence
  Description of Artificial Sequence: Synthetic oligonucleotide
  Sense strand starting at position 2976 of SEQ ID NO: 1241141
gguucucagugaucaauuc

SEQ ID NO: 1250019 - RNA, 19 nt, Artificial Sequence
  Description of Artificial Sequence: Synthetic oligonucleotide
  Antisense strand to SEQ ID NO: 1250018
gaauugaucacugagaacc

SEQ ID NO: 1250020 - RNA, 19 nt, Artificial Sequence
  Description of Artificial Sequence: Synthetic oligonucleotide
  Sense strand starting at position 3119 of SEQ ID NO: 1241141
uuguauccaugagcugaau

SEQ ID NO: 1250021 - RNA, 19 nt, Artificial Sequence
  Description of Artificial Sequence: Synthetic oligonucleotide
  Antisense strand to SEQ ID NO: 1250020
auucagcucauggauacaa

SEQ ID NO: 1250022 - RNA, 19 nt, Artificial Sequence
  Description of Artificial Sequence: Synthetic oligonucleotide
  Sense strand starting at position 3150 of SEQ ID NO: 1241141
acaauauugcccuaagguu

SEQ ID NO: 1250023 - RNA, 19 nt, Artificial Sequence
  Description of Artificial Sequence: Synthetic oligonucleotide
  Antisense strand to SEQ ID NO: 1250022
aaccuuagggcaauauugu

SEQ ID NO: 1250024 - RNA, 19 nt, Artificial Sequence
  Description of Artificial Sequence: Synthetic oligonucleotide
  Sense strand starting at position 3156 of SEQ ID NO: 1241141
uugcccuaagguuaaauua

SEQ ID NO: 1250025 - RNA, 19 nt, Artificial Sequence
  Description of Artificial Sequence: Synthetic oligonucleotide
  Antisense strand to SEQ ID NO: 1250024
uaauuuaaccuuagggcaa

SEQ ID NO: 1250026 - RNA, 19 nt, Artificial Sequence
  Description of Artificial Sequence: Synthetic oligonucleotide
  Sense strand starting at position 3186 of SEQ ID NO: 1241141
auuccuuuccuauggagga

SEQ ID NO: 1250027 - RNA, 19 nt, Artificial Sequence
  Description of Artificial Sequence: Synthetic oligonucleotide
  Antisense strand to SEQ ID NO: 1250026
uccuccauaggaaaggaau

SEQ ID NO: 1250028 - RNA, 19 nt, Artificial Sequence
  Description of Artificial Sequence: Synthetic oligonucleotide
  Sense strand starting at position 3227 of SEQ ID NO: 1241141
agggaauucugggugguca

SEQ ID NO: 1250029 - RNA, 19 nt, Artificial Sequence
  Description of Artificial Sequence: Synthetic oligonucleotide
  Antisense strand to SEQ ID NO: 1250028
ugaccacccagaauucccu

SEQ ID NO: 1250030 - RNA, 19 nt, Artificial Sequence
  Description of Artificial Sequence: Synthetic oligonucleotide
  Sense strand starting at position 3228 of SEQ ID NO: 1241141
gggaauucuggguggucag

SEQ ID NO: 1250031 - RNA, 19 nt, Artificial Sequence
  Description of Artificial Sequence: Synthetic oligonucleotide
  Antisense strand to SEQ ID NO: 1250030
cugaccacccagaauuccc

SEQ ID NO: 1250032 - RNA, 19 nt, Artificial Sequence
  Description of Artificial Sequence: Synthetic oligonucleotide
  Sense strand starting at position 3229 of SEQ ID NO: 1241141
ggaauucuggguggucaga

SEQ ID NO: 1250033 - RNA, 19 nt, Artificial Sequence
  Description of Artificial Sequence: Synthetic oligonucleotide
  Antisense strand to SEQ ID NO: 1250032
ucugaccacccagaauucc

SEQ ID NO: 1250034 - RNA, 19 nt, Artificial Sequence
  Description of Artificial Sequence: Synthetic oligonucleotide
  Sense strand starting at position 3274 of SEQ ID NO: 1241141
ugagcagagauucgaagaa

SEQ ID NO: 1250035 - RNA, 19 nt, Artificial Sequence
  Description of Artificial Sequence: Synthetic oligonucleotide
  Antisense strand to SEQ ID NO: 1250034
uucuucgaaucucugcuca

SEQ ID NO: 1250036 - RNA, 19 nt, Artificial Sequence
  Description of Artificial Sequence: Synthetic oligonucleotide
  Sense strand starting at position 3347 of SEQ ID NO: 1241141
ggaagugugcuugaguauu

SEQ ID NO: 1250037 - RNA, 19 nt, Artificial Sequence
  Description of Artificial Sequence: Synthetic oligonucleotide
  Antisense strand to SEQ ID NO: 1250036
aauacucaagcacacuucc

SEQ ID NO: 1250038 - RNA, 19 nt, Artificial Sequence
  Description of Artificial Sequence: Synthetic oligonucleotide
  Sense strand starting at position 3381 of SEQ ID NO: 1241141
gggccagguaguuggauau

SEQ ID NO: 1250039 - RNA, 19 nt, Artificial Sequence
  Description of Artificial Sequence: Synthetic oligonucleotide
  Antisense strand to SEQ ID NO: 1250038
auauccaacuaccuggccc

SEQ ID NO: 1250040 - RNA, 19 nt, Artificial Sequence
  Description of Artificial Sequence: Synthetic oligonucleotide
  Sense strand starting at position 3422 of SEQ ID NO: 1241141
cgaugaggucagugaggua

SEQ ID NO: 1250041 - RNA, 19 nt, Artificial Sequence
  Description of Artificial Sequence: Synthetic oligonucleotide
  Antisense strand to SEQ ID NO: 1250040
uaccucacugaccucaucg

SEQ ID NO: 1250042 - RNA, 19 nt, Artificial Sequence
  Description of Artificial Sequence: Synthetic oligonucleotide
  Sense strand starting at position 3609 of SEQ ID NO: 1241141
uucguuuacugauuuaucu

SEQ ID NO: 1250043 - RNA, 19 nt, Artificial Sequence
  Description of Artificial Sequence: Synthetic oligonucleotide
  Antisense strand to SEQ ID NO: 1250042
agauaaaucaguaaacgaa

SEQ ID NO: 1250044 - RNA, 19 nt, Artificial Sequence
  Description of Artificial Sequence: Synthetic oligonucleotide
  Sense strand starting at position 3634 of SEQ ID NO: 1241141
uguuucccucaauagaaug

SEQ ID NO: 1250045 - RNA, 19 nt, Artificial Sequence
  Description of Artificial Sequence: Synthetic oligonucleotide
  Antisense strand to SEQ ID NO: 1250044
cauucuauugagggaaaca

SEQ ID NO: 1250046 - RNA, 19 nt, Artificial Sequence
  Description of Artificial Sequence: Synthetic oligonucleotide
  Sense strand starting at position 3849 of SEQ ID NO: 1241141
gagucugugggucaucuga

SEQ ID NO: 1250047 - RNA, 19 nt, Artificial Sequence
  Description of Artificial Sequence: Synthetic oligonucleotide
  Antisense strand to SEQ ID NO: 1250046
ucagaugacccacagacuc

SEQ ID NO: 1250048 - RNA, 19 nt, Artificial Sequence
  Description of Artificial Sequence: Synthetic oligonucleotide
  Sense strand starting at position 3851 of SEQ ID NO: 1241141
gucugugggucaucugaaa

SEQ ID NO: 1250049 - RNA, 19 nt, Artificial Sequence
  Description of Artificial Sequence: Synthetic oligonucleotide
  Antisense strand to SEQ ID NO: 1250048
uuucagaugacccacagac

SEQ ID NO: 1250050 - RNA, 19 nt, Artificial Sequence
  Description of Artificial Sequence: Synthetic oligonucleotide
  Sense strand starting at position 3858 of SEQ ID NO: 1241141
ggucaucugaaagguucuu

SEQ ID NO: 1250051 - RNA, 19 nt, Artificial Sequence
  Description of Artificial Sequence: Synthetic oligonucleotide
  Antisense strand to SEQ ID NO: 1250050
aagaaccuuucagaugacc

SEQ ID NO: 1250052 - RNA, 19 nt, Artificial Sequence
  Description of Artificial Sequence: Synthetic oligonucleotide
  Sense strand starting at position 3935 of SEQ ID NO: 1241141
cugguagguuggcugauaa

SEQ ID NO: 1250053 - RNA, 19 nt, Artificial Sequence
  Description of Artificial Sequence: Synthetic oligonucleotide
  Antisense strand to SEQ ID NO: 1250052
uuaucagccaaccuaccag

SEQ ID NO: 1250054 - RNA, 19 nt, Artificial Sequence
  Description of Artificial Sequence: Synthetic oligonucleotide
  Sense strand starting at position 77 of SEQ ID NO: 1241142
cgacuucuuccucacugau

SEQ ID NO: 1250055 - RNA, 19 nt, Artificial Sequence
  Description of Artificial Sequence: Synthetic oligonucleotide
  Antisense strand to SEQ ID NO: 1250054
aucagugaggaagaagucg

SEQ ID NO: 1250056 - RNA, 19 nt, Artificial Sequence
  Description of Artificial Sequence: Synthetic oligonucleotide
  Sense strand starting at position 127 of SEQ ID NO: 1241142
agacgaguuagucaccaag

SEQ ID NO: 1250057 - RNA, 19 nt, Artificial Sequence
  Description of Artificial Sequence: Synthetic oligonucleotide
  Antisense strand to SEQ ID NO: 1250056
cuuggugacuaacucgucu

SEQ ID NO: 1250058 - RNA, 19 nt, Artificial Sequence
  Description of Artificial Sequence: Synthetic oligonucleotide
  Sense strand starting at position 129 of SEQ ID NO: 1241142
acgaguuagucaccaagaa

SEQ ID NO: 1250059 - RNA, 19 nt, Artificial Sequence
  Description of Artificial Sequence: Synthetic oligonucleotide
  Antisense strand to SEQ ID NO: 1250058
uucuuggugacuaacucgu

SEQ ID NO: 1250060 - RNA, 19 nt, Artificial Sequence
  Description of Artificial Sequence: Synthetic oligonucleotide
  Sense strand starting at position 130 of SEQ ID NO: 1241142
cgaguuagucaccaagaag

SEQ ID NO: 1250061 - RNA, 19 nt, Artificial Sequence
  Description of Artificial Sequence: Synthetic oligonucleotide
  Antisense strand to SEQ ID NO: 1250060
cuucuuggugacuaacucg

SEQ ID NO: 1250062 - RNA, 19 nt, Artificial Sequence
  Description of Artificial Sequence: Synthetic oligonucleotide
  Sense strand starting at position 340 of SEQ ID NO: 1241142
cccacucccgacugagaaa

SEQ ID NO: 1250063 - RNA, 19 nt, Artificial Sequence
  Description of Artificial Sequence: Synthetic oligonucleotide
  Antisense strand to SEQ ID NO: 1250062
uuucucagucgggaguggg

SEQ ID NO: 1250064 - RNA, 19 nt, Artificial Sequence
  Description of Artificial Sequence: Synthetic oligonucleotide
  Sense strand starting at position 854 of SEQ ID NO: 1241142
cggaagaucucguugguga

SEQ ID NO: 1250065 - RNA, 19 nt, Artificial Sequence
  Description of Artificial Sequence: Synthetic oligonucleotide
  Antisense strand to SEQ ID NO: 1250064
ucaccaacgagaucuuccg

SEQ ID NO: 1250066 - RNA, 19 nt, Artificial Sequence
  Description of Artificial Sequence: Synthetic oligonucleotide
  Sense strand starting at position 855 of SEQ ID NO: 1241142
ggaagaucucguuggugac

SEQ ID NO: 1250067 - RNA, 19 nt, Artificial Sequence
  Description of Artificial Sequence: Synthetic oligonucleotide
  Antisense strand to SEQ ID NO: 1250066
gucaccaacgagaucuucc

SEQ ID NO: 1250068 - RNA, 19 nt, Artificial Sequence
  Description of Artificial Sequence: Synthetic oligonucleotide
  Sense strand starting at position 856 of SEQ ID NO: 1241142
gaagaucucguuggugacu

SEQ ID NO: 1250069 - RNA, 19 nt, Artificial Sequence
  Description of Artificial Sequence: Synthetic oligonucleotide
  Antisense strand to SEQ ID NO: 1250068
agucaccaacgagaucuuc

SEQ ID NO: 1250070 - RNA, 19 nt, Artificial Sequence
  Description of Artificial Sequence: Synthetic oligonucleotide
  Sense strand starting at position 859 of SEQ ID NO: 1241142
gaucucguuggugacuuua

SEQ ID NO: 1250071 - RNA, 19 nt, Artificial Sequence
  Description of Artificial Sequence: Synthetic oligonucleotide
  Antisense strand to SEQ ID NO: 1250070
uaaagucaccaacgagauc

SEQ ID NO: 1250072 - RNA, 19 nt, Artificial Sequence
  Description of Artificial Sequence: Synthetic oligonucleotide
  Sense strand starting at position 1683 of SEQ ID NO: 1241142
ggaaguuucugaucuacuu

SEQ ID NO: 1250073 - RNA, 19 nt, Artificial Sequence
  Description of Artificial Sequence: Synthetic oligonucleotide
  Antisense strand to SEQ ID NO: 1250072
aaguagaucagaaacuucc

SEQ ID NO: 1250074 - RNA, 19 nt, Artificial Sequence
  Description of Artificial Sequence: Synthetic oligonucleotide
  Sense strand starting at position 1697 of SEQ ID NO: 1241142
uacuuucggcucugaagga

SEQ ID NO: 1250075 - RNA, 19 nt, Artificial Sequence
  Description of Artificial Sequence: Synthetic oligonucleotide
  Antisense strand to SEQ ID NO: 1250074
uccuucagagccgaaagua

SEQ ID NO: 1250076 - RNA, 19 nt, Artificial Sequence
  Description of Artificial Sequence: Synthetic oligonucleotide
  Sense strand starting at position 1760 of SEQ ID NO: 1241142
uuuauuggcuacucgauga

SEQ ID NO: 1250077 - RNA, 19 nt, Artificial Sequence
  Description of Artificial Sequence: Synthetic oligonucleotide
  Antisense strand to SEQ ID NO: 1250076
ucaucgaguagccaauaaa

SEQ ID NO: 1250078 - RNA, 19 nt, Artificial Sequence
  Description of Artificial Sequence: Synthetic oligonucleotide
  Sense strand starting at position 1764 of SEQ ID NO: 1241142
uuggcuacucgaugacuuu

SEQ ID NO: 1250079 - RNA, 19 nt, Artificial Sequence
  Description of Artificial Sequence: Synthetic oligonucleotide
  Antisense strand to SEQ ID NO: 1250078
aaagucaucgaguagccaa

SEQ ID NO: 1250080 - RNA, 19 nt, Artificial Sequence
  Description of Artificial Sequence: Synthetic oligonucleotide
  Sense strand starting at position 1784 of SEQ ID NO: 1241142
acagccugucacugauaca

SEQ ID NO: 1250081 - RNA, 19 nt, Artificial Sequence
  Description of Artificial Sequence: Synthetic oligonucleotide
  Antisense strand to SEQ ID NO: 1250080
uguaucagugacaggcugu

SEQ ID NO: 1250082 - RNA, 19 nt, Artificial Sequence
  Description of Artificial Sequence: Synthetic oligonucleotide
  Sense strand starting at position 1877 of SEQ ID NO: 1241142
auccuccauguuugagauu

SEQ ID NO: 1250083 - RNA, 19 nt, Artificial Sequence
  Description of Artificial Sequence: Synthetic oligonucleotide
  Antisense strand to SEQ ID NO: 1250082
aaucucaaacauggaggau

SEQ ID NO: 1250084 - RNA, 19 nt, Artificial Sequence
  Description of Artificial Sequence: Synthetic oligonucleotide
  Sense strand starting at position 2001 of SEQ ID NO: 1241142
ggauuccaauuacgauuua

SEQ ID NO: 1250085 - RNA, 19 nt, Artificial Sequence
  Description of Artificial Sequence: Synthetic oligonucleotide
  Antisense strand to SEQ ID NO: 1250084
uaaaucguaauuggaaucc

SEQ ID NO: 1250086 - RNA, 19 nt, Artificial Sequence
  Description of Artificial Sequence: Synthetic oligonucleotide
  Sense strand starting at position 2184 of SEQ ID NO: 1241142
uuaagagauuuagaaagca

SEQ ID NO: 1250087 - RNA, 19 nt, Artificial Sequence
  Description of Artificial Sequence: Synthetic oligonucleotide
  Antisense strand to SEQ ID NO: 1250086
ugcuuucuaaaucucuuaa

SEQ ID NO: 1250088 - RNA, 19 nt, Artificial Sequence
  Description of Artificial Sequence: Synthetic oligonucleotide
  Sense strand starting at position 2446 of SEQ ID NO: 1241142
acaugugaccuuggaauuc

SEQ ID NO: 1250089 - RNA, 19 nt, Artificial Sequence
  Description of Artificial Sequence: Synthetic oligonucleotide
  Antisense strand to SEQ ID NO: 1250088
gaauuccaaggucacaugu

SEQ ID NO: 1250090 - RNA, 19 nt, Artificial Sequence
  Description of Artificial Sequence: Synthetic oligonucleotide
  Sense strand starting at position 2594 of SEQ ID NO: 1241142
uaggaaugguuauucgaca

SEQ ID NO: 1250091 - RNA, 19 nt, Artificial Sequence
  Description of Artificial Sequence: Synthetic oligonucleotide
  Antisense strand to SEQ ID NO: 1250090
ugucgaauaaccauuccua

SEQ ID NO: 1250092 - RNA, 19 nt, Artificial Sequence
  Description of Artificial Sequence: Synthetic oligonucleotide
  Sense strand starting at position 2595 of SEQ ID NO: 1241142
aggaaugguuauucgacaa

SEQ ID NO: 1250093 - RNA, 19 nt, Artificial Sequence
  Description of Artificial Sequence: Synthetic oligonucleotide
  Antisense strand to SEQ ID NO: 1250092
uugucgaauaaccauuccu

SEQ ID NO: 1250094 - RNA, 19 nt, Artificial Sequence
  Description of Artificial Sequence: Synthetic oligonucleotide
  Sense strand starting at position 2628 of SEQ ID NO: 1241142
uuaccaauacugcgaaaug

SEQ ID NO: 1250095 - RNA, 19 nt, Artificial Sequence
  Description of Artificial Sequence: Synthetic oligonucleotide
  Antisense strand to SEQ ID NO: 1250094
cauuucgcaguauugguaa

SEQ ID NO: 1250096 - RNA, 19 nt, Artificial Sequence
  Description of Artificial Sequence: Synthetic oligonucleotide
  Sense strand starting at position 2639 of SEQ ID NO: 1241142
gcgaaaugauaauuacaga

SEQ ID NO: 1250097 - RNA, 19 nt, Artificial Sequence
  Description of Artificial Sequence: Synthetic oligonucleotide
  Antisense strand to SEQ ID NO: 1250096
ucuguaauuaucauuucgc

SEQ ID NO: 1250098 - RNA, 19 nt, Artificial Sequence
  Description of Artificial Sequence: Synthetic oligonucleotide
  Sense strand starting at position 2798 of SEQ ID NO: 1241142
acauuugugaaaggcguua

SEQ ID NO: 1250099 - RNA, 19 nt, Artificial Sequence
  Description of Artificial Sequence: Synthetic oligonucleotide
  Antisense strand to SEQ ID NO: 1250098
uaacgccuuucacaaaugu

SEQ ID NO: 1250100 - RNA, 19 nt, Artificial Sequence
  Description of Artificial Sequence: Synthetic oligonucleotide
  Sense strand starting at position 2800 of SEQ ID NO: 1241142
auuugugaaaggcguuauu

SEQ ID NO: 1250101 - RNA, 19 nt, Artificial Sequence
  Description of Artificial Sequence: Synthetic oligonucleotide
  Antisense strand to SEQ ID NO: 1250100
aauaacgccuuucacaaau

SEQ ID NO: 1250102 - RNA, 19 nt, Artificial Sequence
  Description of Artificial Sequence: Synthetic oligonucleotide
  Sense strand starting at position 2803 of SEQ ID NO: 1241142
ugugaaaggcguuauucuu

SEQ ID NO: 1250103 - RNA, 19 nt, Artificial Sequence
  Description of Artificial Sequence: Synthetic oligonucleotide
  Antisense strand to SEQ ID NO: 1250102
aagaauaacgccuuucaca

SEQ ID NO: 1250104 - RNA, 19 nt, Artificial Sequence
  Description of Artificial Sequence: Synthetic oligonucleotide
  Sense strand starting at position 2848 of SEQ ID NO: 1241142
augaaugcaccuuacugua

SEQ ID NO: 1250105 - RNA, 19 nt, Artificial Sequence
  Description of Artificial Sequence: Synthetic oligonucleotide
  Antisense strand to SEQ ID NO: 1250104
uacaguaaggugcauucau

SEQ ID NO: 1250106 - RNA, 19 nt, Artificial Sequence
  Description of Artificial Sequence: Synthetic oligonucleotide
  Sense strand starting at position 2872 of SEQ ID NO: 1241142
gucacagaaguuuggaaau

SEQ ID NO: 1250107 - RNA, 19 nt, Artificial Sequence
  Description of Artificial Sequence: Synthetic oligonucleotide
  Antisense strand to SEQ ID NO: 1250106
auuuccaaacuucugugac

SEQ ID NO: 1250108 - RNA, 19 nt, Artificial Sequence
  Description of Artificial Sequence: Synthetic oligonucleotide
  Sense strand starting at position 2897 of SEQ ID NO: 1241142
guaaguaguaaguauauac

SEQ ID NO: 1250109 - RNA, 19 nt, Artificial Sequence
  Description of Artificial Sequence: Synthetic oligonucleotide
  Antisense strand to SEQ ID NO: 1250108
guauauacuuacuacuuac

SEQ ID NO: 1250110 - RNA, 19 nt, Artificial Sequence
  Description of Artificial Sequence: Synthetic oligonucleotide
  Sense strand starting at position 2914 of SEQ ID NO: 1241142
acuuuaguaucgguuaacu

SEQ ID NO: 1250111 - RNA, 19 nt, Artificial Sequence
  Description of Artificial Sequence: Synthetic oligonucleotide
  Antisense strand to SEQ ID NO: 1250110
aguuaaccgauacuaaagu

SEQ ID NO: 1250112 - RNA, 19 nt, Artificial Sequence
  Description of Artificial Sequence: Synthetic oligonucleotide
  Sense strand starting at position 2916 of SEQ ID NO: 1241142
uuuaguaucgguuaacucu

SEQ ID NO: 1250113 - RNA, 19 nt, Artificial Sequence
  Description of Artificial Sequence: Synthetic oligonucleotide
  Antisense strand to SEQ ID NO: 1250112
agaguuaaccgauacuaaa

SEQ ID NO: 1250114 - RNA, 19 nt, Artificial Sequence
  Description of Artificial Sequence: Synthetic oligonucleotide
  Sense strand starting at position 3286 of SEQ ID NO: 1241142
cuaguauacugagugacaa

SEQ ID NO: 1250115 - RNA, 19 nt, Artificial Sequence
  Description of Artificial Sequence: Synthetic oligonucleotide
  Antisense strand to SEQ ID NO: 1250114
uugucacucaguauacuag

SEQ ID NO: 1250116 - RNA, 19 nt, Artificial Sequence
  Description of Artificial Sequence: Synthetic oligonucleotide
  Sense strand starting at position 3287 of SEQ ID NO: 1241142
uaguauacugagugacaag

SEQ ID NO: 1250117 - RNA, 19 nt, Artificial Sequence
  Description of Artificial Sequence: Synthetic oligonucleotide
  Antisense strand to SEQ ID NO: 1250116
cuugucacucaguauacua

SEQ ID NO: 1250118 - RNA, 19 nt, Artificial Sequence
  Description of Artificial Sequence: Synthetic oligonucleotide
  Sense strand starting at position 3288 of SEQ ID NO: 1241142
aguauacugagugacaagu

SEQ ID NO: 1250119 - RNA, 19 nt, Artificial Sequence
  Description of Artificial Sequence: Synthetic oligonucleotide
  Antisense strand to SEQ ID NO: 1250118
acuugucacucaguauacu

SEQ ID NO: 1250120 - RNA, 19 nt, Artificial Sequence
  Description of Artificial Sequence: Synthetic oligonucleotide
  Sense strand starting at position 3305 of SEQ ID NO: 1241142
guuagaauucccugccuag

SEQ ID NO: 1250121 - RNA, 19 nt, Artificial Sequence
  Description of Artificial Sequence: Synthetic oligonucleotide
  Antisense strand to SEQ ID NO: 1250120
cuaggcagggaauucuaac

SEQ ID NO: 1250122 - RNA, 19 nt, Artificial Sequence
  Description of Artificial Sequence: Synthetic oligonucleotide
  Sense strand starting at position 3308 of SEQ ID NO: 1241142
agaauucccugccuagaaa

SEQ ID NO: 1250123 - RNA, 19 nt, Artificial Sequence
  Description of Artificial Sequence: Synthetic oligonucleotide
  Antisense strand to SEQ ID NO: 1250122
uuucuaggcagggaauucu

SEQ ID NO: 1250124 - RNA, 19 nt, Artificial Sequence
  Description of Artificial Sequence: Synthetic oligonucleotide
  Sense strand starting at position 3529 of SEQ ID NO: 1241142
ggagguuguccugagccga

SEQ ID NO: 1250125 - RNA, 19 nt, Artificial Sequence
  Description of Artificial Sequence: Synthetic oligonucleotide
  Antisense strand to SEQ ID NO: 1250124
ucggcucaggacaaccucc

SEQ ID NO: 1250126 - RNA, 19 nt, Artificial Sequence
  Description of Artificial Sequence: Synthetic oligonucleotide
  Sense strand starting at position 3632 of SEQ ID NO: 1241142
auugaucuaccaggugaaa

SEQ ID NO: 1250127 - RNA, 19 nt, Artificial Sequence
  Description of Artificial Sequence: Synthetic oligonucleotide
  Antisense strand to SEQ ID NO: 1250126
uuucaccugguagaucaau

SEQ ID NO: 1250128 - RNA, 19 nt, Artificial Sequence
  Description of Artificial Sequence: Synthetic oligonucleotide
  Sense strand starting at position 3777 of SEQ ID NO: 1241142
auucuuucugaauacguca

SEQ ID NO: 1250129 - RNA, 19 nt, Artificial Sequence
  Description of Artificial Sequence: Synthetic oligonucleotide
  Antisense strand to SEQ ID NO: 1250128
ugacguauucagaaagaau

SEQ ID NO: 1250130 - RNA, 19 nt, Artificial Sequence
  Description of Artificial Sequence: Synthetic oligonucleotide
  Sense strand starting at position 3780 of SEQ ID NO: 1241142
cuuucugaauacgucagua

SEQ ID NO: 1250131 - RNA, 19 nt, Artificial Sequence
  Description of Artificial Sequence: Synthetic oligonucleotide
  Antisense strand to SEQ ID NO: 1250130
uacugacguauucagaaag

SEQ ID NO: 1250132 - RNA, 19 nt, Artificial Sequence
  Description of Artificial Sequence: Synthetic oligonucleotide
  Sense strand starting at position 3782 of SEQ ID NO: 1241142
uucugaauacgucaguauu

SEQ ID NO: 1250133 - RNA, 19 nt, Artificial Sequence
  Description of Artificial Sequence: Synthetic oligonucleotide
  Antisense strand to SEQ ID NO: 1250132
aauacugacguauucagaa

SEQ ID NO: 1250134 - RNA, 19 nt, Artificial Sequence
  Description of Artificial Sequence: Synthetic oligonucleotide
  Sense strand starting at position 92 of SEQ ID NO: 1241143
gcggauugcaagcauauaa

SEQ ID NO: 1250135 - RNA, 19 nt, Artificial Sequence
  Description of Artificial Sequence: Synthetic oligonucleotide
  Antisense strand to SEQ ID NO: 1250134
uuauaugcuugcaauccgc

SEQ ID NO: 1250136 - RNA, 19 nt, Artificial Sequence
  Description of Artificial Sequence: Synthetic oligonucleotide
  Sense strand starting at position 459 of SEQ ID NO: 1241143
ccagccacaugcuugaaau

SEQ ID NO: 1250137 - RNA, 19 nt, Artificial Sequence
  Description of Artificial Sequence: Synthetic oligonucleotide
  Antisense strand to SEQ ID NO: 1250136
auuucaagcauguggcugg

SEQ ID NO: 1250138 - RNA, 19 nt, Artificial Sequence
  Description of Artificial Sequence: Synthetic oligonucleotide
  Sense strand starting at position 469 of SEQ ID NO: 1241143
gcuugaaaucgacacgauu

SEQ ID NO: 1250139 - RNA, 19 nt, Artificial Sequence
  Description of Artificial Sequence: Synthetic oligonucleotide
  Antisense strand to SEQ ID NO: 1250138
aaucgugucgauuucaagc

SEQ ID NO: 1250140 - RNA, 19 nt, Artificial Sequence
  Description of Artificial Sequence: Synthetic oligonucleotide
  Sense strand starting at position 482 of SEQ ID NO: 1241143
acgauuucagccgguggau

SEQ ID NO: 1250141 - RNA, 19 nt, Artificial Sequence
  Description of Artificial Sequence: Synthetic oligonucleotide
  Antisense strand to SEQ ID NO: 1250140
auccaccggcugaaaucgu

SEQ ID NO: 1250142 - RNA, 19 nt, Artificial Sequence
  Description of Artificial Sequence: Synthetic oligonucleotide
  Sense strand starting at position 506 of SEQ ID NO: 1241143
cugcgaccugccuuguuua

SEQ ID NO: 1250143 - RNA, 19 nt, Artificial Sequence
  Description of Artificial Sequence: Synthetic oligonucleotide
  Antisense strand to SEQ ID NO: 1250142
uaaacaaggcaggucgcag

SEQ ID NO: 1250144 - RNA, 19 nt, Artificial Sequence
  Description of Artificial Sequence: Synthetic oligonucleotide
  Sense strand starting at position 507 of SEQ ID NO: 1241143
ugcgaccugccuuguuuau

SEQ ID NO: 1250145 - RNA, 19 nt, Artificial Sequence
  Description of Artificial Sequence: Synthetic oligonucleotide
  Antisense strand to SEQ ID NO: 1250144
auaaacaaggcaggucgca

SEQ ID NO: 1250146 - RNA, 19 nt, Artificial Sequence
  Description of Artificial Sequence: Synthetic oligonucleotide
  Sense strand starting at position 508 of SEQ ID NO: 1241143
gcgaccugccuuguuuauu

SEQ ID NO: 1250147 - RNA, 19 nt, Artificial Sequence
  Description of Artificial Sequence: Synthetic oligonucleotide
  Antisense strand to SEQ ID NO: 1250146
aauaaacaaggcaggucgc

SEQ ID NO: 1250148 - RNA, 19 nt, Artificial Sequence
  Description of Artificial Sequence: Synthetic oligonucleotide
  Sense strand starting at position 509 of SEQ ID NO: 1241143
cgaccugccuuguuuauuu

SEQ ID NO: 1250149 - RNA, 19 nt, Artificial Sequence
  Description of Artificial Sequence: Synthetic oligonucleotide
  Antisense strand to SEQ ID NO: 1250148
aaauaaacaaggcaggucg

SEQ ID NO: 1250150 - RNA, 19 nt, Artificial Sequence
  Description of Artificial Sequence: Synthetic oligonucleotide
  Sense strand starting at position 513 of SEQ ID NO: 1241143
cugccuuguuuauuuagau

SEQ ID NO: 1250151 - RNA, 19 nt, Artificial Sequence
  Description of Artificial Sequence: Synthetic oligonucleotide
  Antisense strand to SEQ ID NO: 1250150
aucuaaauaaacaaggcag

SEQ ID NO: 1250152 - RNA, 19 nt, Artificial Sequence
  Description of Artificial Sequence: Synthetic oligonucleotide
  Sense strand starting at position 514 of SEQ ID NO: 1241143
ugccuuguuuauuuagaua

SEQ ID NO: 1250153 - RNA, 19 nt, Artificial Sequence
  Description of Artificial Sequence: Synthetic oligonucleotide
  Antisense strand to SEQ ID NO: 1250152
uaucuaaauaaacaaggca

SEQ ID NO: 1250154 - RNA, 19 nt, Artificial Sequence
  Description of Artificial Sequence: Synthetic oligonucleotide
  Sense strand starting at position 517 of SEQ ID NO: 1241143
cuuguuuauuuagauagga

SEQ ID NO: 1250155 - RNA, 19 nt, Artificial Sequence
  Description of Artificial Sequence: Synthetic oligonucleotide
  Antisense strand to SEQ ID NO: 1250154
uccuaucuaaauaaacaag

SEQ ID NO: 1250156 - RNA, 19 nt, Artificial Sequence
  Description of Artificial Sequence: Synthetic oligonucleotide
  Sense strand starting at position 538 of SEQ ID NO: 1241143
gaugaaagauacugagaua

SEQ ID NO: 1250157 - RNA, 19 nt, Artificial Sequence
  Description of Artificial Sequence: Synthetic oligonucleotide
  Antisense strand to SEQ ID NO: 1250156
uaucucaguaucuuucauc

SEQ ID NO: 1250158 - RNA, 19 nt, Artificial Sequence
  Description of Artificial Sequence: Synthetic oligonucleotide
  Sense strand starting at position 730 of SEQ ID NO: 1241143
acaagaucaucccaggaga

SEQ ID NO: 1250159 - RNA, 19 nt, Artificial Sequence
  Description of Artificial Sequence: Synthetic oligonucleotide
  Antisense strand to SEQ ID NO: 1250158
ucuccugggaugaucuugu

SEQ ID NO: 1250160 - RNA, 19 nt, Artificial Sequence
  Description of Artificial Sequence: Synthetic oligonucleotide
  Sense strand starting at position 1918 of SEQ ID NO: 1241143
uugcaaaugucuucuugaa

SEQ ID NO: 1250161 - RNA, 19 nt, Artificial Sequence
  Description of Artificial Sequence: Synthetic oligonucleotide
  Antisense strand to SEQ ID NO: 1250160
uucaagaagacauuugcaa

SEQ ID NO: 1250162 - RNA, 19 nt, Artificial Sequence
  Description of Artificial Sequence: Synthetic oligonucleotide
  Sense strand starting at position 1920 of SEQ ID NO: 1241143
gcaaaugucuucuugaacu

SEQ ID NO: 1250163 - RNA, 19 nt, Artificial Sequence
  Description of Artificial Sequence: Synthetic oligonucleotide
  Antisense strand to SEQ ID NO: 1250162
aguucaagaagacauuugc

SEQ ID NO: 1250164 - RNA, 19 nt, Artificial Sequence
  Description of Artificial Sequence: Synthetic oligonucleotide
  Sense strand starting at position 2420 of SEQ ID NO: 1241143
uauagauugcaacgugaag

SEQ ID NO: 1250165 - RNA, 19 nt, Artificial Sequence
  Description of Artificial Sequence: Synthetic oligonucleotide
  Antisense strand to SEQ ID NO: 1250164
cuucacguugcaaucuaua

SEQ ID NO: 1250166 - RNA, 19 nt, Artificial Sequence
  Description of Artificial Sequence: Synthetic oligonucleotide
  Sense strand starting at position 2491 of SEQ ID NO: 1241143
gccucuguacaaugggaua

SEQ ID NO: 1250167 - RNA, 19 nt, Artificial Sequence
  Description of Artificial Sequence: Synthetic oligonucleotide
  Antisense strand to SEQ ID NO: 1250166
uaucccauuguacagaggc

SEQ ID NO: 1250168 - RNA, 19 nt, Artificial Sequence
  Description of Artificial Sequence: Synthetic oligonucleotide
  Sense strand starting at position 2525 of SEQ ID NO: 1241143
ugcggacgugacguuuaau

SEQ ID NO: 1250169 - RNA, 19 nt, Artificial Sequence
  Description of Artificial Sequence: Synthetic oligonucleotide
  Antisense strand to SEQ ID NO: 1250168
auuaaacgucacguccgca

SEQ ID NO: 1250170 - RNA, 19 nt, Artificial Sequence
  Description of Artificial Sequence: Synthetic oligonucleotide
  Sense strand starting at position 2526 of SEQ ID NO: 1241143
gcggacgugacguuuaauc

SEQ ID NO: 1250171 - RNA, 19 nt, Artificial Sequence
  Description of Artificial Sequence: Synthetic oligonucleotide
  Antisense strand to SEQ ID NO: 1250170
gauuaaacgucacguccgc

SEQ ID NO: 1250172 - RNA, 19 nt, Artificial Sequence
  Description of Artificial Sequence: Synthetic oligonucleotide
  Sense strand starting at position 2528 of SEQ ID NO: 1241143
ggacgugacguuuaaucug

SEQ ID NO: 1250173 - RNA, 19 nt, Artificial Sequence
  Description of Artificial Sequence: Synthetic oligonucleotide
  Antisense strand to SEQ ID NO: 1250172
cagauuaaacgucacgucc

SEQ ID NO: 1250174 - RNA, 19 nt, Artificial Sequence
  Description of Artificial Sequence: Synthetic oligonucleotide
  Sense strand starting at position 2535 of SEQ ID NO: 1241143
acguuuaaucugcacuaga

SEQ ID NO: 1250175 - RNA, 19 nt, Artificial Sequence
  Description of Artificial Sequence: Synthetic oligonucleotide
  Antisense strand to SEQ ID NO: 1250174
ucuagugcagauuaaacgu

SEQ ID NO: 1250176 - RNA, 19 nt, Artificial Sequence
  Description of Artificial Sequence: Synthetic oligonucleotide
  Sense strand starting at position 2605 of SEQ ID NO: 1241143
uuaacauuguacccuguaa

SEQ ID NO: 1250177 - RNA, 19 nt, Artificial Sequence
  Description of Artificial Sequence: Synthetic oligonucleotide
  Antisense strand to SEQ ID NO: 1250176
uuacaggguacaauguuaa

SEQ ID NO: 1250178 - RNA, 19 nt, Artificial Sequence
  Description of Artificial Sequence: Synthetic oligonucleotide
  Sense strand starting at position 2609 of SEQ ID NO: 1241143
cauuguacccuguaagaga

SEQ ID NO: 1250179 - RNA, 19 nt, Artificial Sequence
  Description of Artificial Sequence: Synthetic oligonucleotide
  Antisense strand to SEQ ID NO: 1250178
ucucuuacaggguacaaug

SEQ ID NO: 1250180 - RNA, 19 nt, Artificial Sequence
  Description of Artificial Sequence: Synthetic oligonucleotide
  Sense strand starting at position 2893 of SEQ ID NO: 1241143
ggugcugugugagugaacu

SEQ ID NO: 1250181 - RNA, 19 nt, Artificial Sequence
  Description of Artificial Sequence: Synthetic oligonucleotide
  Antisense strand to SEQ ID NO: 1250180
aguucacucacacagcacc

SEQ ID NO: 1250182 - RNA, 19 nt, Artificial Sequence
  Description of Artificial Sequence: Synthetic oligonucleotide
  Sense strand starting at position 2895 of SEQ ID NO: 1241143
ugcugugugagugaacuaa

SEQ ID NO: 1250183 - RNA, 19 nt, Artificial Sequence
  Description of Artificial Sequence: Synthetic oligonucleotide
  Antisense strand to SEQ ID NO: 1250182
uuaguucacucacacagca

SEQ ID NO: 1250184 - RNA, 19 nt, Artificial Sequence
  Description of Artificial Sequence: Synthetic oligonucleotide
  Sense strand starting at position 2899 of SEQ ID NO: 1241143
gugugagugaacuaaauug

SEQ ID NO: 1250185 - RNA, 19 nt, Artificial Sequence
  Description of Artificial Sequence: Synthetic oligonucleotide
  Antisense strand to SEQ ID NO: 1250184
caauuuaguucacucacac

SEQ ID NO: 1250186 - RNA, 19 nt, Artificial Sequence
  Description of Artificial Sequence: Synthetic oligonucleotide
  Sense strand starting at position 3025 of SEQ ID NO: 1241143
caguaagaaucgcuucguu

SEQ ID NO: 1250187 - RNA, 19 nt, Artificial Sequence
  Description of Artificial Sequence: Synthetic oligonucleotide
  Antisense strand to SEQ ID NO: 1250186
aacgaagcgauucuuacug

SEQ ID NO: 1250188 - RNA, 19 nt, Artificial Sequence
  Description of Artificial Sequence: Synthetic oligonucleotide
  Sense strand starting at position 3027 of SEQ ID NO: 1241143
guaagaaucgcuucguuuc

SEQ ID NO: 1250189 - RNA, 19 nt, Artificial Sequence
  Description of Artificial Sequence: Synthetic oligonucleotide
  Antisense strand to SEQ ID NO: 1250188
gaaacgaagcgauucuuac

SEQ ID NO: 1250190 - RNA, 19 nt, Artificial Sequence
  Description of Artificial Sequence: Synthetic oligonucleotide
  Sense strand starting at position 3035 of SEQ ID NO: 1241143
cgcuucguuucccuggaaa

SEQ ID NO: 1250191 - RNA, 19 nt, Artificial Sequence
  Description of Artificial Sequence: Synthetic oligonucleotide
  Antisense strand to SEQ ID NO: 1250190
uuuccagggaaacgaagcg

SEQ ID NO: 1250192 - RNA, 19 nt, Artificial Sequence
  Description of Artificial Sequence: Synthetic oligonucleotide
  Sense strand starting at position 3234 of SEQ ID NO: 1241143
gugagaaguguuugagacc

SEQ ID NO: 1250193 - RNA, 19 nt, Artificial Sequence
  Description of Artificial Sequence: Synthetic oligonucleotide
  Antisense strand to SEQ ID NO: 1250192
ggucucaaacacuucucac

SEQ ID NO: 1250194 - RNA, 19 nt, Artificial Sequence
  Description of Artificial Sequence: Synthetic oligonucleotide
  Sense strand starting at position 3235 of SEQ ID NO: 1241143
ugagaaguguuugagaccu

SEQ ID NO: 1250195 - RNA, 19 nt, Artificial Sequence
  Description of Artificial Sequence: Synthetic oligonucleotide
  Antisense strand to SEQ ID NO: 1250194
aggucucaaacacuucuca

SEQ ID NO: 1250196 - RNA, 19 nt, Artificial Sequence
  Description of Artificial Sequence: Synthetic oligonucleotide
  Sense strand starting at position 3444 of SEQ ID NO: 1241143
uggccaaaucuccgcagau

SEQ ID NO: 1250197 - RNA, 19 nt, Artificial Sequence
  Description of Artificial Sequence: Synthetic oligonucleotide
  Antisense strand to SEQ ID NO: 1250196
aucugcggagauuuggcca

SEQ ID NO: 1250198 - RNA, 19 nt, Artificial Sequence
  Description of Artificial Sequence: Synthetic oligonucleotide
  Sense strand starting at position 3445 of SEQ ID NO: 1241143
ggccaaaucuccgcagaua

SEQ ID NO: 1250199 - RNA, 19 nt, Artificial Sequence
  Description of Artificial Sequence: Synthetic oligonucleotide
  Antisense strand to SEQ ID NO: 1250198
uaucugcggagauuuggcc

SEQ ID NO: 1250200 - RNA, 19 nt, Artificial Sequence
  Description of Artificial Sequence: Synthetic oligonucleotide
  Sense strand starting at position 3446 of SEQ ID NO: 1241143
gccaaaucuccgcagauac

SEQ ID NO: 1250201 - RNA, 19 nt, Artificial Sequence
  Description of Artificial Sequence: Synthetic oligonucleotide
  Antisense strand to SEQ ID NO: 1250200
guaucugcggagauuuggc

SEQ ID NO: 1250202 - RNA, 19 nt, Artificial Sequence
  Description of Artificial Sequence: Synthetic oligonucleotide
  Sense strand starting at position 3555 of SEQ ID NO: 1241143
cuuggaaaugccugucaga

SEQ ID NO: 1250203 - RNA, 19 nt, Artificial Sequence
  Description of Artificial Sequence: Synthetic oligonucleotide
  Antisense strand to SEQ ID NO: 1250202
ucugacaggcauuuccaag

SEQ ID NO: 1250204 - RNA, 19 nt, Artificial Sequence
  Description of Artificial Sequence: Synthetic oligonucleotide
  Sense strand starting at position 3558 of SEQ ID NO: 1241143
ggaaaugccugucagacug

SEQ ID NO: 1250205 - RNA, 19 nt, Artificial Sequence
  Description of Artificial Sequence: Synthetic oligonucleotide
  Antisense strand to SEQ ID NO: 1250204
cagucugacaggcauuucc

SEQ ID NO: 1250206 - RNA, 19 nt, Artificial Sequence
  Description of Artificial Sequence: Synthetic oligonucleotide
  Sense strand starting at position 3590 of SEQ ID NO: 1241143
ugccuugucagccguuuga

SEQ ID NO: 1250207 - RNA, 19 nt, Artificial Sequence
  Description of Artificial Sequence: Synthetic oligonucleotide
  Antisense strand to SEQ ID NO: 1250206
ucaaacggcugacaaggca

SEQ ID NO: 1250208 - RNA, 19 nt, Artificial Sequence
  Description of Artificial Sequence: Synthetic oligonucleotide
  Sense strand starting at position 3592 of SEQ ID NO: 1241143
ccuugucagccguuugauc

SEQ ID NO: 1250209 - RNA, 19 nt, Artificial Sequence
  Description of Artificial Sequence: Synthetic oligonucleotide
  Antisense strand to SEQ ID NO: 1250208
gaucaaacggcugacaagg

SEQ ID NO: 1250210 - RNA, 19 nt, Artificial Sequence
  Description of Artificial Sequence: Synthetic oligonucleotide
  Sense strand starting at position 3708 of SEQ ID NO: 1241143
guggccaacuuugucaauu

SEQ ID NO: 1250211 - RNA, 19 nt, Artificial Sequence
  Description of Artificial Sequence: Synthetic oligonucleotide
  Antisense strand to SEQ ID NO: 1250210
aauugacaaaguuggccac

SEQ ID NO: 1250212 - RNA, 19 nt, Artificial Sequence
  Description of Artificial Sequence: Synthetic oligonucleotide
  Sense strand starting at position 3709 of SEQ ID NO: 1241143
uggccaacuuugucaauuu

SEQ ID NO: 1250213 - RNA, 19 nt, Artificial Sequence
  Description of Artificial Sequence: Synthetic oligonucleotide
  Antisense strand to SEQ ID NO: 1250212
aaauugacaaaguuggcca

SEQ ID NO: 1250214 - RNA, 19 nt, Artificial Sequence
  Description of Artificial Sequence: Synthetic oligonucleotide
  Sense strand starting at position 276 of SEQ ID NO: 1241144
ccauccuuuccuuggcgaa

SEQ ID NO: 1250215 - RNA, 19 nt, Artificial Sequence
  Description of Artificial Sequence: Synthetic oligonucleotide
  Antisense strand to SEQ ID NO: 1250214
uucgccaaggaaaggaugg

SEQ ID NO: 1250216 - RNA, 19 nt, Artificial Sequence
  Description of Artificial Sequence: Synthetic oligonucleotide
  Sense strand starting at position 613 of SEQ ID NO: 1241144
accagcuuugcagaaggau

SEQ ID NO: 1250217 - RNA, 19 nt, Artificial Sequence
  Description of Artificial Sequence: Synthetic oligonucleotide
  Antisense strand to SEQ ID NO: 1250216
auccuucugcaaagcuggu

SEQ ID NO: 1250218 - RNA, 19 nt, Artificial Sequence
  Description of Artificial Sequence: Synthetic oligonucleotide
  Sense strand starting at position 646 of SEQ ID NO: 1241144
uugagaagcuucuuaccca

SEQ ID NO: 1250219 - RNA, 19 nt, Artificial Sequence
  Description of Artificial Sequence: Synthetic oligonucleotide
  Antisense strand to SEQ ID NO: 1250218
uggguaagaagcuucucaa

SEQ ID NO: 1250220 - RNA, 19 nt, Artificial Sequence
  Description of Artificial Sequence: Synthetic oligonucleotide
  Sense strand starting at position 1117 of SEQ ID NO: 1241144
augaaagacuggcaugaau

SEQ ID NO: 1250221 - RNA, 19 nt, Artificial Sequence
  Description of Artificial Sequence: Synthetic oligonucleotide
  Antisense strand to SEQ ID NO: 1250220
auucaugccagucuuucau

SEQ ID NO: 1250222 - RNA, 19 nt, Artificial Sequence
  Description of Artificial Sequence: Synthetic oligonucleotide
  Sense strand starting at position 1159 of SEQ ID NO: 1241144
gcacuucugguuugaccaa

SEQ ID NO: 1250223 - RNA, 19 nt, Artificial Sequence
  Description of Artificial Sequence: Synthetic oligonucleotide
  Antisense strand to SEQ ID NO: 1250222
uuggucaaaccagaagugc

SEQ ID NO: 1250224 - RNA, 19 nt, Artificial Sequence
  Description of Artificial Sequence: Synthetic oligonucleotide
  Sense strand starting at position 1250 of SEQ ID NO: 1241144
aagucaugauaugagacua

SEQ ID NO: 1250225 - RNA, 19 nt, Artificial Sequence
  Description of Artificial Sequence: Synthetic oligonucleotide
  Antisense strand to SEQ ID NO: 1250224
uagucucauaucaugacuu

SEQ ID NO: 1250226 - RNA, 19 nt, Artificial Sequence
  Description of Artificial Sequence: Synthetic oligonucleotide
  Sense strand starting at position 1331 of SEQ ID NO: 1241144
uucuguuuaggauacuuua

SEQ ID NO: 1250227 - RNA, 19 nt, Artificial Sequence
  Description of Artificial Sequence: Synthetic oligonucleotide
  Antisense strand to SEQ ID NO: 1250226
uaaaguauccuaaacagaa

SEQ ID NO: 1250228 - RNA, 19 nt, Artificial Sequence
  Description of Artificial Sequence: Synthetic oligonucleotide
  Sense strand starting at position 1334 of SEQ ID NO: 1241144
uguuuaggauacuuuagau

SEQ ID NO: 1250229 - RNA, 19 nt, Artificial Sequence
  Description of Artificial Sequence: Synthetic oligonucleotide
  Antisense strand to SEQ ID NO: 1250228
aucuaaaguauccuaaaca

SEQ ID NO: 1250230 - RNA, 19 nt, Artificial Sequence
  Description of Artificial Sequence: Synthetic oligonucleotide
  Sense strand starting at position 1796 of SEQ ID NO: 1241144
ccgaauccauguuuaauga

SEQ ID NO: 1250231 - RNA, 19 nt, Artificial Sequence
  Description of Artificial Sequence: Synthetic oligonucleotide
  Antisense strand to SEQ ID NO: 1250230
ucauuaaacauggauucgg

SEQ ID NO: 1250232 - RNA, 19 nt, Artificial Sequence
  Description of Artificial Sequence: Synthetic oligonucleotide
  Sense strand starting at position 2109 of SEQ ID NO: 1241144
cagagaugcguccagagag

SEQ ID NO: 1250233 - RNA, 19 nt, Artificial Sequence
  Description of Artificial Sequence: Synthetic oligonucleotide
  Antisense strand to SEQ ID NO: 1250232
cucucuggacgcaucucug

SEQ ID NO: 1250234 - RNA, 19 nt, Artificial Sequence
  Description of Artificial Sequence: Synthetic oligonucleotide
  Sense strand starting at position 2110 of SEQ ID NO: 1241144
agagaugcguccagagaga

SEQ ID NO: 1250235 - RNA, 19 nt, Artificial Sequence
  Description of Artificial Sequence: Synthetic oligonucleotide
  Antisense strand to SEQ ID NO: 1250234
ucucucuggacgcaucucu

SEQ ID NO: 1250236 - RNA, 19 nt, Artificial Sequence
  Description of Artificial Sequence: Synthetic oligonucleotide
  Sense strand starting at position 2264 of SEQ ID NO: 1241144
gagaaauaugccggacuuc

SEQ ID NO: 1250237 - RNA, 19 nt, Artificial Sequence
  Description of Artificial Sequence: Synthetic oligonucleotide
  Antisense strand to SEQ ID NO: 1250236
gaaguccggcauauuucuc

SEQ ID NO: 1250238 - RNA, 19 nt, Artificial Sequence
  Description of Artificial Sequence: Synthetic oligonucleotide
  Sense strand starting at position 2314 of SEQ ID NO: 1241144
ggagguuuccgauguucca

SEQ ID NO: 1250239 - RNA, 19 nt, Artificial Sequence
  Description of Artificial Sequence: Synthetic oligonucleotide
  Antisense strand to SEQ ID NO: 1250238
uggaacaucggaaaccucc

SEQ ID NO: 1250240 - RNA, 19 nt, Artificial Sequence
  Description of Artificial Sequence: Synthetic oligonucleotide
  Sense strand starting at position 2321 of SEQ ID NO: 1241144
uccgauguuccaugcacuu

SEQ ID NO: 1250241 - RNA, 19 nt, Artificial Sequence
  Description of Artificial Sequence: Synthetic oligonucleotide
  Antisense strand to SEQ ID NO: 1250240
aagugcauggaacaucgga

SEQ ID NO: 1250242 - RNA, 19 nt, Artificial Sequence
  Description of Artificial Sequence: Synthetic oligonucleotide
  Sense strand starting at position 2552 of SEQ ID NO: 1241144
caagcaguuucucucggua

SEQ ID NO: 1250243 - RNA, 19 nt, Artificial Sequence
  Description of Artificial Sequence: Synthetic oligonucleotide
  Antisense strand to SEQ ID NO: 1250242
uaccgagagaaacugcuug

SEQ ID NO: 1250244 - RNA, 19 nt, Artificial Sequence
  Description of Artificial Sequence: Synthetic oligonucleotide
  Sense strand starting at position 2556 of SEQ ID NO: 1241144
caguuucucucgguacuuu

SEQ ID NO: 1250245 - RNA, 19 nt, Artificial Sequence
  Description of Artificial Sequence: Synthetic oligonucleotide
  Antisense strand to SEQ ID NO: 1250244
aaaguaccgagagaaacug

SEQ ID NO: 1250246 - RNA, 19 nt, Artificial Sequence
  Description of Artificial Sequence: Synthetic oligonucleotide
  Sense strand starting at position 2685 of SEQ ID NO: 1241144
uaaagacgugcggaguaau

SEQ ID NO: 1250247 - RNA, 19 nt, Artificial Sequence
  Description of Artificial Sequence: Synthetic oligonucleotide
  Antisense strand to SEQ ID NO: 1250246
auuacuccgcacgucuuua

SEQ ID NO: 1250248 - RNA, 19 nt, Artificial Sequence
  Description of Artificial Sequence: Synthetic oligonucleotide
  Sense strand starting at position 2688 of SEQ ID NO: 1241144
agacgugcggaguaauaaa

SEQ ID NO: 1250249 - RNA, 19 nt, Artificial Sequence
  Description of Artificial Sequence: Synthetic oligonucleotide
  Antisense strand to SEQ ID NO: 1250248
uuuauuacuccgcacgucu

SEQ ID NO: 1250250 - RNA, 19 nt, Artificial Sequence
  Description of Artificial Sequence: Synthetic oligonucleotide
  Sense strand starting at position 2770 of SEQ ID NO: 1241144
caguguuaagcuugauguu

SEQ ID NO: 1250251 - RNA, 19 nt, Artificial Sequence
  Description of Artificial Sequence: Synthetic oligonucleotide
  Antisense strand to SEQ ID NO: 1250250
aacaucaagcuuaacacug

SEQ ID NO: 1250252 - RNA, 19 nt, Artificial Sequence
  Description of Artificial Sequence: Synthetic oligonucleotide
  Sense strand starting at position 2771 of SEQ ID NO: 1241144
aguguuaagcuugauguuu

SEQ ID NO: 1250253 - RNA, 19 nt, Artificial Sequence
  Description of Artificial Sequence: Synthetic oligonucleotide
  Antisense strand to SEQ ID NO: 1250252
aaacaucaagcuuaacacu

SEQ ID NO: 1250254 - RNA, 19 nt, Artificial Sequence
  Description of Artificial Sequence: Synthetic oligonucleotide
  Sense strand starting at position 2782 of SEQ ID NO: 1241144
ugauguuuauccuuccaga

SEQ ID NO: 1250255 - RNA, 19 nt, Artificial Sequence
  Description of Artificial Sequence: Synthetic oligonucleotide
  Antisense strand to SEQ ID NO: 1250254
ucuggaaggauaaacauca

SEQ ID NO: 1250256 - RNA, 19 nt, Artificial Sequence
  Description of Artificial Sequence: Synthetic oligonucleotide
  Sense strand starting at position 2822 of SEQ ID NO: 1241144
auuuauacauggcaguaua

SEQ ID NO: 1250257 - RNA, 19 nt, Artificial Sequence
  Description of Artificial Sequence: Synthetic oligonucleotide
  Antisense strand to SEQ ID NO: 1250256
uauacugccauguauaaau

SEQ ID NO: 1250258 - RNA, 19 nt, Artificial Sequence
  Description of Artificial Sequence: Synthetic oligonucleotide
  Sense strand starting at position 2863 of SEQ ID NO: 1241144
cgugaagcagucugaccau

SEQ ID NO: 1250259 - RNA, 19 nt, Artificial Sequence
  Description of Artificial Sequence: Synthetic oligonucleotide
  Antisense strand to SEQ ID NO: 1250258
auggucagacugcuucacg

SEQ ID NO: 1250260 - RNA, 19 nt, Artificial Sequence
  Description of Artificial Sequence: Synthetic oligonucleotide
  Sense strand starting at position 3047 of SEQ ID NO: 1241144
cccuuauggucacuggaga

SEQ ID NO: 1250261 - RNA, 19 nt, Artificial Sequence
  Description of Artificial Sequence: Synthetic oligonucleotide
  Antisense strand to SEQ ID NO: 1250260
ucuccagugaccauaaggg

SEQ ID NO: 1250262 - RNA, 19 nt, Artificial Sequence
  Description of Artificial Sequence: Synthetic oligonucleotide
  Sense strand starting at position 3048 of SEQ ID NO: 1241144
ccuuauggucacuggagaa

SEQ ID NO: 1250263 - RNA, 19 nt, Artificial Sequence
  Description of Artificial Sequence: Synthetic oligonucleotide
  Antisense strand to SEQ ID NO: 1250262
uucuccagugaccauaagg

SEQ ID NO: 1250264 - RNA, 19 nt, Artificial Sequence
  Description of Artificial Sequence: Synthetic oligonucleotide
  Sense strand starting at position 3481 of SEQ ID NO: 1241144
uccucauucuaugaaugag

SEQ ID NO: 1250265 - RNA, 19 nt, Artificial Sequence
  Description of Artificial Sequence: Synthetic oligonucleotide
  Antisense strand to SEQ ID NO: 1250264
cucauucauagaaugagga

SEQ ID NO: 1250266 - RNA, 19 nt, Artificial Sequence
  Description of Artificial Sequence: Synthetic oligonucleotide
  Sense strand starting at position 3487 of SEQ ID NO: 1241144
uucuaugaaugaggaaauu

SEQ ID NO: 1250267 - RNA, 19 nt, Artificial Sequence
  Description of Artificial Sequence: Synthetic oligonucleotide
  Antisense strand to SEQ ID NO: 1250266
aauuuccucauucauagaa

SEQ ID NO: 1250268 - RNA, 19 nt, Artificial Sequence
  Description of Artificial Sequence: Synthetic oligonucleotide
  Sense strand starting at position 3536 of SEQ ID NO: 1241144
aagccauaggcugauaugu

SEQ ID NO: 1250269 - RNA, 19 nt, Artificial Sequence
  Description of Artificial Sequence: Synthetic oligonucleotide
  Antisense strand to SEQ ID NO: 1250268
acauaucagccuauggcuu

SEQ ID NO: 1250270 - RNA, 19 nt, Artificial Sequence
  Description of Artificial Sequence: Synthetic oligonucleotide
  Sense strand starting at position 3541 of SEQ ID NO: 1241144
auaggcugauauguaagaa

SEQ ID NO: 1250271 - RNA, 19 nt, Artificial Sequence
  Description of Artificial Sequence: Synthetic oligonucleotide
  Antisense strand to SEQ ID NO: 1250270
uucuuacauaucagccuau

SEQ ID NO: 1250272 - RNA, 19 nt, Artificial Sequence
  Description of Artificial Sequence: Synthetic oligonucleotide
  Sense strand starting at position 3621 of SEQ ID NO: 1241144
ucacauagucaauaugguu

SEQ ID NO: 1250273 - RNA, 19 nt, Artificial Sequence
  Description of Artificial Sequence: Synthetic oligonucleotide
  Antisense strand to SEQ ID NO: 1250272
aaccauauugacuauguga

SEQ ID NO: 1250274 - RNA, 19 nt, Artificial Sequence
  Description of Artificial Sequence: Synthetic oligonucleotide
  Sense strand starting at position 3629 of SEQ ID NO: 1241144
ucaauaugguucucauagu

SEQ ID NO: 1250275 - RNA, 19 nt, Artificial Sequence
  Description of Artificial Sequence: Synthetic oligonucleotide
  Antisense strand to SEQ ID NO: 1250274
acuaugagaaccauauuga

SEQ ID NO: 1250276 - RNA, 19 nt, Artificial Sequence
  Description of Artificial Sequence: Synthetic oligonucleotide
  Sense strand starting at position 3635 of SEQ ID NO: 1241144
ugguucucauagucugaau

SEQ ID NO: 1250277 - RNA, 19 nt, Artificial Sequence
  Description of Artificial Sequence: Synthetic oligonucleotide
  Antisense strand to SEQ ID NO: 1250276
auucagacuaugagaacca

SEQ ID NO: 1250278 - RNA, 19 nt, Artificial Sequence
  Description of Artificial Sequence: Synthetic oligonucleotide
  Sense strand starting at position 3758 of SEQ ID NO: 1241144
uugcucuuagccugaucau

SEQ ID NO: 1250279 - RNA, 19 nt, Artificial Sequence
  Description of Artificial Sequence: Synthetic oligonucleotide
  Antisense strand to SEQ ID NO: 1250278
augaucaggcuaagagcaa

SEQ ID NO: 1250280 - RNA, 19 nt, Artificial Sequence
  Description of Artificial Sequence: Synthetic oligonucleotide
  Sense strand starting at position 3759 of SEQ ID NO: 1241144
ugcucuuagccugaucauu

SEQ ID NO: 1250281 - RNA, 19 nt, Artificial Sequence
  Description of Artificial Sequence: Synthetic oligonucleotide
  Antisense strand to SEQ ID NO: 1250280
aaugaucaggcuaagagca

SEQ ID NO: 1250282 - RNA, 19 nt, Artificial Sequence
  Description of Artificial Sequence: Synthetic oligonucleotide
  Sense strand starting at position 3797 of SEQ ID NO: 1241144
uugcccucuucuuuagaga

SEQ ID NO: 1250283 - RNA, 19 nt, Artificial Sequence
  Description of Artificial Sequence: Synthetic oligonucleotide
  Antisense strand to SEQ ID NO: 1250282
ucucuaaagaagagggcaa

SEQ ID NO: 1250284 - RNA, 19 nt, Artificial Sequence
  Description of Artificial Sequence: Synthetic oligonucleotide
  Sense strand starting at position 3813 of SEQ ID NO: 1241144
agaauaaccuaguccaagu

SEQ ID NO: 1250285 - RNA, 19 nt, Artificial Sequence
  Description of Artificial Sequence: Synthetic oligonucleotide
  Antisense strand to SEQ ID NO: 1250284
acuuggacuagguuauucu

SEQ ID NO: 1250286 - RNA, 19 nt, Artificial Sequence
  Description of Artificial Sequence: Synthetic oligonucleotide
  Sense strand starting at position 3836 of SEQ ID NO: 1241144
auuugcacuccugguuuau

SEQ ID NO: 1250287 - RNA, 19 nt, Artificial Sequence
  Description of Artificial Sequence: Synthetic oligonucleotide
  Antisense strand to SEQ ID NO: 1250286
auaaaccaggagugcaaau

SEQ ID NO: 1250288 - RNA, 19 nt, Artificial Sequence
  Description of Artificial Sequence: Synthetic oligonucleotide
  Sense strand starting at position 3838 of SEQ ID NO: 1241144
uugcacuccugguuuauuu

SEQ ID NO: 1250289 - RNA, 19 nt, Artificial Sequence
  Description of Artificial Sequence: Synthetic oligonucleotide
  Antisense strand to SEQ ID NO: 1250288
aaauaaaccaggagugcaa

SEQ ID NO: 1250290 - RNA, 19 nt, Artificial Sequence
  Description of Artificial Sequence: Synthetic oligonucleotide
  Sense strand starting at position 3853 of SEQ ID NO: 1241144
auuuguuuguuugugauac

SEQ ID NO: 1250291 - RNA, 19 nt, Artificial Sequence
  Description of Artificial Sequence: Synthetic oligonucleotide
  Antisense strand to SEQ ID NO: 1250290
guaucacaaacaaacaaau

SEQ ID NO: 1250292 - RNA, 19 nt, Artificial Sequence
  Description of Artificial Sequence: Synthetic oligonucleotide
  Sense strand starting at position 3859 of SEQ ID NO: 1241144
uuguuugugauacaagguu

SEQ ID NO: 1250293 - RNA, 19 nt, Artificial Sequence
  Description of Artificial Sequence: Synthetic oligonucleotide
  Antisense strand to SEQ ID NO: 1250292
aaccuuguaucacaaacaa

SEQ ID NO: 1250294 - RNA, 19 nt, Artificial Sequence
  Description of Artificial Sequence: Synthetic oligonucleotide
  Sense strand starting at position 178 of SEQ ID NO: 1241145
ccauccuuuccuuggcgaa

SEQ ID NO: 1250295 - RNA, 19 nt, Artificial Sequence
  Description of Artificial Sequence: Synthetic oligonucleotide
  Antisense strand to SEQ ID NO: 1250294
uucgccaaggaaaggaugg

SEQ ID NO: 1250296 - RNA, 19 nt, Artificial Sequence
  Description of Artificial Sequence: Synthetic oligonucleotide
  Sense strand starting at position 515 of SEQ ID NO: 1241145
accagcuuugcagaaggau

SEQ ID NO: 1250297 - RNA, 19 nt, Artificial Sequence
  Description of Artificial Sequence: Synthetic oligonucleotide
  Antisense strand to SEQ ID NO: 1250296
auccuucugcaaagcuggu

SEQ ID NO: 1250298 - RNA, 19 nt, Artificial Sequence
  Description of Artificial Sequence: Synthetic oligonucleotide
  Sense strand starting at position 548 of SEQ ID NO: 1241145
uugagaagcuucuuaccca

SEQ ID NO: 1250299 - RNA, 19 nt, Artificial Sequence
  Description of Artificial Sequence: Synthetic oligonucleotide
  Antisense strand to SEQ ID NO: 1250298
uggguaagaagcuucucaa

SEQ ID NO: 1250300 - RNA, 19 nt, Artificial Sequence
  Description of Artificial Sequence: Synthetic oligonucleotide
  Sense strand starting at position 1019 of SEQ ID NO: 1241145
augaaagacuggcaugaau

SEQ ID NO: 1250301 - RNA, 19 nt, Artificial Sequence
  Description of Artificial Sequence: Synthetic oligonucleotide
  Antisense strand to SEQ ID NO: 1250300
auucaugccagucuuucau

SEQ ID NO: 1250302 - RNA, 19 nt, Artificial Sequence
  Description of Artificial Sequence: Synthetic oligonucleotide
  Sense strand starting at position 1061 of SEQ ID NO: 1241145
gcacuucugguuugaccaa

SEQ ID NO: 1250303 - RNA, 19 nt, Artificial Sequence
  Description of Artificial Sequence: Synthetic oligonucleotide
  Antisense strand to SEQ ID NO: 1250302
uuggucaaaccagaagugc

SEQ ID NO: 1250304 - RNA, 19 nt, Artificial Sequence
  Description of Artificial Sequence: Synthetic oligonucleotide
  Sense strand starting at position 1152 of SEQ ID NO: 1241145
aagucaugauaugagacua

SEQ ID NO: 1250305 - RNA, 19 nt, Artificial Sequence
  Description of Artificial Sequence: Synthetic oligonucleotide
  Antisense strand to SEQ ID NO: 1250304
uagucucauaucaugacuu

SEQ ID NO: 1250306 - RNA, 19 nt, Artificial Sequence
  Description of Artificial Sequence: Synthetic oligonucleotide
  Sense strand starting at position 1233 of SEQ ID NO: 1241145
uucuguuuaggauacuuua

SEQ ID NO: 1250307 - RNA, 19 nt, Artificial Sequence
  Description of Artificial Sequence: Synthetic oligonucleotide
  Antisense strand to SEQ ID NO: 1250306
uaaaguauccuaaacagaa

SEQ ID NO: 1250308 - RNA, 19 nt, Artificial Sequence
  Description of Artificial Sequence: Synthetic oligonucleotide
  Sense strand starting at position 1236 of SEQ ID NO: 1241145
uguuuaggauacuuuagau

SEQ ID NO: 1250309 - RNA, 19 nt, Artificial Sequence
  Description of Artificial Sequence: Synthetic oligonucleotide
  Antisense strand to SEQ ID NO: 1250308
aucuaaaguauccuaaaca

SEQ ID NO: 1250310 - RNA, 19 nt, Artificial Sequence
  Description of Artificial Sequence: Synthetic oligonucleotide
  Sense strand starting at position 1698 of SEQ ID NO: 1241145
ccgaauccauguuuaauga

SEQ ID NO: 1250311 - RNA, 19 nt, Artificial Sequence
  Description of Artificial Sequence: Synthetic oligonucleotide
  Antisense strand to SEQ ID NO: 1250310
ucauuaaacauggauucgg

SEQ ID NO: 1250312 - RNA, 19 nt, Artificial Sequence
  Description of Artificial Sequence: Synthetic oligonucleotide
  Sense strand starting at position 2011 of SEQ ID NO: 1241145
cagagaugcguccagagag

SEQ ID NO: 1250313 - RNA, 19 nt, Artificial Sequence
  Description of Artificial Sequence: Synthetic oligonucleotide
  Antisense strand to SEQ ID NO: 1250312
cucucuggacgcaucucug

SEQ ID NO: 1250314 - RNA, 19 nt, Artificial Sequence
  Description of Artificial Sequence: Synthetic oligonucleotide
  Sense strand starting at position 2012 of SEQ ID NO: 1241145
agagaugcguccagagaga

SEQ ID NO: 1250315 - RNA, 19 nt, Artificial Sequence
  Description of Artificial Sequence: Synthetic oligonucleotide
  Antisense strand to SEQ ID NO: 1250314
ucucucuggacgcaucucu

SEQ ID NO: 1250316 - RNA, 19 nt, Artificial Sequence
  Description of Artificial Sequence: Synthetic oligonucleotide
  Sense strand starting at position 2166 of SEQ ID NO: 1241145
gagaaauaugccggacuuc

SEQ ID NO: 1250317 - RNA, 19 nt, Artificial Sequence
  Description of Artificial Sequence: Synthetic oligonucleotide
  Antisense strand to SEQ ID NO: 1250316
gaaguccggcauauuucuc

SEQ ID NO: 1250318 - RNA, 19 nt, Artificial Sequence
  Description of Artificial Sequence: Synthetic oligonucleotide
  Sense strand starting at position 2216 of SEQ ID NO: 1241145
ggagguuuccgauguucca

SEQ ID NO: 1250319 - RNA, 19 nt, Artificial Sequence
  Description of Artificial Sequence: Synthetic oligonucleotide
  Antisense strand to SEQ ID NO: 1250318
uggaacaucggaaaccucc

SEQ ID NO: 1250320 - RNA, 19 nt, Artificial Sequence
  Description of Artificial Sequence: Synthetic oligonucleotide
  Sense strand starting at position 2223 of SEQ ID NO: 1241145
uccgauguuccaugcacuu

SEQ ID NO: 1250321 - RNA, 19 nt, Artificial Sequence
  Description of Artificial Sequence: Synthetic oligonucleotide
  Antisense strand to SEQ ID NO: 1250320
aagugcauggaacaucgga

SEQ ID NO: 1250322 - RNA, 19 nt, Artificial Sequence
  Description of Artificial Sequence: Synthetic oligonucleotide
  Sense strand starting at position 2454 of SEQ ID NO: 1241145
caagcaguuucucucggua

SEQ ID NO: 1250323 - RNA, 19 nt, Artificial Sequence
  Description of Artificial Sequence: Synthetic oligonucleotide
  Antisense strand to SEQ ID NO: 1250322
uaccgagagaaacugcuug

SEQ ID NO: 1250324 - RNA, 19 nt, Artificial Sequence
  Description of Artificial Sequence: Synthetic oligonucleotide
  Sense strand starting at position 2458 of SEQ ID NO: 1241145
caguuucucucgguacuuu

SEQ ID NO: 1250325 - RNA, 19 nt, Artificial Sequence
  Description of Artificial Sequence: Synthetic oligonucleotide
  Antisense strand to SEQ ID NO: 1250324
aaaguaccgagagaaacug

SEQ ID NO: 1250326 - RNA, 19 nt, Artificial Sequence
  Description of Artificial Sequence: Synthetic oligonucleotide
  Sense strand starting at position 2587 of SEQ ID NO: 1241145
uaaagacgugcggaguaau

SEQ ID NO: 1250327 - RNA, 19 nt, Artificial Sequence
  Description of Artificial Sequence: Synthetic oligonucleotide
  Antisense strand to SEQ ID NO: 1250326
auuacuccgcacgucuuua

SEQ ID NO: 1250328 - RNA, 19 nt, Artificial Sequence
  Description of Artificial Sequence: Synthetic oligonucleotide
  Sense strand starting at position 2590 of SEQ ID NO: 1241145
agacgugcggaguaauaaa

SEQ ID NO: 1250329 - RNA, 19 nt, Artificial Sequence
  Description of Artificial Sequence: Synthetic oligonucleotide
  Antisense strand to SEQ ID NO: 1250328
uuuauuacuccgcacgucu

SEQ ID NO: 1250330 - RNA, 19 nt, Artificial Sequence
  Description of Artificial Sequence: Synthetic oligonucleotide
  Sense strand starting at position 2672 of SEQ ID NO: 1241145
caguguuaagcuugauguu

SEQ ID NO: 1250331 - RNA, 19 nt, Artificial Sequence
  Description of Artificial Sequence: Synthetic oligonucleotide
  Antisense strand to SEQ ID NO: 1250330
aacaucaagcuuaacacug

SEQ ID NO: 1250332 - RNA, 19 nt, Artificial Sequence
  Description of Artificial Sequence: Synthetic oligonucleotide
  Sense strand starting at position 2673 of SEQ ID NO: 1241145
aguguuaagcuugauguuu

SEQ ID NO: 1250333 - RNA, 19 nt, Artificial Sequence
  Description of Artificial Sequence: Synthetic oligonucleotide
  Antisense strand to SEQ ID NO: 1250332
aaacaucaagcuuaacacu

SEQ ID NO: 1250334 - RNA, 19 nt, Artificial Sequence
  Description of Artificial Sequence: Synthetic oligonucleotide
  Sense strand starting at position 2684 of SEQ ID NO: 1241145
ugauguuuauccuuccaga

SEQ ID NO: 1250335 - RNA, 19 nt, Artificial Sequence
  Description of Artificial Sequence: Synthetic oligonucleotide
  Antisense strand to SEQ ID NO: 1250334
ucuggaaggauaaacauca

SEQ ID NO: 1250336 - RNA, 19 nt, Artificial Sequence
  Description of Artificial Sequence: Synthetic oligonucleotide
  Sense strand starting at position 2724 of SEQ ID NO: 1241145
auuuauacauggcaguaua

SEQ ID NO: 1250337 - RNA, 19 nt, Artificial Sequence
  Description of Artificial Sequence: Synthetic oligonucleotide
  Antisense strand to SEQ ID NO: 1250336
uauacugccauguauaaau

SEQ ID NO: 1250338 - RNA, 19 nt, Artificial Sequence
  Description of Artificial Sequence: Synthetic oligonucleotide
  Sense strand starting at position 2765 of SEQ ID NO: 1241145
cgugaagcagucugaccau

SEQ ID NO: 1250339 - RNA, 19 nt, Artificial Sequence
  Description of Artificial Sequence: Synthetic oligonucleotide
  Antisense strand to SEQ ID NO: 1250338
auggucagacugcuucacg

SEQ ID NO: 1250340 - RNA, 19 nt, Artificial Sequence
  Description of Artificial Sequence: Synthetic oligonucleotide
  Sense strand starting at position 2949 of SEQ ID NO: 1241145
cccuuauggucacuggaga

SEQ ID NO: 1250341 - RNA, 19 nt, Artificial Sequence
  Description of Artificial Sequence: Synthetic oligonucleotide
  Antisense strand to SEQ ID NO: 1250340
ucuccagugaccauaaggg

SEQ ID NO: 1250342 - RNA, 19 nt, Artificial Sequence
  Description of Artificial Sequence: Synthetic oligonucleotide
  Sense strand starting at position 2950 of SEQ ID NO: 1241145
ccuuauggucacuggagaa

SEQ ID NO: 1250343 - RNA, 19 nt, Artificial Sequence
  Description of Artificial Sequence: Synthetic oligonucleotide
  Antisense strand to SEQ ID NO: 1250342
uucuccagugaccauaagg

SEQ ID NO: 1250344 - RNA, 19 nt, Artificial Sequence
  Description of Artificial Sequence: Synthetic oligonucleotide
  Sense strand starting at position 3438 of SEQ ID NO: 1241145
aagccauaggcugauaugu

SEQ ID NO: 1250345 - RNA, 19 nt, Artificial Sequence
  Description of Artificial Sequence: Synthetic oligonucleotide
  Antisense strand to SEQ ID NO: 1250344
acauaucagccuauggcuu

SEQ ID NO: 1250346 - RNA, 19 nt, Artificial Sequence
  Description of Artificial Sequence: Synthetic oligonucleotide
  Sense strand starting at position 3443 of SEQ ID NO: 1241145
auaggcugauauguaagaa

SEQ ID NO: 1250347 - RNA, 19 nt, Artificial Sequence
  Description of Artificial Sequence: Synthetic oligonucleotide
  Antisense strand to SEQ ID NO: 1250346
uucuuacauaucagccuau

SEQ ID NO: 1250348 - RNA, 19 nt, Artificial Sequence
  Description of Artificial Sequence: Synthetic oligonucleotide
  Sense strand starting at position 3523 of SEQ ID NO: 1241145
ucacauagucaauaugguu

SEQ ID NO: 1250349 - RNA, 19 nt, Artificial Sequence
  Description of Artificial Sequence: Synthetic oligonucleotide
  Antisense strand to SEQ ID NO: 1250348
aaccauauugacuauguga

SEQ ID NO: 1250350 - RNA, 19 nt, Artificial Sequence
  Description of Artificial Sequence: Synthetic oligonucleotide
  Sense strand starting at position 3531 of SEQ ID NO: 1241145
ucaauaugguucucauagu

SEQ ID NO: 1250351 - RNA, 19 nt, Artificial Sequence
  Description of Artificial Sequence: Synthetic oligonucleotide
  Antisense strand to SEQ ID NO: 1250350
acuaugagaaccauauuga

SEQ ID NO: 1250352 - RNA, 19 nt, Artificial Sequence
  Description of Artificial Sequence: Synthetic oligonucleotide
  Sense strand starting at position 3537 of SEQ ID NO: 1241145
ugguucucauagucugaau

SEQ ID NO: 1250353 - RNA, 19 nt, Artificial Sequence
  Description of Artificial Sequence: Synthetic oligonucleotide
  Antisense strand to SEQ ID NO: 1250352
auucagacuaugagaacca

SEQ ID NO: 1250354 - RNA, 19 nt, Artificial Sequence
  Description of Artificial Sequence: Synthetic oligonucleotide
  Sense strand starting at position 3660 of SEQ ID NO: 1241145
uugcucuuagccugaucau

SEQ ID NO: 1250355 - RNA, 19 nt, Artificial Sequence
  Description of Artificial Sequence: Synthetic oligonucleotide
  Antisense strand to SEQ ID NO: 1250354
augaucaggcuaagagcaa

SEQ ID NO: 1250356 - RNA, 19 nt, Artificial Sequence
  Description of Artificial Sequence: Synthetic oligonucleotide
  Sense strand starting at position 3661 of SEQ ID NO: 1241145
ugcucuuagccugaucauu

SEQ ID NO: 1250357 - RNA, 19 nt, Artificial Sequence
  Description of Artificial Sequence: Synthetic oligonucleotide
  Antisense strand to SEQ ID NO: 1250356
aaugaucaggcuaagagca

SEQ ID NO: 1250358 - RNA, 19 nt, Artificial Sequence
  Description of Artificial Sequence: Synthetic oligonucleotide
  Sense strand starting at position 3699 of SEQ ID NO: 1241145
uugcccucuucuuuagaga

SEQ ID NO: 1250359 - RNA, 19 nt, Artificial Sequence
  Description of Artificial Sequence: Synthetic oligonucleotide
  Antisense strand to SEQ ID NO: 1250358
ucucuaaagaagagggcaa

SEQ ID NO: 1250360 - RNA, 19 nt, Artificial Sequence
  Description of Artificial Sequence: Synthetic oligonucleotide
  Sense strand starting at position 3715 of SEQ ID NO: 1241145
agaauaaccuaguccaagu

SEQ ID NO: 1250361 - RNA, 19 nt, Artificial Sequence
  Description of Artificial Sequence: Synthetic oligonucleotide
  Antisense strand to SEQ ID NO: 1250360
acuuggacuagguuauucu

SEQ ID NO: 1250362 - RNA, 19 nt, Artificial Sequence
  Description of Artificial Sequence: Synthetic oligonucleotide
  Sense strand starting at position 3738 of SEQ ID NO: 1241145
auuugcacuccugguuuau

SEQ ID NO: 1250363 - RNA, 19 nt, Artificial Sequence
  Description of Artificial Sequence: Synthetic oligonucleotide
  Antisense strand to SEQ ID NO: 1250362
auaaaccaggagugcaaau

SEQ ID NO: 1250364 - RNA, 19 nt, Artificial Sequence
  Description of Artificial Sequence: Synthetic oligonucleotide
  Sense strand starting at position 3740 of SEQ ID NO: 1241145
uugcacuccugguuuauuu

SEQ ID NO: 1250365 - RNA, 19 nt, Artificial Sequence
  Description of Artificial Sequence: Synthetic oligonucleotide
  Antisense strand to SEQ ID NO: 1250364
aaauaaaccaggagugcaa

SEQ ID NO: 1250366 - RNA, 19 nt, Artificial Sequence
  Description of Artificial Sequence: Synthetic oligonucleotide
  Sense strand starting at position 3755 of SEQ ID NO: 1241145
auuuguuuguuugugauac

SEQ ID NO: 1250367 - RNA, 19 nt, Artificial Sequence
  Description of Artificial Sequence: Synthetic oligonucleotide
  Antisense strand to SEQ ID NO: 1250366
guaucacaaacaaacaaau

SEQ ID NO: 1250368 - RNA, 19 nt, Artificial Sequence
  Description of Artificial Sequence: Synthetic oligonucleotide
  Sense strand starting at position 3761 of SEQ ID NO: 1241145
uuguuugugauacaagguu

SEQ ID NO: 1250369 - RNA, 19 nt, Artificial Sequence
  Description of Artificial Sequence: Synthetic oligonucleotide
  Antisense strand to SEQ ID NO: 1250368
aaccuuguaucacaaacaa

SEQ ID NO: 1250370 - RNA, 19 nt, Artificial Sequence
  Description of Artificial Sequence: Synthetic oligonucleotide
  Sense strand starting at position 3901 of SEQ ID NO: 1241145
ugcaccaugcuugguuaaa

SEQ ID NO: 1250371 - RNA, 19 nt, Artificial Sequence
  Description of Artificial Sequence: Synthetic oligonucleotide
  Antisense strand to SEQ ID NO: 1250370
uuuaaccaagcauggugca

SEQ ID NO: 1250372 - RNA, 19 nt, Artificial Sequence
  Description of Artificial Sequence: Synthetic oligonucleotide
  Sense strand starting at position 3902 of SEQ ID NO: 1241145
gcaccaugcuugguuaaau

SEQ ID NO: 1250373 - RNA, 19 nt, Artificial Sequence
  Description of Artificial Sequence: Synthetic oligonucleotide
  Antisense strand to SEQ ID NO: 1250372
auuuaaccaagcauggugc

SEQ ID NO: 1250374 - RNA, 19 nt, Artificial Sequence
  Description of Artificial Sequence: Synthetic oligonucleotide
  Sense strand starting at position 178 of SEQ ID NO: 1241146
ccauccuuuccuuggcgaa

SEQ ID NO: 1250375 - RNA, 19 nt, Artificial Sequence
  Description of Artificial Sequence: Synthetic oligonucleotide
  Antisense strand to SEQ ID NO: 1250374
uucgccaaggaaaggaugg

SEQ ID NO: 1250376 - RNA, 19 nt, Artificial Sequence
  Description of Artificial Sequence: Synthetic oligonucleotide
  Sense strand starting at position 515 of SEQ ID NO: 1241146
accagcuuugcagaaggau

SEQ ID NO: 1250377 - RNA, 19 nt, Artificial Sequence
  Description of Artificial Sequence: Synthetic oligonucleotide
  Antisense strand to SEQ ID NO: 1250376
auccuucugcaaagcuggu

SEQ ID NO: 1250378 - RNA, 19 nt, Artificial Sequence
  Description of Artificial Sequence: Synthetic oligonucleotide
  Sense strand starting at position 548 of SEQ ID NO: 1241146
uugagaagcuucuuaccca

SEQ ID NO: 1250379 - RNA, 19 nt, Artificial Sequence
  Description of Artificial Sequence: Synthetic oligonucleotide
  Antisense strand to SEQ ID NO: 1250378
uggguaagaagcuucucaa

SEQ ID NO: 1250380 - RNA, 19 nt, Artificial Sequence
  Description of Artificial Sequence: Synthetic oligonucleotide
  Sense strand starting at position 1019 of SEQ ID NO: 1241146
augaaagacuggcaugaau

SEQ ID NO: 1250381 - RNA, 19 nt, Artificial Sequence
  Description of Artificial Sequence: Synthetic oligonucleotide
  Antisense strand to SEQ ID NO: 1250380
auucaugccagucuuucau

SEQ ID NO: 1250382 - RNA, 19 nt, Artificial Sequence
  Description of Artificial Sequence: Synthetic oligonucleotide
  Sense strand starting at position 1061 of SEQ ID NO: 1241146
gcacuucugguuugaccaa

SEQ ID NO: 1250383 - RNA, 19 nt, Artificial Sequence
  Description of Artificial Sequence: Synthetic oligonucleotide
  Antisense strand to SEQ ID NO: 1250382
uuggucaaaccagaagugc

SEQ ID NO: 1250384 - RNA, 19 nt, Artificial Sequence
  Description of Artificial Sequence: Synthetic oligonucleotide
  Sense strand starting at position 1152 of SEQ ID NO: 1241146
aagucaugauaugagacua

SEQ ID NO: 1250385 - RNA, 19 nt, Artificial Sequence
  Description of Artificial Sequence: Synthetic oligonucleotide
  Antisense strand to SEQ ID NO: 1250384
uagucucauaucaugacuu

SEQ ID NO: 1250386 - RNA, 19 nt, Artificial Sequence
  Description of Artificial Sequence: Synthetic oligonucleotide
  Sense strand starting at position 1233 of SEQ ID NO: 1241146
uucuguuuaggauacuuua

SEQ ID NO: 1250387 - RNA, 19 nt, Artificial Sequence
  Description of Artificial Sequence: Synthetic oligonucleotide
  Antisense strand to SEQ ID NO: 1250386
uaaaguauccuaaacagaa

SEQ ID NO: 1250388 - RNA, 19 nt, Artificial Sequence
  Description of Artificial Sequence: Synthetic oligonucleotide
  Sense strand starting at position 1236 of SEQ ID NO: 1241146
uguuuaggauacuuuagau

SEQ ID NO: 1250389 - RNA, 19 nt, Artificial Sequence
  Description of Artificial Sequence: Synthetic oligonucleotide
  Antisense strand to SEQ ID NO: 1250388
aucuaaaguauccuaaaca

SEQ ID NO: 1250390 - RNA, 19 nt, Artificial Sequence
  Description of Artificial Sequence: Synthetic oligonucleotide
  Sense strand starting at position 1698 of SEQ ID NO: 1241146
ccgaauccauguuuaauga

SEQ ID NO: 1250391 - RNA, 19 nt, Artificial Sequence
  Description of Artificial Sequence: Synthetic oligonucleotide
  Antisense strand to SEQ ID NO: 1250390
ucauuaaacauggauucgg

SEQ ID NO: 1250392 - RNA, 19 nt, Artificial Sequence
  Description of Artificial Sequence: Synthetic oligonucleotide
  Sense strand starting at position 2011 of SEQ ID NO: 1241146
cagagaugcguccagagag

SEQ ID NO: 1250393 - RNA, 19 nt, Artificial Sequence
  Description of Artificial Sequence: Synthetic oligonucleotide
  Antisense strand to SEQ ID NO: 1250392
cucucuggacgcaucucug

SEQ ID NO: 1250394 - RNA, 19 nt, Artificial Sequence
  Description of Artificial Sequence: Synthetic oligonucleotide
  Sense strand starting at position 2012 of SEQ ID NO: 1241146
agagaugcguccagagaga

SEQ ID NO: 1250395 - RNA, 19 nt, Artificial Sequence
  Description of Artificial Sequence: Synthetic oligonucleotide
  Antisense strand to SEQ ID NO: 1250394
ucucucuggacgcaucucu

SEQ ID NO: 1250396 - RNA, 19 nt, Artificial Sequence
  Description of Artificial Sequence: Synthetic oligonucleotide
  Sense strand starting at position 2166 of SEQ ID NO: 1241146
gagaaauaugccggacuuc

SEQ ID NO: 1250397 - RNA, 19 nt, Artificial Sequence
  Description of Artificial Sequence: Synthetic oligonucleotide
  Antisense strand to SEQ ID NO: 1250396
gaaguccggcauauuucuc

SEQ ID NO: 1250398 - RNA, 19 nt, Artificial Sequence
  Description of Artificial Sequence: Synthetic oligonucleotide
  Sense strand starting at position 2216 of SEQ ID NO: 1241146
ggagguuuccgauguucca

SEQ ID NO: 1250399 - RNA, 19 nt, Artificial Sequence
  Description of Artificial Sequence: Synthetic oligonucleotide
  Antisense strand to SEQ ID NO: 1250398
uggaacaucggaaaccucc

SEQ ID NO: 1250400 - RNA, 19 nt, Artificial Sequence
  Description of Artificial Sequence: Synthetic oligonucleotide
  Sense strand starting at position 2223 of SEQ ID NO: 1241146
uccgauguuccaugcacuu

SEQ ID NO: 1250401 - RNA, 19 nt, Artificial Sequence
  Description of Artificial Sequence: Synthetic oligonucleotide
  Antisense strand to SEQ ID NO: 1250400
aagugcauggaacaucgga

SEQ ID NO: 1250402 - RNA, 19 nt, Artificial Sequence
  Description of Artificial Sequence: Synthetic oligonucleotide
  Sense strand starting at position 2454 of SEQ ID NO: 1241146
caagcaguuucucucggua

SEQ ID NO: 1250403 - RNA, 19 nt, Artificial Sequence
  Description of Artificial Sequence: Synthetic oligonucleotide
  Antisense strand to SEQ ID NO: 1250402
uaccgagagaaacugcuug

SEQ ID NO: 1250404 - RNA, 19 nt, Artificial Sequence
  Description of Artificial Sequence: Synthetic oligonucleotide
  Sense strand starting at position 2458 of SEQ ID NO: 1241146
caguuucucucgguacuuu

SEQ ID NO: 1250405 - RNA, 19 nt, Artificial Sequence
  Description of Artificial Sequence: Synthetic oligonucleotide
  Antisense strand to SEQ ID NO: 1250404
aaaguaccgagagaaacug

SEQ ID NO: 1250406 - RNA, 19 nt, Artificial Sequence
  Description of Artificial Sequence: Synthetic oligonucleotide
  Sense strand starting at position 2587 of SEQ ID NO: 1241146
uaaagacgugcggaguaau

SEQ ID NO: 1250407 - RNA, 19 nt, Artificial Sequence
  Description of Artificial Sequence: Synthetic oligonucleotide
  Antisense strand to SEQ ID NO: 1250406
auuacuccgcacgucuuua

SEQ ID NO: 1250408 - RNA, 19 nt, Artificial Sequence
  Description of Artificial Sequence: Synthetic oligonucleotide
  Sense strand starting at position 2590 of SEQ ID NO: 1241146
agacgugcggaguaauaaa

SEQ ID NO: 1250409 - RNA, 19 nt, Artificial Sequence
  Description of Artificial Sequence: Synthetic oligonucleotide
  Antisense strand to SEQ ID NO: 1250408
uuuauuacuccgcacgucu

SEQ ID NO: 1250410 - RNA, 19 nt, Artificial Sequence
  Description of Artificial Sequence: Synthetic oligonucleotide
  Sense strand starting at position 2672 of SEQ ID NO: 1241146
caguguuaagcuugauguu

SEQ ID NO: 1250411 - RNA, 19 nt, Artificial Sequence
  Description of Artificial Sequence: Synthetic oligonucleotide
  Antisense strand to SEQ ID NO: 1250410
aacaucaagcuuaacacug

SEQ ID NO: 1250412 - RNA, 19 nt, Artificial Sequence
  Description of Artificial Sequence: Synthetic oligonucleotide
  Sense strand starting at position 2673 of SEQ ID NO: 1241146
aguguuaagcuugauguuu

SEQ ID NO: 1250413 - RNA, 19 nt, Artificial Sequence
  Description of Artificial Sequence: Synthetic oligonucleotide
  Antisense strand to SEQ ID NO: 1250412
aaacaucaagcuuaacacu

SEQ ID NO: 1250414 - RNA, 19 nt, Artificial Sequence
  Description of Artificial Sequence: Synthetic oligonucleotide
  Sense strand starting at position 2684 of SEQ ID NO: 1241146
ugauguuuauccuuccaga

SEQ ID NO: 1250415 - RNA, 19 nt, Artificial Sequence
  Description of Artificial Sequence: Synthetic oligonucleotide
  Antisense strand to SEQ ID NO: 1250414
ucuggaaggauaaacauca

SEQ ID NO: 1250416 - RNA, 19 nt, Artificial Sequence
  Description of Artificial Sequence: Synthetic oligonucleotide
  Sense strand starting at position 2724 of SEQ ID NO: 1241146
auuuauacauggcaguaua

SEQ ID NO: 1250417 - RNA, 19 nt, Artificial Sequence
  Description of Artificial Sequence: Synthetic oligonucleotide
  Antisense strand to SEQ ID NO: 1250416
uauacugccauguauaaau

SEQ ID NO: 1250418 - RNA, 19 nt, Artificial Sequence
  Description of Artificial Sequence: Synthetic oligonucleotide
  Sense strand starting at position 2765 of SEQ ID NO: 1241146
cgugaagcagucugaccau

SEQ ID NO: 1250419 - RNA, 19 nt, Artificial Sequence
  Description of Artificial Sequence: Synthetic oligonucleotide
  Antisense strand to SEQ ID NO: 1250418
auggucagacugcuucacg

SEQ ID NO: 1250420 - RNA, 19 nt, Artificial Sequence
  Description of Artificial Sequence: Synthetic oligonucleotide
  Sense strand starting at position 2949 of SEQ ID NO: 1241146
cccuuauggucacuggaga

SEQ ID NO: 1250421 - RNA, 19 nt, Artificial Sequence
  Description of Artificial Sequence: Synthetic oligonucleotide
  Antisense strand to SEQ ID NO: 1250420
ucuccagugaccauaaggg

SEQ ID NO: 1250422 - RNA, 19 nt, Artificial Sequence
  Description of Artificial Sequence: Synthetic oligonucleotide
  Sense strand starting at position 2950 of SEQ ID NO: 1241146
ccuuauggucacuggagaa

SEQ ID NO: 1250423 - RNA, 19 nt, Artificial Sequence
  Description of Artificial Sequence: Synthetic oligonucleotide
  Antisense strand to SEQ ID NO: 1250422
uucuccagugaccauaagg

SEQ ID NO: 1250424 - RNA, 19 nt, Artificial Sequence
  Description of Artificial Sequence: Synthetic oligonucleotide
  Sense strand starting at position 3438 of SEQ ID NO: 1241146
aagccauaggcugauaugu

SEQ ID NO: 1250425 - RNA, 19 nt, Artificial Sequence
  Description of Artificial Sequence: Synthetic oligonucleotide
  Antisense strand to SEQ ID NO: 1250424
acauaucagccuauggcuu

SEQ ID NO: 1250426 - RNA, 19 nt, Artificial Sequence
  Description of Artificial Sequence: Synthetic oligonucleotide
  Sense strand starting at position 3443 of SEQ ID NO: 1241146
auaggcugauauguaagaa

SEQ ID NO: 1250427 - RNA, 19 nt, Artificial Sequence
  Description of Artificial Sequence: Synthetic oligonucleotide
  Antisense strand to SEQ ID NO: 1250426
uucuuacauaucagccuau

SEQ ID NO: 1250428 - RNA, 19 nt, Artificial Sequence
  Description of Artificial Sequence: Synthetic oligonucleotide
  Sense strand starting at position 3523 of SEQ ID NO: 1241146
ucacauagucaauaugguu

SEQ ID NO: 1250429 - RNA, 19 nt, Artificial Sequence
  Description of Artificial Sequence: Synthetic oligonucleotide
  Antisense strand to SEQ ID NO: 1250428
aaccauauugacuauguga

SEQ ID NO: 1250430 - RNA, 19 nt, Artificial Sequence
  Description of Artificial Sequence: Synthetic oligonucleotide
  Sense strand starting at position 3531 of SEQ ID NO: 1241146
ucaauaugguucucauagu

SEQ ID NO: 1250431 - RNA, 19 nt, Artificial Sequence
  Description of Artificial Sequence: Synthetic oligonucleotide
  Antisense strand to SEQ ID NO: 1250430
acuaugagaaccauauuga

SEQ ID NO: 1250432 - RNA, 19 nt, Artificial Sequence
  Description of Artificial Sequence: Synthetic oligonucleotide
  Sense strand starting at position 3537 of SEQ ID NO: 1241146
ugguucucauagucugaau

SEQ ID NO: 1250433 - RNA, 19 nt, Artificial Sequence
  Description of Artificial Sequence: Synthetic oligonucleotide
  Antisense strand to SEQ ID NO: 1250432
auucagacuaugagaacca

SEQ ID NO: 1250434 - RNA, 19 nt, Artificial Sequence
  Description of Artificial Sequence: Synthetic oligonucleotide
  Sense strand starting at position 3660 of SEQ ID NO: 1241146
uugcucuuagccugaucau

SEQ ID NO: 1250435 - RNA, 19 nt, Artificial Sequence
  Description of Artificial Sequence: Synthetic oligonucleotide
  Antisense strand to SEQ ID NO: 1250434
augaucaggcuaagagcaa

SEQ ID NO: 1250436 - RNA, 19 nt, Artificial Sequence
  Description of Artificial Sequence: Synthetic oligonucleotide
  Sense strand starting at position 3661 of SEQ ID NO: 1241146
ugcucuuagccugaucauu

SEQ ID NO: 1250437 - RNA, 19 nt, Artificial Sequence
  Description of Artificial Sequence: Synthetic oligonucleotide
  Antisense strand to SEQ ID NO: 1250436
aaugaucaggcuaagagca

SEQ ID NO: 1250438 - RNA, 19 nt, Artificial Sequence
  Description of Artificial Sequence: Synthetic oligonucleotide
  Sense strand starting at position 3699 of SEQ ID NO: 1241146
uugcccucuucuuuagaga

SEQ ID NO: 1250439 - RNA, 19 nt, Artificial Sequence
  Description of Artificial Sequence: Synthetic oligonucleotide
  Antisense strand to SEQ ID NO: 1250438
ucucuaaagaagagggcaa

SEQ ID NO: 1250440 - RNA, 19 nt, Artificial Sequence
  Description of Artificial Sequence: Synthetic oligonucleotide
  Sense strand starting at position 3715 of SEQ ID NO: 1241146
agaauaaccuaguccaagu

SEQ ID NO: 1250441 - RNA, 19 nt, Artificial Sequence
  Description of Artificial Sequence: Synthetic oligonucleotide
  Antisense strand to SEQ ID NO: 1250440
acuuggacuagguuauucu

SEQ ID NO: 1250442 - RNA, 19 nt, Artificial Sequence
  Description of Artificial Sequence: Synthetic oligonucleotide
  Sense strand starting at position 3738 of SEQ ID NO: 1241146
auuugcacuccugguuuau

SEQ ID NO: 1250443 - RNA, 19 nt, Artificial Sequence
  Description of Artificial Sequence: Synthetic oligonucleotide
  Antisense strand to SEQ ID NO: 1250442
auaaaccaggagugcaaau

SEQ ID NO: 1250444 - RNA, 19 nt, Artificial Sequence
  Description of Artificial Sequence: Synthetic oligonucleotide
  Sense strand starting at position 3740 of SEQ ID NO: 1241146
uugcacuccugguuuauuu

SEQ ID NO: 1250445 - RNA, 19 nt, Artificial Sequence
  Description of Artificial Sequence: Synthetic oligonucleotide
  Antisense strand to SEQ ID NO: 1250444
aaauaaaccaggagugcaa

SEQ ID NO: 1250446 - RNA, 19 nt, Artificial Sequence
  Description of Artificial Sequence: Synthetic oligonucleotide
  Sense strand starting at position 3755 of SEQ ID NO: 1241146
auuuguuuguuugugauac

SEQ ID NO: 1250447 - RNA, 19 nt, Artificial Sequence
  Description of Artificial Sequence: Synthetic oligonucleotide
  Antisense strand to SEQ ID NO: 1250446
guaucacaaacaaacaaau

SEQ ID NO: 1250448 - RNA, 19 nt, Artificial Sequence
  Description of Artificial Sequence: Synthetic oligonucleotide
  Sense strand starting at position 3761 of SEQ ID NO: 1241146
uuguuugugauacaagguu

SEQ ID NO: 1250449 - RNA, 19 nt, Artificial Sequence
  Description of Artificial Sequence: Synthetic oligonucleotide
  Antisense strand to SEQ ID NO: 1250448
aaccuuguaucacaaacaa

SEQ ID NO: 1250450 - RNA, 19 nt, Artificial Sequence
  Description of Artificial Sequence: Synthetic oligonucleotide
  Sense strand starting at position 3901 of SEQ ID NO: 1241146
ugcaccaugcuugguuaaa

SEQ ID NO: 1250451 - RNA, 19 nt, Artificial Sequence
  Description of Artificial Sequence: Synthetic oligonucleotide
  Antisense strand to SEQ ID NO: 1250450
uuuaaccaagcauggugca

SEQ ID NO: 1250452 - RNA, 19 nt, Artificial Sequence
  Description of Artificial Sequence: Synthetic oligonucleotide
  Sense strand starting at position 3902 of SEQ ID NO: 1241146
gcaccaugcuugguuaaau

SEQ ID NO: 1250453 - RNA, 19 nt, Artificial Sequence
  Description of Artificial Sequence: Synthetic oligonucleotide
  Antisense strand to SEQ ID NO: 1250452
auuuaaccaagcauggugc

SEQ ID NO: 1250454 - RNA, 19 nt, Artificial Sequence
  Description of Artificial Sequence: Synthetic oligonucleotide
  Sense strand starting at position 461 of SEQ ID NO: 1241147
ccuagcuaucucugaugau

SEQ ID NO: 1250455 - RNA, 19 nt, Artificial Sequence
  Description of Artificial Sequence: Synthetic oligonucleotide
  Antisense strand to SEQ ID NO: 1250454
aucaucagagauagcuagg

SEQ ID NO: 1250456 - RNA, 19 nt, Artificial Sequence
  Description of Artificial Sequence: Synthetic oligonucleotide
  Sense strand starting at position 540 of SEQ ID NO: 1241147
cggcgauugguugggauuu

SEQ ID NO: 1250457 - RNA, 19 nt, Artificial Sequence
  Description of Artificial Sequence: Synthetic oligonucleotide
  Antisense strand to SEQ ID NO: 1250456
aaaucccaaccaaucgccg

SEQ ID NO: 1250458 - RNA, 19 nt, Artificial Sequence
  Description of Artificial Sequence: Synthetic oligonucleotide
  Sense strand starting at position 551 of SEQ ID NO: 1241147
ugggauuucucagggagaa

SEQ ID NO: 1250459 - RNA, 19 nt, Artificial Sequence
  Description of Artificial Sequence: Synthetic oligonucleotide
  Antisense strand to SEQ ID NO: 1250458
uucucccugagaaauccca

SEQ ID NO: 1250460 - RNA, 19 nt, Artificial Sequence
  Description of Artificial Sequence: Synthetic oligonucleotide
  Sense strand starting at position 632 of SEQ ID NO: 1241147
gaggguguugagcacugau

SEQ ID NO: 1250461 - RNA, 19 nt, Artificial Sequence
  Description of Artificial Sequence: Synthetic oligonucleotide
  Antisense strand to SEQ ID NO: 1250460
aucagugcucaacacccuc

SEQ ID NO: 1250462 - RNA, 19 nt, Artificial Sequence
  Description of Artificial Sequence: Synthetic oligonucleotide
  Sense strand starting at position 709 of SEQ ID NO: 1241147
ucguguugugugagggacu

SEQ ID NO: 1250463 - RNA, 19 nt, Artificial Sequence
  Description of Artificial Sequence: Synthetic oligonucleotide
  Antisense strand to SEQ ID NO: 1250462
agucccucacacaacacga

SEQ ID NO: 1250464 - RNA, 19 nt, Artificial Sequence
  Description of Artificial Sequence: Synthetic oligonucleotide
  Sense strand starting at position 829 of SEQ ID NO: 1241147
guaagauaauaacuugcau

SEQ ID NO: 1250465 - RNA, 19 nt, Artificial Sequence
  Description of Artificial Sequence: Synthetic oligonucleotide
  Antisense strand to SEQ ID NO: 1250464
augcaaguuauuaucuuac

SEQ ID NO: 1250466 - RNA, 19 nt, Artificial Sequence
  Description of Artificial Sequence: Synthetic oligonucleotide
  Sense strand starting at position 970 of SEQ ID NO: 1241147
accugauuaggucagugga

SEQ ID NO: 1250467 - RNA, 19 nt, Artificial Sequence
  Description of Artificial Sequence: Synthetic oligonucleotide
  Antisense strand to SEQ ID NO: 1250466
uccacugaccuaaucaggu

SEQ ID NO: 1250468 - RNA, 19 nt, Artificial Sequence
  Description of Artificial Sequence: Synthetic oligonucleotide
  Sense strand starting at position 972 of SEQ ID NO: 1241147
cugauuaggucaguggaca

SEQ ID NO: 1250469 - RNA, 19 nt, Artificial Sequence
  Description of Artificial Sequence: Synthetic oligonucleotide
  Antisense strand to SEQ ID NO: 1250468
uguccacugaccuaaucag

SEQ ID NO: 1250470 - RNA, 19 nt, Artificial Sequence
  Description of Artificial Sequence: Synthetic oligonucleotide
  Sense strand starting at position 1072 of SEQ ID NO: 1241147
aagggauuguccucaccug

SEQ ID NO: 1250471 - RNA, 19 nt, Artificial Sequence
  Description of Artificial Sequence: Synthetic oligonucleotide
  Antisense strand to SEQ ID NO: 1250470
caggugaggacaaucccuu

SEQ ID NO: 1250472 - RNA, 19 nt, Artificial Sequence
  Description of Artificial Sequence: Synthetic oligonucleotide
  Sense strand starting at position 1104 of SEQ ID NO: 1241147
uuauaaaguuggcuagaga

SEQ ID NO: 1250473 - RNA, 19 nt, Artificial Sequence
  Description of Artificial Sequence: Synthetic oligonucleotide
  Antisense strand to SEQ ID NO: 1250472
ucucuagccaacuuuauaa

SEQ ID NO: 1250474 - RNA, 19 nt, Artificial Sequence
  Description of Artificial Sequence: Synthetic oligonucleotide
  Sense strand starting at position 1216 of SEQ ID NO: 1241147
aguaauaugugacccuauu

SEQ ID NO: 1250475 - RNA, 19 nt, Artificial Sequence
  Description of Artificial Sequence: Synthetic oligonucleotide
  Antisense strand to SEQ ID NO: 1250474
aauagggucacauauuacu

SEQ ID NO: 1250476 - RNA, 19 nt, Artificial Sequence
  Description of Artificial Sequence: Synthetic oligonucleotide
  Sense strand starting at position 1263 of SEQ ID NO: 1241147
gucuacaagagauggcaau

SEQ ID NO: 1250477 - RNA, 19 nt, Artificial Sequence
  Description of Artificial Sequence: Synthetic oligonucleotide
  Antisense strand to SEQ ID NO: 1250476
auugccaucucuuguagac

SEQ ID NO: 1250478 - RNA, 19 nt, Artificial Sequence
  Description of Artificial Sequence: Synthetic oligonucleotide
  Sense strand starting at position 1273 of SEQ ID NO: 1241147
gauggcaauucuguaauuc

SEQ ID NO: 1250479 - RNA, 19 nt, Artificial Sequence
  Description of Artificial Sequence: Synthetic oligonucleotide
  Antisense strand to SEQ ID NO: 1250478
gaauuacagaauugccauc

SEQ ID NO: 1250480 - RNA, 19 nt, Artificial Sequence
  Description of Artificial Sequence: Synthetic oligonucleotide
  Sense strand starting at position 1336 of SEQ ID NO: 1241147
gagacagugugacuuucuu

SEQ ID NO: 1250481 - RNA, 19 nt, Artificial Sequence
  Description of Artificial Sequence: Synthetic oligonucleotide
  Antisense strand to SEQ ID NO: 1250480
aagaaagucacacugucuc

SEQ ID NO: 1250482 - RNA, 19 nt, Artificial Sequence
  Description of Artificial Sequence: Synthetic oligonucleotide
  Sense strand starting at position 1406 of SEQ ID NO: 1241147
uguuaaaggcauuggaaau

SEQ ID NO: 1250483 - RNA, 19 nt, Artificial Sequence
  Description of Artificial Sequence: Synthetic oligonucleotide
  Antisense strand to SEQ ID NO: 1250482
auuuccaaugccuuuaaca

SEQ ID NO: 1250484 - RNA, 19 nt, Artificial Sequence
  Description of Artificial Sequence: Synthetic oligonucleotide
  Sense strand starting at position 1407 of SEQ ID NO: 1241147
guuaaaggcauuggaaauu

SEQ ID NO: 1250485 - RNA, 19 nt, Artificial Sequence
  Description of Artificial Sequence: Synthetic oligonucleotide
  Antisense strand to SEQ ID NO: 1250484
aauuuccaaugccuuuaac

SEQ ID NO: 1250486 - RNA, 19 nt, Artificial Sequence
  Description of Artificial Sequence: Synthetic oligonucleotide
  Sense strand starting at position 1497 of SEQ ID NO: 1241147
accaguuauuggucuuaug

SEQ ID NO: 1250487 - RNA, 19 nt, Artificial Sequence
  Description of Artificial Sequence: Synthetic oligonucleotide
  Antisense strand to SEQ ID NO: 1250486
cauaagaccaauaacuggu

SEQ ID NO: 1250488 - RNA, 19 nt, Artificial Sequence
  Description of Artificial Sequence: Synthetic oligonucleotide
  Sense strand starting at position 1561 of SEQ ID NO: 1241147
ucagaauuugcaggcugua

SEQ ID NO: 1250489 - RNA, 19 nt, Artificial Sequence
  Description of Artificial Sequence: Synthetic oligonucleotide
  Antisense strand to SEQ ID NO: 1250488
uacagccugcaaauucuga

SEQ ID NO: 1250490 - RNA, 19 nt, Artificial Sequence
  Description of Artificial Sequence: Synthetic oligonucleotide
  Sense strand starting at position 1564 of SEQ ID NO: 1241147
gaauuugcaggcuguaacu

SEQ ID NO: 1250491 - RNA, 19 nt, Artificial Sequence
  Description of Artificial Sequence: Synthetic oligonucleotide
  Antisense strand to SEQ ID NO: 1250490
aguuacagccugcaaauuc

SEQ ID NO: 1250492 - RNA, 19 nt, Artificial Sequence
  Description of Artificial Sequence: Synthetic oligonucleotide
  Sense strand starting at position 1804 of SEQ ID NO: 1241147
gccaauagguagguguaaa

SEQ ID NO: 1250493 - RNA, 19 nt, Artificial Sequence
  Description of Artificial Sequence: Synthetic oligonucleotide
  Antisense strand to SEQ ID NO: 1250492
uuuacaccuaccuauuggc

SEQ ID NO: 1250494 - RNA, 19 nt, Artificial Sequence
  Description of Artificial Sequence: Synthetic oligonucleotide
  Sense strand starting at position 2135 of SEQ ID NO: 1241147
gcacuuuagggaugauaag

SEQ ID NO: 1250495 - RNA, 19 nt, Artificial Sequence
  Description of Artificial Sequence: Synthetic oligonucleotide
  Antisense strand to SEQ ID NO: 1250494
cuuaucaucccuaaagugc

SEQ ID NO: 1250496 - RNA, 19 nt, Artificial Sequence
  Description of Artificial Sequence: Synthetic oligonucleotide
  Sense strand starting at position 2141 of SEQ ID NO: 1241147
uagggaugauaagagauua

SEQ ID NO: 1250497 - RNA, 19 nt, Artificial Sequence
  Description of Artificial Sequence: Synthetic oligonucleotide
  Antisense strand to SEQ ID NO: 1250496
uaaucucuuaucaucccua

SEQ ID NO: 1250498 - RNA, 19 nt, Artificial Sequence
  Description of Artificial Sequence: Synthetic oligonucleotide
  Sense strand starting at position 2215 of SEQ ID NO: 1241147
gcccaagaccuguauguug

SEQ ID NO: 1250499 - RNA, 19 nt, Artificial Sequence
  Description of Artificial Sequence: Synthetic oligonucleotide
  Antisense strand to SEQ ID NO: 1250498
caacauacaggucuugggc

SEQ ID NO: 1250500 - RNA, 19 nt, Artificial Sequence
  Description of Artificial Sequence: Synthetic oligonucleotide
  Sense strand starting at position 2293 of SEQ ID NO: 1241147
gucagugaacauugaggga

SEQ ID NO: 1250501 - RNA, 19 nt, Artificial Sequence
  Description of Artificial Sequence: Synthetic oligonucleotide
  Antisense strand to SEQ ID NO: 1250500
ucccucaauguucacugac

SEQ ID NO: 1250502 - RNA, 19 nt, Artificial Sequence
  Description of Artificial Sequence: Synthetic oligonucleotide
  Sense strand starting at position 2547 of SEQ ID NO: 1241147
aaauuaugucugcaugggu

SEQ ID NO: 1250503 - RNA, 19 nt, Artificial Sequence
  Description of Artificial Sequence: Synthetic oligonucleotide
  Antisense strand to SEQ ID NO: 1250502
acccaugcagacauaauuu

SEQ ID NO: 1250504 - RNA, 19 nt, Artificial Sequence
  Description of Artificial Sequence: Synthetic oligonucleotide
  Sense strand starting at position 2614 of SEQ ID NO: 1241147
ggcuuugagaaucagguga

SEQ ID NO: 1250505 - RNA, 19 nt, Artificial Sequence
  Description of Artificial Sequence: Synthetic oligonucleotide
  Antisense strand to SEQ ID NO: 1250504
ucaccugauucucaaagcc

SEQ ID NO: 1250506 - RNA, 19 nt, Artificial Sequence
  Description of Artificial Sequence: Synthetic oligonucleotide
  Sense strand starting at position 2629 of SEQ ID NO: 1241147
gugacaagauucuccaacu

SEQ ID NO: 1250507 - RNA, 19 nt, Artificial Sequence
  Description of Artificial Sequence: Synthetic oligonucleotide
  Antisense strand to SEQ ID NO: 1250506
aguuggagaaucuugucac

SEQ ID NO: 1250508 - RNA, 19 nt, Artificial Sequence
  Description of Artificial Sequence: Synthetic oligonucleotide
  Sense strand starting at position 2743 of SEQ ID NO: 1241147
gucugacuucuggaaaggu

SEQ ID NO: 1250509 - RNA, 19 nt, Artificial Sequence
  Description of Artificial Sequence: Synthetic oligonucleotide
  Antisense strand to SEQ ID NO: 1250508
accuuuccagaagucagac

SEQ ID NO: 1250510 - RNA, 19 nt, Artificial Sequence
  Description of Artificial Sequence: Synthetic oligonucleotide
  Sense strand starting at position 2986 of SEQ ID NO: 1241147
gaauuugccuuagaggaua

SEQ ID NO: 1250511 - RNA, 19 nt, Artificial Sequence
  Description of Artificial Sequence: Synthetic oligonucleotide
  Antisense strand to SEQ ID NO: 1250510
uauccucuaaggcaaauuc

SEQ ID NO: 1250512 - RNA, 19 nt, Artificial Sequence
  Description of Artificial Sequence: Synthetic oligonucleotide
  Sense strand starting at position 3082 of SEQ ID NO: 1241147
uccauuacucccgggauag

SEQ ID NO: 1250513 - RNA, 19 nt, Artificial Sequence
  Description of Artificial Sequence: Synthetic oligonucleotide
  Antisense strand to SEQ ID NO: 1250512
cuaucccgggaguaaugga

SEQ ID NO: 1250514 - RNA, 19 nt, Artificial Sequence
  Description of Artificial Sequence: Synthetic oligonucleotide
  Sense strand starting at position 3083 of SEQ ID NO: 1241147
ccauuacucccgggauaga

SEQ ID NO: 1250515 - RNA, 19 nt, Artificial Sequence
  Description of Artificial Sequence: Synthetic oligonucleotide
  Antisense strand to SEQ ID NO: 1250514
ucuaucccgggaguaaugg

SEQ ID NO: 1250516 - RNA, 19 nt, Artificial Sequence
  Description of Artificial Sequence: Synthetic oligonucleotide
  Sense strand starting at position 3196 of SEQ ID NO: 1241147
ucaguaugaguuuagacua

SEQ ID NO: 1250517 - RNA, 19 nt, Artificial Sequence
  Description of Artificial Sequence: Synthetic oligonucleotide
  Antisense strand to SEQ ID NO: 1250516
uagucuaaacucauacuga

SEQ ID NO: 1250518 - RNA, 19 nt, Artificial Sequence
  Description of Artificial Sequence: Synthetic oligonucleotide
  Sense strand starting at position 3203 of SEQ ID NO: 1241147
gaguuuagacuauacuguu

SEQ ID NO: 1250519 - RNA, 19 nt, Artificial Sequence
  Description of Artificial Sequence: Synthetic oligonucleotide
  Antisense strand to SEQ ID NO: 1250518
aacaguauagucuaaacuc

SEQ ID NO: 1250520 - RNA, 19 nt, Artificial Sequence
  Description of Artificial Sequence: Synthetic oligonucleotide
  Sense strand starting at position 3209 of SEQ ID NO: 1241147
agacuauacuguuucugag

SEQ ID NO: 1250521 - RNA, 19 nt, Artificial Sequence
  Description of Artificial Sequence: Synthetic oligonucleotide
  Antisense strand to SEQ ID NO: 1250520
cucagaaacaguauagucu

SEQ ID NO: 1250522 - RNA, 19 nt, Artificial Sequence
  Description of Artificial Sequence: Synthetic oligonucleotide
  Sense strand starting at position 3211 of SEQ ID NO: 1241147
acuauacuguuucugagaa

SEQ ID NO: 1250523 - RNA, 19 nt, Artificial Sequence
  Description of Artificial Sequence: Synthetic oligonucleotide
  Antisense strand to SEQ ID NO: 1250522
uucucagaaacaguauagu

SEQ ID NO: 1250524 - RNA, 19 nt, Artificial Sequence
  Description of Artificial Sequence: Synthetic oligonucleotide
  Sense strand starting at position 3328 of SEQ ID NO: 1241147
ugccucuugcuggaagaca

SEQ ID NO: 1250525 - RNA, 19 nt, Artificial Sequence
  Description of Artificial Sequence: Synthetic oligonucleotide
  Antisense strand to SEQ ID NO: 1250524
ugucuuccagcaagaggca

SEQ ID NO: 1250526 - RNA, 19 nt, Artificial Sequence
  Description of Artificial Sequence: Synthetic oligonucleotide
  Sense strand starting at position 3375 of SEQ ID NO: 1241147
cuggacuucggagaugcau

SEQ ID NO: 1250527 - RNA, 19 nt, Artificial Sequence
  Description of Artificial Sequence: Synthetic oligonucleotide
  Antisense strand to SEQ ID NO: 1250526
augcaucuccgaaguccag

SEQ ID NO: 1250528 - RNA, 19 nt, Artificial Sequence
  Description of Artificial Sequence: Synthetic oligonucleotide
  Sense strand starting at position 3464 of SEQ ID NO: 1241147
ugcucaucuccacgggaaa

SEQ ID NO: 1250529 - RNA, 19 nt, Artificial Sequence
  Description of Artificial Sequence: Synthetic oligonucleotide
  Antisense strand to SEQ ID NO: 1250528
uuucccguggagaugagca

SEQ ID NO: 1250530 - RNA, 19 nt, Artificial Sequence
  Description of Artificial Sequence: Synthetic oligonucleotide
  Sense strand starting at position 3465 of SEQ ID NO: 1241147
gcucaucuccacgggaaau

SEQ ID NO: 1250531 - RNA, 19 nt, Artificial Sequence
  Description of Artificial Sequence: Synthetic oligonucleotide
  Antisense strand to SEQ ID NO: 1250530
auuucccguggagaugagc

SEQ ID NO: 1250532 - RNA, 19 nt, Artificial Sequence
  Description of Artificial Sequence: Synthetic oligonucleotide
  Sense strand starting at position 3600 of SEQ ID NO: 1241147
uauaguguggcagaagaua

SEQ ID NO: 1250533 - RNA, 19 nt, Artificial Sequence
  Description of Artificial Sequence: Synthetic oligonucleotide
  Antisense strand to SEQ ID NO: 1250532
uaucuucugccacacuaua

SEQ ID NO: 1250534 - RNA, 19 nt, Artificial Sequence
  Description of Artificial Sequence: Synthetic oligonucleotide
  Sense strand starting at position 6 of SEQ ID NO: 1241148
ggcuaugacacugggcaaa

SEQ ID NO: 1250535 - RNA, 19 nt, Artificial Sequence
  Description of Artificial Sequence: Synthetic oligonucleotide
  Antisense strand to SEQ ID NO: 1250534
uuugcccagugucauagcc

SEQ ID NO: 1250536 - RNA, 19 nt, Artificial Sequence
  Description of Artificial Sequence: Synthetic oligonucleotide
  Sense strand starting at position 132 of SEQ ID NO: 1241148
ugagccagucacuguguua

SEQ ID NO: 1250537 - RNA, 19 nt, Artificial Sequence
  Description of Artificial Sequence: Synthetic oligonucleotide
  Antisense strand to SEQ ID NO: 1250536
uaacacagugacuggcuca

SEQ ID NO: 1250538 - RNA, 19 nt, Artificial Sequence
  Description of Artificial Sequence: Synthetic oligonucleotide
  Sense strand starting at position 362 of SEQ ID NO: 1241148
caaagagauugaggcauuu

SEQ ID NO: 1250539 - RNA, 19 nt, Artificial Sequence
  Description of Artificial Sequence: Synthetic oligonucleotide
  Antisense strand to SEQ ID NO: 1250538
aaaugccucaaucucuuug

SEQ ID NO: 1250540 - RNA, 19 nt, Artificial Sequence
  Description of Artificial Sequence: Synthetic oligonucleotide
  Sense strand starting at position 982 of SEQ ID NO: 1241148
ccauuuauuuagugccuau

SEQ ID NO: 1250541 - RNA, 19 nt, Artificial Sequence
  Description of Artificial Sequence: Synthetic oligonucleotide
  Antisense strand to SEQ ID NO: 1250540
auaggcacuaaauaaaugg

SEQ ID NO: 1250542 - RNA, 19 nt, Artificial Sequence
  Description of Artificial Sequence: Synthetic oligonucleotide
  Sense strand starting at position 1035 of SEQ ID NO: 1241148
ucuaucuuugcauaaagag

SEQ ID NO: 1250543 - RNA, 19 nt, Artificial Sequence
  Description of Artificial Sequence: Synthetic oligonucleotide
  Antisense strand to SEQ ID NO: 1250542
cucuuuaugcaaagauaga

SEQ ID NO: 1250544 - RNA, 19 nt, Artificial Sequence
  Description of Artificial Sequence: Synthetic oligonucleotide
  Sense strand starting at position 1056 of SEQ ID NO: 1241148
acuuccaggucuucuuuau

SEQ ID NO: 1250545 - RNA, 19 nt, Artificial Sequence
  Description of Artificial Sequence: Synthetic oligonucleotide
  Antisense strand to SEQ ID NO: 1250544
auaaagaagaccuggaagu

SEQ ID NO: 1250546 - RNA, 19 nt, Artificial Sequence
  Description of Artificial Sequence: Synthetic oligonucleotide
  Sense strand starting at position 1067 of SEQ ID NO: 1241148
uucuuuauagcucaggaga

SEQ ID NO: 1250547 - RNA, 19 nt, Artificial Sequence
  Description of Artificial Sequence: Synthetic oligonucleotide
  Antisense strand to SEQ ID NO: 1250546
ucuccugagcuauaaagaa

SEQ ID NO: 1250548 - RNA, 19 nt, Artificial Sequence
  Description of Artificial Sequence: Synthetic oligonucleotide
  Sense strand starting at position 1362 of SEQ ID NO: 1241148
cugcuuugcagacagagaa

SEQ ID NO: 1250549 - RNA, 19 nt, Artificial Sequence
  Description of Artificial Sequence: Synthetic oligonucleotide
  Antisense strand to SEQ ID NO: 1250548
uucucugucugcaaagcag

SEQ ID NO: 1250550 - RNA, 19 nt, Artificial Sequence
  Description of Artificial Sequence: Synthetic oligonucleotide
  Sense strand starting at position 1531 of SEQ ID NO: 1241148
ccacucaaaguaugugaaa

SEQ ID NO: 1250551 - RNA, 19 nt, Artificial Sequence
  Description of Artificial Sequence: Synthetic oligonucleotide
  Antisense strand to SEQ ID NO: 1250550
uuucacauacuuugagugg

SEQ ID NO: 1250552 - RNA, 19 nt, Artificial Sequence
  Description of Artificial Sequence: Synthetic oligonucleotide
  Sense strand starting at position 2160 of SEQ ID NO: 1241148
agauuuccauguuugcgua

SEQ ID NO: 1250553 - RNA, 19 nt, Artificial Sequence
  Description of Artificial Sequence: Synthetic oligonucleotide
  Antisense strand to SEQ ID NO: 1250552
uacgcaaacauggaaaucu

SEQ ID NO: 1250554 - RNA, 19 nt, Artificial Sequence
  Description of Artificial Sequence: Synthetic oligonucleotide
  Sense strand starting at position 2259 of SEQ ID NO: 1241148
gaauaaauuugccucgcgu

SEQ ID NO: 1250555 - RNA, 19 nt, Artificial Sequence
  Description of Artificial Sequence: Synthetic oligonucleotide
  Antisense strand to SEQ ID NO: 1250554
acgcgaggcaaauuuauuc

SEQ ID NO: 1250556 - RNA, 19 nt, Artificial Sequence
  Description of Artificial Sequence: Synthetic oligonucleotide
  Sense strand starting at position 2261 of SEQ ID NO: 1241148
auaaauuugccucgcguaa

SEQ ID NO: 1250557 - RNA, 19 nt, Artificial Sequence
  Description of Artificial Sequence: Synthetic oligonucleotide
  Antisense strand to SEQ ID NO: 1250556
uuacgcgaggcaaauuuau

SEQ ID NO: 1250558 - RNA, 19 nt, Artificial Sequence
  Description of Artificial Sequence: Synthetic oligonucleotide
  Sense strand starting at position 2265 of SEQ ID NO: 1241148
auuugccucgcguaacauu

SEQ ID NO: 1250559 - RNA, 19 nt, Artificial Sequence
  Description of Artificial Sequence: Synthetic oligonucleotide
  Antisense strand to SEQ ID NO: 1250558
aauguuacgcgaggcaaau

SEQ ID NO: 1250560 - RNA, 19 nt, Artificial Sequence
  Description of Artificial Sequence: Synthetic oligonucleotide
  Sense strand starting at position 2297 of SEQ ID NO: 1241148
uauuuaucuucuugaggug

SEQ ID NO: 1250561 - RNA, 19 nt, Artificial Sequence
  Description of Artificial Sequence: Synthetic oligonucleotide
  Antisense strand to SEQ ID NO: 1250560
caccucaagaagauaaaua

SEQ ID NO: 1250562 - RNA, 19 nt, Artificial Sequence
  Description of Artificial Sequence: Synthetic oligonucleotide
  Sense strand starting at position 2302 of SEQ ID NO: 1241148
aucuucuugaggugguuau

SEQ ID NO: 1250563 - RNA, 19 nt, Artificial Sequence
  Description of Artificial Sequence: Synthetic oligonucleotide
  Antisense strand to SEQ ID NO: 1250562
auaaccaccucaagaagau

SEQ ID NO: 1250564 - RNA, 19 nt, Artificial Sequence
  Description of Artificial Sequence: Synthetic oligonucleotide
  Sense strand starting at position 2303 of SEQ ID NO: 1241148
ucuucuugaggugguuauu

SEQ ID NO: 1250565 - RNA, 19 nt, Artificial Sequence
  Description of Artificial Sequence: Synthetic oligonucleotide
  Antisense strand to SEQ ID NO: 1250564
aauaaccaccucaagaaga

SEQ ID NO: 1250566 - RNA, 19 nt, Artificial Sequence
  Description of Artificial Sequence: Synthetic oligonucleotide
  Sense strand starting at position 2352 of SEQ ID NO: 1241148
gcguuuacgcggaaggugu

SEQ ID NO: 1250567 - RNA, 19 nt, Artificial Sequence
  Description of Artificial Sequence: Synthetic oligonucleotide
  Antisense strand to SEQ ID NO: 1250566
acaccuuccgcguaaacgc

SEQ ID NO: 1250568 - RNA, 19 nt, Artificial Sequence
  Description of Artificial Sequence: Synthetic oligonucleotide
  Sense strand starting at position 2395 of SEQ ID NO: 1241148
ggcggaguccugggauuuc

SEQ ID NO: 1250569 - RNA, 19 nt, Artificial Sequence
  Description of Artificial Sequence: Synthetic oligonucleotide
  Antisense strand to SEQ ID NO: 1250568
gaaaucccaggacuccgcc

SEQ ID NO: 1250570 - RNA, 19 nt, Artificial Sequence
  Description of Artificial Sequence: Synthetic oligonucleotide
  Sense strand starting at position 2406 of SEQ ID NO: 1241148
gggauuucuuuguaugcca

SEQ ID NO: 1250571 - RNA, 19 nt, Artificial Sequence
  Description of Artificial Sequence: Synthetic oligonucleotide
  Antisense strand to SEQ ID NO: 1250570
uggcauacaaagaaauccc

SEQ ID NO: 1250572 - RNA, 19 nt, Artificial Sequence
  Description of Artificial Sequence: Synthetic oligonucleotide
  Sense strand starting at position 2507 of SEQ ID NO: 1241148
cguuucuucggagauguau

SEQ ID NO: 1250573 - RNA, 19 nt, Artificial Sequence
  Description of Artificial Sequence: Synthetic oligonucleotide
  Antisense strand to SEQ ID NO: 1250572
auacaucuccgaagaaacg

SEQ ID NO: 1250574 - RNA, 19 nt, Artificial Sequence
  Description of Artificial Sequence: Synthetic oligonucleotide
  Sense strand starting at position 2518 of SEQ ID NO: 1241148
agauguauggcggagguuu

SEQ ID NO: 1250575 - RNA, 19 nt, Artificial Sequence
  Description of Artificial Sequence: Synthetic oligonucleotide
  Antisense strand to SEQ ID NO: 1250574
aaaccuccgccauacaucu

SEQ ID NO: 1250576 - RNA, 19 nt, Artificial Sequence
  Description of Artificial Sequence: Synthetic oligonucleotide
  Sense strand starting at position 2531 of SEQ ID NO: 1241148
agguuucucccaugucaag

SEQ ID NO: 1250577 - RNA, 19 nt, Artificial Sequence
  Description of Artificial Sequence: Synthetic oligonucleotide
  Antisense strand to SEQ ID NO: 1250576
cuugacaugggagaaaccu

SEQ ID NO: 1250578 - RNA, 19 nt, Artificial Sequence
  Description of Artificial Sequence: Synthetic oligonucleotide
  Sense strand starting at position 2823 of SEQ ID NO: 1241148
gccugaucccaucaucaug

SEQ ID NO: 1250579 - RNA, 19 nt, Artificial Sequence
  Description of Artificial Sequence: Synthetic oligonucleotide
  Antisense strand to SEQ ID NO: 1250578
caugaugaugggaucaggc

SEQ ID NO: 1250580 - RNA, 19 nt, Artificial Sequence
  Description of Artificial Sequence: Synthetic oligonucleotide
  Sense strand starting at position 2829 of SEQ ID NO: 1241148
ucccaucaucauggagaca

SEQ ID NO: 1250581 - RNA, 19 nt, Artificial Sequence
  Description of Artificial Sequence: Synthetic oligonucleotide
  Antisense strand to SEQ ID NO: 1250580
ugucuccaugaugauggga

SEQ ID NO: 1250582 - RNA, 19 nt, Artificial Sequence
  Description of Artificial Sequence: Synthetic oligonucleotide
  Sense strand starting at position 2850 of SEQ ID NO: 1241148
gaaacagagucucagauca

SEQ ID NO: 1250583 - RNA, 19 nt, Artificial Sequence
  Description of Artificial Sequence: Synthetic oligonucleotide
  Antisense strand to SEQ ID NO: 1250582
ugaucugagacucuguuuc

SEQ ID NO: 1250584 - RNA, 19 nt, Artificial Sequence
  Description of Artificial Sequence: Synthetic oligonucleotide
  Sense strand starting at position 2855 of SEQ ID NO: 1241148
agagucucagaucaguuua

SEQ ID NO: 1250585 - RNA, 19 nt, Artificial Sequence
  Description of Artificial Sequence: Synthetic oligonucleotide
  Antisense strand to SEQ ID NO: 1250584
uaaacugaucugagacucu

SEQ ID NO: 1250586 - RNA, 19 nt, Artificial Sequence
  Description of Artificial Sequence: Synthetic oligonucleotide
  Sense strand starting at position 2949 of SEQ ID NO: 1241148
ggcugugugguugacucau

SEQ ID NO: 1250587 - RNA, 19 nt, Artificial Sequence
  Description of Artificial Sequence: Synthetic oligonucleotide
  Antisense strand to SEQ ID NO: 1250586
augagucaaccacacagcc

SEQ ID NO: 1250588 - RNA, 19 nt, Artificial Sequence
  Description of Artificial Sequence: Synthetic oligonucleotide
  Sense strand starting at position 2957 of SEQ ID NO: 1241148
gguugacucaucugugcac

SEQ ID NO: 1250589 - RNA, 19 nt, Artificial Sequence
  Description of Artificial Sequence: Synthetic oligonucleotide
  Antisense strand to SEQ ID NO: 1250588
gugcacagaugagucaacc

SEQ ID NO: 1250590 - RNA, 19 nt, Artificial Sequence
  Description of Artificial Sequence: Synthetic oligonucleotide
  Sense strand starting at position 2997 of SEQ ID NO: 1241148
ggcuccuuaaucuggaguu

SEQ ID NO: 1250591 - RNA, 19 nt, Artificial Sequence
  Description of Artificial Sequence: Synthetic oligonucleotide
  Antisense strand to SEQ ID NO: 1250590
aacuccagauuaaggagcc

SEQ ID NO: 1250592 - RNA, 19 nt, Artificial Sequence
  Description of Artificial Sequence: Synthetic oligonucleotide
  Sense strand starting at position 3010 of SEQ ID NO: 1241148
ggaguuuccugacuugcca

SEQ ID NO: 1250593 - RNA, 19 nt, Artificial Sequence
  Description of Artificial Sequence: Synthetic oligonucleotide
  Antisense strand to SEQ ID NO: 1250592
uggcaagucaggaaacucc

SEQ ID NO: 1250594 - RNA, 19 nt, Artificial Sequence
  Description of Artificial Sequence: Synthetic oligonucleotide
  Sense strand starting at position 3106 of SEQ ID NO: 1241148
uauggagccucaucuauag

SEQ ID NO: 1250595 - RNA, 19 nt, Artificial Sequence
  Description of Artificial Sequence: Synthetic oligonucleotide
  Antisense strand to SEQ ID NO: 1250594
cuauagaugaggcuccaua

SEQ ID NO: 1250596 - RNA, 19 nt, Artificial Sequence
  Description of Artificial Sequence: Synthetic oligonucleotide
  Sense strand starting at position 3138 of SEQ ID NO: 1241148
auugaagagcucugagauc

SEQ ID NO: 1250597 - RNA, 19 nt, Artificial Sequence
  Description of Artificial Sequence: Synthetic oligonucleotide
  Antisense strand to SEQ ID NO: 1250596
gaucucagagcucuucaau

SEQ ID NO: 1250598 - RNA, 19 nt, Artificial Sequence
  Description of Artificial Sequence: Synthetic oligonucleotide
  Sense strand starting at position 3219 of SEQ ID NO: 1241148
auuguagagcucuguaucu

SEQ ID NO: 1250599 - RNA, 19 nt, Artificial Sequence
  Description of Artificial Sequence: Synthetic oligonucleotide
  Antisense strand to SEQ ID NO: 1250598
agauacagagcucuacaau

SEQ ID NO: 1250600 - RNA, 19 nt, Artificial Sequence
  Description of Artificial Sequence: Synthetic oligonucleotide
  Sense strand starting at position 3221 of SEQ ID NO: 1241148
uguagagcucuguaucuau

SEQ ID NO: 1250601 - RNA, 19 nt, Artificial Sequence
  Description of Artificial Sequence: Synthetic oligonucleotide
  Antisense strand to SEQ ID NO: 1250600
auagauacagagcucuaca

SEQ ID NO: 1250602 - RNA, 19 nt, Artificial Sequence
  Description of Artificial Sequence: Synthetic oligonucleotide
  Sense strand starting at position 3230 of SEQ ID NO: 1241148
cuguaucuaugaguugaaa

SEQ ID NO: 1250603 - RNA, 19 nt, Artificial Sequence
  Description of Artificial Sequence: Synthetic oligonucleotide
  Antisense strand to SEQ ID NO: 1250602
uuucaacucauagauacag

SEQ ID NO: 1250604 - RNA, 19 nt, Artificial Sequence
  Description of Artificial Sequence: Synthetic oligonucleotide
  Sense strand starting at position 3268 of SEQ ID NO: 1241148
caauguugaugcuucugua

SEQ ID NO: 1250605 - RNA, 19 nt, Artificial Sequence
  Description of Artificial Sequence: Synthetic oligonucleotide
  Antisense strand to SEQ ID NO: 1250604
uacagaagcaucaacauug

SEQ ID NO: 1250606 - RNA, 19 nt, Artificial Sequence
  Description of Artificial Sequence: Synthetic oligonucleotide
  Sense strand starting at position 3272 of SEQ ID NO: 1241148
guugaugcuucuguaaaua

SEQ ID NO: 1250607 - RNA, 19 nt, Artificial Sequence
  Description of Artificial Sequence: Synthetic oligonucleotide
  Antisense strand to SEQ ID NO: 1250606
uauuuacagaagcaucaac

SEQ ID NO: 1250608 - RNA, 19 nt, Artificial Sequence
  Description of Artificial Sequence: Synthetic oligonucleotide
  Sense strand starting at position 3282 of SEQ ID NO: 1241148
cuguaaauaucauugacag

SEQ ID NO: 1250609 - RNA, 19 nt, Artificial Sequence
  Description of Artificial Sequence: Synthetic oligonucleotide
  Antisense strand to SEQ ID NO: 1250608
cugucaaugauauuuacag

SEQ ID NO: 1250610 - RNA, 19 nt, Artificial Sequence
  Description of Artificial Sequence: Synthetic oligonucleotide
  Sense strand starting at position 3746 of SEQ ID NO: 1241148
aucugagugucacuguguu

SEQ ID NO: 1250611 - RNA, 19 nt, Artificial Sequence
  Description of Artificial Sequence: Synthetic oligonucleotide
  Antisense strand to SEQ ID NO: 1250610
aacacagugacacucagau

SEQ ID NO: 1250612 - RNA, 19 nt, Artificial Sequence
  Description of Artificial Sequence: Synthetic oligonucleotide
  Sense strand starting at position 3830 of SEQ ID NO: 1241148
acugguaucuacccacaca

SEQ ID NO: 1250613 - RNA, 19 nt, Artificial Sequence
  Description of Artificial Sequence: Synthetic oligonucleotide
  Antisense strand to SEQ ID NO: 1250612
uguguggguagauaccagu

SEQ ID NO: 1250614 - RNA, 19 nt, Artificial Sequence
  Description of Artificial Sequence: Synthetic oligonucleotide
  Sense strand starting at position 411 of SEQ ID NO: 1241149
ccucaagucucagcugagu

SEQ ID NO: 1250615 - RNA, 19 nt, Artificial Sequence
  Description of Artificial Sequence: Synthetic oligonucleotide
  Antisense strand to SEQ ID NO: 1250614
acucagcugagacuugagg

SEQ ID NO: 1250616 - RNA, 19 nt, Artificial Sequence
  Description of Artificial Sequence: Synthetic oligonucleotide
  Sense strand starting at position 414 of SEQ ID NO: 1241149
caagucucagcugaguuaa

SEQ ID NO: 1250617 - RNA, 19 nt, Artificial Sequence
  Description of Artificial Sequence: Synthetic oligonucleotide
  Antisense strand to SEQ ID NO: 1250616
uuaacucagcugagacuug

SEQ ID NO: 1250618 - RNA, 19 nt, Artificial Sequence
  Description of Artificial Sequence: Synthetic oligonucleotide
  Sense strand starting at position 422 of SEQ ID NO: 1241149
agcugaguuaagcaguguu

SEQ ID NO: 1250619 - RNA, 19 nt, Artificial Sequence
  Description of Artificial Sequence: Synthetic oligonucleotide
  Antisense strand to SEQ ID NO: 1250618
aacacugcuuaacucagcu

SEQ ID NO: 1250620 - RNA, 19 nt, Artificial Sequence
  Description of Artificial Sequence: Synthetic oligonucleotide
  Sense strand starting at position 542 of SEQ ID NO: 1241149
gaggucaucugugugacca

SEQ ID NO: 1250621 - RNA, 19 nt, Artificial Sequence
  Description of Artificial Sequence: Synthetic oligonucleotide
  Antisense strand to SEQ ID NO: 1250620
uggucacacagaugaccuc

SEQ ID NO: 1250622 - RNA, 19 nt, Artificial Sequence
  Description of Artificial Sequence: Synthetic oligonucleotide
  Sense strand starting at position 544 of SEQ ID NO: 1241149
ggucaucugugugaccaca

SEQ ID NO: 1250623 - RNA, 19 nt, Artificial Sequence
  Description of Artificial Sequence: Synthetic oligonucleotide
  Antisense strand to SEQ ID NO: 1250622
uguggucacacagaugacc

SEQ ID NO: 1250624 - RNA, 19 nt, Artificial Sequence
  Description of Artificial Sequence: Synthetic oligonucleotide
  Sense strand starting at position 630 of SEQ ID NO: 1241149
gcugauggguaucagguau

SEQ ID NO: 1250625 - RNA, 19 nt, Artificial Sequence
  Description of Artificial Sequence: Synthetic oligonucleotide
  Antisense strand to SEQ ID NO: 1250624
auaccugauacccaucagc

SEQ ID NO: 1250626 - RNA, 19 nt, Artificial Sequence
  Description of Artificial Sequence: Synthetic oligonucleotide
  Sense strand starting at position 1201 of SEQ ID NO: 1241149
gcagguggucccgugaagu

SEQ ID NO: 1250627 - RNA, 19 nt, Artificial Sequence
  Description of Artificial Sequence: Synthetic oligonucleotide
  Antisense strand to SEQ ID NO: 1250626
acuucacgggaccaccugc

SEQ ID NO: 1250628 - RNA, 19 nt, Artificial Sequence
  Description of Artificial Sequence: Synthetic oligonucleotide
  Sense strand starting at position 1848 of SEQ ID NO: 1241149
ucuccaugucugcggcaga

SEQ ID NO: 1250629 - RNA, 19 nt, Artificial Sequence
  Description of Artificial Sequence: Synthetic oligonucleotide
  Antisense strand to SEQ ID NO: 1250628
ucugccgcagacauggaga

SEQ ID NO: 1250630 - RNA, 19 nt, Artificial Sequence
  Description of Artificial Sequence: Synthetic oligonucleotide
  Sense strand starting at position 2313 of SEQ ID NO: 1241149
cuccgagucggagaauguu

SEQ ID NO: 1250631 - RNA, 19 nt, Artificial Sequence
  Description of Artificial Sequence: Synthetic oligonucleotide
  Antisense strand to SEQ ID NO: 1250630
aacauucuccgacucggag

SEQ ID NO: 1250632 - RNA, 19 nt, Artificial Sequence
  Description of Artificial Sequence: Synthetic oligonucleotide
  Sense strand starting at position 2720 of SEQ ID NO: 1241149
cucucuaucacccgggaga

SEQ ID NO: 1250633 - RNA, 19 nt, Artificial Sequence
  Description of Artificial Sequence: Synthetic oligonucleotide
  Antisense strand to SEQ ID NO: 1250632
ucucccgggugauagagag

SEQ ID NO: 1250634 - RNA, 19 nt, Artificial Sequence
  Description of Artificial Sequence: Synthetic oligonucleotide
  Sense strand starting at position 3288 of SEQ ID NO: 1241149
aggaguuugccgggaagac

SEQ ID NO: 1250635 - RNA, 19 nt, Artificial Sequence
  Description of Artificial Sequence: Synthetic oligonucleotide
  Antisense strand to SEQ ID NO: 1250634
gucuucccggcaaacuccu

SEQ ID NO: 1250636 - RNA, 19 nt, Artificial Sequence
  Description of Artificial Sequence: Synthetic oligonucleotide
  Sense strand starting at position 3289 of SEQ ID NO: 1241149
ggaguuugccgggaagacu

SEQ ID NO: 1250637 - RNA, 19 nt, Artificial Sequence
  Description of Artificial Sequence: Synthetic oligonucleotide
  Antisense strand to SEQ ID NO: 1250636
agucuucccggcaaacucc

SEQ ID NO: 1250638 - RNA, 19 nt, Artificial Sequence
  Description of Artificial Sequence: Synthetic oligonucleotide
  Sense strand starting at position 3385 of SEQ ID NO: 1241149
caugcuaggucccagcaua

SEQ ID NO: 1250639 - RNA, 19 nt, Artificial Sequence
  Description of Artificial Sequence: Synthetic oligonucleotide
  Antisense strand to SEQ ID NO: 1250638
uaugcugggaccuagcaug

SEQ ID NO: 1250640 - RNA, 19 nt, Artificial Sequence
  Description of Artificial Sequence: Synthetic oligonucleotide
  Sense strand starting at position 3512 of SEQ ID NO: 1241149
cuguguucucaccaggaca

SEQ ID NO: 1250641 - RNA, 19 nt, Artificial Sequence
  Description of Artificial Sequence: Synthetic oligonucleotide
  Antisense strand to SEQ ID NO: 1250640
uguccuggugagaacacag

SEQ ID NO: 1250642 - RNA, 19 nt, Artificial Sequence
  Description of Artificial Sequence: Synthetic oligonucleotide
  Sense strand starting at position 3683 of SEQ ID NO: 1241149
gggcuaaguucuccagcag

SEQ ID NO: 1250643 - RNA, 19 nt, Artificial Sequence
  Description of Artificial Sequence: Synthetic oligonucleotide
  Antisense strand to SEQ ID NO: 1250642
cugcuggagaacuuagccc

SEQ ID NO: 1250644 - RNA, 19 nt, Artificial Sequence
  Description of Artificial Sequence: Synthetic oligonucleotide
  Sense strand starting at position 3684 of SEQ ID NO: 1241149
ggcuaaguucuccagcaga

SEQ ID NO: 1250645 - RNA, 19 nt, Artificial Sequence
  Description of Artificial Sequence: Synthetic oligonucleotide
  Antisense strand to SEQ ID NO: 1250644
ucugcuggagaacuuagcc

SEQ ID NO: 1250646 - RNA, 19 nt, Artificial Sequence
  Description of Artificial Sequence: Synthetic oligonucleotide
  Sense strand starting at position 3687 of SEQ ID NO: 1241149
uaaguucuccagcagagag

SEQ ID NO: 1250647 - RNA, 19 nt, Artificial Sequence
  Description of Artificial Sequence: Synthetic oligonucleotide
  Antisense strand to SEQ ID NO: 1250646
cucucugcuggagaacuua

SEQ ID NO: 1250648 - RNA, 19 nt, Artificial Sequence
  Description of Artificial Sequence: Synthetic oligonucleotide
  Sense strand starting at position 3817 of SEQ ID NO: 1241149
gcagaauggccacgguagu

SEQ ID NO: 1250649 - RNA, 19 nt, Artificial Sequence
  Description of Artificial Sequence: Synthetic oligonucleotide
  Antisense strand to SEQ ID NO: 1250648
acuaccguggccauucugc

SEQ ID NO: 1250650 - RNA, 19 nt, Artificial Sequence
  Description of Artificial Sequence: Synthetic oligonucleotide
  Sense strand starting at position 124 of SEQ ID NO: 1241150
ucuccaugucugcggcaga

SEQ ID NO: 1250651 - RNA, 19 nt, Artificial Sequence
  Description of Artificial Sequence: Synthetic oligonucleotide
  Antisense strand to SEQ ID NO: 1250650
ucugccgcagacauggaga

SEQ ID NO: 1250652 - RNA, 19 nt, Artificial Sequence
  Description of Artificial Sequence: Synthetic oligonucleotide
  Sense strand starting at position 589 of SEQ ID NO: 1241150
cuccgagucggagaauguu

SEQ ID NO: 1250653 - RNA, 19 nt, Artificial Sequence
  Description of Artificial Sequence: Synthetic oligonucleotide
  Antisense strand to SEQ ID NO: 1250652
aacauucuccgacucggag

SEQ ID NO: 1250654 - RNA, 19 nt, Artificial Sequence
  Description of Artificial Sequence: Synthetic oligonucleotide
  Sense strand starting at position 996 of SEQ ID NO: 1241150
cucucuaucacccgggaga

SEQ ID NO: 1250655 - RNA, 19 nt, Artificial Sequence
  Description of Artificial Sequence: Synthetic oligonucleotide
  Antisense strand to SEQ ID NO: 1250654
ucucccgggugauagagag

SEQ ID NO: 1250656 - RNA, 19 nt, Artificial Sequence
  Description of Artificial Sequence: Synthetic oligonucleotide
  Sense strand starting at position 1564 of SEQ ID NO: 1241150
aggaguuugccgggaagac

SEQ ID NO: 1250657 - RNA, 19 nt, Artificial Sequence
  Description of Artificial Sequence: Synthetic oligonucleotide
  Antisense strand to SEQ ID NO: 1250656
gucuucccggcaaacuccu

SEQ ID NO: 1250658 - RNA, 19 nt, Artificial Sequence
  Description of Artificial Sequence: Synthetic oligonucleotide
  Sense strand starting at position 1565 of SEQ ID NO: 1241150
ggaguuugccgggaagacu

SEQ ID NO: 1250659 - RNA, 19 nt, Artificial Sequence
  Description of Artificial Sequence: Synthetic oligonucleotide
  Antisense strand to SEQ ID NO: 1250658
agucuucccggcaaacucc

SEQ ID NO: 1250660 - RNA, 19 nt, Artificial Sequence
  Description of Artificial Sequence: Synthetic oligonucleotide
  Sense strand starting at position 1661 of SEQ ID NO: 1241150
caugcuaggucccagcaua

SEQ ID NO: 1250661 - RNA, 19 nt, Artificial Sequence
  Description of Artificial Sequence: Synthetic oligonucleotide
  Antisense strand to SEQ ID NO: 1250660
uaugcugggaccuagcaug

SEQ ID NO: 1250662 - RNA, 19 nt, Artificial Sequence
  Description of Artificial Sequence: Synthetic oligonucleotide
  Sense strand starting at position 1788 of SEQ ID NO: 1241150
cuguguucucaccaggaca

SEQ ID NO: 1250663 - RNA, 19 nt, Artificial Sequence
  Description of Artificial Sequence: Synthetic oligonucleotide
  Antisense strand to SEQ ID NO: 1250662
uguccuggugagaacacag

SEQ ID NO: 1250664 - RNA, 19 nt, Artificial Sequence
  Description of Artificial Sequence: Synthetic oligonucleotide
  Sense strand starting at position 1959 of SEQ ID NO: 1241150
gggcuaaguucuccagcag

SEQ ID NO: 1250665 - RNA, 19 nt, Artificial Sequence
  Description of Artificial Sequence: Synthetic oligonucleotide
  Antisense strand to SEQ ID NO: 1250664
cugcuggagaacuuagccc

SEQ ID NO: 1250666 - RNA, 19 nt, Artificial Sequence
  Description of Artificial Sequence: Synthetic oligonucleotide
  Sense strand starting at position 1960 of SEQ ID NO: 1241150
ggcuaaguucuccagcaga

SEQ ID NO: 1250667 - RNA, 19 nt, Artificial Sequence
  Description of Artificial Sequence: Synthetic oligonucleotide
  Antisense strand to SEQ ID NO: 1250666
ucugcuggagaacuuagcc

SEQ ID NO: 1250668 - RNA, 19 nt, Artificial Sequence
  Description of Artificial Sequence: Synthetic oligonucleotide
  Sense strand starting at position 1963 of SEQ ID NO: 1241150
uaaguucuccagcagagag

SEQ ID NO: 1250669 - RNA, 19 nt, Artificial Sequence
  Description of Artificial Sequence: Synthetic oligonucleotide
  Antisense strand to SEQ ID NO: 1250668
cucucugcuggagaacuua

SEQ ID NO: 1250670 - RNA, 19 nt, Artificial Sequence
  Description of Artificial Sequence: Synthetic oligonucleotide
  Sense strand starting at position 2093 of SEQ ID NO: 1241150
gcagaauggccacgguagu

SEQ ID NO: 1250671 - RNA, 19 nt, Artificial Sequence
  Description of Artificial Sequence: Synthetic oligonucleotide
  Antisense strand to SEQ ID NO: 1250670
acuaccguggccauucugc

SEQ ID NO: 1250672 - RNA, 19 nt, Artificial Sequence
  Description of Artificial Sequence: Synthetic oligonucleotide
  Sense strand starting at position 2307 of SEQ ID NO: 1241150
ggcugucucugguugccaa

SEQ ID NO: 1250673 - RNA, 19 nt, Artificial Sequence
  Description of Artificial Sequence: Synthetic oligonucleotide
  Antisense strand to SEQ ID NO: 1250672
uuggcaaccagagacagcc

SEQ ID NO: 1250674 - RNA, 19 nt, Artificial Sequence
  Description of Artificial Sequence: Synthetic oligonucleotide
  Sense strand starting at position 2328 of SEQ ID NO: 1241150
ucaaucacucacggcgaau

SEQ ID NO: 1250675 - RNA, 19 nt, Artificial Sequence
  Description of Artificial Sequence: Synthetic oligonucleotide
  Antisense strand to SEQ ID NO: 1250674
auucgccgugagugauuga

SEQ ID NO: 1250676 - RNA, 19 nt, Artificial Sequence
  Description of Artificial Sequence: Synthetic oligonucleotide
  Sense strand starting at position 2602 of SEQ ID NO: 1241150
ccugaagccuggcuuugau

SEQ ID NO: 1250677 - RNA, 19 nt, Artificial Sequence
  Description of Artificial Sequence: Synthetic oligonucleotide
  Antisense strand to SEQ ID NO: 1250676
aucaaagccaggcuucagg

SEQ ID NO: 1250678 - RNA, 19 nt, Artificial Sequence
  Description of Artificial Sequence: Synthetic oligonucleotide
  Sense strand starting at position 2838 of SEQ ID NO: 1241150
gccugaugcucuccaugca

SEQ ID NO: 1250679 - RNA, 19 nt, Artificial Sequence
  Description of Artificial Sequence: Synthetic oligonucleotide
  Antisense strand to SEQ ID NO: 1250678
ugcauggagagcaucaggc

SEQ ID NO: 1250680 - RNA, 19 nt, Artificial Sequence
  Description of Artificial Sequence: Synthetic oligonucleotide
  Sense strand starting at position 2869 of SEQ ID NO: 1241150
gcaucuuuauggguggcua

SEQ ID NO: 1250681 - RNA, 19 nt, Artificial Sequence
  Description of Artificial Sequence: Synthetic oligonucleotide
  Antisense strand to SEQ ID NO: 1250680
uagccacccauaaagaugc

SEQ ID NO: 1250682 - RNA, 19 nt, Artificial Sequence
  Description of Artificial Sequence: Synthetic oligonucleotide
  Sense strand starting at position 3008 of SEQ ID NO: 1241150
accacaagacucggugauu

SEQ ID NO: 1250683 - RNA, 19 nt, Artificial Sequence
  Description of Artificial Sequence: Synthetic oligonucleotide
  Antisense strand to SEQ ID NO: 1250682
aaucaccgagucuuguggu

SEQ ID NO: 1250684 - RNA, 19 nt, Artificial Sequence
  Description of Artificial Sequence: Synthetic oligonucleotide
  Sense strand starting at position 3037 of SEQ ID NO: 1241150
ccuuacuacgggugaggaa

SEQ ID NO: 1250685 - RNA, 19 nt, Artificial Sequence
  Description of Artificial Sequence: Synthetic oligonucleotide
  Antisense strand to SEQ ID NO: 1250684
uuccucacccguaguaagg

SEQ ID NO: 1250686 - RNA, 19 nt, Artificial Sequence
  Description of Artificial Sequence: Synthetic oligonucleotide
  Sense strand starting at position 3069 of SEQ ID NO: 1241150
caugaaguggcuugcucaa

SEQ ID NO: 1250687 - RNA, 19 nt, Artificial Sequence
  Description of Artificial Sequence: Synthetic oligonucleotide
  Antisense strand to SEQ ID NO: 1250686
uugagcaagccacuucaug

SEQ ID NO: 1250688 - RNA, 19 nt, Artificial Sequence
  Description of Artificial Sequence: Synthetic oligonucleotide
  Sense strand starting at position 3071 of SEQ ID NO: 1241150
ugaaguggcuugcucaagu

SEQ ID NO: 1250689 - RNA, 19 nt, Artificial Sequence
  Description of Artificial Sequence: Synthetic oligonucleotide
  Antisense strand to SEQ ID NO: 1250688
acuugagcaagccacuuca

SEQ ID NO: 1250690 - RNA, 19 nt, Artificial Sequence
  Description of Artificial Sequence: Synthetic oligonucleotide
  Sense strand starting at position 3198 of SEQ ID NO: 1241150
caggguucccacugugaag

SEQ ID NO: 1250691 - RNA, 19 nt, Artificial Sequence
  Description of Artificial Sequence: Synthetic oligonucleotide
  Antisense strand to SEQ ID NO: 1250690
cuucacagugggaacccug

SEQ ID NO: 1250692 - RNA, 19 nt, Artificial Sequence
  Description of Artificial Sequence: Synthetic oligonucleotide
  Sense strand starting at position 3587 of SEQ ID NO: 1241150
uuucuuacuagcgauggga

SEQ ID NO: 1250693 - RNA, 19 nt, Artificial Sequence
  Description of Artificial Sequence: Synthetic oligonucleotide
  Antisense strand to SEQ ID NO: 1250692
ucccaucgcuaguaagaaa

SEQ ID NO: 1250694 - RNA, 19 nt, Artificial Sequence
  Description of Artificial Sequence: Synthetic oligonucleotide
  Sense strand starting at position 3685 of SEQ ID NO: 1241150
agaaaucaguuccauugaa

SEQ ID NO: 1250695 - RNA, 19 nt, Artificial Sequence
  Description of Artificial Sequence: Synthetic oligonucleotide
  Antisense strand to SEQ ID NO: 1250694
uucaauggaacugauuucu

SEQ ID NO: 1250696 - RNA, 19 nt, Artificial Sequence
  Description of Artificial Sequence: Synthetic oligonucleotide
  Sense strand starting at position 3689 of SEQ ID NO: 1241150
aucaguuccauugaagugu

SEQ ID NO: 1250697 - RNA, 19 nt, Artificial Sequence
  Description of Artificial Sequence: Synthetic oligonucleotide
  Antisense strand to SEQ ID NO: 1250696
acacuucaauggaacugau

SEQ ID NO: 1250698 - RNA, 19 nt, Artificial Sequence
  Description of Artificial Sequence: Synthetic oligonucleotide
  Sense strand starting at position 3693 of SEQ ID NO: 1241150
guuccauugaagugucaca

SEQ ID NO: 1250699 - RNA, 19 nt, Artificial Sequence
  Description of Artificial Sequence: Synthetic oligonucleotide
  Antisense strand to SEQ ID NO: 1250698
ugugacacuucaauggaac

SEQ ID NO: 1250700 - RNA, 19 nt, Artificial Sequence
  Description of Artificial Sequence: Synthetic oligonucleotide
  Sense strand starting at position 3728 of SEQ ID NO: 1241150
ggucucaucagcugugcau

SEQ ID NO: 1250701 - RNA, 19 nt, Artificial Sequence
  Description of Artificial Sequence: Synthetic oligonucleotide
  Antisense strand to SEQ ID NO: 1250700
augcacagcugaugagacc

SEQ ID NO: 1250702 - RNA, 19 nt, Artificial Sequence
  Description of Artificial Sequence: Synthetic oligonucleotide
  Sense strand starting at position 3729 of SEQ ID NO: 1241150
gucucaucagcugugcauu

SEQ ID NO: 1250703 - RNA, 19 nt, Artificial Sequence
  Description of Artificial Sequence: Synthetic oligonucleotide
  Antisense strand to SEQ ID NO: 1250702
aaugcacagcugaugagac

SEQ ID NO: 1250704 - RNA, 19 nt, Artificial Sequence
  Description of Artificial Sequence: Synthetic oligonucleotide
  Sense strand starting at position 3757 of SEQ ID NO: 1241150
uaggcaagagcuuggagau

SEQ ID NO: 1250705 - RNA, 19 nt, Artificial Sequence
  Description of Artificial Sequence: Synthetic oligonucleotide
  Antisense strand to SEQ ID NO: 1250704
aucuccaagcucuugccua

SEQ ID NO: 1250706 - RNA, 19 nt, Artificial Sequence
  Description of Artificial Sequence: Synthetic oligonucleotide
  Sense strand starting at position 3758 of SEQ ID NO: 1241150
aggcaagagcuuggagauu

SEQ ID NO: 1250707 - RNA, 19 nt, Artificial Sequence
  Description of Artificial Sequence: Synthetic oligonucleotide
  Antisense strand to SEQ ID NO: 1250706
aaucuccaagcucuugccu

SEQ ID NO: 1250708 - RNA, 19 nt, Artificial Sequence
  Description of Artificial Sequence: Synthetic oligonucleotide
  Sense strand starting at position 3792 of SEQ ID NO: 1241150
ugcuaucuucccuguggca

SEQ ID NO: 1250709 - RNA, 19 nt, Artificial Sequence
  Description of Artificial Sequence: Synthetic oligonucleotide
  Antisense strand to SEQ ID NO: 1250708
ugccacagggaagauagca

SEQ ID NO: 1250710 - RNA, 19 nt, Artificial Sequence
  Description of Artificial Sequence: Synthetic oligonucleotide
  Sense strand starting at position 91 of SEQ ID NO: 1241151
ggcauuggcagguagacuu

SEQ ID NO: 1250711 - RNA, 19 nt, Artificial Sequence
  Description of Artificial Sequence: Synthetic oligonucleotide
  Antisense strand to SEQ ID NO: 1250710
aagucuaccugccaaugcc

SEQ ID NO: 1250712 - RNA, 19 nt, Artificial Sequence
  Description of Artificial Sequence: Synthetic oligonucleotide
  Sense strand starting at position 98 of SEQ ID NO: 1241151
gcagguagacuuugaggaa

SEQ ID NO: 1250713 - RNA, 19 nt, Artificial Sequence
  Description of Artificial Sequence: Synthetic oligonucleotide
  Antisense strand to SEQ ID NO: 1250712
uuccucaaagucuaccugc

SEQ ID NO: 1250714 - RNA, 19 nt, Artificial Sequence
  Description of Artificial Sequence: Synthetic oligonucleotide
  Sense strand starting at position 698 of SEQ ID NO: 1241151
cucgaaucuucuccuaaug

SEQ ID NO: 1250715 - RNA, 19 nt, Artificial Sequence
  Description of Artificial Sequence: Synthetic oligonucleotide
  Antisense strand to SEQ ID NO: 1250714
cauuaggagaagauucgag

SEQ ID NO: 1250716 - RNA, 19 nt, Artificial Sequence
  Description of Artificial Sequence: Synthetic oligonucleotide
  Sense strand starting at position 707 of SEQ ID NO: 1241151
ucuccuaaugccgaaaugu

SEQ ID NO: 1250717 - RNA, 19 nt, Artificial Sequence
  Description of Artificial Sequence: Synthetic oligonucleotide
  Antisense strand to SEQ ID NO: 1250716
acauuucggcauuaggaga

SEQ ID NO: 1250718 - RNA, 19 nt, Artificial Sequence
  Description of Artificial Sequence: Synthetic oligonucleotide
  Sense strand starting at position 716 of SEQ ID NO: 1241151
gccgaaauguguuuacagg

SEQ ID NO: 1250719 - RNA, 19 nt, Artificial Sequence
  Description of Artificial Sequence: Synthetic oligonucleotide
  Antisense strand to SEQ ID NO: 1250718
ccuguaaacacauuucggc

SEQ ID NO: 1250720 - RNA, 19 nt, Artificial Sequence
  Description of Artificial Sequence: Synthetic oligonucleotide
  Sense strand starting at position 717 of SEQ ID NO: 1241151
ccgaaauguguuuacaggu

SEQ ID NO: 1250721 - RNA, 19 nt, Artificial Sequence
  Description of Artificial Sequence: Synthetic oligonucleotide
  Antisense strand to SEQ ID NO: 1250720
accuguaaacacauuucgg

SEQ ID NO: 1250722 - RNA, 19 nt, Artificial Sequence
  Description of Artificial Sequence: Synthetic oligonucleotide
  Sense strand starting at position 1049 of SEQ ID NO: 1241151
gacccuacaccgugaaaug

SEQ ID NO: 1250723 - RNA, 19 nt, Artificial Sequence
  Description of Artificial Sequence: Synthetic oligonucleotide
  Antisense strand to SEQ ID NO: 1250722
cauuucacgguguaggguc

SEQ ID NO: 1250724 - RNA, 19 nt, Artificial Sequence
  Description of Artificial Sequence: Synthetic oligonucleotide
  Sense strand starting at position 1050 of SEQ ID NO: 1241151
acccuacaccgugaaauga

SEQ ID NO: 1250725 - RNA, 19 nt, Artificial Sequence
  Description of Artificial Sequence: Synthetic oligonucleotide
  Antisense strand to SEQ ID NO: 1250724
ucauuucacgguguagggu

SEQ ID NO: 1250726 - RNA, 19 nt, Artificial Sequence
  Description of Artificial Sequence: Synthetic oligonucleotide
  Sense strand starting at position 1063 of SEQ ID NO: 1241151
aaaugauagaggcgagguu

SEQ ID NO: 1250727 - RNA, 19 nt, Artificial Sequence
  Description of Artificial Sequence: Synthetic oligonucleotide
  Antisense strand to SEQ ID NO: 1250726
aaccucgccucuaucauuu

SEQ ID NO: 1250728 - RNA, 19 nt, Artificial Sequence
  Description of Artificial Sequence: Synthetic oligonucleotide
  Sense strand starting at position 1480 of SEQ ID NO: 1241151
gcacuucccaaaggugaga

SEQ ID NO: 1250729 - RNA, 19 nt, Artificial Sequence
  Description of Artificial Sequence: Synthetic oligonucleotide
  Antisense strand to SEQ ID NO: 1250728
ucucaccuuugggaagugc

SEQ ID NO: 1250730 - RNA, 19 nt, Artificial Sequence
  Description of Artificial Sequence: Synthetic oligonucleotide
  Sense strand starting at position 1558 of SEQ ID NO: 1241151
ggucuuucagcgccagcau

SEQ ID NO: 1250731 - RNA, 19 nt, Artificial Sequence
  Description of Artificial Sequence: Synthetic oligonucleotide
  Antisense strand to SEQ ID NO: 1250730
augcuggcgcugaaagacc

SEQ ID NO: 1250732 - RNA, 19 nt, Artificial Sequence
  Description of Artificial Sequence: Synthetic oligonucleotide
  Sense strand starting at position 1699 of SEQ ID NO: 1241151
gguagccuugcucaccaua

SEQ ID NO: 1250733 - RNA, 19 nt, Artificial Sequence
  Description of Artificial Sequence: Synthetic oligonucleotide
  Antisense strand to SEQ ID NO: 1250732
uauggugagcaaggcuacc

SEQ ID NO: 1250734 - RNA, 19 nt, Artificial Sequence
  Description of Artificial Sequence: Synthetic oligonucleotide
  Sense strand starting at position 1712 of SEQ ID NO: 1241151
accauaggucccugcagua

SEQ ID NO: 1250735 - RNA, 19 nt, Artificial Sequence
  Description of Artificial Sequence: Synthetic oligonucleotide
  Antisense strand to SEQ ID NO: 1250734
uacugcagggaccuauggu

SEQ ID NO: 1250736 - RNA, 19 nt, Artificial Sequence
  Description of Artificial Sequence: Synthetic oligonucleotide
  Sense strand starting at position 2280 of SEQ ID NO: 1241151
cgacuagucgccguaccuu

SEQ ID NO: 1250737 - RNA, 19 nt, Artificial Sequence
  Description of Artificial Sequence: Synthetic oligonucleotide
  Antisense strand to SEQ ID NO: 1250736
aagguacggcgacuagucg

SEQ ID NO: 1250738 - RNA, 19 nt, Artificial Sequence
  Description of Artificial Sequence: Synthetic oligonucleotide
  Sense strand starting at position 2319 of SEQ ID NO: 1241151
cugggcuucccugaguuua

SEQ ID NO: 1250739 - RNA, 19 nt, Artificial Sequence
  Description of Artificial Sequence: Synthetic oligonucleotide
  Antisense strand to SEQ ID NO: 1250738
uaaacucagggaagcccag

SEQ ID NO: 1250740 - RNA, 19 nt, Artificial Sequence
  Description of Artificial Sequence: Synthetic oligonucleotide
  Sense strand starting at position 2321 of SEQ ID NO: 1241151
gggcuucccugaguuuagu

SEQ ID NO: 1250741 - RNA, 19 nt, Artificial Sequence
  Description of Artificial Sequence: Synthetic oligonucleotide
  Antisense strand to SEQ ID NO: 1250740
acuaaacucagggaagccc

SEQ ID NO: 1250742 - RNA, 19 nt, Artificial Sequence
  Description of Artificial Sequence: Synthetic oligonucleotide
  Sense strand starting at position 2387 of SEQ ID NO: 1241151
uacccugaguaauuagaga

SEQ ID NO: 1250743 - RNA, 19 nt, Artificial Sequence
  Description of Artificial Sequence: Synthetic oligonucleotide
  Antisense strand to SEQ ID NO: 1250742
ucucuaauuacucagggua

SEQ ID NO: 1250744 - RNA, 19 nt, Artificial Sequence
  Description of Artificial Sequence: Synthetic oligonucleotide
  Sense strand starting at position 2422 of SEQ ID NO: 1241151
aaaucagguuauggagaaa

SEQ ID NO: 1250745 - RNA, 19 nt, Artificial Sequence
  Description of Artificial Sequence: Synthetic oligonucleotide
  Antisense strand to SEQ ID NO: 1250744
uuucuccauaaccugauuu

SEQ ID NO: 1250746 - RNA, 19 nt, Artificial Sequence
  Description of Artificial Sequence: Synthetic oligonucleotide
  Sense strand starting at position 2443 of SEQ ID NO: 1241151
agcuguuggaucgguuuaa

SEQ ID NO: 1250747 - RNA, 19 nt, Artificial Sequence
  Description of Artificial Sequence: Synthetic oligonucleotide
  Antisense strand to SEQ ID NO: 1250746
uuaaaccgauccaacagcu

SEQ ID NO: 1250748 - RNA, 19 nt, Artificial Sequence
  Description of Artificial Sequence: Synthetic oligonucleotide
  Sense strand starting at position 2444 of SEQ ID NO: 1241151
gcuguuggaucgguuuaaa

SEQ ID NO: 1250749 - RNA, 19 nt, Artificial Sequence
  Description of Artificial Sequence: Synthetic oligonucleotide
  Antisense strand to SEQ ID NO: 1250748
uuuaaaccgauccaacagc

SEQ ID NO: 1250750 - RNA, 19 nt, Artificial Sequence
  Description of Artificial Sequence: Synthetic oligonucleotide
  Sense strand starting at position 2518 of SEQ ID NO: 1241151
ugcagaacugugugccaga

SEQ ID NO: 1250751 - RNA, 19 nt, Artificial Sequence
  Description of Artificial Sequence: Synthetic oligonucleotide
  Antisense strand to SEQ ID NO: 1250750
ucuggcacacaguucugca

SEQ ID NO: 1250752 - RNA, 19 nt, Artificial Sequence
  Description of Artificial Sequence: Synthetic oligonucleotide
  Sense strand starting at position 2543 of SEQ ID NO: 1241151
uaccucuugggcuguuaaa

SEQ ID NO: 1250753 - RNA, 19 nt, Artificial Sequence
  Description of Artificial Sequence: Synthetic oligonucleotide
  Antisense strand to SEQ ID NO: 1250752
uuuaacagcccaagaggua

SEQ ID NO: 1250754 - RNA, 19 nt, Artificial Sequence
  Description of Artificial Sequence: Synthetic oligonucleotide
  Sense strand starting at position 2600 of SEQ ID NO: 1241151
uguagaacaccuuggugau

SEQ ID NO: 1250755 - RNA, 19 nt, Artificial Sequence
  Description of Artificial Sequence: Synthetic oligonucleotide
  Antisense strand to SEQ ID NO: 1250754
aucaccaagguguucuaca

SEQ ID NO: 1250756 - RNA, 19 nt, Artificial Sequence
  Description of Artificial Sequence: Synthetic oligonucleotide
  Sense strand starting at position 2601 of SEQ ID NO: 1241151
guagaacaccuuggugaug

SEQ ID NO: 1250757 - RNA, 19 nt, Artificial Sequence
  Description of Artificial Sequence: Synthetic oligonucleotide
  Antisense strand to SEQ ID NO: 1250756
caucaccaagguguucuac

SEQ ID NO: 1250758 - RNA, 19 nt, Artificial Sequence
  Description of Artificial Sequence: Synthetic oligonucleotide
  Sense strand starting at position 2612 of SEQ ID NO: 1241151
uggugaugacccugaggua

SEQ ID NO: 1250759 - RNA, 19 nt, Artificial Sequence
  Description of Artificial Sequence: Synthetic oligonucleotide
  Antisense strand to SEQ ID NO: 1250758
uaccucagggucaucacca

SEQ ID NO: 1250760 - RNA, 19 nt, Artificial Sequence
  Description of Artificial Sequence: Synthetic oligonucleotide
  Sense strand starting at position 2729 of SEQ ID NO: 1241151
aucuguuucuagcucagaa

SEQ ID NO: 1250761 - RNA, 19 nt, Artificial Sequence
  Description of Artificial Sequence: Synthetic oligonucleotide
  Antisense strand to SEQ ID NO: 1250760
uucugagcuagaaacagau

SEQ ID NO: 1250762 - RNA, 19 nt, Artificial Sequence
  Description of Artificial Sequence: Synthetic oligonucleotide
  Sense strand starting at position 2845 of SEQ ID NO: 1241151
cugucuuuccaaggagaua

SEQ ID NO: 1250763 - RNA, 19 nt, Artificial Sequence
  Description of Artificial Sequence: Synthetic oligonucleotide
  Antisense strand to SEQ ID NO: 1250762
uaucuccuuggaaagacag

SEQ ID NO: 1250764 - RNA, 19 nt, Artificial Sequence
  Description of Artificial Sequence: Synthetic oligonucleotide
  Sense strand starting at position 3114 of SEQ ID NO: 1241151
gcaggacuaccagguuaaa

SEQ ID NO: 1250765 - RNA, 19 nt, Artificial Sequence
  Description of Artificial Sequence: Synthetic oligonucleotide
  Antisense strand to SEQ ID NO: 1250764
uuuaaccugguaguccugc

SEQ ID NO: 1250766 - RNA, 19 nt, Artificial Sequence
  Description of Artificial Sequence: Synthetic oligonucleotide
  Sense strand starting at position 3165 of SEQ ID NO: 1241151
gccucugcuccagagcuaa

SEQ ID NO: 1250767 - RNA, 19 nt, Artificial Sequence
  Description of Artificial Sequence: Synthetic oligonucleotide
  Antisense strand to SEQ ID NO: 1250766
uuagcucuggagcagaggc

SEQ ID NO: 1250768 - RNA, 19 nt, Artificial Sequence
  Description of Artificial Sequence: Synthetic oligonucleotide
  Sense strand starting at position 3250 of SEQ ID NO: 1241151
agcauuuccuguccuggau

SEQ ID NO: 1250769 - RNA, 19 nt, Artificial Sequence
  Description of Artificial Sequence: Synthetic oligonucleotide
  Antisense strand to SEQ ID NO: 1250768
auccaggacaggaaaugcu

SEQ ID NO: 1250770 - RNA, 19 nt, Artificial Sequence
  Description of Artificial Sequence: Synthetic oligonucleotide
  Sense strand starting at position 3268 of SEQ ID NO: 1241151
uuucuuucccugggacaga

SEQ ID NO: 1250771 - RNA, 19 nt, Artificial Sequence
  Description of Artificial Sequence: Synthetic oligonucleotide
  Antisense strand to SEQ ID NO: 1250770
ucugucccagggaaagaaa

SEQ ID NO: 1250772 - RNA, 19 nt, Artificial Sequence
  Description of Artificial Sequence: Synthetic oligonucleotide
  Sense strand starting at position 3312 of SEQ ID NO: 1241151
gcauuuaggucuuuacuua

SEQ ID NO: 1250773 - RNA, 19 nt, Artificial Sequence
  Description of Artificial Sequence: Synthetic oligonucleotide
  Antisense strand to SEQ ID NO: 1250772
uaaguaaagaccuaaaugc

SEQ ID NO: 1250774 - RNA, 19 nt, Artificial Sequence
  Description of Artificial Sequence: Synthetic oligonucleotide
  Sense strand starting at position 3345 of SEQ ID NO: 1241151
cuggguggcucaucuauaa

SEQ ID NO: 1250775 - RNA, 19 nt, Artificial Sequence
  Description of Artificial Sequence: Synthetic oligonucleotide
  Antisense strand to SEQ ID NO: 1250774
uuauagaugagccacccag

SEQ ID NO: 1250776 - RNA, 19 nt, Artificial Sequence
  Description of Artificial Sequence: Synthetic oligonucleotide
  Sense strand starting at position 3404 of SEQ ID NO: 1241151
aacuacuuccuguguggaa

SEQ ID NO: 1250777 - RNA, 19 nt, Artificial Sequence
  Description of Artificial Sequence: Synthetic oligonucleotide
  Antisense strand to SEQ ID NO: 1250776
uuccacacaggaaguaguu

SEQ ID NO: 1250778 - RNA, 19 nt, Artificial Sequence
  Description of Artificial Sequence: Synthetic oligonucleotide
  Sense strand starting at position 3406 of SEQ ID NO: 1241151
cuacuuccuguguggaaca

SEQ ID NO: 1250779 - RNA, 19 nt, Artificial Sequence
  Description of Artificial Sequence: Synthetic oligonucleotide
  Antisense strand to SEQ ID NO: 1250778
uguuccacacaggaaguag

SEQ ID NO: 1250780 - RNA, 19 nt, Artificial Sequence
  Description of Artificial Sequence: Synthetic oligonucleotide
  Sense strand starting at position 3430 of SEQ ID NO: 1241151
uacaaagggugggaaauau

SEQ ID NO: 1250781 - RNA, 19 nt, Artificial Sequence
  Description of Artificial Sequence: Synthetic oligonucleotide
  Antisense strand to SEQ ID NO: 1250780
auauuucccacccuuugua

SEQ ID NO: 1250782 - RNA, 19 nt, Artificial Sequence
  Description of Artificial Sequence: Synthetic oligonucleotide
  Sense strand starting at position 3439 of SEQ ID NO: 1241151
ugggaaauaucugagauca

SEQ ID NO: 1250783 - RNA, 19 nt, Artificial Sequence
  Description of Artificial Sequence: Synthetic oligonucleotide
  Antisense strand to SEQ ID NO: 1250782
ugaucucagauauuuccca

SEQ ID NO: 1250784 - RNA, 19 nt, Artificial Sequence
  Description of Artificial Sequence: Synthetic oligonucleotide
  Sense strand starting at position 3441 of SEQ ID NO: 1241151
ggaaauaucugagaucaga

SEQ ID NO: 1250785 - RNA, 19 nt, Artificial Sequence
  Description of Artificial Sequence: Synthetic oligonucleotide
  Antisense strand to SEQ ID NO: 1250784
ucugaucucagauauuucc

SEQ ID NO: 1250786 - RNA, 19 nt, Artificial Sequence
  Description of Artificial Sequence: Synthetic oligonucleotide
  Sense strand starting at position 3527 of SEQ ID NO: 1241151
ggccuaaugcaccaaacaa

SEQ ID NO: 1250787 - RNA, 19 nt, Artificial Sequence
  Description of Artificial Sequence: Synthetic oligonucleotide
  Antisense strand to SEQ ID NO: 1250786
uuguuuggugcauuaggcc

SEQ ID NO: 1250788 - RNA, 19 nt, Artificial Sequence
  Description of Artificial Sequence: Synthetic oligonucleotide
  Sense strand starting at position 3905 of SEQ ID NO: 1241151
caggcauugugcuccuuua

SEQ ID NO: 1250789 - RNA, 19 nt, Artificial Sequence
  Description of Artificial Sequence: Synthetic oligonucleotide
  Antisense strand to SEQ ID NO: 1250788
uaaaggagcacaaugccug

SEQ ID NO: 1250790 - RNA, 19 nt, Artificial Sequence
  Description of Artificial Sequence: Synthetic oligonucleotide
  Sense strand starting at position 66 of SEQ ID NO: 1241152
ggcauugcucuccacuuua

SEQ ID NO: 1250791 - RNA, 19 nt, Artificial Sequence
  Description of Artificial Sequence: Synthetic oligonucleotide
  Antisense strand to SEQ ID NO: 1250790
uaaaguggagagcaaugcc

SEQ ID NO: 1250792 - RNA, 19 nt, Artificial Sequence
  Description of Artificial Sequence: Synthetic oligonucleotide
  Sense strand starting at position 222 of SEQ ID NO: 1241152
gaagguggucugggagcua

SEQ ID NO: 1250793 - RNA, 19 nt, Artificial Sequence
  Description of Artificial Sequence: Synthetic oligonucleotide
  Antisense strand to SEQ ID NO: 1250792
uagcucccagaccaccuuc

SEQ ID NO: 1250794 - RNA, 19 nt, Artificial Sequence
  Description of Artificial Sequence: Synthetic oligonucleotide
  Sense strand starting at position 263 of SEQ ID NO: 1241152
uuuauuguggccgaugagu

SEQ ID NO: 1250795 - RNA, 19 nt, Artificial Sequence
  Description of Artificial Sequence: Synthetic oligonucleotide
  Antisense strand to SEQ ID NO: 1250794
acucaucggccacaauaaa

SEQ ID NO: 1250796 - RNA, 19 nt, Artificial Sequence
  Description of Artificial Sequence: Synthetic oligonucleotide
  Sense strand starting at position 265 of SEQ ID NO: 1241152
uauuguggccgaugaguuu

SEQ ID NO: 1250797 - RNA, 19 nt, Artificial Sequence
  Description of Artificial Sequence: Synthetic oligonucleotide
  Antisense strand to SEQ ID NO: 1250796
aaacucaucggccacaaua

SEQ ID NO: 1250798 - RNA, 19 nt, Artificial Sequence
  Description of Artificial Sequence: Synthetic oligonucleotide
  Sense strand starting at position 271 of SEQ ID NO: 1241152
ggccgaugaguuugaaaua

SEQ ID NO: 1250799 - RNA, 19 nt, Artificial Sequence
  Description of Artificial Sequence: Synthetic oligonucleotide
  Antisense strand to SEQ ID NO: 1250798
uauuucaaacucaucggcc

SEQ ID NO: 1250800 - RNA, 19 nt, Artificial Sequence
  Description of Artificial Sequence: Synthetic oligonucleotide
  Sense strand starting at position 272 of SEQ ID NO: 1241152
gccgaugaguuugaaauau

SEQ ID NO: 1250801 - RNA, 19 nt, Artificial Sequence
  Description of Artificial Sequence: Synthetic oligonucleotide
  Antisense strand to SEQ ID NO: 1250800
auauuucaaacucaucggc

SEQ ID NO: 1250802 - RNA, 19 nt, Artificial Sequence
  Description of Artificial Sequence: Synthetic oligonucleotide
  Sense strand starting at position 339 of SEQ ID NO: 1241152
agagacgauuccggagaga

SEQ ID NO: 1250803 - RNA, 19 nt, Artificial Sequence
  Description of Artificial Sequence: Synthetic oligonucleotide
  Antisense strand to SEQ ID NO: 1250802
ucucuccggaaucgucucu

SEQ ID NO: 1250804 - RNA, 19 nt, Artificial Sequence
  Description of Artificial Sequence: Synthetic oligonucleotide
  Sense strand starting at position 350 of SEQ ID NO: 1241152
cggagagaccucugugagu

SEQ ID NO: 1250805 - RNA, 19 nt, Artificial Sequence
  Description of Artificial Sequence: Synthetic oligonucleotide
  Antisense strand to SEQ ID NO: 1250804
acucacagaggucucuccg

SEQ ID NO: 1250806 - RNA, 19 nt, Artificial Sequence
  Description of Artificial Sequence: Synthetic oligonucleotide
  Sense strand starting at position 352 of SEQ ID NO: 1241152
gagagaccucugugaguuu

SEQ ID NO: 1250807 - RNA, 19 nt, Artificial Sequence
  Description of Artificial Sequence: Synthetic oligonucleotide
  Antisense strand to SEQ ID NO: 1250806
aaacucacagaggucucuc

SEQ ID NO: 1250808 - RNA, 19 nt, Artificial Sequence
  Description of Artificial Sequence: Synthetic oligonucleotide
  Sense strand starting at position 437 of SEQ ID NO: 1241152
gggagugguuagcccucaa

SEQ ID NO: 1250809 - RNA, 19 nt, Artificial Sequence
  Description of Artificial Sequence: Synthetic oligonucleotide
  Antisense strand to SEQ ID NO: 1250808
uugagggcuaaccacuccc

SEQ ID NO: 1250810 - RNA, 19 nt, Artificial Sequence
  Description of Artificial Sequence: Synthetic oligonucleotide
  Sense strand starting at position 441 of SEQ ID NO: 1241152
gugguuagcccucaaggua

SEQ ID NO: 1250811 - RNA, 19 nt, Artificial Sequence
  Description of Artificial Sequence: Synthetic oligonucleotide
  Antisense strand to SEQ ID NO: 1250810
uaccuugagggcuaaccac

SEQ ID NO: 1250812 - RNA, 19 nt, Artificial Sequence
  Description of Artificial Sequence: Synthetic oligonucleotide
  Sense strand starting at position 529 of SEQ ID NO: 1241152
gcgcuagcagcacuuuaaa

SEQ ID NO: 1250813 - RNA, 19 nt, Artificial Sequence
  Description of Artificial Sequence: Synthetic oligonucleotide
  Antisense strand to SEQ ID NO: 1250812
uuuaaagugcugcuagcgc

SEQ ID NO: 1250814 - RNA, 19 nt, Artificial Sequence
  Description of Artificial Sequence: Synthetic oligonucleotide
  Sense strand starting at position 617 of SEQ ID NO: 1241152
gaguguggauauuguaaag

SEQ ID NO: 1250815 - RNA, 19 nt, Artificial Sequence
  Description of Artificial Sequence: Synthetic oligonucleotide
  Antisense strand to SEQ ID NO: 1250814
cuuuacaauauccacacuc

SEQ ID NO: 1250816 - RNA, 19 nt, Artificial Sequence
  Description of Artificial Sequence: Synthetic oligonucleotide
  Sense strand starting at position 708 of SEQ ID NO: 1241152
agaggugucuacucacuga

SEQ ID NO: 1250817 - RNA, 19 nt, Artificial Sequence
  Description of Artificial Sequence: Synthetic oligonucleotide
  Antisense strand to SEQ ID NO: 1250816
ucagugaguagacaccucu

SEQ ID NO: 1250818 - RNA, 19 nt, Artificial Sequence
  Description of Artificial Sequence: Synthetic oligonucleotide
  Sense strand starting at position 712 of SEQ ID NO: 1241152
gugucuacucacugacaga

SEQ ID NO: 1250819 - RNA, 19 nt, Artificial Sequence
  Description of Artificial Sequence: Synthetic oligonucleotide
  Antisense strand to SEQ ID NO: 1250818
ucugucagugaguagacac

SEQ ID NO: 1250820 - RNA, 19 nt, Artificial Sequence
  Description of Artificial Sequence: Synthetic oligonucleotide
  Sense strand starting at position 777 of SEQ ID NO: 1241152
gaacaaacuugcuggaaag

SEQ ID NO: 1250821 - RNA, 19 nt, Artificial Sequence
  Description of Artificial Sequence: Synthetic oligonucleotide
  Antisense strand to SEQ ID NO: 1250820
cuuuccagcaaguuuguuc

SEQ ID NO: 1250822 - RNA, 19 nt, Artificial Sequence
  Description of Artificial Sequence: Synthetic oligonucleotide
  Sense strand starting at position 1249 of SEQ ID NO: 1241152
gcucgaacccggcuuaagu

SEQ ID NO: 1250823 - RNA, 19 nt, Artificial Sequence
  Description of Artificial Sequence: Synthetic oligonucleotide
  Antisense strand to SEQ ID NO: 1250822
acuuaagccggguucgagc

SEQ ID NO: 1250824 - RNA, 19 nt, Artificial Sequence
  Description of Artificial Sequence: Synthetic oligonucleotide
  Sense strand starting at position 1441 of SEQ ID NO: 1241152
ggccaaauauugcucccaa

SEQ ID NO: 1250825 - RNA, 19 nt, Artificial Sequence
  Description of Artificial Sequence: Synthetic oligonucleotide
  Antisense strand to SEQ ID NO: 1250824
uugggagcaauauuuggcc

SEQ ID NO: 1250826 - RNA, 19 nt, Artificial Sequence
  Description of Artificial Sequence: Synthetic oligonucleotide
  Sense strand starting at position 1586 of SEQ ID NO: 1241152
gagggugaucgcuguggga

SEQ ID NO: 1250827 - RNA, 19 nt, Artificial Sequence
  Description of Artificial Sequence: Synthetic oligonucleotide
  Antisense strand to SEQ ID NO: 1250826
ucccacagcgaucacccuc

SEQ ID NO: 1250828 - RNA, 19 nt, Artificial Sequence
  Description of Artificial Sequence: Synthetic oligonucleotide
  Sense strand starting at position 1588 of SEQ ID NO: 1241152
gggugaucgcugugggaaa

SEQ ID NO: 1250829 - RNA, 19 nt, Artificial Sequence
  Description of Artificial Sequence: Synthetic oligonucleotide
  Antisense strand to SEQ ID NO: 1250828
uuucccacagcgaucaccc

SEQ ID NO: 1250830 - RNA, 19 nt, Artificial Sequence
  Description of Artificial Sequence: Synthetic oligonucleotide
  Sense strand starting at position 1627 of SEQ ID NO: 1241152
gucauugcuccggguccau

SEQ ID NO: 1250831 - RNA, 19 nt, Artificial Sequence
  Description of Artificial Sequence: Synthetic oligonucleotide
  Antisense strand to SEQ ID NO: 1250830
auggacccggagcaaugac

SEQ ID NO: 1250832 - RNA, 19 nt, Artificial Sequence
  Description of Artificial Sequence: Synthetic oligonucleotide
  Sense strand starting at position 1638 of SEQ ID NO: 1241152
ggguccauuaccgagaauc

SEQ ID NO: 1250833 - RNA, 19 nt, Artificial Sequence
  Description of Artificial Sequence: Synthetic oligonucleotide
  Antisense strand to SEQ ID NO: 1250832
gauucucgguaauggaccc

SEQ ID NO: 1250834 - RNA, 19 nt, Artificial Sequence
  Description of Artificial Sequence: Synthetic oligonucleotide
  Sense strand starting at position 1813 of SEQ ID NO: 1241152
ucuuaauguggccgagguu

SEQ ID NO: 1250835 - RNA, 19 nt, Artificial Sequence
  Description of Artificial Sequence: Synthetic oligonucleotide
  Antisense strand to SEQ ID NO: 1250834
aaccucggccacauuaaga

SEQ ID NO: 1250836 - RNA, 19 nt, Artificial Sequence
  Description of Artificial Sequence: Synthetic oligonucleotide
  Sense strand starting at position 1814 of SEQ ID NO: 1241152
cuuaauguggccgagguuu

SEQ ID NO: 1250837 - RNA, 19 nt, Artificial Sequence
  Description of Artificial Sequence: Synthetic oligonucleotide
  Antisense strand to SEQ ID NO: 1250836
aaaccucggccacauuaag

SEQ ID NO: 1250838 - RNA, 19 nt, Artificial Sequence
  Description of Artificial Sequence: Synthetic oligonucleotide
  Sense strand starting at position 2095 of SEQ ID NO: 1241152
ggauguccugacuaaucga

SEQ ID NO: 1250839 - RNA, 19 nt, Artificial Sequence
  Description of Artificial Sequence: Synthetic oligonucleotide
  Antisense strand to SEQ ID NO: 1250838
ucgauuagucaggacaucc

SEQ ID NO: 1250840 - RNA, 19 nt, Artificial Sequence
  Description of Artificial Sequence: Synthetic oligonucleotide
  Sense strand starting at position 2098 of SEQ ID NO: 1241152
uguccugacuaaucgaaga

SEQ ID NO: 1250841 - RNA, 19 nt, Artificial Sequence
  Description of Artificial Sequence: Synthetic oligonucleotide
  Antisense strand to SEQ ID NO: 1250840
ucuucgauuagucaggaca

SEQ ID NO: 1250842 - RNA, 19 nt, Artificial Sequence
  Description of Artificial Sequence: Synthetic oligonucleotide
  Sense strand starting at position 2375 of SEQ ID NO: 1241152
ggcauuggcagguagacuu

SEQ ID NO: 1250843 - RNA, 19 nt, Artificial Sequence
  Description of Artificial Sequence: Synthetic oligonucleotide
  Antisense strand to SEQ ID NO: 1250842
aagucuaccugccaaugcc

SEQ ID NO: 1250844 - RNA, 19 nt, Artificial Sequence
  Description of Artificial Sequence: Synthetic oligonucleotide
  Sense strand starting at position 2382 of SEQ ID NO: 1241152
gcagguagacuuugaggaa

SEQ ID NO: 1250845 - RNA, 19 nt, Artificial Sequence
  Description of Artificial Sequence: Synthetic oligonucleotide
  Antisense strand to SEQ ID NO: 1250844
uuccucaaagucuaccugc

SEQ ID NO: 1250846 - RNA, 19 nt, Artificial Sequence
  Description of Artificial Sequence: Synthetic oligonucleotide
  Sense strand starting at position 2982 of SEQ ID NO: 1241152
cucgaaucuucuccuaaug

SEQ ID NO: 1250847 - RNA, 19 nt, Artificial Sequence
  Description of Artificial Sequence: Synthetic oligonucleotide
  Antisense strand to SEQ ID NO: 1250846
cauuaggagaagauucgag

SEQ ID NO: 1250848 - RNA, 19 nt, Artificial Sequence
  Description of Artificial Sequence: Synthetic oligonucleotide
  Sense strand starting at position 2991 of SEQ ID NO: 1241152
ucuccuaaugccgaaaugu

SEQ ID NO: 1250849 - RNA, 19 nt, Artificial Sequence
  Description of Artificial Sequence: Synthetic oligonucleotide
  Antisense strand to SEQ ID NO: 1250848
acauuucggcauuaggaga

SEQ ID NO: 1250850 - RNA, 19 nt, Artificial Sequence
  Description of Artificial Sequence: Synthetic oligonucleotide
  Sense strand starting at position 3000 of SEQ ID NO: 1241152
gccgaaauguguuuacagg

SEQ ID NO: 1250851 - RNA, 19 nt, Artificial Sequence
  Description of Artificial Sequence: Synthetic oligonucleotide
  Antisense strand to SEQ ID NO: 1250850
ccuguaaacacauuucggc

SEQ ID NO: 1250852 - RNA, 19 nt, Artificial Sequence
  Description of Artificial Sequence: Synthetic oligonucleotide
  Sense strand starting at position 3001 of SEQ ID NO: 1241152
ccgaaauguguuuacaggu

SEQ ID NO: 1250853 - RNA, 19 nt, Artificial Sequence
  Description of Artificial Sequence: Synthetic oligonucleotide
  Antisense strand to SEQ ID NO: 1250852
accuguaaacacauuucgg

SEQ ID NO: 1250854 - RNA, 19 nt, Artificial Sequence
  Description of Artificial Sequence: Synthetic oligonucleotide
  Sense strand starting at position 3052 of SEQ ID NO: 1241152
gguuuaaccucucacaaag

SEQ ID NO: 1250855 - RNA, 19 nt, Artificial Sequence
  Description of Artificial Sequence: Synthetic oligonucleotide
  Antisense strand to SEQ ID NO: 1250854
cuuugugagagguuaaacc

SEQ ID NO: 1250856 - RNA, 19 nt, Artificial Sequence
  Description of Artificial Sequence: Synthetic oligonucleotide
  Sense strand starting at position 3333 of SEQ ID NO: 1241152
gacccuacaccgugaaaug

SEQ ID NO: 1250857 - RNA, 19 nt, Artificial Sequence
  Description of Artificial Sequence: Synthetic oligonucleotide
  Antisense strand to SEQ ID NO: 1250856
cauuucacgguguaggguc

SEQ ID NO: 1250858 - RNA, 19 nt, Artificial Sequence
  Description of Artificial Sequence: Synthetic oligonucleotide
  Sense strand starting at position 3334 of SEQ ID NO: 1241152
acccuacaccgugaaauga

SEQ ID NO: 1250859 - RNA, 19 nt, Artificial Sequence
  Description of Artificial Sequence: Synthetic oligonucleotide
  Antisense strand to SEQ ID NO: 1250858
ucauuucacgguguagggu

SEQ ID NO: 1250860 - RNA, 19 nt, Artificial Sequence
  Description of Artificial Sequence: Synthetic oligonucleotide
  Sense strand starting at position 3347 of SEQ ID NO: 1241152
aaaugauagaggcgagguu

SEQ ID NO: 1250861 - RNA, 19 nt, Artificial Sequence
  Description of Artificial Sequence: Synthetic oligonucleotide
  Antisense strand to SEQ ID NO: 1250860
aaccucgccucuaucauuu

SEQ ID NO: 1250862 - RNA, 19 nt, Artificial Sequence
  Description of Artificial Sequence: Synthetic oligonucleotide
  Sense strand starting at position 3764 of SEQ ID NO: 1241152
gcacuucccaaaggugaga

SEQ ID NO: 1250863 - RNA, 19 nt, Artificial Sequence
  Description of Artificial Sequence: Synthetic oligonucleotide
  Antisense strand to SEQ ID NO: 1250862
ucucaccuuugggaagugc

SEQ ID NO: 1250864 - RNA, 19 nt, Artificial Sequence
  Description of Artificial Sequence: Synthetic oligonucleotide
  Sense strand starting at position 3777 of SEQ ID NO: 1241152
gugagaaucucccagggac

SEQ ID NO: 1250865 - RNA, 19 nt, Artificial Sequence
  Description of Artificial Sequence: Synthetic oligonucleotide
  Antisense strand to SEQ ID NO: 1250864
gucccugggagauucucac

SEQ ID NO: 1250866 - RNA, 19 nt, Artificial Sequence
  Description of Artificial Sequence: Synthetic oligonucleotide
  Sense strand starting at position 3842 of SEQ ID NO: 1241152
ggucuuucagcgccagcau

SEQ ID NO: 1250867 - RNA, 19 nt, Artificial Sequence
  Description of Artificial Sequence: Synthetic oligonucleotide
  Antisense strand to SEQ ID NO: 1250866
augcuggcgcugaaagacc

SEQ ID NO: 1250868 - RNA, 19 nt, Artificial Sequence
  Description of Artificial Sequence: Synthetic oligonucleotide
  Sense strand starting at position 3983 of SEQ ID NO: 1241152
gguagccuugcucaccaua

SEQ ID NO: 1250869 - RNA, 19 nt, Artificial Sequence
  Description of Artificial Sequence: Synthetic oligonucleotide
  Antisense strand to SEQ ID NO: 1250868
uauggugagcaaggcuacc

SEQ ID NO: 1250870 - RNA, 19 nt, Artificial Sequence
  Description of Artificial Sequence: Synthetic oligonucleotide
  Sense strand starting at position 161 of SEQ ID NO: 1241153
acuguaaacuaacugugaa

SEQ ID NO: 1250871 - RNA, 19 nt, Artificial Sequence
  Description of Artificial Sequence: Synthetic oligonucleotide
  Antisense strand to SEQ ID NO: 1250870
uucacaguuaguuuacagu

SEQ ID NO: 1250872 - RNA, 19 nt, Artificial Sequence
  Description of Artificial Sequence: Synthetic oligonucleotide
  Sense strand starting at position 164 of SEQ ID NO: 1241153
guaaacuaacugugaaaca

SEQ ID NO: 1250873 - RNA, 19 nt, Artificial Sequence
  Description of Artificial Sequence: Synthetic oligonucleotide
  Antisense strand to SEQ ID NO: 1250872
uguuucacaguuaguuuac

SEQ ID NO: 1250874 - RNA, 19 nt, Artificial Sequence
  Description of Artificial Sequence: Synthetic oligonucleotide
  Sense strand starting at position 406 of SEQ ID NO: 1241153
cuccauuguccugagcaca

SEQ ID NO: 1250875 - RNA, 19 nt, Artificial Sequence
  Description of Artificial Sequence: Synthetic oligonucleotide
  Antisense strand to SEQ ID NO: 1250874
ugugcucaggacaauggag

SEQ ID NO: 1250876 - RNA, 19 nt, Artificial Sequence
  Description of Artificial Sequence: Synthetic oligonucleotide
  Sense strand starting at position 1986 of SEQ ID NO: 1241153
cgcugucucucauuuagag

SEQ ID NO: 1250877 - RNA, 19 nt, Artificial Sequence
  Description of Artificial Sequence: Synthetic oligonucleotide
  Antisense strand to SEQ ID NO: 1250876
cucuaaaugagagacagcg

SEQ ID NO: 1250878 - RNA, 19 nt, Artificial Sequence
  Description of Artificial Sequence: Synthetic oligonucleotide
  Sense strand starting at position 2037 of SEQ ID NO: 1241153
cccaguugaucuugccauu

SEQ ID NO: 1250879 - RNA, 19 nt, Artificial Sequence
  Description of Artificial Sequence: Synthetic oligonucleotide
  Antisense strand to SEQ ID NO: 1250878
aauggcaagaucaacuggg

SEQ ID NO: 1250880 - RNA, 19 nt, Artificial Sequence
  Description of Artificial Sequence: Synthetic oligonucleotide
  Sense strand starting at position 2043 of SEQ ID NO: 1241153
ugaucuugccauugcggaa

SEQ ID NO: 1250881 - RNA, 19 nt, Artificial Sequence
  Description of Artificial Sequence: Synthetic oligonucleotide
  Antisense strand to SEQ ID NO: 1250880
uuccgcaauggcaagauca

SEQ ID NO: 1250882 - RNA, 19 nt, Artificial Sequence
  Description of Artificial Sequence: Synthetic oligonucleotide
  Sense strand starting at position 2172 of SEQ ID NO: 1241153
ugagucuccugcucaguuu

SEQ ID NO: 1250883 - RNA, 19 nt, Artificial Sequence
  Description of Artificial Sequence: Synthetic oligonucleotide
  Antisense strand to SEQ ID NO: 1250882
aaacugagcaggagacuca

SEQ ID NO: 1250884 - RNA, 19 nt, Artificial Sequence
  Description of Artificial Sequence: Synthetic oligonucleotide
  Sense strand starting at position 2175 of SEQ ID NO: 1241153
gucuccugcucaguuugaa

SEQ ID NO: 1250885 - RNA, 19 nt, Artificial Sequence
  Description of Artificial Sequence: Synthetic oligonucleotide
  Antisense strand to SEQ ID NO: 1250884
uucaaacugagcaggagac

SEQ ID NO: 1250886 - RNA, 19 nt, Artificial Sequence
  Description of Artificial Sequence: Synthetic oligonucleotide
  Sense strand starting at position 2178 of SEQ ID NO: 1241153
uccugcucaguuugaaacu

SEQ ID NO: 1250887 - RNA, 19 nt, Artificial Sequence
  Description of Artificial Sequence: Synthetic oligonucleotide
  Antisense strand to SEQ ID NO: 1250886
aguuucaaacugagcagga

SEQ ID NO: 1250888 - RNA, 19 nt, Artificial Sequence
  Description of Artificial Sequence: Synthetic oligonucleotide
  Sense strand starting at position 2179 of SEQ ID NO: 1241153
ccugcucaguuugaaacuu

SEQ ID NO: 1250889 - RNA, 19 nt, Artificial Sequence
  Description of Artificial Sequence: Synthetic oligonucleotide
  Antisense strand to SEQ ID NO: 1250888
aaguuucaaacugagcagg

SEQ ID NO: 1250890 - RNA, 19 nt, Artificial Sequence
  Description of Artificial Sequence: Synthetic oligonucleotide
  Sense strand starting at position 2197 of SEQ ID NO: 1241153
uuuguaauuucuucgugac

SEQ ID NO: 1250891 - RNA, 19 nt, Artificial Sequence
  Description of Artificial Sequence: Synthetic oligonucleotide
  Antisense strand to SEQ ID NO: 1250890
gucacgaagaaauuacaaa

SEQ ID NO: 1250892 - RNA, 19 nt, Artificial Sequence
  Description of Artificial Sequence: Synthetic oligonucleotide
  Sense strand starting at position 2198 of SEQ ID NO: 1241153
uuguaauuucuucgugacu

SEQ ID NO: 1250893 - RNA, 19 nt, Artificial Sequence
  Description of Artificial Sequence: Synthetic oligonucleotide
  Antisense strand to SEQ ID NO: 1250892
agucacgaagaaauuacaa

SEQ ID NO: 1250894 - RNA, 19 nt, Artificial Sequence
  Description of Artificial Sequence: Synthetic oligonucleotide
  Sense strand starting at position 2199 of SEQ ID NO: 1241153
uguaauuucuucgugacuu

SEQ ID NO: 1250895 - RNA, 19 nt, Artificial Sequence
  Description of Artificial Sequence: Synthetic oligonucleotide
  Antisense strand to SEQ ID NO: 1250894
aagucacgaagaaauuaca

SEQ ID NO: 1250896 - RNA, 19 nt, Artificial Sequence
  Description of Artificial Sequence: Synthetic oligonucleotide
  Sense strand starting at position 2200 of SEQ ID NO: 1241153
guaauuucuucgugacuug

SEQ ID NO: 1250897 - RNA, 19 nt, Artificial Sequence
  Description of Artificial Sequence: Synthetic oligonucleotide
  Antisense strand to SEQ ID NO: 1250896
caagucacgaagaaauuac

SEQ ID NO: 1250898 - RNA, 19 nt, Artificial Sequence
  Description of Artificial Sequence: Synthetic oligonucleotide
  Sense strand starting at position 2203 of SEQ ID NO: 1241153
auuucuucgugacuuggua

SEQ ID NO: 1250899 - RNA, 19 nt, Artificial Sequence
  Description of Artificial Sequence: Synthetic oligonucleotide
  Antisense strand to SEQ ID NO: 1250898
uaccaagucacgaagaaau

SEQ ID NO: 1250900 - RNA, 19 nt, Artificial Sequence
  Description of Artificial Sequence: Synthetic oligonucleotide
  Sense strand starting at position 2218 of SEQ ID NO: 1241153
gguaguuccugcucaggaa

SEQ ID NO: 1250901 - RNA, 19 nt, Artificial Sequence
  Description of Artificial Sequence: Synthetic oligonucleotide
  Antisense strand to SEQ ID NO: 1250900
uuccugagcaggaacuacc

SEQ ID NO: 1250902 - RNA, 19 nt, Artificial Sequence
  Description of Artificial Sequence: Synthetic oligonucleotide
  Sense strand starting at position 2276 of SEQ ID NO: 1241153
aaguucugguucuagaaua

SEQ ID NO: 1250903 - RNA, 19 nt, Artificial Sequence
  Description of Artificial Sequence: Synthetic oligonucleotide
  Antisense strand to SEQ ID NO: 1250902
uauucuagaaccagaacuu

SEQ ID NO: 1250904 - RNA, 19 nt, Artificial Sequence
  Description of Artificial Sequence: Synthetic oligonucleotide
  Sense strand starting at position 2413 of SEQ ID NO: 1241153
guggcauugaguuguucca

SEQ ID NO: 1250905 - RNA, 19 nt, Artificial Sequence
  Description of Artificial Sequence: Synthetic oligonucleotide
  Antisense strand to SEQ ID NO: 1250904
uggaacaacucaaugccac

SEQ ID NO: 1250906 - RNA, 19 nt, Artificial Sequence
  Description of Artificial Sequence: Synthetic oligonucleotide
  Sense strand starting at position 2650 of SEQ ID NO: 1241153
guguccauaugagaccuaa

SEQ ID NO: 1250907 - RNA, 19 nt, Artificial Sequence
  Description of Artificial Sequence: Synthetic oligonucleotide
  Antisense strand to SEQ ID NO: 1250906
uuaggucucauauggacac

SEQ ID NO: 1250908 - RNA, 19 nt, Artificial Sequence
  Description of Artificial Sequence: Synthetic oligonucleotide
  Sense strand starting at position 2795 of SEQ ID NO: 1241153
auuccaggucuuggcgauu

SEQ ID NO: 1250909 - RNA, 19 nt, Artificial Sequence
  Description of Artificial Sequence: Synthetic oligonucleotide
  Antisense strand to SEQ ID NO: 1250908
aaucgccaagaccuggaau

SEQ ID NO: 1250910 - RNA, 19 nt, Artificial Sequence
  Description of Artificial Sequence: Synthetic oligonucleotide
  Sense strand starting at position 3267 of SEQ ID NO: 1241153
caggauuuguucuguuggu

SEQ ID NO: 1250911 - RNA, 19 nt, Artificial Sequence
  Description of Artificial Sequence: Synthetic oligonucleotide
  Antisense strand to SEQ ID NO: 1250910
accaacagaacaaauccug

SEQ ID NO: 1250912 - RNA, 19 nt, Artificial Sequence
  Description of Artificial Sequence: Synthetic oligonucleotide
  Sense strand starting at position 3275 of SEQ ID NO: 1241153
guucuguugguguggaguu

SEQ ID NO: 1250913 - RNA, 19 nt, Artificial Sequence
  Description of Artificial Sequence: Synthetic oligonucleotide
  Antisense strand to SEQ ID NO: 1250912
aacuccacaccaacagaac

SEQ ID NO: 1250914 - RNA, 19 nt, Artificial Sequence
  Description of Artificial Sequence: Synthetic oligonucleotide
  Sense strand starting at position 3276 of SEQ ID NO: 1241153
uucuguugguguggaguua

SEQ ID NO: 1250915 - RNA, 19 nt, Artificial Sequence
  Description of Artificial Sequence: Synthetic oligonucleotide
  Antisense strand to SEQ ID NO: 1250914
uaacuccacaccaacagaa

SEQ ID NO: 1250916 - RNA, 19 nt, Artificial Sequence
  Description of Artificial Sequence: Synthetic oligonucleotide
  Sense strand starting at position 3277 of SEQ ID NO: 1241153
ucuguugguguggaguuaa

SEQ ID NO: 1250917 - RNA, 19 nt, Artificial Sequence
  Description of Artificial Sequence: Synthetic oligonucleotide
  Antisense strand to SEQ ID NO: 1250916
uuaacuccacaccaacaga

SEQ ID NO: 1250918 - RNA, 19 nt, Artificial Sequence
  Description of Artificial Sequence: Synthetic oligonucleotide
  Sense strand starting at position 3288 of SEQ ID NO: 1241153
ggaguuaaugggcggagga

SEQ ID NO: 1250919 - RNA, 19 nt, Artificial Sequence
  Description of Artificial Sequence: Synthetic oligonucleotide
  Antisense strand to SEQ ID NO: 1250918
uccuccgcccauuaacucc

SEQ ID NO: 1250920 - RNA, 19 nt, Artificial Sequence
  Description of Artificial Sequence: Synthetic oligonucleotide
  Sense strand starting at position 3290 of SEQ ID NO: 1241153
aguuaaugggcggaggagu

SEQ ID NO: 1250921 - RNA, 19 nt, Artificial Sequence
  Description of Artificial Sequence: Synthetic oligonucleotide
  Antisense strand to SEQ ID NO: 1250920
acuccuccgcccauuaacu

SEQ ID NO: 1250922 - RNA, 19 nt, Artificial Sequence
  Description of Artificial Sequence: Synthetic oligonucleotide
  Sense strand starting at position 3354 of SEQ ID NO: 1241153
gcaguuuguucguaggaca

SEQ ID NO: 1250923 - RNA, 19 nt, Artificial Sequence
  Description of Artificial Sequence: Synthetic oligonucleotide
  Antisense strand to SEQ ID NO: 1250922
uguccuacgaacaaacugc

SEQ ID NO: 1250924 - RNA, 19 nt, Artificial Sequence
  Description of Artificial Sequence: Synthetic oligonucleotide
  Sense strand starting at position 3397 of SEQ ID NO: 1241153
gcccuuaccuguccuggaa

SEQ ID NO: 1250925 - RNA, 19 nt, Artificial Sequence
  Description of Artificial Sequence: Synthetic oligonucleotide
  Antisense strand to SEQ ID NO: 1250924
uuccaggacagguaagggc

SEQ ID NO: 1250926 - RNA, 19 nt, Artificial Sequence
  Description of Artificial Sequence: Synthetic oligonucleotide
  Sense strand starting at position 3508 of SEQ ID NO: 1241153
cuuuguuccuccugaguuc

SEQ ID NO: 1250927 - RNA, 19 nt, Artificial Sequence
  Description of Artificial Sequence: Synthetic oligonucleotide
  Antisense strand to SEQ ID NO: 1250926
gaacucaggaggaacaaag

SEQ ID NO: 1250928 - RNA, 19 nt, Artificial Sequence
  Description of Artificial Sequence: Synthetic oligonucleotide
  Sense strand starting at position 3515 of SEQ ID NO: 1241153
ccuccugaguucuucugua

SEQ ID NO: 1250929 - RNA, 19 nt, Artificial Sequence
  Description of Artificial Sequence: Synthetic oligonucleotide
  Antisense strand to SEQ ID NO: 1250928
uacagaagaacucaggagg

SEQ ID NO: 1250930 - RNA, 19 nt, Artificial Sequence
  Description of Artificial Sequence: Synthetic oligonucleotide
  Sense strand starting at position 3592 of SEQ ID NO: 1241153
gcguguucacugcugcgua

SEQ ID NO: 1250931 - RNA, 19 nt, Artificial Sequence
  Description of Artificial Sequence: Synthetic oligonucleotide
  Antisense strand to SEQ ID NO: 1250930
uacgcagcagugaacacgc

SEQ ID NO: 1250932 - RNA, 19 nt, Artificial Sequence
  Description of Artificial Sequence: Synthetic oligonucleotide
  Sense strand starting at position 3634 of SEQ ID NO: 1241153
ucggcuuugcuucugucaa

SEQ ID NO: 1250933 - RNA, 19 nt, Artificial Sequence
  Description of Artificial Sequence: Synthetic oligonucleotide
  Antisense strand to SEQ ID NO: 1250932
uugacagaagcaaagccga

SEQ ID NO: 1250934 - RNA, 19 nt, Artificial Sequence
  Description of Artificial Sequence: Synthetic oligonucleotide
  Sense strand starting at position 3635 of SEQ ID NO: 1241153
cggcuuugcuucugucaag

SEQ ID NO: 1250935 - RNA, 19 nt, Artificial Sequence
  Description of Artificial Sequence: Synthetic oligonucleotide
  Antisense strand to SEQ ID NO: 1250934
cuugacagaagcaaagccg

SEQ ID NO: 1250936 - RNA, 19 nt, Artificial Sequence
  Description of Artificial Sequence: Synthetic oligonucleotide
  Sense strand starting at position 3638 of SEQ ID NO: 1241153
cuuugcuucugucaaggga

SEQ ID NO: 1250937 - RNA, 19 nt, Artificial Sequence
  Description of Artificial Sequence: Synthetic oligonucleotide
  Antisense strand to SEQ ID NO: 1250936
ucccuugacagaagcaaag

SEQ ID NO: 1250938 - RNA, 19 nt, Artificial Sequence
  Description of Artificial Sequence: Synthetic oligonucleotide
  Sense strand starting at position 3727 of SEQ ID NO: 1241153
cugcgugugucuuucugga

SEQ ID NO: 1250939 - RNA, 19 nt, Artificial Sequence
  Description of Artificial Sequence: Synthetic oligonucleotide
  Antisense strand to SEQ ID NO: 1250938
uccagaaagacacacgcag

SEQ ID NO: 1250940 - RNA, 19 nt, Artificial Sequence
  Description of Artificial Sequence: Synthetic oligonucleotide
  Sense strand starting at position 3729 of SEQ ID NO: 1241153
gcgugugucuuucuggaug

SEQ ID NO: 1250941 - RNA, 19 nt, Artificial Sequence
  Description of Artificial Sequence: Synthetic oligonucleotide
  Antisense strand to SEQ ID NO: 1250940
cauccagaaagacacacgc

SEQ ID NO: 1250942 - RNA, 19 nt, Artificial Sequence
  Description of Artificial Sequence: Synthetic oligonucleotide
  Sense strand starting at position 3944 of SEQ ID NO: 1241153
gugaagugguaucgugguu

SEQ ID NO: 1250943 - RNA, 19 nt, Artificial Sequence
  Description of Artificial Sequence: Synthetic oligonucleotide
  Antisense strand to SEQ ID NO: 1250942
aaccacgauaccacuucac

SEQ ID NO: 1250944 - RNA, 19 nt, Artificial Sequence
  Description of Artificial Sequence: Synthetic oligonucleotide
  Sense strand starting at position 570 of SEQ ID NO: 1241154
gagauccugucucgagaua

SEQ ID NO: 1250945 - RNA, 19 nt, Artificial Sequence
  Description of Artificial Sequence: Synthetic oligonucleotide
  Antisense strand to SEQ ID NO: 1250944
uaucucgagacaggaucuc

SEQ ID NO: 1250946 - RNA, 19 nt, Artificial Sequence
  Description of Artificial Sequence: Synthetic oligonucleotide
  Sense strand starting at position 571 of SEQ ID NO: 1241154
agauccugucucgagauaa

SEQ ID NO: 1250947 - RNA, 19 nt, Artificial Sequence
  Description of Artificial Sequence: Synthetic oligonucleotide
  Antisense strand to SEQ ID NO: 1250946
uuaucucgagacaggaucu

SEQ ID NO: 1250948 - RNA, 19 nt, Artificial Sequence
  Description of Artificial Sequence: Synthetic oligonucleotide
  Sense strand starting at position 625 of SEQ ID NO: 1241154
agaggauucgggcauggca

SEQ ID NO: 1250949 - RNA, 19 nt, Artificial Sequence
  Description of Artificial Sequence: Synthetic oligonucleotide
  Antisense strand to SEQ ID NO: 1250948
ugccaugcccgaauccucu

SEQ ID NO: 1250950 - RNA, 19 nt, Artificial Sequence
  Description of Artificial Sequence: Synthetic oligonucleotide
  Sense strand starting at position 627 of SEQ ID NO: 1241154
aggauucgggcauggcaaa

SEQ ID NO: 1250951 - RNA, 19 nt, Artificial Sequence
  Description of Artificial Sequence: Synthetic oligonucleotide
  Antisense strand to SEQ ID NO: 1250950
uuugccaugcccgaauccu

SEQ ID NO: 1250952 - RNA, 19 nt, Artificial Sequence
  Description of Artificial Sequence: Synthetic oligonucleotide
  Sense strand starting at position 652 of SEQ ID NO: 1241154
cccuaauaagguugaacau

SEQ ID NO: 1250953 - RNA, 19 nt, Artificial Sequence
  Description of Artificial Sequence: Synthetic oligonucleotide
  Antisense strand to SEQ ID NO: 1250952
auguucaaccuuauuaggg

SEQ ID NO: 1250954 - RNA, 19 nt, Artificial Sequence
  Description of Artificial Sequence: Synthetic oligonucleotide
  Sense strand starting at position 828 of SEQ ID NO: 1241154
augacaguuucccauagag

SEQ ID NO: 1250955 - RNA, 19 nt, Artificial Sequence
  Description of Artificial Sequence: Synthetic oligonucleotide
  Antisense strand to SEQ ID NO: 1250954
cucuaugggaaacugucau

SEQ ID NO: 1250956 - RNA, 19 nt, Artificial Sequence
  Description of Artificial Sequence: Synthetic oligonucleotide
  Sense strand starting at position 830 of SEQ ID NO: 1241154
gacaguuucccauagaguu

SEQ ID NO: 1250957 - RNA, 19 nt, Artificial Sequence
  Description of Artificial Sequence: Synthetic oligonucleotide
  Antisense strand to SEQ ID NO: 1250956
aacucuaugggaaacuguc

SEQ ID NO: 1250958 - RNA, 19 nt, Artificial Sequence
  Description of Artificial Sequence: Synthetic oligonucleotide
  Sense strand starting at position 1097 of SEQ ID NO: 1241154
ucggauucuaaguaccaga

SEQ ID NO: 1250959 - RNA, 19 nt, Artificial Sequence
  Description of Artificial Sequence: Synthetic oligonucleotide
  Antisense strand to SEQ ID NO: 1250958
ucugguacuuagaauccga

SEQ ID NO: 1250960 - RNA, 19 nt, Artificial Sequence
  Description of Artificial Sequence: Synthetic oligonucleotide
  Sense strand starting at position 1229 of SEQ ID NO: 1241154
acgcgugugucgaggaagu

SEQ ID NO: 1250961 - RNA, 19 nt, Artificial Sequence
  Description of Artificial Sequence: Synthetic oligonucleotide
  Antisense strand to SEQ ID NO: 1250960
acuuccucgacacacgcgu

SEQ ID NO: 1250962 - RNA, 19 nt, Artificial Sequence
  Description of Artificial Sequence: Synthetic oligonucleotide
  Sense strand starting at position 2688 of SEQ ID NO: 1241154
cccacuuucuagcagucau

SEQ ID NO: 1250963 - RNA, 19 nt, Artificial Sequence
  Description of Artificial Sequence: Synthetic oligonucleotide
  Antisense strand to SEQ ID NO: 1250962
augacugcuagaaaguggg

SEQ ID NO: 1250964 - RNA, 19 nt, Artificial Sequence
  Description of Artificial Sequence: Synthetic oligonucleotide
  Sense strand starting at position 2718 of SEQ ID NO: 1241154
ugugguuacccgugaguca

SEQ ID NO: 1250965 - RNA, 19 nt, Artificial Sequence
  Description of Artificial Sequence: Synthetic oligonucleotide
  Antisense strand to SEQ ID NO: 1250964
ugacucacggguaaccaca

SEQ ID NO: 1250966 - RNA, 19 nt, Artificial Sequence
  Description of Artificial Sequence: Synthetic oligonucleotide
  Sense strand starting at position 2774 of SEQ ID NO: 1241154
ugcgcacgcccucaaauau

SEQ ID NO: 1250967 - RNA, 19 nt, Artificial Sequence
  Description of Artificial Sequence: Synthetic oligonucleotide
  Antisense strand to SEQ ID NO: 1250966
auauuugagggcgugcgca

SEQ ID NO: 1250968 - RNA, 19 nt, Artificial Sequence
  Description of Artificial Sequence: Synthetic oligonucleotide
  Sense strand starting at position 3540 of SEQ ID NO: 1241154
guuagauccuucuuuccac

SEQ ID NO: 1250969 - RNA, 19 nt, Artificial Sequence
  Description of Artificial Sequence: Synthetic oligonucleotide
  Antisense strand to SEQ ID NO: 1250968
guggaaagaaggaucuaac

SEQ ID NO: 1250970 - RNA, 19 nt, Artificial Sequence
  Description of Artificial Sequence: Synthetic oligonucleotide
  Sense strand starting at position 3644 of SEQ ID NO: 1241154
agugcaguagcauaaucaa

SEQ ID NO: 1250971 - RNA, 19 nt, Artificial Sequence
  Description of Artificial Sequence: Synthetic oligonucleotide
  Antisense strand to SEQ ID NO: 1250970
uugauuaugcuacugcacu

SEQ ID NO: 1250972 - RNA, 19 nt, Artificial Sequence
  Description of Artificial Sequence: Synthetic oligonucleotide
  Sense strand starting at position 99 of SEQ ID NO: 1241155
ccuggagaguccuuuguug

SEQ ID NO: 1250973 - RNA, 19 nt, Artificial Sequence
  Description of Artificial Sequence: Synthetic oligonucleotide
  Antisense strand to SEQ ID NO: 1250972
caacaaaggacucuccagg

SEQ ID NO: 1250974 - RNA, 19 nt, Artificial Sequence
  Description of Artificial Sequence: Synthetic oligonucleotide
  Sense strand starting at position 101 of SEQ ID NO: 1241155
uggagaguccuuuguugaa

SEQ ID NO: 1250975 - RNA, 19 nt, Artificial Sequence
  Description of Artificial Sequence: Synthetic oligonucleotide
  Antisense strand to SEQ ID NO: 1250974
uucaacaaaggacucucca

SEQ ID NO: 1250976 - RNA, 19 nt, Artificial Sequence
  Description of Artificial Sequence: Synthetic oligonucleotide
  Sense strand starting at position 124 of SEQ ID NO: 1241155
ccgcaaauaucuucugaag

SEQ ID NO: 1250977 - RNA, 19 nt, Artificial Sequence
  Description of Artificial Sequence: Synthetic oligonucleotide
  Antisense strand to SEQ ID NO: 1250976
cuucagaagauauuugcgg

SEQ ID NO: 1250978 - RNA, 19 nt, Artificial Sequence
  Description of Artificial Sequence: Synthetic oligonucleotide
  Sense strand starting at position 126 of SEQ ID NO: 1241155
gcaaauaucuucugaagag

SEQ ID NO: 1250979 - RNA, 19 nt, Artificial Sequence
  Description of Artificial Sequence: Synthetic oligonucleotide
  Antisense strand to SEQ ID NO: 1250978
cucuucagaagauauuugc

SEQ ID NO: 1250980 - RNA, 19 nt, Artificial Sequence
  Description of Artificial Sequence: Synthetic oligonucleotide
  Sense strand starting at position 141 of SEQ ID NO: 1241155
agaggacucucccagggaa

SEQ ID NO: 1250981 - RNA, 19 nt, Artificial Sequence
  Description of Artificial Sequence: Synthetic oligonucleotide
  Antisense strand to SEQ ID NO: 1250980
uucccugggagaguccucu

SEQ ID NO: 1250982 - RNA, 19 nt, Artificial Sequence
  Description of Artificial Sequence: Synthetic oligonucleotide
  Sense strand starting at position 271 of SEQ ID NO: 1241155
ggguuuccugcauauggaa

SEQ ID NO: 1250983 - RNA, 19 nt, Artificial Sequence
  Description of Artificial Sequence: Synthetic oligonucleotide
  Antisense strand to SEQ ID NO: 1250982
uuccauaugcaggaaaccc

SEQ ID NO: 1250984 - RNA, 19 nt, Artificial Sequence
  Description of Artificial Sequence: Synthetic oligonucleotide
  Sense strand starting at position 444 of SEQ ID NO: 1241155
cuggucuccucaucagcaa

SEQ ID NO: 1250985 - RNA, 19 nt, Artificial Sequence
  Description of Artificial Sequence: Synthetic oligonucleotide
  Antisense strand to SEQ ID NO: 1250984
uugcugaugaggagaccag

SEQ ID NO: 1250986 - RNA, 19 nt, Artificial Sequence
  Description of Artificial Sequence: Synthetic oligonucleotide
  Sense strand starting at position 677 of SEQ ID NO: 1241155
gugccuauuuccucgagga

SEQ ID NO: 1250987 - RNA, 19 nt, Artificial Sequence
  Description of Artificial Sequence: Synthetic oligonucleotide
  Antisense strand to SEQ ID NO: 1250986
uccucgaggaaauaggcac

SEQ ID NO: 1250988 - RNA, 19 nt, Artificial Sequence
  Description of Artificial Sequence: Synthetic oligonucleotide
  Sense strand starting at position 789 of SEQ ID NO: 1241155
aagcuaaaucgcgaagcau

SEQ ID NO: 1250989 - RNA, 19 nt, Artificial Sequence
  Description of Artificial Sequence: Synthetic oligonucleotide
  Antisense strand to SEQ ID NO: 1250988
augcuucgcgauuuagcuu

SEQ ID NO: 1250990 - RNA, 19 nt, Artificial Sequence
  Description of Artificial Sequence: Synthetic oligonucleotide
  Sense strand starting at position 797 of SEQ ID NO: 1241155
ucgcgaagcaucugaacga

SEQ ID NO: 1250991 - RNA, 19 nt, Artificial Sequence
  Description of Artificial Sequence: Synthetic oligonucleotide
  Antisense strand to SEQ ID NO: 1250990
ucguucagaugcuucgcga

SEQ ID NO: 1250992 - RNA, 19 nt, Artificial Sequence
  Description of Artificial Sequence: Synthetic oligonucleotide
  Sense strand starting at position 798 of SEQ ID NO: 1241155
cgcgaagcaucugaacgaa

SEQ ID NO: 1250993 - RNA, 19 nt, Artificial Sequence
  Description of Artificial Sequence: Synthetic oligonucleotide
  Antisense strand to SEQ ID NO: 1250992
uucguucagaugcuucgcg

SEQ ID NO: 1250994 - RNA, 19 nt, Artificial Sequence
  Description of Artificial Sequence: Synthetic oligonucleotide
  Sense strand starting at position 912 of SEQ ID NO: 1241155
aaagaucgcuaacugaaga

SEQ ID NO: 1250995 - RNA, 19 nt, Artificial Sequence
  Description of Artificial Sequence: Synthetic oligonucleotide
  Antisense strand to SEQ ID NO: 1250994
ucuucaguuagcgaucuuu

SEQ ID NO: 1250996 - RNA, 19 nt, Artificial Sequence
  Description of Artificial Sequence: Synthetic oligonucleotide
  Sense strand starting at position 1749 of SEQ ID NO: 1241155
gcaggaacgcgcucauguu

SEQ ID NO: 1250997 - RNA, 19 nt, Artificial Sequence
  Description of Artificial Sequence: Synthetic oligonucleotide
  Antisense strand to SEQ ID NO: 1250996
aacaugagcgcguuccugc

SEQ ID NO: 1250998 - RNA, 19 nt, Artificial Sequence
  Description of Artificial Sequence: Synthetic oligonucleotide
  Sense strand starting at position 1939 of SEQ ID NO: 1241155
gcgcuuucuccucccagua

SEQ ID NO: 1250999 - RNA, 19 nt, Artificial Sequence
  Description of Artificial Sequence: Synthetic oligonucleotide
  Antisense strand to SEQ ID NO: 1250998
uacugggaggagaaagcgc

SEQ ID NO: 1251000 - RNA, 19 nt, Artificial Sequence
  Description of Artificial Sequence: Synthetic oligonucleotide
  Sense strand starting at position 3792 of SEQ ID NO: 1241155
ugaacaugcuaugugguua

SEQ ID NO: 1251001 - RNA, 19 nt, Artificial Sequence
  Description of Artificial Sequence: Synthetic oligonucleotide
  Antisense strand to SEQ ID NO: 1251000
uaaccacauagcauguuca

SEQ ID NO: 1251002 - RNA, 19 nt, Artificial Sequence
  Description of Artificial Sequence: Synthetic oligonucleotide
  Sense strand starting at position 3800 of SEQ ID NO: 1241155
cuaugugguuaggagcaaa

SEQ ID NO: 1251003 - RNA, 19 nt, Artificial Sequence
  Description of Artificial Sequence: Synthetic oligonucleotide
  Antisense strand to SEQ ID NO: 1251002
uuugcuccuaaccacauag

SEQ ID NO: 1251004 - RNA, 19 nt, Artificial Sequence
  Description of Artificial Sequence: Synthetic oligonucleotide
  Sense strand starting at position 3896 of SEQ ID NO: 1241155
gguugucucuauguccuaa

SEQ ID NO: 1251005 - RNA, 19 nt, Artificial Sequence
  Description of Artificial Sequence: Synthetic oligonucleotide
  Antisense strand to SEQ ID NO: 1251004
uuaggacauagagacaacc

SEQ ID NO: 1251006 - RNA, 19 nt, Artificial Sequence
  Description of Artificial Sequence: Synthetic oligonucleotide
  Sense strand starting at position 3900 of SEQ ID NO: 1241155
gucucuauguccuaaugca

SEQ ID NO: 1251007 - RNA, 19 nt, Artificial Sequence
  Description of Artificial Sequence: Synthetic oligonucleotide
  Antisense strand to SEQ ID NO: 1251006
ugcauuaggacauagagac

SEQ ID NO: 1251008 - RNA, 19 nt, Artificial Sequence
  Description of Artificial Sequence: Synthetic oligonucleotide
  Sense strand starting at position 3927 of SEQ ID NO: 1241155
accucagaguccuacccua

SEQ ID NO: 1251009 - RNA, 19 nt, Artificial Sequence
  Description of Artificial Sequence: Synthetic oligonucleotide
  Antisense strand to SEQ ID NO: 1251008
uaggguaggacucugaggu

SEQ ID NO: 1251010 - RNA, 19 nt, Artificial Sequence
  Description of Artificial Sequence: Synthetic oligonucleotide
  Sense strand starting at position 73 of SEQ ID NO: 1241156
ggaaucuauuaacagaaau

SEQ ID NO: 1251011 - RNA, 19 nt, Artificial Sequence
  Description of Artificial Sequence: Synthetic oligonucleotide
  Antisense strand to SEQ ID NO: 1251010
auuucuguuaauagauucc

SEQ ID NO: 1251012 - RNA, 19 nt, Artificial Sequence
  Description of Artificial Sequence: Synthetic oligonucleotide
  Sense strand starting at position 107 of SEQ ID NO: 1241156
ggaagagacuaugugcaaa

SEQ ID NO: 1251013 - RNA, 19 nt, Artificial Sequence
  Description of Artificial Sequence: Synthetic oligonucleotide
  Antisense strand to SEQ ID NO: 1251012
uuugcacauagucucuucc

SEQ ID NO: 1251014 - RNA, 19 nt, Artificial Sequence
  Description of Artificial Sequence: Synthetic oligonucleotide
  Sense strand starting at position 142 of SEQ ID NO: 1241156
ggguuaacagccugaauau

SEQ ID NO: 1251015 - RNA, 19 nt, Artificial Sequence
  Description of Artificial Sequence: Synthetic oligonucleotide
  Antisense strand to SEQ ID NO: 1251014
auauucaggcuguuaaccc

SEQ ID NO: 1251016 - RNA, 19 nt, Artificial Sequence
  Description of Artificial Sequence: Synthetic oligonucleotide
  Sense strand starting at position 143 of SEQ ID NO: 1241156
gguuaacagccugaauaua

SEQ ID NO: 1251017 - RNA, 19 nt, Artificial Sequence
  Description of Artificial Sequence: Synthetic oligonucleotide
  Antisense strand to SEQ ID NO: 1251016
uauauucaggcuguuaacc

SEQ ID NO: 1251018 - RNA, 19 nt, Artificial Sequence
  Description of Artificial Sequence: Synthetic oligonucleotide
  Sense strand starting at position 359 of SEQ ID NO: 1241156
acagacguuucuccaaaca

SEQ ID NO: 1251019 - RNA, 19 nt, Artificial Sequence
  Description of Artificial Sequence: Synthetic oligonucleotide
  Antisense strand to SEQ ID NO: 1251018
uguuuggagaaacgucugu

SEQ ID NO: 1251020 - RNA, 19 nt, Artificial Sequence
  Description of Artificial Sequence: Synthetic oligonucleotide
  Sense strand starting at position 403 of SEQ ID NO: 1241156
augaguagauggucaacau

SEQ ID NO: 1251021 - RNA, 19 nt, Artificial Sequence
  Description of Artificial Sequence: Synthetic oligonucleotide
  Antisense strand to SEQ ID NO: 1251020
auguugaccaucuacucau

SEQ ID NO: 1251022 - RNA, 19 nt, Artificial Sequence
  Description of Artificial Sequence: Synthetic oligonucleotide
  Sense strand starting at position 407 of SEQ ID NO: 1241156
guagauggucaacaucauu

SEQ ID NO: 1251023 - RNA, 19 nt, Artificial Sequence
  Description of Artificial Sequence: Synthetic oligonucleotide
  Antisense strand to SEQ ID NO: 1251022
aaugauguugaccaucuac

SEQ ID NO: 1251024 - RNA, 19 nt, Artificial Sequence
  Description of Artificial Sequence: Synthetic oligonucleotide
  Sense strand starting at position 721 of SEQ ID NO: 1241156
auuacaggugcccguuaau

SEQ ID NO: 1251025 - RNA, 19 nt, Artificial Sequence
  Description of Artificial Sequence: Synthetic oligonucleotide
  Antisense strand to SEQ ID NO: 1251024
auuaacgggcaccuguaau

SEQ ID NO: 1251026 - RNA, 19 nt, Artificial Sequence
  Description of Artificial Sequence: Synthetic oligonucleotide
  Sense strand starting at position 904 of SEQ ID NO: 1241156
aagggugguuucuuucuaa

SEQ ID NO: 1251027 - RNA, 19 nt, Artificial Sequence
  Description of Artificial Sequence: Synthetic oligonucleotide
  Antisense strand to SEQ ID NO: 1251026
uuagaaagaaaccacccuu

SEQ ID NO: 1251028 - RNA, 19 nt, Artificial Sequence
  Description of Artificial Sequence: Synthetic oligonucleotide
  Sense strand starting at position 907 of SEQ ID NO: 1241156
ggugguuucuuucuaagga

SEQ ID NO: 1251029 - RNA, 19 nt, Artificial Sequence
  Description of Artificial Sequence: Synthetic oligonucleotide
  Antisense strand to SEQ ID NO: 1251028
uccuuagaaagaaaccacc

SEQ ID NO: 1251030 - RNA, 19 nt, Artificial Sequence
  Description of Artificial Sequence: Synthetic oligonucleotide
  Sense strand starting at position 908 of SEQ ID NO: 1241156
gugguuucuuucuaaggau

SEQ ID NO: 1251031 - RNA, 19 nt, Artificial Sequence
  Description of Artificial Sequence: Synthetic oligonucleotide
  Antisense strand to SEQ ID NO: 1251030
auccuuagaaagaaaccac

SEQ ID NO: 1251032 - RNA, 19 nt, Artificial Sequence
  Description of Artificial Sequence: Synthetic oligonucleotide
  Sense strand starting at position 911 of SEQ ID NO: 1241156
guuucuuucuaaggaugaa

SEQ ID NO: 1251033 - RNA, 19 nt, Artificial Sequence
  Description of Artificial Sequence: Synthetic oligonucleotide
  Antisense strand to SEQ ID NO: 1251032
uucauccuuagaaagaaac

SEQ ID NO: 1251034 - RNA, 19 nt, Artificial Sequence
  Description of Artificial Sequence: Synthetic oligonucleotide
  Sense strand starting at position 1034 of SEQ ID NO: 1241156
ggucuugugugcugcugua

SEQ ID NO: 1251035 - RNA, 19 nt, Artificial Sequence
  Description of Artificial Sequence: Synthetic oligonucleotide
  Antisense strand to SEQ ID NO: 1251034
uacagcagcacacaagacc

SEQ ID NO: 1251036 - RNA, 19 nt, Artificial Sequence
  Description of Artificial Sequence: Synthetic oligonucleotide
  Sense strand starting at position 1038 of SEQ ID NO: 1241156
uugugugcugcuguaaguu

SEQ ID NO: 1251037 - RNA, 19 nt, Artificial Sequence
  Description of Artificial Sequence: Synthetic oligonucleotide
  Antisense strand to SEQ ID NO: 1251036
aacuuacagcagcacacaa

SEQ ID NO: 1251038 - RNA, 19 nt, Artificial Sequence
  Description of Artificial Sequence: Synthetic oligonucleotide
  Sense strand starting at position 1047 of SEQ ID NO: 1241156
gcuguaaguuauuccuucu

SEQ ID NO: 1251039 - RNA, 19 nt, Artificial Sequence
  Description of Artificial Sequence: Synthetic oligonucleotide
  Antisense strand to SEQ ID NO: 1251038
agaaggaauaacuuacagc

SEQ ID NO: 1251040 - RNA, 19 nt, Artificial Sequence
  Description of Artificial Sequence: Synthetic oligonucleotide
  Sense strand starting at position 1050 of SEQ ID NO: 1241156
guaaguuauuccuucucac

SEQ ID NO: 1251041 - RNA, 19 nt, Artificial Sequence
  Description of Artificial Sequence: Synthetic oligonucleotide
  Antisense strand to SEQ ID NO: 1251040
gugagaaggaauaacuuac

SEQ ID NO: 1251042 - RNA, 19 nt, Artificial Sequence
  Description of Artificial Sequence: Synthetic oligonucleotide
  Sense strand starting at position 1102 of SEQ ID NO: 1241156
gauccuuucuguugcugau

SEQ ID NO: 1251043 - RNA, 19 nt, Artificial Sequence
  Description of Artificial Sequence: Synthetic oligonucleotide
  Antisense strand to SEQ ID NO: 1251042
aucagcaacagaaaggauc

SEQ ID NO: 1251044 - RNA, 19 nt, Artificial Sequence
  Description of Artificial Sequence: Synthetic oligonucleotide
  Sense strand starting at position 1170 of SEQ ID NO: 1241156
ugcuuaugcccguuaccuu

SEQ ID NO: 1251045 - RNA, 19 nt, Artificial Sequence
  Description of Artificial Sequence: Synthetic oligonucleotide
  Antisense strand to SEQ ID NO: 1251044
aagguaacgggcauaagca

SEQ ID NO: 1251046 - RNA, 19 nt, Artificial Sequence
  Description of Artificial Sequence: Synthetic oligonucleotide
  Sense strand starting at position 1319 of SEQ ID NO: 1241156
acacuuucucucggaacuu

SEQ ID NO: 1251047 - RNA, 19 nt, Artificial Sequence
  Description of Artificial Sequence: Synthetic oligonucleotide
  Antisense strand to SEQ ID NO: 1251046
aaguuccgagagaaagugu

SEQ ID NO: 1251048 - RNA, 19 nt, Artificial Sequence
  Description of Artificial Sequence: Synthetic oligonucleotide
  Sense strand starting at position 1338 of SEQ ID NO: 1241156
uccggacucucaugcauau

SEQ ID NO: 1251049 - RNA, 19 nt, Artificial Sequence
  Description of Artificial Sequence: Synthetic oligonucleotide
  Antisense strand to SEQ ID NO: 1251048
auaugcaugagaguccgga

SEQ ID NO: 1251050 - RNA, 19 nt, Artificial Sequence
  Description of Artificial Sequence: Synthetic oligonucleotide
  Sense strand starting at position 1618 of SEQ ID NO: 1241156
ccuggagaguccuuuguug

SEQ ID NO: 1251051 - RNA, 19 nt, Artificial Sequence
  Description of Artificial Sequence: Synthetic oligonucleotide
  Antisense strand to SEQ ID NO: 1251050
caacaaaggacucuccagg

SEQ ID NO: 1251052 - RNA, 19 nt, Artificial Sequence
  Description of Artificial Sequence: Synthetic oligonucleotide
  Sense strand starting at position 1620 of SEQ ID NO: 1241156
uggagaguccuuuguugaa

SEQ ID NO: 1251053 - RNA, 19 nt, Artificial Sequence
  Description of Artificial Sequence: Synthetic oligonucleotide
  Antisense strand to SEQ ID NO: 1251052
uucaacaaaggacucucca

SEQ ID NO: 1251054 - RNA, 19 nt, Artificial Sequence
  Description of Artificial Sequence: Synthetic oligonucleotide
  Sense strand starting at position 1643 of SEQ ID NO: 1241156
ccgcaaauaucuucugaag

SEQ ID NO: 1251055 - RNA, 19 nt, Artificial Sequence
  Description of Artificial Sequence: Synthetic oligonucleotide
  Antisense strand to SEQ ID NO: 1251054
cuucagaagauauuugcgg

SEQ ID NO: 1251056 - RNA, 19 nt, Artificial Sequence
  Description of Artificial Sequence: Synthetic oligonucleotide
  Sense strand starting at position 1645 of SEQ ID NO: 1241156
gcaaauaucuucugaagag

SEQ ID NO: 1251057 - RNA, 19 nt, Artificial Sequence
  Description of Artificial Sequence: Synthetic oligonucleotide
  Antisense strand to SEQ ID NO: 1251056
cucuucagaagauauuugc

SEQ ID NO: 1251058 - RNA, 19 nt, Artificial Sequence
  Description of Artificial Sequence: Synthetic oligonucleotide
  Sense strand starting at position 1660 of SEQ ID NO: 1241156
agaggacucucccagggaa

SEQ ID NO: 1251059 - RNA, 19 nt, Artificial Sequence
  Description of Artificial Sequence: Synthetic oligonucleotide
  Antisense strand to SEQ ID NO: 1251058
uucccugggagaguccucu

SEQ ID NO: 1251060 - RNA, 19 nt, Artificial Sequence
  Description of Artificial Sequence: Synthetic oligonucleotide
  Sense strand starting at position 1790 of SEQ ID NO: 1241156
ggguuuccugcauauggaa

SEQ ID NO: 1251061 - RNA, 19 nt, Artificial Sequence
  Description of Artificial Sequence: Synthetic oligonucleotide
  Antisense strand to SEQ ID NO: 1251060
uuccauaugcaggaaaccc

SEQ ID NO: 1251062 - RNA, 19 nt, Artificial Sequence
  Description of Artificial Sequence: Synthetic oligonucleotide
  Sense strand starting at position 1963 of SEQ ID NO: 1241156
cuggucuccucaucagcaa

SEQ ID NO: 1251063 - RNA, 19 nt, Artificial Sequence
  Description of Artificial Sequence: Synthetic oligonucleotide
  Antisense strand to SEQ ID NO: 1251062
uugcugaugaggagaccag

SEQ ID NO: 1251064 - RNA, 19 nt, Artificial Sequence
  Description of Artificial Sequence: Synthetic oligonucleotide
  Sense strand starting at position 2196 of SEQ ID NO: 1241156
gugccuauuuccucgagga

SEQ ID NO: 1251065 - RNA, 19 nt, Artificial Sequence
  Description of Artificial Sequence: Synthetic oligonucleotide
  Antisense strand to SEQ ID NO: 1251064
uccucgaggaaauaggcac

SEQ ID NO: 1251066 - RNA, 19 nt, Artificial Sequence
  Description of Artificial Sequence: Synthetic oligonucleotide
  Sense strand starting at position 2308 of SEQ ID NO: 1241156
aagcuaaaucgcgaagcau

SEQ ID NO: 1251067 - RNA, 19 nt, Artificial Sequence
  Description of Artificial Sequence: Synthetic oligonucleotide
  Antisense strand to SEQ ID NO: 1251066
augcuucgcgauuuagcuu

SEQ ID NO: 1251068 - RNA, 19 nt, Artificial Sequence
  Description of Artificial Sequence: Synthetic oligonucleotide
  Sense strand starting at position 2316 of SEQ ID NO: 1241156
ucgcgaagcaucugaacga

SEQ ID NO: 1251069 - RNA, 19 nt, Artificial Sequence
  Description of Artificial Sequence: Synthetic oligonucleotide
  Antisense strand to SEQ ID NO: 1251068
ucguucagaugcuucgcga

SEQ ID NO: 1251070 - RNA, 19 nt, Artificial Sequence
  Description of Artificial Sequence: Synthetic oligonucleotide
  Sense strand starting at position 2317 of SEQ ID NO: 1241156
cgcgaagcaucugaacgaa

SEQ ID NO: 1251071 - RNA, 19 nt, Artificial Sequence
  Description of Artificial Sequence: Synthetic oligonucleotide
  Antisense strand to SEQ ID NO: 1251070
uucguucagaugcuucgcg

SEQ ID NO: 1251072 - RNA, 19 nt, Artificial Sequence
  Description of Artificial Sequence: Synthetic oligonucleotide
  Sense strand starting at position 2431 of SEQ ID NO: 1241156
aaagaucgcuaacugaaga

SEQ ID NO: 1251073 - RNA, 19 nt, Artificial Sequence
  Description of Artificial Sequence: Synthetic oligonucleotide
  Antisense strand to SEQ ID NO: 1251072
ucuucaguuagcgaucuuu

SEQ ID NO: 1251074 - RNA, 19 nt, Artificial Sequence
  Description of Artificial Sequence: Synthetic oligonucleotide
  Sense strand starting at position 3268 of SEQ ID NO: 1241156
gcaggaacgcgcucauguu

SEQ ID NO: 1251075 - RNA, 19 nt, Artificial Sequence
  Description of Artificial Sequence: Synthetic oligonucleotide
  Antisense strand to SEQ ID NO: 1251074
aacaugagcgcguuccugc

SEQ ID NO: 1251076 - RNA, 19 nt, Artificial Sequence
  Description of Artificial Sequence: Synthetic oligonucleotide
  Sense strand starting at position 3458 of SEQ ID NO: 1241156
gcgcuuucuccucccagua

SEQ ID NO: 1251077 - RNA, 19 nt, Artificial Sequence
  Description of Artificial Sequence: Synthetic oligonucleotide
  Antisense strand to SEQ ID NO: 1251076
uacugggaggagaaagcgc

SEQ ID NO: 1251078 - RNA, 19 nt, Artificial Sequence
  Description of Artificial Sequence: Synthetic oligonucleotide
  Sense strand starting at position 224 of SEQ ID NO: 1241157
agcaacaugucugaaauac

SEQ ID NO: 1251079 - RNA, 19 nt, Artificial Sequence
  Description of Artificial Sequence: Synthetic oligonucleotide
  Antisense strand to SEQ ID NO: 1251078
guauuucagacauguugcu

SEQ ID NO: 1251080 - RNA, 19 nt, Artificial Sequence
  Description of Artificial Sequence: Synthetic oligonucleotide
  Sense strand starting at position 278 of SEQ ID NO: 1241157
uucuauuucuguugaugcu

SEQ ID NO: 1251081 - RNA, 19 nt, Artificial Sequence
  Description of Artificial Sequence: Synthetic oligonucleotide
  Antisense strand to SEQ ID NO: 1251080
agcaucaacagaaauagaa

SEQ ID NO: 1251082 - RNA, 19 nt, Artificial Sequence
  Description of Artificial Sequence: Synthetic oligonucleotide
  Sense strand starting at position 367 of SEQ ID NO: 1241157
uugugcuuucuuugaaauc

SEQ ID NO: 1251083 - RNA, 19 nt, Artificial Sequence
  Description of Artificial Sequence: Synthetic oligonucleotide
  Antisense strand to SEQ ID NO: 1251082
gauuucaaagaaagcacaa

SEQ ID NO: 1251084 - RNA, 19 nt, Artificial Sequence
  Description of Artificial Sequence: Synthetic oligonucleotide
  Sense strand starting at position 368 of SEQ ID NO: 1241157
ugugcuuucuuugaaauca

SEQ ID NO: 1251085 - RNA, 19 nt, Artificial Sequence
  Description of Artificial Sequence: Synthetic oligonucleotide
  Antisense strand to SEQ ID NO: 1251084
ugauuucaaagaaagcaca

SEQ ID NO: 1251086 - RNA, 19 nt, Artificial Sequence
  Description of Artificial Sequence: Synthetic oligonucleotide
  Sense strand starting at position 667 of SEQ ID NO: 1241157
uuaaucaaguggugacuua

SEQ ID NO: 1251087 - RNA, 19 nt, Artificial Sequence
  Description of Artificial Sequence: Synthetic oligonucleotide
  Antisense strand to SEQ ID NO: 1251086
uaagucaccacuugauuaa

SEQ ID NO: 1251088 - RNA, 19 nt, Artificial Sequence
  Description of Artificial Sequence: Synthetic oligonucleotide
  Sense strand starting at position 668 of SEQ ID NO: 1241157
uaaucaaguggugacuuau

SEQ ID NO: 1251089 - RNA, 19 nt, Artificial Sequence
  Description of Artificial Sequence: Synthetic oligonucleotide
  Antisense strand to SEQ ID NO: 1251088
auaagucaccacuugauua

SEQ ID NO: 1251090 - RNA, 19 nt, Artificial Sequence
  Description of Artificial Sequence: Synthetic oligonucleotide
  Sense strand starting at position 677 of SEQ ID NO: 1241157
ggugacuuaugauagcuuu

SEQ ID NO: 1251091 - RNA, 19 nt, Artificial Sequence
  Description of Artificial Sequence: Synthetic oligonucleotide
  Antisense strand to SEQ ID NO: 1251090
aaagcuaucauaagucacc

SEQ ID NO: 1251092 - RNA, 19 nt, Artificial Sequence
  Description of Artificial Sequence: Synthetic oligonucleotide
  Sense strand starting at position 725 of SEQ ID NO: 1241157
cccucauauugaguacugu

SEQ ID NO: 1251093 - RNA, 19 nt, Artificial Sequence
  Description of Artificial Sequence: Synthetic oligonucleotide
  Antisense strand to SEQ ID NO: 1251092
acaguacucaauaugaggg

SEQ ID NO: 1251094 - RNA, 19 nt, Artificial Sequence
  Description of Artificial Sequence: Synthetic oligonucleotide
  Sense strand starting at position 743 of SEQ ID NO: 1241157
uccagugcugcacaaagaa

SEQ ID NO: 1251095 - RNA, 19 nt, Artificial Sequence
  Description of Artificial Sequence: Synthetic oligonucleotide
  Antisense strand to SEQ ID NO: 1251094
uucuuugugcagcacugga

SEQ ID NO: 1251096 - RNA, 19 nt, Artificial Sequence
  Description of Artificial Sequence: Synthetic oligonucleotide
  Sense strand starting at position 807 of SEQ ID NO: 1241157
auauccuuccauggagauu

SEQ ID NO: 1251097 - RNA, 19 nt, Artificial Sequence
  Description of Artificial Sequence: Synthetic oligonucleotide
  Antisense strand to SEQ ID NO: 1251096
aaucuccauggaaggauau

SEQ ID NO: 1251098 - RNA, 19 nt, Artificial Sequence
  Description of Artificial Sequence: Synthetic oligonucleotide
  Sense strand starting at position 821 of SEQ ID NO: 1241157
agauuugcuuugcaaggga

SEQ ID NO: 1251099 - RNA, 19 nt, Artificial Sequence
  Description of Artificial Sequence: Synthetic oligonucleotide
  Antisense strand to SEQ ID NO: 1251098
ucccuugcaaagcaaaucu

SEQ ID NO: 1251100 - RNA, 19 nt, Artificial Sequence
  Description of Artificial Sequence: Synthetic oligonucleotide
  Sense strand starting at position 851 of SEQ ID NO: 1241157
agggcaucugggugauacu

SEQ ID NO: 1251101 - RNA, 19 nt, Artificial Sequence
  Description of Artificial Sequence: Synthetic oligonucleotide
  Antisense strand to SEQ ID NO: 1251100
aguaucacccagaugcccu

SEQ ID NO: 1251102 - RNA, 19 nt, Artificial Sequence
  Description of Artificial Sequence: Synthetic oligonucleotide
  Sense strand starting at position 852 of SEQ ID NO: 1241157
gggcaucugggugauacua

SEQ ID NO: 1251103 - RNA, 19 nt, Artificial Sequence
  Description of Artificial Sequence: Synthetic oligonucleotide
  Antisense strand to SEQ ID NO: 1251102
uaguaucacccagaugccc

SEQ ID NO: 1251104 - RNA, 19 nt, Artificial Sequence
  Description of Artificial Sequence: Synthetic oligonucleotide
  Sense strand starting at position 860 of SEQ ID NO: 1241157
gggugauacuaggcuguca

SEQ ID NO: 1251105 - RNA, 19 nt, Artificial Sequence
  Description of Artificial Sequence: Synthetic oligonucleotide
  Antisense strand to SEQ ID NO: 1251104
ugacagccuaguaucaccc

SEQ ID NO: 1251106 - RNA, 19 nt, Artificial Sequence
  Description of Artificial Sequence: Synthetic oligonucleotide
  Sense strand starting at position 862 of SEQ ID NO: 1241157
gugauacuaggcugucauc

SEQ ID NO: 1251107 - RNA, 19 nt, Artificial Sequence
  Description of Artificial Sequence: Synthetic oligonucleotide
  Antisense strand to SEQ ID NO: 1251106
gaugacagccuaguaucac

SEQ ID NO: 1251108 - RNA, 19 nt, Artificial Sequence
  Description of Artificial Sequence: Synthetic oligonucleotide
  Sense strand starting at position 868 of SEQ ID NO: 1241157
cuaggcugucaucaaccua

SEQ ID NO: 1251109 - RNA, 19 nt, Artificial Sequence
  Description of Artificial Sequence: Synthetic oligonucleotide
  Antisense strand to SEQ ID NO: 1251108
uagguugaugacagccuag

SEQ ID NO: 1251110 - RNA, 19 nt, Artificial Sequence
  Description of Artificial Sequence: Synthetic oligonucleotide
  Sense strand starting at position 1348 of SEQ ID NO: 1241157
cucacuugcgcugagaagu

SEQ ID NO: 1251111 - RNA, 19 nt, Artificial Sequence
  Description of Artificial Sequence: Synthetic oligonucleotide
  Antisense strand to SEQ ID NO: 1251110
acuucucagcgcaagugag

SEQ ID NO: 1251112 - RNA, 19 nt, Artificial Sequence
  Description of Artificial Sequence: Synthetic oligonucleotide
  Sense strand starting at position 1367 of SEQ ID NO: 1241157
gaggguugcaaaggugaaa

SEQ ID NO: 1251113 - RNA, 19 nt, Artificial Sequence
  Description of Artificial Sequence: Synthetic oligonucleotide
  Antisense strand to SEQ ID NO: 1251112
uuucaccuuugcaacccuc

SEQ ID NO: 1251114 - RNA, 19 nt, Artificial Sequence
  Description of Artificial Sequence: Synthetic oligonucleotide
  Sense strand starting at position 1500 of SEQ ID NO: 1241157
gcguuugggagcuggacaa

SEQ ID NO: 1251115 - RNA, 19 nt, Artificial Sequence
  Description of Artificial Sequence: Synthetic oligonucleotide
  Antisense strand to SEQ ID NO: 1251114
uuguccagcucccaaacgc

SEQ ID NO: 1251116 - RNA, 19 nt, Artificial Sequence
  Description of Artificial Sequence: Synthetic oligonucleotide
  Sense strand starting at position 2111 of SEQ ID NO: 1241157
acgauugguugcccgcaau

SEQ ID NO: 1251117 - RNA, 19 nt, Artificial Sequence
  Description of Artificial Sequence: Synthetic oligonucleotide
  Antisense strand to SEQ ID NO: 1251116
auugcgggcaaccaaucgu

SEQ ID NO: 1251118 - RNA, 19 nt, Artificial Sequence
  Description of Artificial Sequence: Synthetic oligonucleotide
  Sense strand starting at position 2147 of SEQ ID NO: 1241157
augcuugccgggaguugua

SEQ ID NO: 1251119 - RNA, 19 nt, Artificial Sequence
  Description of Artificial Sequence: Synthetic oligonucleotide
  Antisense strand to SEQ ID NO: 1251118
uacaacucccggcaagcau

SEQ ID NO: 1251120 - RNA, 19 nt, Artificial Sequence
  Description of Artificial Sequence: Synthetic oligonucleotide
  Sense strand starting at position 2154 of SEQ ID NO: 1241157
ccgggaguuguaguucgua

SEQ ID NO: 1251121 - RNA, 19 nt, Artificial Sequence
  Description of Artificial Sequence: Synthetic oligonucleotide
  Antisense strand to SEQ ID NO: 1251120
uacgaacuacaacucccgg

SEQ ID NO: 1251122 - RNA, 19 nt, Artificial Sequence
  Description of Artificial Sequence: Synthetic oligonucleotide
  Sense strand starting at position 2157 of SEQ ID NO: 1241157
ggaguuguaguucguaggu

SEQ ID NO: 1251123 - RNA, 19 nt, Artificial Sequence
  Description of Artificial Sequence: Synthetic oligonucleotide
  Antisense strand to SEQ ID NO: 1251122
accuacgaacuacaacucc

SEQ ID NO: 1251124 - RNA, 19 nt, Artificial Sequence
  Description of Artificial Sequence: Synthetic oligonucleotide
  Sense strand starting at position 2276 of SEQ ID NO: 1241157
gaucgcaguuuauaaacua

SEQ ID NO: 1251125 - RNA, 19 nt, Artificial Sequence
  Description of Artificial Sequence: Synthetic oligonucleotide
  Antisense strand to SEQ ID NO: 1251124
uaguuuauaaacugcgauc

SEQ ID NO: 1251126 - RNA, 19 nt, Artificial Sequence
  Description of Artificial Sequence: Synthetic oligonucleotide
  Sense strand starting at position 2298 of SEQ ID NO: 1241157
agaaacagauugugcgaau

SEQ ID NO: 1251127 - RNA, 19 nt, Artificial Sequence
  Description of Artificial Sequence: Synthetic oligonucleotide
  Antisense strand to SEQ ID NO: 1251126
auucgcacaaucuguuucu

SEQ ID NO: 1251128 - RNA, 19 nt, Artificial Sequence
  Description of Artificial Sequence: Synthetic oligonucleotide
  Sense strand starting at position 2299 of SEQ ID NO: 1241157
gaaacagauugugcgaauu

SEQ ID NO: 1251129 - RNA, 19 nt, Artificial Sequence
  Description of Artificial Sequence: Synthetic oligonucleotide
  Antisense strand to SEQ ID NO: 1251128
aauucgcacaaucuguuuc

SEQ ID NO: 1251130 - RNA, 19 nt, Artificial Sequence
  Description of Artificial Sequence: Synthetic oligonucleotide
  Sense strand starting at position 2301 of SEQ ID NO: 1241157
aacagauugugcgaauuua

SEQ ID NO: 1251131 - RNA, 19 nt, Artificial Sequence
  Description of Artificial Sequence: Synthetic oligonucleotide
  Antisense strand to SEQ ID NO: 1251130
uaaauucgcacaaucuguu

SEQ ID NO: 1251132 - RNA, 19 nt, Artificial Sequence
  Description of Artificial Sequence: Synthetic oligonucleotide
  Sense strand starting at position 2309 of SEQ ID NO: 1241157
gugcgaauuuagucuguau

SEQ ID NO: 1251133 - RNA, 19 nt, Artificial Sequence
  Description of Artificial Sequence: Synthetic oligonucleotide
  Antisense strand to SEQ ID NO: 1251132
auacagacuaaauucgcac

SEQ ID NO: 1251134 - RNA, 19 nt, Artificial Sequence
  Description of Artificial Sequence: Synthetic oligonucleotide
  Sense strand starting at position 2339 of SEQ ID NO: 1241157
ccgccaagugauuguuuga

SEQ ID NO: 1251135 - RNA, 19 nt, Artificial Sequence
  Description of Artificial Sequence: Synthetic oligonucleotide
  Antisense strand to SEQ ID NO: 1251134
ucaaacaaucacuuggcgg

SEQ ID NO: 1251136 - RNA, 19 nt, Artificial Sequence
  Description of Artificial Sequence: Synthetic oligonucleotide
  Sense strand starting at position 2342 of SEQ ID NO: 1241157
ccaagugauuguuugaccu

SEQ ID NO: 1251137 - RNA, 19 nt, Artificial Sequence
  Description of Artificial Sequence: Synthetic oligonucleotide
  Antisense strand to SEQ ID NO: 1251136
aggucaaacaaucacuugg

SEQ ID NO: 1251138 - RNA, 19 nt, Artificial Sequence
  Description of Artificial Sequence: Synthetic oligonucleotide
  Sense strand starting at position 2352 of SEQ ID NO: 1241157
guuugaccugccugaccau

SEQ ID NO: 1251139 - RNA, 19 nt, Artificial Sequence
  Description of Artificial Sequence: Synthetic oligonucleotide
  Antisense strand to SEQ ID NO: 1251138
auggucaggcaggucaaac

SEQ ID NO: 1251140 - RNA, 19 nt, Artificial Sequence
  Description of Artificial Sequence: Synthetic oligonucleotide
  Sense strand starting at position 2359 of SEQ ID NO: 1241157
cugccugaccaucagagau

SEQ ID NO: 1251141 - RNA, 19 nt, Artificial Sequence
  Description of Artificial Sequence: Synthetic oligonucleotide
  Antisense strand to SEQ ID NO: 1251140
aucucugauggucaggcag

SEQ ID NO: 1251142 - RNA, 19 nt, Artificial Sequence
  Description of Artificial Sequence: Synthetic oligonucleotide
  Sense strand starting at position 2361 of SEQ ID NO: 1241157
gccugaccaucagagaugu

SEQ ID NO: 1251143 - RNA, 19 nt, Artificial Sequence
  Description of Artificial Sequence: Synthetic oligonucleotide
  Antisense strand to SEQ ID NO: 1251142
acaucucugauggucaggc

SEQ ID NO: 1251144 - RNA, 19 nt, Artificial Sequence
  Description of Artificial Sequence: Synthetic oligonucleotide
  Sense strand starting at position 2371 of SEQ ID NO: 1241157
cagagauguuacuguuaga

SEQ ID NO: 1251145 - RNA, 19 nt, Artificial Sequence
  Description of Artificial Sequence: Synthetic oligonucleotide
  Antisense strand to SEQ ID NO: 1251144
ucuaacaguaacaucucug

SEQ ID NO: 1251146 - RNA, 19 nt, Artificial Sequence
  Description of Artificial Sequence: Synthetic oligonucleotide
  Sense strand starting at position 2374 of SEQ ID NO: 1241157
agauguuacuguuagaugu

SEQ ID NO: 1251147 - RNA, 19 nt, Artificial Sequence
  Description of Artificial Sequence: Synthetic oligonucleotide
  Antisense strand to SEQ ID NO: 1251146
acaucuaacaguaacaucu

SEQ ID NO: 1251148 - RNA, 19 nt, Artificial Sequence
  Description of Artificial Sequence: Synthetic oligonucleotide
  Sense strand starting at position 2376 of SEQ ID NO: 1241157
auguuacuguuagauguga

SEQ ID NO: 1251149 - RNA, 19 nt, Artificial Sequence
  Description of Artificial Sequence: Synthetic oligonucleotide
  Antisense strand to SEQ ID NO: 1251148
ucacaucuaacaguaacau

SEQ ID NO: 1251150 - RNA, 19 nt, Artificial Sequence
  Description of Artificial Sequence: Synthetic oligonucleotide
  Sense strand starting at position 2378 of SEQ ID NO: 1241157
guuacuguuagaugugaaa

SEQ ID NO: 1251151 - RNA, 19 nt, Artificial Sequence
  Description of Artificial Sequence: Synthetic oligonucleotide
  Antisense strand to SEQ ID NO: 1251150
uuucacaucuaacaguaac

SEQ ID NO: 1251152 - RNA, 19 nt, Artificial Sequence
  Description of Artificial Sequence: Synthetic oligonucleotide
  Sense strand starting at position 2413 of SEQ ID NO: 1241157
aggaucuuugccugcucau

SEQ ID NO: 1251153 - RNA, 19 nt, Artificial Sequence
  Description of Artificial Sequence: Synthetic oligonucleotide
  Antisense strand to SEQ ID NO: 1251152
augagcaggcaaagauccu

SEQ ID NO: 1251154 - RNA, 19 nt, Artificial Sequence
  Description of Artificial Sequence: Synthetic oligonucleotide
  Sense strand starting at position 2416 of SEQ ID NO: 1241157
aucuuugccugcucauuga

SEQ ID NO: 1251155 - RNA, 19 nt, Artificial Sequence
  Description of Artificial Sequence: Synthetic oligonucleotide
  Antisense strand to SEQ ID NO: 1251154
ucaaugagcaggcaaagau

SEQ ID NO: 1251156 - RNA, 19 nt, Artificial Sequence
  Description of Artificial Sequence: Synthetic oligonucleotide
  Sense strand starting at position 2666 of SEQ ID NO: 1241157
ugccaucaguccugauuua

SEQ ID NO: 1251157 - RNA, 19 nt, Artificial Sequence
  Description of Artificial Sequence: Synthetic oligonucleotide
  Antisense strand to SEQ ID NO: 1251156
uaaaucaggacugauggca

SEQ ID NO: 1251158 - RNA, 19 nt, Artificial Sequence
  Description of Artificial Sequence: Synthetic oligonucleotide
  Sense strand starting at position 1379 of SEQ ID NO: 1241158
gcgcguuccugcaaaggua

SEQ ID NO: 1251159 - RNA, 19 nt, Artificial Sequence
  Description of Artificial Sequence: Synthetic oligonucleotide
  Antisense strand to SEQ ID NO: 1251158
uaccuuugcaggaacgcgc

SEQ ID NO: 1251160 - RNA, 19 nt, Artificial Sequence
  Description of Artificial Sequence: Synthetic oligonucleotide
  Sense strand starting at position 2204 of SEQ ID NO: 1241158
cccguucuucaguuagcga

SEQ ID NO: 1251161 - RNA, 19 nt, Artificial Sequence
  Description of Artificial Sequence: Synthetic oligonucleotide
  Antisense strand to SEQ ID NO: 1251160
ucgcuaacugaagaacggg

SEQ ID NO: 1251162 - RNA, 19 nt, Artificial Sequence
  Description of Artificial Sequence: Synthetic oligonucleotide
  Sense strand starting at position 2314 of SEQ ID NO: 1241158
gcuuccucguucguucaga

SEQ ID NO: 1251163 - RNA, 19 nt, Artificial Sequence
  Description of Artificial Sequence: Synthetic oligonucleotide
  Antisense strand to SEQ ID NO: 1251162
ucugaacgaacgaggaagc

SEQ ID NO: 1251164 - RNA, 19 nt, Artificial Sequence
  Description of Artificial Sequence: Synthetic oligonucleotide
  Sense strand starting at position 2325 of SEQ ID NO: 1241158
cguucagaugcuucgcgau

SEQ ID NO: 1251165 - RNA, 19 nt, Artificial Sequence
  Description of Artificial Sequence: Synthetic oligonucleotide
  Antisense strand to SEQ ID NO: 1251164
aucgcgaagcaucugaacg

SEQ ID NO: 1251166 - RNA, 19 nt, Artificial Sequence
  Description of Artificial Sequence: Synthetic oligonucleotide
  Sense strand starting at position 2327 of SEQ ID NO: 1241158
uucagaugcuucgcgauuu

SEQ ID NO: 1251167 - RNA, 19 nt, Artificial Sequence
  Description of Artificial Sequence: Synthetic oligonucleotide
  Antisense strand to SEQ ID NO: 1251166
aaaucgcgaagcaucugaa

SEQ ID NO: 1251168 - RNA, 19 nt, Artificial Sequence
  Description of Artificial Sequence: Synthetic oligonucleotide
  Sense strand starting at position 2328 of SEQ ID NO: 1241158
ucagaugcuucgcgauuua

SEQ ID NO: 1251169 - RNA, 19 nt, Artificial Sequence
  Description of Artificial Sequence: Synthetic oligonucleotide
  Antisense strand to SEQ ID NO: 1251168
uaaaucgcgaagcaucuga

SEQ ID NO: 1251170 - RNA, 19 nt, Artificial Sequence
  Description of Artificial Sequence: Synthetic oligonucleotide
  Sense strand starting at position 2340 of SEQ ID NO: 1241158
cgauuuagcuugcuacgga

SEQ ID NO: 1251171 - RNA, 19 nt, Artificial Sequence
  Description of Artificial Sequence: Synthetic oligonucleotide
  Antisense strand to SEQ ID NO: 1251170
uccguagcaagcuaaaucg

SEQ ID NO: 1251172 - RNA, 19 nt, Artificial Sequence
  Description of Artificial Sequence: Synthetic oligonucleotide
  Sense strand starting at position 2424 of SEQ ID NO: 1241158
gcugcuauuucccggcauu

SEQ ID NO: 1251173 - RNA, 19 nt, Artificial Sequence
  Description of Artificial Sequence: Synthetic oligonucleotide
  Antisense strand to SEQ ID NO: 1251172
aaugccgggaaauagcagc

SEQ ID NO: 1251174 - RNA, 19 nt, Artificial Sequence
  Description of Artificial Sequence: Synthetic oligonucleotide
  Sense strand starting at position 2467 of SEQ ID NO: 1241158
agguuagucgcgcgcugaa

SEQ ID NO: 1251175 - RNA, 19 nt, Artificial Sequence
  Description of Artificial Sequence: Synthetic oligonucleotide
  Antisense strand to SEQ ID NO: 1251174
uucagcgcgcgacuaaccu

SEQ ID NO: 1251176 - RNA, 19 nt, Artificial Sequence
  Description of Artificial Sequence: Synthetic oligonucleotide
  Sense strand starting at position 2638 of SEQ ID NO: 1241158
gggcuaauccugggaggug

SEQ ID NO: 1251177 - RNA, 19 nt, Artificial Sequence
  Description of Artificial Sequence: Synthetic oligonucleotide
  Antisense strand to SEQ ID NO: 1251176
caccucccaggauuagccc

SEQ ID NO: 1251178 - RNA, 19 nt, Artificial Sequence
  Description of Artificial Sequence: Synthetic oligonucleotide
  Sense strand starting at position 2673 of SEQ ID NO: 1241158
ggcuuugcugaugaggaga

SEQ ID NO: 1251179 - RNA, 19 nt, Artificial Sequence
  Description of Artificial Sequence: Synthetic oligonucleotide
  Antisense strand to SEQ ID NO: 1251178
ucuccucaucagcaaagcc

SEQ ID NO: 1251180 - RNA, 19 nt, Artificial Sequence
  Description of Artificial Sequence: Synthetic oligonucleotide
  Sense strand starting at position 2911 of SEQ ID NO: 1241158
accgcaguccugggcuaaa

SEQ ID NO: 1251181 - RNA, 19 nt, Artificial Sequence
  Description of Artificial Sequence: Synthetic oligonucleotide
  Antisense strand to SEQ ID NO: 1251180
uuuagcccaggacugcggu

SEQ ID NO: 1251182 - RNA, 19 nt, Artificial Sequence
  Description of Artificial Sequence: Synthetic oligonucleotide
  Sense strand starting at position 2948 of SEQ ID NO: 1241158
ugucucuguggucguuaca

SEQ ID NO: 1251183 - RNA, 19 nt, Artificial Sequence
  Description of Artificial Sequence: Synthetic oligonucleotide
  Antisense strand to SEQ ID NO: 1251182
uguaacgaccacagagaca

SEQ ID NO: 1251184 - RNA, 19 nt, Artificial Sequence
  Description of Artificial Sequence: Synthetic oligonucleotide
  Sense strand starting at position 2951 of SEQ ID NO: 1241158
cucuguggucguuacaguu

SEQ ID NO: 1251185 - RNA, 19 nt, Artificial Sequence
  Description of Artificial Sequence: Synthetic oligonucleotide
  Antisense strand to SEQ ID NO: 1251184
aacuguaacgaccacagag

SEQ ID NO: 1251186 - RNA, 19 nt, Artificial Sequence
  Description of Artificial Sequence: Synthetic oligonucleotide
  Sense strand starting at position 2954 of SEQ ID NO: 1241158
uguggucguuacaguugua

SEQ ID NO: 1251187 - RNA, 19 nt, Artificial Sequence
  Description of Artificial Sequence: Synthetic oligonucleotide
  Antisense strand to SEQ ID NO: 1251186
uacaacuguaacgaccaca

SEQ ID NO: 1251188 - RNA, 19 nt, Artificial Sequence
  Description of Artificial Sequence: Synthetic oligonucleotide
  Sense strand starting at position 2959 of SEQ ID NO: 1241158
ucguuacaguuguagugaa

SEQ ID NO: 1251189 - RNA, 19 nt, Artificial Sequence
  Description of Artificial Sequence: Synthetic oligonucleotide
  Antisense strand to SEQ ID NO: 1251188
uucacuacaacuguaacga

SEQ ID NO: 1251190 - RNA, 19 nt, Artificial Sequence
  Description of Artificial Sequence: Synthetic oligonucleotide
  Sense strand starting at position 2971 of SEQ ID NO: 1241158
uagugaauguucccuggga

SEQ ID NO: 1251191 - RNA, 19 nt, Artificial Sequence
  Description of Artificial Sequence: Synthetic oligonucleotide
  Antisense strand to SEQ ID NO: 1251190
ucccagggaacauucacua

SEQ ID NO: 1251192 - RNA, 19 nt, Artificial Sequence
  Description of Artificial Sequence: Synthetic oligonucleotide
  Sense strand starting at position 2972 of SEQ ID NO: 1241158
agugaauguucccugggag

SEQ ID NO: 1251193 - RNA, 19 nt, Artificial Sequence
  Description of Artificial Sequence: Synthetic oligonucleotide
  Antisense strand to SEQ ID NO: 1251192
cucccagggaacauucacu

SEQ ID NO: 1251194 - RNA, 19 nt, Artificial Sequence
  Description of Artificial Sequence: Synthetic oligonucleotide
  Sense strand starting at position 2973 of SEQ ID NO: 1241158
gugaauguucccugggaga

SEQ ID NO: 1251195 - RNA, 19 nt, Artificial Sequence
  Description of Artificial Sequence: Synthetic oligonucleotide
  Antisense strand to SEQ ID NO: 1251194
ucucccagggaacauucac

SEQ ID NO: 1251196 - RNA, 19 nt, Artificial Sequence
  Description of Artificial Sequence: Synthetic oligonucleotide
  Sense strand starting at position 2975 of SEQ ID NO: 1241158
gaauguucccugggagagu

SEQ ID NO: 1251197 - RNA, 19 nt, Artificial Sequence
  Description of Artificial Sequence: Synthetic oligonucleotide
  Antisense strand to SEQ ID NO: 1251196
acucucccagggaacauuc

SEQ ID NO: 1251198 - RNA, 19 nt, Artificial Sequence
  Description of Artificial Sequence: Synthetic oligonucleotide
  Sense strand starting at position 3001 of SEQ ID NO: 1241158
agaagauauuugcgguauu

SEQ ID NO: 1251199 - RNA, 19 nt, Artificial Sequence
  Description of Artificial Sequence: Synthetic oligonucleotide
  Antisense strand to SEQ ID NO: 1251198
aauaccgcaaauaucuucu

SEQ ID NO: 1251200 - RNA, 19 nt, Artificial Sequence
  Description of Artificial Sequence: Synthetic oligonucleotide
  Sense strand starting at position 3002 of SEQ ID NO: 1241158
gaagauauuugcgguauuu

SEQ ID NO: 1251201 - RNA, 19 nt, Artificial Sequence
  Description of Artificial Sequence: Synthetic oligonucleotide
  Antisense strand to SEQ ID NO: 1251200
aaauaccgcaaauaucuuc

SEQ ID NO: 1251202 - RNA, 19 nt, Artificial Sequence
  Description of Artificial Sequence: Synthetic oligonucleotide
  Sense strand starting at position 3189 of SEQ ID NO: 1241158
ggcugaacuugagacuugu

SEQ ID NO: 1251203 - RNA, 19 nt, Artificial Sequence
  Description of Artificial Sequence: Synthetic oligonucleotide
  Antisense strand to SEQ ID NO: 1251202
acaagucucaaguucagcc

SEQ ID NO: 1251204 - RNA, 19 nt, Artificial Sequence
  Description of Artificial Sequence: Synthetic oligonucleotide
  Sense strand starting at position 3195 of SEQ ID NO: 1241158
acuugagacuugucacgua

SEQ ID NO: 1251205 - RNA, 19 nt, Artificial Sequence
  Description of Artificial Sequence: Synthetic oligonucleotide
  Antisense strand to SEQ ID NO: 1251204
uacgugacaagucucaagu

SEQ ID NO: 1251206 - RNA, 19 nt, Artificial Sequence
  Description of Artificial Sequence: Synthetic oligonucleotide
  Sense strand starting at position 3200 of SEQ ID NO: 1241158
agacuugucacguaguguu

SEQ ID NO: 1251207 - RNA, 19 nt, Artificial Sequence
  Description of Artificial Sequence: Synthetic oligonucleotide
  Antisense strand to SEQ ID NO: 1251206
aacacuacgugacaagucu

SEQ ID NO: 1251208 - RNA, 19 nt, Artificial Sequence
  Description of Artificial Sequence: Synthetic oligonucleotide
  Sense strand starting at position 3207 of SEQ ID NO: 1241158
ucacguaguguugguggaa

SEQ ID NO: 1251209 - RNA, 19 nt, Artificial Sequence
  Description of Artificial Sequence: Synthetic oligonucleotide
  Antisense strand to SEQ ID NO: 1251208
uuccaccaacacuacguga

SEQ ID NO: 1251210 - RNA, 19 nt, Artificial Sequence
  Description of Artificial Sequence: Synthetic oligonucleotide
  Sense strand starting at position 3208 of SEQ ID NO: 1241158
cacguaguguugguggaau

SEQ ID NO: 1251211 - RNA, 19 nt, Artificial Sequence
  Description of Artificial Sequence: Synthetic oligonucleotide
  Antisense strand to SEQ ID NO: 1251210
auuccaccaacacuacgug

SEQ ID NO: 1251212 - RNA, 19 nt, Artificial Sequence
  Description of Artificial Sequence: Synthetic oligonucleotide
  Sense strand starting at position 3286 of SEQ ID NO: 1241158
uuuggaaagcuguagcaua

SEQ ID NO: 1251213 - RNA, 19 nt, Artificial Sequence
  Description of Artificial Sequence: Synthetic oligonucleotide
  Antisense strand to SEQ ID NO: 1251212
uaugcuacagcuuuccaaa

SEQ ID NO: 1251214 - RNA, 19 nt, Artificial Sequence
  Description of Artificial Sequence: Synthetic oligonucleotide
  Sense strand starting at position 3297 of SEQ ID NO: 1241158
guagcauaugcaugagagu

SEQ ID NO: 1251215 - RNA, 19 nt, Artificial Sequence
  Description of Artificial Sequence: Synthetic oligonucleotide
  Antisense strand to SEQ ID NO: 1251214
acucucaugcauaugcuac

SEQ ID NO: 1251216 - RNA, 19 nt, Artificial Sequence
  Description of Artificial Sequence: Synthetic oligonucleotide
  Sense strand starting at position 3306 of SEQ ID NO: 1241158
gcaugagaguccggaaagu

SEQ ID NO: 1251217 - RNA, 19 nt, Artificial Sequence
  Description of Artificial Sequence: Synthetic oligonucleotide
  Antisense strand to SEQ ID NO: 1251216
acuuuccggacucucaugc

SEQ ID NO: 1251218 - RNA, 19 nt, Artificial Sequence
  Description of Artificial Sequence: Synthetic oligonucleotide
  Sense strand starting at position 3315 of SEQ ID NO: 1241158
uccggaaaguuccgagaga

SEQ ID NO: 1251219 - RNA, 19 nt, Artificial Sequence
  Description of Artificial Sequence: Synthetic oligonucleotide
  Antisense strand to SEQ ID NO: 1251218
ucucucggaacuuuccgga

SEQ ID NO: 1251220 - RNA, 19 nt, Artificial Sequence
  Description of Artificial Sequence: Synthetic oligonucleotide
  Sense strand starting at position 3316 of SEQ ID NO: 1241158
ccggaaaguuccgagagaa

SEQ ID NO: 1251221 - RNA, 19 nt, Artificial Sequence
  Description of Artificial Sequence: Synthetic oligonucleotide
  Antisense strand to SEQ ID NO: 1251220
uucucucggaacuuuccgg

SEQ ID NO: 1251222 - RNA, 19 nt, Artificial Sequence
  Description of Artificial Sequence: Synthetic oligonucleotide
  Sense strand starting at position 3327 of SEQ ID NO: 1241158
cgagagaaaguguguggau

SEQ ID NO: 1251223 - RNA, 19 nt, Artificial Sequence
  Description of Artificial Sequence: Synthetic oligonucleotide
  Antisense strand to SEQ ID NO: 1251222
auccacacacuuucucucg

SEQ ID NO: 1251224 - RNA, 19 nt, Artificial Sequence
  Description of Artificial Sequence: Synthetic oligonucleotide
  Sense strand starting at position 3382 of SEQ ID NO: 1241158
gcgauuucauaguguggga

SEQ ID NO: 1251225 - RNA, 19 nt, Artificial Sequence
  Description of Artificial Sequence: Synthetic oligonucleotide
  Antisense strand to SEQ ID NO: 1251224
ucccacacuaugaaaucgc

SEQ ID NO: 1251226 - RNA, 19 nt, Artificial Sequence
  Description of Artificial Sequence: Synthetic oligonucleotide
  Sense strand starting at position 3447 of SEQ ID NO: 1241158
ccagccgucuguuuccaua

SEQ ID NO: 1251227 - RNA, 19 nt, Artificial Sequence
  Description of Artificial Sequence: Synthetic oligonucleotide
  Antisense strand to SEQ ID NO: 1251226
uauggaaacagacggcugg

SEQ ID NO: 1251228 - RNA, 19 nt, Artificial Sequence
  Description of Artificial Sequence: Synthetic oligonucleotide
  Sense strand starting at position 3449 of SEQ ID NO: 1241158
agccgucuguuuccauaga

SEQ ID NO: 1251229 - RNA, 19 nt, Artificial Sequence
  Description of Artificial Sequence: Synthetic oligonucleotide
  Antisense strand to SEQ ID NO: 1251228
ucuauggaaacagacggcu

SEQ ID NO: 1251230 - RNA, 19 nt, Artificial Sequence
  Description of Artificial Sequence: Synthetic oligonucleotide
  Sense strand starting at position 3482 of SEQ ID NO: 1241158
auaagcaguuuccaggaga

SEQ ID NO: 1251231 - RNA, 19 nt, Artificial Sequence
  Description of Artificial Sequence: Synthetic oligonucleotide
  Antisense strand to SEQ ID NO: 1251230
ucuccuggaaacugcuuau

SEQ ID NO: 1251232 - RNA, 19 nt, Artificial Sequence
  Description of Artificial Sequence: Synthetic oligonucleotide
  Sense strand starting at position 3678 of SEQ ID NO: 1241158
guagucagcgucuugaucu

SEQ ID NO: 1251233 - RNA, 19 nt, Artificial Sequence
  Description of Artificial Sequence: Synthetic oligonucleotide
  Antisense strand to SEQ ID NO: 1251232
agaucaagacgcugacuac

SEQ ID NO: 1251234 - RNA, 19 nt, Artificial Sequence
  Description of Artificial Sequence: Synthetic oligonucleotide
  Sense strand starting at position 3703 of SEQ ID NO: 1241158
ugguguggagcaugugaau

SEQ ID NO: 1251235 - RNA, 19 nt, Artificial Sequence
  Description of Artificial Sequence: Synthetic oligonucleotide
  Antisense strand to SEQ ID NO: 1251234
auucacaugcuccacacca

SEQ ID NO: 1251236 - RNA, 19 nt, Artificial Sequence
  Description of Artificial Sequence: Synthetic oligonucleotide
  Sense strand starting at position 3706 of SEQ ID NO: 1241158
uguggagcaugugaauaau

SEQ ID NO: 1251237 - RNA, 19 nt, Artificial Sequence
  Description of Artificial Sequence: Synthetic oligonucleotide
  Antisense strand to SEQ ID NO: 1251236
auuauucacaugcuccaca

SEQ ID NO: 1251238 - RNA, 19 nt, Artificial Sequence
  Description of Artificial Sequence: Synthetic oligonucleotide
  Sense strand starting at position 37 of SEQ ID NO: 1241159
acuugaaguagcugucaga

SEQ ID NO: 1251239 - RNA, 19 nt, Artificial Sequence
  Description of Artificial Sequence: Synthetic oligonucleotide
  Antisense strand to SEQ ID NO: 1251238
ucugacagcuacuucaagu

SEQ ID NO: 1251240 - RNA, 19 nt, Artificial Sequence
  Description of Artificial Sequence: Synthetic oligonucleotide
  Sense strand starting at position 117 of SEQ ID NO: 1241159
guagguagugaauggugaa

SEQ ID NO: 1251241 - RNA, 19 nt, Artificial Sequence
  Description of Artificial Sequence: Synthetic oligonucleotide
  Antisense strand to SEQ ID NO: 1251240
uucaccauucacuaccuac

SEQ ID NO: 1251242 - RNA, 19 nt, Artificial Sequence
  Description of Artificial Sequence: Synthetic oligonucleotide
  Sense strand starting at position 205 of SEQ ID NO: 1241159
gguguagaggccuacaucu

SEQ ID NO: 1251243 - RNA, 19 nt, Artificial Sequence
  Description of Artificial Sequence: Synthetic oligonucleotide
  Antisense strand to SEQ ID NO: 1251242
agauguaggccucuacacc

SEQ ID NO: 1251244 - RNA, 19 nt, Artificial Sequence
  Description of Artificial Sequence: Synthetic oligonucleotide
  Sense strand starting at position 207 of SEQ ID NO: 1241159
uguagaggccuacaucuua

SEQ ID NO: 1251245 - RNA, 19 nt, Artificial Sequence
  Description of Artificial Sequence: Synthetic oligonucleotide
  Antisense strand to SEQ ID NO: 1251244
uaagauguaggccucuaca

SEQ ID NO: 1251246 - RNA, 19 nt, Artificial Sequence
  Description of Artificial Sequence: Synthetic oligonucleotide
  Sense strand starting at position 376 of SEQ ID NO: 1241159
ugcuauuaacaacguauga

SEQ ID NO: 1251247 - RNA, 19 nt, Artificial Sequence
  Description of Artificial Sequence: Synthetic oligonucleotide
  Antisense strand to SEQ ID NO: 1251246
ucauacguuguuaauagca

SEQ ID NO: 1251248 - RNA, 19 nt, Artificial Sequence
  Description of Artificial Sequence: Synthetic oligonucleotide
  Sense strand starting at position 386 of SEQ ID NO: 1241159
aacguaugauucuugcaaa

SEQ ID NO: 1251249 - RNA, 19 nt, Artificial Sequence
  Description of Artificial Sequence: Synthetic oligonucleotide
  Antisense strand to SEQ ID NO: 1251248
uuugcaagaaucauacguu

SEQ ID NO: 1251250 - RNA, 19 nt, Artificial Sequence
  Description of Artificial Sequence: Synthetic oligonucleotide
  Sense strand starting at position 488 of SEQ ID NO: 1241159
aaagauuguuaguugacca

SEQ ID NO: 1251251 - RNA, 19 nt, Artificial Sequence
  Description of Artificial Sequence: Synthetic oligonucleotide
  Antisense strand to SEQ ID NO: 1251250
uggucaacuaacaaucuuu

SEQ ID NO: 1251252 - RNA, 19 nt, Artificial Sequence
  Description of Artificial Sequence: Synthetic oligonucleotide
  Sense strand starting at position 883 of SEQ ID NO: 1241159
agugcucugguguagauaa

SEQ ID NO: 1251253 - RNA, 19 nt, Artificial Sequence
  Description of Artificial Sequence: Synthetic oligonucleotide
  Antisense strand to SEQ ID NO: 1251252
uuaucuacaccagagcacu

SEQ ID NO: 1251254 - RNA, 19 nt, Artificial Sequence
  Description of Artificial Sequence: Synthetic oligonucleotide
  Sense strand starting at position 916 of SEQ ID NO: 1241159
guaaauuaggccuacucca

SEQ ID NO: 1251255 - RNA, 19 nt, Artificial Sequence
  Description of Artificial Sequence: Synthetic oligonucleotide
  Antisense strand to SEQ ID NO: 1251254
uggaguaggccuaauuuac

SEQ ID NO: 1251256 - RNA, 19 nt, Artificial Sequence
  Description of Artificial Sequence: Synthetic oligonucleotide
  Sense strand starting at position 923 of SEQ ID NO: 1241159
aggccuacuccagaguacu

SEQ ID NO: 1251257 - RNA, 19 nt, Artificial Sequence
  Description of Artificial Sequence: Synthetic oligonucleotide
  Antisense strand to SEQ ID NO: 1251256
aguacucuggaguaggccu

SEQ ID NO: 1251258 - RNA, 19 nt, Artificial Sequence
  Description of Artificial Sequence: Synthetic oligonucleotide
  Sense strand starting at position 929 of SEQ ID NO: 1241159
acuccagaguacuuauuau

SEQ ID NO: 1251259 - RNA, 19 nt, Artificial Sequence
  Description of Artificial Sequence: Synthetic oligonucleotide
  Antisense strand to SEQ ID NO: 1251258
auaauaaguacucuggagu

SEQ ID NO: 1251260 - RNA, 19 nt, Artificial Sequence
  Description of Artificial Sequence: Synthetic oligonucleotide
  Sense strand starting at position 948 of SEQ ID NO: 1241159
cugugcugguaugugaaga

SEQ ID NO: 1251261 - RNA, 19 nt, Artificial Sequence
  Description of Artificial Sequence: Synthetic oligonucleotide
  Antisense strand to SEQ ID NO: 1251260
ucuucacauaccagcacag

SEQ ID NO: 1251262 - RNA, 19 nt, Artificial Sequence
  Description of Artificial Sequence: Synthetic oligonucleotide
  Sense strand starting at position 959 of SEQ ID NO: 1241159
ugugaagacgugcaauugu

SEQ ID NO: 1251263 - RNA, 19 nt, Artificial Sequence
  Description of Artificial Sequence: Synthetic oligonucleotide
  Antisense strand to SEQ ID NO: 1251262
acaauugcacgucuucaca

SEQ ID NO: 1251264 - RNA, 19 nt, Artificial Sequence
  Description of Artificial Sequence: Synthetic oligonucleotide
  Sense strand starting at position 999 of SEQ ID NO: 1241159
uccucagaguuucuugaaa

SEQ ID NO: 1251265 - RNA, 19 nt, Artificial Sequence
  Description of Artificial Sequence: Synthetic oligonucleotide
  Antisense strand to SEQ ID NO: 1251264
uuucaagaaacucugagga

SEQ ID NO: 1251266 - RNA, 19 nt, Artificial Sequence
  Description of Artificial Sequence: Synthetic oligonucleotide
  Sense strand starting at position 1022 of SEQ ID NO: 1241159
gugagaaaguucucacccu

SEQ ID NO: 1251267 - RNA, 19 nt, Artificial Sequence
  Description of Artificial Sequence: Synthetic oligonucleotide
  Antisense strand to SEQ ID NO: 1251266
agggugagaacuuucucac

SEQ ID NO: 1251268 - RNA, 19 nt, Artificial Sequence
  Description of Artificial Sequence: Synthetic oligonucleotide
  Sense strand starting at position 1053 of SEQ ID NO: 1241159
agcaaacacugugcaaaua

SEQ ID NO: 1251269 - RNA, 19 nt, Artificial Sequence
  Description of Artificial Sequence: Synthetic oligonucleotide
  Antisense strand to SEQ ID NO: 1251268
uauuugcacaguguuugcu

SEQ ID NO: 1251270 - RNA, 19 nt, Artificial Sequence
  Description of Artificial Sequence: Synthetic oligonucleotide
  Sense strand starting at position 1148 of SEQ ID NO: 1241159
gguauugucucccucccaa

SEQ ID NO: 1251271 - RNA, 19 nt, Artificial Sequence
  Description of Artificial Sequence: Synthetic oligonucleotide
  Antisense strand to SEQ ID NO: 1251270
uugggagggagacaauacc

SEQ ID NO: 1251272 - RNA, 19 nt, Artificial Sequence
  Description of Artificial Sequence: Synthetic oligonucleotide
  Sense strand starting at position 1175 of SEQ ID NO: 1241159
agcucaauuccagguuuau

SEQ ID NO: 1251273 - RNA, 19 nt, Artificial Sequence
  Description of Artificial Sequence: Synthetic oligonucleotide
  Antisense strand to SEQ ID NO: 1251272
auaaaccuggaauugagcu

SEQ ID NO: 1251274 - RNA, 19 nt, Artificial Sequence
  Description of Artificial Sequence: Synthetic oligonucleotide
  Sense strand starting at position 1186 of SEQ ID NO: 1241159
agguuuaucccgcaauagu

SEQ ID NO: 1251275 - RNA, 19 nt, Artificial Sequence
  Description of Artificial Sequence: Synthetic oligonucleotide
  Antisense strand to SEQ ID NO: 1251274
acuauugcgggauaaaccu

SEQ ID NO: 1251276 - RNA, 19 nt, Artificial Sequence
  Description of Artificial Sequence: Synthetic oligonucleotide
  Sense strand starting at position 1202 of SEQ ID NO: 1241159
aguaacuuacccggacaau

SEQ ID NO: 1251277 - RNA, 19 nt, Artificial Sequence
  Description of Artificial Sequence: Synthetic oligonucleotide
  Antisense strand to SEQ ID NO: 1251276
auuguccggguaaguuacu

SEQ ID NO: 1251278 - RNA, 19 nt, Artificial Sequence
  Description of Artificial Sequence: Synthetic oligonucleotide
  Sense strand starting at position 1203 of SEQ ID NO: 1241159
guaacuuacccggacaauc

SEQ ID NO: 1251279 - RNA, 19 nt, Artificial Sequence
  Description of Artificial Sequence: Synthetic oligonucleotide
  Antisense strand to SEQ ID NO: 1251278
gauuguccggguaaguuac

SEQ ID NO: 1251280 - RNA, 19 nt, Artificial Sequence
  Description of Artificial Sequence: Synthetic oligonucleotide
  Sense strand starting at position 2416 of SEQ ID NO: 1241159
ugagcacuugucuaucgua

SEQ ID NO: 1251281 - RNA, 19 nt, Artificial Sequence
  Description of Artificial Sequence: Synthetic oligonucleotide
  Antisense strand to SEQ ID NO: 1251280
uacgauagacaagugcuca

SEQ ID NO: 1251282 - RNA, 19 nt, Artificial Sequence
  Description of Artificial Sequence: Synthetic oligonucleotide
  Sense strand starting at position 2435 of SEQ ID NO: 1241159
agcacuugucugcauggua

SEQ ID NO: 1251283 - RNA, 19 nt, Artificial Sequence
  Description of Artificial Sequence: Synthetic oligonucleotide
  Antisense strand to SEQ ID NO: 1251282
uaccaugcagacaagugcu

SEQ ID NO: 1251284 - RNA, 19 nt, Artificial Sequence
  Description of Artificial Sequence: Synthetic oligonucleotide
  Sense strand starting at position 2476 of SEQ ID NO: 1241159
acuuguguaguagguuaaa

SEQ ID NO: 1251285 - RNA, 19 nt, Artificial Sequence
  Description of Artificial Sequence: Synthetic oligonucleotide
  Antisense strand to SEQ ID NO: 1251284
uuuaaccuacuacacaagu

SEQ ID NO: 1251286 - RNA, 19 nt, Artificial Sequence
  Description of Artificial Sequence: Synthetic oligonucleotide
  Sense strand starting at position 2691 of SEQ ID NO: 1241159
cagagagauccaugguuuc

SEQ ID NO: 1251287 - RNA, 19 nt, Artificial Sequence
  Description of Artificial Sequence: Synthetic oligonucleotide
  Antisense strand to SEQ ID NO: 1251286
gaaaccauggaucucucug

SEQ ID NO: 1251288 - RNA, 19 nt, Artificial Sequence
  Description of Artificial Sequence: Synthetic oligonucleotide
  Sense strand starting at position 2730 of SEQ ID NO: 1241159
cuuugugguagucaggaua

SEQ ID NO: 1251289 - RNA, 19 nt, Artificial Sequence
  Description of Artificial Sequence: Synthetic oligonucleotide
  Antisense strand to SEQ ID NO: 1251288
uauccugacuaccacaaag

SEQ ID NO: 1251290 - RNA, 19 nt, Artificial Sequence
  Description of Artificial Sequence: Synthetic oligonucleotide
  Sense strand starting at position 2733 of SEQ ID NO: 1241159
ugugguagucaggauaggu

SEQ ID NO: 1251291 - RNA, 19 nt, Artificial Sequence
  Description of Artificial Sequence: Synthetic oligonucleotide
  Antisense strand to SEQ ID NO: 1251290
accuauccugacuaccaca

SEQ ID NO: 1251292 - RNA, 19 nt, Artificial Sequence
  Description of Artificial Sequence: Synthetic oligonucleotide
  Sense strand starting at position 2778 of SEQ ID NO: 1241159
gagacaggcucagaaauac

SEQ ID NO: 1251293 - RNA, 19 nt, Artificial Sequence
  Description of Artificial Sequence: Synthetic oligonucleotide
  Antisense strand to SEQ ID NO: 1251292
guauuucugagccugucuc

SEQ ID NO: 1251294 - RNA, 19 nt, Artificial Sequence
  Description of Artificial Sequence: Synthetic oligonucleotide
  Sense strand starting at position 3094 of SEQ ID NO: 1241159
gagacaauaucauuguugu

SEQ ID NO: 1251295 - RNA, 19 nt, Artificial Sequence
  Description of Artificial Sequence: Synthetic oligonucleotide
  Antisense strand to SEQ ID NO: 1251294
acaacaaugauauugucuc

SEQ ID NO: 1251296 - RNA, 19 nt, Artificial Sequence
  Description of Artificial Sequence: Synthetic oligonucleotide
  Sense strand starting at position 3095 of SEQ ID NO: 1241159
agacaauaucauuguuguu

SEQ ID NO: 1251297 - RNA, 19 nt, Artificial Sequence
  Description of Artificial Sequence: Synthetic oligonucleotide
  Antisense strand to SEQ ID NO: 1251296
aacaacaaugauauugucu

SEQ ID NO: 1251298 - RNA, 19 nt, Artificial Sequence
  Description of Artificial Sequence: Synthetic oligonucleotide
  Sense strand starting at position 3269 of SEQ ID NO: 1241159
gauuguagcagagauugua

SEQ ID NO: 1251299 - RNA, 19 nt, Artificial Sequence
  Description of Artificial Sequence: Synthetic oligonucleotide
  Antisense strand to SEQ ID NO: 1251298
uacaaucucugcuacaauc

SEQ ID NO: 1251300 - RNA, 19 nt, Artificial Sequence
  Description of Artificial Sequence: Synthetic oligonucleotide
  Sense strand starting at position 3287 of SEQ ID NO: 1241159
agcagucccuugccugaaa

SEQ ID NO: 1251301 - RNA, 19 nt, Artificial Sequence
  Description of Artificial Sequence: Synthetic oligonucleotide
  Antisense strand to SEQ ID NO: 1251300
uuucaggcaagggacugcu

SEQ ID NO: 1251302 - RNA, 19 nt, Artificial Sequence
  Description of Artificial Sequence: Synthetic oligonucleotide
  Sense strand starting at position 3288 of SEQ ID NO: 1241159
gcagucccuugccugaaau

SEQ ID NO: 1251303 - RNA, 19 nt, Artificial Sequence
  Description of Artificial Sequence: Synthetic oligonucleotide
  Antisense strand to SEQ ID NO: 1251302
auuucaggcaagggacugc

SEQ ID NO: 1251304 - RNA, 19 nt, Artificial Sequence
  Description of Artificial Sequence: Synthetic oligonucleotide
  Sense strand starting at position 3318 of SEQ ID NO: 1241159
ugguaagggucacuucagu

SEQ ID NO: 1251305 - RNA, 19 nt, Artificial Sequence
  Description of Artificial Sequence: Synthetic oligonucleotide
  Antisense strand to SEQ ID NO: 1251304
acugaagugacccuuacca

SEQ ID NO: 1251306 - RNA, 19 nt, Artificial Sequence
  Description of Artificial Sequence: Synthetic oligonucleotide
  Sense strand starting at position 3422 of SEQ ID NO: 1241159
aaugauuaccucugagugu

SEQ ID NO: 1251307 - RNA, 19 nt, Artificial Sequence
  Description of Artificial Sequence: Synthetic oligonucleotide
  Antisense strand to SEQ ID NO: 1251306
acacucagagguaaucauu

SEQ ID NO: 1251308 - RNA, 19 nt, Artificial Sequence
  Description of Artificial Sequence: Synthetic oligonucleotide
  Sense strand starting at position 3479 of SEQ ID NO: 1241159
guaagugaaccuuaucuaa

SEQ ID NO: 1251309 - RNA, 19 nt, Artificial Sequence
  Description of Artificial Sequence: Synthetic oligonucleotide
  Antisense strand to SEQ ID NO: 1251308
uuagauaagguucacuuac

SEQ ID NO: 1251310 - RNA, 19 nt, Artificial Sequence
  Description of Artificial Sequence: Synthetic oligonucleotide
  Sense strand starting at position 3577 of SEQ ID NO: 1241159
ggguuugaacugugcggau

SEQ ID NO: 1251311 - RNA, 19 nt, Artificial Sequence
  Description of Artificial Sequence: Synthetic oligonucleotide
  Antisense strand to SEQ ID NO: 1251310
auccgcacaguucaaaccc

SEQ ID NO: 1251312 - RNA, 19 nt, Artificial Sequence
  Description of Artificial Sequence: Synthetic oligonucleotide
  Sense strand starting at position 3682 of SEQ ID NO: 1241159
ggcagacuugaguaugcuu

SEQ ID NO: 1251313 - RNA, 19 nt, Artificial Sequence
  Description of Artificial Sequence: Synthetic oligonucleotide
  Antisense strand to SEQ ID NO: 1251312
aagcauacucaagucugcc

SEQ ID NO: 1251314 - RNA, 19 nt, Artificial Sequence
  Description of Artificial Sequence: Synthetic oligonucleotide
  Sense strand starting at position 3762 of SEQ ID NO: 1241159
acuguauugcauuaacuga

SEQ ID NO: 1251315 - RNA, 19 nt, Artificial Sequence
  Description of Artificial Sequence: Synthetic oligonucleotide
  Antisense strand to SEQ ID NO: 1251314
ucaguuaaugcaauacagu

SEQ ID NO: 1251316 - RNA, 19 nt, Artificial Sequence
  Description of Artificial Sequence: Synthetic oligonucleotide
  Sense strand starting at position 3777 of SEQ ID NO: 1241159
cugaaagagcuaugauuag

SEQ ID NO: 1251317 - RNA, 19 nt, Artificial Sequence
  Description of Artificial Sequence: Synthetic oligonucleotide
  Antisense strand to SEQ ID NO: 1251316
cuaaucauagcucuuucag

SEQ ID NO: 1251318 - RNA, 19 nt, Artificial Sequence
  Description of Artificial Sequence: Synthetic oligonucleotide
  Sense strand starting at position 19 of SEQ ID NO: 1241160
gcugcagugcuaccucauu

SEQ ID NO: 1251319 - RNA, 19 nt, Artificial Sequence
  Description of Artificial Sequence: Synthetic oligonucleotide
  Antisense strand to SEQ ID NO: 1251318
aaugagguagcacugcagc

SEQ ID NO: 1251320 - RNA, 19 nt, Artificial Sequence
  Description of Artificial Sequence: Synthetic oligonucleotide
  Sense strand starting at position 27 of SEQ ID NO: 1241160
gcuaccucauuguuugaga

SEQ ID NO: 1251321 - RNA, 19 nt, Artificial Sequence
  Description of Artificial Sequence: Synthetic oligonucleotide
  Antisense strand to SEQ ID NO: 1251320
ucucaaacaaugagguagc

SEQ ID NO: 1251322 - RNA, 19 nt, Artificial Sequence
  Description of Artificial Sequence: Synthetic oligonucleotide
  Sense strand starting at position 398 of SEQ ID NO: 1241160
aacucuuguugaguaguaa

SEQ ID NO: 1251323 - RNA, 19 nt, Artificial Sequence
  Description of Artificial Sequence: Synthetic oligonucleotide
  Antisense strand to SEQ ID NO: 1251322
uuacuacucaacaagaguu

SEQ ID NO: 1251324 - RNA, 19 nt, Artificial Sequence
  Description of Artificial Sequence: Synthetic oligonucleotide
  Sense strand starting at position 399 of SEQ ID NO: 1241160
acucuuguugaguaguaau

SEQ ID NO: 1251325 - RNA, 19 nt, Artificial Sequence
  Description of Artificial Sequence: Synthetic oligonucleotide
  Antisense strand to SEQ ID NO: 1251324
auuacuacucaacaagagu

SEQ ID NO: 1251326 - RNA, 19 nt, Artificial Sequence
  Description of Artificial Sequence: Synthetic oligonucleotide
  Sense strand starting at position 539 of SEQ ID NO: 1241160
ugggccugaagugguaaua

SEQ ID NO: 1251327 - RNA, 19 nt, Artificial Sequence
  Description of Artificial Sequence: Synthetic oligonucleotide
  Antisense strand to SEQ ID NO: 1251326
uauuaccacuucaggccca

SEQ ID NO: 1251328 - RNA, 19 nt, Artificial Sequence
  Description of Artificial Sequence: Synthetic oligonucleotide
  Sense strand starting at position 577 of SEQ ID NO: 1241160
ucacuuuggcaauacaagu

SEQ ID NO: 1251329 - RNA, 19 nt, Artificial Sequence
  Description of Artificial Sequence: Synthetic oligonucleotide
  Antisense strand to SEQ ID NO: 1251328
acuuguauugccaaaguga

SEQ ID NO: 1251330 - RNA, 19 nt, Artificial Sequence
  Description of Artificial Sequence: Synthetic oligonucleotide
  Sense strand starting at position 646 of SEQ ID NO: 1241160
ggcccaagacagugugaaa

SEQ ID NO: 1251331 - RNA, 19 nt, Artificial Sequence
  Description of Artificial Sequence: Synthetic oligonucleotide
  Antisense strand to SEQ ID NO: 1251330
uuucacacugucuugggcc

SEQ ID NO: 1251332 - RNA, 19 nt, Artificial Sequence
  Description of Artificial Sequence: Synthetic oligonucleotide
  Sense strand starting at position 767 of SEQ ID NO: 1241160
aaagguggucucugucgaa

SEQ ID NO: 1251333 - RNA, 19 nt, Artificial Sequence
  Description of Artificial Sequence: Synthetic oligonucleotide
  Antisense strand to SEQ ID NO: 1251332
uucgacagagaccaccuuu

SEQ ID NO: 1251334 - RNA, 19 nt, Artificial Sequence
  Description of Artificial Sequence: Synthetic oligonucleotide
  Sense strand starting at position 774 of SEQ ID NO: 1241160
gucucugucgaagaucaga

SEQ ID NO: 1251335 - RNA, 19 nt, Artificial Sequence
  Description of Artificial Sequence: Synthetic oligonucleotide
  Antisense strand to SEQ ID NO: 1251334
ucugaucuucgacagagac

SEQ ID NO: 1251336 - RNA, 19 nt, Artificial Sequence
  Description of Artificial Sequence: Synthetic oligonucleotide
  Sense strand starting at position 957 of SEQ ID NO: 1241160
acagaaguguuaucuguua

SEQ ID NO: 1251337 - RNA, 19 nt, Artificial Sequence
  Description of Artificial Sequence: Synthetic oligonucleotide
  Antisense strand to SEQ ID NO: 1251336
uaacagauaacacuucugu

SEQ ID NO: 1251338 - RNA, 19 nt, Artificial Sequence
  Description of Artificial Sequence: Synthetic oligonucleotide
  Sense strand starting at position 959 of SEQ ID NO: 1241160
agaaguguuaucuguuaga

SEQ ID NO: 1251339 - RNA, 19 nt, Artificial Sequence
  Description of Artificial Sequence: Synthetic oligonucleotide
  Antisense strand to SEQ ID NO: 1251338
ucuaacagauaacacuucu

SEQ ID NO: 1251340 - RNA, 19 nt, Artificial Sequence
  Description of Artificial Sequence: Synthetic oligonucleotide
  Sense strand starting at position 1068 of SEQ ID NO: 1241160
ccucuuagaguguauacaa

SEQ ID NO: 1251341 - RNA, 19 nt, Artificial Sequence
  Description of Artificial Sequence: Synthetic oligonucleotide
  Antisense strand to SEQ ID NO: 1251340
uuguauacacucuaagagg

SEQ ID NO: 1251342 - RNA, 19 nt, Artificial Sequence
  Description of Artificial Sequence: Synthetic oligonucleotide
  Sense strand starting at position 1320 of SEQ ID NO: 1241160
agugaaggcucuuuguaca

SEQ ID NO: 1251343 - RNA, 19 nt, Artificial Sequence
  Description of Artificial Sequence: Synthetic oligonucleotide
  Antisense strand to SEQ ID NO: 1251342
uguacaaagagccuucacu

SEQ ID NO: 1251344 - RNA, 19 nt, Artificial Sequence
  Description of Artificial Sequence: Synthetic oligonucleotide
  Sense strand starting at position 2427 of SEQ ID NO: 1241160
agaggagucuccuuaggug

SEQ ID NO: 1251345 - RNA, 19 nt, Artificial Sequence
  Description of Artificial Sequence: Synthetic oligonucleotide
  Antisense strand to SEQ ID NO: 1251344
caccuaaggagacuccucu

SEQ ID NO: 1251346 - RNA, 19 nt, Artificial Sequence
  Description of Artificial Sequence: Synthetic oligonucleotide
  Sense strand starting at position 2431 of SEQ ID NO: 1241160
gagucuccuuaggugagua

SEQ ID NO: 1251347 - RNA, 19 nt, Artificial Sequence
  Description of Artificial Sequence: Synthetic oligonucleotide
  Antisense strand to SEQ ID NO: 1251346
uacucaccuaaggagacuc

SEQ ID NO: 1251348 - RNA, 19 nt, Artificial Sequence
  Description of Artificial Sequence: Synthetic oligonucleotide
  Sense strand starting at position 2432 of SEQ ID NO: 1241160
agucuccuuaggugaguau

SEQ ID NO: 1251349 - RNA, 19 nt, Artificial Sequence
  Description of Artificial Sequence: Synthetic oligonucleotide
  Antisense strand to SEQ ID NO: 1251348
auacucaccuaaggagacu

SEQ ID NO: 1251350 - RNA, 19 nt, Artificial Sequence
  Description of Artificial Sequence: Synthetic oligonucleotide
  Sense strand starting at position 2441 of SEQ ID NO: 1241160
aggugaguaucucuacucu

SEQ ID NO: 1251351 - RNA, 19 nt, Artificial Sequence
  Description of Artificial Sequence: Synthetic oligonucleotide
  Antisense strand to SEQ ID NO: 1251350
agaguagagauacucaccu

SEQ ID NO: 1251352 - RNA, 19 nt, Artificial Sequence
  Description of Artificial Sequence: Synthetic oligonucleotide
  Sense strand starting at position 2456 of SEQ ID NO: 1241160
cucuucuuccgauagaccu

SEQ ID NO: 1251353 - RNA, 19 nt, Artificial Sequence
  Description of Artificial Sequence: Synthetic oligonucleotide
  Antisense strand to SEQ ID NO: 1251352
aggucuaucggaagaagag

SEQ ID NO: 1251354 - RNA, 19 nt, Artificial Sequence
  Description of Artificial Sequence: Synthetic oligonucleotide
  Sense strand starting at position 2581 of SEQ ID NO: 1241160
aagaaaucccguugagaau

SEQ ID NO: 1251355 - RNA, 19 nt, Artificial Sequence
  Description of Artificial Sequence: Synthetic oligonucleotide
  Antisense strand to SEQ ID NO: 1251354
auucucaacgggauuucuu

SEQ ID NO: 1251356 - RNA, 19 nt, Artificial Sequence
  Description of Artificial Sequence: Synthetic oligonucleotide
  Sense strand starting at position 2611 of SEQ ID NO: 1241160
agccauugaaguuguuaga

SEQ ID NO: 1251357 - RNA, 19 nt, Artificial Sequence
  Description of Artificial Sequence: Synthetic oligonucleotide
  Antisense strand to SEQ ID NO: 1251356
ucuaacaacuucaauggcu

SEQ ID NO: 1251358 - RNA, 19 nt, Artificial Sequence
  Description of Artificial Sequence: Synthetic oligonucleotide
  Sense strand starting at position 2632 of SEQ ID NO: 1241160
uugccuauugcgccgaaga

SEQ ID NO: 1251359 - RNA, 19 nt, Artificial Sequence
  Description of Artificial Sequence: Synthetic oligonucleotide
  Antisense strand to SEQ ID NO: 1251358
ucuucggcgcaauaggcaa

SEQ ID NO: 1251360 - RNA, 19 nt, Artificial Sequence
  Description of Artificial Sequence: Synthetic oligonucleotide
  Sense strand starting at position 2642 of SEQ ID NO: 1241160
cgccgaagaucuuugauca

SEQ ID NO: 1251361 - RNA, 19 nt, Artificial Sequence
  Description of Artificial Sequence: Synthetic oligonucleotide
  Antisense strand to SEQ ID NO: 1251360
ugaucaaagaucuucggcg

SEQ ID NO: 1251362 - RNA, 19 nt, Artificial Sequence
  Description of Artificial Sequence: Synthetic oligonucleotide
  Sense strand starting at position 2643 of SEQ ID NO: 1241160
gccgaagaucuuugaucau

SEQ ID NO: 1251363 - RNA, 19 nt, Artificial Sequence
  Description of Artificial Sequence: Synthetic oligonucleotide
  Antisense strand to SEQ ID NO: 1251362
augaucaaagaucuucggc

SEQ ID NO: 1251364 - RNA, 19 nt, Artificial Sequence
  Description of Artificial Sequence: Synthetic oligonucleotide
  Sense strand starting at position 2696 of SEQ ID NO: 1241160
gucucaucguauuuaugaa

SEQ ID NO: 1251365 - RNA, 19 nt, Artificial Sequence
  Description of Artificial Sequence: Synthetic oligonucleotide
  Antisense strand to SEQ ID NO: 1251364
uucauaaauacgaugagac

SEQ ID NO: 1251366 - RNA, 19 nt, Artificial Sequence
  Description of Artificial Sequence: Synthetic oligonucleotide
  Sense strand starting at position 2745 of SEQ ID NO: 1241160
aaguaauuaucgcugagua

SEQ ID NO: 1251367 - RNA, 19 nt, Artificial Sequence
  Description of Artificial Sequence: Synthetic oligonucleotide
  Antisense strand to SEQ ID NO: 1251366
uacucagcgauaauuacuu

SEQ ID NO: 1251368 - RNA, 19 nt, Artificial Sequence
  Description of Artificial Sequence: Synthetic oligonucleotide
  Sense strand starting at position 2747 of SEQ ID NO: 1241160
guaauuaucgcugaguaau

SEQ ID NO: 1251369 - RNA, 19 nt, Artificial Sequence
  Description of Artificial Sequence: Synthetic oligonucleotide
  Antisense strand to SEQ ID NO: 1251368
auuacucagcgauaauuac

SEQ ID NO: 1251370 - RNA, 19 nt, Artificial Sequence
  Description of Artificial Sequence: Synthetic oligonucleotide
  Sense strand starting at position 2755 of SEQ ID NO: 1241160
cgcugaguaauuugggauu

SEQ ID NO: 1251371 - RNA, 19 nt, Artificial Sequence
  Description of Artificial Sequence: Synthetic oligonucleotide
  Antisense strand to SEQ ID NO: 1251370
aaucccaaauuacucagcg

SEQ ID NO: 1251372 - RNA, 19 nt, Artificial Sequence
  Description of Artificial Sequence: Synthetic oligonucleotide
  Sense strand starting at position 2758 of SEQ ID NO: 1241160
ugaguaauuugggauuaug

SEQ ID NO: 1251373 - RNA, 19 nt, Artificial Sequence
  Description of Artificial Sequence: Synthetic oligonucleotide
  Antisense strand to SEQ ID NO: 1251372
cauaaucccaaauuacuca

SEQ ID NO: 1251374 - RNA, 19 nt, Artificial Sequence
  Description of Artificial Sequence: Synthetic oligonucleotide
  Sense strand starting at position 2874 of SEQ ID NO: 1241160
uuagaaaugcaguguugga

SEQ ID NO: 1251375 - RNA, 19 nt, Artificial Sequence
  Description of Artificial Sequence: Synthetic oligonucleotide
  Antisense strand to SEQ ID NO: 1251374
uccaacacugcauuucuaa

SEQ ID NO: 1251376 - RNA, 19 nt, Artificial Sequence
  Description of Artificial Sequence: Synthetic oligonucleotide
  Sense strand starting at position 2878 of SEQ ID NO: 1241160
aaaugcaguguuggaaauu

SEQ ID NO: 1251377 - RNA, 19 nt, Artificial Sequence
  Description of Artificial Sequence: Synthetic oligonucleotide
  Antisense strand to SEQ ID NO: 1251376
aauuuccaacacugcauuu

SEQ ID NO: 1251378 - RNA, 19 nt, Artificial Sequence
  Description of Artificial Sequence: Synthetic oligonucleotide
  Sense strand starting at position 2914 of SEQ ID NO: 1241160
auuugagagucguaccaaa

SEQ ID NO: 1251379 - RNA, 19 nt, Artificial Sequence
  Description of Artificial Sequence: Synthetic oligonucleotide
  Antisense strand to SEQ ID NO: 1251378
uuugguacgacucucaaau

SEQ ID NO: 1251380 - RNA, 19 nt, Artificial Sequence
  Description of Artificial Sequence: Synthetic oligonucleotide
  Sense strand starting at position 2924 of SEQ ID NO: 1241160
cguaccaaacuuugugauu

SEQ ID NO: 1251381 - RNA, 19 nt, Artificial Sequence
  Description of Artificial Sequence: Synthetic oligonucleotide
  Antisense strand to SEQ ID NO: 1251380
aaucacaaaguuugguacg

SEQ ID NO: 1251382 - RNA, 19 nt, Artificial Sequence
  Description of Artificial Sequence: Synthetic oligonucleotide
  Sense strand starting at position 3088 of SEQ ID NO: 1241160
gugcuugucauagagucua

SEQ ID NO: 1251383 - RNA, 19 nt, Artificial Sequence
  Description of Artificial Sequence: Synthetic oligonucleotide
  Antisense strand to SEQ ID NO: 1251382
uagacucuaugacaagcac

SEQ ID NO: 1251384 - RNA, 19 nt, Artificial Sequence
  Description of Artificial Sequence: Synthetic oligonucleotide
  Sense strand starting at position 3450 of SEQ ID NO: 1241160
ggucuuaaaccuugaguuu

SEQ ID NO: 1251385 - RNA, 19 nt, Artificial Sequence
  Description of Artificial Sequence: Synthetic oligonucleotide
  Antisense strand to SEQ ID NO: 1251384
aaacucaagguuuaagacc

SEQ ID NO: 1251386 - RNA, 19 nt, Artificial Sequence
  Description of Artificial Sequence: Synthetic oligonucleotide
  Sense strand starting at position 3556 of SEQ ID NO: 1241160
aagugaggagucuauccuu

SEQ ID NO: 1251387 - RNA, 19 nt, Artificial Sequence
  Description of Artificial Sequence: Synthetic oligonucleotide
  Antisense strand to SEQ ID NO: 1251386
aaggauagacuccucacuu

SEQ ID NO: 1251388 - RNA, 19 nt, Artificial Sequence
  Description of Artificial Sequence: Synthetic oligonucleotide
  Sense strand starting at position 3644 of SEQ ID NO: 1241160
cacagacuguauguuugaa

SEQ ID NO: 1251389 - RNA, 19 nt, Artificial Sequence
  Description of Artificial Sequence: Synthetic oligonucleotide
  Antisense strand to SEQ ID NO: 1251388
uucaaacauacagucugug

SEQ ID NO: 1251390 - RNA, 19 nt, Artificial Sequence
  Description of Artificial Sequence: Synthetic oligonucleotide
  Sense strand starting at position 3681 of SEQ ID NO: 1241160
ggcauauugaggcacauau

SEQ ID NO: 1251391 - RNA, 19 nt, Artificial Sequence
  Description of Artificial Sequence: Synthetic oligonucleotide
  Antisense strand to SEQ ID NO: 1251390
auaugugccucaauaugcc

SEQ ID NO: 1251392 - RNA, 19 nt, Artificial Sequence
  Description of Artificial Sequence: Synthetic oligonucleotide
  Sense strand starting at position 3702 of SEQ ID NO: 1241160
aggcacauuccauauguua

SEQ ID NO: 1251393 - RNA, 19 nt, Artificial Sequence
  Description of Artificial Sequence: Synthetic oligonucleotide
  Antisense strand to SEQ ID NO: 1251392
uaacauauggaaugugccu

SEQ ID NO: 1251394 - RNA, 19 nt, Artificial Sequence
  Description of Artificial Sequence: Synthetic oligonucleotide
  Sense strand starting at position 3738 of SEQ ID NO: 1241160
gagguugagcacuguuuag

SEQ ID NO: 1251395 - RNA, 19 nt, Artificial Sequence
  Description of Artificial Sequence: Synthetic oligonucleotide
  Antisense strand to SEQ ID NO: 1251394
cuaaacagugcucaaccuc

SEQ ID NO: 1251396 - RNA, 19 nt, Artificial Sequence
  Description of Artificial Sequence: Synthetic oligonucleotide
  Sense strand starting at position 3742 of SEQ ID NO: 1241160
uugagcacuguuuaggaau

SEQ ID NO: 1251397 - RNA, 19 nt, Artificial Sequence
  Description of Artificial Sequence: Synthetic oligonucleotide
  Antisense strand to SEQ ID NO: 1251396
auuccuaaacagugcucaa

SEQ ID NO: 1251398 - RNA, 19 nt, Artificial Sequence
  Description of Artificial Sequence: Synthetic oligonucleotide
  Sense strand starting at position 131 of SEQ ID NO: 1241161
gcauauugagcaggaugga

SEQ ID NO: 1251399 - RNA, 19 nt, Artificial Sequence
  Description of Artificial Sequence: Synthetic oligonucleotide
  Antisense strand to SEQ ID NO: 1251398
uccauccugcucaauaugc

SEQ ID NO: 1251400 - RNA, 19 nt, Artificial Sequence
  Description of Artificial Sequence: Synthetic oligonucleotide
  Sense strand starting at position 235 of SEQ ID NO: 1241161
gugacauuacuccauuauu

SEQ ID NO: 1251401 - RNA, 19 nt, Artificial Sequence
  Description of Artificial Sequence: Synthetic oligonucleotide
  Antisense strand to SEQ ID NO: 1251400
aauaauggaguaaugucac

SEQ ID NO: 1251402 - RNA, 19 nt, Artificial Sequence
  Description of Artificial Sequence: Synthetic oligonucleotide
  Sense strand starting at position 280 of SEQ ID NO: 1241161
ggcugugucaggcauuuau

SEQ ID NO: 1251403 - RNA, 19 nt, Artificial Sequence
  Description of Artificial Sequence: Synthetic oligonucleotide
  Antisense strand to SEQ ID NO: 1251402
auaaaugccugacacagcc

SEQ ID NO: 1251404 - RNA, 19 nt, Artificial Sequence
  Description of Artificial Sequence: Synthetic oligonucleotide
  Sense strand starting at position 348 of SEQ ID NO: 1241161
ggucauucgauuugguauu

SEQ ID NO: 1251405 - RNA, 19 nt, Artificial Sequence
  Description of Artificial Sequence: Synthetic oligonucleotide
  Antisense strand to SEQ ID NO: 1251404
aauaccaaaucgaaugacc

SEQ ID NO: 1251406 - RNA, 19 nt, Artificial Sequence
  Description of Artificial Sequence: Synthetic oligonucleotide
  Sense strand starting at position 396 of SEQ ID NO: 1241161
ucaugaggauucucaugau

SEQ ID NO: 1251407 - RNA, 19 nt, Artificial Sequence
  Description of Artificial Sequence: Synthetic oligonucleotide
  Antisense strand to SEQ ID NO: 1251406
aucaugagaauccucauga

SEQ ID NO: 1251408 - RNA, 19 nt, Artificial Sequence
  Description of Artificial Sequence: Synthetic oligonucleotide
  Sense strand starting at position 866 of SEQ ID NO: 1241161
guguuauugauccagaagg

SEQ ID NO: 1251409 - RNA, 19 nt, Artificial Sequence
  Description of Artificial Sequence: Synthetic oligonucleotide
  Antisense strand to SEQ ID NO: 1251408
ccuucuggaucaauaacac

SEQ ID NO: 1251410 - RNA, 19 nt, Artificial Sequence
  Description of Artificial Sequence: Synthetic oligonucleotide
  Sense strand starting at position 868 of SEQ ID NO: 1241161
guuauugauccagaaggug

SEQ ID NO: 1251411 - RNA, 19 nt, Artificial Sequence
  Description of Artificial Sequence: Synthetic oligonucleotide
  Antisense strand to SEQ ID NO: 1251410
caccuucuggaucaauaac

SEQ ID NO: 1251412 - RNA, 19 nt, Artificial Sequence
  Description of Artificial Sequence: Synthetic oligonucleotide
  Sense strand starting at position 948 of SEQ ID NO: 1241161
gagaaugucuguuuaauua

SEQ ID NO: 1251413 - RNA, 19 nt, Artificial Sequence
  Description of Artificial Sequence: Synthetic oligonucleotide
  Antisense strand to SEQ ID NO: 1251412
uaauuaaacagacauucuc

SEQ ID NO: 1251414 - RNA, 19 nt, Artificial Sequence
  Description of Artificial Sequence: Synthetic oligonucleotide
  Sense strand starting at position 1219 of SEQ ID NO: 1241161
caaagucuggugcauuaaa

SEQ ID NO: 1251415 - RNA, 19 nt, Artificial Sequence
  Description of Artificial Sequence: Synthetic oligonucleotide
  Antisense strand to SEQ ID NO: 1251414
uuuaaugcaccagacuuug

SEQ ID NO: 1251416 - RNA, 19 nt, Artificial Sequence
  Description of Artificial Sequence: Synthetic oligonucleotide
  Sense strand starting at position 1623 of SEQ ID NO: 1241161
uguuuaccuguagaauauc

SEQ ID NO: 1251417 - RNA, 19 nt, Artificial Sequence
  Description of Artificial Sequence: Synthetic oligonucleotide
  Antisense strand to SEQ ID NO: 1251416
gauauucuacagguaaaca

SEQ ID NO: 1251418 - RNA, 19 nt, Artificial Sequence
  Description of Artificial Sequence: Synthetic oligonucleotide
  Sense strand starting at position 2036 of SEQ ID NO: 1241161
cugguuuccauggagacuu

SEQ ID NO: 1251419 - RNA, 19 nt, Artificial Sequence
  Description of Artificial Sequence: Synthetic oligonucleotide
  Antisense strand to SEQ ID NO: 1251418
aagucuccauggaaaccag

SEQ ID NO: 1251420 - RNA, 19 nt, Artificial Sequence
  Description of Artificial Sequence: Synthetic oligonucleotide
  Sense strand starting at position 2120 of SEQ ID NO: 1241161
cugaaauacucagugauag

SEQ ID NO: 1251421 - RNA, 19 nt, Artificial Sequence
  Description of Artificial Sequence: Synthetic oligonucleotide
  Antisense strand to SEQ ID NO: 1251420
cuaucacugaguauuucag

SEQ ID NO: 1251422 - RNA, 19 nt, Artificial Sequence
  Description of Artificial Sequence: Synthetic oligonucleotide
  Sense strand starting at position 2395 of SEQ ID NO: 1241161
cggcuaaagcgucauuuga

SEQ ID NO: 1251423 - RNA, 19 nt, Artificial Sequence
  Description of Artificial Sequence: Synthetic oligonucleotide
  Antisense strand to SEQ ID NO: 1251422
ucaaaugacgcuuuagccg

SEQ ID NO: 1251424 - RNA, 19 nt, Artificial Sequence
  Description of Artificial Sequence: Synthetic oligonucleotide
  Sense strand starting at position 2448 of SEQ ID NO: 1241161
gggugaauacauugcagga

SEQ ID NO: 1251425 - RNA, 19 nt, Artificial Sequence
  Description of Artificial Sequence: Synthetic oligonucleotide
  Antisense strand to SEQ ID NO: 1251424
uccugcaauguauucaccc

SEQ ID NO: 1251426 - RNA, 19 nt, Artificial Sequence
  Description of Artificial Sequence: Synthetic oligonucleotide
  Sense strand starting at position 2515 of SEQ ID NO: 1241161
uugaauaaauggucuaagu

SEQ ID NO: 1251427 - RNA, 19 nt, Artificial Sequence
  Description of Artificial Sequence: Synthetic oligonucleotide
  Antisense strand to SEQ ID NO: 1251426
acuuagaccauuuauucaa

SEQ ID NO: 1251428 - RNA, 19 nt, Artificial Sequence
  Description of Artificial Sequence: Synthetic oligonucleotide
  Sense strand starting at position 2929 of SEQ ID NO: 1241161
aggaaaugugccgaaauau

SEQ ID NO: 1251429 - RNA, 19 nt, Artificial Sequence
  Description of Artificial Sequence: Synthetic oligonucleotide
  Antisense strand to SEQ ID NO: 1251428
auauuucggcacauuuccu

SEQ ID NO: 1251430 - RNA, 19 nt, Artificial Sequence
  Description of Artificial Sequence: Synthetic oligonucleotide
  Sense strand starting at position 2940 of SEQ ID NO: 1241161
cgaaauauugaguagugau

SEQ ID NO: 1251431 - RNA, 19 nt, Artificial Sequence
  Description of Artificial Sequence: Synthetic oligonucleotide
  Antisense strand to SEQ ID NO: 1251430
aucacuacucaauauuucg

SEQ ID NO: 1251432 - RNA, 19 nt, Artificial Sequence
  Description of Artificial Sequence: Synthetic oligonucleotide
  Sense strand starting at position 3136 of SEQ ID NO: 1241161
uaaggugauguuuggaaag

SEQ ID NO: 1251433 - RNA, 19 nt, Artificial Sequence
  Description of Artificial Sequence: Synthetic oligonucleotide
  Antisense strand to SEQ ID NO: 1251432
cuuuccaaacaucaccuua

SEQ ID NO: 1251434 - RNA, 19 nt, Artificial Sequence
  Description of Artificial Sequence: Synthetic oligonucleotide
  Sense strand starting at position 3147 of SEQ ID NO: 1241161
uuggaaagucuugguagac

SEQ ID NO: 1251435 - RNA, 19 nt, Artificial Sequence
  Description of Artificial Sequence: Synthetic oligonucleotide
  Antisense strand to SEQ ID NO: 1251434
gucuaccaagacuuuccaa

SEQ ID NO: 1251436 - RNA, 19 nt, Artificial Sequence
  Description of Artificial Sequence: Synthetic oligonucleotide
  Sense strand starting at position 3148 of SEQ ID NO: 1241161
uggaaagucuugguagaca

SEQ ID NO: 1251437 - RNA, 19 nt, Artificial Sequence
  Description of Artificial Sequence: Synthetic oligonucleotide
  Antisense strand to SEQ ID NO: 1251436
ugucuaccaagacuuucca

SEQ ID NO: 1251438 - RNA, 19 nt, Artificial Sequence
  Description of Artificial Sequence: Synthetic oligonucleotide
  Sense strand starting at position 3244 of SEQ ID NO: 1241161
agcagagagguuuauaagu

SEQ ID NO: 1251439 - RNA, 19 nt, Artificial Sequence
  Description of Artificial Sequence: Synthetic oligonucleotide
  Antisense strand to SEQ ID NO: 1251438
acuuauaaaccucucugcu

SEQ ID NO: 1251440 - RNA, 19 nt, Artificial Sequence
  Description of Artificial Sequence: Synthetic oligonucleotide
  Sense strand starting at position 3319 of SEQ ID NO: 1241161
gcuuaauuacaaggauaau

SEQ ID NO: 1251441 - RNA, 19 nt, Artificial Sequence
  Description of Artificial Sequence: Synthetic oligonucleotide
  Antisense strand to SEQ ID NO: 1251440
auuauccuuguaauuaagc

SEQ ID NO: 1251442 - RNA, 19 nt, Artificial Sequence
  Description of Artificial Sequence: Synthetic oligonucleotide
  Sense strand starting at position 3335 of SEQ ID NO: 1241161
aauaauacuugaguaaggu

SEQ ID NO: 1251443 - RNA, 19 nt, Artificial Sequence
  Description of Artificial Sequence: Synthetic oligonucleotide
  Antisense strand to SEQ ID NO: 1251442
accuuacucaaguauuauu

SEQ ID NO: 1251444 - RNA, 19 nt, Artificial Sequence
  Description of Artificial Sequence: Synthetic oligonucleotide
  Sense strand starting at position 3343 of SEQ ID NO: 1241161
uugaguaaggucuaguaag

SEQ ID NO: 1251445 - RNA, 19 nt, Artificial Sequence
  Description of Artificial Sequence: Synthetic oligonucleotide
  Antisense strand to SEQ ID NO: 1251444
cuuacuagaccuuacucaa

SEQ ID NO: 1251446 - RNA, 19 nt, Artificial Sequence
  Description of Artificial Sequence: Synthetic oligonucleotide
  Sense strand starting at position 3371 of SEQ ID NO: 1241161
uuaguacaaucaguuuaag

SEQ ID NO: 1251447 - RNA, 19 nt, Artificial Sequence
  Description of Artificial Sequence: Synthetic oligonucleotide
  Antisense strand to SEQ ID NO: 1251446
cuuaaacugauuguacuaa

SEQ ID NO: 1251448 - RNA, 19 nt, Artificial Sequence
  Description of Artificial Sequence: Synthetic oligonucleotide
  Sense strand starting at position 3374 of SEQ ID NO: 1241161
guacaaucaguuuaaguau

SEQ ID NO: 1251449 - RNA, 19 nt, Artificial Sequence
  Description of Artificial Sequence: Synthetic oligonucleotide
  Antisense strand to SEQ ID NO: 1251448
auacuuaaacugauuguac

SEQ ID NO: 1251450 - RNA, 19 nt, Artificial Sequence
  Description of Artificial Sequence: Synthetic oligonucleotide
  Sense strand starting at position 3547 of SEQ ID NO: 1241161
ugagccuuuguugaggaaa

SEQ ID NO: 1251451 - RNA, 19 nt, Artificial Sequence
  Description of Artificial Sequence: Synthetic oligonucleotide
  Antisense strand to SEQ ID NO: 1251450
uuuccucaacaaaggcuca

SEQ ID NO: 1251452 - RNA, 19 nt, Artificial Sequence
  Description of Artificial Sequence: Synthetic oligonucleotide
  Sense strand starting at position 3550 of SEQ ID NO: 1241161
gccuuuguugaggaaauug

SEQ ID NO: 1251453 - RNA, 19 nt, Artificial Sequence
  Description of Artificial Sequence: Synthetic oligonucleotide
  Antisense strand to SEQ ID NO: 1251452
caauuuccucaacaaaggc

SEQ ID NO: 1251454 - RNA, 19 nt, Artificial Sequence
  Description of Artificial Sequence: Synthetic oligonucleotide
  Sense strand starting at position 3558 of SEQ ID NO: 1241161
ugaggaaauugguuaguug

SEQ ID NO: 1251455 - RNA, 19 nt, Artificial Sequence
  Description of Artificial Sequence: Synthetic oligonucleotide
  Antisense strand to SEQ ID NO: 1251454
caacuaaccaauuuccuca

SEQ ID NO: 1251456 - RNA, 19 nt, Artificial Sequence
  Description of Artificial Sequence: Synthetic oligonucleotide
  Sense strand starting at position 3559 of SEQ ID NO: 1241161
gaggaaauugguuaguugu

SEQ ID NO: 1251457 - RNA, 19 nt, Artificial Sequence
  Description of Artificial Sequence: Synthetic oligonucleotide
  Antisense strand to SEQ ID NO: 1251456
acaacuaaccaauuuccuc

SEQ ID NO: 1251458 - RNA, 19 nt, Artificial Sequence
  Description of Artificial Sequence: Synthetic oligonucleotide
  Sense strand starting at position 3567 of SEQ ID NO: 1241161
ugguuaguuguugaaggaa

SEQ ID NO: 1251459 - RNA, 19 nt, Artificial Sequence
  Description of Artificial Sequence: Synthetic oligonucleotide
  Antisense strand to SEQ ID NO: 1251458
uuccuucaacaacuaacca

SEQ ID NO: 1251460 - RNA, 19 nt, Artificial Sequence
  Description of Artificial Sequence: Synthetic oligonucleotide
  Sense strand starting at position 3570 of SEQ ID NO: 1241161
uuaguuguugaaggaauaa

SEQ ID NO: 1251461 - RNA, 19 nt, Artificial Sequence
  Description of Artificial Sequence: Synthetic oligonucleotide
  Antisense strand to SEQ ID NO: 1251460
uuauuccuucaacaacuaa

SEQ ID NO: 1251462 - RNA, 19 nt, Artificial Sequence
  Description of Artificial Sequence: Synthetic oligonucleotide
  Sense strand starting at position 3684 of SEQ ID NO: 1241161
auaacaauacuuuguggga

SEQ ID NO: 1251463 - RNA, 19 nt, Artificial Sequence
  Description of Artificial Sequence: Synthetic oligonucleotide
  Antisense strand to SEQ ID NO: 1251462
ucccacaaaguauuguuau

SEQ ID NO: 1251464 - RNA, 19 nt, Artificial Sequence
  Description of Artificial Sequence: Synthetic oligonucleotide
  Sense strand starting at position 3688 of SEQ ID NO: 1241161
caauacuuugugggaaaug

SEQ ID NO: 1251465 - RNA, 19 nt, Artificial Sequence
  Description of Artificial Sequence: Synthetic oligonucleotide
  Antisense strand to SEQ ID NO: 1251464
cauuucccacaaaguauug

SEQ ID NO: 1251466 - RNA, 19 nt, Artificial Sequence
  Description of Artificial Sequence: Synthetic oligonucleotide
  Sense strand starting at position 3751 of SEQ ID NO: 1241161
guaagcucacaguaaucau

SEQ ID NO: 1251467 - RNA, 19 nt, Artificial Sequence
  Description of Artificial Sequence: Synthetic oligonucleotide
  Antisense strand to SEQ ID NO: 1251466
augauuacugugagcuuac

SEQ ID NO: 1251468 - RNA, 19 nt, Artificial Sequence
  Description of Artificial Sequence: Synthetic oligonucleotide
  Sense strand starting at position 3782 of SEQ ID NO: 1241161
uccuccucugaggaaguau

SEQ ID NO: 1251469 - RNA, 19 nt, Artificial Sequence
  Description of Artificial Sequence: Synthetic oligonucleotide
  Antisense strand to SEQ ID NO: 1251468
auacuuccucagaggagga

SEQ ID NO: 1251470 - RNA, 19 nt, Artificial Sequence
  Description of Artificial Sequence: Synthetic oligonucleotide
  Sense strand starting at position 3791 of SEQ ID NO: 1241161
gaggaaguauugcuacaua

SEQ ID NO: 1251471 - RNA, 19 nt, Artificial Sequence
  Description of Artificial Sequence: Synthetic oligonucleotide
  Antisense strand to SEQ ID NO: 1251470
uauguagcaauacuuccuc

SEQ ID NO: 1251472 - RNA, 19 nt, Artificial Sequence
  Description of Artificial Sequence: Synthetic oligonucleotide
  Sense strand starting at position 3859 of SEQ ID NO: 1241161
auagacauauuccugucua

SEQ ID NO: 1251473 - RNA, 19 nt, Artificial Sequence
  Description of Artificial Sequence: Synthetic oligonucleotide
  Antisense strand to SEQ ID NO: 1251472
uagacaggaauaugucuau

SEQ ID NO: 1251474 - RNA, 19 nt, Artificial Sequence
  Description of Artificial Sequence: Synthetic oligonucleotide
  Sense strand starting at position 3863 of SEQ ID NO: 1241161
acauauuccugucuaaagg

SEQ ID NO: 1251475 - RNA, 19 nt, Artificial Sequence
  Description of Artificial Sequence: Synthetic oligonucleotide
  Antisense strand to SEQ ID NO: 1251474
ccuuuagacaggaauaugu

SEQ ID NO: 1251476 - RNA, 19 nt, Artificial Sequence
  Description of Artificial Sequence: Synthetic oligonucleotide
  Sense strand starting at position 3960 of SEQ ID NO: 1241161
gucuaaggauuaucauuag

SEQ ID NO: 1251477 - RNA, 19 nt, Artificial Sequence
  Description of Artificial Sequence: Synthetic oligonucleotide
  Antisense strand to SEQ ID NO: 1251476
cuaaugauaauccuuagac

SEQ ID NO: 1251478 - RNA, 19 nt, Artificial Sequence
  Description of Artificial Sequence: Synthetic oligonucleotide
  Sense strand starting at position 169 of SEQ ID NO: 1241162
augauuaauguugguccau

SEQ ID NO: 1251479 - RNA, 19 nt, Artificial Sequence
  Description of Artificial Sequence: Synthetic oligonucleotide
  Antisense strand to SEQ ID NO: 1251478
auggaccaacauuaaucau

SEQ ID NO: 1251480 - RNA, 19 nt, Artificial Sequence
  Description of Artificial Sequence: Synthetic oligonucleotide
  Sense strand starting at position 171 of SEQ ID NO: 1241162
gauuaauguugguccauua

SEQ ID NO: 1251481 - RNA, 19 nt, Artificial Sequence
  Description of Artificial Sequence: Synthetic oligonucleotide
  Antisense strand to SEQ ID NO: 1251480
uaauggaccaacauuaauc

SEQ ID NO: 1251482 - RNA, 19 nt, Artificial Sequence
  Description of Artificial Sequence: Synthetic oligonucleotide
  Sense strand starting at position 420 of SEQ ID NO: 1241162
gaguaaggaccuugcucaa

SEQ ID NO: 1251483 - RNA, 19 nt, Artificial Sequence
  Description of Artificial Sequence: Synthetic oligonucleotide
  Antisense strand to SEQ ID NO: 1251482
uugagcaagguccuuacuc

SEQ ID NO: 1251484 - RNA, 19 nt, Artificial Sequence
  Description of Artificial Sequence: Synthetic oligonucleotide
  Sense strand starting at position 441 of SEQ ID NO: 1241162
uaagguaacgcaugaaaga

SEQ ID NO: 1251485 - RNA, 19 nt, Artificial Sequence
  Description of Artificial Sequence: Synthetic oligonucleotide
  Antisense strand to SEQ ID NO: 1251484
ucuuucaugcguuaccuua

SEQ ID NO: 1251486 - RNA, 19 nt, Artificial Sequence
  Description of Artificial Sequence: Synthetic oligonucleotide
  Sense strand starting at position 873 of SEQ ID NO: 1241162
cccagaguggagugacaaa

SEQ ID NO: 1251487 - RNA, 19 nt, Artificial Sequence
  Description of Artificial Sequence: Synthetic oligonucleotide
  Antisense strand to SEQ ID NO: 1251486
uuugucacuccacucuggg

SEQ ID NO: 1251488 - RNA, 19 nt, Artificial Sequence
  Description of Artificial Sequence: Synthetic oligonucleotide
  Sense strand starting at position 1271 of SEQ ID NO: 1241162
acggaaagaucagccaauu

SEQ ID NO: 1251489 - RNA, 19 nt, Artificial Sequence
  Description of Artificial Sequence: Synthetic oligonucleotide
  Antisense strand to SEQ ID NO: 1251488
aauuggcugaucuuuccgu

SEQ ID NO: 1251490 - RNA, 19 nt, Artificial Sequence
  Description of Artificial Sequence: Synthetic oligonucleotide
  Sense strand starting at position 1482 of SEQ ID NO: 1241162
caguucuugcccuacagga

SEQ ID NO: 1251491 - RNA, 19 nt, Artificial Sequence
  Description of Artificial Sequence: Synthetic oligonucleotide
  Antisense strand to SEQ ID NO: 1251490
uccuguagggcaagaacug

SEQ ID NO: 1251492 - RNA, 19 nt, Artificial Sequence
  Description of Artificial Sequence: Synthetic oligonucleotide
  Sense strand starting at position 1553 of SEQ ID NO: 1241162
cccagaaucuugccacaug

SEQ ID NO: 1251493 - RNA, 19 nt, Artificial Sequence
  Description of Artificial Sequence: Synthetic oligonucleotide
  Antisense strand to SEQ ID NO: 1251492
cauguggcaagauucuggg

SEQ ID NO: 1251494 - RNA, 19 nt, Artificial Sequence
  Description of Artificial Sequence: Synthetic oligonucleotide
  Sense strand starting at position 1760 of SEQ ID NO: 1241162
gcuguuugcguuaaggagu

SEQ ID NO: 1251495 - RNA, 19 nt, Artificial Sequence
  Description of Artificial Sequence: Synthetic oligonucleotide
  Antisense strand to SEQ ID NO: 1251494
acuccuuaacgcaaacagc

SEQ ID NO: 1251496 - RNA, 19 nt, Artificial Sequence
  Description of Artificial Sequence: Synthetic oligonucleotide
  Sense strand starting at position 2020 of SEQ ID NO: 1241162
caucucuagguccggaaau

SEQ ID NO: 1251497 - RNA, 19 nt, Artificial Sequence
  Description of Artificial Sequence: Synthetic oligonucleotide
  Antisense strand to SEQ ID NO: 1251496
auuuccggaccuagagaug

SEQ ID NO: 1251498 - RNA, 19 nt, Artificial Sequence
  Description of Artificial Sequence: Synthetic oligonucleotide
  Sense strand starting at position 2022 of SEQ ID NO: 1241162
ucucuagguccggaaauaa

SEQ ID NO: 1251499 - RNA, 19 nt, Artificial Sequence
  Description of Artificial Sequence: Synthetic oligonucleotide
  Antisense strand to SEQ ID NO: 1251498
uuauuuccggaccuagaga

SEQ ID NO: 1251500 - RNA, 19 nt, Artificial Sequence
  Description of Artificial Sequence: Synthetic oligonucleotide
  Sense strand starting at position 2050 of SEQ ID NO: 1241162
uccgauuaugguuauacca

SEQ ID NO: 1251501 - RNA, 19 nt, Artificial Sequence
  Description of Artificial Sequence: Synthetic oligonucleotide
  Antisense strand to SEQ ID NO: 1251500
ugguauaaccauaaucgga

SEQ ID NO: 1251502 - RNA, 19 nt, Artificial Sequence
  Description of Artificial Sequence: Synthetic oligonucleotide
  Sense strand starting at position 2075 of SEQ ID NO: 1241162
aggguuuccgaauauauuc

SEQ ID NO: 1251503 - RNA, 19 nt, Artificial Sequence
  Description of Artificial Sequence: Synthetic oligonucleotide
  Antisense strand to SEQ ID NO: 1251502
gaauauauucggaaacccu

SEQ ID NO: 1251504 - RNA, 19 nt, Artificial Sequence
  Description of Artificial Sequence: Synthetic oligonucleotide
  Sense strand starting at position 2171 of SEQ ID NO: 1241162
aagaauugauugguaacga

SEQ ID NO: 1251505 - RNA, 19 nt, Artificial Sequence
  Description of Artificial Sequence: Synthetic oligonucleotide
  Antisense strand to SEQ ID NO: 1251504
ucguuaccaaucaauucuu

SEQ ID NO: 1251506 - RNA, 19 nt, Artificial Sequence
  Description of Artificial Sequence: Synthetic oligonucleotide
  Sense strand starting at position 2305 of SEQ ID NO: 1241162
gcggaaauuaccgaagaug

SEQ ID NO: 1251507 - RNA, 19 nt, Artificial Sequence
  Description of Artificial Sequence: Synthetic oligonucleotide
  Antisense strand to SEQ ID NO: 1251506
caucuucgguaauuuccgc

SEQ ID NO: 1251508 - RNA, 19 nt, Artificial Sequence
  Description of Artificial Sequence: Synthetic oligonucleotide
  Sense strand starting at position 2957 of SEQ ID NO: 1241162
aaaugucugcucgauuaga

SEQ ID NO: 1251509 - RNA, 19 nt, Artificial Sequence
  Description of Artificial Sequence: Synthetic oligonucleotide
  Antisense strand to SEQ ID NO: 1251508
ucuaaucgagcagacauuu

SEQ ID NO: 1251510 - RNA, 19 nt, Artificial Sequence
  Description of Artificial Sequence: Synthetic oligonucleotide
  Sense strand starting at position 2996 of SEQ ID NO: 1241162
agaccuuuauuugaaggga

SEQ ID NO: 1251511 - RNA, 19 nt, Artificial Sequence
  Description of Artificial Sequence: Synthetic oligonucleotide
  Antisense strand to SEQ ID NO: 1251510
ucccuucaaauaaaggucu

SEQ ID NO: 1251512 - RNA, 19 nt, Artificial Sequence
  Description of Artificial Sequence: Synthetic oligonucleotide
  Sense strand starting at position 3052 of SEQ ID NO: 1241162
guggcaauuugggugguua

SEQ ID NO: 1251513 - RNA, 19 nt, Artificial Sequence
  Description of Artificial Sequence: Synthetic oligonucleotide
  Antisense strand to SEQ ID NO: 1251512
uaaccacccaaauugccac

SEQ ID NO: 1251514 - RNA, 19 nt, Artificial Sequence
  Description of Artificial Sequence: Synthetic oligonucleotide
  Sense strand starting at position 3065 of SEQ ID NO: 1241162
ugguuaagaguuuggugaa

SEQ ID NO: 1251515 - RNA, 19 nt, Artificial Sequence
  Description of Artificial Sequence: Synthetic oligonucleotide
  Antisense strand to SEQ ID NO: 1251514
uucaccaaacucuuaacca

SEQ ID NO: 1251516 - RNA, 19 nt, Artificial Sequence
  Description of Artificial Sequence: Synthetic oligonucleotide
  Sense strand starting at position 3072 of SEQ ID NO: 1241162
gaguuuggugaauauuggu

SEQ ID NO: 1251517 - RNA, 19 nt, Artificial Sequence
  Description of Artificial Sequence: Synthetic oligonucleotide
  Antisense strand to SEQ ID NO: 1251516
accaauauucaccaaacuc

SEQ ID NO: 1251518 - RNA, 19 nt, Artificial Sequence
  Description of Artificial Sequence: Synthetic oligonucleotide
  Sense strand starting at position 3132 of SEQ ID NO: 1241162
ucgguuugaguagauuaag

SEQ ID NO: 1251519 - RNA, 19 nt, Artificial Sequence
  Description of Artificial Sequence: Synthetic oligonucleotide
  Antisense strand to SEQ ID NO: 1251518
cuuaaucuacucaaaccga

SEQ ID NO: 1251520 - RNA, 19 nt, Artificial Sequence
  Description of Artificial Sequence: Synthetic oligonucleotide
  Sense strand starting at position 3140 of SEQ ID NO: 1241162
aguagauuaaggugggauu

SEQ ID NO: 1251521 - RNA, 19 nt, Artificial Sequence
  Description of Artificial Sequence: Synthetic oligonucleotide
  Antisense strand to SEQ ID NO: 1251520
aaucccaccuuaaucuacu

SEQ ID NO: 1251522 - RNA, 19 nt, Artificial Sequence
  Description of Artificial Sequence: Synthetic oligonucleotide
  Sense strand starting at position 3368 of SEQ ID NO: 1241162
guggauagacuagguuaga

SEQ ID NO: 1251523 - RNA, 19 nt, Artificial Sequence
  Description of Artificial Sequence: Synthetic oligonucleotide
  Antisense strand to SEQ ID NO: 1251522
ucuaaccuagucuauccac

SEQ ID NO: 1251524 - RNA, 19 nt, Artificial Sequence
  Description of Artificial Sequence: Synthetic oligonucleotide
  Sense strand starting at position 3378 of SEQ ID NO: 1241162
uagguuagaccacaguuua

SEQ ID NO: 1251525 - RNA, 19 nt, Artificial Sequence
  Description of Artificial Sequence: Synthetic oligonucleotide
  Antisense strand to SEQ ID NO: 1251524
uaaacuguggucuaaccua

SEQ ID NO: 1251526 - RNA, 19 nt, Artificial Sequence
  Description of Artificial Sequence: Synthetic oligonucleotide
  Sense strand starting at position 3450 of SEQ ID NO: 1241162
uugauaaaucuaggugcca

SEQ ID NO: 1251527 - RNA, 19 nt, Artificial Sequence
  Description of Artificial Sequence: Synthetic oligonucleotide
  Antisense strand to SEQ ID NO: 1251526
uggcaccuagauuuaucaa

SEQ ID NO: 1251528 - RNA, 19 nt, Artificial Sequence
  Description of Artificial Sequence: Synthetic oligonucleotide
  Sense strand starting at position 3465 of SEQ ID NO: 1241162
gccacaguacuggaaauua

SEQ ID NO: 1251529 - RNA, 19 nt, Artificial Sequence
  Description of Artificial Sequence: Synthetic oligonucleotide
  Antisense strand to SEQ ID NO: 1251528
uaauuuccaguacuguggc

SEQ ID NO: 1251530 - RNA, 19 nt, Artificial Sequence
  Description of Artificial Sequence: Synthetic oligonucleotide
  Sense strand starting at position 3485 of SEQ ID NO: 1241162
acaaauugacccugguacu

SEQ ID NO: 1251531 - RNA, 19 nt, Artificial Sequence
  Description of Artificial Sequence: Synthetic oligonucleotide
  Antisense strand to SEQ ID NO: 1251530
aguaccagggucaauuugu

SEQ ID NO: 1251532 - RNA, 19 nt, Artificial Sequence
  Description of Artificial Sequence: Synthetic oligonucleotide
  Sense strand starting at position 3503 of SEQ ID NO: 1241162
uggguaacccuuugaccaa

SEQ ID NO: 1251533 - RNA, 19 nt, Artificial Sequence
  Description of Artificial Sequence: Synthetic oligonucleotide
  Antisense strand to SEQ ID NO: 1251532
uuggucaaaggguuaccca

SEQ ID NO: 1251534 - RNA, 19 nt, Artificial Sequence
  Description of Artificial Sequence: Synthetic oligonucleotide
  Sense strand starting at position 3520 of SEQ ID NO: 1241162
aaguaauuccgucaggcaa

SEQ ID NO: 1251535 - RNA, 19 nt, Artificial Sequence
  Description of Artificial Sequence: Synthetic oligonucleotide
  Antisense strand to SEQ ID NO: 1251534
uugccugacggaauuacuu

SEQ ID NO: 1251536 - RNA, 19 nt, Artificial Sequence
  Description of Artificial Sequence: Synthetic oligonucleotide
  Sense strand starting at position 3581 of SEQ ID NO: 1241162
uuacaugcaugaucagauu

SEQ ID NO: 1251537 - RNA, 19 nt, Artificial Sequence
  Description of Artificial Sequence: Synthetic oligonucleotide
  Antisense strand to SEQ ID NO: 1251536
aaucugaucaugcauguaa

SEQ ID NO: 1251538 - RNA, 19 nt, Artificial Sequence
  Description of Artificial Sequence: Synthetic oligonucleotide
  Sense strand starting at position 3584 of SEQ ID NO: 1241162
caugcaugaucagauuuag

SEQ ID NO: 1251539 - RNA, 19 nt, Artificial Sequence
  Description of Artificial Sequence: Synthetic oligonucleotide
  Antisense strand to SEQ ID NO: 1251538
cuaaaucugaucaugcaug

SEQ ID NO: 1251540 - RNA, 19 nt, Artificial Sequence
  Description of Artificial Sequence: Synthetic oligonucleotide
  Sense strand starting at position 3614 of SEQ ID NO: 1241162
ggcgaaagugcagaagaua

SEQ ID NO: 1251541 - RNA, 19 nt, Artificial Sequence
  Description of Artificial Sequence: Synthetic oligonucleotide
  Antisense strand to SEQ ID NO: 1251540
uaucuucugcacuuucgcc

SEQ ID NO: 1251542 - RNA, 19 nt, Artificial Sequence
  Description of Artificial Sequence: Synthetic oligonucleotide
  Sense strand starting at position 3648 of SEQ ID NO: 1241162
cugguucuauuacugauau

SEQ ID NO: 1251543 - RNA, 19 nt, Artificial Sequence
  Description of Artificial Sequence: Synthetic oligonucleotide
  Antisense strand to SEQ ID NO: 1251542
auaucaguaauagaaccag

SEQ ID NO: 1251544 - RNA, 19 nt, Artificial Sequence
  Description of Artificial Sequence: Synthetic oligonucleotide
  Sense strand starting at position 3743 of SEQ ID NO: 1241162
cuuuaugggucuucugaag

SEQ ID NO: 1251545 - RNA, 19 nt, Artificial Sequence
  Description of Artificial Sequence: Synthetic oligonucleotide
  Antisense strand to SEQ ID NO: 1251544
cuucagaagacccauaaag

SEQ ID NO: 1251546 - RNA, 19 nt, Artificial Sequence
  Description of Artificial Sequence: Synthetic oligonucleotide
  Sense strand starting at position 3751 of SEQ ID NO: 1241162
gucuucugaagaugaauga

SEQ ID NO: 1251547 - RNA, 19 nt, Artificial Sequence
  Description of Artificial Sequence: Synthetic oligonucleotide
  Antisense strand to SEQ ID NO: 1251546
ucauucaucuucagaagac

SEQ ID NO: 1251548 - RNA, 19 nt, Artificial Sequence
  Description of Artificial Sequence: Synthetic oligonucleotide
  Sense strand starting at position 3764 of SEQ ID NO: 1241162
gaaugagaacaguguuagu

SEQ ID NO: 1251549 - RNA, 19 nt, Artificial Sequence
  Description of Artificial Sequence: Synthetic oligonucleotide
  Antisense strand to SEQ ID NO: 1251548
acuaacacuguucucauuc

SEQ ID NO: 1251550 - RNA, 19 nt, Artificial Sequence
  Description of Artificial Sequence: Synthetic oligonucleotide
  Sense strand starting at position 3824 of SEQ ID NO: 1241162
guguguauuuaagucauug

SEQ ID NO: 1251551 - RNA, 19 nt, Artificial Sequence
  Description of Artificial Sequence: Synthetic oligonucleotide
  Antisense strand to SEQ ID NO: 1251550
caaugacuuaaauacacac

SEQ ID NO: 1251552 - RNA, 19 nt, Artificial Sequence
  Description of Artificial Sequence: Synthetic oligonucleotide
  Sense strand starting at position 3829 of SEQ ID NO: 1241162
uauuuaagucauugcguuu

SEQ ID NO: 1251553 - RNA, 19 nt, Artificial Sequence
  Description of Artificial Sequence: Synthetic oligonucleotide
  Antisense strand to SEQ ID NO: 1251552
aaacgcaaugacuuaaaua

SEQ ID NO: 1251554 - RNA, 19 nt, Artificial Sequence
  Description of Artificial Sequence: Synthetic oligonucleotide
  Sense strand starting at position 3835 of SEQ ID NO: 1241162
agucauugcguuuaauuua

SEQ ID NO: 1251555 - RNA, 19 nt, Artificial Sequence
  Description of Artificial Sequence: Synthetic oligonucleotide
  Antisense strand to SEQ ID NO: 1251554
uaaauuaaacgcaaugacu

SEQ ID NO: 1251556 - RNA, 19 nt, Artificial Sequence
  Description of Artificial Sequence: Synthetic oligonucleotide
  Sense strand starting at position 3840 of SEQ ID NO: 1241162
uugcguuuaauuuagaggu

SEQ ID NO: 1251557 - RNA, 19 nt, Artificial Sequence
  Description of Artificial Sequence: Synthetic oligonucleotide
  Antisense strand to SEQ ID NO: 1251556
accucuaaauuaaacgcaa

SEQ ID NO: 1251558 - RNA, 19 nt, Artificial Sequence
  Description of Artificial Sequence: Synthetic oligonucleotide
  Sense strand starting at position 167 of SEQ ID NO: 1241163
gcauguaaccagugucaaa

SEQ ID NO: 1251559 - RNA, 19 nt, Artificial Sequence
  Description of Artificial Sequence: Synthetic oligonucleotide
  Antisense strand to SEQ ID NO: 1251558
uuugacacugguuacaugc

SEQ ID NO: 1251560 - RNA, 19 nt, Artificial Sequence
  Description of Artificial Sequence: Synthetic oligonucleotide
  Sense strand starting at position 208 of SEQ ID NO: 1241163
gaccgaguggaaugugaau

SEQ ID NO: 1251561 - RNA, 19 nt, Artificial Sequence
  Description of Artificial Sequence: Synthetic oligonucleotide
  Antisense strand to SEQ ID NO: 1251560
auucacauuccacucgguc

SEQ ID NO: 1251562 - RNA, 19 nt, Artificial Sequence
  Description of Artificial Sequence: Synthetic oligonucleotide
  Sense strand starting at position 215 of SEQ ID NO: 1241163
uggaaugugaauuguaaac

SEQ ID NO: 1251563 - RNA, 19 nt, Artificial Sequence
  Description of Artificial Sequence: Synthetic oligonucleotide
  Antisense strand to SEQ ID NO: 1251562
guuuacaauucacauucca

SEQ ID NO: 1251564 - RNA, 19 nt, Artificial Sequence
  Description of Artificial Sequence: Synthetic oligonucleotide
  Sense strand starting at position 253 of SEQ ID NO: 1241163
ccuggucucugggcagauu

SEQ ID NO: 1251565 - RNA, 19 nt, Artificial Sequence
  Description of Artificial Sequence: Synthetic oligonucleotide
  Antisense strand to SEQ ID NO: 1251564
aaucugcccagagaccagg

SEQ ID NO: 1251566 - RNA, 19 nt, Artificial Sequence
  Description of Artificial Sequence: Synthetic oligonucleotide
  Sense strand starting at position 264 of SEQ ID NO: 1241163
ggcagauucugccugaaga

SEQ ID NO: 1251567 - RNA, 19 nt, Artificial Sequence
  Description of Artificial Sequence: Synthetic oligonucleotide
  Antisense strand to SEQ ID NO: 1251566
ucuucaggcagaaucugcc

SEQ ID NO: 1251568 - RNA, 19 nt, Artificial Sequence
  Description of Artificial Sequence: Synthetic oligonucleotide
  Sense strand starting at position 265 of SEQ ID NO: 1241163
gcagauucugccugaagac

SEQ ID NO: 1251569 - RNA, 19 nt, Artificial Sequence
  Description of Artificial Sequence: Synthetic oligonucleotide
  Antisense strand to SEQ ID NO: 1251568
gucuucaggcagaaucugc

SEQ ID NO: 1251570 - RNA, 19 nt, Artificial Sequence
  Description of Artificial Sequence: Synthetic oligonucleotide
  Sense strand starting at position 295 of SEQ ID NO: 1241163
cuguauuuauuucgucaag

SEQ ID NO: 1251571 - RNA, 19 nt, Artificial Sequence
  Description of Artificial Sequence: Synthetic oligonucleotide
  Antisense strand to SEQ ID NO: 1251570
cuugacgaaauaaauacag

SEQ ID NO: 1251572 - RNA, 19 nt, Artificial Sequence
  Description of Artificial Sequence: Synthetic oligonucleotide
  Sense strand starting at position 349 of SEQ ID NO: 1241163
aggguuagcagggaucagu

SEQ ID NO: 1251573 - RNA, 19 nt, Artificial Sequence
  Description of Artificial Sequence: Synthetic oligonucleotide
  Antisense strand to SEQ ID NO: 1251572
acugaucccugcuaacccu

SEQ ID NO: 1251574 - RNA, 19 nt, Artificial Sequence
  Description of Artificial Sequence: Synthetic oligonucleotide
  Sense strand starting at position 352 of SEQ ID NO: 1241163
guuagcagggaucaguuua

SEQ ID NO: 1251575 - RNA, 19 nt, Artificial Sequence
  Description of Artificial Sequence: Synthetic oligonucleotide
  Antisense strand to SEQ ID NO: 1251574
uaaacugaucccugcuaac

SEQ ID NO: 1251576 - RNA, 19 nt, Artificial Sequence
  Description of Artificial Sequence: Synthetic oligonucleotide
  Sense strand starting at position 359 of SEQ ID NO: 1241163
gggaucaguuuaucuuguu

SEQ ID NO: 1251577 - RNA, 19 nt, Artificial Sequence
  Description of Artificial Sequence: Synthetic oligonucleotide
  Antisense strand to SEQ ID NO: 1251576
aacaagauaaacugauccc

SEQ ID NO: 1251578 - RNA, 19 nt, Artificial Sequence
  Description of Artificial Sequence: Synthetic oligonucleotide
  Sense strand starting at position 360 of SEQ ID NO: 1241163
ggaucaguuuaucuuguua

SEQ ID NO: 1251579 - RNA, 19 nt, Artificial Sequence
  Description of Artificial Sequence: Synthetic oligonucleotide
  Antisense strand to SEQ ID NO: 1251578
uaacaagauaaacugaucc

SEQ ID NO: 1251580 - RNA, 19 nt, Artificial Sequence
  Description of Artificial Sequence: Synthetic oligonucleotide
  Sense strand starting at position 371 of SEQ ID NO: 1241163
ucuuguuaaccauggaaau

SEQ ID NO: 1251581 - RNA, 19 nt, Artificial Sequence
  Description of Artificial Sequence: Synthetic oligonucleotide
  Antisense strand to SEQ ID NO: 1251580
auuuccaugguuaacaaga

SEQ ID NO: 1251582 - RNA, 19 nt, Artificial Sequence
  Description of Artificial Sequence: Synthetic oligonucleotide
  Sense strand starting at position 372 of SEQ ID NO: 1241163
cuuguuaaccauggaaauu

SEQ ID NO: 1251583 - RNA, 19 nt, Artificial Sequence
  Description of Artificial Sequence: Synthetic oligonucleotide
  Antisense strand to SEQ ID NO: 1251582
aauuuccaugguuaacaag

SEQ ID NO: 1251584 - RNA, 19 nt, Artificial Sequence
  Description of Artificial Sequence: Synthetic oligonucleotide
  Sense strand starting at position 427 of SEQ ID NO: 1241163
acaguucuucuccagucua

SEQ ID NO: 1251585 - RNA, 19 nt, Artificial Sequence
  Description of Artificial Sequence: Synthetic oligonucleotide
  Antisense strand to SEQ ID NO: 1251584
uagacuggagaagaacugu

SEQ ID NO: 1251586 - RNA, 19 nt, Artificial Sequence
  Description of Artificial Sequence: Synthetic oligonucleotide
  Sense strand starting at position 445 of SEQ ID NO: 1241163
agaaauaaauccuggaaag

SEQ ID NO: 1251587 - RNA, 19 nt, Artificial Sequence
  Description of Artificial Sequence: Synthetic oligonucleotide
  Antisense strand to SEQ ID NO: 1251586
cuuuccaggauuuauuucu

SEQ ID NO: 1251588 - RNA, 19 nt, Artificial Sequence
  Description of Artificial Sequence: Synthetic oligonucleotide
  Sense strand starting at position 457 of SEQ ID NO: 1241163
uggaaagccuccuuaguuu

SEQ ID NO: 1251589 - RNA, 19 nt, Artificial Sequence
  Description of Artificial Sequence: Synthetic oligonucleotide
  Antisense strand to SEQ ID NO: 1251588
aaacuaaggaggcuuucca

SEQ ID NO: 1251590 - RNA, 19 nt, Artificial Sequence
  Description of Artificial Sequence: Synthetic oligonucleotide
  Sense strand starting at position 1045 of SEQ ID NO: 1241163
uuuguucuggcucaagaga

SEQ ID NO: 1251591 - RNA, 19 nt, Artificial Sequence
  Description of Artificial Sequence: Synthetic oligonucleotide
  Antisense strand to SEQ ID NO: 1251590
ucucuugagccagaacaaa

SEQ ID NO: 1251592 - RNA, 19 nt, Artificial Sequence
  Description of Artificial Sequence: Synthetic oligonucleotide
  Sense strand starting at position 1344 of SEQ ID NO: 1241163
cgaggucaccggcaagaga

SEQ ID NO: 1251593 - RNA, 19 nt, Artificial Sequence
  Description of Artificial Sequence: Synthetic oligonucleotide
  Antisense strand to SEQ ID NO: 1251592
ucucuugccggugaccucg

SEQ ID NO: 1251594 - RNA, 19 nt, Artificial Sequence
  Description of Artificial Sequence: Synthetic oligonucleotide
  Sense strand starting at position 2372 of SEQ ID NO: 1241163
ugggcagaacgagguuuaa

SEQ ID NO: 1251595 - RNA, 19 nt, Artificial Sequence
  Description of Artificial Sequence: Synthetic oligonucleotide
  Antisense strand to SEQ ID NO: 1251594
uuaaaccucguucugccca

SEQ ID NO: 1251596 - RNA, 19 nt, Artificial Sequence
  Description of Artificial Sequence: Synthetic oligonucleotide
  Sense strand starting at position 2420 of SEQ ID NO: 1241163
gcaagauagugucuuugag

SEQ ID NO: 1251597 - RNA, 19 nt, Artificial Sequence
  Description of Artificial Sequence: Synthetic oligonucleotide
  Antisense strand to SEQ ID NO: 1251596
cucaaagacacuaucuugc

SEQ ID NO: 1251598 - RNA, 19 nt, Artificial Sequence
  Description of Artificial Sequence: Synthetic oligonucleotide
  Sense strand starting at position 2426 of SEQ ID NO: 1241163
uagugucuuugagccuaga

SEQ ID NO: 1251599 - RNA, 19 nt, Artificial Sequence
  Description of Artificial Sequence: Synthetic oligonucleotide
  Antisense strand to SEQ ID NO: 1251598
ucuaggcucaaagacacua

SEQ ID NO: 1251600 - RNA, 19 nt, Artificial Sequence
  Description of Artificial Sequence: Synthetic oligonucleotide
  Sense strand starting at position 2504 of SEQ ID NO: 1241163
gcacgcgguguccucaaua

SEQ ID NO: 1251601 - RNA, 19 nt, Artificial Sequence
  Description of Artificial Sequence: Synthetic oligonucleotide
  Antisense strand to SEQ ID NO: 1251600
uauugaggacaccgcgugc

SEQ ID NO: 1251602 - RNA, 19 nt, Artificial Sequence
  Description of Artificial Sequence: Synthetic oligonucleotide
  Sense strand starting at position 2509 of SEQ ID NO: 1241163
cgguguccucaauaaauga

SEQ ID NO: 1251603 - RNA, 19 nt, Artificial Sequence
  Description of Artificial Sequence: Synthetic oligonucleotide
  Antisense strand to SEQ ID NO: 1251602
ucauuuauugaggacaccg

SEQ ID NO: 1251604 - RNA, 19 nt, Artificial Sequence
  Description of Artificial Sequence: Synthetic oligonucleotide
  Sense strand starting at position 2530 of SEQ ID NO: 1241163
gcccuaacauggcuaauca

SEQ ID NO: 1251605 - RNA, 19 nt, Artificial Sequence
  Description of Artificial Sequence: Synthetic oligonucleotide
  Antisense strand to SEQ ID NO: 1251604
ugauuagccauguuagggc

SEQ ID NO: 1251606 - RNA, 19 nt, Artificial Sequence
  Description of Artificial Sequence: Synthetic oligonucleotide
  Sense strand starting at position 2568 of SEQ ID NO: 1241163
ugaguggugucuucgagga

SEQ ID NO: 1251607 - RNA, 19 nt, Artificial Sequence
  Description of Artificial Sequence: Synthetic oligonucleotide
  Antisense strand to SEQ ID NO: 1251606
uccucgaagacaccacuca

SEQ ID NO: 1251608 - RNA, 19 nt, Artificial Sequence
  Description of Artificial Sequence: Synthetic oligonucleotide
  Sense strand starting at position 2630 of SEQ ID NO: 1241163
agcucaaaccaguaucgaa

SEQ ID NO: 1251609 - RNA, 19 nt, Artificial Sequence
  Description of Artificial Sequence: Synthetic oligonucleotide
  Antisense strand to SEQ ID NO: 1251608
uucgauacugguuugagcu

SEQ ID NO: 1251610 - RNA, 19 nt, Artificial Sequence
  Description of Artificial Sequence: Synthetic oligonucleotide
  Sense strand starting at position 2821 of SEQ ID NO: 1241163
uaaggagucucagugagua

SEQ ID NO: 1251611 - RNA, 19 nt, Artificial Sequence
  Description of Artificial Sequence: Synthetic oligonucleotide
  Antisense strand to SEQ ID NO: 1251610
uacucacugagacuccuua

SEQ ID NO: 1251612 - RNA, 19 nt, Artificial Sequence
  Description of Artificial Sequence: Synthetic oligonucleotide
  Sense strand starting at position 2855 of SEQ ID NO: 1241163
ggugaugucucuuccaggu

SEQ ID NO: 1251613 - RNA, 19 nt, Artificial Sequence
  Description of Artificial Sequence: Synthetic oligonucleotide
  Antisense strand to SEQ ID NO: 1251612
accuggaagagacaucacc

SEQ ID NO: 1251614 - RNA, 19 nt, Artificial Sequence
  Description of Artificial Sequence: Synthetic oligonucleotide
  Sense strand starting at position 2859 of SEQ ID NO: 1241163
augucucuuccagguacuu

SEQ ID NO: 1251615 - RNA, 19 nt, Artificial Sequence
  Description of Artificial Sequence: Synthetic oligonucleotide
  Antisense strand to SEQ ID NO: 1251614
aaguaccuggaagagacau

SEQ ID NO: 1251616 - RNA, 19 nt, Artificial Sequence
  Description of Artificial Sequence: Synthetic oligonucleotide
  Sense strand starting at position 3065 of SEQ ID NO: 1241163
aguguuaucuuuccuguaa

SEQ ID NO: 1251617 - RNA, 19 nt, Artificial Sequence
  Description of Artificial Sequence: Synthetic oligonucleotide
  Antisense strand to SEQ ID NO: 1251616
uuacaggaaagauaacacu

SEQ ID NO: 1251618 - RNA, 19 nt, Artificial Sequence
  Description of Artificial Sequence: Synthetic oligonucleotide
  Sense strand starting at position 3519 of SEQ ID NO: 1241163
auaauauagccuugcauag

SEQ ID NO: 1251619 - RNA, 19 nt, Artificial Sequence
  Description of Artificial Sequence: Synthetic oligonucleotide
  Antisense strand to SEQ ID NO: 1251618
cuaugcaaggcuauauuau

SEQ ID NO: 1251620 - RNA, 19 nt, Artificial Sequence
  Description of Artificial Sequence: Synthetic oligonucleotide
  Sense strand starting at position 3701 of SEQ ID NO: 1241163
gcuuuaacccuuuguagaa

SEQ ID NO: 1251621 - RNA, 19 nt, Artificial Sequence
  Description of Artificial Sequence: Synthetic oligonucleotide
  Antisense strand to SEQ ID NO: 1251620
uucuacaaaggguuaaagc

SEQ ID NO: 1251622 - RNA, 19 nt, Artificial Sequence
  Description of Artificial Sequence: Synthetic oligonucleotide
  Sense strand starting at position 3769 of SEQ ID NO: 1241163
ucagcauuauuuguguagu

SEQ ID NO: 1251623 - RNA, 19 nt, Artificial Sequence
  Description of Artificial Sequence: Synthetic oligonucleotide
  Antisense strand to SEQ ID NO: 1251622
acuacacaaauaaugcuga

SEQ ID NO: 1251624 - RNA, 19 nt, Artificial Sequence
  Description of Artificial Sequence: Synthetic oligonucleotide
  Sense strand starting at position 3772 of SEQ ID NO: 1241163
gcauuauuuguguaguuga

SEQ ID NO: 1251625 - RNA, 19 nt, Artificial Sequence
  Description of Artificial Sequence: Synthetic oligonucleotide
  Antisense strand to SEQ ID NO: 1251624
ucaacuacacaaauaaugc

SEQ ID NO: 1251626 - RNA, 19 nt, Artificial Sequence
  Description of Artificial Sequence: Synthetic oligonucleotide
  Sense strand starting at position 3777 of SEQ ID NO: 1241163
auuuguguaguugacguau

SEQ ID NO: 1251627 - RNA, 19 nt, Artificial Sequence
  Description of Artificial Sequence: Synthetic oligonucleotide
  Antisense strand to SEQ ID NO: 1251626
auacgucaacuacacaaau

SEQ ID NO: 1251628 - RNA, 19 nt, Artificial Sequence
  Description of Artificial Sequence: Synthetic oligonucleotide
  Sense strand starting at position 3820 of SEQ ID NO: 1241163
uuccauuuguauguccuua

SEQ ID NO: 1251629 - RNA, 19 nt, Artificial Sequence
  Description of Artificial Sequence: Synthetic oligonucleotide
  Antisense strand to SEQ ID NO: 1251628
uaaggacauacaaauggaa

SEQ ID NO: 1251630 - RNA, 19 nt, Artificial Sequence
  Description of Artificial Sequence: Synthetic oligonucleotide
  Sense strand starting at position 3825 of SEQ ID NO: 1241163
uuuguauguccuuaucaca

SEQ ID NO: 1251631 - RNA, 19 nt, Artificial Sequence
  Description of Artificial Sequence: Synthetic oligonucleotide
  Antisense strand to SEQ ID NO: 1251630
ugugauaaggacauacaaa

SEQ ID NO: 1251632 - RNA, 19 nt, Artificial Sequence
  Description of Artificial Sequence: Synthetic oligonucleotide
  Sense strand starting at position 3856 of SEQ ID NO: 1241163
gcacuagcccuuugaugga

SEQ ID NO: 1251633 - RNA, 19 nt, Artificial Sequence
  Description of Artificial Sequence: Synthetic oligonucleotide
  Antisense strand to SEQ ID NO: 1251632
uccaucaaagggcuagugc

SEQ ID NO: 1251634 - RNA, 19 nt, Artificial Sequence
  Description of Artificial Sequence: Synthetic oligonucleotide
  Sense strand starting at position 3925 of SEQ ID NO: 1241163
gugaauacucucgaucuug

SEQ ID NO: 1251635 - RNA, 19 nt, Artificial Sequence
  Description of Artificial Sequence: Synthetic oligonucleotide
  Antisense strand to SEQ ID NO: 1251634
caagaucgagaguauucac

SEQ ID NO: 1251636 - RNA, 19 nt, Artificial Sequence
  Description of Artificial Sequence: Synthetic oligonucleotide
  Sense strand starting at position 3933 of SEQ ID NO: 1241163
ucucgaucuugucuuugga

SEQ ID NO: 1251637 - RNA, 19 nt, Artificial Sequence
  Description of Artificial Sequence: Synthetic oligonucleotide
  Antisense strand to SEQ ID NO: 1251636
uccaaagacaagaucgaga

SEQ ID NO: 1251638 - RNA, 19 nt, Artificial Sequence
  Description of Artificial Sequence: Synthetic oligonucleotide
  Sense strand starting at position 152 of SEQ ID NO: 1241164
agauguauuucccaagaug

SEQ ID NO: 1251639 - RNA, 19 nt, Artificial Sequence
  Description of Artificial Sequence: Synthetic oligonucleotide
  Antisense strand to SEQ ID NO: 1251638
caucuugggaaauacaucu

SEQ ID NO: 1251640 - RNA, 19 nt, Artificial Sequence
  Description of Artificial Sequence: Synthetic oligonucleotide
  Sense strand starting at position 572 of SEQ ID NO: 1241164
ugccuauuucugcauucga

SEQ ID NO: 1251641 - RNA, 19 nt, Artificial Sequence
  Description of Artificial Sequence: Synthetic oligonucleotide
  Antisense strand to SEQ ID NO: 1251640
ucgaaugcagaaauaggca

SEQ ID NO: 1251642 - RNA, 19 nt, Artificial Sequence
  Description of Artificial Sequence: Synthetic oligonucleotide
  Sense strand starting at position 677 of SEQ ID NO: 1241164
gggaguuaauacgugauaa

SEQ ID NO: 1251643 - RNA, 19 nt, Artificial Sequence
  Description of Artificial Sequence: Synthetic oligonucleotide
  Antisense strand to SEQ ID NO: 1251642
uuaucacguauuaacuccc

SEQ ID NO: 1251644 - RNA, 19 nt, Artificial Sequence
  Description of Artificial Sequence: Synthetic oligonucleotide
  Sense strand starting at position 678 of SEQ ID NO: 1241164
ggaguuaauacgugauaaa

SEQ ID NO: 1251645 - RNA, 19 nt, Artificial Sequence
  Description of Artificial Sequence: Synthetic oligonucleotide
  Antisense strand to SEQ ID NO: 1251644
uuuaucacguauuaacucc

SEQ ID NO: 1251646 - RNA, 19 nt, Artificial Sequence
  Description of Artificial Sequence: Synthetic oligonucleotide
  Sense strand starting at position 725 of SEQ ID NO: 1241164
guuccuacucugcgauaga

SEQ ID NO: 1251647 - RNA, 19 nt, Artificial Sequence
  Description of Artificial Sequence: Synthetic oligonucleotide
  Antisense strand to SEQ ID NO: 1251646
ucuaucgcagaguaggaac

SEQ ID NO: 1251648 - RNA, 19 nt, Artificial Sequence
  Description of Artificial Sequence: Synthetic oligonucleotide
  Sense strand starting at position 728 of SEQ ID NO: 1241164
ccuacucugcgauagauug

SEQ ID NO: 1251649 - RNA, 19 nt, Artificial Sequence
  Description of Artificial Sequence: Synthetic oligonucleotide
  Antisense strand to SEQ ID NO: 1251648
caaucuaucgcagaguagg

SEQ ID NO: 1251650 - RNA, 19 nt, Artificial Sequence
  Description of Artificial Sequence: Synthetic oligonucleotide
  Sense strand starting at position 755 of SEQ ID NO: 1241164
caaguaugucuguaguuuc

SEQ ID NO: 1251651 - RNA, 19 nt, Artificial Sequence
  Description of Artificial Sequence: Synthetic oligonucleotide
  Antisense strand to SEQ ID NO: 1251650
gaaacuacagacauacuug

SEQ ID NO: 1251652 - RNA, 19 nt, Artificial Sequence
  Description of Artificial Sequence: Synthetic oligonucleotide
  Sense strand starting at position 816 of SEQ ID NO: 1241164
gucuuauccuuucugaaga

SEQ ID NO: 1251653 - RNA, 19 nt, Artificial Sequence
  Description of Artificial Sequence: Synthetic oligonucleotide
  Antisense strand to SEQ ID NO: 1251652
ucuucagaaaggauaagac

SEQ ID NO: 1251654 - RNA, 19 nt, Artificial Sequence
  Description of Artificial Sequence: Synthetic oligonucleotide
  Sense strand starting at position 1212 of SEQ ID NO: 1241164
gagugucugccugucuagu

SEQ ID NO: 1251655 - RNA, 19 nt, Artificial Sequence
  Description of Artificial Sequence: Synthetic oligonucleotide
  Antisense strand to SEQ ID NO: 1251654
acuagacaggcagacacuc

SEQ ID NO: 1251656 - RNA, 19 nt, Artificial Sequence
  Description of Artificial Sequence: Synthetic oligonucleotide
  Sense strand starting at position 1297 of SEQ ID NO: 1241164
caggguuuggcacauaaua

SEQ ID NO: 1251657 - RNA, 19 nt, Artificial Sequence
  Description of Artificial Sequence: Synthetic oligonucleotide
  Antisense strand to SEQ ID NO: 1251656
uauuaugugccaaacccug

SEQ ID NO: 1251658 - RNA, 19 nt, Artificial Sequence
  Description of Artificial Sequence: Synthetic oligonucleotide
  Sense strand starting at position 1299 of SEQ ID NO: 1241164
ggguuuggcacauaauagu

SEQ ID NO: 1251659 - RNA, 19 nt, Artificial Sequence
  Description of Artificial Sequence: Synthetic oligonucleotide
  Antisense strand to SEQ ID NO: 1251658
acuauuaugugccaaaccc

SEQ ID NO: 1251660 - RNA, 19 nt, Artificial Sequence
  Description of Artificial Sequence: Synthetic oligonucleotide
  Sense strand starting at position 1346 of SEQ ID NO: 1241164
aaacgaaauagcgaugagu

SEQ ID NO: 1251661 - RNA, 19 nt, Artificial Sequence
  Description of Artificial Sequence: Synthetic oligonucleotide
  Antisense strand to SEQ ID NO: 1251660
acucaucgcuauuucguuu

SEQ ID NO: 1251662 - RNA, 19 nt, Artificial Sequence
  Description of Artificial Sequence: Synthetic oligonucleotide
  Sense strand starting at position 1348 of SEQ ID NO: 1241164
acgaaauagcgaugaguug

SEQ ID NO: 1251663 - RNA, 19 nt, Artificial Sequence
  Description of Artificial Sequence: Synthetic oligonucleotide
  Antisense strand to SEQ ID NO: 1251662
caacucaucgcuauuucgu

SEQ ID NO: 1251664 - RNA, 19 nt, Artificial Sequence
  Description of Artificial Sequence: Synthetic oligonucleotide
  Sense strand starting at position 1349 of SEQ ID NO: 1241164
cgaaauagcgaugaguugu

SEQ ID NO: 1251665 - RNA, 19 nt, Artificial Sequence
  Description of Artificial Sequence: Synthetic oligonucleotide
  Antisense strand to SEQ ID NO: 1251664
acaacucaucgcuauuucg

SEQ ID NO: 1251666 - RNA, 19 nt, Artificial Sequence
  Description of Artificial Sequence: Synthetic oligonucleotide
  Sense strand starting at position 1365 of SEQ ID NO: 1241164
uguggaaacgcuugaguag

SEQ ID NO: 1251667 - RNA, 19 nt, Artificial Sequence
  Description of Artificial Sequence: Synthetic oligonucleotide
  Antisense strand to SEQ ID NO: 1251666
cuacucaagcguuuccaca

SEQ ID NO: 1251668 - RNA, 19 nt, Artificial Sequence
  Description of Artificial Sequence: Synthetic oligonucleotide
  Sense strand starting at position 1366 of SEQ ID NO: 1241164
guggaaacgcuugaguaga

SEQ ID NO: 1251669 - RNA, 19 nt, Artificial Sequence
  Description of Artificial Sequence: Synthetic oligonucleotide
  Antisense strand to SEQ ID NO: 1251668
ucuacucaagcguuuccac

SEQ ID NO: 1251670 - RNA, 19 nt, Artificial Sequence
  Description of Artificial Sequence: Synthetic oligonucleotide
  Sense strand starting at position 1767 of SEQ ID NO: 1241164
guaccagagggucgaauaa

SEQ ID NO: 1251671 - RNA, 19 nt, Artificial Sequence
  Description of Artificial Sequence: Synthetic oligonucleotide
  Antisense strand to SEQ ID NO: 1251670
uuauucgacccucugguac

SEQ ID NO: 1251672 - RNA, 19 nt, Artificial Sequence
  Description of Artificial Sequence: Synthetic oligonucleotide
  Sense strand starting at position 1778 of SEQ ID NO: 1241164
ucgaauaauuccguuacca

SEQ ID NO: 1251673 - RNA, 19 nt, Artificial Sequence
  Description of Artificial Sequence: Synthetic oligonucleotide
  Antisense strand to SEQ ID NO: 1251672
ugguaacggaauuauucga

SEQ ID NO: 1251674 - RNA, 19 nt, Artificial Sequence
  Description of Artificial Sequence: Synthetic oligonucleotide
  Sense strand starting at position 1780 of SEQ ID NO: 1241164
gaauaauuccguuaccaug

SEQ ID NO: 1251675 - RNA, 19 nt, Artificial Sequence
  Description of Artificial Sequence: Synthetic oligonucleotide
  Antisense strand to SEQ ID NO: 1251674
caugguaacggaauuauuc

SEQ ID NO: 1251676 - RNA, 19 nt, Artificial Sequence
  Description of Artificial Sequence: Synthetic oligonucleotide
  Sense strand starting at position 2669 of SEQ ID NO: 1241164
agacaucuuugucccugau

SEQ ID NO: 1251677 - RNA, 19 nt, Artificial Sequence
  Description of Artificial Sequence: Synthetic oligonucleotide
  Antisense strand to SEQ ID NO: 1251676
aucagggacaaagaugucu

SEQ ID NO: 1251678 - RNA, 19 nt, Artificial Sequence
  Description of Artificial Sequence: Synthetic oligonucleotide
  Sense strand starting at position 2714 of SEQ ID NO: 1241164
uuuauuuauuagggaccga

SEQ ID NO: 1251679 - RNA, 19 nt, Artificial Sequence
  Description of Artificial Sequence: Synthetic oligonucleotide
  Antisense strand to SEQ ID NO: 1251678
ucggucccuaauaaauaaa

SEQ ID NO: 1251680 - RNA, 19 nt, Artificial Sequence
  Description of Artificial Sequence: Synthetic oligonucleotide
  Sense strand starting at position 2792 of SEQ ID NO: 1241164
acagcuaguuccucugcaa

SEQ ID NO: 1251681 - RNA, 19 nt, Artificial Sequence
  Description of Artificial Sequence: Synthetic oligonucleotide
  Antisense strand to SEQ ID NO: 1251680
uugcagaggaacuagcugu

SEQ ID NO: 1251682 - RNA, 19 nt, Artificial Sequence
  Description of Artificial Sequence: Synthetic oligonucleotide
  Sense strand starting at position 2795 of SEQ ID NO: 1241164
gcuaguuccucugcaauuu

SEQ ID NO: 1251683 - RNA, 19 nt, Artificial Sequence
  Description of Artificial Sequence: Synthetic oligonucleotide
  Antisense strand to SEQ ID NO: 1251682
aaauugcagaggaacuagc

SEQ ID NO: 1251684 - RNA, 19 nt, Artificial Sequence
  Description of Artificial Sequence: Synthetic oligonucleotide
  Sense strand starting at position 2807 of SEQ ID NO: 1241164
gcaauuuaguuggacaagu

SEQ ID NO: 1251685 - RNA, 19 nt, Artificial Sequence
  Description of Artificial Sequence: Synthetic oligonucleotide
  Antisense strand to SEQ ID NO: 1251684
acuuguccaacuaaauugc

SEQ ID NO: 1251686 - RNA, 19 nt, Artificial Sequence
  Description of Artificial Sequence: Synthetic oligonucleotide
  Sense strand starting at position 2968 of SEQ ID NO: 1241164
aaaggaucuguuuggcauu

SEQ ID NO: 1251687 - RNA, 19 nt, Artificial Sequence
  Description of Artificial Sequence: Synthetic oligonucleotide
  Antisense strand to SEQ ID NO: 1251686
aaugccaaacagauccuuu

SEQ ID NO: 1251688 - RNA, 19 nt, Artificial Sequence
  Description of Artificial Sequence: Synthetic oligonucleotide
  Sense strand starting at position 2985 of SEQ ID NO: 1241164
uuuggaagacguugugagu

SEQ ID NO: 1251689 - RNA, 19 nt, Artificial Sequence
  Description of Artificial Sequence: Synthetic oligonucleotide
  Antisense strand to SEQ ID NO: 1251688
acucacaacgucuuccaaa

SEQ ID NO: 1251690 - RNA, 19 nt, Artificial Sequence
  Description of Artificial Sequence: Synthetic oligonucleotide
  Sense strand starting at position 2991 of SEQ ID NO: 1241164
agacguugugagugagcaa

SEQ ID NO: 1251691 - RNA, 19 nt, Artificial Sequence
  Description of Artificial Sequence: Synthetic oligonucleotide
  Antisense strand to SEQ ID NO: 1251690
uugcucacucacaacgucu

SEQ ID NO: 1251692 - RNA, 19 nt, Artificial Sequence
  Description of Artificial Sequence: Synthetic oligonucleotide
  Sense strand starting at position 3022 of SEQ ID NO: 1241164
gugugaugugguguuuagu

SEQ ID NO: 1251693 - RNA, 19 nt, Artificial Sequence
  Description of Artificial Sequence: Synthetic oligonucleotide
  Antisense strand to SEQ ID NO: 1251692
acuaaacaccacaucacac

SEQ ID NO: 1251694 - RNA, 19 nt, Artificial Sequence
  Description of Artificial Sequence: Synthetic oligonucleotide
  Sense strand starting at position 3048 of SEQ ID NO: 1241164
ccuacacuucgagguacaa

SEQ ID NO: 1251695 - RNA, 19 nt, Artificial Sequence
  Description of Artificial Sequence: Synthetic oligonucleotide
  Antisense strand to SEQ ID NO: 1251694
uuguaccucgaaguguagg

SEQ ID NO: 1251696 - RNA, 19 nt, Artificial Sequence
  Description of Artificial Sequence: Synthetic oligonucleotide
  Sense strand starting at position 3107 of SEQ ID NO: 1241164
gagaauugguaggaagaag

SEQ ID NO: 1251697 - RNA, 19 nt, Artificial Sequence
  Description of Artificial Sequence: Synthetic oligonucleotide
  Antisense strand to SEQ ID NO: 1251696
cuucuuccuaccaauucuc

SEQ ID NO: 1251698 - RNA, 19 nt, Artificial Sequence
  Description of Artificial Sequence: Synthetic oligonucleotide
  Sense strand starting at position 3191 of SEQ ID NO: 1241164
ugugguaugaacugagauc

SEQ ID NO: 1251699 - RNA, 19 nt, Artificial Sequence
  Description of Artificial Sequence: Synthetic oligonucleotide
  Antisense strand to SEQ ID NO: 1251698
gaucucaguucauaccaca

SEQ ID NO: 1251700 - RNA, 19 nt, Artificial Sequence
  Description of Artificial Sequence: Synthetic oligonucleotide
  Sense strand starting at position 3225 of SEQ ID NO: 1241164
guuguugaccaagguuagu

SEQ ID NO: 1251701 - RNA, 19 nt, Artificial Sequence
  Description of Artificial Sequence: Synthetic oligonucleotide
  Antisense strand to SEQ ID NO: 1251700
acuaaccuuggucaacaac

SEQ ID NO: 1251702 - RNA, 19 nt, Artificial Sequence
  Description of Artificial Sequence: Synthetic oligonucleotide
  Sense strand starting at position 3238 of SEQ ID NO: 1241164
guuaguuuacacugcaaag

SEQ ID NO: 1251703 - RNA, 19 nt, Artificial Sequence
  Description of Artificial Sequence: Synthetic oligonucleotide
  Antisense strand to SEQ ID NO: 1251702
cuuugcaguguaaacuaac

SEQ ID NO: 1251704 - RNA, 19 nt, Artificial Sequence
  Description of Artificial Sequence: Synthetic oligonucleotide
  Sense strand starting at position 3250 of SEQ ID NO: 1241164
ugcaaagugcuagauuguu

SEQ ID NO: 1251705 - RNA, 19 nt, Artificial Sequence
  Description of Artificial Sequence: Synthetic oligonucleotide
  Antisense strand to SEQ ID NO: 1251704
aacaaucuagcacuuugca

SEQ ID NO: 1251706 - RNA, 19 nt, Artificial Sequence
  Description of Artificial Sequence: Synthetic oligonucleotide
  Sense strand starting at position 3255 of SEQ ID NO: 1241164
agugcuagauuguugaaua

SEQ ID NO: 1251707 - RNA, 19 nt, Artificial Sequence
  Description of Artificial Sequence: Synthetic oligonucleotide
  Antisense strand to SEQ ID NO: 1251706
uauucaacaaucuagcacu

SEQ ID NO: 1251708 - RNA, 19 nt, Artificial Sequence
  Description of Artificial Sequence: Synthetic oligonucleotide
  Sense strand starting at position 3498 of SEQ ID NO: 1241164
gaaagugugcguguuccca

SEQ ID NO: 1251709 - RNA, 19 nt, Artificial Sequence
  Description of Artificial Sequence: Synthetic oligonucleotide
  Antisense strand to SEQ ID NO: 1251708
ugggaacacgcacacuuuc

SEQ ID NO: 1251710 - RNA, 19 nt, Artificial Sequence
  Description of Artificial Sequence: Synthetic oligonucleotide
  Sense strand starting at position 3552 of SEQ ID NO: 1241164
aaaggcuuauuggaauaga

SEQ ID NO: 1251711 - RNA, 19 nt, Artificial Sequence
  Description of Artificial Sequence: Synthetic oligonucleotide
  Antisense strand to SEQ ID NO: 1251710
ucuauuccaauaagccuuu

SEQ ID NO: 1251712 - RNA, 19 nt, Artificial Sequence
  Description of Artificial Sequence: Synthetic oligonucleotide
  Sense strand starting at position 3618 of SEQ ID NO: 1241164
ccggaagccuccuuaucua

SEQ ID NO: 1251713 - RNA, 19 nt, Artificial Sequence
  Description of Artificial Sequence: Synthetic oligonucleotide
  Antisense strand to SEQ ID NO: 1251712
uagauaaggaggcuuccgg

SEQ ID NO: 1251714 - RNA, 19 nt, Artificial Sequence
  Description of Artificial Sequence: Synthetic oligonucleotide
  Sense strand starting at position 3874 of SEQ ID NO: 1241164
guguucuagagaugagguu

SEQ ID NO: 1251715 - RNA, 19 nt, Artificial Sequence
  Description of Artificial Sequence: Synthetic oligonucleotide
  Antisense strand to SEQ ID NO: 1251714
aaccucaucucuagaacac

SEQ ID NO: 1251716 - RNA, 19 nt, Artificial Sequence
  Description of Artificial Sequence: Synthetic oligonucleotide
  Sense strand starting at position 3875 of SEQ ID NO: 1241164
uguucuagagaugagguuu

SEQ ID NO: 1251717 - RNA, 19 nt, Artificial Sequence
  Description of Artificial Sequence: Synthetic oligonucleotide
  Antisense strand to SEQ ID NO: 1251716
aaaccucaucucuagaaca

SEQ ID NO: 1251718 - RNA, 19 nt, Artificial Sequence
  Description of Artificial Sequence: Synthetic oligonucleotide
  Sense strand starting at position 148 of SEQ ID NO: 1241165
gcggaaacgugagcccauu

SEQ ID NO: 1251719 - RNA, 19 nt, Artificial Sequence
  Description of Artificial Sequence: Synthetic oligonucleotide
  Antisense strand to SEQ ID NO: 1251718
aaugggcucacguuuccgc

SEQ ID NO: 1251720 - RNA, 19 nt, Artificial Sequence
  Description of Artificial Sequence: Synthetic oligonucleotide
  Sense strand starting at position 271 of SEQ ID NO: 1241165
ggaagugacaucugacucu

SEQ ID NO: 1251721 - RNA, 19 nt, Artificial Sequence
  Description of Artificial Sequence: Synthetic oligonucleotide
  Antisense strand to SEQ ID NO: 1251720
agagucagaugucacuucc

SEQ ID NO: 1251722 - RNA, 19 nt, Artificial Sequence
  Description of Artificial Sequence: Synthetic oligonucleotide
  Sense strand starting at position 291 of SEQ ID NO: 1241165
uuaagaugcuuccuggcua

SEQ ID NO: 1251723 - RNA, 19 nt, Artificial Sequence
  Description of Artificial Sequence: Synthetic oligonucleotide
  Antisense strand to SEQ ID NO: 1251722
uagccaggaagcaucuuaa

SEQ ID NO: 1251724 - RNA, 19 nt, Artificial Sequence
  Description of Artificial Sequence: Synthetic oligonucleotide
  Sense strand starting at position 594 of SEQ ID NO: 1241165
ggugcuuccucauaauuau

SEQ ID NO: 1251725 - RNA, 19 nt, Artificial Sequence
  Description of Artificial Sequence: Synthetic oligonucleotide
  Antisense strand to SEQ ID NO: 1251724
auaauuaugaggaagcacc

SEQ ID NO: 1251726 - RNA, 19 nt, Artificial Sequence
  Description of Artificial Sequence: Synthetic oligonucleotide
  Sense strand starting at position 1410 of SEQ ID NO: 1241165
gggaguucucaagggcagu

SEQ ID NO: 1251727 - RNA, 19 nt, Artificial Sequence
  Description of Artificial Sequence: Synthetic oligonucleotide
  Antisense strand to SEQ ID NO: 1251726
acugcccuugagaacuccc

SEQ ID NO: 1251728 - RNA, 19 nt, Artificial Sequence
  Description of Artificial Sequence: Synthetic oligonucleotide
  Sense strand starting at position 2042 of SEQ ID NO: 1241165
cccaguucucccugcaaga

SEQ ID NO: 1251729 - RNA, 19 nt, Artificial Sequence
  Description of Artificial Sequence: Synthetic oligonucleotide
  Antisense strand to SEQ ID NO: 1251728
ucuugcagggagaacuggg

SEQ ID NO: 1251730 - RNA, 19 nt, Artificial Sequence
  Description of Artificial Sequence: Synthetic oligonucleotide
  Sense strand starting at position 2044 of SEQ ID NO: 1241165
caguucucccugcaagagu

SEQ ID NO: 1251731 - RNA, 19 nt, Artificial Sequence
  Description of Artificial Sequence: Synthetic oligonucleotide
  Antisense strand to SEQ ID NO: 1251730
acucuugcagggagaacug

SEQ ID NO: 1251732 - RNA, 19 nt, Artificial Sequence
  Description of Artificial Sequence: Synthetic oligonucleotide
  Sense strand starting at position 2104 of SEQ ID NO: 1241165
aauccugaugccuggguga

SEQ ID NO: 1251733 - RNA, 19 nt, Artificial Sequence
  Description of Artificial Sequence: Synthetic oligonucleotide
  Antisense strand to SEQ ID NO: 1251732
ucacccaggcaucaggauu

SEQ ID NO: 1251734 - RNA, 19 nt, Artificial Sequence
  Description of Artificial Sequence: Synthetic oligonucleotide
  Sense strand starting at position 2106 of SEQ ID NO: 1241165
uccugaugccugggugaca

SEQ ID NO: 1251735 - RNA, 19 nt, Artificial Sequence
  Description of Artificial Sequence: Synthetic oligonucleotide
  Antisense strand to SEQ ID NO: 1251734
ugucacccaggcaucagga

SEQ ID NO: 1251736 - RNA, 19 nt, Artificial Sequence
  Description of Artificial Sequence: Synthetic oligonucleotide
  Sense strand starting at position 2136 of SEQ ID NO: 1241165
gcagauguaauugaucuag

SEQ ID NO: 1251737 - RNA, 19 nt, Artificial Sequence
  Description of Artificial Sequence: Synthetic oligonucleotide
  Antisense strand to SEQ ID NO: 1251736
cuagaucaauuacaucugc

SEQ ID NO: 1251738 - RNA, 19 nt, Artificial Sequence
  Description of Artificial Sequence: Synthetic oligonucleotide
  Sense strand starting at position 2228 of SEQ ID NO: 1241165
cgccaucugugcuguacaa

SEQ ID NO: 1251739 - RNA, 19 nt, Artificial Sequence
  Description of Artificial Sequence: Synthetic oligonucleotide
  Antisense strand to SEQ ID NO: 1251738
uuguacagcacagauggcg

SEQ ID NO: 1251740 - RNA, 19 nt, Artificial Sequence
  Description of Artificial Sequence: Synthetic oligonucleotide
  Sense strand starting at position 2230 of SEQ ID NO: 1241165
ccaucugugcuguacaaac

SEQ ID NO: 1251741 - RNA, 19 nt, Artificial Sequence
  Description of Artificial Sequence: Synthetic oligonucleotide
  Antisense strand to SEQ ID NO: 1251740
guuuguacagcacagaugg

SEQ ID NO: 1251742 - RNA, 19 nt, Artificial Sequence
  Description of Artificial Sequence: Synthetic oligonucleotide
  Sense strand starting at position 2289 of SEQ ID NO: 1241165
gcaggcuugauccagaaga

SEQ ID NO: 1251743 - RNA, 19 nt, Artificial Sequence
  Description of Artificial Sequence: Synthetic oligonucleotide
  Antisense strand to SEQ ID NO: 1251742
ucuucuggaucaagccugc

SEQ ID NO: 1251744 - RNA, 19 nt, Artificial Sequence
  Description of Artificial Sequence: Synthetic oligonucleotide
  Sense strand starting at position 2381 of SEQ ID NO: 1241165
ugugaauagcaagggugau

SEQ ID NO: 1251745 - RNA, 19 nt, Artificial Sequence
  Description of Artificial Sequence: Synthetic oligonucleotide
  Antisense strand to SEQ ID NO: 1251744
aucacccuugcuauucaca

SEQ ID NO: 1251746 - RNA, 19 nt, Artificial Sequence
  Description of Artificial Sequence: Synthetic oligonucleotide
  Sense strand starting at position 2434 of SEQ ID NO: 1241165
uuuagaggucuugguaagu

SEQ ID NO: 1251747 - RNA, 19 nt, Artificial Sequence
  Description of Artificial Sequence: Synthetic oligonucleotide
  Antisense strand to SEQ ID NO: 1251746
acuuaccaagaccucuaaa

SEQ ID NO: 1251748 - RNA, 19 nt, Artificial Sequence
  Description of Artificial Sequence: Synthetic oligonucleotide
  Sense strand starting at position 2484 of SEQ ID NO: 1241165
cuuggcugcucugacgauu

SEQ ID NO: 1251749 - RNA, 19 nt, Artificial Sequence
  Description of Artificial Sequence: Synthetic oligonucleotide
  Antisense strand to SEQ ID NO: 1251748
aaucgucagagcagccaag

SEQ ID NO: 1251750 - RNA, 19 nt, Artificial Sequence
  Description of Artificial Sequence: Synthetic oligonucleotide
  Sense strand starting at position 2490 of SEQ ID NO: 1241165
ugcucugacgauugacuga

SEQ ID NO: 1251751 - RNA, 19 nt, Artificial Sequence
  Description of Artificial Sequence: Synthetic oligonucleotide
  Antisense strand to SEQ ID NO: 1251750
ucagucaaucgucagagca

SEQ ID NO: 1251752 - RNA, 19 nt, Artificial Sequence
  Description of Artificial Sequence: Synthetic oligonucleotide
  Sense strand starting at position 2497 of SEQ ID NO: 1241165
acgauugacugagauaaua

SEQ ID NO: 1251753 - RNA, 19 nt, Artificial Sequence
  Description of Artificial Sequence: Synthetic oligonucleotide
  Antisense strand to SEQ ID NO: 1251752
uauuaucucagucaaucgu

SEQ ID NO: 1251754 - RNA, 19 nt, Artificial Sequence
  Description of Artificial Sequence: Synthetic oligonucleotide
  Sense strand starting at position 2505 of SEQ ID NO: 1241165
cugagauaauaagcauuau

SEQ ID NO: 1251755 - RNA, 19 nt, Artificial Sequence
  Description of Artificial Sequence: Synthetic oligonucleotide
  Antisense strand to SEQ ID NO: 1251754
auaaugcuuauuaucucag

SEQ ID NO: 1251756 - RNA, 19 nt, Artificial Sequence
  Description of Artificial Sequence: Synthetic oligonucleotide
  Sense strand starting at position 2516 of SEQ ID NO: 1241165
agcauuaugcacuagaaca

SEQ ID NO: 1251757 - RNA, 19 nt, Artificial Sequence
  Description of Artificial Sequence: Synthetic oligonucleotide
  Antisense strand to SEQ ID NO: 1251756
uguucuagugcauaaugcu

SEQ ID NO: 1251758 - RNA, 19 nt, Artificial Sequence
  Description of Artificial Sequence: Synthetic oligonucleotide
  Sense strand starting at position 2529 of SEQ ID NO: 1241165
agaacaguaucagcacuua

SEQ ID NO: 1251759 - RNA, 19 nt, Artificial Sequence
  Description of Artificial Sequence: Synthetic oligonucleotide
  Antisense strand to SEQ ID NO: 1251758
uaagugcugauacuguucu

SEQ ID NO: 1251760 - RNA, 19 nt, Artificial Sequence
  Description of Artificial Sequence: Synthetic oligonucleotide
  Sense strand starting at position 3384 of SEQ ID NO: 1241165
ucaauaauguuggaaugag

SEQ ID NO: 1251761 - RNA, 19 nt, Artificial Sequence
  Description of Artificial Sequence: Synthetic oligonucleotide
  Antisense strand to SEQ ID NO: 1251760
cucauuccaacauuauuga

SEQ ID NO: 1251762 - RNA, 19 nt, Artificial Sequence
  Description of Artificial Sequence: Synthetic oligonucleotide
  Sense strand starting at position 3612 of SEQ ID NO: 1241165
ugucuaaguugcucuguuu

SEQ ID NO: 1251763 - RNA, 19 nt, Artificial Sequence
  Description of Artificial Sequence: Synthetic oligonucleotide
  Antisense strand to SEQ ID NO: 1251762
aaacagagcaacuuagaca

SEQ ID NO: 1251764 - RNA, 19 nt, Artificial Sequence
  Description of Artificial Sequence: Synthetic oligonucleotide
  Sense strand starting at position 3632 of SEQ ID NO: 1241165
gugucauggugucauguuu

SEQ ID NO: 1251765 - RNA, 19 nt, Artificial Sequence
  Description of Artificial Sequence: Synthetic oligonucleotide
  Antisense strand to SEQ ID NO: 1251764
aaacaugacaccaugacac

SEQ ID NO: 1251766 - RNA, 19 nt, Artificial Sequence
  Description of Artificial Sequence: Synthetic oligonucleotide
  Sense strand starting at position 3639 of SEQ ID NO: 1241165
ggugucauguuuccagaga

SEQ ID NO: 1251767 - RNA, 19 nt, Artificial Sequence
  Description of Artificial Sequence: Synthetic oligonucleotide
  Antisense strand to SEQ ID NO: 1251766
ucucuggaaacaugacacc

SEQ ID NO: 1251768 - RNA, 19 nt, Artificial Sequence
  Description of Artificial Sequence: Synthetic oligonucleotide
  Sense strand starting at position 3640 of SEQ ID NO: 1241165
gugucauguuuccagagaa

SEQ ID NO: 1251769 - RNA, 19 nt, Artificial Sequence
  Description of Artificial Sequence: Synthetic oligonucleotide
  Antisense strand to SEQ ID NO: 1251768
uucucuggaaacaugacac

SEQ ID NO: 1251770 - RNA, 19 nt, Artificial Sequence
  Description of Artificial Sequence: Synthetic oligonucleotide
  Sense strand starting at position 3725 of SEQ ID NO: 1241165
ucugccaccuguuauguua

SEQ ID NO: 1251771 - RNA, 19 nt, Artificial Sequence
  Description of Artificial Sequence: Synthetic oligonucleotide
  Antisense strand to SEQ ID NO: 1251770
uaacauaacagguggcaga

SEQ ID NO: 1251772 - RNA, 19 nt, Artificial Sequence
  Description of Artificial Sequence: Synthetic oligonucleotide
  Sense strand starting at position 3727 of SEQ ID NO: 1241165
ugccaccuguuauguuaaa

SEQ ID NO: 1251773 - RNA, 19 nt, Artificial Sequence
  Description of Artificial Sequence: Synthetic oligonucleotide
  Antisense strand to SEQ ID NO: 1251772
uuuaacauaacagguggca

SEQ ID NO: 1251774 - RNA, 19 nt, Artificial Sequence
  Description of Artificial Sequence: Synthetic oligonucleotide
  Sense strand starting at position 3798 of SEQ ID NO: 1241165
aguguaauggugcgguguu

SEQ ID NO: 1251775 - RNA, 19 nt, Artificial Sequence
  Description of Artificial Sequence: Synthetic oligonucleotide
  Antisense strand to SEQ ID NO: 1251774
aacaccgcaccauuacacu

SEQ ID NO: 1251776 - RNA, 19 nt, Artificial Sequence
  Description of Artificial Sequence: Synthetic oligonucleotide
  Sense strand starting at position 3811 of SEQ ID NO: 1241165
gguguuggcucaccgcaau

SEQ ID NO: 1251777 - RNA, 19 nt, Artificial Sequence
  Description of Artificial Sequence: Synthetic oligonucleotide
  Antisense strand to SEQ ID NO: 1251776
auugcggugagccaacacc

SEQ ID NO: 1251778 - RNA, 19 nt, Artificial Sequence
  Description of Artificial Sequence: Synthetic oligonucleotide
  Sense strand starting at position 30 of SEQ ID NO: 1241166
cccaguugcuucuugcaca

SEQ ID NO: 1251779 - RNA, 19 nt, Artificial Sequence
  Description of Artificial Sequence: Synthetic oligonucleotide
  Antisense strand to SEQ ID NO: 1251778
ugugcaagaagcaacuggg

SEQ ID NO: 1251780 - RNA, 19 nt, Artificial Sequence
  Description of Artificial Sequence: Synthetic oligonucleotide
  Sense strand starting at position 31 of SEQ ID NO: 1241166
ccaguugcuucuugcacaa

SEQ ID NO: 1251781 - RNA, 19 nt, Artificial Sequence
  Description of Artificial Sequence: Synthetic oligonucleotide
  Antisense strand to SEQ ID NO: 1251780
uugugcaagaagcaacugg

SEQ ID NO: 1251782 - RNA, 19 nt, Artificial Sequence
  Description of Artificial Sequence: Synthetic oligonucleotide
  Sense strand starting at position 101 of SEQ ID NO: 1241166
aguauucuggauugagauc

SEQ ID NO: 1251783 - RNA, 19 nt, Artificial Sequence
  Description of Artificial Sequence: Synthetic oligonucleotide
  Antisense strand to SEQ ID NO: 1251782
gaucucaauccagaauacu

SEQ ID NO: 1251784 - RNA, 19 nt, Artificial Sequence
  Description of Artificial Sequence: Synthetic oligonucleotide
  Sense strand starting at position 187 of SEQ ID NO: 1241166
cuuggucuuccagagagcu

SEQ ID NO: 1251785 - RNA, 19 nt, Artificial Sequence
  Description of Artificial Sequence: Synthetic oligonucleotide
  Antisense strand to SEQ ID NO: 1251784
agcucucuggaagaccaag

SEQ ID NO: 1251786 - RNA, 19 nt, Artificial Sequence
  Description of Artificial Sequence: Synthetic oligonucleotide
  Sense strand starting at position 199 of SEQ ID NO: 1241166
gagagcugugccugaaugu

SEQ ID NO: 1251787 - RNA, 19 nt, Artificial Sequence
  Description of Artificial Sequence: Synthetic oligonucleotide
  Antisense strand to SEQ ID NO: 1251786
acauucaggcacagcucuc

SEQ ID NO: 1251788 - RNA, 19 nt, Artificial Sequence
  Description of Artificial Sequence: Synthetic oligonucleotide
  Sense strand starting at position 364 of SEQ ID NO: 1241166
cuuugaaagcuguaaagug

SEQ ID NO: 1251789 - RNA, 19 nt, Artificial Sequence
  Description of Artificial Sequence: Synthetic oligonucleotide
  Antisense strand to SEQ ID NO: 1251788
cacuuuacagcuuucaaag

SEQ ID NO: 1251790 - RNA, 19 nt, Artificial Sequence
  Description of Artificial Sequence: Synthetic oligonucleotide
  Sense strand starting at position 371 of SEQ ID NO: 1241166
agcuguaaaguguggcaua

SEQ ID NO: 1251791 - RNA, 19 nt, Artificial Sequence
  Description of Artificial Sequence: Synthetic oligonucleotide
  Antisense strand to SEQ ID NO: 1251790
uaugccacacuuuacagcu

SEQ ID NO: 1251792 - RNA, 19 nt, Artificial Sequence
  Description of Artificial Sequence: Synthetic oligonucleotide
  Sense strand starting at position 372 of SEQ ID NO: 1241166
gcuguaaaguguggcauaa

SEQ ID NO: 1251793 - RNA, 19 nt, Artificial Sequence
  Description of Artificial Sequence: Synthetic oligonucleotide
  Antisense strand to SEQ ID NO: 1251792
uuaugccacacuuuacagc

SEQ ID NO: 1251794 - RNA, 19 nt, Artificial Sequence
  Description of Artificial Sequence: Synthetic oligonucleotide
  Sense strand starting at position 374 of SEQ ID NO: 1241166
uguaaaguguggcauaaau

SEQ ID NO: 1251795 - RNA, 19 nt, Artificial Sequence
  Description of Artificial Sequence: Synthetic oligonucleotide
  Antisense strand to SEQ ID NO: 1251794
auuuaugccacacuuuaca

SEQ ID NO: 1251796 - RNA, 19 nt, Artificial Sequence
  Description of Artificial Sequence: Synthetic oligonucleotide
  Sense strand starting at position 376 of SEQ ID NO: 1241166
uaaaguguggcauaaauga

SEQ ID NO: 1251797 - RNA, 19 nt, Artificial Sequence
  Description of Artificial Sequence: Synthetic oligonucleotide
  Antisense strand to SEQ ID NO: 1251796
ucauuuaugccacacuuua

SEQ ID NO: 1251798 - RNA, 19 nt, Artificial Sequence
  Description of Artificial Sequence: Synthetic oligonucleotide
  Sense strand starting at position 391 of SEQ ID NO: 1241166
augaaauauugccuuaagg

SEQ ID NO: 1251799 - RNA, 19 nt, Artificial Sequence
  Description of Artificial Sequence: Synthetic oligonucleotide
  Antisense strand to SEQ ID NO: 1251798
ccuuaaggcaauauuucau

SEQ ID NO: 1251800 - RNA, 19 nt, Artificial Sequence
  Description of Artificial Sequence: Synthetic oligonucleotide
  Sense strand starting at position 501 of SEQ ID NO: 1241166
ggcugagaaaucugucaag

SEQ ID NO: 1251801 - RNA, 19 nt, Artificial Sequence
  Description of Artificial Sequence: Synthetic oligonucleotide
  Antisense strand to SEQ ID NO: 1251800
cuugacagauuucucagcc

SEQ ID NO: 1251802 - RNA, 19 nt, Artificial Sequence
  Description of Artificial Sequence: Synthetic oligonucleotide
  Sense strand starting at position 591 of SEQ ID NO: 1241166
agcauauaccugugcacuu

SEQ ID NO: 1251803 - RNA, 19 nt, Artificial Sequence
  Description of Artificial Sequence: Synthetic oligonucleotide
  Antisense strand to SEQ ID NO: 1251802
aagugcacagguauaugcu

SEQ ID NO: 1251804 - RNA, 19 nt, Artificial Sequence
  Description of Artificial Sequence: Synthetic oligonucleotide
  Sense strand starting at position 601 of SEQ ID NO: 1241166
ugugcacuuggacgagaau

SEQ ID NO: 1251805 - RNA, 19 nt, Artificial Sequence
  Description of Artificial Sequence: Synthetic oligonucleotide
  Antisense strand to SEQ ID NO: 1251804
auucucguccaagugcaca

SEQ ID NO: 1251806 - RNA, 19 nt, Artificial Sequence
  Description of Artificial Sequence: Synthetic oligonucleotide
  Sense strand starting at position 604 of SEQ ID NO: 1241166
gcacuuggacgagaaucau

SEQ ID NO: 1251807 - RNA, 19 nt, Artificial Sequence
  Description of Artificial Sequence: Synthetic oligonucleotide
  Antisense strand to SEQ ID NO: 1251806
augauucucguccaagugc

SEQ ID NO: 1251808 - RNA, 19 nt, Artificial Sequence
  Description of Artificial Sequence: Synthetic oligonucleotide
  Sense strand starting at position 610 of SEQ ID NO: 1241166
ggacgagaaucauuauuau

SEQ ID NO: 1251809 - RNA, 19 nt, Artificial Sequence
  Description of Artificial Sequence: Synthetic oligonucleotide
  Antisense strand to SEQ ID NO: 1251808
auaauaaugauucucgucc

SEQ ID NO: 1251810 - RNA, 19 nt, Artificial Sequence
  Description of Artificial Sequence: Synthetic oligonucleotide
  Sense strand starting at position 613 of SEQ ID NO: 1241166
cgagaaucauuauuaucaa

SEQ ID NO: 1251811 - RNA, 19 nt, Artificial Sequence
  Description of Artificial Sequence: Synthetic oligonucleotide
  Antisense strand to SEQ ID NO: 1251810
uugauaauaaugauucucg

SEQ ID NO: 1251812 - RNA, 19 nt, Artificial Sequence
  Description of Artificial Sequence: Synthetic oligonucleotide
  Sense strand starting at position 770 of SEQ ID NO: 1241166
gcggaaacgugagcccauu

SEQ ID NO: 1251813 - RNA, 19 nt, Artificial Sequence
  Description of Artificial Sequence: Synthetic oligonucleotide
  Antisense strand to SEQ ID NO: 1251812
aaugggcucacguuuccgc

SEQ ID NO: 1251814 - RNA, 19 nt, Artificial Sequence
  Description of Artificial Sequence: Synthetic oligonucleotide
  Sense strand starting at position 893 of SEQ ID NO: 1241166
ggaagugacaucugacucu

SEQ ID NO: 1251815 - RNA, 19 nt, Artificial Sequence
  Description of Artificial Sequence: Synthetic oligonucleotide
  Antisense strand to SEQ ID NO: 1251814
agagucagaugucacuucc

SEQ ID NO: 1251816 - RNA, 19 nt, Artificial Sequence
  Description of Artificial Sequence: Synthetic oligonucleotide
  Sense strand starting at position 913 of SEQ ID NO: 1241166
uuaagaugcuuccuggcua

SEQ ID NO: 1251817 - RNA, 19 nt, Artificial Sequence
  Description of Artificial Sequence: Synthetic oligonucleotide
  Antisense strand to SEQ ID NO: 1251816
uagccaggaagcaucuuaa

SEQ ID NO: 1251818 - RNA, 19 nt, Artificial Sequence
  Description of Artificial Sequence: Synthetic oligonucleotide
  Sense strand starting at position 1216 of SEQ ID NO: 1241166
ggugcuuccucauaauuau

SEQ ID NO: 1251819 - RNA, 19 nt, Artificial Sequence
  Description of Artificial Sequence: Synthetic oligonucleotide
  Antisense strand to SEQ ID NO: 1251818
auaauuaugaggaagcacc

SEQ ID NO: 1251820 - RNA, 19 nt, Artificial Sequence
  Description of Artificial Sequence: Synthetic oligonucleotide
  Sense strand starting at position 2032 of SEQ ID NO: 1241166
gggaguucucaagggcagu

SEQ ID NO: 1251821 - RNA, 19 nt, Artificial Sequence
  Description of Artificial Sequence: Synthetic oligonucleotide
  Antisense strand to SEQ ID NO: 1251820
acugcccuugagaacuccc

SEQ ID NO: 1251822 - RNA, 19 nt, Artificial Sequence
  Description of Artificial Sequence: Synthetic oligonucleotide
  Sense strand starting at position 2664 of SEQ ID NO: 1241166
cccaguucucccugcaaga

SEQ ID NO: 1251823 - RNA, 19 nt, Artificial Sequence
  Description of Artificial Sequence: Synthetic oligonucleotide
  Antisense strand to SEQ ID NO: 1251822
ucuugcagggagaacuggg

SEQ ID NO: 1251824 - RNA, 19 nt, Artificial Sequence
  Description of Artificial Sequence: Synthetic oligonucleotide
  Sense strand starting at position 2666 of SEQ ID NO: 1241166
caguucucccugcaagagu

SEQ ID NO: 1251825 - RNA, 19 nt, Artificial Sequence
  Description of Artificial Sequence: Synthetic oligonucleotide
  Antisense strand to SEQ ID NO: 1251824
acucuugcagggagaacug

SEQ ID NO: 1251826 - RNA, 19 nt, Artificial Sequence
  Description of Artificial Sequence: Synthetic oligonucleotide
  Sense strand starting at position 2726 of SEQ ID NO: 1241166
aauccugaugccuggguga

SEQ ID NO: 1251827 - RNA, 19 nt, Artificial Sequence
  Description of Artificial Sequence: Synthetic oligonucleotide
  Antisense strand to SEQ ID NO: 1251826
ucacccaggcaucaggauu

SEQ ID NO: 1251828 - RNA, 19 nt, Artificial Sequence
  Description of Artificial Sequence: Synthetic oligonucleotide
  Sense strand starting at position 2728 of SEQ ID NO: 1241166
uccugaugccugggugaca

SEQ ID NO: 1251829 - RNA, 19 nt, Artificial Sequence
  Description of Artificial Sequence: Synthetic oligonucleotide
  Antisense strand to SEQ ID NO: 1251828
ugucacccaggcaucagga

SEQ ID NO: 1251830 - RNA, 19 nt, Artificial Sequence
  Description of Artificial Sequence: Synthetic oligonucleotide
  Sense strand starting at position 2758 of SEQ ID NO: 1241166
gcagauguaauugaucuag

SEQ ID NO: 1251831 - RNA, 19 nt, Artificial Sequence
  Description of Artificial Sequence: Synthetic oligonucleotide
  Antisense strand to SEQ ID NO: 1251830
cuagaucaauuacaucugc

SEQ ID NO: 1251832 - RNA, 19 nt, Artificial Sequence
  Description of Artificial Sequence: Synthetic oligonucleotide
  Sense strand starting at position 2850 of SEQ ID NO: 1241166
cgccaucugugcuguacaa

SEQ ID NO: 1251833 - RNA, 19 nt, Artificial Sequence
  Description of Artificial Sequence: Synthetic oligonucleotide
  Antisense strand to SEQ ID NO: 1251832
uuguacagcacagauggcg

SEQ ID NO: 1251834 - RNA, 19 nt, Artificial Sequence
  Description of Artificial Sequence: Synthetic oligonucleotide
  Sense strand starting at position 2852 of SEQ ID NO: 1241166
ccaucugugcuguacaaac

SEQ ID NO: 1251835 - RNA, 19 nt, Artificial Sequence
  Description of Artificial Sequence: Synthetic oligonucleotide
  Antisense strand to SEQ ID NO: 1251834
guuuguacagcacagaugg

SEQ ID NO: 1251836 - RNA, 19 nt, Artificial Sequence
  Description of Artificial Sequence: Synthetic oligonucleotide
  Sense strand starting at position 2911 of SEQ ID NO: 1241166
gcaggcuugauccagaaga

SEQ ID NO: 1251837 - RNA, 19 nt, Artificial Sequence
  Description of Artificial Sequence: Synthetic oligonucleotide
  Antisense strand to SEQ ID NO: 1251836
ucuucuggaucaagccugc

SEQ ID NO: 1251838 - RNA, 19 nt, Artificial Sequence
  Description of Artificial Sequence: Synthetic oligonucleotide
  Sense strand starting at position 3003 of SEQ ID NO: 1241166
ugugaauagcaagggugau

SEQ ID NO: 1251839 - RNA, 19 nt, Artificial Sequence
  Description of Artificial Sequence: Synthetic oligonucleotide
  Antisense strand to SEQ ID NO: 1251838
aucacccuugcuauucaca

SEQ ID NO: 1251840 - RNA, 19 nt, Artificial Sequence
  Description of Artificial Sequence: Synthetic oligonucleotide
  Sense strand starting at position 3056 of SEQ ID NO: 1241166
uuuagaggucuugguaagu

SEQ ID NO: 1251841 - RNA, 19 nt, Artificial Sequence
  Description of Artificial Sequence: Synthetic oligonucleotide
  Antisense strand to SEQ ID NO: 1251840
acuuaccaagaccucuaaa

SEQ ID NO: 1251842 - RNA, 19 nt, Artificial Sequence
  Description of Artificial Sequence: Synthetic oligonucleotide
  Sense strand starting at position 3106 of SEQ ID NO: 1241166
cuuggcugcucugacgauu

SEQ ID NO: 1251843 - RNA, 19 nt, Artificial Sequence
  Description of Artificial Sequence: Synthetic oligonucleotide
  Antisense strand to SEQ ID NO: 1251842
aaucgucagagcagccaag

SEQ ID NO: 1251844 - RNA, 19 nt, Artificial Sequence
  Description of Artificial Sequence: Synthetic oligonucleotide
  Sense strand starting at position 3112 of SEQ ID NO: 1241166
ugcucugacgauugacuga

SEQ ID NO: 1251845 - RNA, 19 nt, Artificial Sequence
  Description of Artificial Sequence: Synthetic oligonucleotide
  Antisense strand to SEQ ID NO: 1251844
ucagucaaucgucagagca

SEQ ID NO: 1251846 - RNA, 19 nt, Artificial Sequence
  Description of Artificial Sequence: Synthetic oligonucleotide
  Sense strand starting at position 3119 of SEQ ID NO: 1241166
acgauugacugagauaaua

SEQ ID NO: 1251847 - RNA, 19 nt, Artificial Sequence
  Description of Artificial Sequence: Synthetic oligonucleotide
  Antisense strand to SEQ ID NO: 1251846
uauuaucucagucaaucgu

SEQ ID NO: 1251848 - RNA, 19 nt, Artificial Sequence
  Description of Artificial Sequence: Synthetic oligonucleotide
  Sense strand starting at position 3127 of SEQ ID NO: 1241166
cugagauaauaagcauuau

SEQ ID NO: 1251849 - RNA, 19 nt, Artificial Sequence
  Description of Artificial Sequence: Synthetic oligonucleotide
  Antisense strand to SEQ ID NO: 1251848
auaaugcuuauuaucucag

SEQ ID NO: 1251850 - RNA, 19 nt, Artificial Sequence
  Description of Artificial Sequence: Synthetic oligonucleotide
  Sense strand starting at position 3138 of SEQ ID NO: 1241166
agcauuaugcacuagaaca

SEQ ID NO: 1251851 - RNA, 19 nt, Artificial Sequence
  Description of Artificial Sequence: Synthetic oligonucleotide
  Antisense strand to SEQ ID NO: 1251850
uguucuagugcauaaugcu

SEQ ID NO: 1251852 - RNA, 19 nt, Artificial Sequence
  Description of Artificial Sequence: Synthetic oligonucleotide
  Sense strand starting at position 3151 of SEQ ID NO: 1241166
agaacaguaucagcacuua

SEQ ID NO: 1251853 - RNA, 19 nt, Artificial Sequence
  Description of Artificial Sequence: Synthetic oligonucleotide
  Antisense strand to SEQ ID NO: 1251852
uaagugcugauacuguucu

SEQ ID NO: 1251854 - RNA, 19 nt, Artificial Sequence
  Description of Artificial Sequence: Synthetic oligonucleotide
  Sense strand starting at position 95 of SEQ ID NO: 1241167
cccaguugcuucuugcaca

SEQ ID NO: 1251855 - RNA, 19 nt, Artificial Sequence
  Description of Artificial Sequence: Synthetic oligonucleotide
  Antisense strand to SEQ ID NO: 1251854
ugugcaagaagcaacuggg

SEQ ID NO: 1251856 - RNA, 19 nt, Artificial Sequence
  Description of Artificial Sequence: Synthetic oligonucleotide
  Sense strand starting at position 96 of SEQ ID NO: 1241167
ccaguugcuucuugcacaa

SEQ ID NO: 1251857 - RNA, 19 nt, Artificial Sequence
  Description of Artificial Sequence: Synthetic oligonucleotide
  Antisense strand to SEQ ID NO: 1251856
uugugcaagaagcaacugg

SEQ ID NO: 1251858 - RNA, 19 nt, Artificial Sequence
  Description of Artificial Sequence: Synthetic oligonucleotide
  Sense strand starting at position 166 of SEQ ID NO: 1241167
aguauucuggauugagauc

SEQ ID NO: 1251859 - RNA, 19 nt, Artificial Sequence
  Description of Artificial Sequence: Synthetic oligonucleotide
  Antisense strand to SEQ ID NO: 1251858
gaucucaauccagaauacu

SEQ ID NO: 1251860 - RNA, 19 nt, Artificial Sequence
  Description of Artificial Sequence: Synthetic oligonucleotide
  Sense strand starting at position 252 of SEQ ID NO: 1241167
cuuggucuuccagagagcu

SEQ ID NO: 1251861 - RNA, 19 nt, Artificial Sequence
  Description of Artificial Sequence: Synthetic oligonucleotide
  Antisense strand to SEQ ID NO: 1251860
agcucucuggaagaccaag

SEQ ID NO: 1251862 - RNA, 19 nt, Artificial Sequence
  Description of Artificial Sequence: Synthetic oligonucleotide
  Sense strand starting at position 264 of SEQ ID NO: 1241167
gagagcugugccugaaugu

SEQ ID NO: 1251863 - RNA, 19 nt, Artificial Sequence
  Description of Artificial Sequence: Synthetic oligonucleotide
  Antisense strand to SEQ ID NO: 1251862
acauucaggcacagcucuc

SEQ ID NO: 1251864 - RNA, 19 nt, Artificial Sequence
  Description of Artificial Sequence: Synthetic oligonucleotide
  Sense strand starting at position 429 of SEQ ID NO: 1241167
cuuugaaagcuguaaagug

SEQ ID NO: 1251865 - RNA, 19 nt, Artificial Sequence
  Description of Artificial Sequence: Synthetic oligonucleotide
  Antisense strand to SEQ ID NO: 1251864
cacuuuacagcuuucaaag

SEQ ID NO: 1251866 - RNA, 19 nt, Artificial Sequence
  Description of Artificial Sequence: Synthetic oligonucleotide
  Sense strand starting at position 436 of SEQ ID NO: 1241167
agcuguaaaguguggcaua

SEQ ID NO: 1251867 - RNA, 19 nt, Artificial Sequence
  Description of Artificial Sequence: Synthetic oligonucleotide
  Antisense strand to SEQ ID NO: 1251866
uaugccacacuuuacagcu

SEQ ID NO: 1251868 - RNA, 19 nt, Artificial Sequence
  Description of Artificial Sequence: Synthetic oligonucleotide
  Sense strand starting at position 437 of SEQ ID NO: 1241167
gcuguaaaguguggcauaa

SEQ ID NO: 1251869 - RNA, 19 nt, Artificial Sequence
  Description of Artificial Sequence: Synthetic oligonucleotide
  Antisense strand to SEQ ID NO: 1251868
uuaugccacacuuuacagc

SEQ ID NO: 1251870 - RNA, 19 nt, Artificial Sequence
  Description of Artificial Sequence: Synthetic oligonucleotide
  Sense strand starting at position 439 of SEQ ID NO: 1241167
uguaaaguguggcauaaau

SEQ ID NO: 1251871 - RNA, 19 nt, Artificial Sequence
  Description of Artificial Sequence: Synthetic oligonucleotide
  Antisense strand to SEQ ID NO: 1251870
auuuaugccacacuuuaca

SEQ ID NO: 1251872 - RNA, 19 nt, Artificial Sequence
  Description of Artificial Sequence: Synthetic oligonucleotide
  Sense strand starting at position 441 of SEQ ID NO: 1241167
uaaaguguggcauaaauga

SEQ ID NO: 1251873 - RNA, 19 nt, Artificial Sequence
  Description of Artificial Sequence: Synthetic oligonucleotide
  Antisense strand to SEQ ID NO: 1251872
ucauuuaugccacacuuua

SEQ ID NO: 1251874 - RNA, 19 nt, Artificial Sequence
  Description of Artificial Sequence: Synthetic oligonucleotide
  Sense strand starting at position 456 of SEQ ID NO: 1241167
augaaauauugccuuaagg

SEQ ID NO: 1251875 - RNA, 19 nt, Artificial Sequence
  Description of Artificial Sequence: Synthetic oligonucleotide
  Antisense strand to SEQ ID NO: 1251874
ccuuaaggcaauauuucau

SEQ ID NO: 1251876 - RNA, 19 nt, Artificial Sequence
  Description of Artificial Sequence: Synthetic oligonucleotide
  Sense strand starting at position 566 of SEQ ID NO: 1241167
ggcugagaaaucugucaag

SEQ ID NO: 1251877 - RNA, 19 nt, Artificial Sequence
  Description of Artificial Sequence: Synthetic oligonucleotide
  Antisense strand to SEQ ID NO: 1251876
cuugacagauuucucagcc

SEQ ID NO: 1251878 - RNA, 19 nt, Artificial Sequence
  Description of Artificial Sequence: Synthetic oligonucleotide
  Sense strand starting at position 656 of SEQ ID NO: 1241167
agcauauaccugugcacuu

SEQ ID NO: 1251879 - RNA, 19 nt, Artificial Sequence
  Description of Artificial Sequence: Synthetic oligonucleotide
  Antisense strand to SEQ ID NO: 1251878
aagugcacagguauaugcu

SEQ ID NO: 1251880 - RNA, 19 nt, Artificial Sequence
  Description of Artificial Sequence: Synthetic oligonucleotide
  Sense strand starting at position 666 of SEQ ID NO: 1241167
ugugcacuuggacgagaau

SEQ ID NO: 1251881 - RNA, 19 nt, Artificial Sequence
  Description of Artificial Sequence: Synthetic oligonucleotide
  Antisense strand to SEQ ID NO: 1251880
auucucguccaagugcaca

SEQ ID NO: 1251882 - RNA, 19 nt, Artificial Sequence
  Description of Artificial Sequence: Synthetic oligonucleotide
  Sense strand starting at position 669 of SEQ ID NO: 1241167
gcacuuggacgagaaucau

SEQ ID NO: 1251883 - RNA, 19 nt, Artificial Sequence
  Description of Artificial Sequence: Synthetic oligonucleotide
  Antisense strand to SEQ ID NO: 1251882
augauucucguccaagugc

SEQ ID NO: 1251884 - RNA, 19 nt, Artificial Sequence
  Description of Artificial Sequence: Synthetic oligonucleotide
  Sense strand starting at position 675 of SEQ ID NO: 1241167
ggacgagaaucauuauuau

SEQ ID NO: 1251885 - RNA, 19 nt, Artificial Sequence
  Description of Artificial Sequence: Synthetic oligonucleotide
  Antisense strand to SEQ ID NO: 1251884
auaauaaugauucucgucc

SEQ ID NO: 1251886 - RNA, 19 nt, Artificial Sequence
  Description of Artificial Sequence: Synthetic oligonucleotide
  Sense strand starting at position 678 of SEQ ID NO: 1241167
cgagaaucauuauuaucaa

SEQ ID NO: 1251887 - RNA, 19 nt, Artificial Sequence
  Description of Artificial Sequence: Synthetic oligonucleotide
  Antisense strand to SEQ ID NO: 1251886
uugauaauaaugauucucg

SEQ ID NO: 1251888 - RNA, 19 nt, Artificial Sequence
  Description of Artificial Sequence: Synthetic oligonucleotide
  Sense strand starting at position 835 of SEQ ID NO: 1241167
gcggaaacgugagcccauu

SEQ ID NO: 1251889 - RNA, 19 nt, Artificial Sequence
  Description of Artificial Sequence: Synthetic oligonucleotide
  Antisense strand to SEQ ID NO: 1251888
aaugggcucacguuuccgc

SEQ ID NO: 1251890 - RNA, 19 nt, Artificial Sequence
  Description of Artificial Sequence: Synthetic oligonucleotide
  Sense strand starting at position 958 of SEQ ID NO: 1241167
ggaagugacaucugacucu

SEQ ID NO: 1251891 - RNA, 19 nt, Artificial Sequence
  Description of Artificial Sequence: Synthetic oligonucleotide
  Antisense strand to SEQ ID NO: 1251890
agagucagaugucacuucc

SEQ ID NO: 1251892 - RNA, 19 nt, Artificial Sequence
  Description of Artificial Sequence: Synthetic oligonucleotide
  Sense strand starting at position 978 of SEQ ID NO: 1241167
uuaagaugcuuccuggcua

SEQ ID NO: 1251893 - RNA, 19 nt, Artificial Sequence
  Description of Artificial Sequence: Synthetic oligonucleotide
  Antisense strand to SEQ ID NO: 1251892
uagccaggaagcaucuuaa

SEQ ID NO: 1251894 - RNA, 19 nt, Artificial Sequence
  Description of Artificial Sequence: Synthetic oligonucleotide
  Sense strand starting at position 1281 of SEQ ID NO: 1241167
ggugcuuccucauaauuau

SEQ ID NO: 1251895 - RNA, 19 nt, Artificial Sequence
  Description of Artificial Sequence: Synthetic oligonucleotide
  Antisense strand to SEQ ID NO: 1251894
auaauuaugaggaagcacc

SEQ ID NO: 1251896 - RNA, 19 nt, Artificial Sequence
  Description of Artificial Sequence: Synthetic oligonucleotide
  Sense strand starting at position 2097 of SEQ ID NO: 1241167
gggaguucucaagggcagu

SEQ ID NO: 1251897 - RNA, 19 nt, Artificial Sequence
  Description of Artificial Sequence: Synthetic oligonucleotide
  Antisense strand to SEQ ID NO: 1251896
acugcccuugagaacuccc

SEQ ID NO: 1251898 - RNA, 19 nt, Artificial Sequence
  Description of Artificial Sequence: Synthetic oligonucleotide
  Sense strand starting at position 2729 of SEQ ID NO: 1241167
cccaguucucccugcaaga

SEQ ID NO: 1251899 - RNA, 19 nt, Artificial Sequence
  Description of Artificial Sequence: Synthetic oligonucleotide
  Antisense strand to SEQ ID NO: 1251898
ucuugcagggagaacuggg

SEQ ID NO: 1251900 - RNA, 19 nt, Artificial Sequence
  Description of Artificial Sequence: Synthetic oligonucleotide
  Sense strand starting at position 2731 of SEQ ID NO: 1241167
caguucucccugcaagagu

SEQ ID NO: 1251901 - RNA, 19 nt, Artificial Sequence
  Description of Artificial Sequence: Synthetic oligonucleotide
  Antisense strand to SEQ ID NO: 1251900
acucuugcagggagaacug

SEQ ID NO: 1251902 - RNA, 19 nt, Artificial Sequence
  Description of Artificial Sequence: Synthetic oligonucleotide
  Sense strand starting at position 2791 of SEQ ID NO: 1241167
aauccugaugccuggguga

SEQ ID NO: 1251903 - RNA, 19 nt, Artificial Sequence
  Description of Artificial Sequence: Synthetic oligonucleotide
  Antisense strand to SEQ ID NO: 1251902
ucacccaggcaucaggauu

SEQ ID NO: 1251904 - RNA, 19 nt, Artificial Sequence
  Description of Artificial Sequence: Synthetic oligonucleotide
  Sense strand starting at position 2793 of SEQ ID NO: 1241167
uccugaugccugggugaca

SEQ ID NO: 1251905 - RNA, 19 nt, Artificial Sequence
  Description of Artificial Sequence: Synthetic oligonucleotide
  Antisense strand to SEQ ID NO: 1251904
ugucacccaggcaucagga

SEQ ID NO: 1251906 - RNA, 19 nt, Artificial Sequence
  Description of Artificial Sequence: Synthetic oligonucleotide
  Sense strand starting at position 2823 of SEQ ID NO: 1241167
gcagauguaauugaucuag

SEQ ID NO: 1251907 - RNA, 19 nt, Artificial Sequence
  Description of Artificial Sequence: Synthetic oligonucleotide
  Antisense strand to SEQ ID NO: 1251906
cuagaucaauuacaucugc

SEQ ID NO: 1251908 - RNA, 19 nt, Artificial Sequence
  Description of Artificial Sequence: Synthetic oligonucleotide
  Sense strand starting at position 2915 of SEQ ID NO: 1241167
cgccaucugugcuguacaa

SEQ ID NO: 1251909 - RNA, 19 nt, Artificial Sequence
  Description of Artificial Sequence: Synthetic oligonucleotide
  Antisense strand to SEQ ID NO: 1251908
uuguacagcacagauggcg

SEQ ID NO: 1251910 - RNA, 19 nt, Artificial Sequence
  Description of Artificial Sequence: Synthetic oligonucleotide
  Sense strand starting at position 2917 of SEQ ID NO: 1241167
ccaucugugcuguacaaac

SEQ ID NO: 1251911 - RNA, 19 nt, Artificial Sequence
  Description of Artificial Sequence: Synthetic oligonucleotide
  Antisense strand to SEQ ID NO: 1251910
guuuguacagcacagaugg

SEQ ID NO: 1251912 - RNA, 19 nt, Artificial Sequence
  Description of Artificial Sequence: Synthetic oligonucleotide
  Sense strand starting at position 2976 of SEQ ID NO: 1241167
gcaggcuugauccagaaga

SEQ ID NO: 1251913 - RNA, 19 nt, Artificial Sequence
  Description of Artificial Sequence: Synthetic oligonucleotide
  Antisense strand to SEQ ID NO: 1251912
ucuucuggaucaagccugc

SEQ ID NO: 1251914 - RNA, 19 nt, Artificial Sequence
  Description of Artificial Sequence: Synthetic oligonucleotide
  Sense strand starting at position 3068 of SEQ ID NO: 1241167
ugugaauagcaagggugau

SEQ ID NO: 1251915 - RNA, 19 nt, Artificial Sequence
  Description of Artificial Sequence: Synthetic oligonucleotide
  Antisense strand to SEQ ID NO: 1251914
aucacccuugcuauucaca

SEQ ID NO: 1251916 - RNA, 19 nt, Artificial Sequence
  Description of Artificial Sequence: Synthetic oligonucleotide
  Sense strand starting at position 3121 of SEQ ID NO: 1241167
uuuagaggucuugguaagu

SEQ ID NO: 1251917 - RNA, 19 nt, Artificial Sequence
  Description of Artificial Sequence: Synthetic oligonucleotide
  Antisense strand to SEQ ID NO: 1251916
acuuaccaagaccucuaaa

SEQ ID NO: 1251918 - RNA, 19 nt, Artificial Sequence
  Description of Artificial Sequence: Synthetic oligonucleotide
  Sense strand starting at position 3171 of SEQ ID NO: 1241167
cuuggcugcucugacgauu

SEQ ID NO: 1251919 - RNA, 19 nt, Artificial Sequence
  Description of Artificial Sequence: Synthetic oligonucleotide
  Antisense strand to SEQ ID NO: 1251918
aaucgucagagcagccaag

SEQ ID NO: 1251920 - RNA, 19 nt, Artificial Sequence
  Description of Artificial Sequence: Synthetic oligonucleotide
  Sense strand starting at position 3177 of SEQ ID NO: 1241167
ugcucugacgauugacuga

SEQ ID NO: 1251921 - RNA, 19 nt, Artificial Sequence
  Description of Artificial Sequence: Synthetic oligonucleotide
  Antisense strand to SEQ ID NO: 1251920
ucagucaaucgucagagca

SEQ ID NO: 1251922 - RNA, 19 nt, Artificial Sequence
  Description of Artificial Sequence: Synthetic oligonucleotide
  Sense strand starting at position 3184 of SEQ ID NO: 1241167
acgauugacugagauaaua

SEQ ID NO: 1251923 - RNA, 19 nt, Artificial Sequence
  Description of Artificial Sequence: Synthetic oligonucleotide
  Antisense strand to SEQ ID NO: 1251922
uauuaucucagucaaucgu

SEQ ID NO: 1251924 - RNA, 19 nt, Artificial Sequence
  Description of Artificial Sequence: Synthetic oligonucleotide
  Sense strand starting at position 3192 of SEQ ID NO: 1241167
cugagauaauaagcauuau

SEQ ID NO: 1251925 - RNA, 19 nt, Artificial Sequence
  Description of Artificial Sequence: Synthetic oligonucleotide
  Antisense strand to SEQ ID NO: 1251924
auaaugcuuauuaucucag

SEQ ID NO: 1251926 - RNA, 19 nt, Artificial Sequence
  Description of Artificial Sequence: Synthetic oligonucleotide
  Sense strand starting at position 3203 of SEQ ID NO: 1241167
agcauuaugcacuagaaca

SEQ ID NO: 1251927 - RNA, 19 nt, Artificial Sequence
  Description of Artificial Sequence: Synthetic oligonucleotide
  Antisense strand to SEQ ID NO: 1251926
uguucuagugcauaaugcu

SEQ ID NO: 1251928 - RNA, 19 nt, Artificial Sequence
  Description of Artificial Sequence: Synthetic oligonucleotide
  Sense strand starting at position 3216 of SEQ ID NO: 1241167
agaacaguaucagcacuua

SEQ ID NO: 1251929 - RNA, 19 nt, Artificial Sequence
  Description of Artificial Sequence: Synthetic oligonucleotide
  Antisense strand to SEQ ID NO: 1251928
uaagugcugauacuguucu

SEQ ID NO: 1251930 - RNA, 19 nt, Artificial Sequence
  Description of Artificial Sequence: Synthetic oligonucleotide
  Sense strand starting at position 263 of SEQ ID NO: 1241168
ucagauauauguucuugug

SEQ ID NO: 1251931 - RNA, 19 nt, Artificial Sequence
  Description of Artificial Sequence: Synthetic oligonucleotide
  Antisense strand to SEQ ID NO: 1251930
cacaagaacauauaucuga

SEQ ID NO: 1251932 - RNA, 19 nt, Artificial Sequence
  Description of Artificial Sequence: Synthetic oligonucleotide
  Sense strand starting at position 265 of SEQ ID NO: 1241168
agauauauguucuugugga

SEQ ID NO: 1251933 - RNA, 19 nt, Artificial Sequence
  Description of Artificial Sequence: Synthetic oligonucleotide
  Antisense strand to SEQ ID NO: 1251932
uccacaagaacauauaucu

SEQ ID NO: 1251934 - RNA, 19 nt, Artificial Sequence
  Description of Artificial Sequence: Synthetic oligonucleotide
  Sense strand starting at position 397 of SEQ ID NO: 1241168
auacuuacugguuguguga

SEQ ID NO: 1251935 - RNA, 19 nt, Artificial Sequence
  Description of Artificial Sequence: Synthetic oligonucleotide
  Antisense strand to SEQ ID NO: 1251934
ucacacaaccaguaaguau

SEQ ID NO: 1251936 - RNA, 19 nt, Artificial Sequence
  Description of Artificial Sequence: Synthetic oligonucleotide
  Sense strand starting at position 408 of SEQ ID NO: 1241168
uugugugaacuugggauaa

SEQ ID NO: 1251937 - RNA, 19 nt, Artificial Sequence
  Description of Artificial Sequence: Synthetic oligonucleotide
  Antisense strand to SEQ ID NO: 1251936
uuaucccaaguucacacaa

SEQ ID NO: 1251938 - RNA, 19 nt, Artificial Sequence
  Description of Artificial Sequence: Synthetic oligonucleotide
  Sense strand starting at position 615 of SEQ ID NO: 1241168
aguuccuuugcggacagaa

SEQ ID NO: 1251939 - RNA, 19 nt, Artificial Sequence
  Description of Artificial Sequence: Synthetic oligonucleotide
  Antisense strand to SEQ ID NO: 1251938
uucuguccgcaaaggaacu

SEQ ID NO: 1251940 - RNA, 19 nt, Artificial Sequence
  Description of Artificial Sequence: Synthetic oligonucleotide
  Sense strand starting at position 732 of SEQ ID NO: 1241168
ugacaacuguugucaugga

SEQ ID NO: 1251941 - RNA, 19 nt, Artificial Sequence
  Description of Artificial Sequence: Synthetic oligonucleotide
  Antisense strand to SEQ ID NO: 1251940
uccaugacaacaguuguca

SEQ ID NO: 1251942 - RNA, 19 nt, Artificial Sequence
  Description of Artificial Sequence: Synthetic oligonucleotide
  Sense strand starting at position 736 of SEQ ID NO: 1241168
aacuguugucauggaaugu

SEQ ID NO: 1251943 - RNA, 19 nt, Artificial Sequence
  Description of Artificial Sequence: Synthetic oligonucleotide
  Antisense strand to SEQ ID NO: 1251942
acauuccaugacaacaguu

SEQ ID NO: 1251944 - RNA, 19 nt, Artificial Sequence
  Description of Artificial Sequence: Synthetic oligonucleotide
  Sense strand starting at position 737 of SEQ ID NO: 1241168
acuguugucauggaauguu

SEQ ID NO: 1251945 - RNA, 19 nt, Artificial Sequence
  Description of Artificial Sequence: Synthetic oligonucleotide
  Antisense strand to SEQ ID NO: 1251944
aacauuccaugacaacagu

SEQ ID NO: 1251946 - RNA, 19 nt, Artificial Sequence
  Description of Artificial Sequence: Synthetic oligonucleotide
  Sense strand starting at position 740 of SEQ ID NO: 1241168
guugucauggaauguuaac

SEQ ID NO: 1251947 - RNA, 19 nt, Artificial Sequence
  Description of Artificial Sequence: Synthetic oligonucleotide
  Antisense strand to SEQ ID NO: 1251946
guuaacauuccaugacaac

SEQ ID NO: 1251948 - RNA, 19 nt, Artificial Sequence
  Description of Artificial Sequence: Synthetic oligonucleotide
  Sense strand starting at position 760 of SEQ ID NO: 1241168
gcacauuaagugcauaauu

SEQ ID NO: 1251949 - RNA, 19 nt, Artificial Sequence
  Description of Artificial Sequence: Synthetic oligonucleotide
  Antisense strand to SEQ ID NO: 1251948
aauuaugcacuuaaugugc

SEQ ID NO: 1251950 - RNA, 19 nt, Artificial Sequence
  Description of Artificial Sequence: Synthetic oligonucleotide
  Sense strand starting at position 762 of SEQ ID NO: 1241168
acauuaagugcauaauugu

SEQ ID NO: 1251951 - RNA, 19 nt, Artificial Sequence
  Description of Artificial Sequence: Synthetic oligonucleotide
  Antisense strand to SEQ ID NO: 1251950
acaauuaugcacuuaaugu

SEQ ID NO: 1251952 - RNA, 19 nt, Artificial Sequence
  Description of Artificial Sequence: Synthetic oligonucleotide
  Sense strand starting at position 875 of SEQ ID NO: 1241168
gcucuauugucacugauac

SEQ ID NO: 1251953 - RNA, 19 nt, Artificial Sequence
  Description of Artificial Sequence: Synthetic oligonucleotide
  Antisense strand to SEQ ID NO: 1251952
guaucagugacaauagagc

SEQ ID NO: 1251954 - RNA, 19 nt, Artificial Sequence
  Description of Artificial Sequence: Synthetic oligonucleotide
  Sense strand starting at position 876 of SEQ ID NO: 1241168
cucuauugucacugauacu

SEQ ID NO: 1251955 - RNA, 19 nt, Artificial Sequence
  Description of Artificial Sequence: Synthetic oligonucleotide
  Antisense strand to SEQ ID NO: 1251954
aguaucagugacaauagag

SEQ ID NO: 1251956 - RNA, 19 nt, Artificial Sequence
  Description of Artificial Sequence: Synthetic oligonucleotide
  Sense strand starting at position 961 of SEQ ID NO: 1241168
cugucauccugcuuagaaa

SEQ ID NO: 1251957 - RNA, 19 nt, Artificial Sequence
  Description of Artificial Sequence: Synthetic oligonucleotide
  Antisense strand to SEQ ID NO: 1251956
uuucuaagcaggaugacag

SEQ ID NO: 1251958 - RNA, 19 nt, Artificial Sequence
  Description of Artificial Sequence: Synthetic oligonucleotide
  Sense strand starting at position 962 of SEQ ID NO: 1241168
ugucauccugcuuagaaau

SEQ ID NO: 1251959 - RNA, 19 nt, Artificial Sequence
  Description of Artificial Sequence: Synthetic oligonucleotide
  Antisense strand to SEQ ID NO: 1251958
auuucuaagcaggaugaca

SEQ ID NO: 1251960 - RNA, 19 nt, Artificial Sequence
  Description of Artificial Sequence: Synthetic oligonucleotide
  Sense strand starting at position 1033 of SEQ ID NO: 1241168
uacacaguggucugaguau

SEQ ID NO: 1251961 - RNA, 19 nt, Artificial Sequence
  Description of Artificial Sequence: Synthetic oligonucleotide
  Antisense strand to SEQ ID NO: 1251960
auacucagaccacugugua

SEQ ID NO: 1251962 - RNA, 19 nt, Artificial Sequence
  Description of Artificial Sequence: Synthetic oligonucleotide
  Sense strand starting at position 1056 of SEQ ID NO: 1241168
aguuauacuugaucacuuu

SEQ ID NO: 1251963 - RNA, 19 nt, Artificial Sequence
  Description of Artificial Sequence: Synthetic oligonucleotide
  Antisense strand to SEQ ID NO: 1251962
aaagugaucaaguauaacu

SEQ ID NO: 1251964 - RNA, 19 nt, Artificial Sequence
  Description of Artificial Sequence: Synthetic oligonucleotide
  Sense strand starting at position 1471 of SEQ ID NO: 1241168
caagguaucgccuaauuac

SEQ ID NO: 1251965 - RNA, 19 nt, Artificial Sequence
  Description of Artificial Sequence: Synthetic oligonucleotide
  Antisense strand to SEQ ID NO: 1251964
guaauuaggcgauaccuug

SEQ ID NO: 1251966 - RNA, 19 nt, Artificial Sequence
  Description of Artificial Sequence: Synthetic oligonucleotide
  Sense strand starting at position 1505 of SEQ ID NO: 1241168
guugaauagugagugagaa

SEQ ID NO: 1251967 - RNA, 19 nt, Artificial Sequence
  Description of Artificial Sequence: Synthetic oligonucleotide
  Antisense strand to SEQ ID NO: 1251966
uucucacucacuauucaac

SEQ ID NO: 1251968 - RNA, 19 nt, Artificial Sequence
  Description of Artificial Sequence: Synthetic oligonucleotide
  Sense strand starting at position 2006 of SEQ ID NO: 1241168
ucgccaaucguggcuuaaa

SEQ ID NO: 1251969 - RNA, 19 nt, Artificial Sequence
  Description of Artificial Sequence: Synthetic oligonucleotide
  Antisense strand to SEQ ID NO: 1251968
uuuaagccacgauuggcga

SEQ ID NO: 1251970 - RNA, 19 nt, Artificial Sequence
  Description of Artificial Sequence: Synthetic oligonucleotide
  Sense strand starting at position 2090 of SEQ ID NO: 1241168
gcacgucgacgcucaaaua

SEQ ID NO: 1251971 - RNA, 19 nt, Artificial Sequence
  Description of Artificial Sequence: Synthetic oligonucleotide
  Antisense strand to SEQ ID NO: 1251970
uauuugagcgucgacgugc

SEQ ID NO: 1251972 - RNA, 19 nt, Artificial Sequence
  Description of Artificial Sequence: Synthetic oligonucleotide
  Sense strand starting at position 2179 of SEQ ID NO: 1241168
ugcuauagcaugcagagaa

SEQ ID NO: 1251973 - RNA, 19 nt, Artificial Sequence
  Description of Artificial Sequence: Synthetic oligonucleotide
  Antisense strand to SEQ ID NO: 1251972
uucucugcaugcuauagca

SEQ ID NO: 1251974 - RNA, 19 nt, Artificial Sequence
  Description of Artificial Sequence: Synthetic oligonucleotide
  Sense strand starting at position 2183 of SEQ ID NO: 1241168
auagcaugcagagaauagu

SEQ ID NO: 1251975 - RNA, 19 nt, Artificial Sequence
  Description of Artificial Sequence: Synthetic oligonucleotide
  Antisense strand to SEQ ID NO: 1251974
acuauucucugcaugcuau

SEQ ID NO: 1251976 - RNA, 19 nt, Artificial Sequence
  Description of Artificial Sequence: Synthetic oligonucleotide
  Sense strand starting at position 2186 of SEQ ID NO: 1241168
gcaugcagagaauaguaua

SEQ ID NO: 1251977 - RNA, 19 nt, Artificial Sequence
  Description of Artificial Sequence: Synthetic oligonucleotide
  Antisense strand to SEQ ID NO: 1251976
uauacuauucucugcaugc

SEQ ID NO: 1251978 - RNA, 19 nt, Artificial Sequence
  Description of Artificial Sequence: Synthetic oligonucleotide
  Sense strand starting at position 2244 of SEQ ID NO: 1241168
cagaauuacuguuuagugu

SEQ ID NO: 1251979 - RNA, 19 nt, Artificial Sequence
  Description of Artificial Sequence: Synthetic oligonucleotide
  Antisense strand to SEQ ID NO: 1251978
acacuaaacaguaauucug

SEQ ID NO: 1251980 - RNA, 19 nt, Artificial Sequence
  Description of Artificial Sequence: Synthetic oligonucleotide
  Sense strand starting at position 2245 of SEQ ID NO: 1241168
agaauuacuguuuaguguu

SEQ ID NO: 1251981 - RNA, 19 nt, Artificial Sequence
  Description of Artificial Sequence: Synthetic oligonucleotide
  Antisense strand to SEQ ID NO: 1251980
aacacuaaacaguaauucu

SEQ ID NO: 1251982 - RNA, 19 nt, Artificial Sequence
  Description of Artificial Sequence: Synthetic oligonucleotide
  Sense strand starting at position 2339 of SEQ ID NO: 1241168
aaagcaaggucccuauagu

SEQ ID NO: 1251983 - RNA, 19 nt, Artificial Sequence
  Description of Artificial Sequence: Synthetic oligonucleotide
  Antisense strand to SEQ ID NO: 1251982
acuauagggaccuugcuuu

SEQ ID NO: 1251984 - RNA, 19 nt, Artificial Sequence
  Description of Artificial Sequence: Synthetic oligonucleotide
  Sense strand starting at position 2340 of SEQ ID NO: 1241168
aagcaaggucccuauagua

SEQ ID NO: 1251985 - RNA, 19 nt, Artificial Sequence
  Description of Artificial Sequence: Synthetic oligonucleotide
  Antisense strand to SEQ ID NO: 1251984
uacuauagggaccuugcuu

SEQ ID NO: 1251986 - RNA, 19 nt, Artificial Sequence
  Description of Artificial Sequence: Synthetic oligonucleotide
  Sense strand starting at position 2371 of SEQ ID NO: 1241168
acuaauugggagugaucca

SEQ ID NO: 1251987 - RNA, 19 nt, Artificial Sequence
  Description of Artificial Sequence: Synthetic oligonucleotide
  Antisense strand to SEQ ID NO: 1251986
uggaucacucccaauuagu

SEQ ID NO: 1251988 - RNA, 19 nt, Artificial Sequence
  Description of Artificial Sequence: Synthetic oligonucleotide
  Sense strand starting at position 2428 of SEQ ID NO: 1241168
cagauauccucagccagag

SEQ ID NO: 1251989 - RNA, 19 nt, Artificial Sequence
  Description of Artificial Sequence: Synthetic oligonucleotide
  Antisense strand to SEQ ID NO: 1251988
cucuggcugaggauaucug

SEQ ID NO: 1251990 - RNA, 19 nt, Artificial Sequence
  Description of Artificial Sequence: Synthetic oligonucleotide
  Sense strand starting at position 2432 of SEQ ID NO: 1241168
uauccucagccagagugaa

SEQ ID NO: 1251991 - RNA, 19 nt, Artificial Sequence
  Description of Artificial Sequence: Synthetic oligonucleotide
  Antisense strand to SEQ ID NO: 1251990
uucacucuggcugaggaua

SEQ ID NO: 1251992 - RNA, 19 nt, Artificial Sequence
  Description of Artificial Sequence: Synthetic oligonucleotide
  Sense strand starting at position 2665 of SEQ ID NO: 1241168
ccuccauacagcgaugaga

SEQ ID NO: 1251993 - RNA, 19 nt, Artificial Sequence
  Description of Artificial Sequence: Synthetic oligonucleotide
  Antisense strand to SEQ ID NO: 1251992
ucucaucgcuguauggagg

SEQ ID NO: 1251994 - RNA, 19 nt, Artificial Sequence
  Description of Artificial Sequence: Synthetic oligonucleotide
  Sense strand starting at position 2667 of SEQ ID NO: 1241168
uccauacagcgaugagaga

SEQ ID NO: 1251995 - RNA, 19 nt, Artificial Sequence
  Description of Artificial Sequence: Synthetic oligonucleotide
  Antisense strand to SEQ ID NO: 1251994
ucucucaucgcuguaugga

SEQ ID NO: 1251996 - RNA, 19 nt, Artificial Sequence
  Description of Artificial Sequence: Synthetic oligonucleotide
  Sense strand starting at position 3221 of SEQ ID NO: 1241168
ggagcauacaaaugaguaa

SEQ ID NO: 1251997 - RNA, 19 nt, Artificial Sequence
  Description of Artificial Sequence: Synthetic oligonucleotide
  Antisense strand to SEQ ID NO: 1251996
uuacucauuuguaugcucc

SEQ ID NO: 1251998 - RNA, 19 nt, Artificial Sequence
  Description of Artificial Sequence: Synthetic oligonucleotide
  Sense strand starting at position 3224 of SEQ ID NO: 1241168
gcauacaaaugaguaaacu

SEQ ID NO: 1251999 - RNA, 19 nt, Artificial Sequence
  Description of Artificial Sequence: Synthetic oligonucleotide
  Antisense strand to SEQ ID NO: 1251998
aguuuacucauuuguaugc

SEQ ID NO: 1252000 - RNA, 19 nt, Artificial Sequence
  Description of Artificial Sequence: Synthetic oligonucleotide
  Sense strand starting at position 3257 of SEQ ID NO: 1241168
caggaaguuuaaguauaau

SEQ ID NO: 1252001 - RNA, 19 nt, Artificial Sequence
  Description of Artificial Sequence: Synthetic oligonucleotide
  Antisense strand to SEQ ID NO: 1252000
auuauacuuaaacuuccug

SEQ ID NO: 1252002 - RNA, 19 nt, Artificial Sequence
  Description of Artificial Sequence: Synthetic oligonucleotide
  Sense strand starting at position 3724 of SEQ ID NO: 1241168
acuguaagauaaucuguau

SEQ ID NO: 1252003 - RNA, 19 nt, Artificial Sequence
  Description of Artificial Sequence: Synthetic oligonucleotide
  Antisense strand to SEQ ID NO: 1252002
auacagauuaucuuacagu

SEQ ID NO: 1252004 - RNA, 19 nt, Artificial Sequence
  Description of Artificial Sequence: Synthetic oligonucleotide
  Sense strand starting at position 3747 of SEQ ID NO: 1241168
caauuaaggugcuuauaga

SEQ ID NO: 1252005 - RNA, 19 nt, Artificial Sequence
  Description of Artificial Sequence: Synthetic oligonucleotide
  Antisense strand to SEQ ID NO: 1252004
ucuauaagcaccuuaauug

SEQ ID NO: 1252006 - RNA, 19 nt, Artificial Sequence
  Description of Artificial Sequence: Synthetic oligonucleotide
  Sense strand starting at position 3755 of SEQ ID NO: 1241168
gugcuuauagagugaauca

SEQ ID NO: 1252007 - RNA, 19 nt, Artificial Sequence
  Description of Artificial Sequence: Synthetic oligonucleotide
  Antisense strand to SEQ ID NO: 1252006
ugauucacucuauaagcac

SEQ ID NO: 1252008 - RNA, 19 nt, Artificial Sequence
  Description of Artificial Sequence: Synthetic oligonucleotide
  Sense strand starting at position 3844 of SEQ ID NO: 1241168
uagugcaugcuaguuguau

SEQ ID NO: 1252009 - RNA, 19 nt, Artificial Sequence
  Description of Artificial Sequence: Synthetic oligonucleotide
  Antisense strand to SEQ ID NO: 1252008
auacaacuagcaugcacua

SEQ ID NO: 1252010 - RNA, 19 nt, Artificial Sequence
  Description of Artificial Sequence: Synthetic oligonucleotide
  Sense strand starting at position 2866 of SEQ ID NO: 1241169
cuucuagucucugcacauu

SEQ ID NO: 1252011 - RNA, 19 nt, Artificial Sequence
  Description of Artificial Sequence: Synthetic oligonucleotide
  Antisense strand to SEQ ID NO: 1252010
aaugugcagagacuagaag

SEQ ID NO: 1252012 - RNA, 19 nt, Artificial Sequence
  Description of Artificial Sequence: Synthetic oligonucleotide
  Sense strand starting at position 2882 of SEQ ID NO: 1241169
auugcaguguuccuuggau

SEQ ID NO: 1252013 - RNA, 19 nt, Artificial Sequence
  Description of Artificial Sequence: Synthetic oligonucleotide
  Antisense strand to SEQ ID NO: 1252012
auccaaggaacacugcaau

SEQ ID NO: 1252014 - RNA, 19 nt, Artificial Sequence
  Description of Artificial Sequence: Synthetic oligonucleotide
  Sense strand starting at position 2884 of SEQ ID NO: 1241169
ugcaguguuccuuggaugu

SEQ ID NO: 1252015 - RNA, 19 nt, Artificial Sequence
  Description of Artificial Sequence: Synthetic oligonucleotide
  Antisense strand to SEQ ID NO: 1252014
acauccaaggaacacugca

SEQ ID NO: 1252016 - RNA, 19 nt, Artificial Sequence
  Description of Artificial Sequence: Synthetic oligonucleotide
  Sense strand starting at position 2984 of SEQ ID NO: 1241169
caguuugaguuccgcagaa

SEQ ID NO: 1252017 - RNA, 19 nt, Artificial Sequence
  Description of Artificial Sequence: Synthetic oligonucleotide
  Antisense strand to SEQ ID NO: 1252016
uucugcggaacucaaacug

SEQ ID NO: 1252018 - RNA, 19 nt, Artificial Sequence
  Description of Artificial Sequence: Synthetic oligonucleotide
  Sense strand starting at position 2986 of SEQ ID NO: 1241169
guuugaguuccgcagaaac

SEQ ID NO: 1252019 - RNA, 19 nt, Artificial Sequence
  Description of Artificial Sequence: Synthetic oligonucleotide
  Antisense strand to SEQ ID NO: 1252018
guuucugcggaacucaaac

SEQ ID NO: 1252020 - RNA, 19 nt, Artificial Sequence
  Description of Artificial Sequence: Synthetic oligonucleotide
  Sense strand starting at position 2988 of SEQ ID NO: 1241169
uugaguuccgcagaaacuu

SEQ ID NO: 1252021 - RNA, 19 nt, Artificial Sequence
  Description of Artificial Sequence: Synthetic oligonucleotide
  Antisense strand to SEQ ID NO: 1252020
aaguuucugcggaacucaa

SEQ ID NO: 1252022 - RNA, 19 nt, Artificial Sequence
  Description of Artificial Sequence: Synthetic oligonucleotide
  Sense strand starting at position 3003 of SEQ ID NO: 1241169
acuucugcucugcagauga

SEQ ID NO: 1252023 - RNA, 19 nt, Artificial Sequence
  Description of Artificial Sequence: Synthetic oligonucleotide
  Antisense strand to SEQ ID NO: 1252022
ucaucugcagagcagaagu

SEQ ID NO: 1252024 - RNA, 19 nt, Artificial Sequence
  Description of Artificial Sequence: Synthetic oligonucleotide
  Sense strand starting at position 3005 of SEQ ID NO: 1241169
uucugcucugcagaugaau

SEQ ID NO: 1252025 - RNA, 19 nt, Artificial Sequence
  Description of Artificial Sequence: Synthetic oligonucleotide
  Antisense strand to SEQ ID NO: 1252024
auucaucugcagagcagaa

SEQ ID NO: 1252026 - RNA, 19 nt, Artificial Sequence
  Description of Artificial Sequence: Synthetic oligonucleotide
  Sense strand starting at position 3030 of SEQ ID NO: 1241169
auugaagccuuaucuagga

SEQ ID NO: 1252027 - RNA, 19 nt, Artificial Sequence
  Description of Artificial Sequence: Synthetic oligonucleotide
  Antisense strand to SEQ ID NO: 1252026
uccuagauaaggcuucaau

SEQ ID NO: 1252028 - RNA, 19 nt, Artificial Sequence
  Description of Artificial Sequence: Synthetic oligonucleotide
  Sense strand starting at position 3032 of SEQ ID NO: 1241169
ugaagccuuaucuaggagu

SEQ ID NO: 1252029 - RNA, 19 nt, Artificial Sequence
  Description of Artificial Sequence: Synthetic oligonucleotide
  Antisense strand to SEQ ID NO: 1252028
acuccuagauaaggcuuca

SEQ ID NO: 1252030 - RNA, 19 nt, Artificial Sequence
  Description of Artificial Sequence: Synthetic oligonucleotide
  Sense strand starting at position 3034 of SEQ ID NO: 1241169
aagccuuaucuaggaguuc

SEQ ID NO: 1252031 - RNA, 19 nt, Artificial Sequence
  Description of Artificial Sequence: Synthetic oligonucleotide
  Antisense strand to SEQ ID NO: 1252030
gaacuccuagauaaggcuu

SEQ ID NO: 1252032 - RNA, 19 nt, Artificial Sequence
  Description of Artificial Sequence: Synthetic oligonucleotide
  Sense strand starting at position 3257 of SEQ ID NO: 1241169
gguggcaugcggguguaau

SEQ ID NO: 1252033 - RNA, 19 nt, Artificial Sequence
  Description of Artificial Sequence: Synthetic oligonucleotide
  Antisense strand to SEQ ID NO: 1252032
auuacacccgcaugccacc

SEQ ID NO: 1252034 - RNA, 19 nt, Artificial Sequence
  Description of Artificial Sequence: Synthetic oligonucleotide
  Sense strand starting at position 3258 of SEQ ID NO: 1241169
guggcaugcggguguaauu

SEQ ID NO: 1252035 - RNA, 19 nt, Artificial Sequence
  Description of Artificial Sequence: Synthetic oligonucleotide
  Antisense strand to SEQ ID NO: 1252034
aauuacacccgcaugccac

SEQ ID NO: 1252036 - RNA, 19 nt, Artificial Sequence
  Description of Artificial Sequence: Synthetic oligonucleotide
  Sense strand starting at position 3278 of SEQ ID NO: 1241169
uugagaacguggucacugu

SEQ ID NO: 1252037 - RNA, 19 nt, Artificial Sequence
  Description of Artificial Sequence: Synthetic oligonucleotide
  Antisense strand to SEQ ID NO: 1252036
acagugaccacguucucaa

SEQ ID NO: 1252038 - RNA, 19 nt, Artificial Sequence
  Description of Artificial Sequence: Synthetic oligonucleotide
  Sense strand starting at position 3289 of SEQ ID NO: 1241169
gucacugucugucaugcaa

SEQ ID NO: 1252039 - RNA, 19 nt, Artificial Sequence
  Description of Artificial Sequence: Synthetic oligonucleotide
  Antisense strand to SEQ ID NO: 1252038
uugcaugacagacagugac

SEQ ID NO: 1252040 - RNA, 19 nt, Artificial Sequence
  Description of Artificial Sequence: Synthetic oligonucleotide
  Sense strand starting at position 3467 of SEQ ID NO: 1241169
ugauaagcauauuagacua

SEQ ID NO: 1252041 - RNA, 19 nt, Artificial Sequence
  Description of Artificial Sequence: Synthetic oligonucleotide
  Antisense strand to SEQ ID NO: 1252040
uagucuaauaugcuuauca

SEQ ID NO: 1252042 - RNA, 19 nt, Artificial Sequence
  Description of Artificial Sequence: Synthetic oligonucleotide
  Sense strand starting at position 3472 of SEQ ID NO: 1241169
agcauauuagacuacagua

SEQ ID NO: 1252043 - RNA, 19 nt, Artificial Sequence
  Description of Artificial Sequence: Synthetic oligonucleotide
  Antisense strand to SEQ ID NO: 1252042
uacuguagucuaauaugcu

SEQ ID NO: 1252044 - RNA, 19 nt, Artificial Sequence
  Description of Artificial Sequence: Synthetic oligonucleotide
  Sense strand starting at position 3501 of SEQ ID NO: 1241169
aggaccuuucucuguuuga

SEQ ID NO: 1252045 - RNA, 19 nt, Artificial Sequence
  Description of Artificial Sequence: Synthetic oligonucleotide
  Antisense strand to SEQ ID NO: 1252044
ucaaacagagaaagguccu

SEQ ID NO: 1252046 - RNA, 19 nt, Artificial Sequence
  Description of Artificial Sequence: Synthetic oligonucleotide
  Sense strand starting at position 3585 of SEQ ID NO: 1241169
uguccuuacccaugucuaa

SEQ ID NO: 1252047 - RNA, 19 nt, Artificial Sequence
  Description of Artificial Sequence: Synthetic oligonucleotide
  Antisense strand to SEQ ID NO: 1252046
uuagacauggguaaggaca

SEQ ID NO: 1252048 - RNA, 19 nt, Artificial Sequence
  Description of Artificial Sequence: Synthetic oligonucleotide
  Sense strand starting at position 3622 of SEQ ID NO: 1241169
ucucacauggucuguuaca

SEQ ID NO: 1252049 - RNA, 19 nt, Artificial Sequence
  Description of Artificial Sequence: Synthetic oligonucleotide
  Antisense strand to SEQ ID NO: 1252048
uguaacagaccaugugaga

SEQ ID NO: 1252050 - RNA, 19 nt, Artificial Sequence
  Description of Artificial Sequence: Synthetic oligonucleotide
  Sense strand starting at position 3659 of SEQ ID NO: 1241169
gggugauauugucuccaua

SEQ ID NO: 1252051 - RNA, 19 nt, Artificial Sequence
  Description of Artificial Sequence: Synthetic oligonucleotide
  Antisense strand to SEQ ID NO: 1252050
uauggagacaauaucaccc

SEQ ID NO: 1252052 - RNA, 19 nt, Artificial Sequence
  Description of Artificial Sequence: Synthetic oligonucleotide
  Sense strand starting at position 3661 of SEQ ID NO: 1241169
gugauauugucuccauagg

SEQ ID NO: 1252053 - RNA, 19 nt, Artificial Sequence
  Description of Artificial Sequence: Synthetic oligonucleotide
  Antisense strand to SEQ ID NO: 1252052
ccuauggagacaauaucac

SEQ ID NO: 1252054 - RNA, 19 nt, Artificial Sequence
  Description of Artificial Sequence: Synthetic oligonucleotide
  Sense strand starting at position 3815 of SEQ ID NO: 1241169
guaguguaguguugaggca

SEQ ID NO: 1252055 - RNA, 19 nt, Artificial Sequence
  Description of Artificial Sequence: Synthetic oligonucleotide
  Antisense strand to SEQ ID NO: 1252054
ugccucaacacuacacuac

SEQ ID NO: 1252056 - RNA, 19 nt, Artificial Sequence
  Description of Artificial Sequence: Synthetic oligonucleotide
  Sense strand starting at position 3817 of SEQ ID NO: 1241169
aguguaguguugaggcaga

SEQ ID NO: 1252057 - RNA, 19 nt, Artificial Sequence
  Description of Artificial Sequence: Synthetic oligonucleotide
  Antisense strand to SEQ ID NO: 1252056
ucugccucaacacuacacu

SEQ ID NO: 1252058 - RNA, 19 nt, Artificial Sequence
  Description of Artificial Sequence: Synthetic oligonucleotide
  Sense strand starting at position 3822 of SEQ ID NO: 1241169
aguguugaggcagacaaau

SEQ ID NO: 1252059 - RNA, 19 nt, Artificial Sequence
  Description of Artificial Sequence: Synthetic oligonucleotide
  Antisense strand to SEQ ID NO: 1252058
auuugucugccucaacacu

SEQ ID NO: 1252060 - RNA, 19 nt, Artificial Sequence
  Description of Artificial Sequence: Synthetic oligonucleotide
  Sense strand starting at position 3831 of SEQ ID NO: 1241169
gcagacaaauccugguuua

SEQ ID NO: 1252061 - RNA, 19 nt, Artificial Sequence
  Description of Artificial Sequence: Synthetic oligonucleotide
  Antisense strand to SEQ ID NO: 1252060
uaaaccaggauuugucugc

SEQ ID NO: 1252062 - RNA, 19 nt, Artificial Sequence
  Description of Artificial Sequence: Synthetic oligonucleotide
  Sense strand starting at position 3946 of SEQ ID NO: 1241169
guugcaauggcccaaucuu

SEQ ID NO: 1252063 - RNA, 19 nt, Artificial Sequence
  Description of Artificial Sequence: Synthetic oligonucleotide
  Antisense strand to SEQ ID NO: 1252062
aagauugggccauugcaac

SEQ ID NO: 1252064 - RNA, 19 nt, Artificial Sequence
  Description of Artificial Sequence: Synthetic oligonucleotide
  Sense strand starting at position 164 of SEQ ID NO: 1241170
ggcacaaucuuggcugguu

SEQ ID NO: 1252065 - RNA, 19 nt, Artificial Sequence
  Description of Artificial Sequence: Synthetic oligonucleotide
  Antisense strand to SEQ ID NO: 1252064
aaccagccaagauugugcc

SEQ ID NO: 1252066 - RNA, 19 nt, Artificial Sequence
  Description of Artificial Sequence: Synthetic oligonucleotide
  Sense strand starting at position 487 of SEQ ID NO: 1241170
accaaauauuugugacuug

SEQ ID NO: 1252067 - RNA, 19 nt, Artificial Sequence
  Description of Artificial Sequence: Synthetic oligonucleotide
  Antisense strand to SEQ ID NO: 1252066
caagucacaaauauuuggu

SEQ ID NO: 1252068 - RNA, 19 nt, Artificial Sequence
  Description of Artificial Sequence: Synthetic oligonucleotide
  Sense strand starting at position 494 of SEQ ID NO: 1241170
auuugugacuugccauagu

SEQ ID NO: 1252069 - RNA, 19 nt, Artificial Sequence
  Description of Artificial Sequence: Synthetic oligonucleotide
  Antisense strand to SEQ ID NO: 1252068
acuauggcaagucacaaau

SEQ ID NO: 1252070 - RNA, 19 nt, Artificial Sequence
  Description of Artificial Sequence: Synthetic oligonucleotide
  Sense strand starting at position 503 of SEQ ID NO: 1241170
uugccauagugguugguau

SEQ ID NO: 1252071 - RNA, 19 nt, Artificial Sequence
  Description of Artificial Sequence: Synthetic oligonucleotide
  Antisense strand to SEQ ID NO: 1252070
auaccaaccacuauggcaa

SEQ ID NO: 1252072 - RNA, 19 nt, Artificial Sequence
  Description of Artificial Sequence: Synthetic oligonucleotide
  Sense strand starting at position 510 of SEQ ID NO: 1241170
agugguugguaugugagaa

SEQ ID NO: 1252073 - RNA, 19 nt, Artificial Sequence
  Description of Artificial Sequence: Synthetic oligonucleotide
  Antisense strand to SEQ ID NO: 1252072
uucucacauaccaaccacu

SEQ ID NO: 1252074 - RNA, 19 nt, Artificial Sequence
  Description of Artificial Sequence: Synthetic oligonucleotide
  Sense strand starting at position 511 of SEQ ID NO: 1241170
gugguugguaugugagaau

SEQ ID NO: 1252075 - RNA, 19 nt, Artificial Sequence
  Description of Artificial Sequence: Synthetic oligonucleotide
  Antisense strand to SEQ ID NO: 1252074
auucucacauaccaaccac

SEQ ID NO: 1252076 - RNA, 19 nt, Artificial Sequence
  Description of Artificial Sequence: Synthetic oligonucleotide
  Sense strand starting at position 566 of SEQ ID NO: 1241170
cuaagugaaguuggaauua

SEQ ID NO: 1252077 - RNA, 19 nt, Artificial Sequence
  Description of Artificial Sequence: Synthetic oligonucleotide
  Antisense strand to SEQ ID NO: 1252076
uaauuccaacuucacuuag

SEQ ID NO: 1252078 - RNA, 19 nt, Artificial Sequence
  Description of Artificial Sequence: Synthetic oligonucleotide
  Sense strand starting at position 692 of SEQ ID NO: 1241170
agucauuccuaaguguaaa

SEQ ID NO: 1252079 - RNA, 19 nt, Artificial Sequence
  Description of Artificial Sequence: Synthetic oligonucleotide
  Antisense strand to SEQ ID NO: 1252078
uuuacacuuaggaaugacu

SEQ ID NO: 1252080 - RNA, 19 nt, Artificial Sequence
  Description of Artificial Sequence: Synthetic oligonucleotide
  Sense strand starting at position 877 of SEQ ID NO: 1241170
ugagacugccuuugaguga

SEQ ID NO: 1252081 - RNA, 19 nt, Artificial Sequence
  Description of Artificial Sequence: Synthetic oligonucleotide
  Antisense strand to SEQ ID NO: 1252080
ucacucaaaggcagucuca

SEQ ID NO: 1252082 - RNA, 19 nt, Artificial Sequence
  Description of Artificial Sequence: Synthetic oligonucleotide
  Sense strand starting at position 893 of SEQ ID NO: 1241170
ugaggucuaucgcuuguau

SEQ ID NO: 1252083 - RNA, 19 nt, Artificial Sequence
  Description of Artificial Sequence: Synthetic oligonucleotide
  Antisense strand to SEQ ID NO: 1252082
auacaagcgauagaccuca

SEQ ID NO: 1252084 - RNA, 19 nt, Artificial Sequence
  Description of Artificial Sequence: Synthetic oligonucleotide
  Sense strand starting at position 896 of SEQ ID NO: 1241170
ggucuaucgcuuguauugu

SEQ ID NO: 1252085 - RNA, 19 nt, Artificial Sequence
  Description of Artificial Sequence: Synthetic oligonucleotide
  Antisense strand to SEQ ID NO: 1252084
acaauacaagcgauagacc

SEQ ID NO: 1252086 - RNA, 19 nt, Artificial Sequence
  Description of Artificial Sequence: Synthetic oligonucleotide
  Sense strand starting at position 904 of SEQ ID NO: 1241170
gcuuguauugugccucagu

SEQ ID NO: 1252087 - RNA, 19 nt, Artificial Sequence
  Description of Artificial Sequence: Synthetic oligonucleotide
  Antisense strand to SEQ ID NO: 1252086
acugaggcacaauacaagc

SEQ ID NO: 1252088 - RNA, 19 nt, Artificial Sequence
  Description of Artificial Sequence: Synthetic oligonucleotide
  Sense strand starting at position 907 of SEQ ID NO: 1241170
uguauugugccucaguaaa

SEQ ID NO: 1252089 - RNA, 19 nt, Artificial Sequence
  Description of Artificial Sequence: Synthetic oligonucleotide
  Antisense strand to SEQ ID NO: 1252088
uuuacugaggcacaauaca

SEQ ID NO: 1252090 - RNA, 19 nt, Artificial Sequence
  Description of Artificial Sequence: Synthetic oligonucleotide
  Sense strand starting at position 1062 of SEQ ID NO: 1241170
uaagguuagugccuuuaua

SEQ ID NO: 1252091 - RNA, 19 nt, Artificial Sequence
  Description of Artificial Sequence: Synthetic oligonucleotide
  Antisense strand to SEQ ID NO: 1252090
uauaaaggcacuaaccuua

SEQ ID NO: 1252092 - RNA, 19 nt, Artificial Sequence
  Description of Artificial Sequence: Synthetic oligonucleotide
  Sense strand starting at position 1089 of SEQ ID NO: 1241170
ucuugcauccuguaaugca

SEQ ID NO: 1252093 - RNA, 19 nt, Artificial Sequence
  Description of Artificial Sequence: Synthetic oligonucleotide
  Antisense strand to SEQ ID NO: 1252092
ugcauuacaggaugcaaga

SEQ ID NO: 1252094 - RNA, 19 nt, Artificial Sequence
  Description of Artificial Sequence: Synthetic oligonucleotide
  Sense strand starting at position 1096 of SEQ ID NO: 1241170
uccuguaaugcacggguau

SEQ ID NO: 1252095 - RNA, 19 nt, Artificial Sequence
  Description of Artificial Sequence: Synthetic oligonucleotide
  Antisense strand to SEQ ID NO: 1252094
auacccgugcauuacagga

SEQ ID NO: 1252096 - RNA, 19 nt, Artificial Sequence
  Description of Artificial Sequence: Synthetic oligonucleotide
  Sense strand starting at position 1107 of SEQ ID NO: 1241170
acggguauguaccugagau

SEQ ID NO: 1252097 - RNA, 19 nt, Artificial Sequence
  Description of Artificial Sequence: Synthetic oligonucleotide
  Antisense strand to SEQ ID NO: 1252096
aucucagguacauacccgu

SEQ ID NO: 1252098 - RNA, 19 nt, Artificial Sequence
  Description of Artificial Sequence: Synthetic oligonucleotide
  Sense strand starting at position 1108 of SEQ ID NO: 1241170
cggguauguaccugagauc

SEQ ID NO: 1252099 - RNA, 19 nt, Artificial Sequence
  Description of Artificial Sequence: Synthetic oligonucleotide
  Antisense strand to SEQ ID NO: 1252098
gaucucagguacauacccg

SEQ ID NO: 1252100 - RNA, 19 nt, Artificial Sequence
  Description of Artificial Sequence: Synthetic oligonucleotide
  Sense strand starting at position 1109 of SEQ ID NO: 1241170
ggguauguaccugagaucu

SEQ ID NO: 1252101 - RNA, 19 nt, Artificial Sequence
  Description of Artificial Sequence: Synthetic oligonucleotide
  Antisense strand to SEQ ID NO: 1252100
agaucucagguacauaccc

SEQ ID NO: 1252102 - RNA, 19 nt, Artificial Sequence
  Description of Artificial Sequence: Synthetic oligonucleotide
  Sense strand starting at position 1350 of SEQ ID NO: 1241170
gcauuuaucucauaugguu

SEQ ID NO: 1252103 - RNA, 19 nt, Artificial Sequence
  Description of Artificial Sequence: Synthetic oligonucleotide
  Antisense strand to SEQ ID NO: 1252102
aaccauaugagauaaaugc

SEQ ID NO: 1252104 - RNA, 19 nt, Artificial Sequence
  Description of Artificial Sequence: Synthetic oligonucleotide
  Sense strand starting at position 1389 of SEQ ID NO: 1241170
uggauaugauuacuccauu

SEQ ID NO: 1252105 - RNA, 19 nt, Artificial Sequence
  Description of Artificial Sequence: Synthetic oligonucleotide
  Antisense strand to SEQ ID NO: 1252104
aauggaguaaucauaucca

SEQ ID NO: 1252106 - RNA, 19 nt, Artificial Sequence
  Description of Artificial Sequence: Synthetic oligonucleotide
  Sense strand starting at position 1390 of SEQ ID NO: 1241170
ggauaugauuacuccauug

SEQ ID NO: 1252107 - RNA, 19 nt, Artificial Sequence
  Description of Artificial Sequence: Synthetic oligonucleotide
  Antisense strand to SEQ ID NO: 1252106
caauggaguaaucauaucc

SEQ ID NO: 1252108 - RNA, 19 nt, Artificial Sequence
  Description of Artificial Sequence: Synthetic oligonucleotide
  Sense strand starting at position 1435 of SEQ ID NO: 1241170
uuuagaauggugcaccaaa

SEQ ID NO: 1252109 - RNA, 19 nt, Artificial Sequence
  Description of Artificial Sequence: Synthetic oligonucleotide
  Antisense strand to SEQ ID NO: 1252108
uuuggugcaccauucuaaa

SEQ ID NO: 1252110 - RNA, 19 nt, Artificial Sequence
  Description of Artificial Sequence: Synthetic oligonucleotide
  Sense strand starting at position 1490 of SEQ ID NO: 1241170
uaaggaagauaggaauaau

SEQ ID NO: 1252111 - RNA, 19 nt, Artificial Sequence
  Description of Artificial Sequence: Synthetic oligonucleotide
  Antisense strand to SEQ ID NO: 1252110
auuauuccuaucuuccuua

SEQ ID NO: 1252112 - RNA, 19 nt, Artificial Sequence
  Description of Artificial Sequence: Synthetic oligonucleotide
  Sense strand starting at position 1661 of SEQ ID NO: 1241170
agcugagagccaugcacaa

SEQ ID NO: 1252113 - RNA, 19 nt, Artificial Sequence
  Description of Artificial Sequence: Synthetic oligonucleotide
  Antisense strand to SEQ ID NO: 1252112
uugugcauggcucucagcu

SEQ ID NO: 1252114 - RNA, 19 nt, Artificial Sequence
  Description of Artificial Sequence: Synthetic oligonucleotide
  Sense strand starting at position 1729 of SEQ ID NO: 1241170
gcaaucuagguguggcaaa

SEQ ID NO: 1252115 - RNA, 19 nt, Artificial Sequence
  Description of Artificial Sequence: Synthetic oligonucleotide
  Antisense strand to SEQ ID NO: 1252114
uuugccacaccuagauugc

SEQ ID NO: 1252116 - RNA, 19 nt, Artificial Sequence
  Description of Artificial Sequence: Synthetic oligonucleotide
  Sense strand starting at position 2230 of SEQ ID NO: 1241170
aaagaaggcucuggaggaa

SEQ ID NO: 1252117 - RNA, 19 nt, Artificial Sequence
  Description of Artificial Sequence: Synthetic oligonucleotide
  Antisense strand to SEQ ID NO: 1252116
uuccuccagagccuucuuu

SEQ ID NO: 1252118 - RNA, 19 nt, Artificial Sequence
  Description of Artificial Sequence: Synthetic oligonucleotide
  Sense strand starting at position 2896 of SEQ ID NO: 1241170
uucuacaagcuaugagaga

SEQ ID NO: 1252119 - RNA, 19 nt, Artificial Sequence
  Description of Artificial Sequence: Synthetic oligonucleotide
  Antisense strand to SEQ ID NO: 1252118
ucucucauagcuuguagaa

SEQ ID NO: 1252120 - RNA, 19 nt, Artificial Sequence
  Description of Artificial Sequence: Synthetic oligonucleotide
  Sense strand starting at position 2897 of SEQ ID NO: 1241170
ucuacaagcuaugagagaa

SEQ ID NO: 1252121 - RNA, 19 nt, Artificial Sequence
  Description of Artificial Sequence: Synthetic oligonucleotide
  Antisense strand to SEQ ID NO: 1252120
uucucucauagcuuguaga

SEQ ID NO: 1252122 - RNA, 19 nt, Artificial Sequence
  Description of Artificial Sequence: Synthetic oligonucleotide
  Sense strand starting at position 3341 of SEQ ID NO: 1241170
uuacucauuccagguaguu

SEQ ID NO: 1252123 - RNA, 19 nt, Artificial Sequence
  Description of Artificial Sequence: Synthetic oligonucleotide
  Antisense strand to SEQ ID NO: 1252122
aacuaccuggaaugaguaa

SEQ ID NO: 1252124 - RNA, 19 nt, Artificial Sequence
  Description of Artificial Sequence: Synthetic oligonucleotide
  Sense strand starting at position 3353 of SEQ ID NO: 1241170
gguaguuuccaagaguaag

SEQ ID NO: 1252125 - RNA, 19 nt, Artificial Sequence
  Description of Artificial Sequence: Synthetic oligonucleotide
  Antisense strand to SEQ ID NO: 1252124
cuuacucuuggaaacuacc

SEQ ID NO: 1252126 - RNA, 19 nt, Artificial Sequence
  Description of Artificial Sequence: Synthetic oligonucleotide
  Sense strand starting at position 3356 of SEQ ID NO: 1241170
aguuuccaagaguaaguau

SEQ ID NO: 1252127 - RNA, 19 nt, Artificial Sequence
  Description of Artificial Sequence: Synthetic oligonucleotide
  Antisense strand to SEQ ID NO: 1252126
auacuuacucuuggaaacu

SEQ ID NO: 1252128 - RNA, 19 nt, Artificial Sequence
  Description of Artificial Sequence: Synthetic oligonucleotide
  Sense strand starting at position 3359 of SEQ ID NO: 1241170
uuccaagaguaaguauaau

SEQ ID NO: 1252129 - RNA, 19 nt, Artificial Sequence
  Description of Artificial Sequence: Synthetic oligonucleotide
  Antisense strand to SEQ ID NO: 1252128
auuauacuuacucuuggaa

SEQ ID NO: 1252130 - RNA, 19 nt, Artificial Sequence
  Description of Artificial Sequence: Synthetic oligonucleotide
  Sense strand starting at position 3450 of SEQ ID NO: 1241170
accuaaagccaucgucaaa

SEQ ID NO: 1252131 - RNA, 19 nt, Artificial Sequence
  Description of Artificial Sequence: Synthetic oligonucleotide
  Antisense strand to SEQ ID NO: 1252130
uuugacgauggcuuuaggu

SEQ ID NO: 1252132 - RNA, 19 nt, Artificial Sequence
  Description of Artificial Sequence: Synthetic oligonucleotide
  Sense strand starting at position 3506 of SEQ ID NO: 1241170
uuguauggucuguggguua

SEQ ID NO: 1252133 - RNA, 19 nt, Artificial Sequence
  Description of Artificial Sequence: Synthetic oligonucleotide
  Antisense strand to SEQ ID NO: 1252132
uaacccacagaccauacaa

SEQ ID NO: 1252134 - RNA, 19 nt, Artificial Sequence
  Description of Artificial Sequence: Synthetic oligonucleotide
  Sense strand starting at position 3615 of SEQ ID NO: 1241170
uggugucaauaaguaaagu

SEQ ID NO: 1252135 - RNA, 19 nt, Artificial Sequence
  Description of Artificial Sequence: Synthetic oligonucleotide
  Antisense strand to SEQ ID NO: 1252134
acuuuacuuauugacacca

SEQ ID NO: 1252136 - RNA, 19 nt, Artificial Sequence
  Description of Artificial Sequence: Synthetic oligonucleotide
  Sense strand starting at position 3616 of SEQ ID NO: 1241170
ggugucaauaaguaaaguu

SEQ ID NO: 1252137 - RNA, 19 nt, Artificial Sequence
  Description of Artificial Sequence: Synthetic oligonucleotide
  Antisense strand to SEQ ID NO: 1252136
aacuuuacuuauugacacc

SEQ ID NO: 1252138 - RNA, 19 nt, Artificial Sequence
  Description of Artificial Sequence: Synthetic oligonucleotide
  Sense strand starting at position 3625 of SEQ ID NO: 1241170
aaguaaaguucuguuggaa

SEQ ID NO: 1252139 - RNA, 19 nt, Artificial Sequence
  Description of Artificial Sequence: Synthetic oligonucleotide
  Antisense strand to SEQ ID NO: 1252138
uuccaacagaacuuuacuu

SEQ ID NO: 1252140 - RNA, 19 nt, Artificial Sequence
  Description of Artificial Sequence: Synthetic oligonucleotide
  Sense strand starting at position 3675 of SEQ ID NO: 1241170
uguggcugcuuuccugaua

SEQ ID NO: 1252141 - RNA, 19 nt, Artificial Sequence
  Description of Artificial Sequence: Synthetic oligonucleotide
  Antisense strand to SEQ ID NO: 1252140
uaucaggaaagcagccaca

SEQ ID NO: 1252142 - RNA, 19 nt, Artificial Sequence
  Description of Artificial Sequence: Synthetic oligonucleotide
  Sense strand starting at position 3780 of SEQ ID NO: 1241170
gccaauccugaaggaugua

SEQ ID NO: 1252143 - RNA, 19 nt, Artificial Sequence
  Description of Artificial Sequence: Synthetic oligonucleotide
  Antisense strand to SEQ ID NO: 1252142
uacauccuucaggauuggc

SEQ ID NO: 1252144 - RNA, 19 nt, Artificial Sequence
  Description of Artificial Sequence: Synthetic oligonucleotide
  Sense strand starting at position 90 of SEQ ID NO: 1241171
ggccaugcagguuauauua

SEQ ID NO: 1252145 - RNA, 19 nt, Artificial Sequence
  Description of Artificial Sequence: Synthetic oligonucleotide
  Antisense strand to SEQ ID NO: 1252144
uaauauaaccugcauggcc

SEQ ID NO: 1252146 - RNA, 19 nt, Artificial Sequence
  Description of Artificial Sequence: Synthetic oligonucleotide
  Sense strand starting at position 183 of SEQ ID NO: 1241171
ggcagaauucuaggauauc

SEQ ID NO: 1252147 - RNA, 19 nt, Artificial Sequence
  Description of Artificial Sequence: Synthetic oligonucleotide
  Antisense strand to SEQ ID NO: 1252146
gauauccuagaauucugcc

SEQ ID NO: 1252148 - RNA, 19 nt, Artificial Sequence
  Description of Artificial Sequence: Synthetic oligonucleotide
  Sense strand starting at position 257 of SEQ ID NO: 1241171
gggccaugacuaugaagau

SEQ ID NO: 1252149 - RNA, 19 nt, Artificial Sequence
  Description of Artificial Sequence: Synthetic oligonucleotide
  Antisense strand to SEQ ID NO: 1252148
aucuucauagucauggccc

SEQ ID NO: 1252150 - RNA, 19 nt, Artificial Sequence
  Description of Artificial Sequence: Synthetic oligonucleotide
  Sense strand starting at position 269 of SEQ ID NO: 1241171
ugaagauucugauucuguu

SEQ ID NO: 1252151 - RNA, 19 nt, Artificial Sequence
  Description of Artificial Sequence: Synthetic oligonucleotide
  Antisense strand to SEQ ID NO: 1252150
aacagaaucagaaucuuca

SEQ ID NO: 1252152 - RNA, 19 nt, Artificial Sequence
  Description of Artificial Sequence: Synthetic oligonucleotide
  Sense strand starting at position 795 of SEQ ID NO: 1241171
cggccaagaguugaucuua

SEQ ID NO: 1252153 - RNA, 19 nt, Artificial Sequence
  Description of Artificial Sequence: Synthetic oligonucleotide
  Antisense strand to SEQ ID NO: 1252152
uaagaucaacucuuggccg

SEQ ID NO: 1252154 - RNA, 19 nt, Artificial Sequence
  Description of Artificial Sequence: Synthetic oligonucleotide
  Sense strand starting at position 820 of SEQ ID NO: 1241171
ggagauuauccaggugcuc

SEQ ID NO: 1252155 - RNA, 19 nt, Artificial Sequence
  Description of Artificial Sequence: Synthetic oligonucleotide
  Antisense strand to SEQ ID NO: 1252154
gagcaccuggauaaucucc

SEQ ID NO: 1252156 - RNA, 19 nt, Artificial Sequence
  Description of Artificial Sequence: Synthetic oligonucleotide
  Sense strand starting at position 829 of SEQ ID NO: 1241171
ccaggugcuccugaucuaa

SEQ ID NO: 1252157 - RNA, 19 nt, Artificial Sequence
  Description of Artificial Sequence: Synthetic oligonucleotide
  Antisense strand to SEQ ID NO: 1252156
uuagaucaggagcaccugg

SEQ ID NO: 1252158 - RNA, 19 nt, Artificial Sequence
  Description of Artificial Sequence: Synthetic oligonucleotide
  Sense strand starting at position 902 of SEQ ID NO: 1241171
gucagaaagaugugccuca

SEQ ID NO: 1252159 - RNA, 19 nt, Artificial Sequence
  Description of Artificial Sequence: Synthetic oligonucleotide
  Antisense strand to SEQ ID NO: 1252158
ugaggcacaucuuucugac

SEQ ID NO: 1252160 - RNA, 19 nt, Artificial Sequence
  Description of Artificial Sequence: Synthetic oligonucleotide
  Sense strand starting at position 1070 of SEQ ID NO: 1241171
ugccaacaagaaugaguua

SEQ ID NO: 1252161 - RNA, 19 nt, Artificial Sequence
  Description of Artificial Sequence: Synthetic oligonucleotide
  Antisense strand to SEQ ID NO: 1252160
uaacucauucuuguuggca

SEQ ID NO: 1252162 - RNA, 19 nt, Artificial Sequence
  Description of Artificial Sequence: Synthetic oligonucleotide
  Sense strand starting at position 1106 of SEQ ID NO: 1241171
cagagccuccuaugagauu

SEQ ID NO: 1252163 - RNA, 19 nt, Artificial Sequence
  Description of Artificial Sequence: Synthetic oligonucleotide
  Antisense strand to SEQ ID NO: 1252162
aaucucauaggaggcucug

SEQ ID NO: 1252164 - RNA, 19 nt, Artificial Sequence
  Description of Artificial Sequence: Synthetic oligonucleotide
  Sense strand starting at position 1107 of SEQ ID NO: 1241171
agagccuccuaugagauuu

SEQ ID NO: 1252165 - RNA, 19 nt, Artificial Sequence
  Description of Artificial Sequence: Synthetic oligonucleotide
  Antisense strand to SEQ ID NO: 1252164
aaaucucauaggaggcucu

SEQ ID NO: 1252166 - RNA, 19 nt, Artificial Sequence
  Description of Artificial Sequence: Synthetic oligonucleotide
  Sense strand starting at position 1131 of SEQ ID NO: 1241171
uugucauacccugggcaga

SEQ ID NO: 1252167 - RNA, 19 nt, Artificial Sequence
  Description of Artificial Sequence: Synthetic oligonucleotide
  Antisense strand to SEQ ID NO: 1252166
ucugcccaggguaugacaa

SEQ ID NO: 1252168 - RNA, 19 nt, Artificial Sequence
  Description of Artificial Sequence: Synthetic oligonucleotide
  Sense strand starting at position 1153 of SEQ ID NO: 1241171
cccagacacucgguaaauu

SEQ ID NO: 1252169 - RNA, 19 nt, Artificial Sequence
  Description of Artificial Sequence: Synthetic oligonucleotide
  Antisense strand to SEQ ID NO: 1252168
aauuuaccgagugucuggg

SEQ ID NO: 1252170 - RNA, 19 nt, Artificial Sequence
  Description of Artificial Sequence: Synthetic oligonucleotide
  Sense strand starting at position 1154 of SEQ ID NO: 1241171
ccagacacucgguaaauua

SEQ ID NO: 1252171 - RNA, 19 nt, Artificial Sequence
  Description of Artificial Sequence: Synthetic oligonucleotide
  Antisense strand to SEQ ID NO: 1252170
uaauuuaccgagugucugg

SEQ ID NO: 1252172 - RNA, 19 nt, Artificial Sequence
  Description of Artificial Sequence: Synthetic oligonucleotide
  Sense strand starting at position 1390 of SEQ ID NO: 1241171
cugaguaaggaacguaaua

SEQ ID NO: 1252173 - RNA, 19 nt, Artificial Sequence
  Description of Artificial Sequence: Synthetic oligonucleotide
  Antisense strand to SEQ ID NO: 1252172
uauuacguuccuuacucag

SEQ ID NO: 1252174 - RNA, 19 nt, Artificial Sequence
  Description of Artificial Sequence: Synthetic oligonucleotide
  Sense strand starting at position 1427 of SEQ ID NO: 1241171
cucccuguaucuuugauau

SEQ ID NO: 1252175 - RNA, 19 nt, Artificial Sequence
  Description of Artificial Sequence: Synthetic oligonucleotide
  Antisense strand to SEQ ID NO: 1252174
auaucaaagauacagggag

SEQ ID NO: 1252176 - RNA, 19 nt, Artificial Sequence
  Description of Artificial Sequence: Synthetic oligonucleotide
  Sense strand starting at position 1459 of SEQ ID NO: 1241171
cgcccuaucaugucgcaua

SEQ ID NO: 1252177 - RNA, 19 nt, Artificial Sequence
  Description of Artificial Sequence: Synthetic oligonucleotide
  Antisense strand to SEQ ID NO: 1252176
uaugcgacaugauagggcg

SEQ ID NO: 1252178 - RNA, 19 nt, Artificial Sequence
  Description of Artificial Sequence: Synthetic oligonucleotide
  Sense strand starting at position 1475 of SEQ ID NO: 1241171
auauaagcgaucgaguuau

SEQ ID NO: 1252179 - RNA, 19 nt, Artificial Sequence
  Description of Artificial Sequence: Synthetic oligonucleotide
  Antisense strand to SEQ ID NO: 1252178
auaacucgaucgcuuauau

SEQ ID NO: 1252180 - RNA, 19 nt, Artificial Sequence
  Description of Artificial Sequence: Synthetic oligonucleotide
  Sense strand starting at position 1483 of SEQ ID NO: 1241171
gaucgaguuaugcauuugu

SEQ ID NO: 1252181 - RNA, 19 nt, Artificial Sequence
  Description of Artificial Sequence: Synthetic oligonucleotide
  Antisense strand to SEQ ID NO: 1252180
acaaaugcauaacucgauc

SEQ ID NO: 1252182 - RNA, 19 nt, Artificial Sequence
  Description of Artificial Sequence: Synthetic oligonucleotide
  Sense strand starting at position 1496 of SEQ ID NO: 1241171
auuuguugcuagcugaaga

SEQ ID NO: 1252183 - RNA, 19 nt, Artificial Sequence
  Description of Artificial Sequence: Synthetic oligonucleotide
  Antisense strand to SEQ ID NO: 1252182
ucuucagcuagcaacaaau

SEQ ID NO: 1252184 - RNA, 19 nt, Artificial Sequence
  Description of Artificial Sequence: Synthetic oligonucleotide
  Sense strand starting at position 1501 of SEQ ID NO: 1241171
uugcuagcugaagagauua

SEQ ID NO: 1252185 - RNA, 19 nt, Artificial Sequence
  Description of Artificial Sequence: Synthetic oligonucleotide
  Antisense strand to SEQ ID NO: 1252184
uaaucucuucagcuagcaa

SEQ ID NO: 1252186 - RNA, 19 nt, Artificial Sequence
  Description of Artificial Sequence: Synthetic oligonucleotide
  Sense strand starting at position 1503 of SEQ ID NO: 1241171
gcuagcugaagagauuauu

SEQ ID NO: 1252187 - RNA, 19 nt, Artificial Sequence
  Description of Artificial Sequence: Synthetic oligonucleotide
  Antisense strand to SEQ ID NO: 1252186
aauaaucucuucagcuagc

SEQ ID NO: 1252188 - RNA, 19 nt, Artificial Sequence
  Description of Artificial Sequence: Synthetic oligonucleotide
  Sense strand starting at position 2066 of SEQ ID NO: 1241171
gcuuauuugggcggaguga

SEQ ID NO: 1252189 - RNA, 19 nt, Artificial Sequence
  Description of Artificial Sequence: Synthetic oligonucleotide
  Antisense strand to SEQ ID NO: 1252188
ucacuccgcccaaauaagc

SEQ ID NO: 1252190 - RNA, 19 nt, Artificial Sequence
  Description of Artificial Sequence: Synthetic oligonucleotide
  Sense strand starting at position 2316 of SEQ ID NO: 1241171
ugcuguuuccgguuaccuu

SEQ ID NO: 1252191 - RNA, 19 nt, Artificial Sequence
  Description of Artificial Sequence: Synthetic oligonucleotide
  Antisense strand to SEQ ID NO: 1252190
aagguaaccggaaacagca

SEQ ID NO: 1252192 - RNA, 19 nt, Artificial Sequence
  Description of Artificial Sequence: Synthetic oligonucleotide
  Sense strand starting at position 2351 of SEQ ID NO: 1241171
gugcucuccgccuuuaaga

SEQ ID NO: 1252193 - RNA, 19 nt, Artificial Sequence
  Description of Artificial Sequence: Synthetic oligonucleotide
  Antisense strand to SEQ ID NO: 1252192
ucuuaaaggcggagagcac

SEQ ID NO: 1252194 - RNA, 19 nt, Artificial Sequence
  Description of Artificial Sequence: Synthetic oligonucleotide
  Sense strand starting at position 2483 of SEQ ID NO: 1241171
gcuaguguucaggaagguu

SEQ ID NO: 1252195 - RNA, 19 nt, Artificial Sequence
  Description of Artificial Sequence: Synthetic oligonucleotide
  Antisense strand to SEQ ID NO: 1252194
aaccuuccugaacacuagc

SEQ ID NO: 1252196 - RNA, 19 nt, Artificial Sequence
  Description of Artificial Sequence: Synthetic oligonucleotide
  Sense strand starting at position 2486 of SEQ ID NO: 1241171
aguguucaggaagguuaua

SEQ ID NO: 1252197 - RNA, 19 nt, Artificial Sequence
  Description of Artificial Sequence: Synthetic oligonucleotide
  Antisense strand to SEQ ID NO: 1252196
uauaaccuuccugaacacu

SEQ ID NO: 1252198 - RNA, 19 nt, Artificial Sequence
  Description of Artificial Sequence: Synthetic oligonucleotide
  Sense strand starting at position 2582 of SEQ ID NO: 1241171
ggcugaugacaguaugacu

SEQ ID NO: 1252199 - RNA, 19 nt, Artificial Sequence
  Description of Artificial Sequence: Synthetic oligonucleotide
  Antisense strand to SEQ ID NO: 1252198
agucauacugucaucagcc

SEQ ID NO: 1252200 - RNA, 19 nt, Artificial Sequence
  Description of Artificial Sequence: Synthetic oligonucleotide
  Sense strand starting at position 2712 of SEQ ID NO: 1241171
gugcaagguauacagacau

SEQ ID NO: 1252201 - RNA, 19 nt, Artificial Sequence
  Description of Artificial Sequence: Synthetic oligonucleotide
  Antisense strand to SEQ ID NO: 1252200
augucuguauaccuugcac

SEQ ID NO: 1252202 - RNA, 19 nt, Artificial Sequence
  Description of Artificial Sequence: Synthetic oligonucleotide
  Sense strand starting at position 2753 of SEQ ID NO: 1241171
ugugcauuuguguaauacu

SEQ ID NO: 1252203 - RNA, 19 nt, Artificial Sequence
  Description of Artificial Sequence: Synthetic oligonucleotide
  Antisense strand to SEQ ID NO: 1252202
aguauuacacaaaugcaca

SEQ ID NO: 1252204 - RNA, 19 nt, Artificial Sequence
  Description of Artificial Sequence: Synthetic oligonucleotide
  Sense strand starting at position 2800 of SEQ ID NO: 1241171
auaaguuaugugggcugga

SEQ ID NO: 1252205 - RNA, 19 nt, Artificial Sequence
  Description of Artificial Sequence: Synthetic oligonucleotide
  Antisense strand to SEQ ID NO: 1252204
uccagcccacauaacuuau

SEQ ID NO: 1252206 - RNA, 19 nt, Artificial Sequence
  Description of Artificial Sequence: Synthetic oligonucleotide
  Sense strand starting at position 2805 of SEQ ID NO: 1241171
uuaugugggcuggagaguu

SEQ ID NO: 1252207 - RNA, 19 nt, Artificial Sequence
  Description of Artificial Sequence: Synthetic oligonucleotide
  Antisense strand to SEQ ID NO: 1252206
aacucuccagcccacauaa

SEQ ID NO: 1252208 - RNA, 19 nt, Artificial Sequence
  Description of Artificial Sequence: Synthetic oligonucleotide
  Sense strand starting at position 3019 of SEQ ID NO: 1241171
cuagaaauaggguguuacu

SEQ ID NO: 1252209 - RNA, 19 nt, Artificial Sequence
  Description of Artificial Sequence: Synthetic oligonucleotide
  Antisense strand to SEQ ID NO: 1252208
aguaacacccuauuucuag

SEQ ID NO: 1252210 - RNA, 19 nt, Artificial Sequence
  Description of Artificial Sequence: Synthetic oligonucleotide
  Sense strand starting at position 3046 of SEQ ID NO: 1241171
cagaguggucuccaacucu

SEQ ID NO: 1252211 - RNA, 19 nt, Artificial Sequence
  Description of Artificial Sequence: Synthetic oligonucleotide
  Antisense strand to SEQ ID NO: 1252210
agaguuggagaccacucug

SEQ ID NO: 1252212 - RNA, 19 nt, Artificial Sequence
  Description of Artificial Sequence: Synthetic oligonucleotide
  Sense strand starting at position 3136 of SEQ ID NO: 1241171
ccaagaguuuguuuaguaa

SEQ ID NO: 1252213 - RNA, 19 nt, Artificial Sequence
  Description of Artificial Sequence: Synthetic oligonucleotide
  Antisense strand to SEQ ID NO: 1252212
uuacuaaacaaacucuugg

SEQ ID NO: 1252214 - RNA, 19 nt, Artificial Sequence
  Description of Artificial Sequence: Synthetic oligonucleotide
  Sense strand starting at position 3139 of SEQ ID NO: 1241171
agaguuuguuuaguaaaug

SEQ ID NO: 1252215 - RNA, 19 nt, Artificial Sequence
  Description of Artificial Sequence: Synthetic oligonucleotide
  Antisense strand to SEQ ID NO: 1252214
cauuuacuaaacaaacucu

SEQ ID NO: 1252216 - RNA, 19 nt, Artificial Sequence
  Description of Artificial Sequence: Synthetic oligonucleotide
  Sense strand starting at position 3201 of SEQ ID NO: 1241171
ugugucauagacuaguaaa

SEQ ID NO: 1252217 - RNA, 19 nt, Artificial Sequence
  Description of Artificial Sequence: Synthetic oligonucleotide
  Antisense strand to SEQ ID NO: 1252216
uuuacuagucuaugacaca

SEQ ID NO: 1252218 - RNA, 19 nt, Artificial Sequence
  Description of Artificial Sequence: Synthetic oligonucleotide
  Sense strand starting at position 3281 of SEQ ID NO: 1241171
uagagaugucauggguauu

SEQ ID NO: 1252219 - RNA, 19 nt, Artificial Sequence
  Description of Artificial Sequence: Synthetic oligonucleotide
  Antisense strand to SEQ ID NO: 1252218
aauacccaugacaucucua

SEQ ID NO: 1252220 - RNA, 19 nt, Artificial Sequence
  Description of Artificial Sequence: Synthetic oligonucleotide
  Sense strand starting at position 3528 of SEQ ID NO: 1241171
gggcuuaacugaucugauc

SEQ ID NO: 1252221 - RNA, 19 nt, Artificial Sequence
  Description of Artificial Sequence: Synthetic oligonucleotide
  Antisense strand to SEQ ID NO: 1252220
gaucagaucaguuaagccc

SEQ ID NO: 1252222 - RNA, 19 nt, Artificial Sequence
  Description of Artificial Sequence: Synthetic oligonucleotide
  Sense strand starting at position 3962 of SEQ ID NO: 1241171
uugacugguguccaguaga

SEQ ID NO: 1252223 - RNA, 19 nt, Artificial Sequence
  Description of Artificial Sequence: Synthetic oligonucleotide
  Antisense strand to SEQ ID NO: 1252222
ucuacuggacaccagucaa

SEQ ID NO: 1252224 - RNA, 19 nt, Artificial Sequence
  Description of Artificial Sequence: Synthetic oligonucleotide
  Sense strand starting at position 565 of SEQ ID NO: 1241172
caacaugcguucucgacuu

SEQ ID NO: 1252225 - RNA, 19 nt, Artificial Sequence
  Description of Artificial Sequence: Synthetic oligonucleotide
  Antisense strand to SEQ ID NO: 1252224
aagucgagaacgcauguug

SEQ ID NO: 1252226 - RNA, 19 nt, Artificial Sequence
  Description of Artificial Sequence: Synthetic oligonucleotide
  Sense strand starting at position 567 of SEQ ID NO: 1241172
acaugcguucucgacuuaa

SEQ ID NO: 1252227 - RNA, 19 nt, Artificial Sequence
  Description of Artificial Sequence: Synthetic oligonucleotide
  Antisense strand to SEQ ID NO: 1252226
uuaagucgagaacgcaugu

SEQ ID NO: 1252228 - RNA, 19 nt, Artificial Sequence
  Description of Artificial Sequence: Synthetic oligonucleotide
  Sense strand starting at position 569 of SEQ ID NO: 1241172
augcguucucgacuuaagu

SEQ ID NO: 1252229 - RNA, 19 nt, Artificial Sequence
  Description of Artificial Sequence: Synthetic oligonucleotide
  Antisense strand to SEQ ID NO: 1252228
acuuaagucgagaacgcau

SEQ ID NO: 1252230 - RNA, 19 nt, Artificial Sequence
  Description of Artificial Sequence: Synthetic oligonucleotide
  Sense strand starting at position 570 of SEQ ID NO: 1241172
ugcguucucgacuuaagua

SEQ ID NO: 1252231 - RNA, 19 nt, Artificial Sequence
  Description of Artificial Sequence: Synthetic oligonucleotide
  Antisense strand to SEQ ID NO: 1252230
uacuuaagucgagaacgca

SEQ ID NO: 1252232 - RNA, 19 nt, Artificial Sequence
  Description of Artificial Sequence: Synthetic oligonucleotide
  Sense strand starting at position 571 of SEQ ID NO: 1241172
gcguucucgacuuaaguaa

SEQ ID NO: 1252233 - RNA, 19 nt, Artificial Sequence
  Description of Artificial Sequence: Synthetic oligonucleotide
  Antisense strand to SEQ ID NO: 1252232
uuacuuaagucgagaacgc

SEQ ID NO: 1252234 - RNA, 19 nt, Artificial Sequence
  Description of Artificial Sequence: Synthetic oligonucleotide
  Sense strand starting at position 747 of SEQ ID NO: 1241172
gcaguuagggcucgaggua

SEQ ID NO: 1252235 - RNA, 19 nt, Artificial Sequence
  Description of Artificial Sequence: Synthetic oligonucleotide
  Antisense strand to SEQ ID NO: 1252234
uaccucgagcccuaacugc

SEQ ID NO: 1252236 - RNA, 19 nt, Artificial Sequence
  Description of Artificial Sequence: Synthetic oligonucleotide
  Sense strand starting at position 920 of SEQ ID NO: 1241172
cucaguagugcccaagaaa

SEQ ID NO: 1252237 - RNA, 19 nt, Artificial Sequence
  Description of Artificial Sequence: Synthetic oligonucleotide
  Antisense strand to SEQ ID NO: 1252236
uuucuugggcacuacugag

SEQ ID NO: 1252238 - RNA, 19 nt, Artificial Sequence
  Description of Artificial Sequence: Synthetic oligonucleotide
  Sense strand starting at position 991 of SEQ ID NO: 1241172
agggauuccuucugacuga

SEQ ID NO: 1252239 - RNA, 19 nt, Artificial Sequence
  Description of Artificial Sequence: Synthetic oligonucleotide
  Antisense strand to SEQ ID NO: 1252238
ucagucagaaggaaucccu

SEQ ID NO: 1252240 - RNA, 19 nt, Artificial Sequence
  Description of Artificial Sequence: Synthetic oligonucleotide
  Sense strand starting at position 1021 of SEQ ID NO: 1241172
agagccaguucucagggau

SEQ ID NO: 1252241 - RNA, 19 nt, Artificial Sequence
  Description of Artificial Sequence: Synthetic oligonucleotide
  Antisense strand to SEQ ID NO: 1252240
aucccugagaacuggcucu

SEQ ID NO: 1252242 - RNA, 19 nt, Artificial Sequence
  Description of Artificial Sequence: Synthetic oligonucleotide
  Sense strand starting at position 1059 of SEQ ID NO: 1241172
ggcuucaguuacuggagua

SEQ ID NO: 1252243 - RNA, 19 nt, Artificial Sequence
  Description of Artificial Sequence: Synthetic oligonucleotide
  Antisense strand to SEQ ID NO: 1252242
uacuccaguaacugaagcc

SEQ ID NO: 1252244 - RNA, 19 nt, Artificial Sequence
  Description of Artificial Sequence: Synthetic oligonucleotide
  Sense strand starting at position 1064 of SEQ ID NO: 1241172
caguuacuggaguaacgaa

SEQ ID NO: 1252245 - RNA, 19 nt, Artificial Sequence
  Description of Artificial Sequence: Synthetic oligonucleotide
  Antisense strand to SEQ ID NO: 1252244
uucguuacuccaguaacug

SEQ ID NO: 1252246 - RNA, 19 nt, Artificial Sequence
  Description of Artificial Sequence: Synthetic oligonucleotide
  Sense strand starting at position 1109 of SEQ ID NO: 1241172
uagacuugcccucggagga

SEQ ID NO: 1252247 - RNA, 19 nt, Artificial Sequence
  Description of Artificial Sequence: Synthetic oligonucleotide
  Antisense strand to SEQ ID NO: 1252246
uccuccgagggcaagucua

SEQ ID NO: 1252248 - RNA, 19 nt, Artificial Sequence
  Description of Artificial Sequence: Synthetic oligonucleotide
  Sense strand starting at position 1110 of SEQ ID NO: 1241172
agacuugcccucggaggau

SEQ ID NO: 1252249 - RNA, 19 nt, Artificial Sequence
  Description of Artificial Sequence: Synthetic oligonucleotide
  Antisense strand to SEQ ID NO: 1252248
auccuccgagggcaagucu

SEQ ID NO: 1252250 - RNA, 19 nt, Artificial Sequence
  Description of Artificial Sequence: Synthetic oligonucleotide
  Sense strand starting at position 1227 of SEQ ID NO: 1241172
ggcuguuucgcgcaacauc

SEQ ID NO: 1252251 - RNA, 19 nt, Artificial Sequence
  Description of Artificial Sequence: Synthetic oligonucleotide
  Antisense strand to SEQ ID NO: 1252250
gauguugcgcgaaacagcc

SEQ ID NO: 1252252 - RNA, 19 nt, Artificial Sequence
  Description of Artificial Sequence: Synthetic oligonucleotide
  Sense strand starting at position 1436 of SEQ ID NO: 1241172
ucaggucacucaggaucau

SEQ ID NO: 1252253 - RNA, 19 nt, Artificial Sequence
  Description of Artificial Sequence: Synthetic oligonucleotide
  Antisense strand to SEQ ID NO: 1252252
augauccugagugaccuga

SEQ ID NO: 1252254 - RNA, 19 nt, Artificial Sequence
  Description of Artificial Sequence: Synthetic oligonucleotide
  Sense strand starting at position 2118 of SEQ ID NO: 1241172
gaguuugcugcuguuccua

SEQ ID NO: 1252255 - RNA, 19 nt, Artificial Sequence
  Description of Artificial Sequence: Synthetic oligonucleotide
  Antisense strand to SEQ ID NO: 1252254
uaggaacagcagcaaacuc

SEQ ID NO: 1252256 - RNA, 19 nt, Artificial Sequence
  Description of Artificial Sequence: Synthetic oligonucleotide
  Sense strand starting at position 2166 of SEQ ID NO: 1241172
aggucaauuccagagcugu

SEQ ID NO: 1252257 - RNA, 19 nt, Artificial Sequence
  Description of Artificial Sequence: Synthetic oligonucleotide
  Antisense strand to SEQ ID NO: 1252256
acagcucuggaauugaccu

SEQ ID NO: 1252258 - RNA, 19 nt, Artificial Sequence
  Description of Artificial Sequence: Synthetic oligonucleotide
  Sense strand starting at position 2443 of SEQ ID NO: 1241172
cgauauugcccuggcagga

SEQ ID NO: 1252259 - RNA, 19 nt, Artificial Sequence
  Description of Artificial Sequence: Synthetic oligonucleotide
  Antisense strand to SEQ ID NO: 1252258
uccugccagggcaauaucg

SEQ ID NO: 1252260 - RNA, 19 nt, Artificial Sequence
  Description of Artificial Sequence: Synthetic oligonucleotide
  Sense strand starting at position 2464 of SEQ ID NO: 1241172
gggcaauguaugggucagu

SEQ ID NO: 1252261 - RNA, 19 nt, Artificial Sequence
  Description of Artificial Sequence: Synthetic oligonucleotide
  Antisense strand to SEQ ID NO: 1252260
acugacccauacauugccc

SEQ ID NO: 1252262 - RNA, 19 nt, Artificial Sequence
  Description of Artificial Sequence: Synthetic oligonucleotide
  Sense strand starting at position 2822 of SEQ ID NO: 1241172
uguggagagacccguguuu

SEQ ID NO: 1252263 - RNA, 19 nt, Artificial Sequence
  Description of Artificial Sequence: Synthetic oligonucleotide
  Antisense strand to SEQ ID NO: 1252262
aaacacgggucucuccaca

SEQ ID NO: 1252264 - RNA, 19 nt, Artificial Sequence
  Description of Artificial Sequence: Synthetic oligonucleotide
  Sense strand starting at position 2824 of SEQ ID NO: 1241172
uggagagacccguguuucu

SEQ ID NO: 1252265 - RNA, 19 nt, Artificial Sequence
  Description of Artificial Sequence: Synthetic oligonucleotide
  Antisense strand to SEQ ID NO: 1252264
agaaacacgggucucucca

SEQ ID NO: 1252266 - RNA, 19 nt, Artificial Sequence
  Description of Artificial Sequence: Synthetic oligonucleotide
  Sense strand starting at position 2835 of SEQ ID NO: 1241172
guguuucuccauuaggaau

SEQ ID NO: 1252267 - RNA, 19 nt, Artificial Sequence
  Description of Artificial Sequence: Synthetic oligonucleotide
  Antisense strand to SEQ ID NO: 1252266
auuccuaauggagaaacac

SEQ ID NO: 1252268 - RNA, 19 nt, Artificial Sequence
  Description of Artificial Sequence: Synthetic oligonucleotide
  Sense strand starting at position 2858 of SEQ ID NO: 1241172
gugcaucucccuuggguaa

SEQ ID NO: 1252269 - RNA, 19 nt, Artificial Sequence
  Description of Artificial Sequence: Synthetic oligonucleotide
  Antisense strand to SEQ ID NO: 1252268
uuacccaagggagaugcac

SEQ ID NO: 1252270 - RNA, 19 nt, Artificial Sequence
  Description of Artificial Sequence: Synthetic oligonucleotide
  Sense strand starting at position 2859 of SEQ ID NO: 1241172
ugcaucucccuuggguaaa

SEQ ID NO: 1252271 - RNA, 19 nt, Artificial Sequence
  Description of Artificial Sequence: Synthetic oligonucleotide
  Antisense strand to SEQ ID NO: 1252270
uuuacccaagggagaugca

SEQ ID NO: 1252272 - RNA, 19 nt, Artificial Sequence
  Description of Artificial Sequence: Synthetic oligonucleotide
  Sense strand starting at position 3117 of SEQ ID NO: 1241172
gcgcucugugucuacacaa

SEQ ID NO: 1252273 - RNA, 19 nt, Artificial Sequence
  Description of Artificial Sequence: Synthetic oligonucleotide
  Antisense strand to SEQ ID NO: 1252272
uuguguagacacagagcgc

SEQ ID NO: 1252274 - RNA, 19 nt, Artificial Sequence
  Description of Artificial Sequence: Synthetic oligonucleotide
  Sense strand starting at position 3176 of SEQ ID NO: 1241172
acgcuuguuccagggagag

SEQ ID NO: 1252275 - RNA, 19 nt, Artificial Sequence
  Description of Artificial Sequence: Synthetic oligonucleotide
  Antisense strand to SEQ ID NO: 1252274
cucucccuggaacaagcgu

SEQ ID NO: 1252276 - RNA, 19 nt, Artificial Sequence
  Description of Artificial Sequence: Synthetic oligonucleotide
  Sense strand starting at position 3178 of SEQ ID NO: 1241172
gcuuguuccagggagagca

SEQ ID NO: 1252277 - RNA, 19 nt, Artificial Sequence
  Description of Artificial Sequence: Synthetic oligonucleotide
  Antisense strand to SEQ ID NO: 1252276
ugcucucccuggaacaagc

SEQ ID NO: 1252278 - RNA, 19 nt, Artificial Sequence
  Description of Artificial Sequence: Synthetic oligonucleotide
  Sense strand starting at position 3228 of SEQ ID NO: 1241172
cuggcuuccugggaagagu

SEQ ID NO: 1252279 - RNA, 19 nt, Artificial Sequence
  Description of Artificial Sequence: Synthetic oligonucleotide
  Antisense strand to SEQ ID NO: 1252278
acucuucccaggaagccag

SEQ ID NO: 1252280 - RNA, 19 nt, Artificial Sequence
  Description of Artificial Sequence: Synthetic oligonucleotide
  Sense strand starting at position 3284 of SEQ ID NO: 1241172
gcccaaucugggcgcuuau

SEQ ID NO: 1252281 - RNA, 19 nt, Artificial Sequence
  Description of Artificial Sequence: Synthetic oligonucleotide
  Antisense strand to SEQ ID NO: 1252280
auaagcgcccagauugggc

SEQ ID NO: 1252282 - RNA, 19 nt, Artificial Sequence
  Description of Artificial Sequence: Synthetic oligonucleotide
  Sense strand starting at position 3323 of SEQ ID NO: 1241172
agcugcuccucccagauuu

SEQ ID NO: 1252283 - RNA, 19 nt, Artificial Sequence
  Description of Artificial Sequence: Synthetic oligonucleotide
  Antisense strand to SEQ ID NO: 1252282
aaaucugggaggagcagcu

SEQ ID NO: 1252284 - RNA, 19 nt, Artificial Sequence
  Description of Artificial Sequence: Synthetic oligonucleotide
  Sense strand starting at position 3379 of SEQ ID NO: 1241172
cgggacaacuccuuccuga

SEQ ID NO: 1252285 - RNA, 19 nt, Artificial Sequence
  Description of Artificial Sequence: Synthetic oligonucleotide
  Antisense strand to SEQ ID NO: 1252284
ucaggaaggaguugucccg

SEQ ID NO: 1252286 - RNA, 19 nt, Artificial Sequence
  Description of Artificial Sequence: Synthetic oligonucleotide
  Sense strand starting at position 3458 of SEQ ID NO: 1241172
cucugugcucccuggaaag

SEQ ID NO: 1252287 - RNA, 19 nt, Artificial Sequence
  Description of Artificial Sequence: Synthetic oligonucleotide
  Antisense strand to SEQ ID NO: 1252286
cuuuccagggagcacagag

SEQ ID NO: 1252288 - RNA, 19 nt, Artificial Sequence
  Description of Artificial Sequence: Synthetic oligonucleotide
  Sense strand starting at position 3485 of SEQ ID NO: 1241172
ggcugacccuguggacauu

SEQ ID NO: 1252289 - RNA, 19 nt, Artificial Sequence
  Description of Artificial Sequence: Synthetic oligonucleotide
  Antisense strand to SEQ ID NO: 1252288
aauguccacagggucagcc

SEQ ID NO: 1252290 - RNA, 19 nt, Artificial Sequence
  Description of Artificial Sequence: Synthetic oligonucleotide
  Sense strand starting at position 3497 of SEQ ID NO: 1241172
ggacauucgcucuggguaa

SEQ ID NO: 1252291 - RNA, 19 nt, Artificial Sequence
  Description of Artificial Sequence: Synthetic oligonucleotide
  Antisense strand to SEQ ID NO: 1252290
uuacccagagcgaaugucc

SEQ ID NO: 1252292 - RNA, 19 nt, Artificial Sequence
  Description of Artificial Sequence: Synthetic oligonucleotide
  Sense strand starting at position 3499 of SEQ ID NO: 1241172
acauucgcucuggguaauu

SEQ ID NO: 1252293 - RNA, 19 nt, Artificial Sequence
  Description of Artificial Sequence: Synthetic oligonucleotide
  Antisense strand to SEQ ID NO: 1252292
aauuacccagagcgaaugu

SEQ ID NO: 1252294 - RNA, 19 nt, Artificial Sequence
  Description of Artificial Sequence: Synthetic oligonucleotide
  Sense strand starting at position 3504 of SEQ ID NO: 1241172
cgcucuggguaauuuauua

SEQ ID NO: 1252295 - RNA, 19 nt, Artificial Sequence
  Description of Artificial Sequence: Synthetic oligonucleotide
  Antisense strand to SEQ ID NO: 1252294
uaauaaauuacccagagcg

SEQ ID NO: 1252296 - RNA, 19 nt, Artificial Sequence
  Description of Artificial Sequence: Synthetic oligonucleotide
  Sense strand starting at position 3509 of SEQ ID NO: 1241172
uggguaauuuauuagugag

SEQ ID NO: 1252297 - RNA, 19 nt, Artificial Sequence
  Description of Artificial Sequence: Synthetic oligonucleotide
  Antisense strand to SEQ ID NO: 1252296
cucacuaauaaauuaccca

SEQ ID NO: 1252298 - RNA, 19 nt, Artificial Sequence
  Description of Artificial Sequence: Synthetic oligonucleotide
  Sense strand starting at position 3512 of SEQ ID NO: 1241172
guaauuuauuagugagcug

SEQ ID NO: 1252299 - RNA, 19 nt, Artificial Sequence
  Description of Artificial Sequence: Synthetic oligonucleotide
  Antisense strand to SEQ ID NO: 1252298
cagcucacuaauaaauuac

SEQ ID NO: 1252300 - RNA, 19 nt, Artificial Sequence
  Description of Artificial Sequence: Synthetic oligonucleotide
  Sense strand starting at position 3562 of SEQ ID NO: 1241172
ggucauauuuccggccgua

SEQ ID NO: 1252301 - RNA, 19 nt, Artificial Sequence
  Description of Artificial Sequence: Synthetic oligonucleotide
  Antisense strand to SEQ ID NO: 1252300
uacggccggaaauaugacc

SEQ ID NO: 1252302 - RNA, 19 nt, Artificial Sequence
  Description of Artificial Sequence: Synthetic oligonucleotide
  Sense strand starting at position 3574 of SEQ ID NO: 1241172
ggccguaucugauagggcu

SEQ ID NO: 1252303 - RNA, 19 nt, Artificial Sequence
  Description of Artificial Sequence: Synthetic oligonucleotide
  Antisense strand to SEQ ID NO: 1252302
agcccuaucagauacggcc

SEQ ID NO: 1252304 - RNA, 19 nt, Artificial Sequence
  Description of Artificial Sequence: Synthetic oligonucleotide
  Sense strand starting at position 100 of SEQ ID NO: 1241173
ggaagagaggucuggcuca

SEQ ID NO: 1252305 - RNA, 19 nt, Artificial Sequence
  Description of Artificial Sequence: Synthetic oligonucleotide
  Antisense strand to SEQ ID NO: 1252304
ugagccagaccucucuucc

SEQ ID NO: 1252306 - RNA, 19 nt, Artificial Sequence
  Description of Artificial Sequence: Synthetic oligonucleotide
  Sense strand starting at position 286 of SEQ ID NO: 1241173
ccucgugacagaugggaga

SEQ ID NO: 1252307 - RNA, 19 nt, Artificial Sequence
  Description of Artificial Sequence: Synthetic oligonucleotide
  Antisense strand to SEQ ID NO: 1252306
ucucccaucugucacgagg

SEQ ID NO: 1252308 - RNA, 19 nt, Artificial Sequence
  Description of Artificial Sequence: Synthetic oligonucleotide
  Sense strand starting at position 288 of SEQ ID NO: 1241173
ucgugacagaugggagaua

SEQ ID NO: 1252309 - RNA, 19 nt, Artificial Sequence
  Description of Artificial Sequence: Synthetic oligonucleotide
  Antisense strand to SEQ ID NO: 1252308
uaucucccaucugucacga

SEQ ID NO: 1252310 - RNA, 19 nt, Artificial Sequence
  Description of Artificial Sequence: Synthetic oligonucleotide
  Sense strand starting at position 728 of SEQ ID NO: 1241173
ucuugaagcugcugagaga

SEQ ID NO: 1252311 - RNA, 19 nt, Artificial Sequence
  Description of Artificial Sequence: Synthetic oligonucleotide
  Antisense strand to SEQ ID NO: 1252310
ucucucagcagcuucaaga

SEQ ID NO: 1252312 - RNA, 19 nt, Artificial Sequence
  Description of Artificial Sequence: Synthetic oligonucleotide
  Sense strand starting at position 1071 of SEQ ID NO: 1241173
gcagcuggcucgugagaaa

SEQ ID NO: 1252313 - RNA, 19 nt, Artificial Sequence
  Description of Artificial Sequence: Synthetic oligonucleotide
  Antisense strand to SEQ ID NO: 1252312
uuucucacgagccagcugc

SEQ ID NO: 1252314 - RNA, 19 nt, Artificial Sequence
  Description of Artificial Sequence: Synthetic oligonucleotide
  Sense strand starting at position 2022 of SEQ ID NO: 1241173
caacaugcguucucgacuu

SEQ ID NO: 1252315 - RNA, 19 nt, Artificial Sequence
  Description of Artificial Sequence: Synthetic oligonucleotide
  Antisense strand to SEQ ID NO: 1252314
aagucgagaacgcauguug

SEQ ID NO: 1252316 - RNA, 19 nt, Artificial Sequence
  Description of Artificial Sequence: Synthetic oligonucleotide
  Sense strand starting at position 2024 of SEQ ID NO: 1241173
acaugcguucucgacuuaa

SEQ ID NO: 1252317 - RNA, 19 nt, Artificial Sequence
  Description of Artificial Sequence: Synthetic oligonucleotide
  Antisense strand to SEQ ID NO: 1252316
uuaagucgagaacgcaugu

SEQ ID NO: 1252318 - RNA, 19 nt, Artificial Sequence
  Description of Artificial Sequence: Synthetic oligonucleotide
  Sense strand starting at position 2026 of SEQ ID NO: 1241173
augcguucucgacuuaagu

SEQ ID NO: 1252319 - RNA, 19 nt, Artificial Sequence
  Description of Artificial Sequence: Synthetic oligonucleotide
  Antisense strand to SEQ ID NO: 1252318
acuuaagucgagaacgcau

SEQ ID NO: 1252320 - RNA, 19 nt, Artificial Sequence
  Description of Artificial Sequence: Synthetic oligonucleotide
  Sense strand starting at position 2027 of SEQ ID NO: 1241173
ugcguucucgacuuaagua

SEQ ID NO: 1252321 - RNA, 19 nt, Artificial Sequence
  Description of Artificial Sequence: Synthetic oligonucleotide
  Antisense strand to SEQ ID NO: 1252320
uacuuaagucgagaacgca

SEQ ID NO: 1252322 - RNA, 19 nt, Artificial Sequence
  Description of Artificial Sequence: Synthetic oligonucleotide
  Sense strand starting at position 2028 of SEQ ID NO: 1241173
gcguucucgacuuaaguaa

SEQ ID NO: 1252323 - RNA, 19 nt, Artificial Sequence
  Description of Artificial Sequence: Synthetic oligonucleotide
  Antisense strand to SEQ ID NO: 1252322
uuacuuaagucgagaacgc

SEQ ID NO: 1252324 - RNA, 19 nt, Artificial Sequence
  Description of Artificial Sequence: Synthetic oligonucleotide
  Sense strand starting at position 2204 of SEQ ID NO: 1241173
gcaguuagggcucgaggua

SEQ ID NO: 1252325 - RNA, 19 nt, Artificial Sequence
  Description of Artificial Sequence: Synthetic oligonucleotide
  Antisense strand to SEQ ID NO: 1252324
uaccucgagcccuaacugc

SEQ ID NO: 1252326 - RNA, 19 nt, Artificial Sequence
  Description of Artificial Sequence: Synthetic oligonucleotide
  Sense strand starting at position 2377 of SEQ ID NO: 1241173
cucaguagugcccaagaaa

SEQ ID NO: 1252327 - RNA, 19 nt, Artificial Sequence
  Description of Artificial Sequence: Synthetic oligonucleotide
  Antisense strand to SEQ ID NO: 1252326
uuucuugggcacuacugag

SEQ ID NO: 1252328 - RNA, 19 nt, Artificial Sequence
  Description of Artificial Sequence: Synthetic oligonucleotide
  Sense strand starting at position 2448 of SEQ ID NO: 1241173
agggauuccuucugacuga

SEQ ID NO: 1252329 - RNA, 19 nt, Artificial Sequence
  Description of Artificial Sequence: Synthetic oligonucleotide
  Antisense strand to SEQ ID NO: 1252328
ucagucagaaggaaucccu

SEQ ID NO: 1252330 - RNA, 19 nt, Artificial Sequence
  Description of Artificial Sequence: Synthetic oligonucleotide
  Sense strand starting at position 2478 of SEQ ID NO: 1241173
agagccaguucucagggau

SEQ ID NO: 1252331 - RNA, 19 nt, Artificial Sequence
  Description of Artificial Sequence: Synthetic oligonucleotide
  Antisense strand to SEQ ID NO: 1252330
aucccugagaacuggcucu

SEQ ID NO: 1252332 - RNA, 19 nt, Artificial Sequence
  Description of Artificial Sequence: Synthetic oligonucleotide
  Sense strand starting at position 2516 of SEQ ID NO: 1241173
ggcuucaguuacuggagua

SEQ ID NO: 1252333 - RNA, 19 nt, Artificial Sequence
  Description of Artificial Sequence: Synthetic oligonucleotide
  Antisense strand to SEQ ID NO: 1252332
uacuccaguaacugaagcc

SEQ ID NO: 1252334 - RNA, 19 nt, Artificial Sequence
  Description of Artificial Sequence: Synthetic oligonucleotide
  Sense strand starting at position 2521 of SEQ ID NO: 1241173
caguuacuggaguaacgaa

SEQ ID NO: 1252335 - RNA, 19 nt, Artificial Sequence
  Description of Artificial Sequence: Synthetic oligonucleotide
  Antisense strand to SEQ ID NO: 1252334
uucguuacuccaguaacug

SEQ ID NO: 1252336 - RNA, 19 nt, Artificial Sequence
  Description of Artificial Sequence: Synthetic oligonucleotide
  Sense strand starting at position 2566 of SEQ ID NO: 1241173
uagacuugcccucggagga

SEQ ID NO: 1252337 - RNA, 19 nt, Artificial Sequence
  Description of Artificial Sequence: Synthetic oligonucleotide
  Antisense strand to SEQ ID NO: 1252336
uccuccgagggcaagucua

SEQ ID NO: 1252338 - RNA, 19 nt, Artificial Sequence
  Description of Artificial Sequence: Synthetic oligonucleotide
  Sense strand starting at position 2567 of SEQ ID NO: 1241173
agacuugcccucggaggau

SEQ ID NO: 1252339 - RNA, 19 nt, Artificial Sequence
  Description of Artificial Sequence: Synthetic oligonucleotide
  Antisense strand to SEQ ID NO: 1252338
auccuccgagggcaagucu

SEQ ID NO: 1252340 - RNA, 19 nt, Artificial Sequence
  Description of Artificial Sequence: Synthetic oligonucleotide
  Sense strand starting at position 2682 of SEQ ID NO: 1241173
caggcuguuucgcgcaaca

SEQ ID NO: 1252341 - RNA, 19 nt, Artificial Sequence
  Description of Artificial Sequence: Synthetic oligonucleotide
  Antisense strand to SEQ ID NO: 1252340
uguugcgcgaaacagccug

SEQ ID NO: 1252342 - RNA, 19 nt, Artificial Sequence
  Description of Artificial Sequence: Synthetic oligonucleotide
  Sense strand starting at position 2684 of SEQ ID NO: 1241173
ggcuguuucgcgcaacauc

SEQ ID NO: 1252343 - RNA, 19 nt, Artificial Sequence
  Description of Artificial Sequence: Synthetic oligonucleotide
  Antisense strand to SEQ ID NO: 1252342
gauguugcgcgaaacagcc

SEQ ID NO: 1252344 - RNA, 19 nt, Artificial Sequence
  Description of Artificial Sequence: Synthetic oligonucleotide
  Sense strand starting at position 2884 of SEQ ID NO: 1241173
ggagcuuguucaggucacu

SEQ ID NO: 1252345 - RNA, 19 nt, Artificial Sequence
  Description of Artificial Sequence: Synthetic oligonucleotide
  Antisense strand to SEQ ID NO: 1252344
agugaccugaacaagcucc

SEQ ID NO: 1252346 - RNA, 19 nt, Artificial Sequence
  Description of Artificial Sequence: Synthetic oligonucleotide
  Sense strand starting at position 2893 of SEQ ID NO: 1241173
ucaggucacucaggaucau

SEQ ID NO: 1252347 - RNA, 19 nt, Artificial Sequence
  Description of Artificial Sequence: Synthetic oligonucleotide
  Antisense strand to SEQ ID NO: 1252346
augauccugagugaccuga

SEQ ID NO: 1252348 - RNA, 19 nt, Artificial Sequence
  Description of Artificial Sequence: Synthetic oligonucleotide
  Sense strand starting at position 3571 of SEQ ID NO: 1241173
accagaguuugcugcuguu

SEQ ID NO: 1252349 - RNA, 19 nt, Artificial Sequence
  Description of Artificial Sequence: Synthetic oligonucleotide
  Antisense strand to SEQ ID NO: 1252348
aacagcagcaaacucuggu

SEQ ID NO: 1252350 - RNA, 19 nt, Artificial Sequence
  Description of Artificial Sequence: Synthetic oligonucleotide
  Sense strand starting at position 3575 of SEQ ID NO: 1241173
gaguuugcugcuguuccua

SEQ ID NO: 1252351 - RNA, 19 nt, Artificial Sequence
  Description of Artificial Sequence: Synthetic oligonucleotide
  Antisense strand to SEQ ID NO: 1252350
uaggaacagcagcaaacuc

SEQ ID NO: 1252352 - RNA, 19 nt, Artificial Sequence
  Description of Artificial Sequence: Synthetic oligonucleotide
  Sense strand starting at position 3623 of SEQ ID NO: 1241173
aggucaauuccagagcugu

SEQ ID NO: 1252353 - RNA, 19 nt, Artificial Sequence
  Description of Artificial Sequence: Synthetic oligonucleotide
  Antisense strand to SEQ ID NO: 1252352
acagcucuggaauugaccu

SEQ ID NO: 1252354 - RNA, 19 nt, Artificial Sequence
  Description of Artificial Sequence: Synthetic oligonucleotide
  Sense strand starting at position 3900 of SEQ ID NO: 1241173
cgauauugcccuggcagga

SEQ ID NO: 1252355 - RNA, 19 nt, Artificial Sequence
  Description of Artificial Sequence: Synthetic oligonucleotide
  Antisense strand to SEQ ID NO: 1252354
uccugccagggcaauaucg

SEQ ID NO: 1252356 - RNA, 19 nt, Artificial Sequence
  Description of Artificial Sequence: Synthetic oligonucleotide
  Sense strand starting at position 3921 of SEQ ID NO: 1241173
gggcaauguaugggucagu

SEQ ID NO: 1252357 - RNA, 19 nt, Artificial Sequence
  Description of Artificial Sequence: Synthetic oligonucleotide
  Antisense strand to SEQ ID NO: 1252356
acugacccauacauugccc

SEQ ID NO: 1252358 - RNA, 19 nt, Artificial Sequence
  Description of Artificial Sequence: Synthetic oligonucleotide
  Sense strand starting at position 143 of SEQ ID NO: 1241174
gugugugaucuugaaagac

SEQ ID NO: 1252359 - RNA, 19 nt, Artificial Sequence
  Description of Artificial Sequence: Synthetic oligonucleotide
  Antisense strand to SEQ ID NO: 1252358
gucuuucaagaucacacac

SEQ ID NO: 1252360 - RNA, 19 nt, Artificial Sequence
  Description of Artificial Sequence: Synthetic oligonucleotide
  Sense strand starting at position 164 of SEQ ID NO: 1241174
cucgguucgugaauggcau

SEQ ID NO: 1252361 - RNA, 19 nt, Artificial Sequence
  Description of Artificial Sequence: Synthetic oligonucleotide
  Antisense strand to SEQ ID NO: 1252360
augccauucacgaaccgag

SEQ ID NO: 1252362 - RNA, 19 nt, Artificial Sequence
  Description of Artificial Sequence: Synthetic oligonucleotide
  Sense strand starting at position 488 of SEQ ID NO: 1241174
gaaagaagguuuccuuggu

SEQ ID NO: 1252363 - RNA, 19 nt, Artificial Sequence
  Description of Artificial Sequence: Synthetic oligonucleotide
  Antisense strand to SEQ ID NO: 1252362
accaaggaaaccuucuuuc

SEQ ID NO: 1252364 - RNA, 19 nt, Artificial Sequence
  Description of Artificial Sequence: Synthetic oligonucleotide
  Sense strand starting at position 489 of SEQ ID NO: 1241174
aaagaagguuuccuugguu

SEQ ID NO: 1252365 - RNA, 19 nt, Artificial Sequence
  Description of Artificial Sequence: Synthetic oligonucleotide
  Antisense strand to SEQ ID NO: 1252364
aaccaaggaaaccuucuuu

SEQ ID NO: 1252366 - RNA, 19 nt, Artificial Sequence
  Description of Artificial Sequence: Synthetic oligonucleotide
  Sense strand starting at position 492 of SEQ ID NO: 1241174
gaagguuuccuugguuaga

SEQ ID NO: 1252367 - RNA, 19 nt, Artificial Sequence
  Description of Artificial Sequence: Synthetic oligonucleotide
  Antisense strand to SEQ ID NO: 1252366
ucuaaccaaggaaaccuuc

SEQ ID NO: 1252368 - RNA, 19 nt, Artificial Sequence
  Description of Artificial Sequence: Synthetic oligonucleotide
  Sense strand starting at position 493 of SEQ ID NO: 1241174
aagguuuccuugguuagac

SEQ ID NO: 1252369 - RNA, 19 nt, Artificial Sequence
  Description of Artificial Sequence: Synthetic oligonucleotide
  Antisense strand to SEQ ID NO: 1252368
gucuaaccaaggaaaccuu

SEQ ID NO: 1252370 - RNA, 19 nt, Artificial Sequence
  Description of Artificial Sequence: Synthetic oligonucleotide
  Sense strand starting at position 601 of SEQ ID NO: 1241174
caauauucguacuuugaag

SEQ ID NO: 1252371 - RNA, 19 nt, Artificial Sequence
  Description of Artificial Sequence: Synthetic oligonucleotide
  Antisense strand to SEQ ID NO: 1252370
cuucaaaguacgaauauug

SEQ ID NO: 1252372 - RNA, 19 nt, Artificial Sequence
  Description of Artificial Sequence: Synthetic oligonucleotide
  Sense strand starting at position 603 of SEQ ID NO: 1241174
auauucguacuuugaagau

SEQ ID NO: 1252373 - RNA, 19 nt, Artificial Sequence
  Description of Artificial Sequence: Synthetic oligonucleotide
  Antisense strand to SEQ ID NO: 1252372
aucuucaaaguacgaauau

SEQ ID NO: 1252374 - RNA, 19 nt, Artificial Sequence
  Description of Artificial Sequence: Synthetic oligonucleotide
  Sense strand starting at position 874 of SEQ ID NO: 1241174
uugcuuuggcauuaugaug

SEQ ID NO: 1252375 - RNA, 19 nt, Artificial Sequence
  Description of Artificial Sequence: Synthetic oligonucleotide
  Antisense strand to SEQ ID NO: 1252374
caucauaaugccaaagcaa

SEQ ID NO: 1252376 - RNA, 19 nt, Artificial Sequence
  Description of Artificial Sequence: Synthetic oligonucleotide
  Sense strand starting at position 915 of SEQ ID NO: 1241174
gucguuugucauguuuaac

SEQ ID NO: 1252377 - RNA, 19 nt, Artificial Sequence
  Description of Artificial Sequence: Synthetic oligonucleotide
  Antisense strand to SEQ ID NO: 1252376
guuaaacaugacaaacgac

SEQ ID NO: 1252378 - RNA, 19 nt, Artificial Sequence
  Description of Artificial Sequence: Synthetic oligonucleotide
  Sense strand starting at position 918 of SEQ ID NO: 1241174
guuugucauguuuaaccca

SEQ ID NO: 1252379 - RNA, 19 nt, Artificial Sequence
  Description of Artificial Sequence: Synthetic oligonucleotide
  Antisense strand to SEQ ID NO: 1252378
uggguuaaacaugacaaac

SEQ ID NO: 1252380 - RNA, 19 nt, Artificial Sequence
  Description of Artificial Sequence: Synthetic oligonucleotide
  Sense strand starting at position 976 of SEQ ID NO: 1241174
agagacuucuguucuugau

SEQ ID NO: 1252381 - RNA, 19 nt, Artificial Sequence
  Description of Artificial Sequence: Synthetic oligonucleotide
  Antisense strand to SEQ ID NO: 1252380
aucaagaacagaagucucu

SEQ ID NO: 1252382 - RNA, 19 nt, Artificial Sequence
  Description of Artificial Sequence: Synthetic oligonucleotide
  Sense strand starting at position 1019 of SEQ ID NO: 1241174
ugguuuauuccaugagaac

SEQ ID NO: 1252383 - RNA, 19 nt, Artificial Sequence
  Description of Artificial Sequence: Synthetic oligonucleotide
  Antisense strand to SEQ ID NO: 1252382
guucucauggaauaaacca

SEQ ID NO: 1252384 - RNA, 19 nt, Artificial Sequence
  Description of Artificial Sequence: Synthetic oligonucleotide
  Sense strand starting at position 1064 of SEQ ID NO: 1241174
gguucuuccuucuugauuu

SEQ ID NO: 1252385 - RNA, 19 nt, Artificial Sequence
  Description of Artificial Sequence: Synthetic oligonucleotide
  Antisense strand to SEQ ID NO: 1252384
aaaucaagaaggaagaacc

SEQ ID NO: 1252386 - RNA, 19 nt, Artificial Sequence
  Description of Artificial Sequence: Synthetic oligonucleotide
  Sense strand starting at position 1085 of SEQ ID NO: 1241174
cugggagaugacuguaauu

SEQ ID NO: 1252387 - RNA, 19 nt, Artificial Sequence
  Description of Artificial Sequence: Synthetic oligonucleotide
  Antisense strand to SEQ ID NO: 1252386
aauuacagucaucucccag

SEQ ID NO: 1252388 - RNA, 19 nt, Artificial Sequence
  Description of Artificial Sequence: Synthetic oligonucleotide
  Sense strand starting at position 1676 of SEQ ID NO: 1241174
gagggaauccaacgguguu

SEQ ID NO: 1252389 - RNA, 19 nt, Artificial Sequence
  Description of Artificial Sequence: Synthetic oligonucleotide
  Antisense strand to SEQ ID NO: 1252388
aacaccguuggauucccuc

SEQ ID NO: 1252390 - RNA, 19 nt, Artificial Sequence
  Description of Artificial Sequence: Synthetic oligonucleotide
  Sense strand starting at position 1788 of SEQ ID NO: 1241174
ucaugacagguuugaucau

SEQ ID NO: 1252391 - RNA, 19 nt, Artificial Sequence
  Description of Artificial Sequence: Synthetic oligonucleotide
  Antisense strand to SEQ ID NO: 1252390
augaucaaaccugucauga

SEQ ID NO: 1252392 - RNA, 19 nt, Artificial Sequence
  Description of Artificial Sequence: Synthetic oligonucleotide
  Sense strand starting at position 1829 of SEQ ID NO: 1241174
ugucauggugaugaagagu

SEQ ID NO: 1252393 - RNA, 19 nt, Artificial Sequence
  Description of Artificial Sequence: Synthetic oligonucleotide
  Antisense strand to SEQ ID NO: 1252392
acucuucaucaccaugaca

SEQ ID NO: 1252394 - RNA, 19 nt, Artificial Sequence
  Description of Artificial Sequence: Synthetic oligonucleotide
  Sense strand starting at position 1889 of SEQ ID NO: 1241174
ggcuuccuccucuacagua

SEQ ID NO: 1252395 - RNA, 19 nt, Artificial Sequence
  Description of Artificial Sequence: Synthetic oligonucleotide
  Antisense strand to SEQ ID NO: 1252394
uacuguagaggaggaagcc

SEQ ID NO: 1252396 - RNA, 19 nt, Artificial Sequence
  Description of Artificial Sequence: Synthetic oligonucleotide
  Sense strand starting at position 1916 of SEQ ID NO: 1241174
gagaauggcugcuuccuaa

SEQ ID NO: 1252397 - RNA, 19 nt, Artificial Sequence
  Description of Artificial Sequence: Synthetic oligonucleotide
  Antisense strand to SEQ ID NO: 1252396
uuaggaagcagccauucuc

SEQ ID NO: 1252398 - RNA, 19 nt, Artificial Sequence
  Description of Artificial Sequence: Synthetic oligonucleotide
  Sense strand starting at position 1984 of SEQ ID NO: 1241174
gugguaacuauggguauga

SEQ ID NO: 1252399 - RNA, 19 nt, Artificial Sequence
  Description of Artificial Sequence: Synthetic oligonucleotide
  Antisense strand to SEQ ID NO: 1252398
ucauacccauaguuaccac

SEQ ID NO: 1252400 - RNA, 19 nt, Artificial Sequence
  Description of Artificial Sequence: Synthetic oligonucleotide
  Sense strand starting at position 1985 of SEQ ID NO: 1241174
ugguaacuauggguaugau

SEQ ID NO: 1252401 - RNA, 19 nt, Artificial Sequence
  Description of Artificial Sequence: Synthetic oligonucleotide
  Antisense strand to SEQ ID NO: 1252400
aucauacccauaguuacca

SEQ ID NO: 1252402 - RNA, 19 nt, Artificial Sequence
  Description of Artificial Sequence: Synthetic oligonucleotide
  Sense strand starting at position 1986 of SEQ ID NO: 1241174
gguaacuauggguaugauu

SEQ ID NO: 1252403 - RNA, 19 nt, Artificial Sequence
  Description of Artificial Sequence: Synthetic oligonucleotide
  Antisense strand to SEQ ID NO: 1252402
aaucauacccauaguuacc

SEQ ID NO: 1252404 - RNA, 19 nt, Artificial Sequence
  Description of Artificial Sequence: Synthetic oligonucleotide
  Sense strand starting at position 2097 of SEQ ID NO: 1241174
gcuacagggccucaauguu

SEQ ID NO: 1252405 - RNA, 19 nt, Artificial Sequence
  Description of Artificial Sequence: Synthetic oligonucleotide
  Antisense strand to SEQ ID NO: 1252404
aacauugaggcccuguagc

SEQ ID NO: 1252406 - RNA, 19 nt, Artificial Sequence
  Description of Artificial Sequence: Synthetic oligonucleotide
  Sense strand starting at position 2231 of SEQ ID NO: 1241174
gggagaucuaccugcacau

SEQ ID NO: 1252407 - RNA, 19 nt, Artificial Sequence
  Description of Artificial Sequence: Synthetic oligonucleotide
  Antisense strand to SEQ ID NO: 1252406
augugcagguagaucuccc

SEQ ID NO: 1252408 - RNA, 19 nt, Artificial Sequence
  Description of Artificial Sequence: Synthetic oligonucleotide
  Sense strand starting at position 2343 of SEQ ID NO: 1241174
ccuugaguccagggagauu

SEQ ID NO: 1252409 - RNA, 19 nt, Artificial Sequence
  Description of Artificial Sequence: Synthetic oligonucleotide
  Antisense strand to SEQ ID NO: 1252408
aaucucccuggacucaagg

SEQ ID NO: 1252410 - RNA, 19 nt, Artificial Sequence
  Description of Artificial Sequence: Synthetic oligonucleotide
  Sense strand starting at position 2707 of SEQ ID NO: 1241174
ggccacauuucuguauauc

SEQ ID NO: 1252411 - RNA, 19 nt, Artificial Sequence
  Description of Artificial Sequence: Synthetic oligonucleotide
  Antisense strand to SEQ ID NO: 1252410
gauauacagaaauguggcc

SEQ ID NO: 1252412 - RNA, 19 nt, Artificial Sequence
  Description of Artificial Sequence: Synthetic oligonucleotide
  Sense strand starting at position 2756 of SEQ ID NO: 1241174
uugaucaucuuuccaagga

SEQ ID NO: 1252413 - RNA, 19 nt, Artificial Sequence
  Description of Artificial Sequence: Synthetic oligonucleotide
  Antisense strand to SEQ ID NO: 1252412
uccuuggaaagaugaucaa

SEQ ID NO: 1252414 - RNA, 19 nt, Artificial Sequence
  Description of Artificial Sequence: Synthetic oligonucleotide
  Sense strand starting at position 2760 of SEQ ID NO: 1241174
ucaucuuuccaaggaugcu

SEQ ID NO: 1252415 - RNA, 19 nt, Artificial Sequence
  Description of Artificial Sequence: Synthetic oligonucleotide
  Antisense strand to SEQ ID NO: 1252414
agcauccuuggaaagauga

SEQ ID NO: 1252416 - RNA, 19 nt, Artificial Sequence
  Description of Artificial Sequence: Synthetic oligonucleotide
  Sense strand starting at position 2807 of SEQ ID NO: 1241174
gaugcuguuucuccagaga

SEQ ID NO: 1252417 - RNA, 19 nt, Artificial Sequence
  Description of Artificial Sequence: Synthetic oligonucleotide
  Antisense strand to SEQ ID NO: 1252416
ucucuggagaaacagcauc

SEQ ID NO: 1252418 - RNA, 19 nt, Artificial Sequence
  Description of Artificial Sequence: Synthetic oligonucleotide
  Sense strand starting at position 2810 of SEQ ID NO: 1241174
gcuguuucuccagagaaag

SEQ ID NO: 1252419 - RNA, 19 nt, Artificial Sequence
  Description of Artificial Sequence: Synthetic oligonucleotide
  Antisense strand to SEQ ID NO: 1252418
cuuucucuggagaaacagc

SEQ ID NO: 1252420 - RNA, 19 nt, Artificial Sequence
  Description of Artificial Sequence: Synthetic oligonucleotide
  Sense strand starting at position 2976 of SEQ ID NO: 1241174
ccaugauuaugccuguaau

SEQ ID NO: 1252421 - RNA, 19 nt, Artificial Sequence
  Description of Artificial Sequence: Synthetic oligonucleotide
  Antisense strand to SEQ ID NO: 1252420
auuacaggcauaaucaugg

SEQ ID NO: 1252422 - RNA, 19 nt, Artificial Sequence
  Description of Artificial Sequence: Synthetic oligonucleotide
  Sense strand starting at position 3680 of SEQ ID NO: 1241174
auuuguaacuauugggaaa

SEQ ID NO: 1252423 - RNA, 19 nt, Artificial Sequence
  Description of Artificial Sequence: Synthetic oligonucleotide
  Antisense strand to SEQ ID NO: 1252422
uuucccaauaguuacaaau

SEQ ID NO: 1252424 - RNA, 19 nt, Artificial Sequence
  Description of Artificial Sequence: Synthetic oligonucleotide
  Sense strand starting at position 3681 of SEQ ID NO: 1241174
uuuguaacuauugggaaag

SEQ ID NO: 1252425 - RNA, 19 nt, Artificial Sequence
  Description of Artificial Sequence: Synthetic oligonucleotide
  Antisense strand to SEQ ID NO: 1252424
cuuucccaauaguuacaaa

SEQ ID NO: 1252426 - RNA, 19 nt, Artificial Sequence
  Description of Artificial Sequence: Synthetic oligonucleotide
  Sense strand starting at position 3692 of SEQ ID NO: 1241174
ugggaaagugucuagcuuu

SEQ ID NO: 1252427 - RNA, 19 nt, Artificial Sequence
  Description of Artificial Sequence: Synthetic oligonucleotide
  Antisense strand to SEQ ID NO: 1252426
aaagcuagacacuuuccca

SEQ ID NO: 1252428 - RNA, 19 nt, Artificial Sequence
  Description of Artificial Sequence: Synthetic oligonucleotide
  Sense strand starting at position 3843 of SEQ ID NO: 1241174
cgaauucagcaguauguga

SEQ ID NO: 1252429 - RNA, 19 nt, Artificial Sequence
  Description of Artificial Sequence: Synthetic oligonucleotide
  Antisense strand to SEQ ID NO: 1252428
ucacauacugcugaauucg

SEQ ID NO: 1252430 - RNA, 19 nt, Artificial Sequence
  Description of Artificial Sequence: Synthetic oligonucleotide
  Sense strand starting at position 3878 of SEQ ID NO: 1241174
guuauaugugcugaugaau

SEQ ID NO: 1252431 - RNA, 19 nt, Artificial Sequence
  Description of Artificial Sequence: Synthetic oligonucleotide
  Antisense strand to SEQ ID NO: 1252430
auucaucagcacauauaac

SEQ ID NO: 1252432 - RNA, 19 nt, Artificial Sequence
  Description of Artificial Sequence: Synthetic oligonucleotide
  Sense strand starting at position 3881 of SEQ ID NO: 1241174
auaugugcugaugaauuau

SEQ ID NO: 1252433 - RNA, 19 nt, Artificial Sequence
  Description of Artificial Sequence: Synthetic oligonucleotide
  Antisense strand to SEQ ID NO: 1252432
auaauucaucagcacauau

SEQ ID NO: 1252434 - RNA, 19 nt, Artificial Sequence
  Description of Artificial Sequence: Synthetic oligonucleotide
  Sense strand starting at position 3915 of SEQ ID NO: 1241174
ccauuugaauuggaguuua

SEQ ID NO: 1252435 - RNA, 19 nt, Artificial Sequence
  Description of Artificial Sequence: Synthetic oligonucleotide
  Antisense strand to SEQ ID NO: 1252434
uaaacuccaauucaaaugg

SEQ ID NO: 1252436 - RNA, 19 nt, Artificial Sequence
  Description of Artificial Sequence: Synthetic oligonucleotide
  Sense strand starting at position 3983 of SEQ ID NO: 1241174
aguauaaacugguuucuag

SEQ ID NO: 1252437 - RNA, 19 nt, Artificial Sequence
  Description of Artificial Sequence: Synthetic oligonucleotide
  Antisense strand to SEQ ID NO: 1252436
cuagaaaccaguuuauacu

SEQ ID NO: 1252438 - RNA, 19 nt, Artificial Sequence
  Description of Artificial Sequence: Synthetic oligonucleotide
  Sense strand starting at position 35 of SEQ ID NO: 1241175
ccuuuagucuugcugaaga

SEQ ID NO: 1252439 - RNA, 19 nt, Artificial Sequence
  Description of Artificial Sequence: Synthetic oligonucleotide
  Antisense strand to SEQ ID NO: 1252438
ucuucagcaagacuaaagg

SEQ ID NO: 1252440 - RNA, 19 nt, Artificial Sequence
  Description of Artificial Sequence: Synthetic oligonucleotide
  Sense strand starting at position 72 of SEQ ID NO: 1241175
gaaucaaucugccuguggu

SEQ ID NO: 1252441 - RNA, 19 nt, Artificial Sequence
  Description of Artificial Sequence: Synthetic oligonucleotide
  Antisense strand to SEQ ID NO: 1252440
accacaggcagauugauuc

SEQ ID NO: 1252442 - RNA, 19 nt, Artificial Sequence
  Description of Artificial Sequence: Synthetic oligonucleotide
  Sense strand starting at position 352 of SEQ ID NO: 1241175
uauuguaggugcucaagga

SEQ ID NO: 1252443 - RNA, 19 nt, Artificial Sequence
  Description of Artificial Sequence: Synthetic oligonucleotide
  Antisense strand to SEQ ID NO: 1252442
uccuugagcaccuacaaua

SEQ ID NO: 1252444 - RNA, 19 nt, Artificial Sequence
  Description of Artificial Sequence: Synthetic oligonucleotide
  Sense strand starting at position 353 of SEQ ID NO: 1241175
auuguaggugcucaaggaa

SEQ ID NO: 1252445 - RNA, 19 nt, Artificial Sequence
  Description of Artificial Sequence: Synthetic oligonucleotide
  Antisense strand to SEQ ID NO: 1252444
uuccuugagcaccuacaau

SEQ ID NO: 1252446 - RNA, 19 nt, Artificial Sequence
  Description of Artificial Sequence: Synthetic oligonucleotide
  Sense strand starting at position 356 of SEQ ID NO: 1241175
guaggugcucaaggaaaga

SEQ ID NO: 1252447 - RNA, 19 nt, Artificial Sequence
  Description of Artificial Sequence: Synthetic oligonucleotide
  Antisense strand to SEQ ID NO: 1252446
ucuuuccuugagcaccuac

SEQ ID NO: 1252448 - RNA, 19 nt, Artificial Sequence
  Description of Artificial Sequence: Synthetic oligonucleotide
  Sense strand starting at position 411 of SEQ ID NO: 1241175
gagcaauaagugcaaggau

SEQ ID NO: 1252449 - RNA, 19 nt, Artificial Sequence
  Description of Artificial Sequence: Synthetic oligonucleotide
  Antisense strand to SEQ ID NO: 1252448
auccuugcacuuauugcuc

SEQ ID NO: 1252450 - RNA, 19 nt, Artificial Sequence
  Description of Artificial Sequence: Synthetic oligonucleotide
  Sense strand starting at position 467 of SEQ ID NO: 1241175
aggaggaggccguggaauu

SEQ ID NO: 1252451 - RNA, 19 nt, Artificial Sequence
  Description of Artificial Sequence: Synthetic oligonucleotide
  Antisense strand to SEQ ID NO: 1252450
aauuccacggccuccuccu

SEQ ID NO: 1252452 - RNA, 19 nt, Artificial Sequence
  Description of Artificial Sequence: Synthetic oligonucleotide
  Sense strand starting at position 474 of SEQ ID NO: 1241175
ggccguggaauuugugagu

SEQ ID NO: 1252453 - RNA, 19 nt, Artificial Sequence
  Description of Artificial Sequence: Synthetic oligonucleotide
  Antisense strand to SEQ ID NO: 1252452
acucacaaauuccacggcc

SEQ ID NO: 1252454 - RNA, 19 nt, Artificial Sequence
  Description of Artificial Sequence: Synthetic oligonucleotide
  Sense strand starting at position 517 of SEQ ID NO: 1241175
guagaucuacacugugaac

SEQ ID NO: 1252455 - RNA, 19 nt, Artificial Sequence
  Description of Artificial Sequence: Synthetic oligonucleotide
  Antisense strand to SEQ ID NO: 1252454
guucacaguguagaucuac

SEQ ID NO: 1252456 - RNA, 19 nt, Artificial Sequence
  Description of Artificial Sequence: Synthetic oligonucleotide
  Sense strand starting at position 626 of SEQ ID NO: 1241175
ugcagauaaagucauaggu

SEQ ID NO: 1252457 - RNA, 19 nt, Artificial Sequence
  Description of Artificial Sequence: Synthetic oligonucleotide
  Antisense strand to SEQ ID NO: 1252456
accuaugacuuuaucugca

SEQ ID NO: 1252458 - RNA, 19 nt, Artificial Sequence
  Description of Artificial Sequence: Synthetic oligonucleotide
  Sense strand starting at position 724 of SEQ ID NO: 1241175
gggauccucccuuguugaa

SEQ ID NO: 1252459 - RNA, 19 nt, Artificial Sequence
  Description of Artificial Sequence: Synthetic oligonucleotide
  Antisense strand to SEQ ID NO: 1252458
uucaacaagggaggauccc

SEQ ID NO: 1252460 - RNA, 19 nt, Artificial Sequence
  Description of Artificial Sequence: Synthetic oligonucleotide
  Sense strand starting at position 726 of SEQ ID NO: 1241175
gauccucccuuguugaaga

SEQ ID NO: 1252461 - RNA, 19 nt, Artificial Sequence
  Description of Artificial Sequence: Synthetic oligonucleotide
  Antisense strand to SEQ ID NO: 1252460
ucuucaacaagggaggauc

SEQ ID NO: 1252462 - RNA, 19 nt, Artificial Sequence
  Description of Artificial Sequence: Synthetic oligonucleotide
  Sense strand starting at position 766 of SEQ ID NO: 1241175
ggaagcaucaguggacaaa

SEQ ID NO: 1252463 - RNA, 19 nt, Artificial Sequence
  Description of Artificial Sequence: Synthetic oligonucleotide
  Antisense strand to SEQ ID NO: 1252462
uuuguccacugaugcuucc

SEQ ID NO: 1252464 - RNA, 19 nt, Artificial Sequence
  Description of Artificial Sequence: Synthetic oligonucleotide
  Sense strand starting at position 780 of SEQ ID NO: 1241175
acaaaugguucugugccau

SEQ ID NO: 1252465 - RNA, 19 nt, Artificial Sequence
  Description of Artificial Sequence: Synthetic oligonucleotide
  Antisense strand to SEQ ID NO: 1252464
auggcacagaaccauuugu

SEQ ID NO: 1252466 - RNA, 19 nt, Artificial Sequence
  Description of Artificial Sequence: Synthetic oligonucleotide
  Sense strand starting at position 837 of SEQ ID NO: 1241175
agggauuccugaguaucug

SEQ ID NO: 1252467 - RNA, 19 nt, Artificial Sequence
  Description of Artificial Sequence: Synthetic oligonucleotide
  Antisense strand to SEQ ID NO: 1252466
cagauacucaggaaucccu

SEQ ID NO: 1252468 - RNA, 19 nt, Artificial Sequence
  Description of Artificial Sequence: Synthetic oligonucleotide
  Sense strand starting at position 846 of SEQ ID NO: 1241175
ugaguaucugagugaugga

SEQ ID NO: 1252469 - RNA, 19 nt, Artificial Sequence
  Description of Artificial Sequence: Synthetic oligonucleotide
  Antisense strand to SEQ ID NO: 1252468
uccaucacucagauacuca

SEQ ID NO: 1252470 - RNA, 19 nt, Artificial Sequence
  Description of Artificial Sequence: Synthetic oligonucleotide
  Sense strand starting at position 957 of SEQ ID NO: 1241175
cagcaaccucugggugauu

SEQ ID NO: 1252471 - RNA, 19 nt, Artificial Sequence
  Description of Artificial Sequence: Synthetic oligonucleotide
  Antisense strand to SEQ ID NO: 1252470
aaucacccagagguugcug

SEQ ID NO: 1252472 - RNA, 19 nt, Artificial Sequence
  Description of Artificial Sequence: Synthetic oligonucleotide
  Sense strand starting at position 1332 of SEQ ID NO: 1241175
agaguauugagcugaggag

SEQ ID NO: 1252473 - RNA, 19 nt, Artificial Sequence
  Description of Artificial Sequence: Synthetic oligonucleotide
  Antisense strand to SEQ ID NO: 1252472
cuccucagcucaauacucu

SEQ ID NO: 1252474 - RNA, 19 nt, Artificial Sequence
  Description of Artificial Sequence: Synthetic oligonucleotide
  Sense strand starting at position 1333 of SEQ ID NO: 1241175
gaguauugagcugaggagu

SEQ ID NO: 1252475 - RNA, 19 nt, Artificial Sequence
  Description of Artificial Sequence: Synthetic oligonucleotide
  Antisense strand to SEQ ID NO: 1252474
acuccucagcucaauacuc

SEQ ID NO: 1252476 - RNA, 19 nt, Artificial Sequence
  Description of Artificial Sequence: Synthetic oligonucleotide
  Sense strand starting at position 1584 of SEQ ID NO: 1241175
gaugaugacuccuugucuu

SEQ ID NO: 1252477 - RNA, 19 nt, Artificial Sequence
  Description of Artificial Sequence: Synthetic oligonucleotide
  Antisense strand to SEQ ID NO: 1252476
aagacaaggagucaucauc

SEQ ID NO: 1252478 - RNA, 19 nt, Artificial Sequence
  Description of Artificial Sequence: Synthetic oligonucleotide
  Sense strand starting at position 1603 of SEQ ID NO: 1241175
gagucaccuucugugaaga

SEQ ID NO: 1252479 - RNA, 19 nt, Artificial Sequence
  Description of Artificial Sequence: Synthetic oligonucleotide
  Antisense strand to SEQ ID NO: 1252478
ucuucacagaaggugacuc

SEQ ID NO: 1252480 - RNA, 19 nt, Artificial Sequence
  Description of Artificial Sequence: Synthetic oligonucleotide
  Sense strand starting at position 1892 of SEQ ID NO: 1241175
uuuguaaaccgugagaaau

SEQ ID NO: 1252481 - RNA, 19 nt, Artificial Sequence
  Description of Artificial Sequence: Synthetic oligonucleotide
  Antisense strand to SEQ ID NO: 1252480
auuucucacgguuuacaaa

SEQ ID NO: 1252482 - RNA, 19 nt, Artificial Sequence
  Description of Artificial Sequence: Synthetic oligonucleotide
  Sense strand starting at position 1967 of SEQ ID NO: 1241175
ccaucuuacuauucgagaa

SEQ ID NO: 1252483 - RNA, 19 nt, Artificial Sequence
  Description of Artificial Sequence: Synthetic oligonucleotide
  Antisense strand to SEQ ID NO: 1252482
uucucgaauaguaagaugg

SEQ ID NO: 1252484 - RNA, 19 nt, Artificial Sequence
  Description of Artificial Sequence: Synthetic oligonucleotide
  Sense strand starting at position 1971 of SEQ ID NO: 1241175
cuuacuauucgagaacccu

SEQ ID NO: 1252485 - RNA, 19 nt, Artificial Sequence
  Description of Artificial Sequence: Synthetic oligonucleotide
  Antisense strand to SEQ ID NO: 1252484
aggguucucgaauaguaag

SEQ ID NO: 1252486 - RNA, 19 nt, Artificial Sequence
  Description of Artificial Sequence: Synthetic oligonucleotide
  Sense strand starting at position 2445 of SEQ ID NO: 1241175
ggcuucuguuaguccagaa

SEQ ID NO: 1252487 - RNA, 19 nt, Artificial Sequence
  Description of Artificial Sequence: Synthetic oligonucleotide
  Antisense strand to SEQ ID NO: 1252486
uucuggacuaacagaagcc

SEQ ID NO: 1252488 - RNA, 19 nt, Artificial Sequence
  Description of Artificial Sequence: Synthetic oligonucleotide
  Sense strand starting at position 2557 of SEQ ID NO: 1241175
caaugauuggcauggauug

SEQ ID NO: 1252489 - RNA, 19 nt, Artificial Sequence
  Description of Artificial Sequence: Synthetic oligonucleotide
  Antisense strand to SEQ ID NO: 1252488
caauccaugccaaucauug

SEQ ID NO: 1252490 - RNA, 19 nt, Artificial Sequence
  Description of Artificial Sequence: Synthetic oligonucleotide
  Sense strand starting at position 2564 of SEQ ID NO: 1241175
uggcauggauuguuuggaa

SEQ ID NO: 1252491 - RNA, 19 nt, Artificial Sequence
  Description of Artificial Sequence: Synthetic oligonucleotide
  Antisense strand to SEQ ID NO: 1252490
uuccaaacaauccaugcca

SEQ ID NO: 1252492 - RNA, 19 nt, Artificial Sequence
  Description of Artificial Sequence: Synthetic oligonucleotide
  Sense strand starting at position 2624 of SEQ ID NO: 1241175
agucaagggaaauguccua

SEQ ID NO: 1252493 - RNA, 19 nt, Artificial Sequence
  Description of Artificial Sequence: Synthetic oligonucleotide
  Antisense strand to SEQ ID NO: 1252492
uaggacauuucccuugacu

SEQ ID NO: 1252494 - RNA, 19 nt, Artificial Sequence
  Description of Artificial Sequence: Synthetic oligonucleotide
  Sense strand starting at position 2636 of SEQ ID NO: 1241175
uguccuaugguugggaagu

SEQ ID NO: 1252495 - RNA, 19 nt, Artificial Sequence
  Description of Artificial Sequence: Synthetic oligonucleotide
  Antisense strand to SEQ ID NO: 1252494
acuucccaaccauaggaca

SEQ ID NO: 1252496 - RNA, 19 nt, Artificial Sequence
  Description of Artificial Sequence: Synthetic oligonucleotide
  Sense strand starting at position 2830 of SEQ ID NO: 1241175
caaggcuaucuggaaaguu

SEQ ID NO: 1252497 - RNA, 19 nt, Artificial Sequence
  Description of Artificial Sequence: Synthetic oligonucleotide
  Antisense strand to SEQ ID NO: 1252496
aacuuuccagauagccuug

SEQ ID NO: 1252498 - RNA, 19 nt, Artificial Sequence
  Description of Artificial Sequence: Synthetic oligonucleotide
  Sense strand starting at position 2849 of SEQ ID NO: 1241175
acaucuguccucuggagac

SEQ ID NO: 1252499 - RNA, 19 nt, Artificial Sequence
  Description of Artificial Sequence: Synthetic oligonucleotide
  Antisense strand to SEQ ID NO: 1252498
gucuccagaggacagaugu

SEQ ID NO: 1252500 - RNA, 19 nt, Artificial Sequence
  Description of Artificial Sequence: Synthetic oligonucleotide
  Sense strand starting at position 3033 of SEQ ID NO: 1241175
cagagaucgucaucuaaau

SEQ ID NO: 1252501 - RNA, 19 nt, Artificial Sequence
  Description of Artificial Sequence: Synthetic oligonucleotide
  Antisense strand to SEQ ID NO: 1252500
auuuagaugacgaucucug

SEQ ID NO: 1252502 - RNA, 19 nt, Artificial Sequence
  Description of Artificial Sequence: Synthetic oligonucleotide
  Sense strand starting at position 3090 of SEQ ID NO: 1241175
auccuauguuaucccugau

SEQ ID NO: 1252503 - RNA, 19 nt, Artificial Sequence
  Description of Artificial Sequence: Synthetic oligonucleotide
  Antisense strand to SEQ ID NO: 1252502
aucagggauaacauaggau

SEQ ID NO: 1252504 - RNA, 19 nt, Artificial Sequence
  Description of Artificial Sequence: Synthetic oligonucleotide
  Sense strand starting at position 3093 of SEQ ID NO: 1241175
cuauguuaucccugaucac

SEQ ID NO: 1252505 - RNA, 19 nt, Artificial Sequence
  Description of Artificial Sequence: Synthetic oligonucleotide
  Antisense strand to SEQ ID NO: 1252504
gugaucagggauaacauag

SEQ ID NO: 1252506 - RNA, 19 nt, Artificial Sequence
  Description of Artificial Sequence: Synthetic oligonucleotide
  Sense strand starting at position 3096 of SEQ ID NO: 1241175
uguuaucccugaucacauu

SEQ ID NO: 1252507 - RNA, 19 nt, Artificial Sequence
  Description of Artificial Sequence: Synthetic oligonucleotide
  Antisense strand to SEQ ID NO: 1252506
aaugugaucagggauaaca

SEQ ID NO: 1252508 - RNA, 19 nt, Artificial Sequence
  Description of Artificial Sequence: Synthetic oligonucleotide
  Sense strand starting at position 3097 of SEQ ID NO: 1241175
guuaucccugaucacauua

SEQ ID NO: 1252509 - RNA, 19 nt, Artificial Sequence
  Description of Artificial Sequence: Synthetic oligonucleotide
  Antisense strand to SEQ ID NO: 1252508
uaaugugaucagggauaac

SEQ ID NO: 1252510 - RNA, 19 nt, Artificial Sequence
  Description of Artificial Sequence: Synthetic oligonucleotide
  Sense strand starting at position 3129 of SEQ ID NO: 1241175
ggcagaacuucugucagaa

SEQ ID NO: 1252511 - RNA, 19 nt, Artificial Sequence
  Description of Artificial Sequence: Synthetic oligonucleotide
  Antisense strand to SEQ ID NO: 1252510
uucugacagaaguucugcc

SEQ ID NO: 1252512 - RNA, 19 nt, Artificial Sequence
  Description of Artificial Sequence: Synthetic oligonucleotide
  Sense strand starting at position 3518 of SEQ ID NO: 1241175
cugguaagcugguuaauuc

SEQ ID NO: 1252513 - RNA, 19 nt, Artificial Sequence
  Description of Artificial Sequence: Synthetic oligonucleotide
  Antisense strand to SEQ ID NO: 1252512
gaauuaaccagcuuaccag

SEQ ID NO: 1252514 - RNA, 19 nt, Artificial Sequence
  Description of Artificial Sequence: Synthetic oligonucleotide
  Sense strand starting at position 3526 of SEQ ID NO: 1241175
cugguuaauucugcuacaa

SEQ ID NO: 1252515 - RNA, 19 nt, Artificial Sequence
  Description of Artificial Sequence: Synthetic oligonucleotide
  Antisense strand to SEQ ID NO: 1252514
uuguagcagaauuaaccag

SEQ ID NO: 1252516 - RNA, 19 nt, Artificial Sequence
  Description of Artificial Sequence: Synthetic oligonucleotide
  Sense strand starting at position 3595 of SEQ ID NO: 1241175
ggacucuaccgugggaaca

SEQ ID NO: 1252517 - RNA, 19 nt, Artificial Sequence
  Description of Artificial Sequence: Synthetic oligonucleotide
  Antisense strand to SEQ ID NO: 1252516
uguucccacgguagagucc

SEQ ID NO: 1252518 - RNA, 19 nt, Artificial Sequence
  Description of Artificial Sequence: Synthetic oligonucleotide
  Sense strand starting at position 105 of SEQ ID NO: 1241176
cugguauggucuccuuaca

SEQ ID NO: 1252519 - RNA, 19 nt, Artificial Sequence
  Description of Artificial Sequence: Synthetic oligonucleotide
  Antisense strand to SEQ ID NO: 1252518
uguaaggagaccauaccag

SEQ ID NO: 1252520 - RNA, 19 nt, Artificial Sequence
  Description of Artificial Sequence: Synthetic oligonucleotide
  Sense strand starting at position 210 of SEQ ID NO: 1241176
ugccauauuugccuggaca

SEQ ID NO: 1252521 - RNA, 19 nt, Artificial Sequence
  Description of Artificial Sequence: Synthetic oligonucleotide
  Antisense strand to SEQ ID NO: 1252520
uguccaggcaaauauggca

SEQ ID NO: 1252522 - RNA, 19 nt, Artificial Sequence
  Description of Artificial Sequence: Synthetic oligonucleotide
  Sense strand starting at position 229 of SEQ ID NO: 1241176
agugacauguucccaauac

SEQ ID NO: 1252523 - RNA, 19 nt, Artificial Sequence
  Description of Artificial Sequence: Synthetic oligonucleotide
  Antisense strand to SEQ ID NO: 1252522
guauugggaacaugucacu

SEQ ID NO: 1252524 - RNA, 19 nt, Artificial Sequence
  Description of Artificial Sequence: Synthetic oligonucleotide
  Sense strand starting at position 482 of SEQ ID NO: 1241176
gucucuuaaccucgugauc

SEQ ID NO: 1252525 - RNA, 19 nt, Artificial Sequence
  Description of Artificial Sequence: Synthetic oligonucleotide
  Antisense strand to SEQ ID NO: 1252524
gaucacgagguuaagagac

SEQ ID NO: 1252526 - RNA, 19 nt, Artificial Sequence
  Description of Artificial Sequence: Synthetic oligonucleotide
  Sense strand starting at position 1096 of SEQ ID NO: 1241176
gcguuucaccauguuggua

SEQ ID NO: 1252527 - RNA, 19 nt, Artificial Sequence
  Description of Artificial Sequence: Synthetic oligonucleotide
  Antisense strand to SEQ ID NO: 1252526
uaccaacauggugaaacgc

SEQ ID NO: 1252528 - RNA, 19 nt, Artificial Sequence
  Description of Artificial Sequence: Synthetic oligonucleotide
  Sense strand starting at position 1311 of SEQ ID NO: 1241176
ugucuacuguauccacuua

SEQ ID NO: 1252529 - RNA, 19 nt, Artificial Sequence
  Description of Artificial Sequence: Synthetic oligonucleotide
  Antisense strand to SEQ ID NO: 1252528
uaaguggauacaguagaca

SEQ ID NO: 1252530 - RNA, 19 nt, Artificial Sequence
  Description of Artificial Sequence: Synthetic oligonucleotide
  Sense strand starting at position 1323 of SEQ ID NO: 1241176
ccacuuaagucugcaaagu

SEQ ID NO: 1252531 - RNA, 19 nt, Artificial Sequence
  Description of Artificial Sequence: Synthetic oligonucleotide
  Antisense strand to SEQ ID NO: 1252530
acuuugcagacuuaagugg

SEQ ID NO: 1252532 - RNA, 19 nt, Artificial Sequence
  Description of Artificial Sequence: Synthetic oligonucleotide
  Sense strand starting at position 1351 of SEQ ID NO: 1241176
uuacauuaagggcgaacua

SEQ ID NO: 1252533 - RNA, 19 nt, Artificial Sequence
  Description of Artificial Sequence: Synthetic oligonucleotide
  Antisense strand to SEQ ID NO: 1252532
uaguucgcccuuaauguaa

SEQ ID NO: 1252534 - RNA, 19 nt, Artificial Sequence
  Description of Artificial Sequence: Synthetic oligonucleotide
  Sense strand starting at position 1352 of SEQ ID NO: 1241176
uacauuaagggcgaacuau

SEQ ID NO: 1252535 - RNA, 19 nt, Artificial Sequence
  Description of Artificial Sequence: Synthetic oligonucleotide
  Antisense strand to SEQ ID NO: 1252534
auaguucgcccuuaaugua

SEQ ID NO: 1252536 - RNA, 19 nt, Artificial Sequence
  Description of Artificial Sequence: Synthetic oligonucleotide
  Sense strand starting at position 1361 of SEQ ID NO: 1241176
ggcgaacuauuaccugaca

SEQ ID NO: 1252537 - RNA, 19 nt, Artificial Sequence
  Description of Artificial Sequence: Synthetic oligonucleotide
  Antisense strand to SEQ ID NO: 1252536
ugucagguaauaguucgcc

SEQ ID NO: 1252538 - RNA, 19 nt, Artificial Sequence
  Description of Artificial Sequence: Synthetic oligonucleotide
  Sense strand starting at position 1402 of SEQ ID NO: 1241176
ccgcgaguuccauacaauu

SEQ ID NO: 1252539 - RNA, 19 nt, Artificial Sequence
  Description of Artificial Sequence: Synthetic oligonucleotide
  Antisense strand to SEQ ID NO: 1252538
aauuguauggaacucgcgg

SEQ ID NO: 1252540 - RNA, 19 nt, Artificial Sequence
  Description of Artificial Sequence: Synthetic oligonucleotide
  Sense strand starting at position 1463 of SEQ ID NO: 1241176
ucacccaaguugucaugua

SEQ ID NO: 1252541 - RNA, 19 nt, Artificial Sequence
  Description of Artificial Sequence: Synthetic oligonucleotide
  Antisense strand to SEQ ID NO: 1252540
uacaugacaacuuggguga

SEQ ID NO: 1252542 - RNA, 19 nt, Artificial Sequence
  Description of Artificial Sequence: Synthetic oligonucleotide
  Sense strand starting at position 1470 of SEQ ID NO: 1241176
aguugucauguacagcaua

SEQ ID NO: 1252543 - RNA, 19 nt, Artificial Sequence
  Description of Artificial Sequence: Synthetic oligonucleotide
  Antisense strand to SEQ ID NO: 1252542
uaugcuguacaugacaacu

SEQ ID NO: 1252544 - RNA, 19 nt, Artificial Sequence
  Description of Artificial Sequence: Synthetic oligonucleotide
  Sense strand starting at position 1551 of SEQ ID NO: 1241176
gagucagaguucuuggcuu

SEQ ID NO: 1252545 - RNA, 19 nt, Artificial Sequence
  Description of Artificial Sequence: Synthetic oligonucleotide
  Antisense strand to SEQ ID NO: 1252544
aagccaagaacucugacuc

SEQ ID NO: 1252546 - RNA, 19 nt, Artificial Sequence
  Description of Artificial Sequence: Synthetic oligonucleotide
  Sense strand starting at position 1632 of SEQ ID NO: 1241176
agguacgcucccugucaaa

SEQ ID NO: 1252547 - RNA, 19 nt, Artificial Sequence
  Description of Artificial Sequence: Synthetic oligonucleotide
  Antisense strand to SEQ ID NO: 1252546
uuugacagggagcguaccu

SEQ ID NO: 1252548 - RNA, 19 nt, Artificial Sequence
  Description of Artificial Sequence: Synthetic oligonucleotide
  Sense strand starting at position 2147 of SEQ ID NO: 1241176
gcuggcuaauccuccacau

SEQ ID NO: 1252549 - RNA, 19 nt, Artificial Sequence
  Description of Artificial Sequence: Synthetic oligonucleotide
  Antisense strand to SEQ ID NO: 1252548
auguggaggauuagccagc

SEQ ID NO: 1252550 - RNA, 19 nt, Artificial Sequence
  Description of Artificial Sequence: Synthetic oligonucleotide
  Sense strand starting at position 2162 of SEQ ID NO: 1241176
acaucuucccacgacugau

SEQ ID NO: 1252551 - RNA, 19 nt, Artificial Sequence
  Description of Artificial Sequence: Synthetic oligonucleotide
  Antisense strand to SEQ ID NO: 1252550
aucagucgugggaagaugu

SEQ ID NO: 1252552 - RNA, 19 nt, Artificial Sequence
  Description of Artificial Sequence: Synthetic oligonucleotide
  Sense strand starting at position 2216 of SEQ ID NO: 1241176
cuaggaaaguucuagacau

SEQ ID NO: 1252553 - RNA, 19 nt, Artificial Sequence
  Description of Artificial Sequence: Synthetic oligonucleotide
  Antisense strand to SEQ ID NO: 1252552
augucuagaacuuuccuag

SEQ ID NO: 1252554 - RNA, 19 nt, Artificial Sequence
  Description of Artificial Sequence: Synthetic oligonucleotide
  Sense strand starting at position 2241 of SEQ ID NO: 1241176
aggguugguuaaccuaaga

SEQ ID NO: 1252555 - RNA, 19 nt, Artificial Sequence
  Description of Artificial Sequence: Synthetic oligonucleotide
  Antisense strand to SEQ ID NO: 1252554
ucuuagguuaaccaacccu

SEQ ID NO: 1252556 - RNA, 19 nt, Artificial Sequence
  Description of Artificial Sequence: Synthetic oligonucleotide
  Sense strand starting at position 2280 of SEQ ID NO: 1241176
gacguuaaagacuaaguca

SEQ ID NO: 1252557 - RNA, 19 nt, Artificial Sequence
  Description of Artificial Sequence: Synthetic oligonucleotide
  Antisense strand to SEQ ID NO: 1252556
ugacuuagucuuuaacguc

SEQ ID NO: 1252558 - RNA, 19 nt, Artificial Sequence
  Description of Artificial Sequence: Synthetic oligonucleotide
  Sense strand starting at position 2283 of SEQ ID NO: 1241176
guuaaagacuaagucaagu

SEQ ID NO: 1252559 - RNA, 19 nt, Artificial Sequence
  Description of Artificial Sequence: Synthetic oligonucleotide
  Antisense strand to SEQ ID NO: 1252558
acuugacuuagucuuuaac

SEQ ID NO: 1252560 - RNA, 19 nt, Artificial Sequence
  Description of Artificial Sequence: Synthetic oligonucleotide
  Sense strand starting at position 2342 of SEQ ID NO: 1241176
auuauuuagcucugcaugu

SEQ ID NO: 1252561 - RNA, 19 nt, Artificial Sequence
  Description of Artificial Sequence: Synthetic oligonucleotide
  Antisense strand to SEQ ID NO: 1252560
acaugcagagcuaaauaau

SEQ ID NO: 1252562 - RNA, 19 nt, Artificial Sequence
  Description of Artificial Sequence: Synthetic oligonucleotide
  Sense strand starting at position 2343 of SEQ ID NO: 1241176
uuauuuagcucugcaugua

SEQ ID NO: 1252563 - RNA, 19 nt, Artificial Sequence
  Description of Artificial Sequence: Synthetic oligonucleotide
  Antisense strand to SEQ ID NO: 1252562
uacaugcagagcuaaauaa

SEQ ID NO: 1252564 - RNA, 19 nt, Artificial Sequence
  Description of Artificial Sequence: Synthetic oligonucleotide
  Sense strand starting at position 2346 of SEQ ID NO: 1241176
uuuagcucugcauguauaa

SEQ ID NO: 1252565 - RNA, 19 nt, Artificial Sequence
  Description of Artificial Sequence: Synthetic oligonucleotide
  Antisense strand to SEQ ID NO: 1252564
uuauacaugcagagcuaaa

SEQ ID NO: 1252566 - RNA, 19 nt, Artificial Sequence
  Description of Artificial Sequence: Synthetic oligonucleotide
  Sense strand starting at position 2656 of SEQ ID NO: 1241176
cggccugcucugcauauuu

SEQ ID NO: 1252567 - RNA, 19 nt, Artificial Sequence
  Description of Artificial Sequence: Synthetic oligonucleotide
  Antisense strand to SEQ ID NO: 1252566
aaauaugcagagcaggccg

SEQ ID NO: 1252568 - RNA, 19 nt, Artificial Sequence
  Description of Artificial Sequence: Synthetic oligonucleotide
  Sense strand starting at position 2680 of SEQ ID NO: 1241176
ucuguauucugugcauauu

SEQ ID NO: 1252569 - RNA, 19 nt, Artificial Sequence
  Description of Artificial Sequence: Synthetic oligonucleotide
  Antisense strand to SEQ ID NO: 1252568
aauaugcacagaauacaga

SEQ ID NO: 1252570 - RNA, 19 nt, Artificial Sequence
  Description of Artificial Sequence: Synthetic oligonucleotide
  Sense strand starting at position 2683 of SEQ ID NO: 1241176
guauucugugcauauucuu

SEQ ID NO: 1252571 - RNA, 19 nt, Artificial Sequence
  Description of Artificial Sequence: Synthetic oligonucleotide
  Antisense strand to SEQ ID NO: 1252570
aagaauaugcacagaauac

SEQ ID NO: 1252572 - RNA, 19 nt, Artificial Sequence
  Description of Artificial Sequence: Synthetic oligonucleotide
  Sense strand starting at position 2734 of SEQ ID NO: 1241176
uccagacacugggcuuaau

SEQ ID NO: 1252573 - RNA, 19 nt, Artificial Sequence
  Description of Artificial Sequence: Synthetic oligonucleotide
  Antisense strand to SEQ ID NO: 1252572
auuaagcccagugucugga

SEQ ID NO: 1252574 - RNA, 19 nt, Artificial Sequence
  Description of Artificial Sequence: Synthetic oligonucleotide
  Sense strand starting at position 2737 of SEQ ID NO: 1241176
agacacugggcuuaauagu

SEQ ID NO: 1252575 - RNA, 19 nt, Artificial Sequence
  Description of Artificial Sequence: Synthetic oligonucleotide
  Antisense strand to SEQ ID NO: 1252574
acuauuaagcccagugucu

SEQ ID NO: 1252576 - RNA, 19 nt, Artificial Sequence
  Description of Artificial Sequence: Synthetic oligonucleotide
  Sense strand starting at position 2743 of SEQ ID NO: 1241176
ugggcuuaauagucuuaaa

SEQ ID NO: 1252577 - RNA, 19 nt, Artificial Sequence
  Description of Artificial Sequence: Synthetic oligonucleotide
  Antisense strand to SEQ ID NO: 1252576
uuuaagacuauuaagccca

SEQ ID NO: 1252578 - RNA, 19 nt, Artificial Sequence
  Description of Artificial Sequence: Synthetic oligonucleotide
  Sense strand starting at position 2835 of SEQ ID NO: 1241176
aaauuuagcgagcggauca

SEQ ID NO: 1252579 - RNA, 19 nt, Artificial Sequence
  Description of Artificial Sequence: Synthetic oligonucleotide
  Antisense strand to SEQ ID NO: 1252578
ugauccgcucgcuaaauuu

SEQ ID NO: 1252580 - RNA, 19 nt, Artificial Sequence
  Description of Artificial Sequence: Synthetic oligonucleotide
  Sense strand starting at position 3141 of SEQ ID NO: 1241176
ggaggccuguaaucuguaa

SEQ ID NO: 1252581 - RNA, 19 nt, Artificial Sequence
  Description of Artificial Sequence: Synthetic oligonucleotide
  Antisense strand to SEQ ID NO: 1252580
uuacagauuacaggccucc

SEQ ID NO: 1252582 - RNA, 19 nt, Artificial Sequence
  Description of Artificial Sequence: Synthetic oligonucleotide
  Sense strand starting at position 3145 of SEQ ID NO: 1241176
gccuguaaucuguaaucuu

SEQ ID NO: 1252583 - RNA, 19 nt, Artificial Sequence
  Description of Artificial Sequence: Synthetic oligonucleotide
  Antisense strand to SEQ ID NO: 1252582
aagauuacagauuacaggc

SEQ ID NO: 1252584 - RNA, 19 nt, Artificial Sequence
  Description of Artificial Sequence: Synthetic oligonucleotide
  Sense strand starting at position 3184 of SEQ ID NO: 1241176
caggcaaacugcuugaguu

SEQ ID NO: 1252585 - RNA, 19 nt, Artificial Sequence
  Description of Artificial Sequence: Synthetic oligonucleotide
  Antisense strand to SEQ ID NO: 1252584
aacucaagcaguuugccug

SEQ ID NO: 1252586 - RNA, 19 nt, Artificial Sequence
  Description of Artificial Sequence: Synthetic oligonucleotide
  Sense strand starting at position 3185 of SEQ ID NO: 1241176
aggcaaacugcuugaguuc

SEQ ID NO: 1252587 - RNA, 19 nt, Artificial Sequence
  Description of Artificial Sequence: Synthetic oligonucleotide
  Antisense strand to SEQ ID NO: 1252586
gaacucaagcaguuugccu

SEQ ID NO: 1252588 - RNA, 19 nt, Artificial Sequence
  Description of Artificial Sequence: Synthetic oligonucleotide
  Sense strand starting at position 3532 of SEQ ID NO: 1241176
ucauauggguaauugguau

SEQ ID NO: 1252589 - RNA, 19 nt, Artificial Sequence
  Description of Artificial Sequence: Synthetic oligonucleotide
  Antisense strand to SEQ ID NO: 1252588
auaccaauuacccauauga

SEQ ID NO: 1252590 - RNA, 19 nt, Artificial Sequence
  Description of Artificial Sequence: Synthetic oligonucleotide
  Sense strand starting at position 3539 of SEQ ID NO: 1241176
gguaauugguaucuuagaa

SEQ ID NO: 1252591 - RNA, 19 nt, Artificial Sequence
  Description of Artificial Sequence: Synthetic oligonucleotide
  Antisense strand to SEQ ID NO: 1252590
uucuaagauaccaauuacc

SEQ ID NO: 1252592 - RNA, 19 nt, Artificial Sequence
  Description of Artificial Sequence: Synthetic oligonucleotide
  Sense strand starting at position 3543 of SEQ ID NO: 1241176
auugguaucuuagaaggaa

SEQ ID NO: 1252593 - RNA, 19 nt, Artificial Sequence
  Description of Artificial Sequence: Synthetic oligonucleotide
  Antisense strand to SEQ ID NO: 1252592
uuccuucuaagauaccaau

SEQ ID NO: 1252594 - RNA, 19 nt, Artificial Sequence
  Description of Artificial Sequence: Synthetic oligonucleotide
  Sense strand starting at position 3590 of SEQ ID NO: 1241176
agagcuaauggcugagaau

SEQ ID NO: 1252595 - RNA, 19 nt, Artificial Sequence
  Description of Artificial Sequence: Synthetic oligonucleotide
  Antisense strand to SEQ ID NO: 1252594
auucucagccauuagcucu

SEQ ID NO: 1252596 - RNA, 19 nt, Artificial Sequence
  Description of Artificial Sequence: Synthetic oligonucleotide
  Sense strand starting at position 3591 of SEQ ID NO: 1241176
gagcuaauggcugagaauu

SEQ ID NO: 1252597 - RNA, 19 nt, Artificial Sequence
  Description of Artificial Sequence: Synthetic oligonucleotide
  Antisense strand to SEQ ID NO: 1252596
aauucucagccauuagcuc

SEQ ID NO: 1252598 - RNA, 19 nt, Artificial Sequence
  Description of Artificial Sequence: Synthetic oligonucleotide
  Sense strand starting at position 132 of SEQ ID NO: 1241177
uugaaagaaugaguucuuu

SEQ ID NO: 1252599 - RNA, 19 nt, Artificial Sequence
  Description of Artificial Sequence: Synthetic oligonucleotide
  Antisense strand to SEQ ID NO: 1252598
aaagaacucauucuuucaa

SEQ ID NO: 1252600 - RNA, 19 nt, Artificial Sequence
  Description of Artificial Sequence: Synthetic oligonucleotide
  Sense strand starting at position 240 of SEQ ID NO: 1241177
ggagaaguauuguuaugaa

SEQ ID NO: 1252601 - RNA, 19 nt, Artificial Sequence
  Description of Artificial Sequence: Synthetic oligonucleotide
  Antisense strand to SEQ ID NO: 1252600
uucauaacaauacuucucc

SEQ ID NO: 1252602 - RNA, 19 nt, Artificial Sequence
  Description of Artificial Sequence: Synthetic oligonucleotide
  Sense strand starting at position 299 of SEQ ID NO: 1241177
gacugagaucagugucuua

SEQ ID NO: 1252603 - RNA, 19 nt, Artificial Sequence
  Description of Artificial Sequence: Synthetic oligonucleotide
  Antisense strand to SEQ ID NO: 1252602
uaagacacugaucucaguc

SEQ ID NO: 1252604 - RNA, 19 nt, Artificial Sequence
  Description of Artificial Sequence: Synthetic oligonucleotide
  Sense strand starting at position 544 of SEQ ID NO: 1241177
guaugaagaguggauguuu

SEQ ID NO: 1252605 - RNA, 19 nt, Artificial Sequence
  Description of Artificial Sequence: Synthetic oligonucleotide
  Antisense strand to SEQ ID NO: 1252604
aaacauccacucuucauac

SEQ ID NO: 1252606 - RNA, 19 nt, Artificial Sequence
  Description of Artificial Sequence: Synthetic oligonucleotide
  Sense strand starting at position 549 of SEQ ID NO: 1241177
aagaguggauguuuauauc

SEQ ID NO: 1252607 - RNA, 19 nt, Artificial Sequence
  Description of Artificial Sequence: Synthetic oligonucleotide
  Antisense strand to SEQ ID NO: 1252606
gauauaaacauccacucuu

SEQ ID NO: 1252608 - RNA, 19 nt, Artificial Sequence
  Description of Artificial Sequence: Synthetic oligonucleotide
  Sense strand starting at position 555 of SEQ ID NO: 1241177
ggauguuuauaucuaguug

SEQ ID NO: 1252609 - RNA, 19 nt, Artificial Sequence
  Description of Artificial Sequence: Synthetic oligonucleotide
  Antisense strand to SEQ ID NO: 1252608
caacuagauauaaacaucc

SEQ ID NO: 1252610 - RNA, 19 nt, Artificial Sequence
  Description of Artificial Sequence: Synthetic oligonucleotide
  Sense strand starting at position 660 of SEQ ID NO: 1241177
guaauagauacugauucgu

SEQ ID NO: 1252611 - RNA, 19 nt, Artificial Sequence
  Description of Artificial Sequence: Synthetic oligonucleotide
  Antisense strand to SEQ ID NO: 1252610
acgaaucaguaucuauuac

SEQ ID NO: 1252612 - RNA, 19 nt, Artificial Sequence
  Description of Artificial Sequence: Synthetic oligonucleotide
  Sense strand starting at position 662 of SEQ ID NO: 1241177
aauagauacugauucguuu

SEQ ID NO: 1252613 - RNA, 19 nt, Artificial Sequence
  Description of Artificial Sequence: Synthetic oligonucleotide
  Antisense strand to SEQ ID NO: 1252612
aaacgaaucaguaucuauu

SEQ ID NO: 1252614 - RNA, 19 nt, Artificial Sequence
  Description of Artificial Sequence: Synthetic oligonucleotide
  Sense strand starting at position 788 of SEQ ID NO: 1241177
gguuuaagauugcuuaaag

SEQ ID NO: 1252615 - RNA, 19 nt, Artificial Sequence
  Description of Artificial Sequence: Synthetic oligonucleotide
  Antisense strand to SEQ ID NO: 1252614
cuuuaagcaaucuuaaacc

SEQ ID NO: 1252616 - RNA, 19 nt, Artificial Sequence
  Description of Artificial Sequence: Synthetic oligonucleotide
  Sense strand starting at position 789 of SEQ ID NO: 1241177
guuuaagauugcuuaaaga

SEQ ID NO: 1252617 - RNA, 19 nt, Artificial Sequence
  Description of Artificial Sequence: Synthetic oligonucleotide
  Antisense strand to SEQ ID NO: 1252616
ucuuuaagcaaucuuaaac

SEQ ID NO: 1252618 - RNA, 19 nt, Artificial Sequence
  Description of Artificial Sequence: Synthetic oligonucleotide
  Sense strand starting at position 943 of SEQ ID NO: 1241177
acauauguggcaugaaacu

SEQ ID NO: 1252619 - RNA, 19 nt, Artificial Sequence
  Description of Artificial Sequence: Synthetic oligonucleotide
  Antisense strand to SEQ ID NO: 1252618
aguuucaugccacauaugu

SEQ ID NO: 1252620 - RNA, 19 nt, Artificial Sequence
  Description of Artificial Sequence: Synthetic oligonucleotide
  Sense strand starting at position 961 of SEQ ID NO: 1241177
uuuagucuuucucuggaaa

SEQ ID NO: 1252621 - RNA, 19 nt, Artificial Sequence
  Description of Artificial Sequence: Synthetic oligonucleotide
  Antisense strand to SEQ ID NO: 1252620
uuuccagagaaagacuaaa

SEQ ID NO: 1252622 - RNA, 19 nt, Artificial Sequence
  Description of Artificial Sequence: Synthetic oligonucleotide
  Sense strand starting at position 1027 of SEQ ID NO: 1241177
ucaugaauuuggugauuug

SEQ ID NO: 1252623 - RNA, 19 nt, Artificial Sequence
  Description of Artificial Sequence: Synthetic oligonucleotide
  Antisense strand to SEQ ID NO: 1252622
caaaucaccaaauucauga

SEQ ID NO: 1252624 - RNA, 19 nt, Artificial Sequence
  Description of Artificial Sequence: Synthetic oligonucleotide
  Sense strand starting at position 1089 of SEQ ID NO: 1241177
auggaaagauagcugugaa

SEQ ID NO: 1252625 - RNA, 19 nt, Artificial Sequence
  Description of Artificial Sequence: Synthetic oligonucleotide
  Antisense strand to SEQ ID NO: 1252624
uucacagcuaucuuuccau

SEQ ID NO: 1252626 - RNA, 19 nt, Artificial Sequence
  Description of Artificial Sequence: Synthetic oligonucleotide
  Sense strand starting at position 1090 of SEQ ID NO: 1241177
uggaaagauagcugugaag

SEQ ID NO: 1252627 - RNA, 19 nt, Artificial Sequence
  Description of Artificial Sequence: Synthetic oligonucleotide
  Antisense strand to SEQ ID NO: 1252626
cuucacagcuaucuuucca

SEQ ID NO: 1252628 - RNA, 19 nt, Artificial Sequence
  Description of Artificial Sequence: Synthetic oligonucleotide
  Sense strand starting at position 1102 of SEQ ID NO: 1241177
ugugaagagcuuuacuuaa

SEQ ID NO: 1252629 - RNA, 19 nt, Artificial Sequence
  Description of Artificial Sequence: Synthetic oligonucleotide
  Antisense strand to SEQ ID NO: 1252628
uuaaguaaagcucuucaca

SEQ ID NO: 1252630 - RNA, 19 nt, Artificial Sequence
  Description of Artificial Sequence: Synthetic oligonucleotide
  Sense strand starting at position 1633 of SEQ ID NO: 1241177
cgccgagugcucagaacug

SEQ ID NO: 1252631 - RNA, 19 nt, Artificial Sequence
  Description of Artificial Sequence: Synthetic oligonucleotide
  Antisense strand to SEQ ID NO: 1252630
caguucugagcacucggcg

SEQ ID NO: 1252632 - RNA, 19 nt, Artificial Sequence
  Description of Artificial Sequence: Synthetic oligonucleotide
  Sense strand starting at position 1642 of SEQ ID NO: 1241177
cucagaacugcggacaaau

SEQ ID NO: 1252633 - RNA, 19 nt, Artificial Sequence
  Description of Artificial Sequence: Synthetic oligonucleotide
  Antisense strand to SEQ ID NO: 1252632
auuuguccgcaguucugag

SEQ ID NO: 1252634 - RNA, 19 nt, Artificial Sequence
  Description of Artificial Sequence: Synthetic oligonucleotide
  Sense strand starting at position 1998 of SEQ ID NO: 1241177
ucuuauuacggaggaagau

SEQ ID NO: 1252635 - RNA, 19 nt, Artificial Sequence
  Description of Artificial Sequence: Synthetic oligonucleotide
  Antisense strand to SEQ ID NO: 1252634
aucuuccuccguaauaaga

SEQ ID NO: 1252636 - RNA, 19 nt, Artificial Sequence
  Description of Artificial Sequence: Synthetic oligonucleotide
  Sense strand starting at position 2402 of SEQ ID NO: 1241177
gcguuuaaguauuuacuua

SEQ ID NO: 1252637 - RNA, 19 nt, Artificial Sequence
  Description of Artificial Sequence: Synthetic oligonucleotide
  Antisense strand to SEQ ID NO: 1252636
uaaguaaauacuuaaacgc

SEQ ID NO: 1252638 - RNA, 19 nt, Artificial Sequence
  Description of Artificial Sequence: Synthetic oligonucleotide
  Sense strand starting at position 2465 of SEQ ID NO: 1241177
aguuaauuauuggccaaua

SEQ ID NO: 1252639 - RNA, 19 nt, Artificial Sequence
  Description of Artificial Sequence: Synthetic oligonucleotide
  Antisense strand to SEQ ID NO: 1252638
uauuggccaauaauuaacu

SEQ ID NO: 1252640 - RNA, 19 nt, Artificial Sequence
  Description of Artificial Sequence: Synthetic oligonucleotide
  Sense strand starting at position 2680 of SEQ ID NO: 1241177
uuguaucucccguaaagaa

SEQ ID NO: 1252641 - RNA, 19 nt, Artificial Sequence
  Description of Artificial Sequence: Synthetic oligonucleotide
  Antisense strand to SEQ ID NO: 1252640
uucuuuacgggagauacaa

SEQ ID NO: 1252642 - RNA, 19 nt, Artificial Sequence
  Description of Artificial Sequence: Synthetic oligonucleotide
  Sense strand starting at position 2774 of SEQ ID NO: 1241177
uggagaucugguugagauu

SEQ ID NO: 1252643 - RNA, 19 nt, Artificial Sequence
  Description of Artificial Sequence: Synthetic oligonucleotide
  Antisense strand to SEQ ID NO: 1252642
aaucucaaccagaucucca

SEQ ID NO: 1252644 - RNA, 19 nt, Artificial Sequence
  Description of Artificial Sequence: Synthetic oligonucleotide
  Sense strand starting at position 2826 of SEQ ID NO: 1241177
ucuggaaaguuagcucuaa

SEQ ID NO: 1252645 - RNA, 19 nt, Artificial Sequence
  Description of Artificial Sequence: Synthetic oligonucleotide
  Antisense strand to SEQ ID NO: 1252644
uuagagcuaacuuuccaga

SEQ ID NO: 1252646 - RNA, 19 nt, Artificial Sequence
  Description of Artificial Sequence: Synthetic oligonucleotide
  Sense strand starting at position 2827 of SEQ ID NO: 1241177
cuggaaaguuagcucuaac

SEQ ID NO: 1252647 - RNA, 19 nt, Artificial Sequence
  Description of Artificial Sequence: Synthetic oligonucleotide
  Antisense strand to SEQ ID NO: 1252646
guuagagcuaacuuuccag

SEQ ID NO: 1252648 - RNA, 19 nt, Artificial Sequence
  Description of Artificial Sequence: Synthetic oligonucleotide
  Sense strand starting at position 2861 of SEQ ID NO: 1241177
gggcuaaugagagagcuca

SEQ ID NO: 1252649 - RNA, 19 nt, Artificial Sequence
  Description of Artificial Sequence: Synthetic oligonucleotide
  Antisense strand to SEQ ID NO: 1252648
ugagcucucucauuagccc

SEQ ID NO: 1252650 - RNA, 19 nt, Artificial Sequence
  Description of Artificial Sequence: Synthetic oligonucleotide
  Sense strand starting at position 3164 of SEQ ID NO: 1241177
gauaaacuaguguguugga

SEQ ID NO: 1252651 - RNA, 19 nt, Artificial Sequence
  Description of Artificial Sequence: Synthetic oligonucleotide
  Antisense strand to SEQ ID NO: 1252650
uccaacacacuaguuuauc

SEQ ID NO: 1252652 - RNA, 19 nt, Artificial Sequence
  Description of Artificial Sequence: Synthetic oligonucleotide
  Sense strand starting at position 3165 of SEQ ID NO: 1241177
auaaacuaguguguuggaa

SEQ ID NO: 1252653 - RNA, 19 nt, Artificial Sequence
  Description of Artificial Sequence: Synthetic oligonucleotide
  Antisense strand to SEQ ID NO: 1252652
uuccaacacacuaguuuau

SEQ ID NO: 1252654 - RNA, 19 nt, Artificial Sequence
  Description of Artificial Sequence: Synthetic oligonucleotide
  Sense strand starting at position 3249 of SEQ ID NO: 1241177
uuuguaaauguggauuaug

SEQ ID NO: 1252655 - RNA, 19 nt, Artificial Sequence
  Description of Artificial Sequence: Synthetic oligonucleotide
  Antisense strand to SEQ ID NO: 1252654
cauaauccacauuuacaaa

SEQ ID NO: 1252656 - RNA, 19 nt, Artificial Sequence
  Description of Artificial Sequence: Synthetic oligonucleotide
  Sense strand starting at position 3252 of SEQ ID NO: 1241177
guaaauguggauuaugugu

SEQ ID NO: 1252657 - RNA, 19 nt, Artificial Sequence
  Description of Artificial Sequence: Synthetic oligonucleotide
  Antisense strand to SEQ ID NO: 1252656
acacauaauccacauuuac

SEQ ID NO: 1252658 - RNA, 19 nt, Artificial Sequence
  Description of Artificial Sequence: Synthetic oligonucleotide
  Sense strand starting at position 3318 of SEQ ID NO: 1241177
aggucauucucuuccugaa

SEQ ID NO: 1252659 - RNA, 19 nt, Artificial Sequence
  Description of Artificial Sequence: Synthetic oligonucleotide
  Antisense strand to SEQ ID NO: 1252658
uucaggaagagaaugaccu

SEQ ID NO: 1252660 - RNA, 19 nt, Artificial Sequence
  Description of Artificial Sequence: Synthetic oligonucleotide
  Sense strand starting at position 3357 of SEQ ID NO: 1241177
ugacaccauuucuggagaa

SEQ ID NO: 1252661 - RNA, 19 nt, Artificial Sequence
  Description of Artificial Sequence: Synthetic oligonucleotide
  Antisense strand to SEQ ID NO: 1252660
uucuccagaaaugguguca

SEQ ID NO: 1252662 - RNA, 19 nt, Artificial Sequence
  Description of Artificial Sequence: Synthetic oligonucleotide
  Sense strand starting at position 3382 of SEQ ID NO: 1241177
ugagauugcucauuaaacu

SEQ ID NO: 1252663 - RNA, 19 nt, Artificial Sequence
  Description of Artificial Sequence: Synthetic oligonucleotide
  Antisense strand to SEQ ID NO: 1252662
aguuuaaugagcaaucuca

SEQ ID NO: 1252664 - RNA, 19 nt, Artificial Sequence
  Description of Artificial Sequence: Synthetic oligonucleotide
  Sense strand starting at position 3435 of SEQ ID NO: 1241177
uuccuugaauacuuggaua

SEQ ID NO: 1252665 - RNA, 19 nt, Artificial Sequence
  Description of Artificial Sequence: Synthetic oligonucleotide
  Antisense strand to SEQ ID NO: 1252664
uauccaaguauucaaggaa

SEQ ID NO: 1252666 - RNA, 19 nt, Artificial Sequence
  Description of Artificial Sequence: Synthetic oligonucleotide
  Sense strand starting at position 3437 of SEQ ID NO: 1241177
ccuugaauacuuggauaac

SEQ ID NO: 1252667 - RNA, 19 nt, Artificial Sequence
  Description of Artificial Sequence: Synthetic oligonucleotide
  Antisense strand to SEQ ID NO: 1252666
guuauccaaguauucaagg

SEQ ID NO: 1252668 - RNA, 19 nt, Artificial Sequence
  Description of Artificial Sequence: Synthetic oligonucleotide
  Sense strand starting at position 3469 of SEQ ID NO: 1241177
ugaggccuuuaacugaaau

SEQ ID NO: 1252669 - RNA, 19 nt, Artificial Sequence
  Description of Artificial Sequence: Synthetic oligonucleotide
  Antisense strand to SEQ ID NO: 1252668
auuucaguuaaaggccuca

SEQ ID NO: 1252670 - RNA, 19 nt, Artificial Sequence
  Description of Artificial Sequence: Synthetic oligonucleotide
  Sense strand starting at position 3562 of SEQ ID NO: 1241177
gaaguauaauuggcauaga

SEQ ID NO: 1252671 - RNA, 19 nt, Artificial Sequence
  Description of Artificial Sequence: Synthetic oligonucleotide
  Antisense strand to SEQ ID NO: 1252670
ucuaugccaauuauacuuc

SEQ ID NO: 1252672 - RNA, 19 nt, Artificial Sequence
  Description of Artificial Sequence: Synthetic oligonucleotide
  Sense strand starting at position 3645 of SEQ ID NO: 1241177
ccaucacugugaucaaaug

SEQ ID NO: 1252673 - RNA, 19 nt, Artificial Sequence
  Description of Artificial Sequence: Synthetic oligonucleotide
  Antisense strand to SEQ ID NO: 1252672
cauuugaucacagugaugg

SEQ ID NO: 1252674 - RNA, 19 nt, Artificial Sequence
  Description of Artificial Sequence: Synthetic oligonucleotide
  Sense strand starting at position 3746 of SEQ ID NO: 1241177
ucagaauccugaucuguua

SEQ ID NO: 1252675 - RNA, 19 nt, Artificial Sequence
  Description of Artificial Sequence: Synthetic oligonucleotide
  Antisense strand to SEQ ID NO: 1252674
uaacagaucaggauucuga

SEQ ID NO: 1252676 - RNA, 19 nt, Artificial Sequence
  Description of Artificial Sequence: Synthetic oligonucleotide
  Sense strand starting at position 3819 of SEQ ID NO: 1241177
gaucaagaguuucugguau

SEQ ID NO: 1252677 - RNA, 19 nt, Artificial Sequence
  Description of Artificial Sequence: Synthetic oligonucleotide
  Antisense strand to SEQ ID NO: 1252676
auaccagaaacucuugauc

SEQ ID NO: 1252678 - RNA, 19 nt, Artificial Sequence
  Description of Artificial Sequence: Synthetic oligonucleotide
  Sense strand starting at position 25 of SEQ ID NO: 1241178
agccauuugcuuggcuaga

SEQ ID NO: 1252679 - RNA, 19 nt, Artificial Sequence
  Description of Artificial Sequence: Synthetic oligonucleotide
  Antisense strand to SEQ ID NO: 1252678
ucuagccaagcaaauggcu

SEQ ID NO: 1252680 - RNA, 19 nt, Artificial Sequence
  Description of Artificial Sequence: Synthetic oligonucleotide
  Sense strand starting at position 26 of SEQ ID NO: 1241178
gccauuugcuuggcuagau

SEQ ID NO: 1252681 - RNA, 19 nt, Artificial Sequence
  Description of Artificial Sequence: Synthetic oligonucleotide
  Antisense strand to SEQ ID NO: 1252680
aucuagccaagcaaauggc

SEQ ID NO: 1252682 - RNA, 19 nt, Artificial Sequence
  Description of Artificial Sequence: Synthetic oligonucleotide
  Sense strand starting at position 35 of SEQ ID NO: 1241178
uuggcuagaucucuaagua

SEQ ID NO: 1252683 - RNA, 19 nt, Artificial Sequence
  Description of Artificial Sequence: Synthetic oligonucleotide
  Antisense strand to SEQ ID NO: 1252682
uacuuagagaucuagccaa

SEQ ID NO: 1252684 - RNA, 19 nt, Artificial Sequence
  Description of Artificial Sequence: Synthetic oligonucleotide
  Sense strand starting at position 36 of SEQ ID NO: 1241178
uggcuagaucucuaaguag

SEQ ID NO: 1252685 - RNA, 19 nt, Artificial Sequence
  Description of Artificial Sequence: Synthetic oligonucleotide
  Antisense strand to SEQ ID NO: 1252684
cuacuuagagaucuagcca

SEQ ID NO: 1252686 - RNA, 19 nt, Artificial Sequence
  Description of Artificial Sequence: Synthetic oligonucleotide
  Sense strand starting at position 141 of SEQ ID NO: 1241178
cucacaucuugcuuaggga

SEQ ID NO: 1252687 - RNA, 19 nt, Artificial Sequence
  Description of Artificial Sequence: Synthetic oligonucleotide
  Antisense strand to SEQ ID NO: 1252686
ucccuaagcaagaugugag

SEQ ID NO: 1252688 - RNA, 19 nt, Artificial Sequence
  Description of Artificial Sequence: Synthetic oligonucleotide
  Sense strand starting at position 142 of SEQ ID NO: 1241178
ucacaucuugcuuagggaa

SEQ ID NO: 1252689 - RNA, 19 nt, Artificial Sequence
  Description of Artificial Sequence: Synthetic oligonucleotide
  Antisense strand to SEQ ID NO: 1252688
uucccuaagcaagauguga

SEQ ID NO: 1252690 - RNA, 19 nt, Artificial Sequence
  Description of Artificial Sequence: Synthetic oligonucleotide
  Sense strand starting at position 149 of SEQ ID NO: 1241178
uugcuuagggaaugaguuu

SEQ ID NO: 1252691 - RNA, 19 nt, Artificial Sequence
  Description of Artificial Sequence: Synthetic oligonucleotide
  Antisense strand to SEQ ID NO: 1252690
aaacucauucccuaagcaa

SEQ ID NO: 1252692 - RNA, 19 nt, Artificial Sequence
  Description of Artificial Sequence: Synthetic oligonucleotide
  Sense strand starting at position 207 of SEQ ID NO: 1241178
acagcuucccuaugugaga

SEQ ID NO: 1252693 - RNA, 19 nt, Artificial Sequence
  Description of Artificial Sequence: Synthetic oligonucleotide
  Antisense strand to SEQ ID NO: 1252692
ucucacauagggaagcugu

SEQ ID NO: 1252694 - RNA, 19 nt, Artificial Sequence
  Description of Artificial Sequence: Synthetic oligonucleotide
  Sense strand starting at position 208 of SEQ ID NO: 1241178
cagcuucccuaugugagaa

SEQ ID NO: 1252695 - RNA, 19 nt, Artificial Sequence
  Description of Artificial Sequence: Synthetic oligonucleotide
  Antisense strand to SEQ ID NO: 1252694
uucucacauagggaagcug

SEQ ID NO: 1252696 - RNA, 19 nt, Artificial Sequence
  Description of Artificial Sequence: Synthetic oligonucleotide
  Sense strand starting at position 713 of SEQ ID NO: 1241178
gccgguuguguguuucaau

SEQ ID NO: 1252697 - RNA, 19 nt, Artificial Sequence
  Description of Artificial Sequence: Synthetic oligonucleotide
  Antisense strand to SEQ ID NO: 1252696
auugaaacacacaaccggc

SEQ ID NO: 1252698 - RNA, 19 nt, Artificial Sequence
  Description of Artificial Sequence: Synthetic oligonucleotide
  Sense strand starting at position 767 of SEQ ID NO: 1241178
gaagucagucaaugacugu

SEQ ID NO: 1252699 - RNA, 19 nt, Artificial Sequence
  Description of Artificial Sequence: Synthetic oligonucleotide
  Antisense strand to SEQ ID NO: 1252698
acagucauugacugacuuc

SEQ ID NO: 1252700 - RNA, 19 nt, Artificial Sequence
  Description of Artificial Sequence: Synthetic oligonucleotide
  Sense strand starting at position 770 of SEQ ID NO: 1241178
gucagucaaugacuguaga

SEQ ID NO: 1252701 - RNA, 19 nt, Artificial Sequence
  Description of Artificial Sequence: Synthetic oligonucleotide
  Antisense strand to SEQ ID NO: 1252700
ucuacagucauugacugac

SEQ ID NO: 1252702 - RNA, 19 nt, Artificial Sequence
  Description of Artificial Sequence: Synthetic oligonucleotide
  Sense strand starting at position 771 of SEQ ID NO: 1241178
ucagucaaugacuguagau

SEQ ID NO: 1252703 - RNA, 19 nt, Artificial Sequence
  Description of Artificial Sequence: Synthetic oligonucleotide
  Antisense strand to SEQ ID NO: 1252702
aucuacagucauugacuga

SEQ ID NO: 1252704 - RNA, 19 nt, Artificial Sequence
  Description of Artificial Sequence: Synthetic oligonucleotide
  Sense strand starting at position 825 of SEQ ID NO: 1241178
caucacuugugaucaagga

SEQ ID NO: 1252705 - RNA, 19 nt, Artificial Sequence
  Description of Artificial Sequence: Synthetic oligonucleotide
  Antisense strand to SEQ ID NO: 1252704
uccuugaucacaagugaug

SEQ ID NO: 1252706 - RNA, 19 nt, Artificial Sequence
  Description of Artificial Sequence: Synthetic oligonucleotide
  Sense strand starting at position 859 of SEQ ID NO: 1241178
agagaaggcaugugaauuc

SEQ ID NO: 1252707 - RNA, 19 nt, Artificial Sequence
  Description of Artificial Sequence: Synthetic oligonucleotide
  Antisense strand to SEQ ID NO: 1252706
gaauucacaugccuucucu

SEQ ID NO: 1252708 - RNA, 19 nt, Artificial Sequence
  Description of Artificial Sequence: Synthetic oligonucleotide
  Sense strand starting at position 869 of SEQ ID NO: 1241178
ugugaauucugaccacuca

SEQ ID NO: 1252709 - RNA, 19 nt, Artificial Sequence
  Description of Artificial Sequence: Synthetic oligonucleotide
  Antisense strand to SEQ ID NO: 1252708
ugaguggucagaauucaca

SEQ ID NO: 1252710 - RNA, 19 nt, Artificial Sequence
  Description of Artificial Sequence: Synthetic oligonucleotide
  Sense strand starting at position 1032 of SEQ ID NO: 1241178
acaucaguucugcacugaa

SEQ ID NO: 1252711 - RNA, 19 nt, Artificial Sequence
  Description of Artificial Sequence: Synthetic oligonucleotide
  Antisense strand to SEQ ID NO: 1252710
uucagugcagaacugaugu

SEQ ID NO: 1252712 - RNA, 19 nt, Artificial Sequence
  Description of Artificial Sequence: Synthetic oligonucleotide
  Sense strand starting at position 1080 of SEQ ID NO: 1241178
gggaucaucucaucuuuga

SEQ ID NO: 1252713 - RNA, 19 nt, Artificial Sequence
  Description of Artificial Sequence: Synthetic oligonucleotide
  Antisense strand to SEQ ID NO: 1252712
ucaaagaugagaugauccc

SEQ ID NO: 1252714 - RNA, 19 nt, Artificial Sequence
  Description of Artificial Sequence: Synthetic oligonucleotide
  Sense strand starting at position 1187 of SEQ ID NO: 1241178
cagauucugucagugacca

SEQ ID NO: 1252715 - RNA, 19 nt, Artificial Sequence
  Description of Artificial Sequence: Synthetic oligonucleotide
  Antisense strand to SEQ ID NO: 1252714
uggucacugacagaaucug

SEQ ID NO: 1252716 - RNA, 19 nt, Artificial Sequence
  Description of Artificial Sequence: Synthetic oligonucleotide
  Sense strand starting at position 1515 of SEQ ID NO: 1241178
gacgguuugaaaggaguaa

SEQ ID NO: 1252717 - RNA, 19 nt, Artificial Sequence
  Description of Artificial Sequence: Synthetic oligonucleotide
  Antisense strand to SEQ ID NO: 1252716
uuacuccuuucaaaccguc

SEQ ID NO: 1252718 - RNA, 19 nt, Artificial Sequence
  Description of Artificial Sequence: Synthetic oligonucleotide
  Sense strand starting at position 2336 of SEQ ID NO: 1241178
ccuaucuacgcggaagaga

SEQ ID NO: 1252719 - RNA, 19 nt, Artificial Sequence
  Description of Artificial Sequence: Synthetic oligonucleotide
  Antisense strand to SEQ ID NO: 1252718
ucucuuccgcguagauagg

SEQ ID NO: 1252720 - RNA, 19 nt, Artificial Sequence
  Description of Artificial Sequence: Synthetic oligonucleotide
  Sense strand starting at position 2433 of SEQ ID NO: 1241178
guguuccuuguggaaacua

SEQ ID NO: 1252721 - RNA, 19 nt, Artificial Sequence
  Description of Artificial Sequence: Synthetic oligonucleotide
  Antisense strand to SEQ ID NO: 1252720
uaguuuccacaaggaacac

SEQ ID NO: 1252722 - RNA, 19 nt, Artificial Sequence
  Description of Artificial Sequence: Synthetic oligonucleotide
  Sense strand starting at position 2515 of SEQ ID NO: 1241178
ucaguccgucggagaaguu

SEQ ID NO: 1252723 - RNA, 19 nt, Artificial Sequence
  Description of Artificial Sequence: Synthetic oligonucleotide
  Antisense strand to SEQ ID NO: 1252722
aacuucuccgacggacuga

SEQ ID NO: 1252724 - RNA, 19 nt, Artificial Sequence
  Description of Artificial Sequence: Synthetic oligonucleotide
  Sense strand starting at position 2544 of SEQ ID NO: 1241178
gcuagucacaaguaagguu

SEQ ID NO: 1252725 - RNA, 19 nt, Artificial Sequence
  Description of Artificial Sequence: Synthetic oligonucleotide
  Antisense strand to SEQ ID NO: 1252724
aaccuuacuugugacuagc

SEQ ID NO: 1252726 - RNA, 19 nt, Artificial Sequence
  Description of Artificial Sequence: Synthetic oligonucleotide
  Sense strand starting at position 2557 of SEQ ID NO: 1241178
aagguuuauugagcccuua

SEQ ID NO: 1252727 - RNA, 19 nt, Artificial Sequence
  Description of Artificial Sequence: Synthetic oligonucleotide
  Antisense strand to SEQ ID NO: 1252726
uaagggcucaauaaaccuu

SEQ ID NO: 1252728 - RNA, 19 nt, Artificial Sequence
  Description of Artificial Sequence: Synthetic oligonucleotide
  Sense strand starting at position 2596 of SEQ ID NO: 1241178
agaugcuuugcccauuacu

SEQ ID NO: 1252729 - RNA, 19 nt, Artificial Sequence
  Description of Artificial Sequence: Synthetic oligonucleotide
  Antisense strand to SEQ ID NO: 1252728
aguaaugggcaaagcaucu

SEQ ID NO: 1252730 - RNA, 19 nt, Artificial Sequence
  Description of Artificial Sequence: Synthetic oligonucleotide
  Sense strand starting at position 2622 of SEQ ID NO: 1241178
cuuaaucugcacgauagaa

SEQ ID NO: 1252731 - RNA, 19 nt, Artificial Sequence
  Description of Artificial Sequence: Synthetic oligonucleotide
  Antisense strand to SEQ ID NO: 1252730
uucuaucgugcagauuaag

SEQ ID NO: 1252732 - RNA, 19 nt, Artificial Sequence
  Description of Artificial Sequence: Synthetic oligonucleotide
  Sense strand starting at position 2630 of SEQ ID NO: 1241178
gcacgauagaaggguagau

SEQ ID NO: 1252733 - RNA, 19 nt, Artificial Sequence
  Description of Artificial Sequence: Synthetic oligonucleotide
  Antisense strand to SEQ ID NO: 1252732
aucuacccuucuaucgugc

SEQ ID NO: 1252734 - RNA, 19 nt, Artificial Sequence
  Description of Artificial Sequence: Synthetic oligonucleotide
  Sense strand starting at position 2694 of SEQ ID NO: 1241178
guguaacuucuccaagguc

SEQ ID NO: 1252735 - RNA, 19 nt, Artificial Sequence
  Description of Artificial Sequence: Synthetic oligonucleotide
  Antisense strand to SEQ ID NO: 1252734
gaccuuggagaaguuacac

SEQ ID NO: 1252736 - RNA, 19 nt, Artificial Sequence
  Description of Artificial Sequence: Synthetic oligonucleotide
  Sense strand starting at position 2789 of SEQ ID NO: 1241178
cuucuaaugguguggaaag

SEQ ID NO: 1252737 - RNA, 19 nt, Artificial Sequence
  Description of Artificial Sequence: Synthetic oligonucleotide
  Antisense strand to SEQ ID NO: 1252736
cuuuccacaccauuagaag

SEQ ID NO: 1252738 - RNA, 19 nt, Artificial Sequence
  Description of Artificial Sequence: Synthetic oligonucleotide
  Sense strand starting at position 2803 of SEQ ID NO: 1241178
gaaagaggugucggaaucu

SEQ ID NO: 1252739 - RNA, 19 nt, Artificial Sequence
  Description of Artificial Sequence: Synthetic oligonucleotide
  Antisense strand to SEQ ID NO: 1252738
agauuccgacaccucuuuc

SEQ ID NO: 1252740 - RNA, 19 nt, Artificial Sequence
  Description of Artificial Sequence: Synthetic oligonucleotide
  Sense strand starting at position 3701 of SEQ ID NO: 1241178
aauggugcaucuguauaga

SEQ ID NO: 1252741 - RNA, 19 nt, Artificial Sequence
  Description of Artificial Sequence: Synthetic oligonucleotide
  Antisense strand to SEQ ID NO: 1252740
ucuauacagaugcaccauu

SEQ ID NO: 1252742 - RNA, 19 nt, Artificial Sequence
  Description of Artificial Sequence: Synthetic oligonucleotide
  Sense strand starting at position 3762 of SEQ ID NO: 1241178
gggugagucaacgaaugau

SEQ ID NO: 1252743 - RNA, 19 nt, Artificial Sequence
  Description of Artificial Sequence: Synthetic oligonucleotide
  Antisense strand to SEQ ID NO: 1252742
aucauucguugacucaccc

SEQ ID NO: 1252744 - RNA, 19 nt, Artificial Sequence
  Description of Artificial Sequence: Synthetic oligonucleotide
  Sense strand starting at position 3766 of SEQ ID NO: 1241178
gagucaacgaaugaugagu

SEQ ID NO: 1252745 - RNA, 19 nt, Artificial Sequence
  Description of Artificial Sequence: Synthetic oligonucleotide
  Antisense strand to SEQ ID NO: 1252744
acucaucauucguugacuc

SEQ ID NO: 1252746 - RNA, 19 nt, Artificial Sequence
  Description of Artificial Sequence: Synthetic oligonucleotide
  Sense strand starting at position 3811 of SEQ ID NO: 1241178
uguacacuacuguaaugua

SEQ ID NO: 1252747 - RNA, 19 nt, Artificial Sequence
  Description of Artificial Sequence: Synthetic oligonucleotide
  Antisense strand to SEQ ID NO: 1252746
uacauuacaguaguguaca

SEQ ID NO: 1252748 - RNA, 19 nt, Artificial Sequence
  Description of Artificial Sequence: Synthetic oligonucleotide
  Sense strand starting at position 3886 of SEQ ID NO: 1241178
aguuauguaggcuauaacu

SEQ ID NO: 1252749 - RNA, 19 nt, Artificial Sequence
  Description of Artificial Sequence: Synthetic oligonucleotide
  Antisense strand to SEQ ID NO: 1252748
aguuauagccuacauaacu

SEQ ID NO: 1252750 - RNA, 19 nt, Artificial Sequence
  Description of Artificial Sequence: Synthetic oligonucleotide
  Sense strand starting at position 3894 of SEQ ID NO: 1241178
aggcuauaacuguaugcua

SEQ ID NO: 1252751 - RNA, 19 nt, Artificial Sequence
  Description of Artificial Sequence: Synthetic oligonucleotide
  Antisense strand to SEQ ID NO: 1252750
uagcauacaguuauagccu

SEQ ID NO: 1252752 - RNA, 19 nt, Artificial Sequence
  Description of Artificial Sequence: Synthetic oligonucleotide
  Sense strand starting at position 3917 of SEQ ID NO: 1241178
acuacuguaguguaaacaa

SEQ ID NO: 1252753 - RNA, 19 nt, Artificial Sequence
  Description of Artificial Sequence: Synthetic oligonucleotide
  Antisense strand to SEQ ID NO: 1252752
uuguuuacacuacaguagu

SEQ ID NO: 1252754 - RNA, 19 nt, Artificial Sequence
  Description of Artificial Sequence: Synthetic oligonucleotide
  Sense strand starting at position 3944 of SEQ ID NO: 1241178
uaggcuguacuguagacau

SEQ ID NO: 1252755 - RNA, 19 nt, Artificial Sequence
  Description of Artificial Sequence: Synthetic oligonucleotide
  Antisense strand to SEQ ID NO: 1252754
augucuacaguacagccua

SEQ ID NO: 1252756 - RNA, 19 nt, Artificial Sequence
  Description of Artificial Sequence: Synthetic oligonucleotide
  Sense strand starting at position 3946 of SEQ ID NO: 1241178
ggcuguacuguagacauaa

SEQ ID NO: 1252757 - RNA, 19 nt, Artificial Sequence
  Description of Artificial Sequence: Synthetic oligonucleotide
  Antisense strand to SEQ ID NO: 1252756
uuaugucuacaguacagcc

SEQ ID NO: 1252758 - RNA, 19 nt, Artificial Sequence
  Description of Artificial Sequence: Synthetic oligonucleotide
  Sense strand starting at position 3 of SEQ ID NO: 1241179
auaaaugucccuuguaccu

SEQ ID NO: 1252759 - RNA, 19 nt, Artificial Sequence
  Description of Artificial Sequence: Synthetic oligonucleotide
  Antisense strand to SEQ ID NO: 1252758
agguacaagggacauuuau

SEQ ID NO: 1252760 - RNA, 19 nt, Artificial Sequence
  Description of Artificial Sequence: Synthetic oligonucleotide
  Sense strand starting at position 38 of SEQ ID NO: 1241179
gggcuagauucagugauau

SEQ ID NO: 1252761 - RNA, 19 nt, Artificial Sequence
  Description of Artificial Sequence: Synthetic oligonucleotide
  Antisense strand to SEQ ID NO: 1252760
auaucacugaaucuagccc

SEQ ID NO: 1252762 - RNA, 19 nt, Artificial Sequence
  Description of Artificial Sequence: Synthetic oligonucleotide
  Sense strand starting at position 61 of SEQ ID NO: 1241179
ggucaaucguaucuuaaga

SEQ ID NO: 1252763 - RNA, 19 nt, Artificial Sequence
  Description of Artificial Sequence: Synthetic oligonucleotide
  Antisense strand to SEQ ID NO: 1252762
ucuuaagauacgauugacc

SEQ ID NO: 1252764 - RNA, 19 nt, Artificial Sequence
  Description of Artificial Sequence: Synthetic oligonucleotide
  Sense strand starting at position 80 of SEQ ID NO: 1241179
ugcuaugaauucuugcaaa

SEQ ID NO: 1252765 - RNA, 19 nt, Artificial Sequence
  Description of Artificial Sequence: Synthetic oligonucleotide
  Antisense strand to SEQ ID NO: 1252764
uuugcaagaauucauagca

SEQ ID NO: 1252766 - RNA, 19 nt, Artificial Sequence
  Description of Artificial Sequence: Synthetic oligonucleotide
  Sense strand starting at position 93 of SEQ ID NO: 1241179
ugcaaacauuuauucguua

SEQ ID NO: 1252767 - RNA, 19 nt, Artificial Sequence
  Description of Artificial Sequence: Synthetic oligonucleotide
  Antisense strand to SEQ ID NO: 1252766
uaacgaauaaauguuugca

SEQ ID NO: 1252768 - RNA, 19 nt, Artificial Sequence
  Description of Artificial Sequence: Synthetic oligonucleotide
  Sense strand starting at position 336 of SEQ ID NO: 1241179
ugaagaaauuuagaacucu

SEQ ID NO: 1252769 - RNA, 19 nt, Artificial Sequence
  Description of Artificial Sequence: Synthetic oligonucleotide
  Antisense strand to SEQ ID NO: 1252768
agaguucuaaauuucuuca

SEQ ID NO: 1252770 - RNA, 19 nt, Artificial Sequence
  Description of Artificial Sequence: Synthetic oligonucleotide
  Sense strand starting at position 403 of SEQ ID NO: 1241179
ugugauuugccuugcuauu

SEQ ID NO: 1252771 - RNA, 19 nt, Artificial Sequence
  Description of Artificial Sequence: Synthetic oligonucleotide
  Antisense strand to SEQ ID NO: 1252770
aauagcaaggcaaaucaca

SEQ ID NO: 1252772 - RNA, 19 nt, Artificial Sequence
  Description of Artificial Sequence: Synthetic oligonucleotide
  Sense strand starting at position 696 of SEQ ID NO: 1241179
aauaguuuauuugucgcua

SEQ ID NO: 1252773 - RNA, 19 nt, Artificial Sequence
  Description of Artificial Sequence: Synthetic oligonucleotide
  Antisense strand to SEQ ID NO: 1252772
uagcgacaaauaaacuauu

SEQ ID NO: 1252774 - RNA, 19 nt, Artificial Sequence
  Description of Artificial Sequence: Synthetic oligonucleotide
  Sense strand starting at position 700 of SEQ ID NO: 1241179
guuuauuugucgcuagaga

SEQ ID NO: 1252775 - RNA, 19 nt, Artificial Sequence
  Description of Artificial Sequence: Synthetic oligonucleotide
  Antisense strand to SEQ ID NO: 1252774
ucucuagcgacaaauaaac

SEQ ID NO: 1252776 - RNA, 19 nt, Artificial Sequence
  Description of Artificial Sequence: Synthetic oligonucleotide
  Sense strand starting at position 764 of SEQ ID NO: 1241179
agagcaauuguauguuaua

SEQ ID NO: 1252777 - RNA, 19 nt, Artificial Sequence
  Description of Artificial Sequence: Synthetic oligonucleotide
  Antisense strand to SEQ ID NO: 1252776
uauaacauacaauugcucu

SEQ ID NO: 1252778 - RNA, 19 nt, Artificial Sequence
  Description of Artificial Sequence: Synthetic oligonucleotide
  Sense strand starting at position 765 of SEQ ID NO: 1241179
gagcaauuguauguuauau

SEQ ID NO: 1252779 - RNA, 19 nt, Artificial Sequence
  Description of Artificial Sequence: Synthetic oligonucleotide
  Antisense strand to SEQ ID NO: 1252778
auauaacauacaauugcuc

SEQ ID NO: 1252780 - RNA, 19 nt, Artificial Sequence
  Description of Artificial Sequence: Synthetic oligonucleotide
  Sense strand starting at position 776 of SEQ ID NO: 1241179
uguuauaugccauaaggaa

SEQ ID NO: 1252781 - RNA, 19 nt, Artificial Sequence
  Description of Artificial Sequence: Synthetic oligonucleotide
  Antisense strand to SEQ ID NO: 1252780
uuccuuauggcauauaaca

SEQ ID NO: 1252782 - RNA, 19 nt, Artificial Sequence
  Description of Artificial Sequence: Synthetic oligonucleotide
  Sense strand starting at position 1011 of SEQ ID NO: 1241179
ugacaaacaggcugucauu

SEQ ID NO: 1252783 - RNA, 19 nt, Artificial Sequence
  Description of Artificial Sequence: Synthetic oligonucleotide
  Antisense strand to SEQ ID NO: 1252782
aaugacagccuguuuguca

SEQ ID NO: 1252784 - RNA, 19 nt, Artificial Sequence
  Description of Artificial Sequence: Synthetic oligonucleotide
  Sense strand starting at position 1234 of SEQ ID NO: 1241179
uucagaaaucguuguugag

SEQ ID NO: 1252785 - RNA, 19 nt, Artificial Sequence
  Description of Artificial Sequence: Synthetic oligonucleotide
  Antisense strand to SEQ ID NO: 1252784
cucaacaacgauuucugaa

SEQ ID NO: 1252786 - RNA, 19 nt, Artificial Sequence
  Description of Artificial Sequence: Synthetic oligonucleotide
  Sense strand starting at position 1313 of SEQ ID NO: 1241179
gugggauugcaacaagcau

SEQ ID NO: 1252787 - RNA, 19 nt, Artificial Sequence
  Description of Artificial Sequence: Synthetic oligonucleotide
  Antisense strand to SEQ ID NO: 1252786
augcuuguugcaaucccac

SEQ ID NO: 1252788 - RNA, 19 nt, Artificial Sequence
  Description of Artificial Sequence: Synthetic oligonucleotide
  Sense strand starting at position 1373 of SEQ ID NO: 1241179
ggauaugcccuuuaaagua

SEQ ID NO: 1252789 - RNA, 19 nt, Artificial Sequence
  Description of Artificial Sequence: Synthetic oligonucleotide
  Antisense strand to SEQ ID NO: 1252788
uacuuuaaagggcauaucc

SEQ ID NO: 1252790 - RNA, 19 nt, Artificial Sequence
  Description of Artificial Sequence: Synthetic oligonucleotide
  Sense strand starting at position 1497 of SEQ ID NO: 1241179
uuucgcauuuacgaauuua

SEQ ID NO: 1252791 - RNA, 19 nt, Artificial Sequence
  Description of Artificial Sequence: Synthetic oligonucleotide
  Antisense strand to SEQ ID NO: 1252790
uaaauucguaaaugcgaaa

SEQ ID NO: 1252792 - RNA, 19 nt, Artificial Sequence
  Description of Artificial Sequence: Synthetic oligonucleotide
  Sense strand starting at position 1972 of SEQ ID NO: 1241179
agcggauccuaacuacaaa

SEQ ID NO: 1252793 - RNA, 19 nt, Artificial Sequence
  Description of Artificial Sequence: Synthetic oligonucleotide
  Antisense strand to SEQ ID NO: 1252792
uuuguaguuaggauccgcu

SEQ ID NO: 1252794 - RNA, 19 nt, Artificial Sequence
  Description of Artificial Sequence: Synthetic oligonucleotide
  Sense strand starting at position 2225 of SEQ ID NO: 1241179
gaaguagagaccugucaga

SEQ ID NO: 1252795 - RNA, 19 nt, Artificial Sequence
  Description of Artificial Sequence: Synthetic oligonucleotide
  Antisense strand to SEQ ID NO: 1252794
ucugacaggucucuacuuc

SEQ ID NO: 1252796 - RNA, 19 nt, Artificial Sequence
  Description of Artificial Sequence: Synthetic oligonucleotide
  Sense strand starting at position 2449 of SEQ ID NO: 1241179
auauuaguugaauggacau

SEQ ID NO: 1252797 - RNA, 19 nt, Artificial Sequence
  Description of Artificial Sequence: Synthetic oligonucleotide
  Antisense strand to SEQ ID NO: 1252796
auguccauucaacuaauau

SEQ ID NO: 1252798 - RNA, 19 nt, Artificial Sequence
  Description of Artificial Sequence: Synthetic oligonucleotide
  Sense strand starting at position 2476 of SEQ ID NO: 1241179
ugacucauuugcucaguuu

SEQ ID NO: 1252799 - RNA, 19 nt, Artificial Sequence
  Description of Artificial Sequence: Synthetic oligonucleotide
  Antisense strand to SEQ ID NO: 1252798
aaacugagcaaaugaguca

SEQ ID NO: 1252800 - RNA, 19 nt, Artificial Sequence
  Description of Artificial Sequence: Synthetic oligonucleotide
  Sense strand starting at position 2519 of SEQ ID NO: 1241179
aaaugcugucuuuagguaa

SEQ ID NO: 1252801 - RNA, 19 nt, Artificial Sequence
  Description of Artificial Sequence: Synthetic oligonucleotide
  Antisense strand to SEQ ID NO: 1252800
uuaccuaaagacagcauuu

SEQ ID NO: 1252802 - RNA, 19 nt, Artificial Sequence
  Description of Artificial Sequence: Synthetic oligonucleotide
  Sense strand starting at position 2522 of SEQ ID NO: 1241179
ugcugucuuuagguaauuu

SEQ ID NO: 1252803 - RNA, 19 nt, Artificial Sequence
  Description of Artificial Sequence: Synthetic oligonucleotide
  Antisense strand to SEQ ID NO: 1252802
aaauuaccuaaagacagca

SEQ ID NO: 1252804 - RNA, 19 nt, Artificial Sequence
  Description of Artificial Sequence: Synthetic oligonucleotide
  Sense strand starting at position 2632 of SEQ ID NO: 1241179
uuuguauauuucucguaga

SEQ ID NO: 1252805 - RNA, 19 nt, Artificial Sequence
  Description of Artificial Sequence: Synthetic oligonucleotide
  Antisense strand to SEQ ID NO: 1252804
ucuacgagaaauauacaaa

SEQ ID NO: 1252806 - RNA, 19 nt, Artificial Sequence
  Description of Artificial Sequence: Synthetic oligonucleotide
  Sense strand starting at position 2756 of SEQ ID NO: 1241179
ccuuaagugccucagauca

SEQ ID NO: 1252807 - RNA, 19 nt, Artificial Sequence
  Description of Artificial Sequence: Synthetic oligonucleotide
  Antisense strand to SEQ ID NO: 1252806
ugaucugaggcacuuaagg

SEQ ID NO: 1252808 - RNA, 19 nt, Artificial Sequence
  Description of Artificial Sequence: Synthetic oligonucleotide
  Sense strand starting at position 2761 of SEQ ID NO: 1241179
agugccucagaucagauau

SEQ ID NO: 1252809 - RNA, 19 nt, Artificial Sequence
  Description of Artificial Sequence: Synthetic oligonucleotide
  Antisense strand to SEQ ID NO: 1252808
auaucugaucugaggcacu

SEQ ID NO: 1252810 - RNA, 19 nt, Artificial Sequence
  Description of Artificial Sequence: Synthetic oligonucleotide
  Sense strand starting at position 2806 of SEQ ID NO: 1241179
ugucauauugcucacuagu

SEQ ID NO: 1252811 - RNA, 19 nt, Artificial Sequence
  Description of Artificial Sequence: Synthetic oligonucleotide
  Antisense strand to SEQ ID NO: 1252810
acuagugagcaauaugaca

SEQ ID NO: 1252812 - RNA, 19 nt, Artificial Sequence
  Description of Artificial Sequence: Synthetic oligonucleotide
  Sense strand starting at position 2958 of SEQ ID NO: 1241179
uuguauuuaccacguacau

SEQ ID NO: 1252813 - RNA, 19 nt, Artificial Sequence
  Description of Artificial Sequence: Synthetic oligonucleotide
  Antisense strand to SEQ ID NO: 1252812
auguacgugguaaauacaa

SEQ ID NO: 1252814 - RNA, 19 nt, Artificial Sequence
  Description of Artificial Sequence: Synthetic oligonucleotide
  Sense strand starting at position 2973 of SEQ ID NO: 1241179
acaugauauuuggacguau

SEQ ID NO: 1252815 - RNA, 19 nt, Artificial Sequence
  Description of Artificial Sequence: Synthetic oligonucleotide
  Antisense strand to SEQ ID NO: 1252814
auacguccaaauaucaugu

SEQ ID NO: 1252816 - RNA, 19 nt, Artificial Sequence
  Description of Artificial Sequence: Synthetic oligonucleotide
  Sense strand starting at position 3492 of SEQ ID NO: 1241179
uggauagguugaguauaua

SEQ ID NO: 1252817 - RNA, 19 nt, Artificial Sequence
  Description of Artificial Sequence: Synthetic oligonucleotide
  Antisense strand to SEQ ID NO: 1252816
uauauacucaaccuaucca

SEQ ID NO: 1252818 - RNA, 19 nt, Artificial Sequence
  Description of Artificial Sequence: Synthetic oligonucleotide
  Sense strand starting at position 3503 of SEQ ID NO: 1241179
aguauauaucuuggcuauu

SEQ ID NO: 1252819 - RNA, 19 nt, Artificial Sequence
  Description of Artificial Sequence: Synthetic oligonucleotide
  Antisense strand to SEQ ID NO: 1252818
aauagccaagauauauacu

SEQ ID NO: 1252820 - RNA, 19 nt, Artificial Sequence
  Description of Artificial Sequence: Synthetic oligonucleotide
  Sense strand starting at position 3504 of SEQ ID NO: 1241179
guauauaucuuggcuauug

SEQ ID NO: 1252821 - RNA, 19 nt, Artificial Sequence
  Description of Artificial Sequence: Synthetic oligonucleotide
  Antisense strand to SEQ ID NO: 1252820
caauagccaagauauauac

SEQ ID NO: 1252822 - RNA, 19 nt, Artificial Sequence
  Description of Artificial Sequence: Synthetic oligonucleotide
  Sense strand starting at position 3617 of SEQ ID NO: 1241179
gucuuaugauaguucuauu

SEQ ID NO: 1252823 - RNA, 19 nt, Artificial Sequence
  Description of Artificial Sequence: Synthetic oligonucleotide
  Antisense strand to SEQ ID NO: 1252822
aauagaacuaucauaagac

SEQ ID NO: 1252824 - RNA, 19 nt, Artificial Sequence
  Description of Artificial Sequence: Synthetic oligonucleotide
  Sense strand starting at position 3681 of SEQ ID NO: 1241179
ccauuugcauucccgcaaa

SEQ ID NO: 1252825 - RNA, 19 nt, Artificial Sequence
  Description of Artificial Sequence: Synthetic oligonucleotide
  Antisense strand to SEQ ID NO: 1252824
uuugcgggaaugcaaaugg

SEQ ID NO: 1252826 - RNA, 19 nt, Artificial Sequence
  Description of Artificial Sequence: Synthetic oligonucleotide
  Sense strand starting at position 3684 of SEQ ID NO: 1241179
uuugcauucccgcaaagag

SEQ ID NO: 1252827 - RNA, 19 nt, Artificial Sequence
  Description of Artificial Sequence: Synthetic oligonucleotide
  Antisense strand to SEQ ID NO: 1252826
cucuuugcgggaaugcaaa

SEQ ID NO: 1252828 - RNA, 19 nt, Artificial Sequence
  Description of Artificial Sequence: Synthetic oligonucleotide
  Sense strand starting at position 3770 of SEQ ID NO: 1241179
acaggugugacguauccua

SEQ ID NO: 1252829 - RNA, 19 nt, Artificial Sequence
  Description of Artificial Sequence: Synthetic oligonucleotide
  Antisense strand to SEQ ID NO: 1252828
uaggauacgucacaccugu

SEQ ID NO: 1252830 - RNA, 19 nt, Artificial Sequence
  Description of Artificial Sequence: Synthetic oligonucleotide
  Sense strand starting at position 3801 of SEQ ID NO: 1241179
uuugcauuucgcuaugauu

SEQ ID NO: 1252831 - RNA, 19 nt, Artificial Sequence
  Description of Artificial Sequence: Synthetic oligonucleotide
  Antisense strand to SEQ ID NO: 1252830
aaucauagcgaaaugcaaa

SEQ ID NO: 1252832 - RNA, 19 nt, Artificial Sequence
  Description of Artificial Sequence: Synthetic oligonucleotide
  Sense strand starting at position 3803 of SEQ ID NO: 1241179
ugcauuucgcuaugauuau

SEQ ID NO: 1252833 - RNA, 19 nt, Artificial Sequence
  Description of Artificial Sequence: Synthetic oligonucleotide
  Antisense strand to SEQ ID NO: 1252832
auaaucauagcgaaaugca

SEQ ID NO: 1252834 - RNA, 19 nt, Artificial Sequence
  Description of Artificial Sequence: Synthetic oligonucleotide
  Sense strand starting at position 3841 of SEQ ID NO: 1241179
auauaucuguuggcgauuu

SEQ ID NO: 1252835 - RNA, 19 nt, Artificial Sequence
  Description of Artificial Sequence: Synthetic oligonucleotide
  Antisense strand to SEQ ID NO: 1252834
aaaucgccaacagauauau

SEQ ID NO: 1252836 - RNA, 19 nt, Artificial Sequence
  Description of Artificial Sequence: Synthetic oligonucleotide
  Sense strand starting at position 3931 of SEQ ID NO: 1241179
uuaguugaguuccuuauuu

SEQ ID NO: 1252837 - RNA, 19 nt, Artificial Sequence
  Description of Artificial Sequence: Synthetic oligonucleotide
  Antisense strand to SEQ ID NO: 1252836
aaauaaggaacucaacuaa

SEQ ID NO: 1252838 - RNA, 19 nt, Artificial Sequence
  Description of Artificial Sequence: Synthetic oligonucleotide
  Sense strand starting at position 66 of SEQ ID NO: 1241180
gguguugacaggugugcua

SEQ ID NO: 1252839 - RNA, 19 nt, Artificial Sequence
  Description of Artificial Sequence: Synthetic oligonucleotide
  Antisense strand to SEQ ID NO: 1252838
uagcacaccugucaacacc

SEQ ID NO: 1252840 - RNA, 19 nt, Artificial Sequence
  Description of Artificial Sequence: Synthetic oligonucleotide
  Sense strand starting at position 91 of SEQ ID NO: 1241180
ggcacuaagcgcuguguga

SEQ ID NO: 1252841 - RNA, 19 nt, Artificial Sequence
  Description of Artificial Sequence: Synthetic oligonucleotide
  Antisense strand to SEQ ID NO: 1252840
ucacacagcgcuuagugcc

SEQ ID NO: 1252842 - RNA, 19 nt, Artificial Sequence
  Description of Artificial Sequence: Synthetic oligonucleotide
  Sense strand starting at position 114 of SEQ ID NO: 1241180
guacgugugcgagucucau

SEQ ID NO: 1252843 - RNA, 19 nt, Artificial Sequence
  Description of Artificial Sequence: Synthetic oligonucleotide
  Antisense strand to SEQ ID NO: 1252842
augagacucgcacacguac

SEQ ID NO: 1252844 - RNA, 19 nt, Artificial Sequence
  Description of Artificial Sequence: Synthetic oligonucleotide
  Sense strand starting at position 118 of SEQ ID NO: 1241180
gugugcgagucucauguau

SEQ ID NO: 1252845 - RNA, 19 nt, Artificial Sequence
  Description of Artificial Sequence: Synthetic oligonucleotide
  Antisense strand to SEQ ID NO: 1252844
auacaugagacucgcacac

SEQ ID NO: 1252846 - RNA, 19 nt, Artificial Sequence
  Description of Artificial Sequence: Synthetic oligonucleotide
  Sense strand starting at position 120 of SEQ ID NO: 1241180
gugcgagucucauguauuc

SEQ ID NO: 1252847 - RNA, 19 nt, Artificial Sequence
  Description of Artificial Sequence: Synthetic oligonucleotide
  Antisense strand to SEQ ID NO: 1252846
gaauacaugagacucgcac

SEQ ID NO: 1252848 - RNA, 19 nt, Artificial Sequence
  Description of Artificial Sequence: Synthetic oligonucleotide
  Sense strand starting at position 122 of SEQ ID NO: 1241180
gcgagucucauguauucca

SEQ ID NO: 1252849 - RNA, 19 nt, Artificial Sequence
  Description of Artificial Sequence: Synthetic oligonucleotide
  Antisense strand to SEQ ID NO: 1252848
uggaauacaugagacucgc

SEQ ID NO: 1252850 - RNA, 19 nt, Artificial Sequence
  Description of Artificial Sequence: Synthetic oligonucleotide
  Sense strand starting at position 287 of SEQ ID NO: 1241180
cucuauuaagaguggaucu

SEQ ID NO: 1252851 - RNA, 19 nt, Artificial Sequence
  Description of Artificial Sequence: Synthetic oligonucleotide
  Antisense strand to SEQ ID NO: 1252850
agauccacucuuaauagag

SEQ ID NO: 1252852 - RNA, 19 nt, Artificial Sequence
  Description of Artificial Sequence: Synthetic oligonucleotide
  Sense strand starting at position 744 of SEQ ID NO: 1241180
ucugaucucucaugauggu

SEQ ID NO: 1252853 - RNA, 19 nt, Artificial Sequence
  Description of Artificial Sequence: Synthetic oligonucleotide
  Antisense strand to SEQ ID NO: 1252852
accaucaugagagaucaga

SEQ ID NO: 1252854 - RNA, 19 nt, Artificial Sequence
  Description of Artificial Sequence: Synthetic oligonucleotide
  Sense strand starting at position 753 of SEQ ID NO: 1241180
ucaugauggugcuugggau

SEQ ID NO: 1252855 - RNA, 19 nt, Artificial Sequence
  Description of Artificial Sequence: Synthetic oligonucleotide
  Antisense strand to SEQ ID NO: 1252854
aucccaagcaccaucauga

SEQ ID NO: 1252856 - RNA, 19 nt, Artificial Sequence
  Description of Artificial Sequence: Synthetic oligonucleotide
  Sense strand starting at position 866 of SEQ ID NO: 1241180
cccacagucugcucugaaa

SEQ ID NO: 1252857 - RNA, 19 nt, Artificial Sequence
  Description of Artificial Sequence: Synthetic oligonucleotide
  Antisense strand to SEQ ID NO: 1252856
uuucagagcagacuguggg

SEQ ID NO: 1252858 - RNA, 19 nt, Artificial Sequence
  Description of Artificial Sequence: Synthetic oligonucleotide
  Sense strand starting at position 868 of SEQ ID NO: 1241180
cacagucugcucugaaaga

SEQ ID NO: 1252859 - RNA, 19 nt, Artificial Sequence
  Description of Artificial Sequence: Synthetic oligonucleotide
  Antisense strand to SEQ ID NO: 1252858
ucuuucagagcagacugug

SEQ ID NO: 1252860 - RNA, 19 nt, Artificial Sequence
  Description of Artificial Sequence: Synthetic oligonucleotide
  Sense strand starting at position 1012 of SEQ ID NO: 1241180
guugaaaugugaucaugug

SEQ ID NO: 1252861 - RNA, 19 nt, Artificial Sequence
  Description of Artificial Sequence: Synthetic oligonucleotide
  Antisense strand to SEQ ID NO: 1252860
cacaugaucacauuucaac

SEQ ID NO: 1252862 - RNA, 19 nt, Artificial Sequence
  Description of Artificial Sequence: Synthetic oligonucleotide
  Sense strand starting at position 1033 of SEQ ID NO: 1241180
uuuagaaucucugagacuu

SEQ ID NO: 1252863 - RNA, 19 nt, Artificial Sequence
  Description of Artificial Sequence: Synthetic oligonucleotide
  Antisense strand to SEQ ID NO: 1252862
aagucucagagauucuaaa

SEQ ID NO: 1252864 - RNA, 19 nt, Artificial Sequence
  Description of Artificial Sequence: Synthetic oligonucleotide
  Sense strand starting at position 1153 of SEQ ID NO: 1241180
gaggaauggucagaaagag

SEQ ID NO: 1252865 - RNA, 19 nt, Artificial Sequence
  Description of Artificial Sequence: Synthetic oligonucleotide
  Antisense strand to SEQ ID NO: 1252864
cucuuucugaccauuccuc

SEQ ID NO: 1252866 - RNA, 19 nt, Artificial Sequence
  Description of Artificial Sequence: Synthetic oligonucleotide
  Sense strand starting at position 1349 of SEQ ID NO: 1241180
acagcauucgagggcugua

SEQ ID NO: 1252867 - RNA, 19 nt, Artificial Sequence
  Description of Artificial Sequence: Synthetic oligonucleotide
  Antisense strand to SEQ ID NO: 1252866
uacagcccucgaaugcugu

SEQ ID NO: 1252868 - RNA, 19 nt, Artificial Sequence
  Description of Artificial Sequence: Synthetic oligonucleotide
  Sense strand starting at position 2162 of SEQ ID NO: 1241180
ggcuccugcucuggagaga

SEQ ID NO: 1252869 - RNA, 19 nt, Artificial Sequence
  Description of Artificial Sequence: Synthetic oligonucleotide
  Antisense strand to SEQ ID NO: 1252868
ucucuccagagcaggagcc

SEQ ID NO: 1252870 - RNA, 19 nt, Artificial Sequence
  Description of Artificial Sequence: Synthetic oligonucleotide
  Sense strand starting at position 2709 of SEQ ID NO: 1241180
gcccgagugguucuuucuu

SEQ ID NO: 1252871 - RNA, 19 nt, Artificial Sequence
  Description of Artificial Sequence: Synthetic oligonucleotide
  Antisense strand to SEQ ID NO: 1252870
aagaaagaaccacucgggc

SEQ ID NO: 1252872 - RNA, 19 nt, Artificial Sequence
  Description of Artificial Sequence: Synthetic oligonucleotide
  Sense strand starting at position 3039 of SEQ ID NO: 1241180
gguucuuucuuccucacga

SEQ ID NO: 1252873 - RNA, 19 nt, Artificial Sequence
  Description of Artificial Sequence: Synthetic oligonucleotide
  Antisense strand to SEQ ID NO: 1252872
ucgugaggaagaaagaacc

SEQ ID NO: 1252874 - RNA, 19 nt, Artificial Sequence
  Description of Artificial Sequence: Synthetic oligonucleotide
  Sense strand starting at position 3563 of SEQ ID NO: 1241180
uggugaagcccugaaccau

SEQ ID NO: 1252875 - RNA, 19 nt, Artificial Sequence
  Description of Artificial Sequence: Synthetic oligonucleotide
  Antisense strand to SEQ ID NO: 1252874
augguucagggcuucacca

SEQ ID NO: 1252876 - RNA, 19 nt, Artificial Sequence
  Description of Artificial Sequence: Synthetic oligonucleotide
  Sense strand starting at position 3653 of SEQ ID NO: 1241180
ggacucuguccuugcuuga

SEQ ID NO: 1252877 - RNA, 19 nt, Artificial Sequence
  Description of Artificial Sequence: Synthetic oligonucleotide
  Antisense strand to SEQ ID NO: 1252876
ucaagcaaggacagagucc

SEQ ID NO: 1252878 - RNA, 19 nt, Artificial Sequence
  Description of Artificial Sequence: Synthetic oligonucleotide
  Sense strand starting at position 3657 of SEQ ID NO: 1241180
ucuguccuugcuugaauca

SEQ ID NO: 1252879 - RNA, 19 nt, Artificial Sequence
  Description of Artificial Sequence: Synthetic oligonucleotide
  Antisense strand to SEQ ID NO: 1252878
ugauucaagcaaggacaga

SEQ ID NO: 1252880 - RNA, 19 nt, Artificial Sequence
  Description of Artificial Sequence: Synthetic oligonucleotide
  Sense strand starting at position 3731 of SEQ ID NO: 1241180
augacaagaugagaucauu

SEQ ID NO: 1252881 - RNA, 19 nt, Artificial Sequence
  Description of Artificial Sequence: Synthetic oligonucleotide
  Antisense strand to SEQ ID NO: 1252880
aaugaucucaucuugucau

SEQ ID NO: 1252882 - RNA, 19 nt, Artificial Sequence
  Description of Artificial Sequence: Synthetic oligonucleotide
  Sense strand starting at position 3739 of SEQ ID NO: 1241180
augagaucauucucugcac

SEQ ID NO: 1252883 - RNA, 19 nt, Artificial Sequence
  Description of Artificial Sequence: Synthetic oligonucleotide
  Antisense strand to SEQ ID NO: 1252882
gugcagagaaugaucucau

SEQ ID NO: 1252884 - RNA, 19 nt, Artificial Sequence
  Description of Artificial Sequence: Synthetic oligonucleotide
  Sense strand starting at position 3818 of SEQ ID NO: 1241180
uauggaagcucuucgguca

SEQ ID NO: 1252885 - RNA, 19 nt, Artificial Sequence
  Description of Artificial Sequence: Synthetic oligonucleotide
  Antisense strand to SEQ ID NO: 1252884
ugaccgaagagcuuccaua

SEQ ID NO: 1252886 - RNA, 19 nt, Artificial Sequence
  Description of Artificial Sequence: Synthetic oligonucleotide
  Sense strand starting at position 184 of SEQ ID NO: 1241181
gggaguggcuuucauggca

SEQ ID NO: 1252887 - RNA, 19 nt, Artificial Sequence
  Description of Artificial Sequence: Synthetic oligonucleotide
  Antisense strand to SEQ ID NO: 1252886
ugccaugaaagccacuccc

SEQ ID NO: 1252888 - RNA, 19 nt, Artificial Sequence
  Description of Artificial Sequence: Synthetic oligonucleotide
  Sense strand starting at position 232 of SEQ ID NO: 1241181
gaaguccacugguaacuuu

SEQ ID NO: 1252889 - RNA, 19 nt, Artificial Sequence
  Description of Artificial Sequence: Synthetic oligonucleotide
  Antisense strand to SEQ ID NO: 1252888
aaaguuaccaguggacuuc

SEQ ID NO: 1252890 - RNA, 19 nt, Artificial Sequence
  Description of Artificial Sequence: Synthetic oligonucleotide
  Sense strand starting at position 262 of SEQ ID NO: 1241181
aggcaaauucugugagcuc

SEQ ID NO: 1252891 - RNA, 19 nt, Artificial Sequence
  Description of Artificial Sequence: Synthetic oligonucleotide
  Antisense strand to SEQ ID NO: 1252890
gagcucacagaauuugccu

SEQ ID NO: 1252892 - RNA, 19 nt, Artificial Sequence
  Description of Artificial Sequence: Synthetic oligonucleotide
  Sense strand starting at position 263 of SEQ ID NO: 1241181
ggcaaauucugugagcucu

SEQ ID NO: 1252893 - RNA, 19 nt, Artificial Sequence
  Description of Artificial Sequence: Synthetic oligonucleotide
  Antisense strand to SEQ ID NO: 1252892
agagcucacagaauuugcc

SEQ ID NO: 1252894 - RNA, 19 nt, Artificial Sequence
  Description of Artificial Sequence: Synthetic oligonucleotide
  Sense strand starting at position 366 of SEQ ID NO: 1241181
gggcucaggcuuuggguaa

SEQ ID NO: 1252895 - RNA, 19 nt, Artificial Sequence
  Description of Artificial Sequence: Synthetic oligonucleotide
  Antisense strand to SEQ ID NO: 1252894
uuacccaaagccugagccc

SEQ ID NO: 1252896 - RNA, 19 nt, Artificial Sequence
  Description of Artificial Sequence: Synthetic oligonucleotide
  Sense strand starting at position 1244 of SEQ ID NO: 1241181
aggccuaguucagaagaga

SEQ ID NO: 1252897 - RNA, 19 nt, Artificial Sequence
  Description of Artificial Sequence: Synthetic oligonucleotide
  Antisense strand to SEQ ID NO: 1252896
ucucuucugaacuaggccu

SEQ ID NO: 1252898 - RNA, 19 nt, Artificial Sequence
  Description of Artificial Sequence: Synthetic oligonucleotide
  Sense strand starting at position 1257 of SEQ ID NO: 1241181
aagagaugauagugggaga

SEQ ID NO: 1252899 - RNA, 19 nt, Artificial Sequence
  Description of Artificial Sequence: Synthetic oligonucleotide
  Antisense strand to SEQ ID NO: 1252898
ucucccacuaucaucucuu

SEQ ID NO: 1252900 - RNA, 19 nt, Artificial Sequence
  Description of Artificial Sequence: Synthetic oligonucleotide
  Sense strand starting at position 2081 of SEQ ID NO: 1241181
ggccgagaccuguacccaa

SEQ ID NO: 1252901 - RNA, 19 nt, Artificial Sequence
  Description of Artificial Sequence: Synthetic oligonucleotide
  Antisense strand to SEQ ID NO: 1252900
uuggguacaggucucggcc

SEQ ID NO: 1252902 - RNA, 19 nt, Artificial Sequence
  Description of Artificial Sequence: Synthetic oligonucleotide
  Sense strand starting at position 2268 of SEQ ID NO: 1241181
ggcuguugauauggagaac

SEQ ID NO: 1252903 - RNA, 19 nt, Artificial Sequence
  Description of Artificial Sequence: Synthetic oligonucleotide
  Antisense strand to SEQ ID NO: 1252902
guucuccauaucaacagcc

SEQ ID NO: 1252904 - RNA, 19 nt, Artificial Sequence
  Description of Artificial Sequence: Synthetic oligonucleotide
  Sense strand starting at position 2307 of SEQ ID NO: 1241181
aggcucaaucgucacgaca

SEQ ID NO: 1252905 - RNA, 19 nt, Artificial Sequence
  Description of Artificial Sequence: Synthetic oligonucleotide
  Antisense strand to SEQ ID NO: 1252904
ugucgugacgauugagccu

SEQ ID NO: 1252906 - RNA, 19 nt, Artificial Sequence
  Description of Artificial Sequence: Synthetic oligonucleotide
  Sense strand starting at position 3426 of SEQ ID NO: 1241181
ccaggugucgcugucucaa

SEQ ID NO: 1252907 - RNA, 19 nt, Artificial Sequence
  Description of Artificial Sequence: Synthetic oligonucleotide
  Antisense strand to SEQ ID NO: 1252906
uugagacagcgacaccugg

SEQ ID NO: 1252908 - RNA, 19 nt, Artificial Sequence
  Description of Artificial Sequence: Synthetic oligonucleotide
  Sense strand starting at position 3539 of SEQ ID NO: 1241181
gcucccagcucuuggaauu

SEQ ID NO: 1252909 - RNA, 19 nt, Artificial Sequence
  Description of Artificial Sequence: Synthetic oligonucleotide
  Antisense strand to SEQ ID NO: 1252908
aauuccaagagcugggagc

SEQ ID NO: 1252910 - RNA, 19 nt, Artificial Sequence
  Description of Artificial Sequence: Synthetic oligonucleotide
  Sense strand starting at position 3796 of SEQ ID NO: 1241181
ugaguugacaagggaguuu

SEQ ID NO: 1252911 - RNA, 19 nt, Artificial Sequence
  Description of Artificial Sequence: Synthetic oligonucleotide
  Antisense strand to SEQ ID NO: 1252910
aaacucccuugucaacuca

SEQ ID NO: 1252912 - RNA, 19 nt, Artificial Sequence
  Description of Artificial Sequence: Synthetic oligonucleotide
  Sense strand starting at position 178 of SEQ ID NO: 1241182
aggccuaguucagaagaga

SEQ ID NO: 1252913 - RNA, 19 nt, Artificial Sequence
  Description of Artificial Sequence: Synthetic oligonucleotide
  Antisense strand to SEQ ID NO: 1252912
ucucuucugaacuaggccu

SEQ ID NO: 1252914 - RNA, 19 nt, Artificial Sequence
  Description of Artificial Sequence: Synthetic oligonucleotide
  Sense strand starting at position 191 of SEQ ID NO: 1241182
aagagaugauagugggaga

SEQ ID NO: 1252915 - RNA, 19 nt, Artificial Sequence
  Description of Artificial Sequence: Synthetic oligonucleotide
  Antisense strand to SEQ ID NO: 1252914
ucucccacuaucaucucuu

SEQ ID NO: 1252916 - RNA, 19 nt, Artificial Sequence
  Description of Artificial Sequence: Synthetic oligonucleotide
  Sense strand starting at position 1015 of SEQ ID NO: 1241182
ggccgagaccuguacccaa

SEQ ID NO: 1252917 - RNA, 19 nt, Artificial Sequence
  Description of Artificial Sequence: Synthetic oligonucleotide
  Antisense strand to SEQ ID NO: 1252916
uuggguacaggucucggcc

SEQ ID NO: 1252918 - RNA, 19 nt, Artificial Sequence
  Description of Artificial Sequence: Synthetic oligonucleotide
  Sense strand starting at position 1202 of SEQ ID NO: 1241182
ggcuguugauauggagaac

SEQ ID NO: 1252919 - RNA, 19 nt, Artificial Sequence
  Description of Artificial Sequence: Synthetic oligonucleotide
  Antisense strand to SEQ ID NO: 1252918
guucuccauaucaacagcc

SEQ ID NO: 1252920 - RNA, 19 nt, Artificial Sequence
  Description of Artificial Sequence: Synthetic oligonucleotide
  Sense strand starting at position 1241 of SEQ ID NO: 1241182
aggcucaaucgucacgaca

SEQ ID NO: 1252921 - RNA, 19 nt, Artificial Sequence
  Description of Artificial Sequence: Synthetic oligonucleotide
  Antisense strand to SEQ ID NO: 1252920
ugucgugacgauugagccu

SEQ ID NO: 1252922 - RNA, 19 nt, Artificial Sequence
  Description of Artificial Sequence: Synthetic oligonucleotide
  Sense strand starting at position 2360 of SEQ ID NO: 1241182
ccaggugucgcugucucaa

SEQ ID NO: 1252923 - RNA, 19 nt, Artificial Sequence
  Description of Artificial Sequence: Synthetic oligonucleotide
  Antisense strand to SEQ ID NO: 1252922
uugagacagcgacaccugg

SEQ ID NO: 1252924 - RNA, 19 nt, Artificial Sequence
  Description of Artificial Sequence: Synthetic oligonucleotide
  Sense strand starting at position 2473 of SEQ ID NO: 1241182
gcucccagcucuuggaauu

SEQ ID NO: 1252925 - RNA, 19 nt, Artificial Sequence
  Description of Artificial Sequence: Synthetic oligonucleotide
  Antisense strand to SEQ ID NO: 1252924
aauuccaagagcugggagc

SEQ ID NO: 1252926 - RNA, 19 nt, Artificial Sequence
  Description of Artificial Sequence: Synthetic oligonucleotide
  Sense strand starting at position 2730 of SEQ ID NO: 1241182
ugaguugacaagggaguuu

SEQ ID NO: 1252927 - RNA, 19 nt, Artificial Sequence
  Description of Artificial Sequence: Synthetic oligonucleotide
  Antisense strand to SEQ ID NO: 1252926
aaacucccuugucaacuca

SEQ ID NO: 1252928 - RNA, 19 nt, Artificial Sequence
  Description of Artificial Sequence: Synthetic oligonucleotide
  Sense strand starting at position 3246 of SEQ ID NO: 1241182
ggagcccucgccuaugaga

SEQ ID NO: 1252929 - RNA, 19 nt, Artificial Sequence
  Description of Artificial Sequence: Synthetic oligonucleotide
  Antisense strand to SEQ ID NO: 1252928
ucucauaggcgagggcucc

SEQ ID NO: 1252930 - RNA, 19 nt, Artificial Sequence
  Description of Artificial Sequence: Synthetic oligonucleotide
  Sense strand starting at position 3842 of SEQ ID NO: 1241182
uuugccuucgugcugcaaa

SEQ ID NO: 1252931 - RNA, 19 nt, Artificial Sequence
  Description of Artificial Sequence: Synthetic oligonucleotide
  Antisense strand to SEQ ID NO: 1252930
uuugcagcacgaaggcaaa

SEQ ID NO: 1252932 - RNA, 19 nt, Artificial Sequence
  Description of Artificial Sequence: Synthetic oligonucleotide
  Sense strand starting at position 3844 of SEQ ID NO: 1241182
ugccuucgugcugcaaaga

SEQ ID NO: 1252933 - RNA, 19 nt, Artificial Sequence
  Description of Artificial Sequence: Synthetic oligonucleotide
  Antisense strand to SEQ ID NO: 1252932
ucuuugcagcacgaaggca

SEQ ID NO: 1252934 - RNA, 19 nt, Artificial Sequence
  Description of Artificial Sequence: Synthetic oligonucleotide
  Sense strand starting at position 687 of SEQ ID NO: 1241183
ggccgagaccuguacccaa

SEQ ID NO: 1252935 - RNA, 19 nt, Artificial Sequence
  Description of Artificial Sequence: Synthetic oligonucleotide
  Antisense strand to SEQ ID NO: 1252934
uuggguacaggucucggcc

SEQ ID NO: 1252936 - RNA, 19 nt, Artificial Sequence
  Description of Artificial Sequence: Synthetic oligonucleotide
  Sense strand starting at position 874 of SEQ ID NO: 1241183
ggcuguugauauggagaac

SEQ ID NO: 1252937 - RNA, 19 nt, Artificial Sequence
  Description of Artificial Sequence: Synthetic oligonucleotide
  Antisense strand to SEQ ID NO: 1252936
guucuccauaucaacagcc

SEQ ID NO: 1252938 - RNA, 19 nt, Artificial Sequence
  Description of Artificial Sequence: Synthetic oligonucleotide
  Sense strand starting at position 913 of SEQ ID NO: 1241183
aggcucaaucgucacgaca

SEQ ID NO: 1252939 - RNA, 19 nt, Artificial Sequence
  Description of Artificial Sequence: Synthetic oligonucleotide
  Antisense strand to SEQ ID NO: 1252938
ugucgugacgauugagccu

SEQ ID NO: 1252940 - RNA, 19 nt, Artificial Sequence
  Description of Artificial Sequence: Synthetic oligonucleotide
  Sense strand starting at position 2032 of SEQ ID NO: 1241183
ccaggugucgcugucucaa

SEQ ID NO: 1252941 - RNA, 19 nt, Artificial Sequence
  Description of Artificial Sequence: Synthetic oligonucleotide
  Antisense strand to SEQ ID NO: 1252940
uugagacagcgacaccugg

SEQ ID NO: 1252942 - RNA, 19 nt, Artificial Sequence
  Description of Artificial Sequence: Synthetic oligonucleotide
  Sense strand starting at position 2145 of SEQ ID NO: 1241183
gcucccagcucuuggaauu

SEQ ID NO: 1252943 - RNA, 19 nt, Artificial Sequence
  Description of Artificial Sequence: Synthetic oligonucleotide
  Antisense strand to SEQ ID NO: 1252942
aauuccaagagcugggagc

SEQ ID NO: 1252944 - RNA, 19 nt, Artificial Sequence
  Description of Artificial Sequence: Synthetic oligonucleotide
  Sense strand starting at position 2402 of SEQ ID NO: 1241183
ugaguugacaagggaguuu

SEQ ID NO: 1252945 - RNA, 19 nt, Artificial Sequence
  Description of Artificial Sequence: Synthetic oligonucleotide
  Antisense strand to SEQ ID NO: 1252944
aaacucccuugucaacuca

SEQ ID NO: 1252946 - RNA, 19 nt, Artificial Sequence
  Description of Artificial Sequence: Synthetic oligonucleotide
  Sense strand starting at position 2918 of SEQ ID NO: 1241183
ggagcccucgccuaugaga

SEQ ID NO: 1252947 - RNA, 19 nt, Artificial Sequence
  Description of Artificial Sequence: Synthetic oligonucleotide
  Antisense strand to SEQ ID NO: 1252946
ucucauaggcgagggcucc

SEQ ID NO: 1252948 - RNA, 19 nt, Artificial Sequence
  Description of Artificial Sequence: Synthetic oligonucleotide
  Sense strand starting at position 3514 of SEQ ID NO: 1241183
uuugccuucgugcugcaaa

SEQ ID NO: 1252949 - RNA, 19 nt, Artificial Sequence
  Description of Artificial Sequence: Synthetic oligonucleotide
  Antisense strand to SEQ ID NO: 1252948
uuugcagcacgaaggcaaa

SEQ ID NO: 1252950 - RNA, 19 nt, Artificial Sequence
  Description of Artificial Sequence: Synthetic oligonucleotide
  Sense strand starting at position 3516 of SEQ ID NO: 1241183
ugccuucgugcugcaaaga

SEQ ID NO: 1252951 - RNA, 19 nt, Artificial Sequence
  Description of Artificial Sequence: Synthetic oligonucleotide
  Antisense strand to SEQ ID NO: 1252950
ucuuugcagcacgaaggca

SEQ ID NO: 1252952 - RNA, 19 nt, Artificial Sequence
  Description of Artificial Sequence: Synthetic oligonucleotide
  Sense strand starting at position 3935 of SEQ ID NO: 1241183
ccgggaaucuugcuccuga

SEQ ID NO: 1252953 - RNA, 19 nt, Artificial Sequence
  Description of Artificial Sequence: Synthetic oligonucleotide
  Antisense strand to SEQ ID NO: 1252952
ucaggagcaagauucccgg

SEQ ID NO: 1252954 - RNA, 19 nt, Artificial Sequence
  Description of Artificial Sequence: Synthetic oligonucleotide
  Sense strand starting at position 3936 of SEQ ID NO: 1241183
cgggaaucuugcuccugaa

SEQ ID NO: 1252955 - RNA, 19 nt, Artificial Sequence
  Description of Artificial Sequence: Synthetic oligonucleotide
  Antisense strand to SEQ ID NO: 1252954
uucaggagcaagauucccg

SEQ ID NO: 1252956 - RNA, 19 nt, Artificial Sequence
  Description of Artificial Sequence: Synthetic oligonucleotide
  Sense strand starting at position 29 of SEQ ID NO: 1241184
caaagaaaugcaggucuga

SEQ ID NO: 1252957 - RNA, 19 nt, Artificial Sequence
  Description of Artificial Sequence: Synthetic oligonucleotide
  Antisense strand to SEQ ID NO: 1252956
ucagaccugcauuucuuug

SEQ ID NO: 1252958 - RNA, 19 nt, Artificial Sequence
  Description of Artificial Sequence: Synthetic oligonucleotide
  Sense strand starting at position 96 of SEQ ID NO: 1241184
ugacuugaauuguuagaga

SEQ ID NO: 1252959 - RNA, 19 nt, Artificial Sequence
  Description of Artificial Sequence: Synthetic oligonucleotide
  Antisense strand to SEQ ID NO: 1252958
ucucuaacaauucaaguca

SEQ ID NO: 1252960 - RNA, 19 nt, Artificial Sequence
  Description of Artificial Sequence: Synthetic oligonucleotide
  Sense strand starting at position 217 of SEQ ID NO: 1241184
gucaaauacugcuugaaau

SEQ ID NO: 1252961 - RNA, 19 nt, Artificial Sequence
  Description of Artificial Sequence: Synthetic oligonucleotide
  Antisense strand to SEQ ID NO: 1252960
auuucaagcaguauuugac

SEQ ID NO: 1252962 - RNA, 19 nt, Artificial Sequence
  Description of Artificial Sequence: Synthetic oligonucleotide
  Sense strand starting at position 332 of SEQ ID NO: 1241184
ccugguugucacugcauuu

SEQ ID NO: 1252963 - RNA, 19 nt, Artificial Sequence
  Description of Artificial Sequence: Synthetic oligonucleotide
  Antisense strand to SEQ ID NO: 1252962
aaaugcagugacaaccagg

SEQ ID NO: 1252964 - RNA, 19 nt, Artificial Sequence
  Description of Artificial Sequence: Synthetic oligonucleotide
  Sense strand starting at position 339 of SEQ ID NO: 1241184
gucacugcauuugugacau

SEQ ID NO: 1252965 - RNA, 19 nt, Artificial Sequence
  Description of Artificial Sequence: Synthetic oligonucleotide
  Antisense strand to SEQ ID NO: 1252964
augucacaaaugcagugac

SEQ ID NO: 1252966 - RNA, 19 nt, Artificial Sequence
  Description of Artificial Sequence: Synthetic oligonucleotide
  Sense strand starting at position 398 of SEQ ID NO: 1241184
ucacuccaaucugcgaaua

SEQ ID NO: 1252967 - RNA, 19 nt, Artificial Sequence
  Description of Artificial Sequence: Synthetic oligonucleotide
  Antisense strand to SEQ ID NO: 1252966
uauucgcagauuggaguga

SEQ ID NO: 1252968 - RNA, 19 nt, Artificial Sequence
  Description of Artificial Sequence: Synthetic oligonucleotide
  Sense strand starting at position 403 of SEQ ID NO: 1241184
ccaaucugcgaauacaaau

SEQ ID NO: 1252969 - RNA, 19 nt, Artificial Sequence
  Description of Artificial Sequence: Synthetic oligonucleotide
  Antisense strand to SEQ ID NO: 1252968
auuuguauucgcagauugg

SEQ ID NO: 1252970 - RNA, 19 nt, Artificial Sequence
  Description of Artificial Sequence: Synthetic oligonucleotide
  Sense strand starting at position 456 of SEQ ID NO: 1241184
aggagauagugauucugua

SEQ ID NO: 1252971 - RNA, 19 nt, Artificial Sequence
  Description of Artificial Sequence: Synthetic oligonucleotide
  Antisense strand to SEQ ID NO: 1252970
uacagaaucacuaucuccu

SEQ ID NO: 1252972 - RNA, 19 nt, Artificial Sequence
  Description of Artificial Sequence: Synthetic oligonucleotide
  Sense strand starting at position 460 of SEQ ID NO: 1241184
gauagugauucuguaacag

SEQ ID NO: 1252973 - RNA, 19 nt, Artificial Sequence
  Description of Artificial Sequence: Synthetic oligonucleotide
  Antisense strand to SEQ ID NO: 1252972
cuguuacagaaucacuauc

SEQ ID NO: 1252974 - RNA, 19 nt, Artificial Sequence
  Description of Artificial Sequence: Synthetic oligonucleotide
  Sense strand starting at position 572 of SEQ ID NO: 1241184
augagaagcuuuccauucu

SEQ ID NO: 1252975 - RNA, 19 nt, Artificial Sequence
  Description of Artificial Sequence: Synthetic oligonucleotide
  Antisense strand to SEQ ID NO: 1252974
agaauggaaagcuucucau

SEQ ID NO: 1252976 - RNA, 19 nt, Artificial Sequence
  Description of Artificial Sequence: Synthetic oligonucleotide
  Sense strand starting at position 912 of SEQ ID NO: 1241184
ggcuuugaaccacagauuc

SEQ ID NO: 1252977 - RNA, 19 nt, Artificial Sequence
  Description of Artificial Sequence: Synthetic oligonucleotide
  Antisense strand to SEQ ID NO: 1252976
gaaucugugguucaaagcc

SEQ ID NO: 1252978 - RNA, 19 nt, Artificial Sequence
  Description of Artificial Sequence: Synthetic oligonucleotide
  Sense strand starting at position 996 of SEQ ID NO: 1241184
uuauucugauccuuuagga

SEQ ID NO: 1252979 - RNA, 19 nt, Artificial Sequence
  Description of Artificial Sequence: Synthetic oligonucleotide
  Antisense strand to SEQ ID NO: 1252978
uccuaaaggaucagaauaa

SEQ ID NO: 1252980 - RNA, 19 nt, Artificial Sequence
  Description of Artificial Sequence: Synthetic oligonucleotide
  Sense strand starting at position 1037 of SEQ ID NO: 1241184
cauagaaagugccuaagua

SEQ ID NO: 1252981 - RNA, 19 nt, Artificial Sequence
  Description of Artificial Sequence: Synthetic oligonucleotide
  Antisense strand to SEQ ID NO: 1252980
uacuuaggcacuuucuaug

SEQ ID NO: 1252982 - RNA, 19 nt, Artificial Sequence
  Description of Artificial Sequence: Synthetic oligonucleotide
  Sense strand starting at position 1038 of SEQ ID NO: 1241184
auagaaagugccuaaguau

SEQ ID NO: 1252983 - RNA, 19 nt, Artificial Sequence
  Description of Artificial Sequence: Synthetic oligonucleotide
  Antisense strand to SEQ ID NO: 1252982
auacuuaggcacuuucuau

SEQ ID NO: 1252984 - RNA, 19 nt, Artificial Sequence
  Description of Artificial Sequence: Synthetic oligonucleotide
  Sense strand starting at position 1053 of SEQ ID NO: 1241184
guaugcuaagcauaggauu

SEQ ID NO: 1252985 - RNA, 19 nt, Artificial Sequence
  Description of Artificial Sequence: Synthetic oligonucleotide
  Antisense strand to SEQ ID NO: 1252984
aauccuaugcuuagcauac

SEQ ID NO: 1252986 - RNA, 19 nt, Artificial Sequence
  Description of Artificial Sequence: Synthetic oligonucleotide
  Sense strand starting at position 1320 of SEQ ID NO: 1241184
gugugaaagacacacugua

SEQ ID NO: 1252987 - RNA, 19 nt, Artificial Sequence
  Description of Artificial Sequence: Synthetic oligonucleotide
  Antisense strand to SEQ ID NO: 1252986
uacagugugucuuucacac

SEQ ID NO: 1252988 - RNA, 19 nt, Artificial Sequence
  Description of Artificial Sequence: Synthetic oligonucleotide
  Sense strand starting at position 1364 of SEQ ID NO: 1241184
ggaaaugaaugucuccauu

SEQ ID NO: 1252989 - RNA, 19 nt, Artificial Sequence
  Description of Artificial Sequence: Synthetic oligonucleotide
  Antisense strand to SEQ ID NO: 1252988
aauggagacauucauuucc

SEQ ID NO: 1252990 - RNA, 19 nt, Artificial Sequence
  Description of Artificial Sequence: Synthetic oligonucleotide
  Sense strand starting at position 1400 of SEQ ID NO: 1241184
acuuauuggccuuggacaa

SEQ ID NO: 1252991 - RNA, 19 nt, Artificial Sequence
  Description of Artificial Sequence: Synthetic oligonucleotide
  Antisense strand to SEQ ID NO: 1252990
uuguccaaggccaauaagu

SEQ ID NO: 1252992 - RNA, 19 nt, Artificial Sequence
  Description of Artificial Sequence: Synthetic oligonucleotide
  Sense strand starting at position 1532 of SEQ ID NO: 1241184
ggcagaaauuuacauuauc

SEQ ID NO: 1252993 - RNA, 19 nt, Artificial Sequence
  Description of Artificial Sequence: Synthetic oligonucleotide
  Antisense strand to SEQ ID NO: 1252992
gauaauguaaauuucugcc

SEQ ID NO: 1252994 - RNA, 19 nt, Artificial Sequence
  Description of Artificial Sequence: Synthetic oligonucleotide
  Sense strand starting at position 1905 of SEQ ID NO: 1241184
ggucguauggcucuuugua

SEQ ID NO: 1252995 - RNA, 19 nt, Artificial Sequence
  Description of Artificial Sequence: Synthetic oligonucleotide
  Antisense strand to SEQ ID NO: 1252994
uacaaagagccauacgacc

SEQ ID NO: 1252996 - RNA, 19 nt, Artificial Sequence
  Description of Artificial Sequence: Synthetic oligonucleotide
  Sense strand starting at position 1906 of SEQ ID NO: 1241184
gucguauggcucuuuguau

SEQ ID NO: 1252997 - RNA, 19 nt, Artificial Sequence
  Description of Artificial Sequence: Synthetic oligonucleotide
  Antisense strand to SEQ ID NO: 1252996
auacaaagagccauacgac

SEQ ID NO: 1252998 - RNA, 19 nt, Artificial Sequence
  Description of Artificial Sequence: Synthetic oligonucleotide
  Sense strand starting at position 2231 of SEQ ID NO: 1241184
auaacaauccagugagcga

SEQ ID NO: 1252999 - RNA, 19 nt, Artificial Sequence
  Description of Artificial Sequence: Synthetic oligonucleotide
  Antisense strand to SEQ ID NO: 1252998
ucgcucacuggauuguuau

SEQ ID NO: 1253000 - RNA, 19 nt, Artificial Sequence
  Description of Artificial Sequence: Synthetic oligonucleotide
  Sense strand starting at position 2252 of SEQ ID NO: 1241184
uccggacacuuuguuaaau

SEQ ID NO: 1253001 - RNA, 19 nt, Artificial Sequence
  Description of Artificial Sequence: Synthetic oligonucleotide
  Antisense strand to SEQ ID NO: 1253000
auuuaacaaaguguccgga

SEQ ID NO: 1253002 - RNA, 19 nt, Artificial Sequence
  Description of Artificial Sequence: Synthetic oligonucleotide
  Sense strand starting at position 2253 of SEQ ID NO: 1241184
ccggacacuuuguuaaauu

SEQ ID NO: 1253003 - RNA, 19 nt, Artificial Sequence
  Description of Artificial Sequence: Synthetic oligonucleotide
  Antisense strand to SEQ ID NO: 1253002
aauuuaacaaaguguccgg

SEQ ID NO: 1253004 - RNA, 19 nt, Artificial Sequence
  Description of Artificial Sequence: Synthetic oligonucleotide
  Sense strand starting at position 2263 of SEQ ID NO: 1241184
uguuaaauugagugaacua

SEQ ID NO: 1253005 - RNA, 19 nt, Artificial Sequence
  Description of Artificial Sequence: Synthetic oligonucleotide
  Antisense strand to SEQ ID NO: 1253004
uaguucacucaauuuaaca

SEQ ID NO: 1253006 - RNA, 19 nt, Artificial Sequence
  Description of Artificial Sequence: Synthetic oligonucleotide
  Sense strand starting at position 2274 of SEQ ID NO: 1241184
gugaacuagucaguaacau

SEQ ID NO: 1253007 - RNA, 19 nt, Artificial Sequence
  Description of Artificial Sequence: Synthetic oligonucleotide
  Antisense strand to SEQ ID NO: 1253006
auguuacugacuaguucac

SEQ ID NO: 1253008 - RNA, 19 nt, Artificial Sequence
  Description of Artificial Sequence: Synthetic oligonucleotide
  Sense strand starting at position 2275 of SEQ ID NO: 1241184
ugaacuagucaguaacauu

SEQ ID NO: 1253009 - RNA, 19 nt, Artificial Sequence
  Description of Artificial Sequence: Synthetic oligonucleotide
  Antisense strand to SEQ ID NO: 1253008
aauguuacugacuaguuca

SEQ ID NO: 1253010 - RNA, 19 nt, Artificial Sequence
  Description of Artificial Sequence: Synthetic oligonucleotide
  Sense strand starting at position 2340 of SEQ ID NO: 1241184
cgguuuccaggugaaaugu

SEQ ID NO: 1253011 - RNA, 19 nt, Artificial Sequence
  Description of Artificial Sequence: Synthetic oligonucleotide
  Antisense strand to SEQ ID NO: 1253010
acauuucaccuggaaaccg

SEQ ID NO: 1253012 - RNA, 19 nt, Artificial Sequence
  Description of Artificial Sequence: Synthetic oligonucleotide
  Sense strand starting at position 2363 of SEQ ID NO: 1241184
gggucacguguguugcuua

SEQ ID NO: 1253013 - RNA, 19 nt, Artificial Sequence
  Description of Artificial Sequence: Synthetic oligonucleotide
  Antisense strand to SEQ ID NO: 1253012
uaagcaacacacgugaccc

SEQ ID NO: 1253014 - RNA, 19 nt, Artificial Sequence
  Description of Artificial Sequence: Synthetic oligonucleotide
  Sense strand starting at position 2413 of SEQ ID NO: 1241184
uggaacaucuuucugaagu

SEQ ID NO: 1253015 - RNA, 19 nt, Artificial Sequence
  Description of Artificial Sequence: Synthetic oligonucleotide
  Antisense strand to SEQ ID NO: 1253014
acuucagaaagauguucca

SEQ ID NO: 1253016 - RNA, 19 nt, Artificial Sequence
  Description of Artificial Sequence: Synthetic oligonucleotide
  Sense strand starting at position 3042 of SEQ ID NO: 1241184
agcucuugaccucaaguua

SEQ ID NO: 1253017 - RNA, 19 nt, Artificial Sequence
  Description of Artificial Sequence: Synthetic oligonucleotide
  Antisense strand to SEQ ID NO: 1253016
uaacuugaggucaagagcu

SEQ ID NO: 1253018 - RNA, 19 nt, Artificial Sequence
  Description of Artificial Sequence: Synthetic oligonucleotide
  Sense strand starting at position 3119 of SEQ ID NO: 1241184
gcacauauuuguucuuagu

SEQ ID NO: 1253019 - RNA, 19 nt, Artificial Sequence
  Description of Artificial Sequence: Synthetic oligonucleotide
  Antisense strand to SEQ ID NO: 1253018
acuaagaacaaauaugugc

SEQ ID NO: 1253020 - RNA, 19 nt, Artificial Sequence
  Description of Artificial Sequence: Synthetic oligonucleotide
  Sense strand starting at position 3373 of SEQ ID NO: 1241184
ccaguaaacuguuugaggu

SEQ ID NO: 1253021 - RNA, 19 nt, Artificial Sequence
  Description of Artificial Sequence: Synthetic oligonucleotide
  Antisense strand to SEQ ID NO: 1253020
accucaaacaguuuacugg

SEQ ID NO: 1253022 - RNA, 19 nt, Artificial Sequence
  Description of Artificial Sequence: Synthetic oligonucleotide
  Sense strand starting at position 3380 of SEQ ID NO: 1241184
acuguuugaggucagugau

SEQ ID NO: 1253023 - RNA, 19 nt, Artificial Sequence
  Description of Artificial Sequence: Synthetic oligonucleotide
  Antisense strand to SEQ ID NO: 1253022
aucacugaccucaaacagu

SEQ ID NO: 1253024 - RNA, 19 nt, Artificial Sequence
  Description of Artificial Sequence: Synthetic oligonucleotide
  Sense strand starting at position 3423 of SEQ ID NO: 1241184
ccaggaacuguuugauucu

SEQ ID NO: 1253025 - RNA, 19 nt, Artificial Sequence
  Description of Artificial Sequence: Synthetic oligonucleotide
  Antisense strand to SEQ ID NO: 1253024
agaaucaaacaguuccugg

SEQ ID NO: 1253026 - RNA, 19 nt, Artificial Sequence
  Description of Artificial Sequence: Synthetic oligonucleotide
  Sense strand starting at position 3426 of SEQ ID NO: 1241184
ggaacuguuugauucuuac

SEQ ID NO: 1253027 - RNA, 19 nt, Artificial Sequence
  Description of Artificial Sequence: Synthetic oligonucleotide
  Antisense strand to SEQ ID NO: 1253026
guaagaaucaaacaguucc

SEQ ID NO: 1253028 - RNA, 19 nt, Artificial Sequence
  Description of Artificial Sequence: Synthetic oligonucleotide
  Sense strand starting at position 3464 of SEQ ID NO: 1241184
guagauauuuaguaaacac

SEQ ID NO: 1253029 - RNA, 19 nt, Artificial Sequence
  Description of Artificial Sequence: Synthetic oligonucleotide
  Antisense strand to SEQ ID NO: 1253028
guguuuacuaaauaucuac

SEQ ID NO: 1253030 - RNA, 19 nt, Artificial Sequence
  Description of Artificial Sequence: Synthetic oligonucleotide
  Sense strand starting at position 3909 of SEQ ID NO: 1241184
aacacuuauugugcaggaa

SEQ ID NO: 1253031 - RNA, 19 nt, Artificial Sequence
  Description of Artificial Sequence: Synthetic oligonucleotide
  Antisense strand to SEQ ID NO: 1253030
uuccugcacaauaaguguu

SEQ ID NO: 1253032 - RNA, 19 nt, Artificial Sequence
  Description of Artificial Sequence: Synthetic oligonucleotide
  Sense strand starting at position 3913 of SEQ ID NO: 1241184
cuuauugugcaggaaguaa

SEQ ID NO: 1253033 - RNA, 19 nt, Artificial Sequence
  Description of Artificial Sequence: Synthetic oligonucleotide
  Antisense strand to SEQ ID NO: 1253032
uuacuuccugcacaauaag

SEQ ID NO: 1253034 - RNA, 19 nt, Artificial Sequence
  Description of Artificial Sequence: Synthetic oligonucleotide
  Sense strand starting at position 3924 of SEQ ID NO: 1241184
ggaaguaacuguucugaac

SEQ ID NO: 1253035 - RNA, 19 nt, Artificial Sequence
  Description of Artificial Sequence: Synthetic oligonucleotide
  Antisense strand to SEQ ID NO: 1253034
guucagaacaguuacuucc

SEQ ID NO: 1253036 - RNA, 19 nt, Artificial Sequence
  Description of Artificial Sequence: Synthetic oligonucleotide
  Sense strand starting at position 45 of SEQ ID NO: 1241185
gcaucaacuucucuggacu

SEQ ID NO: 1253037 - RNA, 19 nt, Artificial Sequence
  Description of Artificial Sequence: Synthetic oligonucleotide
  Antisense strand to SEQ ID NO: 1253036
aguccagagaaguugaugc

SEQ ID NO: 1253038 - RNA, 19 nt, Artificial Sequence
  Description of Artificial Sequence: Synthetic oligonucleotide
  Sense strand starting at position 68 of SEQ ID NO: 1241185
uuccuuucucaaugaggau

SEQ ID NO: 1253039 - RNA, 19 nt, Artificial Sequence
  Description of Artificial Sequence: Synthetic oligonucleotide
  Antisense strand to SEQ ID NO: 1253038
auccucauugagaaaggaa

SEQ ID NO: 1253040 - RNA, 19 nt, Artificial Sequence
  Description of Artificial Sequence: Synthetic oligonucleotide
  Sense strand starting at position 109 of SEQ ID NO: 1241185
agcuguagggucugugaaa

SEQ ID NO: 1253041 - RNA, 19 nt, Artificial Sequence
  Description of Artificial Sequence: Synthetic oligonucleotide
  Antisense strand to SEQ ID NO: 1253040
uuucacagacccuacagcu

SEQ ID NO: 1253042 - RNA, 19 nt, Artificial Sequence
  Description of Artificial Sequence: Synthetic oligonucleotide
  Sense strand starting at position 110 of SEQ ID NO: 1241185
gcuguagggucugugaaag

SEQ ID NO: 1253043 - RNA, 19 nt, Artificial Sequence
  Description of Artificial Sequence: Synthetic oligonucleotide
  Antisense strand to SEQ ID NO: 1253042
cuuucacagacccuacagc

SEQ ID NO: 1253044 - RNA, 19 nt, Artificial Sequence
  Description of Artificial Sequence: Synthetic oligonucleotide
  Sense strand starting at position 133 of SEQ ID NO: 1241185
guaaacaagccaugaagaa

SEQ ID NO: 1253045 - RNA, 19 nt, Artificial Sequence
  Description of Artificial Sequence: Synthetic oligonucleotide
  Antisense strand to SEQ ID NO: 1253044
uucuucauggcuuguuuac

SEQ ID NO: 1253046 - RNA, 19 nt, Artificial Sequence
  Description of Artificial Sequence: Synthetic oligonucleotide
  Sense strand starting at position 191 of SEQ ID NO: 1241185
ggagacaggugccuucuau

SEQ ID NO: 1253047 - RNA, 19 nt, Artificial Sequence
  Description of Artificial Sequence: Synthetic oligonucleotide
  Antisense strand to SEQ ID NO: 1253046
auagaaggcaccugucucc

SEQ ID NO: 1253048 - RNA, 19 nt, Artificial Sequence
  Description of Artificial Sequence: Synthetic oligonucleotide
  Sense strand starting at position 198 of SEQ ID NO: 1241185
ggugccuucuauuugcaga

SEQ ID NO: 1253049 - RNA, 19 nt, Artificial Sequence
  Description of Artificial Sequence: Synthetic oligonucleotide
  Antisense strand to SEQ ID NO: 1253048
ucugcaaauagaaggcacc

SEQ ID NO: 1253050 - RNA, 19 nt, Artificial Sequence
  Description of Artificial Sequence: Synthetic oligonucleotide
  Sense strand starting at position 366 of SEQ ID NO: 1241185
cuggaaagauuagaagauu

SEQ ID NO: 1253051 - RNA, 19 nt, Artificial Sequence
  Description of Artificial Sequence: Synthetic oligonucleotide
  Antisense strand to SEQ ID NO: 1253050
aaucuucuaaucuuuccag

SEQ ID NO: 1253052 - RNA, 19 nt, Artificial Sequence
  Description of Artificial Sequence: Synthetic oligonucleotide
  Sense strand starting at position 375 of SEQ ID NO: 1241185
uuagaagauuaaggaagaa

SEQ ID NO: 1253053 - RNA, 19 nt, Artificial Sequence
  Description of Artificial Sequence: Synthetic oligonucleotide
  Antisense strand to SEQ ID NO: 1253052
uucuuccuuaaucuucuaa

SEQ ID NO: 1253054 - RNA, 19 nt, Artificial Sequence
  Description of Artificial Sequence: Synthetic oligonucleotide
  Sense strand starting at position 462 of SEQ ID NO: 1241185
ugacauuguuccuuaaggu

SEQ ID NO: 1253055 - RNA, 19 nt, Artificial Sequence
  Description of Artificial Sequence: Synthetic oligonucleotide
  Antisense strand to SEQ ID NO: 1253054
accuuaaggaacaauguca

SEQ ID NO: 1253056 - RNA, 19 nt, Artificial Sequence
  Description of Artificial Sequence: Synthetic oligonucleotide
  Sense strand starting at position 463 of SEQ ID NO: 1241185
gacauuguuccuuaaggug

SEQ ID NO: 1253057 - RNA, 19 nt, Artificial Sequence
  Description of Artificial Sequence: Synthetic oligonucleotide
  Antisense strand to SEQ ID NO: 1253056
caccuuaaggaacaauguc

SEQ ID NO: 1253058 - RNA, 19 nt, Artificial Sequence
  Description of Artificial Sequence: Synthetic oligonucleotide
  Sense strand starting at position 564 of SEQ ID NO: 1241185
ggagaaguuauaugucuuu

SEQ ID NO: 1253059 - RNA, 19 nt, Artificial Sequence
  Description of Artificial Sequence: Synthetic oligonucleotide
  Antisense strand to SEQ ID NO: 1253058
aaagacauauaacuucucc

SEQ ID NO: 1253060 - RNA, 19 nt, Artificial Sequence
  Description of Artificial Sequence: Synthetic oligonucleotide
  Sense strand starting at position 943 of SEQ ID NO: 1241185
gaaacuagcuguccugaau

SEQ ID NO: 1253061 - RNA, 19 nt, Artificial Sequence
  Description of Artificial Sequence: Synthetic oligonucleotide
  Antisense strand to SEQ ID NO: 1253060
auucaggacagcuaguuuc

SEQ ID NO: 1253062 - RNA, 19 nt, Artificial Sequence
  Description of Artificial Sequence: Synthetic oligonucleotide
  Sense strand starting at position 946 of SEQ ID NO: 1241185
acuagcuguccugaaucuu

SEQ ID NO: 1253063 - RNA, 19 nt, Artificial Sequence
  Description of Artificial Sequence: Synthetic oligonucleotide
  Antisense strand to SEQ ID NO: 1253062
aagauucaggacagcuagu

SEQ ID NO: 1253064 - RNA, 19 nt, Artificial Sequence
  Description of Artificial Sequence: Synthetic oligonucleotide
  Sense strand starting at position 1105 of SEQ ID NO: 1241185
gagaaaccagaaugucagu

SEQ ID NO: 1253065 - RNA, 19 nt, Artificial Sequence
  Description of Artificial Sequence: Synthetic oligonucleotide
  Antisense strand to SEQ ID NO: 1253064
acugacauucugguuucuc

SEQ ID NO: 1253066 - RNA, 19 nt, Artificial Sequence
  Description of Artificial Sequence: Synthetic oligonucleotide
  Sense strand starting at position 1110 of SEQ ID NO: 1241185
accagaaugucaguaauaa

SEQ ID NO: 1253067 - RNA, 19 nt, Artificial Sequence
  Description of Artificial Sequence: Synthetic oligonucleotide
  Antisense strand to SEQ ID NO: 1253066
uuauuacugacauucuggu

SEQ ID NO: 1253068 - RNA, 19 nt, Artificial Sequence
  Description of Artificial Sequence: Synthetic oligonucleotide
  Sense strand starting at position 1202 of SEQ ID NO: 1241185
gaaguugauuuguaccacu

SEQ ID NO: 1253069 - RNA, 19 nt, Artificial Sequence
  Description of Artificial Sequence: Synthetic oligonucleotide
  Antisense strand to SEQ ID NO: 1253068
agugguacaaaucaacuuc

SEQ ID NO: 1253070 - RNA, 19 nt, Artificial Sequence
  Description of Artificial Sequence: Synthetic oligonucleotide
  Sense strand starting at position 1222 of SEQ ID NO: 1241185
agaacacucccgggaacuu

SEQ ID NO: 1253071 - RNA, 19 nt, Artificial Sequence
  Description of Artificial Sequence: Synthetic oligonucleotide
  Antisense strand to SEQ ID NO: 1253070
aaguucccgggaguguucu

SEQ ID NO: 1253072 - RNA, 19 nt, Artificial Sequence
  Description of Artificial Sequence: Synthetic oligonucleotide
  Sense strand starting at position 1292 of SEQ ID NO: 1241185
ucugaugugccaugucaaa

SEQ ID NO: 1253073 - RNA, 19 nt, Artificial Sequence
  Description of Artificial Sequence: Synthetic oligonucleotide
  Antisense strand to SEQ ID NO: 1253072
uuugacauggcacaucaga

SEQ ID NO: 1253074 - RNA, 19 nt, Artificial Sequence
  Description of Artificial Sequence: Synthetic oligonucleotide
  Sense strand starting at position 1312 of SEQ ID NO: 1241185
ccuuaaguauguuuacaau

SEQ ID NO: 1253075 - RNA, 19 nt, Artificial Sequence
  Description of Artificial Sequence: Synthetic oligonucleotide
  Antisense strand to SEQ ID NO: 1253074
auuguaaacauacuuaagg

SEQ ID NO: 1253076 - RNA, 19 nt, Artificial Sequence
  Description of Artificial Sequence: Synthetic oligonucleotide
  Sense strand starting at position 1785 of SEQ ID NO: 1241185
uaucaaugccucugaggua

SEQ ID NO: 1253077 - RNA, 19 nt, Artificial Sequence
  Description of Artificial Sequence: Synthetic oligonucleotide
  Antisense strand to SEQ ID NO: 1253076
uaccucagaggcauugaua

SEQ ID NO: 1253078 - RNA, 19 nt, Artificial Sequence
  Description of Artificial Sequence: Synthetic oligonucleotide
  Sense strand starting at position 1840 of SEQ ID NO: 1241185
gugguuauuaaagaauagu

SEQ ID NO: 1253079 - RNA, 19 nt, Artificial Sequence
  Description of Artificial Sequence: Synthetic oligonucleotide
  Antisense strand to SEQ ID NO: 1253078
acuauucuuuaauaaccac

SEQ ID NO: 1253080 - RNA, 19 nt, Artificial Sequence
  Description of Artificial Sequence: Synthetic oligonucleotide
  Sense strand starting at position 1952 of SEQ ID NO: 1241185
acagcuuccuugucauuau

SEQ ID NO: 1253081 - RNA, 19 nt, Artificial Sequence
  Description of Artificial Sequence: Synthetic oligonucleotide
  Antisense strand to SEQ ID NO: 1253080
auaaugacaaggaagcugu

SEQ ID NO: 1253082 - RNA, 19 nt, Artificial Sequence
  Description of Artificial Sequence: Synthetic oligonucleotide
  Sense strand starting at position 2066 of SEQ ID NO: 1241185
auagaugaaucacuuaugu

SEQ ID NO: 1253083 - RNA, 19 nt, Artificial Sequence
  Description of Artificial Sequence: Synthetic oligonucleotide
  Antisense strand to SEQ ID NO: 1253082
acauaagugauucaucuau

SEQ ID NO: 1253084 - RNA, 19 nt, Artificial Sequence
  Description of Artificial Sequence: Synthetic oligonucleotide
  Sense strand starting at position 2166 of SEQ ID NO: 1241185
cagggaguuugcucuuaaa

SEQ ID NO: 1253085 - RNA, 19 nt, Artificial Sequence
  Description of Artificial Sequence: Synthetic oligonucleotide
  Antisense strand to SEQ ID NO: 1253084
uuuaagagcaaacucccug

SEQ ID NO: 1253086 - RNA, 19 nt, Artificial Sequence
  Description of Artificial Sequence: Synthetic oligonucleotide
  Sense strand starting at position 2245 of SEQ ID NO: 1241185
gccagcuggguucaguauu

SEQ ID NO: 1253087 - RNA, 19 nt, Artificial Sequence
  Description of Artificial Sequence: Synthetic oligonucleotide
  Antisense strand to SEQ ID NO: 1253086
aauacugaacccagcuggc

SEQ ID NO: 1253088 - RNA, 19 nt, Artificial Sequence
  Description of Artificial Sequence: Synthetic oligonucleotide
  Sense strand starting at position 2306 of SEQ ID NO: 1241185
ugaguugucuaacuccuuu

SEQ ID NO: 1253089 - RNA, 19 nt, Artificial Sequence
  Description of Artificial Sequence: Synthetic oligonucleotide
  Antisense strand to SEQ ID NO: 1253088
aaaggaguuagacaacuca

SEQ ID NO: 1253090 - RNA, 19 nt, Artificial Sequence
  Description of Artificial Sequence: Synthetic oligonucleotide
  Sense strand starting at position 2787 of SEQ ID NO: 1241185
cacuguacugcagguuaaa

SEQ ID NO: 1253091 - RNA, 19 nt, Artificial Sequence
  Description of Artificial Sequence: Synthetic oligonucleotide
  Antisense strand to SEQ ID NO: 1253090
uuuaaccugcaguacagug

SEQ ID NO: 1253092 - RNA, 19 nt, Artificial Sequence
  Description of Artificial Sequence: Synthetic oligonucleotide
  Sense strand starting at position 3459 of SEQ ID NO: 1241185
uuaugagcugugugaacau

SEQ ID NO: 1253093 - RNA, 19 nt, Artificial Sequence
  Description of Artificial Sequence: Synthetic oligonucleotide
  Antisense strand to SEQ ID NO: 1253092
auguucacacagcucauaa

SEQ ID NO: 1253094 - RNA, 19 nt, Artificial Sequence
  Description of Artificial Sequence: Synthetic oligonucleotide
  Sense strand starting at position 3466 of SEQ ID NO: 1241185
cugugugaacauuaguaaa

SEQ ID NO: 1253095 - RNA, 19 nt, Artificial Sequence
  Description of Artificial Sequence: Synthetic oligonucleotide
  Antisense strand to SEQ ID NO: 1253094
uuuacuaauguucacacag

SEQ ID NO: 1253096 - RNA, 19 nt, Artificial Sequence
  Description of Artificial Sequence: Synthetic oligonucleotide
  Sense strand starting at position 3468 of SEQ ID NO: 1241185
gugugaacauuaguaaauu

SEQ ID NO: 1253097 - RNA, 19 nt, Artificial Sequence
  Description of Artificial Sequence: Synthetic oligonucleotide
  Antisense strand to SEQ ID NO: 1253096
aauuuacuaauguucacac

SEQ ID NO: 1253098 - RNA, 19 nt, Artificial Sequence
  Description of Artificial Sequence: Synthetic oligonucleotide
  Sense strand starting at position 3516 of SEQ ID NO: 1241185
aucacuaucuacuuugagu

SEQ ID NO: 1253099 - RNA, 19 nt, Artificial Sequence
  Description of Artificial Sequence: Synthetic oligonucleotide
  Antisense strand to SEQ ID NO: 1253098
acucaaaguagauagugau

SEQ ID NO: 1253100 - RNA, 19 nt, Artificial Sequence
  Description of Artificial Sequence: Synthetic oligonucleotide
  Sense strand starting at position 3521 of SEQ ID NO: 1241185
uaucuacuuugagugguuu

SEQ ID NO: 1253101 - RNA, 19 nt, Artificial Sequence
  Description of Artificial Sequence: Synthetic oligonucleotide
  Antisense strand to SEQ ID NO: 1253100
aaaccacucaaaguagaua

SEQ ID NO: 1253102 - RNA, 19 nt, Artificial Sequence
  Description of Artificial Sequence: Synthetic oligonucleotide
  Sense strand starting at position 3591 of SEQ ID NO: 1241185
uggucagugcuccacuagu

SEQ ID NO: 1253103 - RNA, 19 nt, Artificial Sequence
  Description of Artificial Sequence: Synthetic oligonucleotide
  Antisense strand to SEQ ID NO: 1253102
acuaguggagcacugacca

SEQ ID NO: 1253104 - RNA, 19 nt, Artificial Sequence
  Description of Artificial Sequence: Synthetic oligonucleotide
  Sense strand starting at position 3604 of SEQ ID NO: 1241185
acuaguaacggcuggauga

SEQ ID NO: 1253105 - RNA, 19 nt, Artificial Sequence
  Description of Artificial Sequence: Synthetic oligonucleotide
  Antisense strand to SEQ ID NO: 1253104
ucauccagccguuacuagu

SEQ ID NO: 1253106 - RNA, 19 nt, Artificial Sequence
  Description of Artificial Sequence: Synthetic oligonucleotide
  Sense strand starting at position 3605 of SEQ ID NO: 1241185
cuaguaacggcuggaugau

SEQ ID NO: 1253107 - RNA, 19 nt, Artificial Sequence
  Description of Artificial Sequence: Synthetic oligonucleotide
  Antisense strand to SEQ ID NO: 1253106
aucauccagccguuacuag

SEQ ID NO: 1253108 - RNA, 19 nt, Artificial Sequence
  Description of Artificial Sequence: Synthetic oligonucleotide
  Sense strand starting at position 3606 of SEQ ID NO: 1241185
uaguaacggcuggaugaua

SEQ ID NO: 1253109 - RNA, 19 nt, Artificial Sequence
  Description of Artificial Sequence: Synthetic oligonucleotide
  Antisense strand to SEQ ID NO: 1253108
uaucauccagccguuacua

SEQ ID NO: 1253110 - RNA, 19 nt, Artificial Sequence
  Description of Artificial Sequence: Synthetic oligonucleotide
  Sense strand starting at position 3628 of SEQ ID NO: 1241185
ugguuauuccuguaacauu

SEQ ID NO: 1253111 - RNA, 19 nt, Artificial Sequence
  Description of Artificial Sequence: Synthetic oligonucleotide
  Antisense strand to SEQ ID NO: 1253110
aauguuacaggaauaacca

SEQ ID NO: 1253112 - RNA, 19 nt, Artificial Sequence
  Description of Artificial Sequence: Synthetic oligonucleotide
  Sense strand starting at position 3839 of SEQ ID NO: 1241185
augcaauggcuugaaauag

SEQ ID NO: 1253113 - RNA, 19 nt, Artificial Sequence
  Description of Artificial Sequence: Synthetic oligonucleotide
  Antisense strand to SEQ ID NO: 1253112
cuauuucaagccauugcau

SEQ ID NO: 1253114 - RNA, 19 nt, Artificial Sequence
  Description of Artificial Sequence: Synthetic oligonucleotide
  Sense strand starting at position 3913 of SEQ ID NO: 1241185
uccucaagucuaugaggau

SEQ ID NO: 1253115 - RNA, 19 nt, Artificial Sequence
  Description of Artificial Sequence: Synthetic oligonucleotide
  Antisense strand to SEQ ID NO: 1253114
auccucauagacuugagga

SEQ ID NO: 1253116 - RNA, 19 nt, Artificial Sequence
  Description of Artificial Sequence: Synthetic oligonucleotide
  Sense strand starting at position 35 of SEQ ID NO: 1241186
ugaaguuuauacucuuaag

SEQ ID NO: 1253117 - RNA, 19 nt, Artificial Sequence
  Description of Artificial Sequence: Synthetic oligonucleotide
  Antisense strand to SEQ ID NO: 1253116
cuuaagaguauaaacuuca

SEQ ID NO: 1253118 - RNA, 19 nt, Artificial Sequence
  Description of Artificial Sequence: Synthetic oligonucleotide
  Sense strand starting at position 69 of SEQ ID NO: 1241186
uaggaaugguguuccaaua

SEQ ID NO: 1253119 - RNA, 19 nt, Artificial Sequence
  Description of Artificial Sequence: Synthetic oligonucleotide
  Antisense strand to SEQ ID NO: 1253118
uauuggaacaccauuccua

SEQ ID NO: 1253120 - RNA, 19 nt, Artificial Sequence
  Description of Artificial Sequence: Synthetic oligonucleotide
  Sense strand starting at position 159 of SEQ ID NO: 1241186
auuggcuuucuuuaaauga

SEQ ID NO: 1253121 - RNA, 19 nt, Artificial Sequence
  Description of Artificial Sequence: Synthetic oligonucleotide
  Antisense strand to SEQ ID NO: 1253120
ucauuuaaagaaagccaau

SEQ ID NO: 1253122 - RNA, 19 nt, Artificial Sequence
  Description of Artificial Sequence: Synthetic oligonucleotide
  Sense strand starting at position 163 of SEQ ID NO: 1241186
gcuuucuuuaaaugacgga

SEQ ID NO: 1253123 - RNA, 19 nt, Artificial Sequence
  Description of Artificial Sequence: Synthetic oligonucleotide
  Antisense strand to SEQ ID NO: 1253122
uccgucauuuaaagaaagc

SEQ ID NO: 1253124 - RNA, 19 nt, Artificial Sequence
  Description of Artificial Sequence: Synthetic oligonucleotide
  Sense strand starting at position 167 of SEQ ID NO: 1241186
ucuuuaaaugacggagaca

SEQ ID NO: 1253125 - RNA, 19 nt, Artificial Sequence
  Description of Artificial Sequence: Synthetic oligonucleotide
  Antisense strand to SEQ ID NO: 1253124
ugucuccgucauuuaaaga

SEQ ID NO: 1253126 - RNA, 19 nt, Artificial Sequence
  Description of Artificial Sequence: Synthetic oligonucleotide
  Sense strand starting at position 253 of SEQ ID NO: 1241186
gagaaacugucaccuuaug

SEQ ID NO: 1253127 - RNA, 19 nt, Artificial Sequence
  Description of Artificial Sequence: Synthetic oligonucleotide
  Antisense strand to SEQ ID NO: 1253126
cauaaggugacaguuucuc

SEQ ID NO: 1253128 - RNA, 19 nt, Artificial Sequence
  Description of Artificial Sequence: Synthetic oligonucleotide
  Sense strand starting at position 800 of SEQ ID NO: 1241186
cagaaacuuugcgucucua

SEQ ID NO: 1253129 - RNA, 19 nt, Artificial Sequence
  Description of Artificial Sequence: Synthetic oligonucleotide
  Antisense strand to SEQ ID NO: 1253128
uagagacgcaaaguuucug

SEQ ID NO: 1253130 - RNA, 19 nt, Artificial Sequence
  Description of Artificial Sequence: Synthetic oligonucleotide
  Sense strand starting at position 2417 of SEQ ID NO: 1241186
gcaggagguccugagagua

SEQ ID NO: 1253131 - RNA, 19 nt, Artificial Sequence
  Description of Artificial Sequence: Synthetic oligonucleotide
  Antisense strand to SEQ ID NO: 1253130
uacucucaggaccuccugc

SEQ ID NO: 1253132 - RNA, 19 nt, Artificial Sequence
  Description of Artificial Sequence: Synthetic oligonucleotide
  Sense strand starting at position 2514 of SEQ ID NO: 1241186
aguuguccuccuggaagaa

SEQ ID NO: 1253133 - RNA, 19 nt, Artificial Sequence
  Description of Artificial Sequence: Synthetic oligonucleotide
  Antisense strand to SEQ ID NO: 1253132
uucuuccaggaggacaacu

SEQ ID NO: 1253134 - RNA, 19 nt, Artificial Sequence
  Description of Artificial Sequence: Synthetic oligonucleotide
  Sense strand starting at position 2515 of SEQ ID NO: 1241186
guuguccuccuggaagaaa

SEQ ID NO: 1253135 - RNA, 19 nt, Artificial Sequence
  Description of Artificial Sequence: Synthetic oligonucleotide
  Antisense strand to SEQ ID NO: 1253134
uuucuuccaggaggacaac

SEQ ID NO: 1253136 - RNA, 19 nt, Artificial Sequence
  Description of Artificial Sequence: Synthetic oligonucleotide
  Sense strand starting at position 2526 of SEQ ID NO: 1241186
ggaagaaauugguccucuu

SEQ ID NO: 1253137 - RNA, 19 nt, Artificial Sequence
  Description of Artificial Sequence: Synthetic oligonucleotide
  Antisense strand to SEQ ID NO: 1253136
aagaggaccaauuucuucc

SEQ ID NO: 1253138 - RNA, 19 nt, Artificial Sequence
  Description of Artificial Sequence: Synthetic oligonucleotide
  Sense strand starting at position 2585 of SEQ ID NO: 1241186
aguugcuaaaucuguguca

SEQ ID NO: 1253139 - RNA, 19 nt, Artificial Sequence
  Description of Artificial Sequence: Synthetic oligonucleotide
  Antisense strand to SEQ ID NO: 1253138
ugacacagauuuagcaacu

SEQ ID NO: 1253140 - RNA, 19 nt, Artificial Sequence
  Description of Artificial Sequence: Synthetic oligonucleotide
  Sense strand starting at position 2586 of SEQ ID NO: 1241186
guugcuaaaucugugucau

SEQ ID NO: 1253141 - RNA, 19 nt, Artificial Sequence
  Description of Artificial Sequence: Synthetic oligonucleotide
  Antisense strand to SEQ ID NO: 1253140
augacacagauuuagcaac

SEQ ID NO: 1253142 - RNA, 19 nt, Artificial Sequence
  Description of Artificial Sequence: Synthetic oligonucleotide
  Sense strand starting at position 2587 of SEQ ID NO: 1241186
uugcuaaaucugugucaug

SEQ ID NO: 1253143 - RNA, 19 nt, Artificial Sequence
  Description of Artificial Sequence: Synthetic oligonucleotide
  Antisense strand to SEQ ID NO: 1253142
caugacacagauuuagcaa

SEQ ID NO: 1253144 - RNA, 19 nt, Artificial Sequence
  Description of Artificial Sequence: Synthetic oligonucleotide
  Sense strand starting at position 2594 of SEQ ID NO: 1241186
aucugugucaugcugcgau

SEQ ID NO: 1253145 - RNA, 19 nt, Artificial Sequence
  Description of Artificial Sequence: Synthetic oligonucleotide
  Antisense strand to SEQ ID NO: 1253144
aucgcagcaugacacagau

SEQ ID NO: 1253146 - RNA, 19 nt, Artificial Sequence
  Description of Artificial Sequence: Synthetic oligonucleotide
  Sense strand starting at position 2607 of SEQ ID NO: 1241186
ugcgauguuuaaucagucu

SEQ ID NO: 1253147 - RNA, 19 nt, Artificial Sequence
  Description of Artificial Sequence: Synthetic oligonucleotide
  Antisense strand to SEQ ID NO: 1253146
agacugauuaaacaucgca

SEQ ID NO: 1253148 - RNA, 19 nt, Artificial Sequence
  Description of Artificial Sequence: Synthetic oligonucleotide
  Sense strand starting at position 2635 of SEQ ID NO: 1241186
uuacguuuccacugaauau

SEQ ID NO: 1253149 - RNA, 19 nt, Artificial Sequence
  Description of Artificial Sequence: Synthetic oligonucleotide
  Antisense strand to SEQ ID NO: 1253148
auauucaguggaaacguaa

SEQ ID NO: 1253150 - RNA, 19 nt, Artificial Sequence
  Description of Artificial Sequence: Synthetic oligonucleotide
  Sense strand starting at position 2782 of SEQ ID NO: 1241186
uccugauccugagaagggu

SEQ ID NO: 1253151 - RNA, 19 nt, Artificial Sequence
  Description of Artificial Sequence: Synthetic oligonucleotide
  Antisense strand to SEQ ID NO: 1253150
acccuucucaggaucagga

SEQ ID NO: 1253152 - RNA, 19 nt, Artificial Sequence
  Description of Artificial Sequence: Synthetic oligonucleotide
  Sense strand starting at position 2791 of SEQ ID NO: 1241186
ugagaagggucagagucuu

SEQ ID NO: 1253153 - RNA, 19 nt, Artificial Sequence
  Description of Artificial Sequence: Synthetic oligonucleotide
  Antisense strand to SEQ ID NO: 1253152
aagacucugacccuucuca

SEQ ID NO: 1253154 - RNA, 19 nt, Artificial Sequence
  Description of Artificial Sequence: Synthetic oligonucleotide
  Sense strand starting at position 2893 of SEQ ID NO: 1241186
cucuuauggagcuagauug

SEQ ID NO: 1253155 - RNA, 19 nt, Artificial Sequence
  Description of Artificial Sequence: Synthetic oligonucleotide
  Antisense strand to SEQ ID NO: 1253154
caaucuagcuccauaagag

SEQ ID NO: 1253156 - RNA, 19 nt, Artificial Sequence
  Description of Artificial Sequence: Synthetic oligonucleotide
  Sense strand starting at position 3189 of SEQ ID NO: 1241186
acaguuggagguuaucauu

SEQ ID NO: 1253157 - RNA, 19 nt, Artificial Sequence
  Description of Artificial Sequence: Synthetic oligonucleotide
  Antisense strand to SEQ ID NO: 1253156
aaugauaaccuccaacugu

SEQ ID NO: 1253158 - RNA, 19 nt, Artificial Sequence
  Description of Artificial Sequence: Synthetic oligonucleotide
  Sense strand starting at position 3197 of SEQ ID NO: 1241186
agguuaucauuugcuuacu
